United States Patent Application Publication US 2018/0305689 A1 - sequence listing, part 38

SEQ ID NO: 542816 - RNA, 19 nt, Artificial Sequence
  Description of Artificial Sequence: Synthetic oligonucleotide
  Antisense strand to SEQ ID NO: 542815
uccauuagccgaaugacag

SEQ ID NO: 542817 - RNA, 19 nt, Artificial Sequence
  Description of Artificial Sequence: Synthetic oligonucleotide
  Sense strand starting at position 2111 of SEQ ID NO: 318179
cacggucuucgggaucuuu

SEQ ID NO: 542818 - RNA, 19 nt, Artificial Sequence
  Description of Artificial Sequence: Synthetic oligonucleotide
  Antisense strand to SEQ ID NO: 542817
aaagaucccgaagaccgug

SEQ ID NO: 542819 - RNA, 19 nt, Artificial Sequence
  Description of Artificial Sequence: Synthetic oligonucleotide
  Sense strand starting at position 2121 of SEQ ID NO: 318179
gggaucuuuccaggagguu

SEQ ID NO: 542820 - RNA, 19 nt, Artificial Sequence
  Description of Artificial Sequence: Synthetic oligonucleotide
  Antisense strand to SEQ ID NO: 542819
aaccuccuggaaagauccc

SEQ ID NO: 542821 - RNA, 19 nt, Artificial Sequence
  Description of Artificial Sequence: Synthetic oligonucleotide
  Sense strand starting at position 2122 of SEQ ID NO: 318179
ggaucuuuccaggagguuu

SEQ ID NO: 542822 - RNA, 19 nt, Artificial Sequence
  Description of Artificial Sequence: Synthetic oligonucleotide
  Antisense strand to SEQ ID NO: 542821
aaaccuccuggaaagaucc

SEQ ID NO: 542823 - RNA, 19 nt, Artificial Sequence
  Description of Artificial Sequence: Synthetic oligonucleotide
  Sense strand starting at position 2139 of SEQ ID NO: 318179
uuucgaauagauuaagcca

SEQ ID NO: 542824 - RNA, 19 nt, Artificial Sequence
  Description of Artificial Sequence: Synthetic oligonucleotide
  Antisense strand to SEQ ID NO: 542823
uggcuuaaucuauucgaaa

SEQ ID NO: 542825 - RNA, 19 nt, Artificial Sequence
  Description of Artificial Sequence: Synthetic oligonucleotide
  Sense strand starting at position 2329 of SEQ ID NO: 318179
aggauuucuuuggaacacu

SEQ ID NO: 542826 - RNA, 19 nt, Artificial Sequence
  Description of Artificial Sequence: Synthetic oligonucleotide
  Antisense strand to SEQ ID NO: 542825
aguguuccaaagaaauccu

SEQ ID NO: 542827 - RNA, 19 nt, Artificial Sequence
  Description of Artificial Sequence: Synthetic oligonucleotide
  Sense strand starting at position 2365 of SEQ ID NO: 318179
guggcuagaguccauauga

SEQ ID NO: 542828 - RNA, 19 nt, Artificial Sequence
  Description of Artificial Sequence: Synthetic oligonucleotide
  Antisense strand to SEQ ID NO: 542827
ucauauggacucuagccac

SEQ ID NO: 542829 - RNA, 19 nt, Artificial Sequence
  Description of Artificial Sequence: Synthetic oligonucleotide
  Sense strand starting at position 2522 of SEQ ID NO: 318179
gcaccauugccaggugaac

SEQ ID NO: 542830 - RNA, 19 nt, Artificial Sequence
  Description of Artificial Sequence: Synthetic oligonucleotide
  Antisense strand to SEQ ID NO: 542829
guucaccuggcaauggugc

SEQ ID NO: 542831 - RNA, 19 nt, Artificial Sequence
  Description of Artificial Sequence: Synthetic oligonucleotide
  Sense strand starting at position 2588 of SEQ ID NO: 318179
ugucuauuuccucagcucu

SEQ ID NO: 542832 - RNA, 19 nt, Artificial Sequence
  Description of Artificial Sequence: Synthetic oligonucleotide
  Antisense strand to SEQ ID NO: 542831
agagcugaggaaauagaca

SEQ ID NO: 542833 - RNA, 19 nt, Artificial Sequence
  Description of Artificial Sequence: Synthetic oligonucleotide
  Sense strand starting at position 2681 of SEQ ID NO: 318179
guuugauuccagcaagaga

SEQ ID NO: 542834 - RNA, 19 nt, Artificial Sequence
  Description of Artificial Sequence: Synthetic oligonucleotide
  Antisense strand to SEQ ID NO: 542833
ucucuugcuggaaucaaac

SEQ ID NO: 542835 - RNA, 19 nt, Artificial Sequence
  Description of Artificial Sequence: Synthetic oligonucleotide
  Sense strand starting at position 2778 of SEQ ID NO: 318179
auaggcucugguugggaaa

SEQ ID NO: 542836 - RNA, 19 nt, Artificial Sequence
  Description of Artificial Sequence: Synthetic oligonucleotide
  Antisense strand to SEQ ID NO: 542835
uuucccaaccagagccuau

SEQ ID NO: 542837 - RNA, 19 nt, Artificial Sequence
  Description of Artificial Sequence: Synthetic oligonucleotide
  Sense strand starting at position 2877 of SEQ ID NO: 318179
auaggaauguggcugaaga

SEQ ID NO: 542838 - RNA, 19 nt, Artificial Sequence
  Description of Artificial Sequence: Synthetic oligonucleotide
  Antisense strand to SEQ ID NO: 542837
ucuucagccacauuccuau

SEQ ID NO: 542839 - RNA, 19 nt, Artificial Sequence
  Description of Artificial Sequence: Synthetic oligonucleotide
  Sense strand starting at position 2925 of SEQ ID NO: 318179
cugucacagcguguucaua

SEQ ID NO: 542840 - RNA, 19 nt, Artificial Sequence
  Description of Artificial Sequence: Synthetic oligonucleotide
  Antisense strand to SEQ ID NO: 542839
uaugaacacgcugugacag

SEQ ID NO: 542841 - RNA, 19 nt, Artificial Sequence
  Description of Artificial Sequence: Synthetic oligonucleotide
  Sense strand starting at position 2971 of SEQ ID NO: 318179
aggcagauuggguggguaa

SEQ ID NO: 542842 - RNA, 19 nt, Artificial Sequence
  Description of Artificial Sequence: Synthetic oligonucleotide
  Antisense strand to SEQ ID NO: 542841
uuacccacccaaucugccu

SEQ ID NO: 542843 - RNA, 19 nt, Artificial Sequence
  Description of Artificial Sequence: Synthetic oligonucleotide
  Sense strand starting at position 2972 of SEQ ID NO: 318179
ggcagauuggguggguaau

SEQ ID NO: 542844 - RNA, 19 nt, Artificial Sequence
  Description of Artificial Sequence: Synthetic oligonucleotide
  Antisense strand to SEQ ID NO: 542843
auuacccacccaaucugcc

SEQ ID NO: 542845 - RNA, 19 nt, Artificial Sequence
  Description of Artificial Sequence: Synthetic oligonucleotide
  Sense strand starting at position 2973 of SEQ ID NO: 318179
gcagauuggguggguaauu

SEQ ID NO: 542846 - RNA, 19 nt, Artificial Sequence
  Description of Artificial Sequence: Synthetic oligonucleotide
  Antisense strand to SEQ ID NO: 542845
aauuacccacccaaucugc

SEQ ID NO: 542847 - RNA, 19 nt, Artificial Sequence
  Description of Artificial Sequence: Synthetic oligonucleotide
  Sense strand starting at position 3014 of SEQ ID NO: 318179
gagaaauugcauuggcauc

SEQ ID NO: 542848 - RNA, 19 nt, Artificial Sequence
  Description of Artificial Sequence: Synthetic oligonucleotide
  Antisense strand to SEQ ID NO: 542847
gaugccaaugcaauuucuc

SEQ ID NO: 542849 - RNA, 19 nt, Artificial Sequence
  Description of Artificial Sequence: Synthetic oligonucleotide
  Sense strand starting at position 3209 of SEQ ID NO: 318179
gggagcuaugcagaccuuu

SEQ ID NO: 542850 - RNA, 19 nt, Artificial Sequence
  Description of Artificial Sequence: Synthetic oligonucleotide
  Antisense strand to SEQ ID NO: 542849
aaaggucugcauagcuccc

SEQ ID NO: 542851 - RNA, 19 nt, Artificial Sequence
  Description of Artificial Sequence: Synthetic oligonucleotide
  Sense strand starting at position 3238 of SEQ ID NO: 318179
ggaccaauaaucuggugau

SEQ ID NO: 542852 - RNA, 19 nt, Artificial Sequence
  Description of Artificial Sequence: Synthetic oligonucleotide
  Antisense strand to SEQ ID NO: 542851
aucaccagauuauuggucc

SEQ ID NO: 542853 - RNA, 19 nt, Artificial Sequence
  Description of Artificial Sequence: Synthetic oligonucleotide
  Sense strand starting at position 3266 of SEQ ID NO: 318179
cagauuaguccagguagaa

SEQ ID NO: 542854 - RNA, 19 nt, Artificial Sequence
  Description of Artificial Sequence: Synthetic oligonucleotide
  Antisense strand to SEQ ID NO: 542853
uucuaccuggacuaaucug

SEQ ID NO: 542855 - RNA, 19 nt, Artificial Sequence
  Description of Artificial Sequence: Synthetic oligonucleotide
  Sense strand starting at position 3315 of SEQ ID NO: 318179
uaaauaaggcugugaggua

SEQ ID NO: 542856 - RNA, 19 nt, Artificial Sequence
  Description of Artificial Sequence: Synthetic oligonucleotide
  Antisense strand to SEQ ID NO: 542855
uaccucacagccuuauuua

SEQ ID NO: 542857 - RNA, 19 nt, Artificial Sequence
  Description of Artificial Sequence: Synthetic oligonucleotide
  Sense strand starting at position 3354 of SEQ ID NO: 318179
uugaacaaguggucaacuu

SEQ ID NO: 542858 - RNA, 19 nt, Artificial Sequence
  Description of Artificial Sequence: Synthetic oligonucleotide
  Antisense strand to SEQ ID NO: 542857
aaguugaccacuuguucaa

SEQ ID NO: 542859 - RNA, 19 nt, Artificial Sequence
  Description of Artificial Sequence: Synthetic oligonucleotide
  Sense strand starting at position 3355 of SEQ ID NO: 318179
ugaacaaguggucaacuuu

SEQ ID NO: 542860 - RNA, 19 nt, Artificial Sequence
  Description of Artificial Sequence: Synthetic oligonucleotide
  Antisense strand to SEQ ID NO: 542859
aaaguugaccacuuguuca

SEQ ID NO: 542861 - RNA, 19 nt, Artificial Sequence
  Description of Artificial Sequence: Synthetic oligonucleotide
  Sense strand starting at position 3668 of SEQ ID NO: 318179
cucugaguuugaccucaua

SEQ ID NO: 542862 - RNA, 19 nt, Artificial Sequence
  Description of Artificial Sequence: Synthetic oligonucleotide
  Antisense strand to SEQ ID NO: 542861
uaugaggucaaacucagag

SEQ ID NO: 542863 - RNA, 19 nt, Artificial Sequence
  Description of Artificial Sequence: Synthetic oligonucleotide
  Sense strand starting at position 3671 of SEQ ID NO: 318179
ugaguuugaccucauaacu

SEQ ID NO: 542864 - RNA, 19 nt, Artificial Sequence
  Description of Artificial Sequence: Synthetic oligonucleotide
  Antisense strand to SEQ ID NO: 542863
aguuaugaggucaaacuca

SEQ ID NO: 542865 - RNA, 19 nt, Artificial Sequence
  Description of Artificial Sequence: Synthetic oligonucleotide
  Sense strand starting at position 3786 of SEQ ID NO: 318179
gcuuucugccucuaagacu

SEQ ID NO: 542866 - RNA, 19 nt, Artificial Sequence
  Description of Artificial Sequence: Synthetic oligonucleotide
  Antisense strand to SEQ ID NO: 542865
agucuuagaggcagaaagc

SEQ ID NO: 542867 - RNA, 19 nt, Artificial Sequence
  Description of Artificial Sequence: Synthetic oligonucleotide
  Sense strand starting at position 26 of SEQ ID NO: 318180
auuugaacuacgugaugcu

SEQ ID NO: 542868 - RNA, 19 nt, Artificial Sequence
  Description of Artificial Sequence: Synthetic oligonucleotide
  Antisense strand to SEQ ID NO: 542867
agcaucacguaguucaaau

SEQ ID NO: 542869 - RNA, 19 nt, Artificial Sequence
  Description of Artificial Sequence: Synthetic oligonucleotide
  Sense strand starting at position 63 of SEQ ID NO: 318180
cguugcacuccucaguaaa

SEQ ID NO: 542870 - RNA, 19 nt, Artificial Sequence
  Description of Artificial Sequence: Synthetic oligonucleotide
  Antisense strand to SEQ ID NO: 542869
uuuacugaggagugcaacg

SEQ ID NO: 542871 - RNA, 19 nt, Artificial Sequence
  Description of Artificial Sequence: Synthetic oligonucleotide
  Sense strand starting at position 173 of SEQ ID NO: 318180
gaucaaggguaguuaaauc

SEQ ID NO: 542872 - RNA, 19 nt, Artificial Sequence
  Description of Artificial Sequence: Synthetic oligonucleotide
  Antisense strand to SEQ ID NO: 542871
gauuuaacuacccuugauc

SEQ ID NO: 542873 - RNA, 19 nt, Artificial Sequence
  Description of Artificial Sequence: Synthetic oligonucleotide
  Sense strand starting at position 181 of SEQ ID NO: 318180
guaguuaaauccuuccaag

SEQ ID NO: 542874 - RNA, 19 nt, Artificial Sequence
  Description of Artificial Sequence: Synthetic oligonucleotide
  Antisense strand to SEQ ID NO: 542873
cuuggaaggauuuaacuac

SEQ ID NO: 542875 - RNA, 19 nt, Artificial Sequence
  Description of Artificial Sequence: Synthetic oligonucleotide
  Sense strand starting at position 257 of SEQ ID NO: 318180
aagcgaaacuucucugggu

SEQ ID NO: 542876 - RNA, 19 nt, Artificial Sequence
  Description of Artificial Sequence: Synthetic oligonucleotide
  Antisense strand to SEQ ID NO: 542875
acccagagaaguuucgcuu

SEQ ID NO: 542877 - RNA, 19 nt, Artificial Sequence
  Description of Artificial Sequence: Synthetic oligonucleotide
  Sense strand starting at position 258 of SEQ ID NO: 318180
agcgaaacuucucugggua

SEQ ID NO: 542878 - RNA, 19 nt, Artificial Sequence
  Description of Artificial Sequence: Synthetic oligonucleotide
  Antisense strand to SEQ ID NO: 542877
uacccagagaaguuucgcu

SEQ ID NO: 542879 - RNA, 19 nt, Artificial Sequence
  Description of Artificial Sequence: Synthetic oligonucleotide
  Sense strand starting at position 259 of SEQ ID NO: 318180
gcgaaacuucucuggguaa

SEQ ID NO: 542880 - RNA, 19 nt, Artificial Sequence
  Description of Artificial Sequence: Synthetic oligonucleotide
  Antisense strand to SEQ ID NO: 542879
uuacccagagaaguuucgc

SEQ ID NO: 542881 - RNA, 19 nt, Artificial Sequence
  Description of Artificial Sequence: Synthetic oligonucleotide
  Sense strand starting at position 261 of SEQ ID NO: 318180
gaaacuucucuggguaaag

SEQ ID NO: 542882 - RNA, 19 nt, Artificial Sequence
  Description of Artificial Sequence: Synthetic oligonucleotide
  Antisense strand to SEQ ID NO: 542881
cuuuacccagagaaguuuc

SEQ ID NO: 542883 - RNA, 19 nt, Artificial Sequence
  Description of Artificial Sequence: Synthetic oligonucleotide
  Sense strand starting at position 262 of SEQ ID NO: 318180
aaacuucucuggguaaagu

SEQ ID NO: 542884 - RNA, 19 nt, Artificial Sequence
  Description of Artificial Sequence: Synthetic oligonucleotide
  Antisense strand to SEQ ID NO: 542883
acuuuacccagagaaguuu

SEQ ID NO: 542885 - RNA, 19 nt, Artificial Sequence
  Description of Artificial Sequence: Synthetic oligonucleotide
  Sense strand starting at position 263 of SEQ ID NO: 318180
aacuucucuggguaaagua

SEQ ID NO: 542886 - RNA, 19 nt, Artificial Sequence
  Description of Artificial Sequence: Synthetic oligonucleotide
  Antisense strand to SEQ ID NO: 542885
uacuuuacccagagaaguu

SEQ ID NO: 542887 - RNA, 19 nt, Artificial Sequence
  Description of Artificial Sequence: Synthetic oligonucleotide
  Sense strand starting at position 303 of SEQ ID NO: 318180
uacuguuaagugcaaagga

SEQ ID NO: 542888 - RNA, 19 nt, Artificial Sequence
  Description of Artificial Sequence: Synthetic oligonucleotide
  Antisense strand to SEQ ID NO: 542887
uccuuugcacuuaacagua

SEQ ID NO: 542889 - RNA, 19 nt, Artificial Sequence
  Description of Artificial Sequence: Synthetic oligonucleotide
  Sense strand starting at position 460 of SEQ ID NO: 318180
aggcaucauccagagcguu

SEQ ID NO: 542890 - RNA, 19 nt, Artificial Sequence
  Description of Artificial Sequence: Synthetic oligonucleotide
  Antisense strand to SEQ ID NO: 542889
aacgcucuggaugaugccu

SEQ ID NO: 542891 - RNA, 19 nt, Artificial Sequence
  Description of Artificial Sequence: Synthetic oligonucleotide
  Sense strand starting at position 547 of SEQ ID NO: 318180
guagaugacugagccauua

SEQ ID NO: 542892 - RNA, 19 nt, Artificial Sequence
  Description of Artificial Sequence: Synthetic oligonucleotide
  Antisense strand to SEQ ID NO: 542891
uaauggcucagucaucuac

SEQ ID NO: 542893 - RNA, 19 nt, Artificial Sequence
  Description of Artificial Sequence: Synthetic oligonucleotide
  Sense strand starting at position 549 of SEQ ID NO: 318180
agaugacugagccauuagu

SEQ ID NO: 542894 - RNA, 19 nt, Artificial Sequence
  Description of Artificial Sequence: Synthetic oligonucleotide
  Antisense strand to SEQ ID NO: 542893
acuaauggcucagucaucu

SEQ ID NO: 542895 - RNA, 19 nt, Artificial Sequence
  Description of Artificial Sequence: Synthetic oligonucleotide
  Sense strand starting at position 636 of SEQ ID NO: 318180
auagucaacuguuuagauu

SEQ ID NO: 542896 - RNA, 19 nt, Artificial Sequence
  Description of Artificial Sequence: Synthetic oligonucleotide
  Antisense strand to SEQ ID NO: 542895
aaucuaaacaguugacuau

SEQ ID NO: 542897 - RNA, 19 nt, Artificial Sequence
  Description of Artificial Sequence: Synthetic oligonucleotide
  Sense strand starting at position 693 of SEQ ID NO: 318180
aucuuaagccaagguuuaa

SEQ ID NO: 542898 - RNA, 19 nt, Artificial Sequence
  Description of Artificial Sequence: Synthetic oligonucleotide
  Antisense strand to SEQ ID NO: 542897
uuaaaccuuggcuuaagau

SEQ ID NO: 542899 - RNA, 19 nt, Artificial Sequence
  Description of Artificial Sequence: Synthetic oligonucleotide
  Sense strand starting at position 754 of SEQ ID NO: 318180
cuacgaaaucaacgauucu

SEQ ID NO: 542900 - RNA, 19 nt, Artificial Sequence
  Description of Artificial Sequence: Synthetic oligonucleotide
  Antisense strand to SEQ ID NO: 542899
agaaucguugauuucguag

SEQ ID NO: 542901 - RNA, 19 nt, Artificial Sequence
  Description of Artificial Sequence: Synthetic oligonucleotide
  Sense strand starting at position 865 of SEQ ID NO: 318180
auaggaauauuccacagaa

SEQ ID NO: 542902 - RNA, 19 nt, Artificial Sequence
  Description of Artificial Sequence: Synthetic oligonucleotide
  Antisense strand to SEQ ID NO: 542901
uucuguggaauauuccuau

SEQ ID NO: 542903 - RNA, 19 nt, Artificial Sequence
  Description of Artificial Sequence: Synthetic oligonucleotide
  Sense strand starting at position 1232 of SEQ ID NO: 318180
gaggaauuguuucugaugu

SEQ ID NO: 542904 - RNA, 19 nt, Artificial Sequence
  Description of Artificial Sequence: Synthetic oligonucleotide
  Antisense strand to SEQ ID NO: 542903
acaucagaaacaauuccuc

SEQ ID NO: 542905 - RNA, 19 nt, Artificial Sequence
  Description of Artificial Sequence: Synthetic oligonucleotide
  Sense strand starting at position 1240 of SEQ ID NO: 318180
guuucugauguccagcuaa

SEQ ID NO: 542906 - RNA, 19 nt, Artificial Sequence
  Description of Artificial Sequence: Synthetic oligonucleotide
  Antisense strand to SEQ ID NO: 542905
uuagcuggacaucagaaac

SEQ ID NO: 542907 - RNA, 19 nt, Artificial Sequence
  Description of Artificial Sequence: Synthetic oligonucleotide
  Sense strand starting at position 2178 of SEQ ID NO: 318180
gcggucguuguucuuuaau

SEQ ID NO: 542908 - RNA, 19 nt, Artificial Sequence
  Description of Artificial Sequence: Synthetic oligonucleotide
  Antisense strand to SEQ ID NO: 542907
auuaaagaacaacgaccgc

SEQ ID NO: 542909 - RNA, 19 nt, Artificial Sequence
  Description of Artificial Sequence: Synthetic oligonucleotide
  Sense strand starting at position 2188 of SEQ ID NO: 318180
uucuuuaaucccggagauc

SEQ ID NO: 542910 - RNA, 19 nt, Artificial Sequence
  Description of Artificial Sequence: Synthetic oligonucleotide
  Antisense strand to SEQ ID NO: 542909
gaucuccgggauuaaagaa

SEQ ID NO: 542911 - RNA, 19 nt, Artificial Sequence
  Description of Artificial Sequence: Synthetic oligonucleotide
  Sense strand starting at position 2200 of SEQ ID NO: 318180
ggagaucccucuccgucau

SEQ ID NO: 542912 - RNA, 19 nt, Artificial Sequence
  Description of Artificial Sequence: Synthetic oligonucleotide
  Antisense strand to SEQ ID NO: 542911
augacggagagggaucucc

SEQ ID NO: 542913 - RNA, 19 nt, Artificial Sequence
  Description of Artificial Sequence: Synthetic oligonucleotide
  Sense strand starting at position 2238 of SEQ ID NO: 318180
gaggaacagacguggcuua

SEQ ID NO: 542914 - RNA, 19 nt, Artificial Sequence
  Description of Artificial Sequence: Synthetic oligonucleotide
  Antisense strand to SEQ ID NO: 542913
uaagccacgucuguuccuc

SEQ ID NO: 542915 - RNA, 19 nt, Artificial Sequence
  Description of Artificial Sequence: Synthetic oligonucleotide
  Sense strand starting at position 2249 of SEQ ID NO: 318180
guggcuuacgaguucgagu

SEQ ID NO: 542916 - RNA, 19 nt, Artificial Sequence
  Description of Artificial Sequence: Synthetic oligonucleotide
  Antisense strand to SEQ ID NO: 542915
acucgaacucguaagccac

SEQ ID NO: 542917 - RNA, 19 nt, Artificial Sequence
  Description of Artificial Sequence: Synthetic oligonucleotide
  Sense strand starting at position 2390 of SEQ ID NO: 318180
uuguucuguuugccaagga

SEQ ID NO: 542918 - RNA, 19 nt, Artificial Sequence
  Description of Artificial Sequence: Synthetic oligonucleotide
  Antisense strand to SEQ ID NO: 542917
uccuuggcaaacagaacaa

SEQ ID NO: 542919 - RNA, 19 nt, Artificial Sequence
  Description of Artificial Sequence: Synthetic oligonucleotide
  Sense strand starting at position 2411 of SEQ ID NO: 318180
gguggaaagcgccagauau

SEQ ID NO: 542920 - RNA, 19 nt, Artificial Sequence
  Description of Artificial Sequence: Synthetic oligonucleotide
  Antisense strand to SEQ ID NO: 542919
auaucuggcgcuuuccacc

SEQ ID NO: 542921 - RNA, 19 nt, Artificial Sequence
  Description of Artificial Sequence: Synthetic oligonucleotide
  Sense strand starting at position 2413 of SEQ ID NO: 318180
uggaaagcgccagauauug

SEQ ID NO: 542922 - RNA, 19 nt, Artificial Sequence
  Description of Artificial Sequence: Synthetic oligonucleotide
  Antisense strand to SEQ ID NO: 542921
caauaucuggcgcuuucca

SEQ ID NO: 542923 - RNA, 19 nt, Artificial Sequence
  Description of Artificial Sequence: Synthetic oligonucleotide
  Sense strand starting at position 2735 of SEQ ID NO: 318180
gccucucagcauuggauua

SEQ ID NO: 542924 - RNA, 19 nt, Artificial Sequence
  Description of Artificial Sequence: Synthetic oligonucleotide
  Antisense strand to SEQ ID NO: 542923
uaauccaaugcugagaggc

SEQ ID NO: 542925 - RNA, 19 nt, Artificial Sequence
  Description of Artificial Sequence: Synthetic oligonucleotide
  Sense strand starting at position 3078 of SEQ ID NO: 318180
ucaggaauucugugcagga

SEQ ID NO: 542926 - RNA, 19 nt, Artificial Sequence
  Description of Artificial Sequence: Synthetic oligonucleotide
  Antisense strand to SEQ ID NO: 542925
uccugcacagaauuccuga

SEQ ID NO: 542927 - RNA, 19 nt, Artificial Sequence
  Description of Artificial Sequence: Synthetic oligonucleotide
  Sense strand starting at position 3153 of SEQ ID NO: 318180
uuuggugaauuugacugaa

SEQ ID NO: 542928 - RNA, 19 nt, Artificial Sequence
  Description of Artificial Sequence: Synthetic oligonucleotide
  Antisense strand to SEQ ID NO: 542927
uucagucaaauucaccaaa

SEQ ID NO: 542929 - RNA, 19 nt, Artificial Sequence
  Description of Artificial Sequence: Synthetic oligonucleotide
  Sense strand starting at position 3248 of SEQ ID NO: 318180
uaaguaaauuguuuggaga

SEQ ID NO: 542930 - RNA, 19 nt, Artificial Sequence
  Description of Artificial Sequence: Synthetic oligonucleotide
  Antisense strand to SEQ ID NO: 542929
ucuccaaacaauuuacuua

SEQ ID NO: 542931 - RNA, 19 nt, Artificial Sequence
  Description of Artificial Sequence: Synthetic oligonucleotide
  Sense strand starting at position 3249 of SEQ ID NO: 318180
aaguaaauuguuuggagac

SEQ ID NO: 542932 - RNA, 19 nt, Artificial Sequence
  Description of Artificial Sequence: Synthetic oligonucleotide
  Antisense strand to SEQ ID NO: 542931
gucuccaaacaauuuacuu

SEQ ID NO: 542933 - RNA, 19 nt, Artificial Sequence
  Description of Artificial Sequence: Synthetic oligonucleotide
  Sense strand starting at position 3266 of SEQ ID NO: 318180
accuaaucuggcugcaacu

SEQ ID NO: 542934 - RNA, 19 nt, Artificial Sequence
  Description of Artificial Sequence: Synthetic oligonucleotide
  Antisense strand to SEQ ID NO: 542933
aguugcagccagauuaggu

SEQ ID NO: 542935 - RNA, 19 nt, Artificial Sequence
  Description of Artificial Sequence: Synthetic oligonucleotide
  Sense strand starting at position 3316 of SEQ ID NO: 318180
ucuggagaguugggaauuu

SEQ ID NO: 542936 - RNA, 19 nt, Artificial Sequence
  Description of Artificial Sequence: Synthetic oligonucleotide
  Antisense strand to SEQ ID NO: 542935
aaauucccaacucuccaga

SEQ ID NO: 542937 - RNA, 19 nt, Artificial Sequence
  Description of Artificial Sequence: Synthetic oligonucleotide
  Sense strand starting at position 3362 of SEQ ID NO: 318180
gagugcuuucuauaaggug

SEQ ID NO: 542938 - RNA, 19 nt, Artificial Sequence
  Description of Artificial Sequence: Synthetic oligonucleotide
  Antisense strand to SEQ ID NO: 542937
caccuuauagaaagcacuc

SEQ ID NO: 542939 - RNA, 19 nt, Artificial Sequence
  Description of Artificial Sequence: Synthetic oligonucleotide
  Sense strand starting at position 3432 of SEQ ID NO: 318180
gcuacugugggauaccauu

SEQ ID NO: 542940 - RNA, 19 nt, Artificial Sequence
  Description of Artificial Sequence: Synthetic oligonucleotide
  Antisense strand to SEQ ID NO: 542939
aaugguaucccacaguagc

SEQ ID NO: 542941 - RNA, 19 nt, Artificial Sequence
  Description of Artificial Sequence: Synthetic oligonucleotide
  Sense strand starting at position 3440 of SEQ ID NO: 318180
gggauaccauuugguagau

SEQ ID NO: 542942 - RNA, 19 nt, Artificial Sequence
  Description of Artificial Sequence: Synthetic oligonucleotide
  Antisense strand to SEQ ID NO: 542941
aucuaccaaaugguauccc

SEQ ID NO: 542943 - RNA, 19 nt, Artificial Sequence
  Description of Artificial Sequence: Synthetic oligonucleotide
  Sense strand starting at position 3442 of SEQ ID NO: 318180
gauaccauuugguagauca

SEQ ID NO: 542944 - RNA, 19 nt, Artificial Sequence
  Description of Artificial Sequence: Synthetic oligonucleotide
  Antisense strand to SEQ ID NO: 542943
ugaucuaccaaaugguauc

SEQ ID NO: 542945 - RNA, 19 nt, Artificial Sequence
  Description of Artificial Sequence: Synthetic oligonucleotide
  Sense strand starting at position 3878 of SEQ ID NO: 318180
ccugaaauggcauagccau

SEQ ID NO: 542946 - RNA, 19 nt, Artificial Sequence
  Description of Artificial Sequence: Synthetic oligonucleotide
  Antisense strand to SEQ ID NO: 542945
auggcuaugccauuucagg

SEQ ID NO: 542947 - RNA, 19 nt, Artificial Sequence
  Description of Artificial Sequence: Synthetic oligonucleotide
  Sense strand starting at position 67 of SEQ ID NO: 318181
gaucaaggguaguuaaauc

SEQ ID NO: 542948 - RNA, 19 nt, Artificial Sequence
  Description of Artificial Sequence: Synthetic oligonucleotide
  Antisense strand to SEQ ID NO: 542947
gauuuaacuacccuugauc

SEQ ID NO: 542949 - RNA, 19 nt, Artificial Sequence
  Description of Artificial Sequence: Synthetic oligonucleotide
  Sense strand starting at position 75 of SEQ ID NO: 318181
guaguuaaauccuuccaag

SEQ ID NO: 542950 - RNA, 19 nt, Artificial Sequence
  Description of Artificial Sequence: Synthetic oligonucleotide
  Antisense strand to SEQ ID NO: 542949
cuuggaaggauuuaacuac

SEQ ID NO: 542951 - RNA, 19 nt, Artificial Sequence
  Description of Artificial Sequence: Synthetic oligonucleotide
  Sense strand starting at position 151 of SEQ ID NO: 318181
aagcgaaacuucucugggu

SEQ ID NO: 542952 - RNA, 19 nt, Artificial Sequence
  Description of Artificial Sequence: Synthetic oligonucleotide
  Antisense strand to SEQ ID NO: 542951
acccagagaaguuucgcuu

SEQ ID NO: 542953 - RNA, 19 nt, Artificial Sequence
  Description of Artificial Sequence: Synthetic oligonucleotide
  Sense strand starting at position 152 of SEQ ID NO: 318181
agcgaaacuucucugggua

SEQ ID NO: 542954 - RNA, 19 nt, Artificial Sequence
  Description of Artificial Sequence: Synthetic oligonucleotide
  Antisense strand to SEQ ID NO: 542953
uacccagagaaguuucgcu

SEQ ID NO: 542955 - RNA, 19 nt, Artificial Sequence
  Description of Artificial Sequence: Synthetic oligonucleotide
  Sense strand starting at position 153 of SEQ ID NO: 318181
gcgaaacuucucuggguaa

SEQ ID NO: 542956 - RNA, 19 nt, Artificial Sequence
  Description of Artificial Sequence: Synthetic oligonucleotide
  Antisense strand to SEQ ID NO: 542955
uuacccagagaaguuucgc

SEQ ID NO: 542957 - RNA, 19 nt, Artificial Sequence
  Description of Artificial Sequence: Synthetic oligonucleotide
  Sense strand starting at position 155 of SEQ ID NO: 318181
gaaacuucucuggguaaag

SEQ ID NO: 542958 - RNA, 19 nt, Artificial Sequence
  Description of Artificial Sequence: Synthetic oligonucleotide
  Antisense strand to SEQ ID NO: 542957
cuuuacccagagaaguuuc

SEQ ID NO: 542959 - RNA, 19 nt, Artificial Sequence
  Description of Artificial Sequence: Synthetic oligonucleotide
  Sense strand starting at position 156 of SEQ ID NO: 318181
aaacuucucuggguaaagu

SEQ ID NO: 542960 - RNA, 19 nt, Artificial Sequence
  Description of Artificial Sequence: Synthetic oligonucleotide
  Antisense strand to SEQ ID NO: 542959
acuuuacccagagaaguuu

SEQ ID NO: 542961 - RNA, 19 nt, Artificial Sequence
  Description of Artificial Sequence: Synthetic oligonucleotide
  Sense strand starting at position 157 of SEQ ID NO: 318181
aacuucucuggguaaagua

SEQ ID NO: 542962 - RNA, 19 nt, Artificial Sequence
  Description of Artificial Sequence: Synthetic oligonucleotide
  Antisense strand to SEQ ID NO: 542961
uacuuuacccagagaaguu

SEQ ID NO: 542963 - RNA, 19 nt, Artificial Sequence
  Description of Artificial Sequence: Synthetic oligonucleotide
  Sense strand starting at position 197 of SEQ ID NO: 318181
uacuguuaagugcaaagga

SEQ ID NO: 542964 - RNA, 19 nt, Artificial Sequence
  Description of Artificial Sequence: Synthetic oligonucleotide
  Antisense strand to SEQ ID NO: 542963
uccuuugcacuuaacagua

SEQ ID NO: 542965 - RNA, 19 nt, Artificial Sequence
  Description of Artificial Sequence: Synthetic oligonucleotide
  Sense strand starting at position 354 of SEQ ID NO: 318181
aggcaucauccagagcguu

SEQ ID NO: 542966 - RNA, 19 nt, Artificial Sequence
  Description of Artificial Sequence: Synthetic oligonucleotide
  Antisense strand to SEQ ID NO: 542965
aacgcucuggaugaugccu

SEQ ID NO: 542967 - RNA, 19 nt, Artificial Sequence
  Description of Artificial Sequence: Synthetic oligonucleotide
  Sense strand starting at position 428 of SEQ ID NO: 318181
gucgauagacugcguagau

SEQ ID NO: 542968 - RNA, 19 nt, Artificial Sequence
  Description of Artificial Sequence: Synthetic oligonucleotide
  Antisense strand to SEQ ID NO: 542967
aucuacgcagucuaucgac

SEQ ID NO: 542969 - RNA, 19 nt, Artificial Sequence
  Description of Artificial Sequence: Synthetic oligonucleotide
  Sense strand starting at position 441 of SEQ ID NO: 318181
guagaugacugagccauua

SEQ ID NO: 542970 - RNA, 19 nt, Artificial Sequence
  Description of Artificial Sequence: Synthetic oligonucleotide
  Antisense strand to SEQ ID NO: 542969
uaauggcucagucaucuac

SEQ ID NO: 542971 - RNA, 19 nt, Artificial Sequence
  Description of Artificial Sequence: Synthetic oligonucleotide
  Sense strand starting at position 443 of SEQ ID NO: 318181
agaugacugagccauuagu

SEQ ID NO: 542972 - RNA, 19 nt, Artificial Sequence
  Description of Artificial Sequence: Synthetic oligonucleotide
  Antisense strand to SEQ ID NO: 542971
acuaauggcucagucaucu

SEQ ID NO: 542973 - RNA, 19 nt, Artificial Sequence
  Description of Artificial Sequence: Synthetic oligonucleotide
  Sense strand starting at position 527 of SEQ ID NO: 318181
cgcauagucaacuguuuag

SEQ ID NO: 542974 - RNA, 19 nt, Artificial Sequence
  Description of Artificial Sequence: Synthetic oligonucleotide
  Antisense strand to SEQ ID NO: 542973
cuaaacaguugacuaugcg

SEQ ID NO: 542975 - RNA, 19 nt, Artificial Sequence
  Description of Artificial Sequence: Synthetic oligonucleotide
  Sense strand starting at position 530 of SEQ ID NO: 318181
auagucaacuguuuagauu

SEQ ID NO: 542976 - RNA, 19 nt, Artificial Sequence
  Description of Artificial Sequence: Synthetic oligonucleotide
  Antisense strand to SEQ ID NO: 542975
aaucuaaacaguugacuau

SEQ ID NO: 542977 - RNA, 19 nt, Artificial Sequence
  Description of Artificial Sequence: Synthetic oligonucleotide
  Sense strand starting at position 587 of SEQ ID NO: 318181
aucuuaagccaagguuuaa

SEQ ID NO: 542978 - RNA, 19 nt, Artificial Sequence
  Description of Artificial Sequence: Synthetic oligonucleotide
  Antisense strand to SEQ ID NO: 542977
uuaaaccuuggcuuaagau

SEQ ID NO: 542979 - RNA, 19 nt, Artificial Sequence
  Description of Artificial Sequence: Synthetic oligonucleotide
  Sense strand starting at position 648 of SEQ ID NO: 318181
cuacgaaaucaacgauucu

SEQ ID NO: 542980 - RNA, 19 nt, Artificial Sequence
  Description of Artificial Sequence: Synthetic oligonucleotide
  Antisense strand to SEQ ID NO: 542979
agaaucguugauuucguag

SEQ ID NO: 542981 - RNA, 19 nt, Artificial Sequence
  Description of Artificial Sequence: Synthetic oligonucleotide
  Sense strand starting at position 759 of SEQ ID NO: 318181
auaggaauauuccacagaa

SEQ ID NO: 542982 - RNA, 19 nt, Artificial Sequence
  Description of Artificial Sequence: Synthetic oligonucleotide
  Antisense strand to SEQ ID NO: 542981
uucuguggaauauuccuau

SEQ ID NO: 542983 - RNA, 19 nt, Artificial Sequence
  Description of Artificial Sequence: Synthetic oligonucleotide
  Sense strand starting at position 1126 of SEQ ID NO: 318181
gaggaauuguuucugaugu

SEQ ID NO: 542984 - RNA, 19 nt, Artificial Sequence
  Description of Artificial Sequence: Synthetic oligonucleotide
  Antisense strand to SEQ ID NO: 542983
acaucagaaacaauuccuc

SEQ ID NO: 542985 - RNA, 19 nt, Artificial Sequence
  Description of Artificial Sequence: Synthetic oligonucleotide
  Sense strand starting at position 1134 of SEQ ID NO: 318181
guuucugauguccagcuaa

SEQ ID NO: 542986 - RNA, 19 nt, Artificial Sequence
  Description of Artificial Sequence: Synthetic oligonucleotide
  Antisense strand to SEQ ID NO: 542985
uuagcuggacaucagaaac

SEQ ID NO: 542987 - RNA, 19 nt, Artificial Sequence
  Description of Artificial Sequence: Synthetic oligonucleotide
  Sense strand starting at position 2072 of SEQ ID NO: 318181
gcggucguuguucuuuaau

SEQ ID NO: 542988 - RNA, 19 nt, Artificial Sequence
  Description of Artificial Sequence: Synthetic oligonucleotide
  Antisense strand to SEQ ID NO: 542987
auuaaagaacaacgaccgc

SEQ ID NO: 542989 - RNA, 19 nt, Artificial Sequence
  Description of Artificial Sequence: Synthetic oligonucleotide
  Sense strand starting at position 2082 of SEQ ID NO: 318181
uucuuuaaucccggagauc

SEQ ID NO: 542990 - RNA, 19 nt, Artificial Sequence
  Description of Artificial Sequence: Synthetic oligonucleotide
  Antisense strand to SEQ ID NO: 542989
gaucuccgggauuaaagaa

SEQ ID NO: 542991 - RNA, 19 nt, Artificial Sequence
  Description of Artificial Sequence: Synthetic oligonucleotide
  Sense strand starting at position 2094 of SEQ ID NO: 318181
ggagaucccucuccgucau

SEQ ID NO: 542992 - RNA, 19 nt, Artificial Sequence
  Description of Artificial Sequence: Synthetic oligonucleotide
  Antisense strand to SEQ ID NO: 542991
augacggagagggaucucc

SEQ ID NO: 542993 - RNA, 19 nt, Artificial Sequence
  Description of Artificial Sequence: Synthetic oligonucleotide
  Sense strand starting at position 2132 of SEQ ID NO: 318181
gaggaacagacguggcuua

SEQ ID NO: 542994 - RNA, 19 nt, Artificial Sequence
  Description of Artificial Sequence: Synthetic oligonucleotide
  Antisense strand to SEQ ID NO: 542993
uaagccacgucuguuccuc

SEQ ID NO: 542995 - RNA, 19 nt, Artificial Sequence
  Description of Artificial Sequence: Synthetic oligonucleotide
  Sense strand starting at position 2143 of SEQ ID NO: 318181
guggcuuacgaguucgagu

SEQ ID NO: 542996 - RNA, 19 nt, Artificial Sequence
  Description of Artificial Sequence: Synthetic oligonucleotide
  Antisense strand to SEQ ID NO: 542995
acucgaacucguaagccac

SEQ ID NO: 542997 - RNA, 19 nt, Artificial Sequence
  Description of Artificial Sequence: Synthetic oligonucleotide
  Sense strand starting at position 2284 of SEQ ID NO: 318181
uuguucuguuugccaagga

SEQ ID NO: 542998 - RNA, 19 nt, Artificial Sequence
  Description of Artificial Sequence: Synthetic oligonucleotide
  Antisense strand to SEQ ID NO: 542997
uccuuggcaaacagaacaa

SEQ ID NO: 542999 - RNA, 19 nt, Artificial Sequence
  Description of Artificial Sequence: Synthetic oligonucleotide
  Sense strand starting at position 2305 of SEQ ID NO: 318181
gguggaaagcgccagauau

SEQ ID NO: 543000 - RNA, 19 nt, Artificial Sequence
  Description of Artificial Sequence: Synthetic oligonucleotide
  Antisense strand to SEQ ID NO: 542999
auaucuggcgcuuuccacc

SEQ ID NO: 543001 - RNA, 19 nt, Artificial Sequence
  Description of Artificial Sequence: Synthetic oligonucleotide
  Sense strand starting at position 2307 of SEQ ID NO: 318181
uggaaagcgccagauauug

SEQ ID NO: 543002 - RNA, 19 nt, Artificial Sequence
  Description of Artificial Sequence: Synthetic oligonucleotide
  Antisense strand to SEQ ID NO: 543001
caauaucuggcgcuuucca

SEQ ID NO: 543003 - RNA, 19 nt, Artificial Sequence
  Description of Artificial Sequence: Synthetic oligonucleotide
  Sense strand starting at position 2629 of SEQ ID NO: 318181
gccucucagcauuggauua

SEQ ID NO: 543004 - RNA, 19 nt, Artificial Sequence
  Description of Artificial Sequence: Synthetic oligonucleotide
  Antisense strand to SEQ ID NO: 543003
uaauccaaugcugagaggc

SEQ ID NO: 543005 - RNA, 19 nt, Artificial Sequence
  Description of Artificial Sequence: Synthetic oligonucleotide
  Sense strand starting at position 2972 of SEQ ID NO: 318181
ucaggaauucugugcagga

SEQ ID NO: 543006 - RNA, 19 nt, Artificial Sequence
  Description of Artificial Sequence: Synthetic oligonucleotide
  Antisense strand to SEQ ID NO: 543005
uccugcacagaauuccuga

SEQ ID NO: 543007 - RNA, 19 nt, Artificial Sequence
  Description of Artificial Sequence: Synthetic oligonucleotide
  Sense strand starting at position 3047 of SEQ ID NO: 318181
uuuggugaauuugacugaa

SEQ ID NO: 543008 - RNA, 19 nt, Artificial Sequence
  Description of Artificial Sequence: Synthetic oligonucleotide
  Antisense strand to SEQ ID NO: 543007
uucagucaaauucaccaaa

SEQ ID NO: 543009 - RNA, 19 nt, Artificial Sequence
  Description of Artificial Sequence: Synthetic oligonucleotide
  Sense strand starting at position 3142 of SEQ ID NO: 318181
uaaguaaauuguuuggaga

SEQ ID NO: 543010 - RNA, 19 nt, Artificial Sequence
  Description of Artificial Sequence: Synthetic oligonucleotide
  Antisense strand to SEQ ID NO: 543009
ucuccaaacaauuuacuua

SEQ ID NO: 543011 - RNA, 19 nt, Artificial Sequence
  Description of Artificial Sequence: Synthetic oligonucleotide
  Sense strand starting at position 3143 of SEQ ID NO: 318181
aaguaaauuguuuggagac

SEQ ID NO: 543012 - RNA, 19 nt, Artificial Sequence
  Description of Artificial Sequence: Synthetic oligonucleotide
  Antisense strand to SEQ ID NO: 543011
gucuccaaacaauuuacuu

SEQ ID NO: 543013 - RNA, 19 nt, Artificial Sequence
  Description of Artificial Sequence: Synthetic oligonucleotide
  Sense strand starting at position 3160 of SEQ ID NO: 318181
accuaaucuggcugcaacu

SEQ ID NO: 543014 - RNA, 19 nt, Artificial Sequence
  Description of Artificial Sequence: Synthetic oligonucleotide
  Antisense strand to SEQ ID NO: 543013
aguugcagccagauuaggu

SEQ ID NO: 543015 - RNA, 19 nt, Artificial Sequence
  Description of Artificial Sequence: Synthetic oligonucleotide
  Sense strand starting at position 3210 of SEQ ID NO: 318181
ucuggagaguugggaauuu

SEQ ID NO: 543016 - RNA, 19 nt, Artificial Sequence
  Description of Artificial Sequence: Synthetic oligonucleotide
  Antisense strand to SEQ ID NO: 543015
aaauucccaacucuccaga

SEQ ID NO: 543017 - RNA, 19 nt, Artificial Sequence
  Description of Artificial Sequence: Synthetic oligonucleotide
  Sense strand starting at position 3256 of SEQ ID NO: 318181
gagugcuuucuauaaggug

SEQ ID NO: 543018 - RNA, 19 nt, Artificial Sequence
  Description of Artificial Sequence: Synthetic oligonucleotide
  Antisense strand to SEQ ID NO: 543017
caccuuauagaaagcacuc

SEQ ID NO: 543019 - RNA, 19 nt, Artificial Sequence
  Description of Artificial Sequence: Synthetic oligonucleotide
  Sense strand starting at position 3326 of SEQ ID NO: 318181
gcuacugugggauaccauu

SEQ ID NO: 543020 - RNA, 19 nt, Artificial Sequence
  Description of Artificial Sequence: Synthetic oligonucleotide
  Antisense strand to SEQ ID NO: 543019
aaugguaucccacaguagc

SEQ ID NO: 543021 - RNA, 19 nt, Artificial Sequence
  Description of Artificial Sequence: Synthetic oligonucleotide
  Sense strand starting at position 3334 of SEQ ID NO: 318181
gggauaccauuugguagau

SEQ ID NO: 543022 - RNA, 19 nt, Artificial Sequence
  Description of Artificial Sequence: Synthetic oligonucleotide
  Antisense strand to SEQ ID NO: 543021
aucuaccaaaugguauccc

SEQ ID NO: 543023 - RNA, 19 nt, Artificial Sequence
  Description of Artificial Sequence: Synthetic oligonucleotide
  Sense strand starting at position 3336 of SEQ ID NO: 318181
gauaccauuugguagauca

SEQ ID NO: 543024 - RNA, 19 nt, Artificial Sequence
  Description of Artificial Sequence: Synthetic oligonucleotide
  Antisense strand to SEQ ID NO: 543023
ugaucuaccaaaugguauc

SEQ ID NO: 543025 - RNA, 19 nt, Artificial Sequence
  Description of Artificial Sequence: Synthetic oligonucleotide
  Sense strand starting at position 3772 of SEQ ID NO: 318181
ccugaaauggcauagccau

SEQ ID NO: 543026 - RNA, 19 nt, Artificial Sequence
  Description of Artificial Sequence: Synthetic oligonucleotide
  Antisense strand to SEQ ID NO: 543025
auggcuaugccauuucagg

SEQ ID NO: 543027 - RNA, 19 nt, Artificial Sequence
  Description of Artificial Sequence: Synthetic oligonucleotide
  Sense strand starting at position 43 of SEQ ID NO: 318182
aucuauugugccuagauuc

SEQ ID NO: 543028 - RNA, 19 nt, Artificial Sequence
  Description of Artificial Sequence: Synthetic oligonucleotide
  Antisense strand to SEQ ID NO: 543027
gaaucuaggcacaauagau

SEQ ID NO: 543029 - RNA, 19 nt, Artificial Sequence
  Description of Artificial Sequence: Synthetic oligonucleotide
  Sense strand starting at position 211 of SEQ ID NO: 318182
ggcgaauuagcucaauuau

SEQ ID NO: 543030 - RNA, 19 nt, Artificial Sequence
  Description of Artificial Sequence: Synthetic oligonucleotide
  Antisense strand to SEQ ID NO: 543029
auaauugagcuaauucgcc

SEQ ID NO: 543031 - RNA, 19 nt, Artificial Sequence
  Description of Artificial Sequence: Synthetic oligonucleotide
  Sense strand starting at position 226 of SEQ ID NO: 318182
uuauuuaagucccuacgua

SEQ ID NO: 543032 - RNA, 19 nt, Artificial Sequence
  Description of Artificial Sequence: Synthetic oligonucleotide
  Antisense strand to SEQ ID NO: 543031
uacguagggacuuaaauaa

SEQ ID NO: 543033 - RNA, 19 nt, Artificial Sequence
  Description of Artificial Sequence: Synthetic oligonucleotide
  Sense strand starting at position 448 of SEQ ID NO: 318182
agacauauucuacguuuau

SEQ ID NO: 543034 - RNA, 19 nt, Artificial Sequence
  Description of Artificial Sequence: Synthetic oligonucleotide
  Antisense strand to SEQ ID NO: 543033
auaaacguagaauaugucu

SEQ ID NO: 543035 - RNA, 19 nt, Artificial Sequence
  Description of Artificial Sequence: Synthetic oligonucleotide
  Sense strand starting at position 449 of SEQ ID NO: 318182
gacauauucuacguuuaug

SEQ ID NO: 543036 - RNA, 19 nt, Artificial Sequence
  Description of Artificial Sequence: Synthetic oligonucleotide
  Antisense strand to SEQ ID NO: 543035
cauaaacguagaauauguc

SEQ ID NO: 543037 - RNA, 19 nt, Artificial Sequence
  Description of Artificial Sequence: Synthetic oligonucleotide
  Sense strand starting at position 457 of SEQ ID NO: 318182
cuacguuuaugauuacuau

SEQ ID NO: 543038 - RNA, 19 nt, Artificial Sequence
  Description of Artificial Sequence: Synthetic oligonucleotide
  Antisense strand to SEQ ID NO: 543037
auaguaaucauaaacguag

SEQ ID NO: 543039 - RNA, 19 nt, Artificial Sequence
  Description of Artificial Sequence: Synthetic oligonucleotide
  Sense strand starting at position 547 of SEQ ID NO: 318182
auuggaaucacuggucuga

SEQ ID NO: 543040 - RNA, 19 nt, Artificial Sequence
  Description of Artificial Sequence: Synthetic oligonucleotide
  Antisense strand to SEQ ID NO: 543039
ucagaccagugauuccaau

SEQ ID NO: 543041 - RNA, 19 nt, Artificial Sequence
  Description of Artificial Sequence: Synthetic oligonucleotide
  Sense strand starting at position 549 of SEQ ID NO: 318182
uggaaucacuggucugaug

SEQ ID NO: 543042 - RNA, 19 nt, Artificial Sequence
  Description of Artificial Sequence: Synthetic oligonucleotide
  Antisense strand to SEQ ID NO: 543041
caucagaccagugauucca

SEQ ID NO: 543043 - RNA, 19 nt, Artificial Sequence
  Description of Artificial Sequence: Synthetic oligonucleotide
  Sense strand starting at position 551 of SEQ ID NO: 318182
gaaucacuggucugaugac

SEQ ID NO: 543044 - RNA, 19 nt, Artificial Sequence
  Description of Artificial Sequence: Synthetic oligonucleotide
  Antisense strand to SEQ ID NO: 543043
gucaucagaccagugauuc

SEQ ID NO: 543045 - RNA, 19 nt, Artificial Sequence
  Description of Artificial Sequence: Synthetic oligonucleotide
  Sense strand starting at position 618 of SEQ ID NO: 318182
ugaugaagucugcaauucu

SEQ ID NO: 543046 - RNA, 19 nt, Artificial Sequence
  Description of Artificial Sequence: Synthetic oligonucleotide
  Antisense strand to SEQ ID NO: 543045
agaauugcagacuucauca

SEQ ID NO: 543047 - RNA, 19 nt, Artificial Sequence
  Description of Artificial Sequence: Synthetic oligonucleotide
  Sense strand starting at position 685 of SEQ ID NO: 318182
aaagucugcucacuacgaa

SEQ ID NO: 543048 - RNA, 19 nt, Artificial Sequence
  Description of Artificial Sequence: Synthetic oligonucleotide
  Antisense strand to SEQ ID NO: 543047
uucguagugagcagacuuu

SEQ ID NO: 543049 - RNA, 19 nt, Artificial Sequence
  Description of Artificial Sequence: Synthetic oligonucleotide
  Sense strand starting at position 686 of SEQ ID NO: 318182
aagucugcucacuacgaaa

SEQ ID NO: 543050 - RNA, 19 nt, Artificial Sequence
  Description of Artificial Sequence: Synthetic oligonucleotide
  Antisense strand to SEQ ID NO: 543049
uuucguagugagcagacuu

SEQ ID NO: 543051 - RNA, 19 nt, Artificial Sequence
  Description of Artificial Sequence: Synthetic oligonucleotide
  Sense strand starting at position 699 of SEQ ID NO: 318182
acgaaagcuccuggaaaug

SEQ ID NO: 543052 - RNA, 19 nt, Artificial Sequence
  Description of Artificial Sequence: Synthetic oligonucleotide
  Antisense strand to SEQ ID NO: 543051
cauuuccaggagcuuucgu

SEQ ID NO: 543053 - RNA, 19 nt, Artificial Sequence
  Description of Artificial Sequence: Synthetic oligonucleotide
  Sense strand starting at position 744 of SEQ ID NO: 318182
agaaaucccuagucaguca

SEQ ID NO: 543054 - RNA, 19 nt, Artificial Sequence
  Description of Artificial Sequence: Synthetic oligonucleotide
  Antisense strand to SEQ ID NO: 543053
ugacugacuagggauuucu

SEQ ID NO: 543055 - RNA, 19 nt, Artificial Sequence
  Description of Artificial Sequence: Synthetic oligonucleotide
  Sense strand starting at position 1010 of SEQ ID NO: 318182
cggacagucucuucccaau

SEQ ID NO: 543056 - RNA, 19 nt, Artificial Sequence
  Description of Artificial Sequence: Synthetic oligonucleotide
  Antisense strand to SEQ ID NO: 543055
auugggaagagacuguccg

SEQ ID NO: 543057 - RNA, 19 nt, Artificial Sequence
  Description of Artificial Sequence: Synthetic oligonucleotide
  Sense strand starting at position 1453 of SEQ ID NO: 318182
guagaaacguucuugaauc

SEQ ID NO: 543058 - RNA, 19 nt, Artificial Sequence
  Description of Artificial Sequence: Synthetic oligonucleotide
  Antisense strand to SEQ ID NO: 543057
gauucaagaacguuucuac

SEQ ID NO: 543059 - RNA, 19 nt, Artificial Sequence
  Description of Artificial Sequence: Synthetic oligonucleotide
  Sense strand starting at position 1455 of SEQ ID NO: 318182
agaaacguucuugaaucca

SEQ ID NO: 543060 - RNA, 19 nt, Artificial Sequence
  Description of Artificial Sequence: Synthetic oligonucleotide
  Antisense strand to SEQ ID NO: 543059
uggauucaagaacguuucu

SEQ ID NO: 543061 - RNA, 19 nt, Artificial Sequence
  Description of Artificial Sequence: Synthetic oligonucleotide
  Sense strand starting at position 1460 of SEQ ID NO: 318182
cguucuugaauccagaaga

SEQ ID NO: 543062 - RNA, 19 nt, Artificial Sequence
  Description of Artificial Sequence: Synthetic oligonucleotide
  Antisense strand to SEQ ID NO: 543061
ucuucuggauucaagaacg

SEQ ID NO: 543063 - RNA, 19 nt, Artificial Sequence
  Description of Artificial Sequence: Synthetic oligonucleotide
  Sense strand starting at position 1479 of SEQ ID NO: 318182
uaccaucgccuagagacuu

SEQ ID NO: 543064 - RNA, 19 nt, Artificial Sequence
  Description of Artificial Sequence: Synthetic oligonucleotide
  Antisense strand to SEQ ID NO: 543063
aagucucuaggcgauggua

SEQ ID NO: 543065 - RNA, 19 nt, Artificial Sequence
  Description of Artificial Sequence: Synthetic oligonucleotide
  Sense strand starting at position 1814 of SEQ ID NO: 318182
acgagagagcuuuaacgca

SEQ ID NO: 543066 - RNA, 19 nt, Artificial Sequence
  Description of Artificial Sequence: Synthetic oligonucleotide
  Antisense strand to SEQ ID NO: 543065
ugcguuaaagcucucucgu

SEQ ID NO: 543067 - RNA, 19 nt, Artificial Sequence
  Description of Artificial Sequence: Synthetic oligonucleotide
  Sense strand starting at position 2383 of SEQ ID NO: 318182
uggagauagcuugguaccu

SEQ ID NO: 543068 - RNA, 19 nt, Artificial Sequence
  Description of Artificial Sequence: Synthetic oligonucleotide
  Antisense strand to SEQ ID NO: 543067
agguaccaagcuaucucca

SEQ ID NO: 543069 - RNA, 19 nt, Artificial Sequence
  Description of Artificial Sequence: Synthetic oligonucleotide
  Sense strand starting at position 2445 of SEQ ID NO: 318182
uccagaucuuaccuagucu

SEQ ID NO: 543070 - RNA, 19 nt, Artificial Sequence
  Description of Artificial Sequence: Synthetic oligonucleotide
  Antisense strand to SEQ ID NO: 543069
agacuagguaagaucugga

SEQ ID NO: 543071 - RNA, 19 nt, Artificial Sequence
  Description of Artificial Sequence: Synthetic oligonucleotide
  Sense strand starting at position 2496 of SEQ ID NO: 318182
ggguauuuaugcucuuacu

SEQ ID NO: 543072 - RNA, 19 nt, Artificial Sequence
  Description of Artificial Sequence: Synthetic oligonucleotide
  Antisense strand to SEQ ID NO: 543071
aguaagagcauaaauaccc

SEQ ID NO: 543073 - RNA, 19 nt, Artificial Sequence
  Description of Artificial Sequence: Synthetic oligonucleotide
  Sense strand starting at position 2639 of SEQ ID NO: 318182
agggaagggaguuguuaau

SEQ ID NO: 543074 - RNA, 19 nt, Artificial Sequence
  Description of Artificial Sequence: Synthetic oligonucleotide
  Antisense strand to SEQ ID NO: 543073
auuaacaacucccuucccu

SEQ ID NO: 543075 - RNA, 19 nt, Artificial Sequence
  Description of Artificial Sequence: Synthetic oligonucleotide
  Sense strand starting at position 2770 of SEQ ID NO: 318182
uaaagcgaguugguagaaa

SEQ ID NO: 543076 - RNA, 19 nt, Artificial Sequence
  Description of Artificial Sequence: Synthetic oligonucleotide
  Antisense strand to SEQ ID NO: 543075
uuucuaccaacucgcuuua

SEQ ID NO: 543077 - RNA, 19 nt, Artificial Sequence
  Description of Artificial Sequence: Synthetic oligonucleotide
  Sense strand starting at position 2831 of SEQ ID NO: 318182
gugaauaaugacugggugu

SEQ ID NO: 543078 - RNA, 19 nt, Artificial Sequence
  Description of Artificial Sequence: Synthetic oligonucleotide
  Antisense strand to SEQ ID NO: 543077
acacccagucauuauucac

SEQ ID NO: 543079 - RNA, 19 nt, Artificial Sequence
  Description of Artificial Sequence: Synthetic oligonucleotide
  Sense strand starting at position 3290 of SEQ ID NO: 318182
ccucuuaaguuagucagga

SEQ ID NO: 543080 - RNA, 19 nt, Artificial Sequence
  Description of Artificial Sequence: Synthetic oligonucleotide
  Antisense strand to SEQ ID NO: 543079
uccugacuaacuuaagagg

SEQ ID NO: 543081 - RNA, 19 nt, Artificial Sequence
  Description of Artificial Sequence: Synthetic oligonucleotide
  Sense strand starting at position 3291 of SEQ ID NO: 318182
cucuuaaguuagucaggaa

SEQ ID NO: 543082 - RNA, 19 nt, Artificial Sequence
  Description of Artificial Sequence: Synthetic oligonucleotide
  Antisense strand to SEQ ID NO: 543081
uuccugacuaacuuaagag

SEQ ID NO: 543083 - RNA, 19 nt, Artificial Sequence
  Description of Artificial Sequence: Synthetic oligonucleotide
  Sense strand starting at position 3473 of SEQ ID NO: 318182
cacagagauuauucgguua

SEQ ID NO: 543084 - RNA, 19 nt, Artificial Sequence
  Description of Artificial Sequence: Synthetic oligonucleotide
  Antisense strand to SEQ ID NO: 543083
uaaccgaauaaucucugug

SEQ ID NO: 543085 - RNA, 19 nt, Artificial Sequence
  Description of Artificial Sequence: Synthetic oligonucleotide
  Sense strand starting at position 3476 of SEQ ID NO: 318182
agagauuauucgguuacuc

SEQ ID NO: 543086 - RNA, 19 nt, Artificial Sequence
  Description of Artificial Sequence: Synthetic oligonucleotide
  Antisense strand to SEQ ID NO: 543085
gaguaaccgaauaaucucu

SEQ ID NO: 543087 - RNA, 19 nt, Artificial Sequence
  Description of Artificial Sequence: Synthetic oligonucleotide
  Sense strand starting at position 3478 of SEQ ID NO: 318182
agauuauucgguuacucag

SEQ ID NO: 543088 - RNA, 19 nt, Artificial Sequence
  Description of Artificial Sequence: Synthetic oligonucleotide
  Antisense strand to SEQ ID NO: 543087
cugaguaaccgaauaaucu

SEQ ID NO: 543089 - RNA, 19 nt, Artificial Sequence
  Description of Artificial Sequence: Synthetic oligonucleotide
  Sense strand starting at position 3561 of SEQ ID NO: 318182
ggucauaaucuggauucuc

SEQ ID NO: 543090 - RNA, 19 nt, Artificial Sequence
  Description of Artificial Sequence: Synthetic oligonucleotide
  Antisense strand to SEQ ID NO: 543089
gagaauccagauuaugacc

SEQ ID NO: 543091 - RNA, 19 nt, Artificial Sequence
  Description of Artificial Sequence: Synthetic oligonucleotide
  Sense strand starting at position 3591 of SEQ ID NO: 318182
ggaagauaaugucuguaca

SEQ ID NO: 543092 - RNA, 19 nt, Artificial Sequence
  Description of Artificial Sequence: Synthetic oligonucleotide
  Antisense strand to SEQ ID NO: 543091
uguacagacauuaucuucc

SEQ ID NO: 543093 - RNA, 19 nt, Artificial Sequence
  Description of Artificial Sequence: Synthetic oligonucleotide
  Sense strand starting at position 3592 of SEQ ID NO: 318182
gaagauaaugucuguacac

SEQ ID NO: 543094 - RNA, 19 nt, Artificial Sequence
  Description of Artificial Sequence: Synthetic oligonucleotide
  Antisense strand to SEQ ID NO: 543093
guguacagacauuaucuuc

SEQ ID NO: 543095 - RNA, 19 nt, Artificial Sequence
  Description of Artificial Sequence: Synthetic oligonucleotide
  Sense strand starting at position 3740 of SEQ ID NO: 318182
gggcauucucagcagagua

SEQ ID NO: 543096 - RNA, 19 nt, Artificial Sequence
  Description of Artificial Sequence: Synthetic oligonucleotide
  Antisense strand to SEQ ID NO: 543095
uacucugcugagaaugccc

SEQ ID NO: 543097 - RNA, 19 nt, Artificial Sequence
  Description of Artificial Sequence: Synthetic oligonucleotide
  Sense strand starting at position 3742 of SEQ ID NO: 318182
gcauucucagcagaguaau

SEQ ID NO: 543098 - RNA, 19 nt, Artificial Sequence
  Description of Artificial Sequence: Synthetic oligonucleotide
  Antisense strand to SEQ ID NO: 543097
auuacucugcugagaaugc

SEQ ID NO: 543099 - RNA, 19 nt, Artificial Sequence
  Description of Artificial Sequence: Synthetic oligonucleotide
  Sense strand starting at position 3745 of SEQ ID NO: 318182
uucucagcagaguaauaua

SEQ ID NO: 543100 - RNA, 19 nt, Artificial Sequence
  Description of Artificial Sequence: Synthetic oligonucleotide
  Antisense strand to SEQ ID NO: 543099
uauauuacucugcugagaa

SEQ ID NO: 543101 - RNA, 19 nt, Artificial Sequence
  Description of Artificial Sequence: Synthetic oligonucleotide
  Sense strand starting at position 3816 of SEQ ID NO: 318182
ggugaaauggagugauauc

SEQ ID NO: 543102 - RNA, 19 nt, Artificial Sequence
  Description of Artificial Sequence: Synthetic oligonucleotide
  Antisense strand to SEQ ID NO: 543101
gauaucacuccauuucacc

SEQ ID NO: 543103 - RNA, 19 nt, Artificial Sequence
  Description of Artificial Sequence: Synthetic oligonucleotide
  Sense strand starting at position 3841 of SEQ ID NO: 318182
aggccaugagcucagcaau

SEQ ID NO: 543104 - RNA, 19 nt, Artificial Sequence
  Description of Artificial Sequence: Synthetic oligonucleotide
  Antisense strand to SEQ ID NO: 543103
auugcugagcucauggccu

SEQ ID NO: 543105 - RNA, 19 nt, Artificial Sequence
  Description of Artificial Sequence: Synthetic oligonucleotide
  Sense strand starting at position 3844 of SEQ ID NO: 318182
ccaugagcucagcaauaau

SEQ ID NO: 543106 - RNA, 19 nt, Artificial Sequence
  Description of Artificial Sequence: Synthetic oligonucleotide
  Antisense strand to SEQ ID NO: 543105
auuauugcugagcucaugg

SEQ ID NO: 543107 - RNA, 19 nt, Artificial Sequence
  Description of Artificial Sequence: Synthetic oligonucleotide
  Sense strand starting at position 39 of SEQ ID NO: 318183
ggaguuugccuuuauuauu

SEQ ID NO: 543108 - RNA, 19 nt, Artificial Sequence
  Description of Artificial Sequence: Synthetic oligonucleotide
  Antisense strand to SEQ ID NO: 543107
aauaauaaaggcaaacucc

SEQ ID NO: 543109 - RNA, 19 nt, Artificial Sequence
  Description of Artificial Sequence: Synthetic oligonucleotide
  Sense strand starting at position 157 of SEQ ID NO: 318183
gauagaaauuugcauggag

SEQ ID NO: 543110 - RNA, 19 nt, Artificial Sequence
  Description of Artificial Sequence: Synthetic oligonucleotide
  Antisense strand to SEQ ID NO: 543109
cuccaugcaaauuucuauc

SEQ ID NO: 543111 - RNA, 19 nt, Artificial Sequence
  Description of Artificial Sequence: Synthetic oligonucleotide
  Sense strand starting at position 240 of SEQ ID NO: 318183
uuccuaauguuucucagua

SEQ ID NO: 543112 - RNA, 19 nt, Artificial Sequence
  Description of Artificial Sequence: Synthetic oligonucleotide
  Antisense strand to SEQ ID NO: 543111
uacugagaaacauuaggaa

SEQ ID NO: 543113 - RNA, 19 nt, Artificial Sequence
  Description of Artificial Sequence: Synthetic oligonucleotide
  Sense strand starting at position 241 of SEQ ID NO: 318183
uccuaauguuucucaguaa

SEQ ID NO: 543114 - RNA, 19 nt, Artificial Sequence
  Description of Artificial Sequence: Synthetic oligonucleotide
  Antisense strand to SEQ ID NO: 543113
uuacugagaaacauuagga

SEQ ID NO: 543115 - RNA, 19 nt, Artificial Sequence
  Description of Artificial Sequence: Synthetic oligonucleotide
  Sense strand starting at position 850 of SEQ ID NO: 318183
aucaauacuggguggcaaa

SEQ ID NO: 543116 - RNA, 19 nt, Artificial Sequence
  Description of Artificial Sequence: Synthetic oligonucleotide
  Antisense strand to SEQ ID NO: 543115
uuugccacccaguauugau

SEQ ID NO: 543117 - RNA, 19 nt, Artificial Sequence
  Description of Artificial Sequence: Synthetic oligonucleotide
  Sense strand starting at position 885 of SEQ ID NO: 318183
ggcucugaaguuuggaauu

SEQ ID NO: 543118 - RNA, 19 nt, Artificial Sequence
  Description of Artificial Sequence: Synthetic oligonucleotide
  Antisense strand to SEQ ID NO: 543117
aauuccaaacuucagagcc

SEQ ID NO: 543119 - RNA, 19 nt, Artificial Sequence
  Description of Artificial Sequence: Synthetic oligonucleotide
  Sense strand starting at position 906 of SEQ ID NO: 318183
uggguucugcggcacaaga

SEQ ID NO: 543120 - RNA, 19 nt, Artificial Sequence
  Description of Artificial Sequence: Synthetic oligonucleotide
  Antisense strand to SEQ ID NO: 543119
ucuugugccgcagaaccca

SEQ ID NO: 543121 - RNA, 19 nt, Artificial Sequence
  Description of Artificial Sequence: Synthetic oligonucleotide
  Sense strand starting at position 908 of SEQ ID NO: 318183
gguucugcggcacaagaaa

SEQ ID NO: 543122 - RNA, 19 nt, Artificial Sequence
  Description of Artificial Sequence: Synthetic oligonucleotide
  Antisense strand to SEQ ID NO: 543121
uuucuugugccgcagaacc

SEQ ID NO: 543123 - RNA, 19 nt, Artificial Sequence
  Description of Artificial Sequence: Synthetic oligonucleotide
  Sense strand starting at position 937 of SEQ ID NO: 318183
agguuauuucccuguccga

SEQ ID NO: 543124 - RNA, 19 nt, Artificial Sequence
  Description of Artificial Sequence: Synthetic oligonucleotide
  Antisense strand to SEQ ID NO: 543123
ucggacagggaaauaaccu

SEQ ID NO: 543125 - RNA, 19 nt, Artificial Sequence
  Description of Artificial Sequence: Synthetic oligonucleotide
  Sense strand starting at position 2193 of SEQ ID NO: 318183
ccacucuguacugggaaga

SEQ ID NO: 543126 - RNA, 19 nt, Artificial Sequence
  Description of Artificial Sequence: Synthetic oligonucleotide
  Antisense strand to SEQ ID NO: 543125
ucuucccaguacagagugg

SEQ ID NO: 543127 - RNA, 19 nt, Artificial Sequence
  Description of Artificial Sequence: Synthetic oligonucleotide
  Sense strand starting at position 2219 of SEQ ID NO: 318183
cgcuguguggcauugugua

SEQ ID NO: 543128 - RNA, 19 nt, Artificial Sequence
  Description of Artificial Sequence: Synthetic oligonucleotide
  Antisense strand to SEQ ID NO: 543127
uacacaaugccacacagcg

SEQ ID NO: 543129 - RNA, 19 nt, Artificial Sequence
  Description of Artificial Sequence: Synthetic oligonucleotide
  Sense strand starting at position 2307 of SEQ ID NO: 318183
uaauaaugccaagagcgaa

SEQ ID NO: 543130 - RNA, 19 nt, Artificial Sequence
  Description of Artificial Sequence: Synthetic oligonucleotide
  Antisense strand to SEQ ID NO: 543129
uucgcucuuggcauuauua

SEQ ID NO: 543131 - RNA, 19 nt, Artificial Sequence
  Description of Artificial Sequence: Synthetic oligonucleotide
  Sense strand starting at position 2329 of SEQ ID NO: 318183
aauagauggucucauuuga

SEQ ID NO: 543132 - RNA, 19 nt, Artificial Sequence
  Description of Artificial Sequence: Synthetic oligonucleotide
  Antisense strand to SEQ ID NO: 543131
ucaaaugagaccaucuauu

SEQ ID NO: 543133 - RNA, 19 nt, Artificial Sequence
  Description of Artificial Sequence: Synthetic oligonucleotide
  Sense strand starting at position 2422 of SEQ ID NO: 318183
cucauagaguuaucuuaca

SEQ ID NO: 543134 - RNA, 19 nt, Artificial Sequence
  Description of Artificial Sequence: Synthetic oligonucleotide
  Antisense strand to SEQ ID NO: 543133
uguaagauaacucuaugag

SEQ ID NO: 543135 - RNA, 19 nt, Artificial Sequence
  Description of Artificial Sequence: Synthetic oligonucleotide
  Sense strand starting at position 2465 of SEQ ID NO: 318183
caguuaggacaaugucuga

SEQ ID NO: 543136 - RNA, 19 nt, Artificial Sequence
  Description of Artificial Sequence: Synthetic oligonucleotide
  Antisense strand to SEQ ID NO: 543135
ucagacauuguccuaacug

SEQ ID NO: 543137 - RNA, 19 nt, Artificial Sequence
  Description of Artificial Sequence: Synthetic oligonucleotide
  Sense strand starting at position 2487 of SEQ ID NO: 318183
cuaguaagugcucaacaac

SEQ ID NO: 543138 - RNA, 19 nt, Artificial Sequence
  Description of Artificial Sequence: Synthetic oligonucleotide
  Antisense strand to SEQ ID NO: 543137
guuguugagcacuuacuag

SEQ ID NO: 543139 - RNA, 19 nt, Artificial Sequence
  Description of Artificial Sequence: Synthetic oligonucleotide
  Sense strand starting at position 2490 of SEQ ID NO: 318183
guaagugcucaacaacugu

SEQ ID NO: 543140 - RNA, 19 nt, Artificial Sequence
  Description of Artificial Sequence: Synthetic oligonucleotide
  Antisense strand to SEQ ID NO: 543139
acaguuguugagcacuuac

SEQ ID NO: 543141 - RNA, 19 nt, Artificial Sequence
  Description of Artificial Sequence: Synthetic oligonucleotide
  Sense strand starting at position 2684 of SEQ ID NO: 318183
auuugugguuucgugaaug

SEQ ID NO: 543142 - RNA, 19 nt, Artificial Sequence
  Description of Artificial Sequence: Synthetic oligonucleotide
  Antisense strand to SEQ ID NO: 543141
cauucacgaaaccacaaau

SEQ ID NO: 543143 - RNA, 19 nt, Artificial Sequence
  Description of Artificial Sequence: Synthetic oligonucleotide
  Sense strand starting at position 2690 of SEQ ID NO: 318183
gguuucgugaaugacucau

SEQ ID NO: 543144 - RNA, 19 nt, Artificial Sequence
  Description of Artificial Sequence: Synthetic oligonucleotide
  Antisense strand to SEQ ID NO: 543143
augagucauucacgaaacc

SEQ ID NO: 543145 - RNA, 19 nt, Artificial Sequence
  Description of Artificial Sequence: Synthetic oligonucleotide
  Sense strand starting at position 2692 of SEQ ID NO: 318183
uuucgugaaugacucauua

SEQ ID NO: 543146 - RNA, 19 nt, Artificial Sequence
  Description of Artificial Sequence: Synthetic oligonucleotide
  Antisense strand to SEQ ID NO: 543145
uaaugagucauucacgaaa

SEQ ID NO: 543147 - RNA, 19 nt, Artificial Sequence
  Description of Artificial Sequence: Synthetic oligonucleotide
  Sense strand starting at position 2696 of SEQ ID NO: 318183
gugaaugacucauuauucu

SEQ ID NO: 543148 - RNA, 19 nt, Artificial Sequence
  Description of Artificial Sequence: Synthetic oligonucleotide
  Antisense strand to SEQ ID NO: 543147
agaauaaugagucauucac

SEQ ID NO: 543149 - RNA, 19 nt, Artificial Sequence
  Description of Artificial Sequence: Synthetic oligonucleotide
  Sense strand starting at position 2705 of SEQ ID NO: 318183
ucauuauucuguccuggau

SEQ ID NO: 543150 - RNA, 19 nt, Artificial Sequence
  Description of Artificial Sequence: Synthetic oligonucleotide
  Antisense strand to SEQ ID NO: 543149
auccaggacagaauaauga

SEQ ID NO: 543151 - RNA, 19 nt, Artificial Sequence
  Description of Artificial Sequence: Synthetic oligonucleotide
  Sense strand starting at position 2830 of SEQ ID NO: 318183
cuggauuggacuugugacu

SEQ ID NO: 543152 - RNA, 19 nt, Artificial Sequence
  Description of Artificial Sequence: Synthetic oligonucleotide
  Antisense strand to SEQ ID NO: 543151
agucacaaguccaauccag

SEQ ID NO: 543153 - RNA, 19 nt, Artificial Sequence
  Description of Artificial Sequence: Synthetic oligonucleotide
  Sense strand starting at position 2857 of SEQ ID NO: 318183
uucugagacuagguuagaa

SEQ ID NO: 543154 - RNA, 19 nt, Artificial Sequence
  Description of Artificial Sequence: Synthetic oligonucleotide
  Antisense strand to SEQ ID NO: 543153
uucuaaccuagucucagaa

SEQ ID NO: 543155 - RNA, 19 nt, Artificial Sequence
  Description of Artificial Sequence: Synthetic oligonucleotide
  Sense strand starting at position 2897 of SEQ ID NO: 318183
ggcucucucccuugggaca

SEQ ID NO: 543156 - RNA, 19 nt, Artificial Sequence
  Description of Artificial Sequence: Synthetic oligonucleotide
  Antisense strand to SEQ ID NO: 543155
ugucccaagggagagagcc

SEQ ID NO: 543157 - RNA, 19 nt, Artificial Sequence
  Description of Artificial Sequence: Synthetic oligonucleotide
  Sense strand starting at position 2980 of SEQ ID NO: 318183
gcagaaagaccauguaaag

SEQ ID NO: 543158 - RNA, 19 nt, Artificial Sequence
  Description of Artificial Sequence: Synthetic oligonucleotide
  Antisense strand to SEQ ID NO: 543157
cuuuacauggucuuucugc

SEQ ID NO: 543159 - RNA, 19 nt, Artificial Sequence
  Description of Artificial Sequence: Synthetic oligonucleotide
  Sense strand starting at position 3029 of SEQ ID NO: 318183
guucuagcccuggaucuua

SEQ ID NO: 543160 - RNA, 19 nt, Artificial Sequence
  Description of Artificial Sequence: Synthetic oligonucleotide
  Antisense strand to SEQ ID NO: 543159
uaagauccagggcuagaac

SEQ ID NO: 543161 - RNA, 19 nt, Artificial Sequence
  Description of Artificial Sequence: Synthetic oligonucleotide
  Sense strand starting at position 3067 of SEQ ID NO: 318183
gccagacaugagugagaga

SEQ ID NO: 543162 - RNA, 19 nt, Artificial Sequence
  Description of Artificial Sequence: Synthetic oligonucleotide
  Antisense strand to SEQ ID NO: 543161
ucucucacucaugucuggc

SEQ ID NO: 543163 - RNA, 19 nt, Artificial Sequence
  Description of Artificial Sequence: Synthetic oligonucleotide
  Sense strand starting at position 3070 of SEQ ID NO: 318183
agacaugagugagagauga

SEQ ID NO: 543164 - RNA, 19 nt, Artificial Sequence
  Description of Artificial Sequence: Synthetic oligonucleotide
  Antisense strand to SEQ ID NO: 543163
ucaucucucacucaugucu

SEQ ID NO: 543165 - RNA, 19 nt, Artificial Sequence
  Description of Artificial Sequence: Synthetic oligonucleotide
  Sense strand starting at position 3083 of SEQ ID NO: 318183
agaugaugcuagcucuaga

SEQ ID NO: 543166 - RNA, 19 nt, Artificial Sequence
  Description of Artificial Sequence: Synthetic oligonucleotide
  Antisense strand to SEQ ID NO: 543165
ucuagagcuagcaucaucu

SEQ ID NO: 543167 - RNA, 19 nt, Artificial Sequence
  Description of Artificial Sequence: Synthetic oligonucleotide
  Sense strand starting at position 3233 of SEQ ID NO: 318183
ggaacaaguccauaugucu

SEQ ID NO: 543168 - RNA, 19 nt, Artificial Sequence
  Description of Artificial Sequence: Synthetic oligonucleotide
  Antisense strand to SEQ ID NO: 543167
agacauauggacuuguucc

SEQ ID NO: 543169 - RNA, 19 nt, Artificial Sequence
  Description of Artificial Sequence: Synthetic oligonucleotide
  Sense strand starting at position 3241 of SEQ ID NO: 318183
uccauaugucuugggaaug

SEQ ID NO: 543170 - RNA, 19 nt, Artificial Sequence
  Description of Artificial Sequence: Synthetic oligonucleotide
  Antisense strand to SEQ ID NO: 543169
cauucccaagacauaugga

SEQ ID NO: 543171 - RNA, 19 nt, Artificial Sequence
  Description of Artificial Sequence: Synthetic oligonucleotide
  Sense strand starting at position 3255 of SEQ ID NO: 318183
gaaugucugcuaggucaga

SEQ ID NO: 543172 - RNA, 19 nt, Artificial Sequence
  Description of Artificial Sequence: Synthetic oligonucleotide
  Antisense strand to SEQ ID NO: 543171
ucugaccuagcagacauuc

SEQ ID NO: 543173 - RNA, 19 nt, Artificial Sequence
  Description of Artificial Sequence: Synthetic oligonucleotide
  Sense strand starting at position 3256 of SEQ ID NO: 318183
aaugucugcuaggucagaa

SEQ ID NO: 543174 - RNA, 19 nt, Artificial Sequence
  Description of Artificial Sequence: Synthetic oligonucleotide
  Antisense strand to SEQ ID NO: 543173
uucugaccuagcagacauu

SEQ ID NO: 543175 - RNA, 19 nt, Artificial Sequence
  Description of Artificial Sequence: Synthetic oligonucleotide
  Sense strand starting at position 3278 of SEQ ID NO: 318183
aggaaucucugcucucuuu

SEQ ID NO: 543176 - RNA, 19 nt, Artificial Sequence
  Description of Artificial Sequence: Synthetic oligonucleotide
  Antisense strand to SEQ ID NO: 543175
aaagagagcagagauuccu

SEQ ID NO: 543177 - RNA, 19 nt, Artificial Sequence
  Description of Artificial Sequence: Synthetic oligonucleotide
  Sense strand starting at position 3422 of SEQ ID NO: 318183
ugggacuagugacuuuaua

SEQ ID NO: 543178 - RNA, 19 nt, Artificial Sequence
  Description of Artificial Sequence: Synthetic oligonucleotide
  Antisense strand to SEQ ID NO: 543177
uauaaagucacuaguccca

SEQ ID NO: 543179 - RNA, 19 nt, Artificial Sequence
  Description of Artificial Sequence: Synthetic oligonucleotide
  Sense strand starting at position 3836 of SEQ ID NO: 318183
ugguuaaauggucauaauc

SEQ ID NO: 543180 - RNA, 19 nt, Artificial Sequence
  Description of Artificial Sequence: Synthetic oligonucleotide
  Antisense strand to SEQ ID NO: 543179
gauuaugaccauuuaacca

SEQ ID NO: 543181 - RNA, 19 nt, Artificial Sequence
  Description of Artificial Sequence: Synthetic oligonucleotide
  Sense strand starting at position 3847 of SEQ ID NO: 318183
ucauaaucagaaugcugau

SEQ ID NO: 543182 - RNA, 19 nt, Artificial Sequence
  Description of Artificial Sequence: Synthetic oligonucleotide
  Antisense strand to SEQ ID NO: 543181
aucagcauucugauuauga

SEQ ID NO: 543183 - RNA, 19 nt, Artificial Sequence
  Description of Artificial Sequence: Synthetic oligonucleotide
  Sense strand starting at position 3854 of SEQ ID NO: 318183
cagaaugcugauggaacua

SEQ ID NO: 543184 - RNA, 19 nt, Artificial Sequence
  Description of Artificial Sequence: Synthetic oligonucleotide
  Antisense strand to SEQ ID NO: 543183
uaguuccaucagcauucug

SEQ ID NO: 543185 - RNA, 19 nt, Artificial Sequence
  Description of Artificial Sequence: Synthetic oligonucleotide
  Sense strand starting at position 3979 of SEQ ID NO: 318183
ugaacuguucuaugccuga

SEQ ID NO: 543186 - RNA, 19 nt, Artificial Sequence
  Description of Artificial Sequence: Synthetic oligonucleotide
  Antisense strand to SEQ ID NO: 543185
ucaggcauagaacaguuca

SEQ ID NO: 543187 - RNA, 19 nt, Artificial Sequence
  Description of Artificial Sequence: Synthetic oligonucleotide
  Sense strand starting at position 89 of SEQ ID NO: 318184
uugagucuucuacaucaca

SEQ ID NO: 543188 - RNA, 19 nt, Artificial Sequence
  Description of Artificial Sequence: Synthetic oligonucleotide
  Antisense strand to SEQ ID NO: 543187
ugugauguagaagacucaa

SEQ ID NO: 543189 - RNA, 19 nt, Artificial Sequence
  Description of Artificial Sequence: Synthetic oligonucleotide
  Sense strand starting at position 370 of SEQ ID NO: 318184
caccauugguagucugaca

SEQ ID NO: 543190 - RNA, 19 nt, Artificial Sequence
  Description of Artificial Sequence: Synthetic oligonucleotide
  Antisense strand to SEQ ID NO: 543189
ugucagacuaccaauggug

SEQ ID NO: 543191 - RNA, 19 nt, Artificial Sequence
  Description of Artificial Sequence: Synthetic oligonucleotide
  Sense strand starting at position 378 of SEQ ID NO: 318184
guagucugacaucaccauu

SEQ ID NO: 543192 - RNA, 19 nt, Artificial Sequence
  Description of Artificial Sequence: Synthetic oligonucleotide
  Antisense strand to SEQ ID NO: 543191
aauggugaugucagacuac

SEQ ID NO: 543193 - RNA, 19 nt, Artificial Sequence
  Description of Artificial Sequence: Synthetic oligonucleotide
  Sense strand starting at position 381 of SEQ ID NO: 318184
gucugacaucaccauuauc

SEQ ID NO: 543194 - RNA, 19 nt, Artificial Sequence
  Description of Artificial Sequence: Synthetic oligonucleotide
  Antisense strand to SEQ ID NO: 543193
gauaauggugaugucagac

SEQ ID NO: 543195 - RNA, 19 nt, Artificial Sequence
  Description of Artificial Sequence: Synthetic oligonucleotide
  Sense strand starting at position 496 of SEQ ID NO: 318184
ccauaaauggcucagugau

SEQ ID NO: 543196 - RNA, 19 nt, Artificial Sequence
  Description of Artificial Sequence: Synthetic oligonucleotide
  Antisense strand to SEQ ID NO: 543195
aucacugagccauuuaugg

SEQ ID NO: 543197 - RNA, 19 nt, Artificial Sequence
  Description of Artificial Sequence: Synthetic oligonucleotide
  Sense strand starting at position 679 of SEQ ID NO: 318184
gauggcuuugggcaucuua

SEQ ID NO: 543198 - RNA, 19 nt, Artificial Sequence
  Description of Artificial Sequence: Synthetic oligonucleotide
  Antisense strand to SEQ ID NO: 543197
uaagaugcccaaagccauc

SEQ ID NO: 543199 - RNA, 19 nt, Artificial Sequence
  Description of Artificial Sequence: Synthetic oligonucleotide
  Sense strand starting at position 805 of SEQ ID NO: 318184
gccucaaagacucaggagu

SEQ ID NO: 543200 - RNA, 19 nt, Artificial Sequence
  Description of Artificial Sequence: Synthetic oligonucleotide
  Antisense strand to SEQ ID NO: 543199
acuccugagucuuugaggc

SEQ ID NO: 543201 - RNA, 19 nt, Artificial Sequence
  Description of Artificial Sequence: Synthetic oligonucleotide
  Sense strand starting at position 1035 of SEQ ID NO: 318184
ggcuuaaacucaucgggaa

SEQ ID NO: 543202 - RNA, 19 nt, Artificial Sequence
  Description of Artificial Sequence: Synthetic oligonucleotide
  Antisense strand to SEQ ID NO: 543201
uucccgaugaguuuaagcc

SEQ ID NO: 543203 - RNA, 19 nt, Artificial Sequence
  Description of Artificial Sequence: Synthetic oligonucleotide
  Sense strand starting at position 1065 of SEQ ID NO: 318184
uuuaccgaucagggaaaua

SEQ ID NO: 543204 - RNA, 19 nt, Artificial Sequence
  Description of Artificial Sequence: Synthetic oligonucleotide
  Antisense strand to SEQ ID NO: 543203
uauuucccugaucgguaaa

SEQ ID NO: 543205 - RNA, 19 nt, Artificial Sequence
  Description of Artificial Sequence: Synthetic oligonucleotide
  Sense strand starting at position 1089 of SEQ ID NO: 318184
guguauauaaauuagugga

SEQ ID NO: 543206 - RNA, 19 nt, Artificial Sequence
  Description of Artificial Sequence: Synthetic oligonucleotide
  Antisense strand to SEQ ID NO: 543205
uccacuaauuuauauacac

SEQ ID NO: 543207 - RNA, 19 nt, Artificial Sequence
  Description of Artificial Sequence: Synthetic oligonucleotide
  Sense strand starting at position 1226 of SEQ ID NO: 318184
gucauuuccugaguagcac

SEQ ID NO: 543208 - RNA, 19 nt, Artificial Sequence
  Description of Artificial Sequence: Synthetic oligonucleotide
  Antisense strand to SEQ ID NO: 543207
gugcuacucaggaaaugac

SEQ ID NO: 543209 - RNA, 19 nt, Artificial Sequence
  Description of Artificial Sequence: Synthetic oligonucleotide
  Sense strand starting at position 1235 of SEQ ID NO: 318184
ugaguagcacuacaaguua

SEQ ID NO: 543210 - RNA, 19 nt, Artificial Sequence
  Description of Artificial Sequence: Synthetic oligonucleotide
  Antisense strand to SEQ ID NO: 543209
uaacuuguagugcuacuca

SEQ ID NO: 543211 - RNA, 19 nt, Artificial Sequence
  Description of Artificial Sequence: Synthetic oligonucleotide
  Sense strand starting at position 2013 of SEQ ID NO: 318184
ucuggaguuguaagugguu

SEQ ID NO: 543212 - RNA, 19 nt, Artificial Sequence
  Description of Artificial Sequence: Synthetic oligonucleotide
  Antisense strand to SEQ ID NO: 543211
aaccacuuacaacuccaga

SEQ ID NO: 543213 - RNA, 19 nt, Artificial Sequence
  Description of Artificial Sequence: Synthetic oligonucleotide
  Sense strand starting at position 2025 of SEQ ID NO: 318184
agugguuucugauugaaca

SEQ ID NO: 543214 - RNA, 19 nt, Artificial Sequence
  Description of Artificial Sequence: Synthetic oligonucleotide
  Antisense strand to SEQ ID NO: 543213
uguucaaucagaaaccacu

SEQ ID NO: 543215 - RNA, 19 nt, Artificial Sequence
  Description of Artificial Sequence: Synthetic oligonucleotide
  Sense strand starting at position 2172 of SEQ ID NO: 318184
aguucucugcaauaguaau

SEQ ID NO: 543216 - RNA, 19 nt, Artificial Sequence
  Description of Artificial Sequence: Synthetic oligonucleotide
  Antisense strand to SEQ ID NO: 543215
auuacuauugcagagaacu

SEQ ID NO: 543217 - RNA, 19 nt, Artificial Sequence
  Description of Artificial Sequence: Synthetic oligonucleotide
  Sense strand starting at position 2178 of SEQ ID NO: 318184
cugcaauaguaauuaagga

SEQ ID NO: 543218 - RNA, 19 nt, Artificial Sequence
  Description of Artificial Sequence: Synthetic oligonucleotide
  Antisense strand to SEQ ID NO: 543217
uccuuaauuacuauugcag

SEQ ID NO: 543219 - RNA, 19 nt, Artificial Sequence
  Description of Artificial Sequence: Synthetic oligonucleotide
  Sense strand starting at position 2237 of SEQ ID NO: 318184
ugaauaaucgugcaggaaa

SEQ ID NO: 543220 - RNA, 19 nt, Artificial Sequence
  Description of Artificial Sequence: Synthetic oligonucleotide
  Antisense strand to SEQ ID NO: 543219
uuuccugcacgauuauuca

SEQ ID NO: 543221 - RNA, 19 nt, Artificial Sequence
  Description of Artificial Sequence: Synthetic oligonucleotide
  Sense strand starting at position 2240 of SEQ ID NO: 318184
auaaucgugcaggaaauua

SEQ ID NO: 543222 - RNA, 19 nt, Artificial Sequence
  Description of Artificial Sequence: Synthetic oligonucleotide
  Antisense strand to SEQ ID NO: 543221
uaauuuccugcacgauuau

SEQ ID NO: 543223 - RNA, 19 nt, Artificial Sequence
  Description of Artificial Sequence: Synthetic oligonucleotide
  Sense strand starting at position 2304 of SEQ ID NO: 318184
agccgcuuuccaugauuua

SEQ ID NO: 543224 - RNA, 19 nt, Artificial Sequence
  Description of Artificial Sequence: Synthetic oligonucleotide
  Antisense strand to SEQ ID NO: 543223
uaaaucauggaaagcggcu

SEQ ID NO: 543225 - RNA, 19 nt, Artificial Sequence
  Description of Artificial Sequence: Synthetic oligonucleotide
  Sense strand starting at position 2305 of SEQ ID NO: 318184
gccgcuuuccaugauuuaa

SEQ ID NO: 543226 - RNA, 19 nt, Artificial Sequence
  Description of Artificial Sequence: Synthetic oligonucleotide
  Antisense strand to SEQ ID NO: 543225
uuaaaucauggaaagcggc

SEQ ID NO: 543227 - RNA, 19 nt, Artificial Sequence
  Description of Artificial Sequence: Synthetic oligonucleotide
  Sense strand starting at position 2419 of SEQ ID NO: 318184
cccuaaucagucuaaaguc

SEQ ID NO: 543228 - RNA, 19 nt, Artificial Sequence
  Description of Artificial Sequence: Synthetic oligonucleotide
  Antisense strand to SEQ ID NO: 543227
gacuuuagacugauuaggg

SEQ ID NO: 543229 - RNA, 19 nt, Artificial Sequence
  Description of Artificial Sequence: Synthetic oligonucleotide
  Sense strand starting at position 2501 of SEQ ID NO: 318184
ucugcauguccauaaugaa

SEQ ID NO: 543230 - RNA, 19 nt, Artificial Sequence
  Description of Artificial Sequence: Synthetic oligonucleotide
  Antisense strand to SEQ ID NO: 543229
uucauuauggacaugcaga

SEQ ID NO: 543231 - RNA, 19 nt, Artificial Sequence
  Description of Artificial Sequence: Synthetic oligonucleotide
  Sense strand starting at position 2539 of SEQ ID NO: 318184
gaaagaugucgauaggcuc

SEQ ID NO: 543232 - RNA, 19 nt, Artificial Sequence
  Description of Artificial Sequence: Synthetic oligonucleotide
  Antisense strand to SEQ ID NO: 543231
gagccuaucgacaucuuuc

SEQ ID NO: 543233 - RNA, 19 nt, Artificial Sequence
  Description of Artificial Sequence: Synthetic oligonucleotide
  Sense strand starting at position 2680 of SEQ ID NO: 318184
uggaguguggaguaugauu

SEQ ID NO: 543234 - RNA, 19 nt, Artificial Sequence
  Description of Artificial Sequence: Synthetic oligonucleotide
  Antisense strand to SEQ ID NO: 543233
aaucauacuccacacucca

SEQ ID NO: 543235 - RNA, 19 nt, Artificial Sequence
  Description of Artificial Sequence: Synthetic oligonucleotide
  Sense strand starting at position 2685 of SEQ ID NO: 318184
uguggaguaugauucagaa

SEQ ID NO: 543236 - RNA, 19 nt, Artificial Sequence
  Description of Artificial Sequence: Synthetic oligonucleotide
  Antisense strand to SEQ ID NO: 543235
uucugaaucauacuccaca

SEQ ID NO: 543237 - RNA, 19 nt, Artificial Sequence
  Description of Artificial Sequence: Synthetic oligonucleotide
  Sense strand starting at position 2760 of SEQ ID NO: 318184
cuuugaguucccgagguaa

SEQ ID NO: 543238 - RNA, 19 nt, Artificial Sequence
  Description of Artificial Sequence: Synthetic oligonucleotide
  Antisense strand to SEQ ID NO: 543237
uuaccucgggaacucaaag

SEQ ID NO: 543239 - RNA, 19 nt, Artificial Sequence
  Description of Artificial Sequence: Synthetic oligonucleotide
  Sense strand starting at position 2980 of SEQ ID NO: 318184
auaacagaacuuggcauau

SEQ ID NO: 543240 - RNA, 19 nt, Artificial Sequence
  Description of Artificial Sequence: Synthetic oligonucleotide
  Antisense strand to SEQ ID NO: 543239
auaugccaaguucuguuau

SEQ ID NO: 543241 - RNA, 19 nt, Artificial Sequence
  Description of Artificial Sequence: Synthetic oligonucleotide
  Sense strand starting at position 3089 of SEQ ID NO: 318184
gagugcaacuauuugcaua

SEQ ID NO: 543242 - RNA, 19 nt, Artificial Sequence
  Description of Artificial Sequence: Synthetic oligonucleotide
  Antisense strand to SEQ ID NO: 543241
uaugcaaauaguugcacuc

SEQ ID NO: 543243 - RNA, 19 nt, Artificial Sequence
  Description of Artificial Sequence: Synthetic oligonucleotide
  Sense strand starting at position 3091 of SEQ ID NO: 318184
gugcaacuauuugcauaua

SEQ ID NO: 543244 - RNA, 19 nt, Artificial Sequence
  Description of Artificial Sequence: Synthetic oligonucleotide
  Antisense strand to SEQ ID NO: 543243
uauaugcaaauaguugcac

SEQ ID NO: 543245 - RNA, 19 nt, Artificial Sequence
  Description of Artificial Sequence: Synthetic oligonucleotide
  Sense strand starting at position 3377 of SEQ ID NO: 318184
cccugaagguguuuauaga

SEQ ID NO: 543246 - RNA, 19 nt, Artificial Sequence
  Description of Artificial Sequence: Synthetic oligonucleotide
  Antisense strand to SEQ ID NO: 543245
ucuauaaacaccuucaggg

SEQ ID NO: 543247 - RNA, 19 nt, Artificial Sequence
  Description of Artificial Sequence: Synthetic oligonucleotide
  Sense strand starting at position 3378 of SEQ ID NO: 318184
ccugaagguguuuauagac

SEQ ID NO: 543248 - RNA, 19 nt, Artificial Sequence
  Description of Artificial Sequence: Synthetic oligonucleotide
  Antisense strand to SEQ ID NO: 543247
gucuauaaacaccuucagg

SEQ ID NO: 543249 - RNA, 19 nt, Artificial Sequence
  Description of Artificial Sequence: Synthetic oligonucleotide
  Sense strand starting at position 3526 of SEQ ID NO: 318184
agauucugugaaggaaucu

SEQ ID NO: 543250 - RNA, 19 nt, Artificial Sequence
  Description of Artificial Sequence: Synthetic oligonucleotide
  Antisense strand to SEQ ID NO: 543249
agauuccuucacagaaucu

SEQ ID NO: 543251 - RNA, 19 nt, Artificial Sequence
  Description of Artificial Sequence: Synthetic oligonucleotide
  Sense strand starting at position 3535 of SEQ ID NO: 318184
gaaggaaucuuagaagagg

SEQ ID NO: 543252 - RNA, 19 nt, Artificial Sequence
  Description of Artificial Sequence: Synthetic oligonucleotide
  Antisense strand to SEQ ID NO: 543251
ccucuucuaagauuccuuc

SEQ ID NO: 543253 - RNA, 19 nt, Artificial Sequence
  Description of Artificial Sequence: Synthetic oligonucleotide
  Sense strand starting at position 3561 of SEQ ID NO: 318184
ugaguugaccugugaagaa

SEQ ID NO: 543254 - RNA, 19 nt, Artificial Sequence
  Description of Artificial Sequence: Synthetic oligonucleotide
  Antisense strand to SEQ ID NO: 543253
uucuucacaggucaacuca

SEQ ID NO: 543255 - RNA, 19 nt, Artificial Sequence
  Description of Artificial Sequence: Synthetic oligonucleotide
  Sense strand starting at position 3625 of SEQ ID NO: 318184
gccacugugagagaaagua

SEQ ID NO: 543256 - RNA, 19 nt, Artificial Sequence
  Description of Artificial Sequence: Synthetic oligonucleotide
  Antisense strand to SEQ ID NO: 543255
uacuuucucucacaguggc

SEQ ID NO: 543257 - RNA, 19 nt, Artificial Sequence
  Description of Artificial Sequence: Synthetic oligonucleotide
  Sense strand starting at position 3701 of SEQ ID NO: 318184
agcauaagcugggugagaa

SEQ ID NO: 543258 - RNA, 19 nt, Artificial Sequence
  Description of Artificial Sequence: Synthetic oligonucleotide
  Antisense strand to SEQ ID NO: 543257
uucucacccagcuuaugcu

SEQ ID NO: 543259 - RNA, 19 nt, Artificial Sequence
  Description of Artificial Sequence: Synthetic oligonucleotide
  Sense strand starting at position 3702 of SEQ ID NO: 318184
gcauaagcugggugagaaa

SEQ ID NO: 543260 - RNA, 19 nt, Artificial Sequence
  Description of Artificial Sequence: Synthetic oligonucleotide
  Antisense strand to SEQ ID NO: 543259
uuucucacccagcuuaugc

SEQ ID NO: 543261 - RNA, 19 nt, Artificial Sequence
  Description of Artificial Sequence: Synthetic oligonucleotide
  Sense strand starting at position 3726 of SEQ ID NO: 318184
guuggugucagacagugaa

SEQ ID NO: 543262 - RNA, 19 nt, Artificial Sequence
  Description of Artificial Sequence: Synthetic oligonucleotide
  Antisense strand to SEQ ID NO: 543261
uucacugucugacaccaac

SEQ ID NO: 543263 - RNA, 19 nt, Artificial Sequence
  Description of Artificial Sequence: Synthetic oligonucleotide
  Sense strand starting at position 3730 of SEQ ID NO: 318184
gugucagacagugaacagu

SEQ ID NO: 543264 - RNA, 19 nt, Artificial Sequence
  Description of Artificial Sequence: Synthetic oligonucleotide
  Antisense strand to SEQ ID NO: 543263
acuguucacugucugacac

SEQ ID NO: 543265 - RNA, 19 nt, Artificial Sequence
  Description of Artificial Sequence: Synthetic oligonucleotide
  Sense strand starting at position 3772 of SEQ ID NO: 318184
gggccuucucaauaggcaa

SEQ ID NO: 543266 - RNA, 19 nt, Artificial Sequence
  Description of Artificial Sequence: Synthetic oligonucleotide
  Antisense strand to SEQ ID NO: 543265
uugccuauugagaaggccc

SEQ ID NO: 543267 - RNA, 19 nt, Artificial Sequence
  Description of Artificial Sequence: Synthetic oligonucleotide
  Sense strand starting at position 153 of SEQ ID NO: 318185
aucuuugcuccucagguau

SEQ ID NO: 543268 - RNA, 19 nt, Artificial Sequence
  Description of Artificial Sequence: Synthetic oligonucleotide
  Antisense strand to SEQ ID NO: 543267
auaccugaggagcaaagau

SEQ ID NO: 543269 - RNA, 19 nt, Artificial Sequence
  Description of Artificial Sequence: Synthetic oligonucleotide
  Sense strand starting at position 366 of SEQ ID NO: 318185
ggaaucuaaauguggcuuu

SEQ ID NO: 543270 - RNA, 19 nt, Artificial Sequence
  Description of Artificial Sequence: Synthetic oligonucleotide
  Antisense strand to SEQ ID NO: 543269
aaagccacauuuagauucc

SEQ ID NO: 543271 - RNA, 19 nt, Artificial Sequence
  Description of Artificial Sequence: Synthetic oligonucleotide
  Sense strand starting at position 390 of SEQ ID NO: 318185
ggaagauccuccucuaucu

SEQ ID NO: 543272 - RNA, 19 nt, Artificial Sequence
  Description of Artificial Sequence: Synthetic oligonucleotide
  Antisense strand to SEQ ID NO: 543271
agauagaggaggaucuucc

SEQ ID NO: 543273 - RNA, 19 nt, Artificial Sequence
  Description of Artificial Sequence: Synthetic oligonucleotide
  Sense strand starting at position 513 of SEQ ID NO: 318185
guaccuauguucuuguaac

SEQ ID NO: 543274 - RNA, 19 nt, Artificial Sequence
  Description of Artificial Sequence: Synthetic oligonucleotide
  Antisense strand to SEQ ID NO: 543273
guuacaagaacauagguac

SEQ ID NO: 543275 - RNA, 19 nt, Artificial Sequence
  Description of Artificial Sequence: Synthetic oligonucleotide
  Sense strand starting at position 523 of SEQ ID NO: 318185
ucuuguaacucucuugguu

SEQ ID NO: 543276 - RNA, 19 nt, Artificial Sequence
  Description of Artificial Sequence: Synthetic oligonucleotide
  Antisense strand to SEQ ID NO: 543275
aaccaagagaguuacaaga

SEQ ID NO: 543277 - RNA, 19 nt, Artificial Sequence
  Description of Artificial Sequence: Synthetic oligonucleotide
  Sense strand starting at position 526 of SEQ ID NO: 318185
uguaacucucuugguuuau

SEQ ID NO: 543278 - RNA, 19 nt, Artificial Sequence
  Description of Artificial Sequence: Synthetic oligonucleotide
  Antisense strand to SEQ ID NO: 543277
auaaaccaagagaguuaca

SEQ ID NO: 543279 - RNA, 19 nt, Artificial Sequence
  Description of Artificial Sequence: Synthetic oligonucleotide
  Sense strand starting at position 527 of SEQ ID NO: 318185
guaacucucuugguuuaua

SEQ ID NO: 543280 - RNA, 19 nt, Artificial Sequence
  Description of Artificial Sequence: Synthetic oligonucleotide
  Antisense strand to SEQ ID NO: 543279
uauaaaccaagagaguuac

SEQ ID NO: 543281 - RNA, 19 nt, Artificial Sequence
  Description of Artificial Sequence: Synthetic oligonucleotide
  Sense strand starting at position 579 of SEQ ID NO: 318185
gccagcucuuacccaagau

SEQ ID NO: 543282 - RNA, 19 nt, Artificial Sequence
  Description of Artificial Sequence: Synthetic oligonucleotide
  Antisense strand to SEQ ID NO: 543281
aucuuggguaagagcuggc

SEQ ID NO: 543283 - RNA, 19 nt, Artificial Sequence
  Description of Artificial Sequence: Synthetic oligonucleotide
  Sense strand starting at position 622 of SEQ ID NO: 318185
gguagcuuucuguaaccac

SEQ ID NO: 543284 - RNA, 19 nt, Artificial Sequence
  Description of Artificial Sequence: Synthetic oligonucleotide
  Antisense strand to SEQ ID NO: 543283
gugguuacagaaagcuacc

SEQ ID NO: 543285 - RNA, 19 nt, Artificial Sequence
  Description of Artificial Sequence: Synthetic oligonucleotide
  Sense strand starting at position 813 of SEQ ID NO: 318185
caaacaauuguguguuguu

SEQ ID NO: 543286 - RNA, 19 nt, Artificial Sequence
  Description of Artificial Sequence: Synthetic oligonucleotide
  Antisense strand to SEQ ID NO: 543285
aacaacacacaauuguuug

SEQ ID NO: 543287 - RNA, 19 nt, Artificial Sequence
  Description of Artificial Sequence: Synthetic oligonucleotide
  Sense strand starting at position 814 of SEQ ID NO: 318185
aaacaauuguguguuguuu

SEQ ID NO: 543288 - RNA, 19 nt, Artificial Sequence
  Description of Artificial Sequence: Synthetic oligonucleotide
  Antisense strand to SEQ ID NO: 543287
aaacaacacacaauuguuu

SEQ ID NO: 543289 - RNA, 19 nt, Artificial Sequence
  Description of Artificial Sequence: Synthetic oligonucleotide
  Sense strand starting at position 836 of SEQ ID NO: 318185
cuauuuagauguuaucugu

SEQ ID NO: 543290 - RNA, 19 nt, Artificial Sequence
  Description of Artificial Sequence: Synthetic oligonucleotide
  Antisense strand to SEQ ID NO: 543289
acagauaacaucuaaauag

SEQ ID NO: 543291 - RNA, 19 nt, Artificial Sequence
  Description of Artificial Sequence: Synthetic oligonucleotide
  Sense strand starting at position 844 of SEQ ID NO: 318185
auguuaucuguauaggcuu

SEQ ID NO: 543292 - RNA, 19 nt, Artificial Sequence
  Description of Artificial Sequence: Synthetic oligonucleotide
  Antisense strand to SEQ ID NO: 543291
aagccuauacagauaacau

SEQ ID NO: 543293 - RNA, 19 nt, Artificial Sequence
  Description of Artificial Sequence: Synthetic oligonucleotide
  Sense strand starting at position 847 of SEQ ID NO: 318185
uuaucuguauaggcuuaga

SEQ ID NO: 543294 - RNA, 19 nt, Artificial Sequence
  Description of Artificial Sequence: Synthetic oligonucleotide
  Antisense strand to SEQ ID NO: 543293
ucuaagccuauacagauaa

SEQ ID NO: 543295 - RNA, 19 nt, Artificial Sequence
  Description of Artificial Sequence: Synthetic oligonucleotide
  Sense strand starting at position 850 of SEQ ID NO: 318185
ucuguauaggcuuagaaau

SEQ ID NO: 543296 - RNA, 19 nt, Artificial Sequence
  Description of Artificial Sequence: Synthetic oligonucleotide
  Antisense strand to SEQ ID NO: 543295
auuucuaagccuauacaga

SEQ ID NO: 543297 - RNA, 19 nt, Artificial Sequence
  Description of Artificial Sequence: Synthetic oligonucleotide
  Sense strand starting at position 857 of SEQ ID NO: 318185
aggcuuagaaaucguggga

SEQ ID NO: 543298 - RNA, 19 nt, Artificial Sequence
  Description of Artificial Sequence: Synthetic oligonucleotide
  Antisense strand to SEQ ID NO: 543297
ucccacgauuucuaagccu

SEQ ID NO: 543299 - RNA, 19 nt, Artificial Sequence
  Description of Artificial Sequence: Synthetic oligonucleotide
  Sense strand starting at position 860 of SEQ ID NO: 318185
cuuagaaaucgugggaaca

SEQ ID NO: 543300 - RNA, 19 nt, Artificial Sequence
  Description of Artificial Sequence: Synthetic oligonucleotide
  Antisense strand to SEQ ID NO: 543299
uguucccacgauuucuaag

SEQ ID NO: 543301 - RNA, 19 nt, Artificial Sequence
  Description of Artificial Sequence: Synthetic oligonucleotide
  Sense strand starting at position 861 of SEQ ID NO: 318185
uuagaaaucgugggaacac

SEQ ID NO: 543302 - RNA, 19 nt, Artificial Sequence
  Description of Artificial Sequence: Synthetic oligonucleotide
  Antisense strand to SEQ ID NO: 543301
guguucccacgauuucuaa

SEQ ID NO: 543303 - RNA, 19 nt, Artificial Sequence
  Description of Artificial Sequence: Synthetic oligonucleotide
  Sense strand starting at position 862 of SEQ ID NO: 318185
uagaaaucgugggaacaca

SEQ ID NO: 543304 - RNA, 19 nt, Artificial Sequence
  Description of Artificial Sequence: Synthetic oligonucleotide
  Antisense strand to SEQ ID NO: 543303
uguguucccacgauuucua

SEQ ID NO: 543305 - RNA, 19 nt, Artificial Sequence
  Description of Artificial Sequence: Synthetic oligonucleotide
  Sense strand starting at position 870 of SEQ ID NO: 318185
gugggaacacagugaaauu

SEQ ID NO: 543306 - RNA, 19 nt, Artificial Sequence
  Description of Artificial Sequence: Synthetic oligonucleotide
  Antisense strand to SEQ ID NO: 543305
aauuucacuguguucccac

SEQ ID NO: 543307 - RNA, 19 nt, Artificial Sequence
  Description of Artificial Sequence: Synthetic oligonucleotide
  Sense strand starting at position 895 of SEQ ID NO: 318185
cucugauauuucgcaaguu

SEQ ID NO: 543308 - RNA, 19 nt, Artificial Sequence
  Description of Artificial Sequence: Synthetic oligonucleotide
  Antisense strand to SEQ ID NO: 543307
aacuugcgaaauaucagag

SEQ ID NO: 543309 - RNA, 19 nt, Artificial Sequence
  Description of Artificial Sequence: Synthetic oligonucleotide
  Sense strand starting at position 926 of SEQ ID NO: 318185
gccuuaugaugccuccuaa

SEQ ID NO: 543310 - RNA, 19 nt, Artificial Sequence
  Description of Artificial Sequence: Synthetic oligonucleotide
  Antisense strand to SEQ ID NO: 543309
uuaggaggcaucauaaggc

SEQ ID NO: 543311 - RNA, 19 nt, Artificial Sequence
  Description of Artificial Sequence: Synthetic oligonucleotide
  Sense strand starting at position 964 of SEQ ID NO: 318185
aagauacugugggauauuu

SEQ ID NO: 543312 - RNA, 19 nt, Artificial Sequence
  Description of Artificial Sequence: Synthetic oligonucleotide
  Antisense strand to SEQ ID NO: 543311
aaauaucccacaguaucuu

SEQ ID NO: 543313 - RNA, 19 nt, Artificial Sequence
  Description of Artificial Sequence: Synthetic oligonucleotide
  Sense strand starting at position 1613 of SEQ ID NO: 318185
acgugcgucacagaaucaa

SEQ ID NO: 543314 - RNA, 19 nt, Artificial Sequence
  Description of Artificial Sequence: Synthetic oligonucleotide
  Antisense strand to SEQ ID NO: 543313
uugauucugugacgcacgu

SEQ ID NO: 543315 - RNA, 19 nt, Artificial Sequence
  Description of Artificial Sequence: Synthetic oligonucleotide
  Sense strand starting at position 1648 of SEQ ID NO: 318185
gagagcagcaguuguugaa

SEQ ID NO: 543316 - RNA, 19 nt, Artificial Sequence
  Description of Artificial Sequence: Synthetic oligonucleotide
  Antisense strand to SEQ ID NO: 543315
uucaacaacugcugcucuc

SEQ ID NO: 543317 - RNA, 19 nt, Artificial Sequence
  Description of Artificial Sequence: Synthetic oligonucleotide
  Sense strand starting at position 2201 of SEQ ID NO: 318185
uguugacacagcgauagau

SEQ ID NO: 543318 - RNA, 19 nt, Artificial Sequence
  Description of Artificial Sequence: Synthetic oligonucleotide
  Antisense strand to SEQ ID NO: 543317
aucuaucgcugugucaaca

SEQ ID NO: 543319 - RNA, 19 nt, Artificial Sequence
  Description of Artificial Sequence: Synthetic oligonucleotide
  Sense strand starting at position 2250 of SEQ ID NO: 318185
ggagaauaagucuggaagc

SEQ ID NO: 543320 - RNA, 19 nt, Artificial Sequence
  Description of Artificial Sequence: Synthetic oligonucleotide
  Antisense strand to SEQ ID NO: 543319
gcuuccagacuuauucucc

SEQ ID NO: 543321 - RNA, 19 nt, Artificial Sequence
  Description of Artificial Sequence: Synthetic oligonucleotide
  Sense strand starting at position 2602 of SEQ ID NO: 318185
ucggguuugaggugagcau

SEQ ID NO: 543322 - RNA, 19 nt, Artificial Sequence
  Description of Artificial Sequence: Synthetic oligonucleotide
  Antisense strand to SEQ ID NO: 543321
augcucaccucaaacccga

SEQ ID NO: 543323 - RNA, 19 nt, Artificial Sequence
  Description of Artificial Sequence: Synthetic oligonucleotide
  Sense strand starting at position 2603 of SEQ ID NO: 318185
cggguuugaggugagcaua

SEQ ID NO: 543324 - RNA, 19 nt, Artificial Sequence
  Description of Artificial Sequence: Synthetic oligonucleotide
  Antisense strand to SEQ ID NO: 543323
uaugcucaccucaaacccg

SEQ ID NO: 543325 - RNA, 19 nt, Artificial Sequence
  Description of Artificial Sequence: Synthetic oligonucleotide
  Sense strand starting at position 2731 of SEQ ID NO: 318185
uucgguaaaucccugcuuu

SEQ ID NO: 543326 - RNA, 19 nt, Artificial Sequence
  Description of Artificial Sequence: Synthetic oligonucleotide
  Antisense strand to SEQ ID NO: 543325
aaagcagggauuuaccgaa

SEQ ID NO: 543327 - RNA, 19 nt, Artificial Sequence
  Description of Artificial Sequence: Synthetic oligonucleotide
  Sense strand starting at position 3255 of SEQ ID NO: 318185
gcacuauguagugacagau

SEQ ID NO: 543328 - RNA, 19 nt, Artificial Sequence
  Description of Artificial Sequence: Synthetic oligonucleotide
  Antisense strand to SEQ ID NO: 543327
aucugucacuacauagugc

SEQ ID NO: 543329 - RNA, 19 nt, Artificial Sequence
  Description of Artificial Sequence: Synthetic oligonucleotide
  Sense strand starting at position 3282 of SEQ ID NO: 318185
ucagcacuguggucuuaaa

SEQ ID NO: 543330 - RNA, 19 nt, Artificial Sequence
  Description of Artificial Sequence: Synthetic oligonucleotide
  Antisense strand to SEQ ID NO: 543329
uuuaagaccacagugcuga

SEQ ID NO: 543331 - RNA, 19 nt, Artificial Sequence
  Description of Artificial Sequence: Synthetic oligonucleotide
  Sense strand starting at position 3461 of SEQ ID NO: 318185
gcgucuacaccuggaggua

SEQ ID NO: 543332 - RNA, 19 nt, Artificial Sequence
  Description of Artificial Sequence: Synthetic oligonucleotide
  Antisense strand to SEQ ID NO: 543331
uaccuccagguguagacgc

SEQ ID NO: 543333 - RNA, 19 nt, Artificial Sequence
  Description of Artificial Sequence: Synthetic oligonucleotide
  Sense strand starting at position 3462 of SEQ ID NO: 318185
cgucuacaccuggagguaa

SEQ ID NO: 543334 - RNA, 19 nt, Artificial Sequence
  Description of Artificial Sequence: Synthetic oligonucleotide
  Antisense strand to SEQ ID NO: 543333
uuaccuccagguguagacg

SEQ ID NO: 543335 - RNA, 19 nt, Artificial Sequence
  Description of Artificial Sequence: Synthetic oligonucleotide
  Sense strand starting at position 3532 of SEQ ID NO: 318185
augauuucuuacugaacug

SEQ ID NO: 543336 - RNA, 19 nt, Artificial Sequence
  Description of Artificial Sequence: Synthetic oligonucleotide
  Antisense strand to SEQ ID NO: 543335
caguucaguaagaaaucau

SEQ ID NO: 543337 - RNA, 19 nt, Artificial Sequence
  Description of Artificial Sequence: Synthetic oligonucleotide
  Sense strand starting at position 3539 of SEQ ID NO: 318185
cuuacugaacuguguagga

SEQ ID NO: 543338 - RNA, 19 nt, Artificial Sequence
  Description of Artificial Sequence: Synthetic oligonucleotide
  Antisense strand to SEQ ID NO: 543337
uccuacacaguucaguaag

SEQ ID NO: 543339 - RNA, 19 nt, Artificial Sequence
  Description of Artificial Sequence: Synthetic oligonucleotide
  Sense strand starting at position 3625 of SEQ ID NO: 318185
uggacugagcaaugaacau

SEQ ID NO: 543340 - RNA, 19 nt, Artificial Sequence
  Description of Artificial Sequence: Synthetic oligonucleotide
  Antisense strand to SEQ ID NO: 543339
auguucauugcucagucca

SEQ ID NO: 543341 - RNA, 19 nt, Artificial Sequence
  Description of Artificial Sequence: Synthetic oligonucleotide
  Sense strand starting at position 3777 of SEQ ID NO: 318185
aagagaggguuugauauuu

SEQ ID NO: 543342 - RNA, 19 nt, Artificial Sequence
  Description of Artificial Sequence: Synthetic oligonucleotide
  Antisense strand to SEQ ID NO: 543341
aaauaucaaacccucucuu

SEQ ID NO: 543343 - RNA, 19 nt, Artificial Sequence
  Description of Artificial Sequence: Synthetic oligonucleotide
  Sense strand starting at position 3883 of SEQ ID NO: 318185
aggauaugauuccuugcuu

SEQ ID NO: 543344 - RNA, 19 nt, Artificial Sequence
  Description of Artificial Sequence: Synthetic oligonucleotide
  Antisense strand to SEQ ID NO: 543343
aagcaaggaaucauauccu

SEQ ID NO: 543345 - RNA, 19 nt, Artificial Sequence
  Description of Artificial Sequence: Synthetic oligonucleotide
  Sense strand starting at position 3884 of SEQ ID NO: 318185
ggauaugauuccuugcuuu

SEQ ID NO: 543346 - RNA, 19 nt, Artificial Sequence
  Description of Artificial Sequence: Synthetic oligonucleotide
  Antisense strand to SEQ ID NO: 543345
aaagcaaggaaucauaucc

SEQ ID NO: 543347 - RNA, 19 nt, Artificial Sequence
  Description of Artificial Sequence: Synthetic oligonucleotide
  Sense strand starting at position 17 of SEQ ID NO: 318186
guagaaucuguauacuuag

SEQ ID NO: 543348 - RNA, 19 nt, Artificial Sequence
  Description of Artificial Sequence: Synthetic oligonucleotide
  Antisense strand to SEQ ID NO: 543347
cuaaguauacagauucuac

SEQ ID NO: 543349 - RNA, 19 nt, Artificial Sequence
  Description of Artificial Sequence: Synthetic oligonucleotide
  Sense strand starting at position 347 of SEQ ID NO: 318186
uggucaauucuuuguagag

SEQ ID NO: 543350 - RNA, 19 nt, Artificial Sequence
  Description of Artificial Sequence: Synthetic oligonucleotide
  Antisense strand to SEQ ID NO: 543349
cucuacaaagaauugacca

SEQ ID NO: 543351 - RNA, 19 nt, Artificial Sequence
  Description of Artificial Sequence: Synthetic oligonucleotide
  Sense strand starting at position 702 of SEQ ID NO: 318186
gaaggacugucucugcaga

SEQ ID NO: 543352 - RNA, 19 nt, Artificial Sequence
  Description of Artificial Sequence: Synthetic oligonucleotide
  Antisense strand to SEQ ID NO: 543351
ucugcagagacaguccuuc

SEQ ID NO: 543353 - RNA, 19 nt, Artificial Sequence
  Description of Artificial Sequence: Synthetic oligonucleotide
  Sense strand starting at position 704 of SEQ ID NO: 318186
aggacugucucugcagaga

SEQ ID NO: 543354 - RNA, 19 nt, Artificial Sequence
  Description of Artificial Sequence: Synthetic oligonucleotide
  Antisense strand to SEQ ID NO: 543353
ucucugcagagacaguccu

SEQ ID NO: 543355 - RNA, 19 nt, Artificial Sequence
  Description of Artificial Sequence: Synthetic oligonucleotide
  Sense strand starting at position 707 of SEQ ID NO: 318186
acugucucugcagagaaga

SEQ ID NO: 543356 - RNA, 19 nt, Artificial Sequence
  Description of Artificial Sequence: Synthetic oligonucleotide
  Antisense strand to SEQ ID NO: 543355
ucuucucugcagagacagu

SEQ ID NO: 543357 - RNA, 19 nt, Artificial Sequence
  Description of Artificial Sequence: Synthetic oligonucleotide
  Sense strand starting at position 733 of SEQ ID NO: 318186
cugcaagauuacuuccaga

SEQ ID NO: 543358 - RNA, 19 nt, Artificial Sequence
  Description of Artificial Sequence: Synthetic oligonucleotide
  Antisense strand to SEQ ID NO: 543357
ucuggaaguaaucuugcag

SEQ ID NO: 543359 - RNA, 19 nt, Artificial Sequence
  Description of Artificial Sequence: Synthetic oligonucleotide
  Sense strand starting at position 738 of SEQ ID NO: 318186
agauuacuuccagaguccu

SEQ ID NO: 543360 - RNA, 19 nt, Artificial Sequence
  Description of Artificial Sequence: Synthetic oligonucleotide
  Antisense strand to SEQ ID NO: 543359
aggacucuggaaguaaucu

SEQ ID NO: 543361 - RNA, 19 nt, Artificial Sequence
  Description of Artificial Sequence: Synthetic oligonucleotide
  Sense strand starting at position 842 of SEQ ID NO: 318186
uuauauacccacggaauga

SEQ ID NO: 543362 - RNA, 19 nt, Artificial Sequence
  Description of Artificial Sequence: Synthetic oligonucleotide
  Antisense strand to SEQ ID NO: 543361
ucauuccguggguauauaa

SEQ ID NO: 543363 - RNA, 19 nt, Artificial Sequence
  Description of Artificial Sequence: Synthetic oligonucleotide
  Sense strand starting at position 1029 of SEQ ID NO: 318186
uguaucaaguuggucaaau

SEQ ID NO: 543364 - RNA, 19 nt, Artificial Sequence
  Description of Artificial Sequence: Synthetic oligonucleotide
  Antisense strand to SEQ ID NO: 543363
auuugaccaacuugauaca

SEQ ID NO: 543365 - RNA, 19 nt, Artificial Sequence
  Description of Artificial Sequence: Synthetic oligonucleotide
  Sense strand starting at position 1030 of SEQ ID NO: 318186
guaucaaguuggucaaauc

SEQ ID NO: 543366 - RNA, 19 nt, Artificial Sequence
  Description of Artificial Sequence: Synthetic oligonucleotide
  Antisense strand to SEQ ID NO: 543365
gauuugaccaacuugauac

SEQ ID NO: 543367 - RNA, 19 nt, Artificial Sequence
  Description of Artificial Sequence: Synthetic oligonucleotide
  Sense strand starting at position 1081 of SEQ ID NO: 318186
cuaggaugcaaguagaagu

SEQ ID NO: 543368 - RNA, 19 nt, Artificial Sequence
  Description of Artificial Sequence: Synthetic oligonucleotide
  Antisense strand to SEQ ID NO: 543367
acuucuacuugcauccuag

SEQ ID NO: 543369 - RNA, 19 nt, Artificial Sequence
  Description of Artificial Sequence: Synthetic oligonucleotide
  Sense strand starting at position 1976 of SEQ ID NO: 318186
cgaggaggugcugagagau

SEQ ID NO: 543370 - RNA, 19 nt, Artificial Sequence
  Description of Artificial Sequence: Synthetic oligonucleotide
  Antisense strand to SEQ ID NO: 543369
aucucucagcaccuccucg

SEQ ID NO: 543371 - RNA, 19 nt, Artificial Sequence
  Description of Artificial Sequence: Synthetic oligonucleotide
  Sense strand starting at position 2290 of SEQ ID NO: 318186
ggcaaaguuaacgauuauu

SEQ ID NO: 543372 - RNA, 19 nt, Artificial Sequence
  Description of Artificial Sequence: Synthetic oligonucleotide
  Antisense strand to SEQ ID NO: 543371
aauaaucguuaacuuugcc

SEQ ID NO: 543373 - RNA, 19 nt, Artificial Sequence
  Description of Artificial Sequence: Synthetic oligonucleotide
  Sense strand starting at position 2341 of SEQ ID NO: 318186
cgaaauaaacguggaguga

SEQ ID NO: 543374 - RNA, 19 nt, Artificial Sequence
  Description of Artificial Sequence: Synthetic oligonucleotide
  Antisense strand to SEQ ID NO: 543373
ucacuccacguuuauuucg

SEQ ID NO: 543375 - RNA, 19 nt, Artificial Sequence
  Description of Artificial Sequence: Synthetic oligonucleotide
  Sense strand starting at position 2414 of SEQ ID NO: 318186
guagaauaccggcagggau

SEQ ID NO: 543376 - RNA, 19 nt, Artificial Sequence
  Description of Artificial Sequence: Synthetic oligonucleotide
  Antisense strand to SEQ ID NO: 543375
aucccugccgguauucuac

SEQ ID NO: 543377 - RNA, 19 nt, Artificial Sequence
  Description of Artificial Sequence: Synthetic oligonucleotide
  Sense strand starting at position 2490 of SEQ ID NO: 318186
uggguccugacuuauggau

SEQ ID NO: 543378 - RNA, 19 nt, Artificial Sequence
  Description of Artificial Sequence: Synthetic oligonucleotide
  Antisense strand to SEQ ID NO: 543377
auccauaagucaggaccca

SEQ ID NO: 543379 - RNA, 19 nt, Artificial Sequence
  Description of Artificial Sequence: Synthetic oligonucleotide
  Sense strand starting at position 2502 of SEQ ID NO: 318186
uauggauuuccacgugguc

SEQ ID NO: 543380 - RNA, 19 nt, Artificial Sequence
  Description of Artificial Sequence: Synthetic oligonucleotide
  Antisense strand to SEQ ID NO: 543379
gaccacguggaaauccaua

SEQ ID NO: 543381 - RNA, 19 nt, Artificial Sequence
  Description of Artificial Sequence: Synthetic oligonucleotide
  Sense strand starting at position 2585 of SEQ ID NO: 318186
gcgugagcacagccuuuaa

SEQ ID NO: 543382 - RNA, 19 nt, Artificial Sequence
  Description of Artificial Sequence: Synthetic oligonucleotide
  Antisense strand to SEQ ID NO: 543381
uuaaaggcugugcucacgc

SEQ ID NO: 543383 - RNA, 19 nt, Artificial Sequence
  Description of Artificial Sequence: Synthetic oligonucleotide
  Sense strand starting at position 2604 of SEQ ID NO: 318186
aagaccguccguuaagaaa

SEQ ID NO: 543384 - RNA, 19 nt, Artificial Sequence
  Description of Artificial Sequence: Synthetic oligonucleotide
  Antisense strand to SEQ ID NO: 543383
uuucuuaacggacggucuu

SEQ ID NO: 543385 - RNA, 19 nt, Artificial Sequence
  Description of Artificial Sequence: Synthetic oligonucleotide
  Sense strand starting at position 2846 of SEQ ID NO: 318186
gagggaccuuucucaguac

SEQ ID NO: 543386 - RNA, 19 nt, Artificial Sequence
  Description of Artificial Sequence: Synthetic oligonucleotide
  Antisense strand to SEQ ID NO: 543385
guacugagaaaggucccuc

SEQ ID NO: 543387 - RNA, 19 nt, Artificial Sequence
  Description of Artificial Sequence: Synthetic oligonucleotide
  Sense strand starting at position 3014 of SEQ ID NO: 318186
aagguaauccaaugguaga

SEQ ID NO: 543388 - RNA, 19 nt, Artificial Sequence
  Description of Artificial Sequence: Synthetic oligonucleotide
  Antisense strand to SEQ ID NO: 543387
ucuaccauuggauuaccuu

SEQ ID NO: 543389 - RNA, 19 nt, Artificial Sequence
  Description of Artificial Sequence: Synthetic oligonucleotide
  Sense strand starting at position 3015 of SEQ ID NO: 318186
agguaauccaaugguagag

SEQ ID NO: 543390 - RNA, 19 nt, Artificial Sequence
  Description of Artificial Sequence: Synthetic oligonucleotide
  Antisense strand to SEQ ID NO: 543389
cucuaccauuggauuaccu

SEQ ID NO: 543391 - RNA, 19 nt, Artificial Sequence
  Description of Artificial Sequence: Synthetic oligonucleotide
  Sense strand starting at position 3033 of SEQ ID NO: 318186
gcuggaauagagugagaga

SEQ ID NO: 543392 - RNA, 19 nt, Artificial Sequence
  Description of Artificial Sequence: Synthetic oligonucleotide
  Antisense strand to SEQ ID NO: 543391
ucucucacucuauuccagc

SEQ ID NO: 543393 - RNA, 19 nt, Artificial Sequence
  Description of Artificial Sequence: Synthetic oligonucleotide
  Sense strand starting at position 3079 of SEQ ID NO: 318186
acugaauugaugugagguc

SEQ ID NO: 543394 - RNA, 19 nt, Artificial Sequence
  Description of Artificial Sequence: Synthetic oligonucleotide
  Antisense strand to SEQ ID NO: 543393
gaccucacaucaauucagu

SEQ ID NO: 543395 - RNA, 19 nt, Artificial Sequence
  Description of Artificial Sequence: Synthetic oligonucleotide
  Sense strand starting at position 3180 of SEQ ID NO: 318186
gcccuaggucuuuaggaaa

SEQ ID NO: 543396 - RNA, 19 nt, Artificial Sequence
  Description of Artificial Sequence: Synthetic oligonucleotide
  Antisense strand to SEQ ID NO: 543395
uuuccuaaagaccuagggc

SEQ ID NO: 543397 - RNA, 19 nt, Artificial Sequence
  Description of Artificial Sequence: Synthetic oligonucleotide
  Sense strand starting at position 3204 of SEQ ID NO: 318186
uuacacuggccucaauaga

SEQ ID NO: 543398 - RNA, 19 nt, Artificial Sequence
  Description of Artificial Sequence: Synthetic oligonucleotide
  Antisense strand to SEQ ID NO: 543397
ucuauugaggccaguguaa

SEQ ID NO: 543399 - RNA, 19 nt, Artificial Sequence
  Description of Artificial Sequence: Synthetic oligonucleotide
  Sense strand starting at position 3227 of SEQ ID NO: 318186
cugugaagaugagugagau

SEQ ID NO: 543400 - RNA, 19 nt, Artificial Sequence
  Description of Artificial Sequence: Synthetic oligonucleotide
  Antisense strand to SEQ ID NO: 543399
aucucacucaucuucacag

SEQ ID NO: 543401 - RNA, 19 nt, Artificial Sequence
  Description of Artificial Sequence: Synthetic oligonucleotide
  Sense strand starting at position 3228 of SEQ ID NO: 318186
ugugaagaugagugagauu

SEQ ID NO: 543402 - RNA, 19 nt, Artificial Sequence
  Description of Artificial Sequence: Synthetic oligonucleotide
  Antisense strand to SEQ ID NO: 543401
aaucucacucaucuucaca

SEQ ID NO: 543403 - RNA, 19 nt, Artificial Sequence
  Description of Artificial Sequence: Synthetic oligonucleotide
  Sense strand starting at position 3483 of SEQ ID NO: 318186
acaugcagaucgucacaaa

SEQ ID NO: 543404 - RNA, 19 nt, Artificial Sequence
  Description of Artificial Sequence: Synthetic oligonucleotide
  Antisense strand to SEQ ID NO: 543403
uuugugacgaucugcaugu

SEQ ID NO: 543405 - RNA, 19 nt, Artificial Sequence
  Description of Artificial Sequence: Synthetic oligonucleotide
  Sense strand starting at position 3522 of SEQ ID NO: 318186
uuccaaauauucgucaaug

SEQ ID NO: 543406 - RNA, 19 nt, Artificial Sequence
  Description of Artificial Sequence: Synthetic oligonucleotide
  Antisense strand to SEQ ID NO: 543405
cauugacgaauauuuggaa

SEQ ID NO: 543407 - RNA, 19 nt, Artificial Sequence
  Description of Artificial Sequence: Synthetic oligonucleotide
  Sense strand starting at position 3523 of SEQ ID NO: 318186
uccaaauauucgucaauga

SEQ ID NO: 543408 - RNA, 19 nt, Artificial Sequence
  Description of Artificial Sequence: Synthetic oligonucleotide
  Antisense strand to SEQ ID NO: 543407
ucauugacgaauauuugga

SEQ ID NO: 543409 - RNA, 19 nt, Artificial Sequence
  Description of Artificial Sequence: Synthetic oligonucleotide
  Sense strand starting at position 3524 of SEQ ID NO: 318186
ccaaauauucgucaaugag

SEQ ID NO: 543410 - RNA, 19 nt, Artificial Sequence
  Description of Artificial Sequence: Synthetic oligonucleotide
  Antisense strand to SEQ ID NO: 543409
cucauugacgaauauuugg

SEQ ID NO: 543411 - RNA, 19 nt, Artificial Sequence
  Description of Artificial Sequence: Synthetic oligonucleotide
  Sense strand starting at position 3539 of SEQ ID NO: 318186
ugaguucuaaguuggagua

SEQ ID NO: 543412 - RNA, 19 nt, Artificial Sequence
  Description of Artificial Sequence: Synthetic oligonucleotide
  Antisense strand to SEQ ID NO: 543411
uacuccaacuuagaacuca

SEQ ID NO: 543413 - RNA, 19 nt, Artificial Sequence
  Description of Artificial Sequence: Synthetic oligonucleotide
  Sense strand starting at position 3602 of SEQ ID NO: 318186
ggaauagcaugauuauaug

SEQ ID NO: 543414 - RNA, 19 nt, Artificial Sequence
  Description of Artificial Sequence: Synthetic oligonucleotide
  Antisense strand to SEQ ID NO: 543413
cauauaaucaugcuauucc

SEQ ID NO: 543415 - RNA, 19 nt, Artificial Sequence
  Description of Artificial Sequence: Synthetic oligonucleotide
  Sense strand starting at position 3621 of SEQ ID NO: 318186
acuccuaguguggaugauu

SEQ ID NO: 543416 - RNA, 19 nt, Artificial Sequence
  Description of Artificial Sequence: Synthetic oligonucleotide
  Antisense strand to SEQ ID NO: 543415
aaucauccacacuaggagu

SEQ ID NO: 543417 - RNA, 19 nt, Artificial Sequence
  Description of Artificial Sequence: Synthetic oligonucleotide
  Sense strand starting at position 3667 of SEQ ID NO: 318186
ggcugauuaauggagcaga

SEQ ID NO: 543418 - RNA, 19 nt, Artificial Sequence
  Description of Artificial Sequence: Synthetic oligonucleotide
  Antisense strand to SEQ ID NO: 543417
ucugcuccauuaaucagcc

SEQ ID NO: 543419 - RNA, 19 nt, Artificial Sequence
  Description of Artificial Sequence: Synthetic oligonucleotide
  Sense strand starting at position 3756 of SEQ ID NO: 318186
agcagagggcccuaauaau

SEQ ID NO: 543420 - RNA, 19 nt, Artificial Sequence
  Description of Artificial Sequence: Synthetic oligonucleotide
  Antisense strand to SEQ ID NO: 543419
auuauuagggcccucugcu

SEQ ID NO: 543421 - RNA, 19 nt, Artificial Sequence
  Description of Artificial Sequence: Synthetic oligonucleotide
  Sense strand starting at position 3791 of SEQ ID NO: 318186
gugauaugaucuuccuccu

SEQ ID NO: 543422 - RNA, 19 nt, Artificial Sequence
  Description of Artificial Sequence: Synthetic oligonucleotide
  Antisense strand to SEQ ID NO: 543421
aggaggaagaucauaucac

SEQ ID NO: 543423 - RNA, 19 nt, Artificial Sequence
  Description of Artificial Sequence: Synthetic oligonucleotide
  Sense strand starting at position 3899 of SEQ ID NO: 318186
gaaaguuuagcauagcaau

SEQ ID NO: 543424 - RNA, 19 nt, Artificial Sequence
  Description of Artificial Sequence: Synthetic oligonucleotide
  Antisense strand to SEQ ID NO: 543423
auugcuaugcuaaacuuuc

SEQ ID NO: 543425 - RNA, 19 nt, Artificial Sequence
  Description of Artificial Sequence: Synthetic oligonucleotide
  Sense strand starting at position 3905 of SEQ ID NO: 318186
uuagcauagcaauauguca

SEQ ID NO: 543426 - RNA, 19 nt, Artificial Sequence
  Description of Artificial Sequence: Synthetic oligonucleotide
  Antisense strand to SEQ ID NO: 543425
ugacauauugcuaugcuaa

SEQ ID NO: 543427 - RNA, 19 nt, Artificial Sequence
  Description of Artificial Sequence: Synthetic oligonucleotide
  Sense strand starting at position 28 of SEQ ID NO: 318187
acugguauaguaggacaua

SEQ ID NO: 543428 - RNA, 19 nt, Artificial Sequence
  Description of Artificial Sequence: Synthetic oligonucleotide
  Antisense strand to SEQ ID NO: 543427
uauguccuacuauaccagu

SEQ ID NO: 543429 - RNA, 19 nt, Artificial Sequence
  Description of Artificial Sequence: Synthetic oligonucleotide
  Sense strand starting at position 31 of SEQ ID NO: 318187
gguauaguaggacauaagu

SEQ ID NO: 543430 - RNA, 19 nt, Artificial Sequence
  Description of Artificial Sequence: Synthetic oligonucleotide
  Antisense strand to SEQ ID NO: 543429
acuuauguccuacuauacc

SEQ ID NO: 543431 - RNA, 19 nt, Artificial Sequence
  Description of Artificial Sequence: Synthetic oligonucleotide
  Sense strand starting at position 40 of SEQ ID NO: 318187
ggacauaagucauuaacuc

SEQ ID NO: 543432 - RNA, 19 nt, Artificial Sequence
  Description of Artificial Sequence: Synthetic oligonucleotide
  Antisense strand to SEQ ID NO: 543431
gaguuaaugacuuaugucc

SEQ ID NO: 543433 - RNA, 19 nt, Artificial Sequence
  Description of Artificial Sequence: Synthetic oligonucleotide
  Sense strand starting at position 204 of SEQ ID NO: 318187
auaagcuuuggaggaaucu

SEQ ID NO: 543434 - RNA, 19 nt, Artificial Sequence
  Description of Artificial Sequence: Synthetic oligonucleotide
  Antisense strand to SEQ ID NO: 543433
agauuccuccaaagcuuau

SEQ ID NO: 543435 - RNA, 19 nt, Artificial Sequence
  Description of Artificial Sequence: Synthetic oligonucleotide
  Sense strand starting at position 337 of SEQ ID NO: 318187
gcucacuucccagaguaag

SEQ ID NO: 543436 - RNA, 19 nt, Artificial Sequence
  Description of Artificial Sequence: Synthetic oligonucleotide
  Antisense strand to SEQ ID NO: 543435
cuuacucugggaagugagc

SEQ ID NO: 543437 - RNA, 19 nt, Artificial Sequence
  Description of Artificial Sequence: Synthetic oligonucleotide
  Sense strand starting at position 373 of SEQ ID NO: 318187
uguggcaauggcuaagaaa

SEQ ID NO: 543438 - RNA, 19 nt, Artificial Sequence
  Description of Artificial Sequence: Synthetic oligonucleotide
  Antisense strand to SEQ ID NO: 543437
uuucuuagccauugccaca

SEQ ID NO: 543439 - RNA, 19 nt, Artificial Sequence
  Description of Artificial Sequence: Synthetic oligonucleotide
  Sense strand starting at position 492 of SEQ ID NO: 318187
ggaauacaguauucuccaa

SEQ ID NO: 543440 - RNA, 19 nt, Artificial Sequence
  Description of Artificial Sequence: Synthetic oligonucleotide
  Antisense strand to SEQ ID NO: 543439
uuggagaauacuguauucc

SEQ ID NO: 543441 - RNA, 19 nt, Artificial Sequence
  Description of Artificial Sequence: Synthetic oligonucleotide
  Sense strand starting at position 532 of SEQ ID NO: 318187
auguuuggaaguugaaaua

SEQ ID NO: 543442 - RNA, 19 nt, Artificial Sequence
  Description of Artificial Sequence: Synthetic oligonucleotide
  Antisense strand to SEQ ID NO: 543441
uauuucaacuuccaaacau

SEQ ID NO: 543443 - RNA, 19 nt, Artificial Sequence
  Description of Artificial Sequence: Synthetic oligonucleotide
  Sense strand starting at position 582 of SEQ ID NO: 318187
aauuaagaaguacgaaagu

SEQ ID NO: 543444 - RNA, 19 nt, Artificial Sequence
  Description of Artificial Sequence: Synthetic oligonucleotide
  Antisense strand to SEQ ID NO: 543443
acuuucguacuucuuaauu

SEQ ID NO: 543445 - RNA, 19 nt, Artificial Sequence
  Description of Artificial Sequence: Synthetic oligonucleotide
  Sense strand starting at position 725 of SEQ ID NO: 318187
uaaauaugaguaugcaaag

SEQ ID NO: 543446 - RNA, 19 nt, Artificial Sequence
  Description of Artificial Sequence: Synthetic oligonucleotide
  Antisense strand to SEQ ID NO: 543445
cuuugcauacucauauuua

SEQ ID NO: 543447 - RNA, 19 nt, Artificial Sequence
  Description of Artificial Sequence: Synthetic oligonucleotide
  Sense strand starting at position 726 of SEQ ID NO: 318187
aaauaugaguaugcaaagu

SEQ ID NO: 543448 - RNA, 19 nt, Artificial Sequence
  Description of Artificial Sequence: Synthetic oligonucleotide
  Antisense strand to SEQ ID NO: 543447
acuuugcauacucauauuu

SEQ ID NO: 543449 - RNA, 19 nt, Artificial Sequence
  Description of Artificial Sequence: Synthetic oligonucleotide
  Sense strand starting at position 838 of SEQ ID NO: 318187
uugaauuagcuuuaagcaa

SEQ ID NO: 543450 - RNA, 19 nt, Artificial Sequence
  Description of Artificial Sequence: Synthetic oligonucleotide
  Antisense strand to SEQ ID NO: 543449
uugcuuaaagcuaauucaa

SEQ ID NO: 543451 - RNA, 19 nt, Artificial Sequence
  Description of Artificial Sequence: Synthetic oligonucleotide
  Sense strand starting at position 949 of SEQ ID NO: 318187
ugagaaaguaggcagugau

SEQ ID NO: 543452 - RNA, 19 nt, Artificial Sequence
  Description of Artificial Sequence: Synthetic oligonucleotide
  Antisense strand to SEQ ID NO: 543451
aucacugccuacuuucuca

SEQ ID NO: 543453 - RNA, 19 nt, Artificial Sequence
  Description of Artificial Sequence: Synthetic oligonucleotide
  Sense strand starting at position 952 of SEQ ID NO: 318187
gaaaguaggcagugauaaa

SEQ ID NO: 543454 - RNA, 19 nt, Artificial Sequence
  Description of Artificial Sequence: Synthetic oligonucleotide
  Antisense strand to SEQ ID NO: 543453
uuuaucacugccuacuuuc

SEQ ID NO: 543455 - RNA, 19 nt, Artificial Sequence
  Description of Artificial Sequence: Synthetic oligonucleotide
  Sense strand starting at position 1388 of SEQ ID NO: 318187
guaucucacaaguagguua

SEQ ID NO: 543456 - RNA, 19 nt, Artificial Sequence
  Description of Artificial Sequence: Synthetic oligonucleotide
  Antisense strand to SEQ ID NO: 543455
uaaccuacuugugagauac

SEQ ID NO: 543457 - RNA, 19 nt, Artificial Sequence
  Description of Artificial Sequence: Synthetic oligonucleotide
  Sense strand starting at position 1524 of SEQ ID NO: 318187
accacaauccagugaguaa

SEQ ID NO: 543458 - RNA, 19 nt, Artificial Sequence
  Description of Artificial Sequence: Synthetic oligonucleotide
  Antisense strand to SEQ ID NO: 543457
uuacucacuggauuguggu

SEQ ID NO: 543459 - RNA, 19 nt, Artificial Sequence
  Description of Artificial Sequence: Synthetic oligonucleotide
  Sense strand starting at position 1609 of SEQ ID NO: 318187
ucuagcauaguugauuaga

SEQ ID NO: 543460 - RNA, 19 nt, Artificial Sequence
  Description of Artificial Sequence: Synthetic oligonucleotide
  Antisense strand to SEQ ID NO: 543459
ucuaaucaacuaugcuaga

SEQ ID NO: 543461 - RNA, 19 nt, Artificial Sequence
  Description of Artificial Sequence: Synthetic oligonucleotide
  Sense strand starting at position 1611 of SEQ ID NO: 318187
uagcauaguugauuagaaa

SEQ ID NO: 543462 - RNA, 19 nt, Artificial Sequence
  Description of Artificial Sequence: Synthetic oligonucleotide
  Antisense strand to SEQ ID NO: 543461
uuucuaaucaacuaugcua

SEQ ID NO: 543463 - RNA, 19 nt, Artificial Sequence
  Description of Artificial Sequence: Synthetic oligonucleotide
  Sense strand starting at position 1768 of SEQ ID NO: 318187
gcgacuuggaaugaaagua

SEQ ID NO: 543464 - RNA, 19 nt, Artificial Sequence
  Description of Artificial Sequence: Synthetic oligonucleotide
  Antisense strand to SEQ ID NO: 543463
uacuuucauuccaagucgc

SEQ ID NO: 543465 - RNA, 19 nt, Artificial Sequence
  Description of Artificial Sequence: Synthetic oligonucleotide
  Sense strand starting at position 1787 of SEQ ID NO: 318187
agaagaacccgugauguuu

SEQ ID NO: 543466 - RNA, 19 nt, Artificial Sequence
  Description of Artificial Sequence: Synthetic oligonucleotide
  Antisense strand to SEQ ID NO: 543465
aaacaucacggguucuucu

SEQ ID NO: 543467 - RNA, 19 nt, Artificial Sequence
  Description of Artificial Sequence: Synthetic oligonucleotide
  Sense strand starting at position 1793 of SEQ ID NO: 318187
acccgugauguuuaaauaa

SEQ ID NO: 543468 - RNA, 19 nt, Artificial Sequence
  Description of Artificial Sequence: Synthetic oligonucleotide
  Antisense strand to SEQ ID NO: 543467
uuauuuaaacaucacgggu

SEQ ID NO: 543469 - RNA, 19 nt, Artificial Sequence
  Description of Artificial Sequence: Synthetic oligonucleotide
  Sense strand starting at position 2085 of SEQ ID NO: 318187
uguuauuaaggaugugaga

SEQ ID NO: 543470 - RNA, 19 nt, Artificial Sequence
  Description of Artificial Sequence: Synthetic oligonucleotide
  Antisense strand to SEQ ID NO: 543469
ucucacauccuuaauaaca

SEQ ID NO: 543471 - RNA, 19 nt, Artificial Sequence
  Description of Artificial Sequence: Synthetic oligonucleotide
  Sense strand starting at position 2481 of SEQ ID NO: 318187
aacacugagcuguauuaag

SEQ ID NO: 543472 - RNA, 19 nt, Artificial Sequence
  Description of Artificial Sequence: Synthetic oligonucleotide
  Antisense strand to SEQ ID NO: 543471
cuuaauacagcucaguguu

SEQ ID NO: 543473 - RNA, 19 nt, Artificial Sequence
  Description of Artificial Sequence: Synthetic oligonucleotide
  Sense strand starting at position 2491 of SEQ ID NO: 318187
uguauuaagcuugaucaaa

SEQ ID NO: 543474 - RNA, 19 nt, Artificial Sequence
  Description of Artificial Sequence: Synthetic oligonucleotide
  Antisense strand to SEQ ID NO: 543473
uuugaucaagcuuaauaca

SEQ ID NO: 543475 - RNA, 19 nt, Artificial Sequence
  Description of Artificial Sequence: Synthetic oligonucleotide
  Sense strand starting at position 2633 of SEQ ID NO: 318187
uguuaauaacaguaaguag

SEQ ID NO: 543476 - RNA, 19 nt, Artificial Sequence
  Description of Artificial Sequence: Synthetic oligonucleotide
  Antisense strand to SEQ ID NO: 543475
cuacuuacuguuauuaaca

SEQ ID NO: 543477 - RNA, 19 nt, Artificial Sequence
  Description of Artificial Sequence: Synthetic oligonucleotide
  Sense strand starting at position 2663 of SEQ ID NO: 318187
cuagaacagggcuguuaaa

SEQ ID NO: 543478 - RNA, 19 nt, Artificial Sequence
  Description of Artificial Sequence: Synthetic oligonucleotide
  Antisense strand to SEQ ID NO: 543477
uuuaacagcccuguucuag

SEQ ID NO: 543479 - RNA, 19 nt, Artificial Sequence
  Description of Artificial Sequence: Synthetic oligonucleotide
  Sense strand starting at position 2683 of SEQ ID NO: 318187
agacauauaaggugaagca

SEQ ID NO: 543480 - RNA, 19 nt, Artificial Sequence
  Description of Artificial Sequence: Synthetic oligonucleotide
  Antisense strand to SEQ ID NO: 543479
ugcuucaccuuauaugucu

SEQ ID NO: 543481 - RNA, 19 nt, Artificial Sequence
  Description of Artificial Sequence: Synthetic oligonucleotide
  Sense strand starting at position 2690 of SEQ ID NO: 318187
uaaggugaagcauauaugu

SEQ ID NO: 543482 - RNA, 19 nt, Artificial Sequence
  Description of Artificial Sequence: Synthetic oligonucleotide
  Antisense strand to SEQ ID NO: 543481
acauauaugcuucaccuua

SEQ ID NO: 543483 - RNA, 19 nt, Artificial Sequence
  Description of Artificial Sequence: Synthetic oligonucleotide
  Sense strand starting at position 2758 of SEQ ID NO: 318187
uuuaguaaugguuacccua

SEQ ID NO: 543484 - RNA, 19 nt, Artificial Sequence
  Description of Artificial Sequence: Synthetic oligonucleotide
  Antisense strand to SEQ ID NO: 543483
uaggguaaccauuacuaaa

SEQ ID NO: 543485 - RNA, 19 nt, Artificial Sequence
  Description of Artificial Sequence: Synthetic oligonucleotide
  Sense strand starting at position 3080 of SEQ ID NO: 318187
uuucuaucggaugaucuuu

SEQ ID NO: 543486 - RNA, 19 nt, Artificial Sequence
  Description of Artificial Sequence: Synthetic oligonucleotide
  Antisense strand to SEQ ID NO: 543485
aaagaucauccgauagaaa

SEQ ID NO: 543487 - RNA, 19 nt, Artificial Sequence
  Description of Artificial Sequence: Synthetic oligonucleotide
  Sense strand starting at position 3108 of SEQ ID NO: 318187
uuuauaguacaucacaguu

SEQ ID NO: 543488 - RNA, 19 nt, Artificial Sequence
  Description of Artificial Sequence: Synthetic oligonucleotide
  Antisense strand to SEQ ID NO: 543487
aacugugauguacuauaaa

SEQ ID NO: 543489 - RNA, 19 nt, Artificial Sequence
  Description of Artificial Sequence: Synthetic oligonucleotide
  Sense strand starting at position 3158 of SEQ ID NO: 318187
uauuuauagucuguggucu

SEQ ID NO: 543490 - RNA, 19 nt, Artificial Sequence
  Description of Artificial Sequence: Synthetic oligonucleotide
  Antisense strand to SEQ ID NO: 543489
agaccacagacuauaaaua

SEQ ID NO: 543491 - RNA, 19 nt, Artificial Sequence
  Description of Artificial Sequence: Synthetic oligonucleotide
  Sense strand starting at position 3228 of SEQ ID NO: 318187
uugacauggucaucaauac

SEQ ID NO: 543492 - RNA, 19 nt, Artificial Sequence
  Description of Artificial Sequence: Synthetic oligonucleotide
  Antisense strand to SEQ ID NO: 543491
guauugaugaccaugucaa

SEQ ID NO: 543493 - RNA, 19 nt, Artificial Sequence
  Description of Artificial Sequence: Synthetic oligonucleotide
  Sense strand starting at position 3393 of SEQ ID NO: 318187
uugagaaauuguccacuuu

SEQ ID NO: 543494 - RNA, 19 nt, Artificial Sequence
  Description of Artificial Sequence: Synthetic oligonucleotide
  Antisense strand to SEQ ID NO: 543493
aaaguggacaauuucucaa

SEQ ID NO: 543495 - RNA, 19 nt, Artificial Sequence
  Description of Artificial Sequence: Synthetic oligonucleotide
  Sense strand starting at position 3526 of SEQ ID NO: 318187
gauguaaauuuggacacua

SEQ ID NO: 543496 - RNA, 19 nt, Artificial Sequence
  Description of Artificial Sequence: Synthetic oligonucleotide
  Antisense strand to SEQ ID NO: 543495
uaguguccaaauuuacauc

SEQ ID NO: 543497 - RNA, 19 nt, Artificial Sequence
  Description of Artificial Sequence: Synthetic oligonucleotide
  Sense strand starting at position 3539 of SEQ ID NO: 318187
acacuauuaggaugucuau

SEQ ID NO: 543498 - RNA, 19 nt, Artificial Sequence
  Description of Artificial Sequence: Synthetic oligonucleotide
  Antisense strand to SEQ ID NO: 543497
auagacauccuaauagugu

SEQ ID NO: 543499 - RNA, 19 nt, Artificial Sequence
  Description of Artificial Sequence: Synthetic oligonucleotide
  Sense strand starting at position 3690 of SEQ ID NO: 318187
gaaagagguuaaguuugua

SEQ ID NO: 543500 - RNA, 19 nt, Artificial Sequence
  Description of Artificial Sequence: Synthetic oligonucleotide
  Antisense strand to SEQ ID NO: 543499
uacaaacuuaaccucuuuc

SEQ ID NO: 543501 - RNA, 19 nt, Artificial Sequence
  Description of Artificial Sequence: Synthetic oligonucleotide
  Sense strand starting at position 3693 of SEQ ID NO: 318187
agagguuaaguuuguagaa

SEQ ID NO: 543502 - RNA, 19 nt, Artificial Sequence
  Description of Artificial Sequence: Synthetic oligonucleotide
  Antisense strand to SEQ ID NO: 543501
uucuacaaacuuaaccucu

SEQ ID NO: 543503 - RNA, 19 nt, Artificial Sequence
  Description of Artificial Sequence: Synthetic oligonucleotide
  Sense strand starting at position 3905 of SEQ ID NO: 318187
ccucuacugcaaugaugaa

SEQ ID NO: 543504 - RNA, 19 nt, Artificial Sequence
  Description of Artificial Sequence: Synthetic oligonucleotide
  Antisense strand to SEQ ID NO: 543503
uucaucauugcaguagagg

SEQ ID NO: 543505 - RNA, 19 nt, Artificial Sequence
  Description of Artificial Sequence: Synthetic oligonucleotide
  Sense strand starting at position 3928 of SEQ ID NO: 318187
cuggaauguucacuggaga

SEQ ID NO: 543506 - RNA, 19 nt, Artificial Sequence
  Description of Artificial Sequence: Synthetic oligonucleotide
  Antisense strand to SEQ ID NO: 543505
ucuccagugaacauuccag

SEQ ID NO: 543507 - RNA, 19 nt, Artificial Sequence
  Description of Artificial Sequence: Synthetic oligonucleotide
  Sense strand starting at position 41 of SEQ ID NO: 318188
gguaaauguauuuggucuu

SEQ ID NO: 543508 - RNA, 19 nt, Artificial Sequence
  Description of Artificial Sequence: Synthetic oligonucleotide
  Antisense strand to SEQ ID NO: 543507
aagaccaaauacauuuacc

SEQ ID NO: 543509 - RNA, 19 nt, Artificial Sequence
  Description of Artificial Sequence: Synthetic oligonucleotide
  Sense strand starting at position 388 of SEQ ID NO: 318188
uaagauauauugggagaaa

SEQ ID NO: 543510 - RNA, 19 nt, Artificial Sequence
  Description of Artificial Sequence: Synthetic oligonucleotide
  Antisense strand to SEQ ID NO: 543509
uuucucccaauauaucuua

SEQ ID NO: 543511 - RNA, 19 nt, Artificial Sequence
  Description of Artificial Sequence: Synthetic oligonucleotide
  Sense strand starting at position 412 of SEQ ID NO: 318188
ucuuuaggucucuggcaga

SEQ ID NO: 543512 - RNA, 19 nt, Artificial Sequence
  Description of Artificial Sequence: Synthetic oligonucleotide
  Antisense strand to SEQ ID NO: 543511
ucugccagagaccuaaaga

SEQ ID NO: 543513 - RNA, 19 nt, Artificial Sequence
  Description of Artificial Sequence: Synthetic oligonucleotide
  Sense strand starting at position 417 of SEQ ID NO: 318188
aggucucuggcagagugaa

SEQ ID NO: 543514 - RNA, 19 nt, Artificial Sequence
  Description of Artificial Sequence: Synthetic oligonucleotide
  Antisense strand to SEQ ID NO: 543513
uucacucugccagagaccu

SEQ ID NO: 543515 - RNA, 19 nt, Artificial Sequence
  Description of Artificial Sequence: Synthetic oligonucleotide
  Sense strand starting at position 500 of SEQ ID NO: 318188
uucgaaauugagggaguaa

SEQ ID NO: 543516 - RNA, 19 nt, Artificial Sequence
  Description of Artificial Sequence: Synthetic oligonucleotide
  Antisense strand to SEQ ID NO: 543515
uuacucccucaauuucgaa

SEQ ID NO: 543517 - RNA, 19 nt, Artificial Sequence
  Description of Artificial Sequence: Synthetic oligonucleotide
  Sense strand starting at position 521 of SEQ ID NO: 318188
acggcuauucagugggaca

SEQ ID NO: 543518 - RNA, 19 nt, Artificial Sequence
  Description of Artificial Sequence: Synthetic oligonucleotide
  Antisense strand to SEQ ID NO: 543517
ugucccacugaauagccgu

SEQ ID NO: 543519 - RNA, 19 nt, Artificial Sequence
  Description of Artificial Sequence: Synthetic oligonucleotide
  Sense strand starting at position 523 of SEQ ID NO: 318188
ggcuauucagugggacaca

SEQ ID NO: 543520 - RNA, 19 nt, Artificial Sequence
  Description of Artificial Sequence: Synthetic oligonucleotide
  Antisense strand to SEQ ID NO: 543519
ugugucccacugaauagcc

SEQ ID NO: 543521 - RNA, 19 nt, Artificial Sequence
  Description of Artificial Sequence: Synthetic oligonucleotide
  Sense strand starting at position 590 of SEQ ID NO: 318188
uugacucuugucugagcaa

SEQ ID NO: 543522 - RNA, 19 nt, Artificial Sequence
  Description of Artificial Sequence: Synthetic oligonucleotide
  Antisense strand to SEQ ID NO: 543521
uugcucagacaagagucaa

SEQ ID NO: 543523 - RNA, 19 nt, Artificial Sequence
  Description of Artificial Sequence: Synthetic oligonucleotide
  Sense strand starting at position 593 of SEQ ID NO: 318188
acucuugucugagcaauca

SEQ ID NO: 543524 - RNA, 19 nt, Artificial Sequence
  Description of Artificial Sequence: Synthetic oligonucleotide
  Antisense strand to SEQ ID NO: 543523
ugauugcucagacaagagu

SEQ ID NO: 543525 - RNA, 19 nt, Artificial Sequence
  Description of Artificial Sequence: Synthetic oligonucleotide
  Sense strand starting at position 604 of SEQ ID NO: 318188
agcaaucaacaugauguau

SEQ ID NO: 543526 - RNA, 19 nt, Artificial Sequence
  Description of Artificial Sequence: Synthetic oligonucleotide
  Antisense strand to SEQ ID NO: 543525
auacaucauguugauugcu

SEQ ID NO: 543527 - RNA, 19 nt, Artificial Sequence
  Description of Artificial Sequence: Synthetic oligonucleotide
  Sense strand starting at position 783 of SEQ ID NO: 318188
ggaugcaggccugagauga

SEQ ID NO: 543528 - RNA, 19 nt, Artificial Sequence
  Description of Artificial Sequence: Synthetic oligonucleotide
  Antisense strand to SEQ ID NO: 543527
ucaucucaggccugcaucc

SEQ ID NO: 543529 - RNA, 19 nt, Artificial Sequence
  Description of Artificial Sequence: Synthetic oligonucleotide
  Sense strand starting at position 799 of SEQ ID NO: 318188
ugaugcuuucccuggcaca

SEQ ID NO: 543530 - RNA, 19 nt, Artificial Sequence
  Description of Artificial Sequence: Synthetic oligonucleotide
  Antisense strand to SEQ ID NO: 543529
ugugccagggaaagcauca

SEQ ID NO: 543531 - RNA, 19 nt, Artificial Sequence
  Description of Artificial Sequence: Synthetic oligonucleotide
  Sense strand starting at position 902 of SEQ ID NO: 318188
caccacacgugaucguaau

SEQ ID NO: 543532 - RNA, 19 nt, Artificial Sequence
  Description of Artificial Sequence: Synthetic oligonucleotide
  Antisense strand to SEQ ID NO: 543531
auuacgaucacguguggug

SEQ ID NO: 543533 - RNA, 19 nt, Artificial Sequence
  Description of Artificial Sequence: Synthetic oligonucleotide
  Sense strand starting at position 903 of SEQ ID NO: 318188
accacacgugaucguaauu

SEQ ID NO: 543534 - RNA, 19 nt, Artificial Sequence
  Description of Artificial Sequence: Synthetic oligonucleotide
  Antisense strand to SEQ ID NO: 543533
aauuacgaucacguguggu

SEQ ID NO: 543535 - RNA, 19 nt, Artificial Sequence
  Description of Artificial Sequence: Synthetic oligonucleotide
  Sense strand starting at position 926 of SEQ ID NO: 318188
uuaaguuauuggguuaguu

SEQ ID NO: 543536 - RNA, 19 nt, Artificial Sequence
  Description of Artificial Sequence: Synthetic oligonucleotide
  Antisense strand to SEQ ID NO: 543535
aacuaacccaauaacuuaa

SEQ ID NO: 543537 - RNA, 19 nt, Artificial Sequence
  Description of Artificial Sequence: Synthetic oligonucleotide
  Sense strand starting at position 1047 of SEQ ID NO: 318188
ucuggugacagguaucauu

SEQ ID NO: 543538 - RNA, 19 nt, Artificial Sequence
  Description of Artificial Sequence: Synthetic oligonucleotide
  Antisense strand to SEQ ID NO: 543537
aaugauaccugucaccaga

SEQ ID NO: 543539 - RNA, 19 nt, Artificial Sequence
  Description of Artificial Sequence: Synthetic oligonucleotide
  Sense strand starting at position 1074 of SEQ ID NO: 318188
aaguaaaguccgggugcaa

SEQ ID NO: 543540 - RNA, 19 nt, Artificial Sequence
  Description of Artificial Sequence: Synthetic oligonucleotide
  Antisense strand to SEQ ID NO: 543539
uugcacccggacuuuacuu

SEQ ID NO: 543541 - RNA, 19 nt, Artificial Sequence
  Description of Artificial Sequence: Synthetic oligonucleotide
  Sense strand starting at position 1116 of SEQ ID NO: 318188
aaaccagagcgagauguuu

SEQ ID NO: 543542 - RNA, 19 nt, Artificial Sequence
  Description of Artificial Sequence: Synthetic oligonucleotide
  Antisense strand to SEQ ID NO: 543541
aaacaucucgcucugguuu

SEQ ID NO: 543543 - RNA, 19 nt, Artificial Sequence
  Description of Artificial Sequence: Synthetic oligonucleotide
  Sense strand starting at position 2630 of SEQ ID NO: 318188
ccagcuugcucccuaggau

SEQ ID NO: 543544 - RNA, 19 nt, Artificial Sequence
  Description of Artificial Sequence: Synthetic oligonucleotide
  Antisense strand to SEQ ID NO: 543543
auccuagggagcaagcugg

SEQ ID NO: 543545 - RNA, 19 nt, Artificial Sequence
  Description of Artificial Sequence: Synthetic oligonucleotide
  Sense strand starting at position 2736 of SEQ ID NO: 318188
gaaacuaugugcccucgau

SEQ ID NO: 543546 - RNA, 19 nt, Artificial Sequence
  Description of Artificial Sequence: Synthetic oligonucleotide
  Antisense strand to SEQ ID NO: 543545
aucgagggcacauaguuuc

SEQ ID NO: 543547 - RNA, 19 nt, Artificial Sequence
  Description of Artificial Sequence: Synthetic oligonucleotide
  Sense strand starting at position 2789 of SEQ ID NO: 318188
cgaugaacccgacggaguu

SEQ ID NO: 543548 - RNA, 19 nt, Artificial Sequence
  Description of Artificial Sequence: Synthetic oligonucleotide
  Antisense strand to SEQ ID NO: 543547
aacuccgucggguucaucg

SEQ ID NO: 543549 - RNA, 19 nt, Artificial Sequence
  Description of Artificial Sequence: Synthetic oligonucleotide
  Sense strand starting at position 2850 of SEQ ID NO: 318188
gguccaagacgagaguuua

SEQ ID NO: 543550 - RNA, 19 nt, Artificial Sequence
  Description of Artificial Sequence: Synthetic oligonucleotide
  Antisense strand to SEQ ID NO: 543549
uaaacucucgucuuggacc

SEQ ID NO: 543551 - RNA, 19 nt, Artificial Sequence
  Description of Artificial Sequence: Synthetic oligonucleotide
  Sense strand starting at position 2863 of SEQ ID NO: 318188
aguuuaauuucuucugucu

SEQ ID NO: 543552 - RNA, 19 nt, Artificial Sequence
  Description of Artificial Sequence: Synthetic oligonucleotide
  Antisense strand to SEQ ID NO: 543551
agacagaagaaauuaaacu

SEQ ID NO: 543553 - RNA, 19 nt, Artificial Sequence
  Description of Artificial Sequence: Synthetic oligonucleotide
  Sense strand starting at position 2924 of SEQ ID NO: 318188
cugcacuggucucuuauga

SEQ ID NO: 543554 - RNA, 19 nt, Artificial Sequence
  Description of Artificial Sequence: Synthetic oligonucleotide
  Antisense strand to SEQ ID NO: 543553
ucauaagagaccagugcag

SEQ ID NO: 543555 - RNA, 19 nt, Artificial Sequence
  Description of Artificial Sequence: Synthetic oligonucleotide
  Sense strand starting at position 2931 of SEQ ID NO: 318188
ggucucuuaugaucagguu

SEQ ID NO: 543556 - RNA, 19 nt, Artificial Sequence
  Description of Artificial Sequence: Synthetic oligonucleotide
  Antisense strand to SEQ ID NO: 543555
aaccugaucauaagagacc

SEQ ID NO: 543557 - RNA, 19 nt, Artificial Sequence
  Description of Artificial Sequence: Synthetic oligonucleotide
  Sense strand starting at position 2983 of SEQ ID NO: 318188
ccuuaaguugcagggaguu

SEQ ID NO: 543558 - RNA, 19 nt, Artificial Sequence
  Description of Artificial Sequence: Synthetic oligonucleotide
  Antisense strand to SEQ ID NO: 543557
aacucccugcaacuuaagg

SEQ ID NO: 543559 - RNA, 19 nt, Artificial Sequence
  Description of Artificial Sequence: Synthetic oligonucleotide
  Sense strand starting at position 2985 of SEQ ID NO: 318188
uuaaguugcagggaguuua

SEQ ID NO: 543560 - RNA, 19 nt, Artificial Sequence
  Description of Artificial Sequence: Synthetic oligonucleotide
  Antisense strand to SEQ ID NO: 543559
uaaacucccugcaacuuaa

SEQ ID NO: 543561 - RNA, 19 nt, Artificial Sequence
  Description of Artificial Sequence: Synthetic oligonucleotide
  Sense strand starting at position 2995 of SEQ ID NO: 318188
gggaguuuacgguggacga

SEQ ID NO: 543562 - RNA, 19 nt, Artificial Sequence
  Description of Artificial Sequence: Synthetic oligonucleotide
  Antisense strand to SEQ ID NO: 543561
ucguccaccguaaacuccc

SEQ ID NO: 543563 - RNA, 19 nt, Artificial Sequence
  Description of Artificial Sequence: Synthetic oligonucleotide
  Sense strand starting at position 2996 of SEQ ID NO: 318188
ggaguuuacgguggacgaa

SEQ ID NO: 543564 - RNA, 19 nt, Artificial Sequence
  Description of Artificial Sequence: Synthetic oligonucleotide
  Antisense strand to SEQ ID NO: 543563
uucguccaccguaaacucc

SEQ ID NO: 543565 - RNA, 19 nt, Artificial Sequence
  Description of Artificial Sequence: Synthetic oligonucleotide
  Sense strand starting at position 3174 of SEQ ID NO: 318188
cagccagggucuucugauu

SEQ ID NO: 543566 - RNA, 19 nt, Artificial Sequence
  Description of Artificial Sequence: Synthetic oligonucleotide
  Antisense strand to SEQ ID NO: 543565
aaucagaagacccuggcug

SEQ ID NO: 543567 - RNA, 19 nt, Artificial Sequence
  Description of Artificial Sequence: Synthetic oligonucleotide
  Sense strand starting at position 3183 of SEQ ID NO: 318188
ucuucugauucugcuagga

SEQ ID NO: 543568 - RNA, 19 nt, Artificial Sequence
  Description of Artificial Sequence: Synthetic oligonucleotide
  Antisense strand to SEQ ID NO: 543567
uccuagcagaaucagaaga

SEQ ID NO: 543569 - RNA, 19 nt, Artificial Sequence
  Description of Artificial Sequence: Synthetic oligonucleotide
  Sense strand starting at position 3198 of SEQ ID NO: 318188
aggagagacuucugaaagg

SEQ ID NO: 543570 - RNA, 19 nt, Artificial Sequence
  Description of Artificial Sequence: Synthetic oligonucleotide
  Antisense strand to SEQ ID NO: 543569
ccuuucagaagucucuccu

SEQ ID NO: 543571 - RNA, 19 nt, Artificial Sequence
  Description of Artificial Sequence: Synthetic oligonucleotide
  Sense strand starting at position 3260 of SEQ ID NO: 318188
gggagaguucccuaagcug

SEQ ID NO: 543572 - RNA, 19 nt, Artificial Sequence
  Description of Artificial Sequence: Synthetic oligonucleotide
  Antisense strand to SEQ ID NO: 543571
cagcuuagggaacucuccc

SEQ ID NO: 543573 - RNA, 19 nt, Artificial Sequence
  Description of Artificial Sequence: Synthetic oligonucleotide
  Sense strand starting at position 3309 of SEQ ID NO: 318188
agcaguaugcuuuggaggu

SEQ ID NO: 543574 - RNA, 19 nt, Artificial Sequence
  Description of Artificial Sequence: Synthetic oligonucleotide
  Antisense strand to SEQ ID NO: 543573
accuccaaagcauacugcu

SEQ ID NO: 543575 - RNA, 19 nt, Artificial Sequence
  Description of Artificial Sequence: Synthetic oligonucleotide
  Sense strand starting at position 3799 of SEQ ID NO: 318188
uuauguguacagggagagu

SEQ ID NO: 543576 - RNA, 19 nt, Artificial Sequence
  Description of Artificial Sequence: Synthetic oligonucleotide
  Antisense strand to SEQ ID NO: 543575
acucucccuguacacauaa

SEQ ID NO: 543577 - RNA, 19 nt, Artificial Sequence
  Description of Artificial Sequence: Synthetic oligonucleotide
  Sense strand starting at position 3812 of SEQ ID NO: 318188
gagagucucucugagaaga

SEQ ID NO: 543578 - RNA, 19 nt, Artificial Sequence
  Description of Artificial Sequence: Synthetic oligonucleotide
  Antisense strand to SEQ ID NO: 543577
ucuucucagagagacucuc

SEQ ID NO: 543579 - RNA, 19 nt, Artificial Sequence
  Description of Artificial Sequence: Synthetic oligonucleotide
  Sense strand starting at position 3845 of SEQ ID NO: 318188
aagacuuaaugaggacaga

SEQ ID NO: 543580 - RNA, 19 nt, Artificial Sequence
  Description of Artificial Sequence: Synthetic oligonucleotide
  Antisense strand to SEQ ID NO: 543579
ucuguccucauuaagucuu

SEQ ID NO: 543581 - RNA, 19 nt, Artificial Sequence
  Description of Artificial Sequence: Synthetic oligonucleotide
  Sense strand starting at position 3876 of SEQ ID NO: 318188
gacggaucugacuguagaa

SEQ ID NO: 543582 - RNA, 19 nt, Artificial Sequence
  Description of Artificial Sequence: Synthetic oligonucleotide
  Antisense strand to SEQ ID NO: 543581
uucuacagucagauccguc

SEQ ID NO: 543583 - RNA, 19 nt, Artificial Sequence
  Description of Artificial Sequence: Synthetic oligonucleotide
  Sense strand starting at position 3878 of SEQ ID NO: 318188
cggaucugacuguagaauu

SEQ ID NO: 543584 - RNA, 19 nt, Artificial Sequence
  Description of Artificial Sequence: Synthetic oligonucleotide
  Antisense strand to SEQ ID NO: 543583
aauucuacagucagauccg

SEQ ID NO: 543585 - RNA, 19 nt, Artificial Sequence
  Description of Artificial Sequence: Synthetic oligonucleotide
  Sense strand starting at position 3941 of SEQ ID NO: 318188
cagcuugacugggcauauu

SEQ ID NO: 543586 - RNA, 19 nt, Artificial Sequence
  Description of Artificial Sequence: Synthetic oligonucleotide
  Antisense strand to SEQ ID NO: 543585
aauaugcccagucaagcug

SEQ ID NO: 543587 - RNA, 19 nt, Artificial Sequence
  Description of Artificial Sequence: Synthetic oligonucleotide
  Sense strand starting at position 41 of SEQ ID NO: 318189
auguguucucaggacuauu

SEQ ID NO: 543588 - RNA, 19 nt, Artificial Sequence
  Description of Artificial Sequence: Synthetic oligonucleotide
  Antisense strand to SEQ ID NO: 543587
aauaguccugagaacacau

SEQ ID NO: 543589 - RNA, 19 nt, Artificial Sequence
  Description of Artificial Sequence: Synthetic oligonucleotide
  Sense strand starting at position 44 of SEQ ID NO: 318189
uguucucaggacuauuacu

SEQ ID NO: 543590 - RNA, 19 nt, Artificial Sequence
  Description of Artificial Sequence: Synthetic oligonucleotide
  Antisense strand to SEQ ID NO: 543589
aguaauaguccugagaaca

SEQ ID NO: 543591 - RNA, 19 nt, Artificial Sequence
  Description of Artificial Sequence: Synthetic oligonucleotide
  Sense strand starting at position 137 of SEQ ID NO: 318189
ucuuuccuccuucgacaga

SEQ ID NO: 543592 - RNA, 19 nt, Artificial Sequence
  Description of Artificial Sequence: Synthetic oligonucleotide
  Antisense strand to SEQ ID NO: 543591
ucugucgaaggaggaaaga

SEQ ID NO: 543593 - RNA, 19 nt, Artificial Sequence
  Description of Artificial Sequence: Synthetic oligonucleotide
  Sense strand starting at position 340 of SEQ ID NO: 318189
gaggaccuaugauguauuu

SEQ ID NO: 543594 - RNA, 19 nt, Artificial Sequence
  Description of Artificial Sequence: Synthetic oligonucleotide
  Antisense strand to SEQ ID NO: 543593
aaauacaucauagguccuc

SEQ ID NO: 543595 - RNA, 19 nt, Artificial Sequence
  Description of Artificial Sequence: Synthetic oligonucleotide
  Sense strand starting at position 552 of SEQ ID NO: 318189
cucgaaugccagugaugaa

SEQ ID NO: 543596 - RNA, 19 nt, Artificial Sequence
  Description of Artificial Sequence: Synthetic oligonucleotide
  Antisense strand to SEQ ID NO: 543595
uucaucacuggcauucgag

SEQ ID NO: 543597 - RNA, 19 nt, Artificial Sequence
  Description of Artificial Sequence: Synthetic oligonucleotide
  Sense strand starting at position 553 of SEQ ID NO: 318189
ucgaaugccagugaugaag

SEQ ID NO: 543598 - RNA, 19 nt, Artificial Sequence
  Description of Artificial Sequence: Synthetic oligonucleotide
  Antisense strand to SEQ ID NO: 543597
cuucaucacuggcauucga

SEQ ID NO: 543599 - RNA, 19 nt, Artificial Sequence
  Description of Artificial Sequence: Synthetic oligonucleotide
  Sense strand starting at position 559 of SEQ ID NO: 318189
gccagugaugaagaaguca

SEQ ID NO: 543600 - RNA, 19 nt, Artificial Sequence
  Description of Artificial Sequence: Synthetic oligonucleotide
  Antisense strand to SEQ ID NO: 543599
ugacuucuucaucacuggc

SEQ ID NO: 543601 - RNA, 19 nt, Artificial Sequence
  Description of Artificial Sequence: Synthetic oligonucleotide
  Sense strand starting at position 647 of SEQ ID NO: 318189
cuucuaacgguacaguaau

SEQ ID NO: 543602 - RNA, 19 nt, Artificial Sequence
  Description of Artificial Sequence: Synthetic oligonucleotide
  Antisense strand to SEQ ID NO: 543601
auuacuguaccguuagaag

SEQ ID NO: 543603 - RNA, 19 nt, Artificial Sequence
  Description of Artificial Sequence: Synthetic oligonucleotide
  Sense strand starting at position 659 of SEQ ID NO: 318189
caguaauaucaugaagcug

SEQ ID NO: 543604 - RNA, 19 nt, Artificial Sequence
  Description of Artificial Sequence: Synthetic oligonucleotide
  Antisense strand to SEQ ID NO: 543603
cagcuucaugauauuacug

SEQ ID NO: 543605 - RNA, 19 nt, Artificial Sequence
  Description of Artificial Sequence: Synthetic oligonucleotide
  Sense strand starting at position 676 of SEQ ID NO: 318189
ugcugucugcacuugucaa

SEQ ID NO: 543606 - RNA, 19 nt, Artificial Sequence
  Description of Artificial Sequence: Synthetic oligonucleotide
  Antisense strand to SEQ ID NO: 543605
uugacaagugcagacagca

SEQ ID NO: 543607 - RNA, 19 nt, Artificial Sequence
  Description of Artificial Sequence: Synthetic oligonucleotide
  Sense strand starting at position 686 of SEQ ID NO: 318189
acuugucaauauccuguaa

SEQ ID NO: 543608 - RNA, 19 nt, Artificial Sequence
  Description of Artificial Sequence: Synthetic oligonucleotide
  Antisense strand to SEQ ID NO: 543607
uuacaggauauugacaagu

SEQ ID NO: 543609 - RNA, 19 nt, Artificial Sequence
  Description of Artificial Sequence: Synthetic oligonucleotide
  Sense strand starting at position 690 of SEQ ID NO: 318189
gucaauauccuguaagcca

SEQ ID NO: 543610 - RNA, 19 nt, Artificial Sequence
  Description of Artificial Sequence: Synthetic oligonucleotide
  Antisense strand to SEQ ID NO: 543609
uggcuuacaggauauugac

SEQ ID NO: 543611 - RNA, 19 nt, Artificial Sequence
  Description of Artificial Sequence: Synthetic oligonucleotide
  Sense strand starting at position 698 of SEQ ID NO: 318189
ccuguaagccaguaacaau

SEQ ID NO: 543612 - RNA, 19 nt, Artificial Sequence
  Description of Artificial Sequence: Synthetic oligonucleotide
  Antisense strand to SEQ ID NO: 543611
auuguuacuggcuuacagg

SEQ ID NO: 543613 - RNA, 19 nt, Artificial Sequence
  Description of Artificial Sequence: Synthetic oligonucleotide
  Sense strand starting at position 752 of SEQ ID NO: 318189
ugguuaauuucgcuugaca

SEQ ID NO: 543614 - RNA, 19 nt, Artificial Sequence
  Description of Artificial Sequence: Synthetic oligonucleotide
  Antisense strand to SEQ ID NO: 543613
ugucaagcgaaauuaacca

SEQ ID NO: 543615 - RNA, 19 nt, Artificial Sequence
  Description of Artificial Sequence: Synthetic oligonucleotide
  Sense strand starting at position 754 of SEQ ID NO: 318189
guuaauuucgcuugacagc

SEQ ID NO: 543616 - RNA, 19 nt, Artificial Sequence
  Description of Artificial Sequence: Synthetic oligonucleotide
  Antisense strand to SEQ ID NO: 543615
gcugucaagcgaaauuaac

SEQ ID NO: 543617 - RNA, 19 nt, Artificial Sequence
  Description of Artificial Sequence: Synthetic oligonucleotide
  Sense strand starting at position 886 of SEQ ID NO: 318189
cuaggacaccguuagaguu

SEQ ID NO: 543618 - RNA, 19 nt, Artificial Sequence
  Description of Artificial Sequence: Synthetic oligonucleotide
  Antisense strand to SEQ ID NO: 543617
aacucuaacgguguccuag

SEQ ID NO: 543619 - RNA, 19 nt, Artificial Sequence
  Description of Artificial Sequence: Synthetic oligonucleotide
  Sense strand starting at position 1042 of SEQ ID NO: 318189
gguuucagcgaacacauga

SEQ ID NO: 543620 - RNA, 19 nt, Artificial Sequence
  Description of Artificial Sequence: Synthetic oligonucleotide
  Antisense strand to SEQ ID NO: 543619
ucauguguucgcugaaacc

SEQ ID NO: 543621 - RNA, 19 nt, Artificial Sequence
  Description of Artificial Sequence: Synthetic oligonucleotide
  Sense strand starting at position 1064 of SEQ ID NO: 318189
agcggacuauacucaaagu

SEQ ID NO: 543622 - RNA, 19 nt, Artificial Sequence
  Description of Artificial Sequence: Synthetic oligonucleotide
  Antisense strand to SEQ ID NO: 543621
acuuugaguauaguccgcu

SEQ ID NO: 543623 - RNA, 19 nt, Artificial Sequence
  Description of Artificial Sequence: Synthetic oligonucleotide
  Sense strand starting at position 1185 of SEQ ID NO: 318189
gaaccucgagugcaacauu

SEQ ID NO: 543624 - RNA, 19 nt, Artificial Sequence
  Description of Artificial Sequence: Synthetic oligonucleotide
  Antisense strand to SEQ ID NO: 543623
aauguugcacucgagguuc

SEQ ID NO: 543625 - RNA, 19 nt, Artificial Sequence
  Description of Artificial Sequence: Synthetic oligonucleotide
  Sense strand starting at position 1208 of SEQ ID NO: 318189
auguccgugccacauauaa

SEQ ID NO: 543626 - RNA, 19 nt, Artificial Sequence
  Description of Artificial Sequence: Synthetic oligonucleotide
  Antisense strand to SEQ ID NO: 543625
uuauauguggcacggacau

SEQ ID NO: 543627 - RNA, 19 nt, Artificial Sequence
  Description of Artificial Sequence: Synthetic oligonucleotide
  Sense strand starting at position 1210 of SEQ ID NO: 318189
guccgugccacauauaaag

SEQ ID NO: 543628 - RNA, 19 nt, Artificial Sequence
  Description of Artificial Sequence: Synthetic oligonucleotide
  Antisense strand to SEQ ID NO: 543627
cuuuauauguggcacggac

SEQ ID NO: 543629 - RNA, 19 nt, Artificial Sequence
  Description of Artificial Sequence: Synthetic oligonucleotide
  Sense strand starting at position 1300 of SEQ ID NO: 318189
ggcuguugccaagaaauaa

SEQ ID NO: 543630 - RNA, 19 nt, Artificial Sequence
  Description of Artificial Sequence: Synthetic oligonucleotide
  Antisense strand to SEQ ID NO: 543629
uuauuucuuggcaacagcc

SEQ ID NO: 543631 - RNA, 19 nt, Artificial Sequence
  Description of Artificial Sequence: Synthetic oligonucleotide
  Sense strand starting at position 1411 of SEQ ID NO: 318189
ccuucugaggccuaguuua

SEQ ID NO: 543632 - RNA, 19 nt, Artificial Sequence
  Description of Artificial Sequence: Synthetic oligonucleotide
  Antisense strand to SEQ ID NO: 543631
uaaacuaggccucagaagg

SEQ ID NO: 543633 - RNA, 19 nt, Artificial Sequence
  Description of Artificial Sequence: Synthetic oligonucleotide
  Sense strand starting at position 1553 of SEQ ID NO: 318189
gcaugauucccuugauagg

SEQ ID NO: 543634 - RNA, 19 nt, Artificial Sequence
  Description of Artificial Sequence: Synthetic oligonucleotide
  Antisense strand to SEQ ID NO: 543633
ccuaucaagggaaucaugc

SEQ ID NO: 543635 - RNA, 19 nt, Artificial Sequence
  Description of Artificial Sequence: Synthetic oligonucleotide
  Sense strand starting at position 1867 of SEQ ID NO: 318189
gcuggaagucacugacgau

SEQ ID NO: 543636 - RNA, 19 nt, Artificial Sequence
  Description of Artificial Sequence: Synthetic oligonucleotide
  Antisense strand to SEQ ID NO: 543635
aucgucagugacuuccagc

SEQ ID NO: 543637 - RNA, 19 nt, Artificial Sequence
  Description of Artificial Sequence: Synthetic oligonucleotide
  Sense strand starting at position 1898 of SEQ ID NO: 318189
ccgaauguucuccacgaac

SEQ ID NO: 543638 - RNA, 19 nt, Artificial Sequence
  Description of Artificial Sequence: Synthetic oligonucleotide
  Antisense strand to SEQ ID NO: 543637
guucguggagaacauucgg

SEQ ID NO: 543639 - RNA, 19 nt, Artificial Sequence
  Description of Artificial Sequence: Synthetic oligonucleotide
  Sense strand starting at position 1900 of SEQ ID NO: 318189
gaauguucuccacgaacuu

SEQ ID NO: 543640 - RNA, 19 nt, Artificial Sequence
  Description of Artificial Sequence: Synthetic oligonucleotide
  Antisense strand to SEQ ID NO: 543639
aaguucguggagaacauuc

SEQ ID NO: 543641 - RNA, 19 nt, Artificial Sequence
  Description of Artificial Sequence: Synthetic oligonucleotide
  Sense strand starting at position 1930 of SEQ ID NO: 318189
ccucuagguggucaaacuu

SEQ ID NO: 543642 - RNA, 19 nt, Artificial Sequence
  Description of Artificial Sequence: Synthetic oligonucleotide
  Antisense strand to SEQ ID NO: 543641
aaguuugaccaccuagagg

SEQ ID NO: 543643 - RNA, 19 nt, Artificial Sequence
  Description of Artificial Sequence: Synthetic oligonucleotide
  Sense strand starting at position 2257 of SEQ ID NO: 318189
guugaagacuuucugcaau

SEQ ID NO: 543644 - RNA, 19 nt, Artificial Sequence
  Description of Artificial Sequence: Synthetic oligonucleotide
  Antisense strand to SEQ ID NO: 543643
auugcagaaagucuucaac

SEQ ID NO: 543645 - RNA, 19 nt, Artificial Sequence
  Description of Artificial Sequence: Synthetic oligonucleotide
  Sense strand starting at position 2494 of SEQ ID NO: 318189
ggccaauucugaccaaaca

SEQ ID NO: 543646 - RNA, 19 nt, Artificial Sequence
  Description of Artificial Sequence: Synthetic oligonucleotide
  Antisense strand to SEQ ID NO: 543645
uguuuggucagaauuggcc

SEQ ID NO: 543647 - RNA, 19 nt, Artificial Sequence
  Description of Artificial Sequence: Synthetic oligonucleotide
  Sense strand starting at position 2646 of SEQ ID NO: 318189
guuugaauuucucaaguga

SEQ ID NO: 543648 - RNA, 19 nt, Artificial Sequence
  Description of Artificial Sequence: Synthetic oligonucleotide
  Antisense strand to SEQ ID NO: 543647
ucacuugagaaauucaaac

SEQ ID NO: 543649 - RNA, 19 nt, Artificial Sequence
  Description of Artificial Sequence: Synthetic oligonucleotide
  Sense strand starting at position 2680 of SEQ ID NO: 318189
auauuuguggccuguacuu

SEQ ID NO: 543650 - RNA, 19 nt, Artificial Sequence
  Description of Artificial Sequence: Synthetic oligonucleotide
  Antisense strand to SEQ ID NO: 543649
aaguacaggccacaaauau

SEQ ID NO: 543651 - RNA, 19 nt, Artificial Sequence
  Description of Artificial Sequence: Synthetic oligonucleotide
  Sense strand starting at position 2726 of SEQ ID NO: 318189
gggagcuccuuugcuagau

SEQ ID NO: 543652 - RNA, 19 nt, Artificial Sequence
  Description of Artificial Sequence: Synthetic oligonucleotide
  Antisense strand to SEQ ID NO: 543651
aucuagcaaaggagcuccc

SEQ ID NO: 543653 - RNA, 19 nt, Artificial Sequence
  Description of Artificial Sequence: Synthetic oligonucleotide
  Sense strand starting at position 2730 of SEQ ID NO: 318189
gcuccuuugcuagaugauc

SEQ ID NO: 543654 - RNA, 19 nt, Artificial Sequence
  Description of Artificial Sequence: Synthetic oligonucleotide
  Antisense strand to SEQ ID NO: 543653
gaucaucuagcaaaggagc

SEQ ID NO: 543655 - RNA, 19 nt, Artificial Sequence
  Description of Artificial Sequence: Synthetic oligonucleotide
  Sense strand starting at position 2761 of SEQ ID NO: 318189
cccagcugugaccagaaau

SEQ ID NO: 543656 - RNA, 19 nt, Artificial Sequence
  Description of Artificial Sequence: Synthetic oligonucleotide
  Antisense strand to SEQ ID NO: 543655
auuucuggucacagcuggg

SEQ ID NO: 543657 - RNA, 19 nt, Artificial Sequence
  Description of Artificial Sequence: Synthetic oligonucleotide
  Sense strand starting at position 2795 of SEQ ID NO: 318189
guaagugacuugccaaacu

SEQ ID NO: 543658 - RNA, 19 nt, Artificial Sequence
  Description of Artificial Sequence: Synthetic oligonucleotide
  Antisense strand to SEQ ID NO: 543657
aguuuggcaagucacuuac

SEQ ID NO: 543659 - RNA, 19 nt, Artificial Sequence
  Description of Artificial Sequence: Synthetic oligonucleotide
  Sense strand starting at position 3256 of SEQ ID NO: 318189
uaaguuauuagguagaggu

SEQ ID NO: 543660 - RNA, 19 nt, Artificial Sequence
  Description of Artificial Sequence: Synthetic oligonucleotide
  Antisense strand to SEQ ID NO: 543659
accucuaccuaauaacuua

SEQ ID NO: 543661 - RNA, 19 nt, Artificial Sequence
  Description of Artificial Sequence: Synthetic oligonucleotide
  Sense strand starting at position 3335 of SEQ ID NO: 318189
gaacuuaggcuuugguaag

SEQ ID NO: 543662 - RNA, 19 nt, Artificial Sequence
  Description of Artificial Sequence: Synthetic oligonucleotide
  Antisense strand to SEQ ID NO: 543661
cuuaccaaagccuaaguuc

SEQ ID NO: 543663 - RNA, 19 nt, Artificial Sequence
  Description of Artificial Sequence: Synthetic oligonucleotide
  Sense strand starting at position 3692 of SEQ ID NO: 318189
gucaccuuacacuguuaga

SEQ ID NO: 543664 - RNA, 19 nt, Artificial Sequence
  Description of Artificial Sequence: Synthetic oligonucleotide
  Antisense strand to SEQ ID NO: 543663
ucuaacaguguaaggugac

SEQ ID NO: 543665 - RNA, 19 nt, Artificial Sequence
  Description of Artificial Sequence: Synthetic oligonucleotide
  Sense strand starting at position 3802 of SEQ ID NO: 318189
uagugcagccuuuauggaa

SEQ ID NO: 543666 - RNA, 19 nt, Artificial Sequence
  Description of Artificial Sequence: Synthetic oligonucleotide
  Antisense strand to SEQ ID NO: 543665
uuccauaaaggcugcacua

SEQ ID NO: 543667 - RNA, 19 nt, Artificial Sequence
  Description of Artificial Sequence: Synthetic oligonucleotide
  Sense strand starting at position 279 of SEQ ID NO: 318190
aauuaacagugaucuggua

SEQ ID NO: 543668 - RNA, 19 nt, Artificial Sequence
  Description of Artificial Sequence: Synthetic oligonucleotide
  Antisense strand to SEQ ID NO: 543667
uaccagaucacuguuaauu

SEQ ID NO: 543669 - RNA, 19 nt, Artificial Sequence
  Description of Artificial Sequence: Synthetic oligonucleotide
  Sense strand starting at position 661 of SEQ ID NO: 318190
gagugcugcucuguacuuu

SEQ ID NO: 543670 - RNA, 19 nt, Artificial Sequence
  Description of Artificial Sequence: Synthetic oligonucleotide
  Antisense strand to SEQ ID NO: 543669
aaaguacagagcagcacuc

SEQ ID NO: 543671 - RNA, 19 nt, Artificial Sequence
  Description of Artificial Sequence: Synthetic oligonucleotide
  Sense strand starting at position 686 of SEQ ID NO: 318190
cgaugugcauuccuguauu

SEQ ID NO: 543672 - RNA, 19 nt, Artificial Sequence
  Description of Artificial Sequence: Synthetic oligonucleotide
  Antisense strand to SEQ ID NO: 543671
aauacaggaaugcacaucg

SEQ ID NO: 543673 - RNA, 19 nt, Artificial Sequence
  Description of Artificial Sequence: Synthetic oligonucleotide
  Sense strand starting at position 984 of SEQ ID NO: 318190
uuuguauuucucgguaaag

SEQ ID NO: 543674 - RNA, 19 nt, Artificial Sequence
  Description of Artificial Sequence: Synthetic oligonucleotide
  Antisense strand to SEQ ID NO: 543673
cuuuaccgagaaauacaaa

SEQ ID NO: 543675 - RNA, 19 nt, Artificial Sequence
  Description of Artificial Sequence: Synthetic oligonucleotide
  Sense strand starting at position 1117 of SEQ ID NO: 318190
cgaauuaaguucuauuauc

SEQ ID NO: 543676 - RNA, 19 nt, Artificial Sequence
  Description of Artificial Sequence: Synthetic oligonucleotide
  Antisense strand to SEQ ID NO: 543675
gauaauagaacuuaauucg

SEQ ID NO: 543677 - RNA, 19 nt, Artificial Sequence
  Description of Artificial Sequence: Synthetic oligonucleotide
  Sense strand starting at position 1251 of SEQ ID NO: 318190
agggcaagcucucuuauau

SEQ ID NO: 543678 - RNA, 19 nt, Artificial Sequence
  Description of Artificial Sequence: Synthetic oligonucleotide
  Antisense strand to SEQ ID NO: 543677
auauaagagagcuugcccu

SEQ ID NO: 543679 - RNA, 19 nt, Artificial Sequence
  Description of Artificial Sequence: Synthetic oligonucleotide
  Sense strand starting at position 1269 of SEQ ID NO: 318190
ucccuaagccgagaagcau

SEQ ID NO: 543680 - RNA, 19 nt, Artificial Sequence
  Description of Artificial Sequence: Synthetic oligonucleotide
  Antisense strand to SEQ ID NO: 543679
augcuucucggcuuaggga

SEQ ID NO: 543681 - RNA, 19 nt, Artificial Sequence
  Description of Artificial Sequence: Synthetic oligonucleotide
  Sense strand starting at position 1277 of SEQ ID NO: 318190
ccgagaagcaucuaacugu

SEQ ID NO: 543682 - RNA, 19 nt, Artificial Sequence
  Description of Artificial Sequence: Synthetic oligonucleotide
  Antisense strand to SEQ ID NO: 543681
acaguuagaugcuucucgg

SEQ ID NO: 543683 - RNA, 19 nt, Artificial Sequence
  Description of Artificial Sequence: Synthetic oligonucleotide
  Sense strand starting at position 1364 of SEQ ID NO: 318190
aaaggugauggaggucuua

SEQ ID NO: 543684 - RNA, 19 nt, Artificial Sequence
  Description of Artificial Sequence: Synthetic oligonucleotide
  Antisense strand to SEQ ID NO: 543683
uaagaccuccaucaccuuu

SEQ ID NO: 543685 - RNA, 19 nt, Artificial Sequence
  Description of Artificial Sequence: Synthetic oligonucleotide
  Sense strand starting at position 1410 of SEQ ID NO: 318190
agagcugguucuuaacuca

SEQ ID NO: 543686 - RNA, 19 nt, Artificial Sequence
  Description of Artificial Sequence: Synthetic oligonucleotide
  Antisense strand to SEQ ID NO: 543685
ugaguuaagaaccagcucu

SEQ ID NO: 543687 - RNA, 19 nt, Artificial Sequence
  Description of Artificial Sequence: Synthetic oligonucleotide
  Sense strand starting at position 1413 of SEQ ID NO: 318190
gcugguucuuaacucaaga

SEQ ID NO: 543688 - RNA, 19 nt, Artificial Sequence
  Description of Artificial Sequence: Synthetic oligonucleotide
  Antisense strand to SEQ ID NO: 543687
ucuugaguuaagaaccagc

SEQ ID NO: 543689 - RNA, 19 nt, Artificial Sequence
  Description of Artificial Sequence: Synthetic oligonucleotide
  Sense strand starting at position 1436 of SEQ ID NO: 318190
acaucuaguguuuguucua

SEQ ID NO: 543690 - RNA, 19 nt, Artificial Sequence
  Description of Artificial Sequence: Synthetic oligonucleotide
  Antisense strand to SEQ ID NO: 543689
uagaacaaacacuagaugu

SEQ ID NO: 543691 - RNA, 19 nt, Artificial Sequence
  Description of Artificial Sequence: Synthetic oligonucleotide
  Sense strand starting at position 1535 of SEQ ID NO: 318190
gugaaugggcccuagaaug

SEQ ID NO: 543692 - RNA, 19 nt, Artificial Sequence
  Description of Artificial Sequence: Synthetic oligonucleotide
  Antisense strand to SEQ ID NO: 543691
cauucuagggcccauucac

SEQ ID NO: 543693 - RNA, 19 nt, Artificial Sequence
  Description of Artificial Sequence: Synthetic oligonucleotide
  Sense strand starting at position 1583 of SEQ ID NO: 318190
gacgauuaggcuugggauc

SEQ ID NO: 543694 - RNA, 19 nt, Artificial Sequence
  Description of Artificial Sequence: Synthetic oligonucleotide
  Antisense strand to SEQ ID NO: 543693
gaucccaagccuaaucguc

SEQ ID NO: 543695 - RNA, 19 nt, Artificial Sequence
  Description of Artificial Sequence: Synthetic oligonucleotide
  Sense strand starting at position 1668 of SEQ ID NO: 318190
gagggcuacucucauguua

SEQ ID NO: 543696 - RNA, 19 nt, Artificial Sequence
  Description of Artificial Sequence: Synthetic oligonucleotide
  Antisense strand to SEQ ID NO: 543695
uaacaugagaguagcccuc

SEQ ID NO: 543697 - RNA, 19 nt, Artificial Sequence
  Description of Artificial Sequence: Synthetic oligonucleotide
  Sense strand starting at position 1701 of SEQ ID NO: 318190
gggcaaaugacucgcccaa

SEQ ID NO: 543698 - RNA, 19 nt, Artificial Sequence
  Description of Artificial Sequence: Synthetic oligonucleotide
  Antisense strand to SEQ ID NO: 543697
uugggcgagucauuugccc

SEQ ID NO: 543699 - RNA, 19 nt, Artificial Sequence
  Description of Artificial Sequence: Synthetic oligonucleotide
  Sense strand starting at position 2102 of SEQ ID NO: 318190
cggucuccuccgggaagaa

SEQ ID NO: 543700 - RNA, 19 nt, Artificial Sequence
  Description of Artificial Sequence: Synthetic oligonucleotide
  Antisense strand to SEQ ID NO: 543699
uucuucccggaggagaccg

SEQ ID NO: 543701 - RNA, 19 nt, Artificial Sequence
  Description of Artificial Sequence: Synthetic oligonucleotide
  Sense strand starting at position 2132 of SEQ ID NO: 318190
uguccuugauuggcuguaa

SEQ ID NO: 543702 - RNA, 19 nt, Artificial Sequence
  Description of Artificial Sequence: Synthetic oligonucleotide
  Antisense strand to SEQ ID NO: 543701
uuacagccaaucaaggaca

SEQ ID NO: 543703 - RNA, 19 nt, Artificial Sequence
  Description of Artificial Sequence: Synthetic oligonucleotide
  Sense strand starting at position 2143 of SEQ ID NO: 318190
ggcuguaagagcuguccuu

SEQ ID NO: 543704 - RNA, 19 nt, Artificial Sequence
  Description of Artificial Sequence: Synthetic oligonucleotide
  Antisense strand to SEQ ID NO: 543703
aaggacagcucuuacagcc

SEQ ID NO: 543705 - RNA, 19 nt, Artificial Sequence
  Description of Artificial Sequence: Synthetic oligonucleotide
  Sense strand starting at position 2150 of SEQ ID NO: 318190
agagcuguccuuuaacgaa

SEQ ID NO: 543706 - RNA, 19 nt, Artificial Sequence
  Description of Artificial Sequence: Synthetic oligonucleotide
  Antisense strand to SEQ ID NO: 543705
uucguuaaaggacagcucu

SEQ ID NO: 543707 - RNA, 19 nt, Artificial Sequence
  Description of Artificial Sequence: Synthetic oligonucleotide
  Sense strand starting at position 2377 of SEQ ID NO: 318190
uguuuaacaugcucuugua

SEQ ID NO: 543708 - RNA, 19 nt, Artificial Sequence
  Description of Artificial Sequence: Synthetic oligonucleotide
  Antisense strand to SEQ ID NO: 543707
uacaagagcauguuaaaca

SEQ ID NO: 543709 - RNA, 19 nt, Artificial Sequence
  Description of Artificial Sequence: Synthetic oligonucleotide
  Sense strand starting at position 2385 of SEQ ID NO: 318190
augcucuuguaagacuuaa

SEQ ID NO: 543710 - RNA, 19 nt, Artificial Sequence
  Description of Artificial Sequence: Synthetic oligonucleotide
  Antisense strand to SEQ ID NO: 543709
uuaagucuuacaagagcau

SEQ ID NO: 543711 - RNA, 19 nt, Artificial Sequence
  Description of Artificial Sequence: Synthetic oligonucleotide
  Sense strand starting at position 2389 of SEQ ID NO: 318190
ucuuguaagacuuaacgug

SEQ ID NO: 543712 - RNA, 19 nt, Artificial Sequence
  Description of Artificial Sequence: Synthetic oligonucleotide
  Antisense strand to SEQ ID NO: 543711
cacguuaagucuuacaaga

SEQ ID NO: 543713 - RNA, 19 nt, Artificial Sequence
  Description of Artificial Sequence: Synthetic oligonucleotide
  Sense strand starting at position 2411 of SEQ ID NO: 318190
uuagaaauuuaugacacga

SEQ ID NO: 543714 - RNA, 19 nt, Artificial Sequence
  Description of Artificial Sequence: Synthetic oligonucleotide
  Antisense strand to SEQ ID NO: 543713
ucgugucauaaauuucuaa

SEQ ID NO: 543715 - RNA, 19 nt, Artificial Sequence
  Description of Artificial Sequence: Synthetic oligonucleotide
  Sense strand starting at position 2413 of SEQ ID NO: 318190
agaaauuuaugacacgaaa

SEQ ID NO: 543716 - RNA, 19 nt, Artificial Sequence
  Description of Artificial Sequence: Synthetic oligonucleotide
  Antisense strand to SEQ ID NO: 543715
uuucgugucauaaauuucu

SEQ ID NO: 543717 - RNA, 19 nt, Artificial Sequence
  Description of Artificial Sequence: Synthetic oligonucleotide
  Sense strand starting at position 2454 of SEQ ID NO: 318190
gcuauugcgccugcguaua

SEQ ID NO: 543718 - RNA, 19 nt, Artificial Sequence
  Description of Artificial Sequence: Synthetic oligonucleotide
  Antisense strand to SEQ ID NO: 543717
uauacgcaggcgcaauagc

SEQ ID NO: 543719 - RNA, 19 nt, Artificial Sequence
  Description of Artificial Sequence: Synthetic oligonucleotide
  Sense strand starting at position 2506 of SEQ ID NO: 318190
gacuuagucgcugcuggua

SEQ ID NO: 543720 - RNA, 19 nt, Artificial Sequence
  Description of Artificial Sequence: Synthetic oligonucleotide
  Antisense strand to SEQ ID NO: 543719
uaccagcagcgacuaaguc

SEQ ID NO: 543721 - RNA, 19 nt, Artificial Sequence
  Description of Artificial Sequence: Synthetic oligonucleotide
  Sense strand starting at position 2821 of SEQ ID NO: 318190
ucucgagcucuugauauga

SEQ ID NO: 543722 - RNA, 19 nt, Artificial Sequence
  Description of Artificial Sequence: Synthetic oligonucleotide
  Antisense strand to SEQ ID NO: 543721
ucauaucaagagcucgaga

SEQ ID NO: 543723 - RNA, 19 nt, Artificial Sequence
  Description of Artificial Sequence: Synthetic oligonucleotide
  Sense strand starting at position 2823 of SEQ ID NO: 318190
ucgagcucuugauaugaag

SEQ ID NO: 543724 - RNA, 19 nt, Artificial Sequence
  Description of Artificial Sequence: Synthetic oligonucleotide
  Antisense strand to SEQ ID NO: 543723
cuucauaucaagagcucga

SEQ ID NO: 543725 - RNA, 19 nt, Artificial Sequence
  Description of Artificial Sequence: Synthetic oligonucleotide
  Sense strand starting at position 2826 of SEQ ID NO: 318190
agcucuugauaugaaguga

SEQ ID NO: 543726 - RNA, 19 nt, Artificial Sequence
  Description of Artificial Sequence: Synthetic oligonucleotide
  Antisense strand to SEQ ID NO: 543725
ucacuucauaucaagagcu

SEQ ID NO: 543727 - RNA, 19 nt, Artificial Sequence
  Description of Artificial Sequence: Synthetic oligonucleotide
  Sense strand starting at position 2921 of SEQ ID NO: 318190
ccucgcacguaucaauuua

SEQ ID NO: 543728 - RNA, 19 nt, Artificial Sequence
  Description of Artificial Sequence: Synthetic oligonucleotide
  Antisense strand to SEQ ID NO: 543727
uaaauugauacgugcgagg

SEQ ID NO: 543729 - RNA, 19 nt, Artificial Sequence
  Description of Artificial Sequence: Synthetic oligonucleotide
  Sense strand starting at position 3022 of SEQ ID NO: 318190
gugacuuccaauggucguu

SEQ ID NO: 543730 - RNA, 19 nt, Artificial Sequence
  Description of Artificial Sequence: Synthetic oligonucleotide
  Antisense strand to SEQ ID NO: 543729
aacgaccauuggaagucac

SEQ ID NO: 543731 - RNA, 19 nt, Artificial Sequence
  Description of Artificial Sequence: Synthetic oligonucleotide
  Sense strand starting at position 3075 of SEQ ID NO: 318190
uuuggcacauuugauuaau

SEQ ID NO: 543732 - RNA, 19 nt, Artificial Sequence
  Description of Artificial Sequence: Synthetic oligonucleotide
  Antisense strand to SEQ ID NO: 543731
auuaaucaaaugugccaaa

SEQ ID NO: 543733 - RNA, 19 nt, Artificial Sequence
  Description of Artificial Sequence: Synthetic oligonucleotide
  Sense strand starting at position 3105 of SEQ ID NO: 318190
ggacucaguucuccaacca

SEQ ID NO: 543734 - RNA, 19 nt, Artificial Sequence
  Description of Artificial Sequence: Synthetic oligonucleotide
  Antisense strand to SEQ ID NO: 543733
ugguuggagaacugagucc

SEQ ID NO: 543735 - RNA, 19 nt, Artificial Sequence
  Description of Artificial Sequence: Synthetic oligonucleotide
  Sense strand starting at position 3123 of SEQ ID NO: 318190
acuucucagucagauauca

SEQ ID NO: 543736 - RNA, 19 nt, Artificial Sequence
  Description of Artificial Sequence: Synthetic oligonucleotide
  Antisense strand to SEQ ID NO: 543735
ugauaucugacugagaagu

SEQ ID NO: 543737 - RNA, 19 nt, Artificial Sequence
  Description of Artificial Sequence: Synthetic oligonucleotide
  Sense strand starting at position 3132 of SEQ ID NO: 318190
ucagauaucagcuggauga

SEQ ID NO: 543738 - RNA, 19 nt, Artificial Sequence
  Description of Artificial Sequence: Synthetic oligonucleotide
  Antisense strand to SEQ ID NO: 543737
ucauccagcugauaucuga

SEQ ID NO: 543739 - RNA, 19 nt, Artificial Sequence
  Description of Artificial Sequence: Synthetic oligonucleotide
  Sense strand starting at position 3133 of SEQ ID NO: 318190
cagauaucagcuggaugau

SEQ ID NO: 543740 - RNA, 19 nt, Artificial Sequence
  Description of Artificial Sequence: Synthetic oligonucleotide
  Antisense strand to SEQ ID NO: 543739
aucauccagcugauaucug

SEQ ID NO: 543741 - RNA, 19 nt, Artificial Sequence
  Description of Artificial Sequence: Synthetic oligonucleotide
  Sense strand starting at position 3194 of SEQ ID NO: 318190
ccucauauccaguggugac

SEQ ID NO: 543742 - RNA, 19 nt, Artificial Sequence
  Description of Artificial Sequence: Synthetic oligonucleotide
  Antisense strand to SEQ ID NO: 543741
gucaccacuggauaugagg

SEQ ID NO: 543743 - RNA, 19 nt, Artificial Sequence
  Description of Artificial Sequence: Synthetic oligonucleotide
  Sense strand starting at position 3204 of SEQ ID NO: 318190
aguggugacagacaucuuu

SEQ ID NO: 543744 - RNA, 19 nt, Artificial Sequence
  Description of Artificial Sequence: Synthetic oligonucleotide
  Antisense strand to SEQ ID NO: 543743
aaagaugucugucaccacu

SEQ ID NO: 543745 - RNA, 19 nt, Artificial Sequence
  Description of Artificial Sequence: Synthetic oligonucleotide
  Sense strand starting at position 3626 of SEQ ID NO: 318190
uggaacucuuugcacagau

SEQ ID NO: 543746 - RNA, 19 nt, Artificial Sequence
  Description of Artificial Sequence: Synthetic oligonucleotide
  Antisense strand to SEQ ID NO: 543745
aucugugcaaagaguucca

SEQ ID NO: 543747 - RNA, 19 nt, Artificial Sequence
  Description of Artificial Sequence: Synthetic oligonucleotide
  Sense strand starting at position 144 of SEQ ID NO: 318191
aauuaacagugaucuggua

SEQ ID NO: 543748 - RNA, 19 nt, Artificial Sequence
  Description of Artificial Sequence: Synthetic oligonucleotide
  Antisense strand to SEQ ID NO: 543747
uaccagaucacuguuaauu

SEQ ID NO: 543749 - RNA, 19 nt, Artificial Sequence
  Description of Artificial Sequence: Synthetic oligonucleotide
  Sense strand starting at position 526 of SEQ ID NO: 318191
gagugcugcucuguacuuu

SEQ ID NO: 543750 - RNA, 19 nt, Artificial Sequence
  Description of Artificial Sequence: Synthetic oligonucleotide
  Antisense strand to SEQ ID NO: 543749
aaaguacagagcagcacuc

SEQ ID NO: 543751 - RNA, 19 nt, Artificial Sequence
  Description of Artificial Sequence: Synthetic oligonucleotide
  Sense strand starting at position 551 of SEQ ID NO: 318191
cgaugugcauuccuguauu

SEQ ID NO: 543752 - RNA, 19 nt, Artificial Sequence
  Description of Artificial Sequence: Synthetic oligonucleotide
  Antisense strand to SEQ ID NO: 543751
aauacaggaaugcacaucg

SEQ ID NO: 543753 - RNA, 19 nt, Artificial Sequence
  Description of Artificial Sequence: Synthetic oligonucleotide
  Sense strand starting at position 849 of SEQ ID NO: 318191
uuuguauuucucgguaaag

SEQ ID NO: 543754 - RNA, 19 nt, Artificial Sequence
  Description of Artificial Sequence: Synthetic oligonucleotide
  Antisense strand to SEQ ID NO: 543753
cuuuaccgagaaauacaaa

SEQ ID NO: 543755 - RNA, 19 nt, Artificial Sequence
  Description of Artificial Sequence: Synthetic oligonucleotide
  Sense strand starting at position 982 of SEQ ID NO: 318191
cgaauuaaguucuauuauc

SEQ ID NO: 543756 - RNA, 19 nt, Artificial Sequence
  Description of Artificial Sequence: Synthetic oligonucleotide
  Antisense strand to SEQ ID NO: 543755
gauaauagaacuuaauucg

SEQ ID NO: 543757 - RNA, 19 nt, Artificial Sequence
  Description of Artificial Sequence: Synthetic oligonucleotide
  Sense strand starting at position 1116 of SEQ ID NO: 318191
agggcaagcucucuuauau

SEQ ID NO: 543758 - RNA, 19 nt, Artificial Sequence
  Description of Artificial Sequence: Synthetic oligonucleotide
  Antisense strand to SEQ ID NO: 543757
auauaagagagcuugcccu

SEQ ID NO: 543759 - RNA, 19 nt, Artificial Sequence
  Description of Artificial Sequence: Synthetic oligonucleotide
  Sense strand starting at position 1134 of SEQ ID NO: 318191
ucccuaagccgagaagcau

SEQ ID NO: 543760 - RNA, 19 nt, Artificial Sequence
  Description of Artificial Sequence: Synthetic oligonucleotide
  Antisense strand to SEQ ID NO: 543759
augcuucucggcuuaggga

SEQ ID NO: 543761 - RNA, 19 nt, Artificial Sequence
  Description of Artificial Sequence: Synthetic oligonucleotide
  Sense strand starting at position 1142 of SEQ ID NO: 318191
ccgagaagcaucuaacugu

SEQ ID NO: 543762 - RNA, 19 nt, Artificial Sequence
  Description of Artificial Sequence: Synthetic oligonucleotide
  Antisense strand to SEQ ID NO: 543761
acaguuagaugcuucucgg

SEQ ID NO: 543763 - RNA, 19 nt, Artificial Sequence
  Description of Artificial Sequence: Synthetic oligonucleotide
  Sense strand starting at position 1229 of SEQ ID NO: 318191
aaaggugauggaggucuua

SEQ ID NO: 543764 - RNA, 19 nt, Artificial Sequence
  Description of Artificial Sequence: Synthetic oligonucleotide
  Antisense strand to SEQ ID NO: 543763
uaagaccuccaucaccuuu

SEQ ID NO: 543765 - RNA, 19 nt, Artificial Sequence
  Description of Artificial Sequence: Synthetic oligonucleotide
  Sense strand starting at position 1278 of SEQ ID NO: 318191
gcugguucuuaacucaaga

SEQ ID NO: 543766 - RNA, 19 nt, Artificial Sequence
  Description of Artificial Sequence: Synthetic oligonucleotide
  Antisense strand to SEQ ID NO: 543765
ucuugaguuaagaaccagc

SEQ ID NO: 543767 - RNA, 19 nt, Artificial Sequence
  Description of Artificial Sequence: Synthetic oligonucleotide
  Sense strand starting at position 1301 of SEQ ID NO: 318191
acaucuaguguuuguucua

SEQ ID NO: 543768 - RNA, 19 nt, Artificial Sequence
  Description of Artificial Sequence: Synthetic oligonucleotide
  Antisense strand to SEQ ID NO: 543767
uagaacaaacacuagaugu

SEQ ID NO: 543769 - RNA, 19 nt, Artificial Sequence
  Description of Artificial Sequence: Synthetic oligonucleotide
  Sense strand starting at position 1400 of SEQ ID NO: 318191
gugaaugggcccuagaaug

SEQ ID NO: 543770 - RNA, 19 nt, Artificial Sequence
  Description of Artificial Sequence: Synthetic oligonucleotide
  Antisense strand to SEQ ID NO: 543769
cauucuagggcccauucac

SEQ ID NO: 543771 - RNA, 19 nt, Artificial Sequence
  Description of Artificial Sequence: Synthetic oligonucleotide
  Sense strand starting at position 1448 of SEQ ID NO: 318191
gacgauuaggcuugggauc

SEQ ID NO: 543772 - RNA, 19 nt, Artificial Sequence
  Description of Artificial Sequence: Synthetic oligonucleotide
  Antisense strand to SEQ ID NO: 543771
gaucccaagccuaaucguc

SEQ ID NO: 543773 - RNA, 19 nt, Artificial Sequence
  Description of Artificial Sequence: Synthetic oligonucleotide
  Sense strand starting at position 1566 of SEQ ID NO: 318191
gggcaaaugacucgcccaa

SEQ ID NO: 543774 - RNA, 19 nt, Artificial Sequence
  Description of Artificial Sequence: Synthetic oligonucleotide
  Antisense strand to SEQ ID NO: 543773
uugggcgagucauuugccc

SEQ ID NO: 543775 - RNA, 19 nt, Artificial Sequence
  Description of Artificial Sequence: Synthetic oligonucleotide
  Sense strand starting at position 1967 of SEQ ID NO: 318191
cggucuccuccgggaagaa

SEQ ID NO: 543776 - RNA, 19 nt, Artificial Sequence
  Description of Artificial Sequence: Synthetic oligonucleotide
  Antisense strand to SEQ ID NO: 543775
uucuucccggaggagaccg

SEQ ID NO: 543777 - RNA, 19 nt, Artificial Sequence
  Description of Artificial Sequence: Synthetic oligonucleotide
  Sense strand starting at position 1997 of SEQ ID NO: 318191
uguccuugauuggcuguaa

SEQ ID NO: 543778 - RNA, 19 nt, Artificial Sequence
  Description of Artificial Sequence: Synthetic oligonucleotide
  Antisense strand to SEQ ID NO: 543777
uuacagccaaucaaggaca

SEQ ID NO: 543779 - RNA, 19 nt, Artificial Sequence
  Description of Artificial Sequence: Synthetic oligonucleotide
  Sense strand starting at position 2008 of SEQ ID NO: 318191
ggcuguaagagcuguccuu

SEQ ID NO: 543780 - RNA, 19 nt, Artificial Sequence
  Description of Artificial Sequence: Synthetic oligonucleotide
  Antisense strand to SEQ ID NO: 543779
aaggacagcucuuacagcc

SEQ ID NO: 543781 - RNA, 19 nt, Artificial Sequence
  Description of Artificial Sequence: Synthetic oligonucleotide
  Sense strand starting at position 2015 of SEQ ID NO: 318191
agagcuguccuuuaacgaa

SEQ ID NO: 543782 - RNA, 19 nt, Artificial Sequence
  Description of Artificial Sequence: Synthetic oligonucleotide
  Antisense strand to SEQ ID NO: 543781
uucguuaaaggacagcucu

SEQ ID NO: 543783 - RNA, 19 nt, Artificial Sequence
  Description of Artificial Sequence: Synthetic oligonucleotide
  Sense strand starting at position 2242 of SEQ ID NO: 318191
uguuuaacaugcucuugua

SEQ ID NO: 543784 - RNA, 19 nt, Artificial Sequence
  Description of Artificial Sequence: Synthetic oligonucleotide
  Antisense strand to SEQ ID NO: 543783
uacaagagcauguuaaaca

SEQ ID NO: 543785 - RNA, 19 nt, Artificial Sequence
  Description of Artificial Sequence: Synthetic oligonucleotide
  Sense strand starting at position 2250 of SEQ ID NO: 318191
augcucuuguaagacuuaa

SEQ ID NO: 543786 - RNA, 19 nt, Artificial Sequence
  Description of Artificial Sequence: Synthetic oligonucleotide
  Antisense strand to SEQ ID NO: 543785
uuaagucuuacaagagcau

SEQ ID NO: 543787 - RNA, 19 nt, Artificial Sequence
  Description of Artificial Sequence: Synthetic oligonucleotide
  Sense strand starting at position 2254 of SEQ ID NO: 318191
ucuuguaagacuuaacgug

SEQ ID NO: 543788 - RNA, 19 nt, Artificial Sequence
  Description of Artificial Sequence: Synthetic oligonucleotide
  Antisense strand to SEQ ID NO: 543787
cacguuaagucuuacaaga

SEQ ID NO: 543789 - RNA, 19 nt, Artificial Sequence
  Description of Artificial Sequence: Synthetic oligonucleotide
  Sense strand starting at position 2276 of SEQ ID NO: 318191
uuagaaauuuaugacacga

SEQ ID NO: 543790 - RNA, 19 nt, Artificial Sequence
  Description of Artificial Sequence: Synthetic oligonucleotide
  Antisense strand to SEQ ID NO: 543789
ucgugucauaaauuucuaa

SEQ ID NO: 543791 - RNA, 19 nt, Artificial Sequence
  Description of Artificial Sequence: Synthetic oligonucleotide
  Sense strand starting at position 2278 of SEQ ID NO: 318191
agaaauuuaugacacgaaa

SEQ ID NO: 543792 - RNA, 19 nt, Artificial Sequence
  Description of Artificial Sequence: Synthetic oligonucleotide
  Antisense strand to SEQ ID NO: 543791
uuucgugucauaaauuucu

SEQ ID NO: 543793 - RNA, 19 nt, Artificial Sequence
  Description of Artificial Sequence: Synthetic oligonucleotide
  Sense strand starting at position 2319 of SEQ ID NO: 318191
gcuauugcgccugcguaua

SEQ ID NO: 543794 - RNA, 19 nt, Artificial Sequence
  Description of Artificial Sequence: Synthetic oligonucleotide
  Antisense strand to SEQ ID NO: 543793
uauacgcaggcgcaauagc

SEQ ID NO: 543795 - RNA, 19 nt, Artificial Sequence
  Description of Artificial Sequence: Synthetic oligonucleotide
  Sense strand starting at position 2371 of SEQ ID NO: 318191
gacuuagucgcugcuggua

SEQ ID NO: 543796 - RNA, 19 nt, Artificial Sequence
  Description of Artificial Sequence: Synthetic oligonucleotide
  Antisense strand to SEQ ID NO: 543795
uaccagcagcgacuaaguc

SEQ ID NO: 543797 - RNA, 19 nt, Artificial Sequence
  Description of Artificial Sequence: Synthetic oligonucleotide
  Sense strand starting at position 2686 of SEQ ID NO: 318191
ucucgagcucuugauauga

SEQ ID NO: 543798 - RNA, 19 nt, Artificial Sequence
  Description of Artificial Sequence: Synthetic oligonucleotide
  Antisense strand to SEQ ID NO: 543797
ucauaucaagagcucgaga

SEQ ID NO: 543799 - RNA, 19 nt, Artificial Sequence
  Description of Artificial Sequence: Synthetic oligonucleotide
  Sense strand starting at position 2688 of SEQ ID NO: 318191
ucgagcucuugauaugaag

SEQ ID NO: 543800 - RNA, 19 nt, Artificial Sequence
  Description of Artificial Sequence: Synthetic oligonucleotide
  Antisense strand to SEQ ID NO: 543799
cuucauaucaagagcucga

SEQ ID NO: 543801 - RNA, 19 nt, Artificial Sequence
  Description of Artificial Sequence: Synthetic oligonucleotide
  Sense strand starting at position 2691 of SEQ ID NO: 318191
agcucuugauaugaaguga

SEQ ID NO: 543802 - RNA, 19 nt, Artificial Sequence
  Description of Artificial Sequence: Synthetic oligonucleotide
  Antisense strand to SEQ ID NO: 543801
ucacuucauaucaagagcu

SEQ ID NO: 543803 - RNA, 19 nt, Artificial Sequence
  Description of Artificial Sequence: Synthetic oligonucleotide
  Sense strand starting at position 2786 of SEQ ID NO: 318191
ccucgcacguaucaauuua

SEQ ID NO: 543804 - RNA, 19 nt, Artificial Sequence
  Description of Artificial Sequence: Synthetic oligonucleotide
  Antisense strand to SEQ ID NO: 543803
uaaauugauacgugcgagg

SEQ ID NO: 543805 - RNA, 19 nt, Artificial Sequence
  Description of Artificial Sequence: Synthetic oligonucleotide
  Sense strand starting at position 2887 of SEQ ID NO: 318191
gugacuuccaauggucguu

SEQ ID NO: 543806 - RNA, 19 nt, Artificial Sequence
  Description of Artificial Sequence: Synthetic oligonucleotide
  Antisense strand to SEQ ID NO: 543805
aacgaccauuggaagucac

SEQ ID NO: 543807 - RNA, 19 nt, Artificial Sequence
  Description of Artificial Sequence: Synthetic oligonucleotide
  Sense strand starting at position 2940 of SEQ ID NO: 318191
uuuggcacauuugauuaau

SEQ ID NO: 543808 - RNA, 19 nt, Artificial Sequence
  Description of Artificial Sequence: Synthetic oligonucleotide
  Antisense strand to SEQ ID NO: 543807
auuaaucaaaugugccaaa

SEQ ID NO: 543809 - RNA, 19 nt, Artificial Sequence
  Description of Artificial Sequence: Synthetic oligonucleotide
  Sense strand starting at position 2970 of SEQ ID NO: 318191
ggacucaguucuccaacca

SEQ ID NO: 543810 - RNA, 19 nt, Artificial Sequence
  Description of Artificial Sequence: Synthetic oligonucleotide
  Antisense strand to SEQ ID NO: 543809
ugguuggagaacugagucc

SEQ ID NO: 543811 - RNA, 19 nt, Artificial Sequence
  Description of Artificial Sequence: Synthetic oligonucleotide
  Sense strand starting at position 2988 of SEQ ID NO: 318191
acuucucagucagauauca

SEQ ID NO: 543812 - RNA, 19 nt, Artificial Sequence
  Description of Artificial Sequence: Synthetic oligonucleotide
  Antisense strand to SEQ ID NO: 543811
ugauaucugacugagaagu

SEQ ID NO: 543813 - RNA, 19 nt, Artificial Sequence
  Description of Artificial Sequence: Synthetic oligonucleotide
  Sense strand starting at position 2997 of SEQ ID NO: 318191
ucagauaucagcuggauga

SEQ ID NO: 543814 - RNA, 19 nt, Artificial Sequence
  Description of Artificial Sequence: Synthetic oligonucleotide
  Antisense strand to SEQ ID NO: 543813
ucauccagcugauaucuga

SEQ ID NO: 543815 - RNA, 19 nt, Artificial Sequence
  Description of Artificial Sequence: Synthetic oligonucleotide
  Sense strand starting at position 2998 of SEQ ID NO: 318191
cagauaucagcuggaugau

SEQ ID NO: 543816 - RNA, 19 nt, Artificial Sequence
  Description of Artificial Sequence: Synthetic oligonucleotide
  Antisense strand to SEQ ID NO: 543815
aucauccagcugauaucug

SEQ ID NO: 543817 - RNA, 19 nt, Artificial Sequence
  Description of Artificial Sequence: Synthetic oligonucleotide
  Sense strand starting at position 3059 of SEQ ID NO: 318191
ccucauauccaguggugac

SEQ ID NO: 543818 - RNA, 19 nt, Artificial Sequence
  Description of Artificial Sequence: Synthetic oligonucleotide
  Antisense strand to SEQ ID NO: 543817
gucaccacuggauaugagg

SEQ ID NO: 543819 - RNA, 19 nt, Artificial Sequence
  Description of Artificial Sequence: Synthetic oligonucleotide
  Sense strand starting at position 3069 of SEQ ID NO: 318191
aguggugacagacaucuuu

SEQ ID NO: 543820 - RNA, 19 nt, Artificial Sequence
  Description of Artificial Sequence: Synthetic oligonucleotide
  Antisense strand to SEQ ID NO: 543819
aaagaugucugucaccacu

SEQ ID NO: 543821 - RNA, 19 nt, Artificial Sequence
  Description of Artificial Sequence: Synthetic oligonucleotide
  Sense strand starting at position 3491 of SEQ ID NO: 318191
uggaacucuuugcacagau

SEQ ID NO: 543822 - RNA, 19 nt, Artificial Sequence
  Description of Artificial Sequence: Synthetic oligonucleotide
  Antisense strand to SEQ ID NO: 543821
aucugugcaaagaguucca

SEQ ID NO: 543823 - RNA, 19 nt, Artificial Sequence
  Description of Artificial Sequence: Synthetic oligonucleotide
  Sense strand starting at position 3940 of SEQ ID NO: 318191
ccuaaucuuucucuuggga

SEQ ID NO: 543824 - RNA, 19 nt, Artificial Sequence
  Description of Artificial Sequence: Synthetic oligonucleotide
  Antisense strand to SEQ ID NO: 543823
ucccaagagaaagauuagg

SEQ ID NO: 543825 - RNA, 19 nt, Artificial Sequence
  Description of Artificial Sequence: Synthetic oligonucleotide
  Sense strand starting at position 3944 of SEQ ID NO: 318191
aucuuucucuugggagaug

SEQ ID NO: 543826 - RNA, 19 nt, Artificial Sequence
  Description of Artificial Sequence: Synthetic oligonucleotide
  Antisense strand to SEQ ID NO: 543825
caucucccaagagaaagau

SEQ ID NO: 543827 - RNA, 19 nt, Artificial Sequence
  Description of Artificial Sequence: Synthetic oligonucleotide
  Sense strand starting at position 9 of SEQ ID NO: 318192
uauugugauuguuuaggaa

SEQ ID NO: 543828 - RNA, 19 nt, Artificial Sequence
  Description of Artificial Sequence: Synthetic oligonucleotide
  Antisense strand to SEQ ID NO: 543827
uuccuaaacaaucacaaua

SEQ ID NO: 543829 - RNA, 19 nt, Artificial Sequence
  Description of Artificial Sequence: Synthetic oligonucleotide
  Sense strand starting at position 139 of SEQ ID NO: 318192
uacucaggugucugaauca

SEQ ID NO: 543830 - RNA, 19 nt, Artificial Sequence
  Description of Artificial Sequence: Synthetic oligonucleotide
  Antisense strand to SEQ ID NO: 543829
ugauucagacaccugagua

SEQ ID NO: 543831 - RNA, 19 nt, Artificial Sequence
  Description of Artificial Sequence: Synthetic oligonucleotide
  Sense strand starting at position 369 of SEQ ID NO: 318192
uuuguuuggguggaguauu

SEQ ID NO: 543832 - RNA, 19 nt, Artificial Sequence
  Description of Artificial Sequence: Synthetic oligonucleotide
  Antisense strand to SEQ ID NO: 543831
aauacuccacccaaacaaa

SEQ ID NO: 543833 - RNA, 19 nt, Artificial Sequence
  Description of Artificial Sequence: Synthetic oligonucleotide
  Sense strand starting at position 379 of SEQ ID NO: 318192
uggaguauuucugauaauu

SEQ ID NO: 543834 - RNA, 19 nt, Artificial Sequence
  Description of Artificial Sequence: Synthetic oligonucleotide
  Antisense strand to SEQ ID NO: 543833
aauuaucagaaauacucca

SEQ ID NO: 543835 - RNA, 19 nt, Artificial Sequence
  Description of Artificial Sequence: Synthetic oligonucleotide
  Sense strand starting at position 449 of SEQ ID NO: 318192
aagaguauguuaguuauac

SEQ ID NO: 543836 - RNA, 19 nt, Artificial Sequence
  Description of Artificial Sequence: Synthetic oligonucleotide
  Antisense strand to SEQ ID NO: 543835
guauaacuaacauacucuu

SEQ ID NO: 543837 - RNA, 19 nt, Artificial Sequence
  Description of Artificial Sequence: Synthetic oligonucleotide
  Sense strand starting at position 450 of SEQ ID NO: 318192
agaguauguuaguuauaca

SEQ ID NO: 543838 - RNA, 19 nt, Artificial Sequence
  Description of Artificial Sequence: Synthetic oligonucleotide
  Antisense strand to SEQ ID NO: 543837
uguauaacuaacauacucu

SEQ ID NO: 543839 - RNA, 19 nt, Artificial Sequence
  Description of Artificial Sequence: Synthetic oligonucleotide
  Sense strand starting at position 481 of SEQ ID NO: 318192
ccaugucgucacugauuua

SEQ ID NO: 543840 - RNA, 19 nt, Artificial Sequence
  Description of Artificial Sequence: Synthetic oligonucleotide
  Antisense strand to SEQ ID NO: 543839
uaaaucagugacgacaugg

SEQ ID NO: 543841 - RNA, 19 nt, Artificial Sequence
  Description of Artificial Sequence: Synthetic oligonucleotide
  Sense strand starting at position 510 of SEQ ID NO: 318192
cagguacaguggucauuaa

SEQ ID NO: 543842 - RNA, 19 nt, Artificial Sequence
  Description of Artificial Sequence: Synthetic oligonucleotide
  Antisense strand to SEQ ID NO: 543841
uuaaugaccacuguaccug

SEQ ID NO: 543843 - RNA, 19 nt, Artificial Sequence
  Description of Artificial Sequence: Synthetic oligonucleotide
  Sense strand starting at position 511 of SEQ ID NO: 318192
agguacaguggucauuaaa

SEQ ID NO: 543844 - RNA, 19 nt, Artificial Sequence
  Description of Artificial Sequence: Synthetic oligonucleotide
  Antisense strand to SEQ ID NO: 543843
uuuaaugaccacuguaccu

SEQ ID NO: 543845 - RNA, 19 nt, Artificial Sequence
  Description of Artificial Sequence: Synthetic oligonucleotide
  Sense strand starting at position 565 of SEQ ID NO: 318192
auguguuaaggauguagau

SEQ ID NO: 543846 - RNA, 19 nt, Artificial Sequence
  Description of Artificial Sequence: Synthetic oligonucleotide
  Antisense strand to SEQ ID NO: 543845
aucuacauccuuaacacau

SEQ ID NO: 543847 - RNA, 19 nt, Artificial Sequence
  Description of Artificial Sequence: Synthetic oligonucleotide
  Sense strand starting at position 588 of SEQ ID NO: 318192
aguuauuuaugggaucauc

SEQ ID NO: 543848 - RNA, 19 nt, Artificial Sequence
  Description of Artificial Sequence: Synthetic oligonucleotide
  Antisense strand to SEQ ID NO: 543847
gaugaucccauaaauaacu

SEQ ID NO: 543849 - RNA, 19 nt, Artificial Sequence
  Description of Artificial Sequence: Synthetic oligonucleotide
  Sense strand starting at position 639 of SEQ ID NO: 318192
uuuauauugguaggagucu

SEQ ID NO: 543850 - RNA, 19 nt, Artificial Sequence
  Description of Artificial Sequence: Synthetic oligonucleotide
  Antisense strand to SEQ ID NO: 543849
agacuccuaccaauauaaa

SEQ ID NO: 543851 - RNA, 19 nt, Artificial Sequence
  Description of Artificial Sequence: Synthetic oligonucleotide
  Sense strand starting at position 776 of SEQ ID NO: 318192
guugcuugugaauauggaa

SEQ ID NO: 543852 - RNA, 19 nt, Artificial Sequence
  Description of Artificial Sequence: Synthetic oligonucleotide
  Antisense strand to SEQ ID NO: 543851
uuccauauucacaagcaac

SEQ ID NO: 543853 - RNA, 19 nt, Artificial Sequence
  Description of Artificial Sequence: Synthetic oligonucleotide
  Sense strand starting at position 902 of SEQ ID NO: 318192
agagaaaugcugugaagca

SEQ ID NO: 543854 - RNA, 19 nt, Artificial Sequence
  Description of Artificial Sequence: Synthetic oligonucleotide
  Antisense strand to SEQ ID NO: 543853
ugcuucacagcauuucucu

SEQ ID NO: 543855 - RNA, 19 nt, Artificial Sequence
  Description of Artificial Sequence: Synthetic oligonucleotide
  Sense strand starting at position 1092 of SEQ ID NO: 318192
uuuggaaaucagugaugua

SEQ ID NO: 543856 - RNA, 19 nt, Artificial Sequence
  Description of Artificial Sequence: Synthetic oligonucleotide
  Antisense strand to SEQ ID NO: 543855
uacaucacugauuuccaaa

SEQ ID NO: 543857 - RNA, 19 nt, Artificial Sequence
  Description of Artificial Sequence: Synthetic oligonucleotide
  Sense strand starting at position 1127 of SEQ ID NO: 318192
ccgucuugguuguuaauuu

SEQ ID NO: 543858 - RNA, 19 nt, Artificial Sequence
  Description of Artificial Sequence: Synthetic oligonucleotide
  Antisense strand to SEQ ID NO: 543857
aaauuaacaaccaagacgg

SEQ ID NO: 543859 - RNA, 19 nt, Artificial Sequence
  Description of Artificial Sequence: Synthetic oligonucleotide
  Sense strand starting at position 2067 of SEQ ID NO: 318192
ucugucacucuggaguaaa

SEQ ID NO: 543860 - RNA, 19 nt, Artificial Sequence
  Description of Artificial Sequence: Synthetic oligonucleotide
  Antisense strand to SEQ ID NO: 543859
uuuacuccagagugacaga

SEQ ID NO: 543861 - RNA, 19 nt, Artificial Sequence
  Description of Artificial Sequence: Synthetic oligonucleotide
  Sense strand starting at position 2348 of SEQ ID NO: 318192
aauuaauuguggcuggaaa

SEQ ID NO: 543862 - RNA, 19 nt, Artificial Sequence
  Description of Artificial Sequence: Synthetic oligonucleotide
  Antisense strand to SEQ ID NO: 543861
uuuccagccacaauuaauu

SEQ ID NO: 543863 - RNA, 19 nt, Artificial Sequence
  Description of Artificial Sequence: Synthetic oligonucleotide
  Sense strand starting at position 2349 of SEQ ID NO: 318192
auuaauuguggcuggaaac

SEQ ID NO: 543864 - RNA, 19 nt, Artificial Sequence
  Description of Artificial Sequence: Synthetic oligonucleotide
  Antisense strand to SEQ ID NO: 543863
guuuccagccacaauuaau

SEQ ID NO: 543865 - RNA, 19 nt, Artificial Sequence
  Description of Artificial Sequence: Synthetic oligonucleotide
  Sense strand starting at position 2350 of SEQ ID NO: 318192
uuaauuguggcuggaaacu

SEQ ID NO: 543866 - RNA, 19 nt, Artificial Sequence
  Description of Artificial Sequence: Synthetic oligonucleotide
  Antisense strand to SEQ ID NO: 543865
aguuuccagccacaauuaa

SEQ ID NO: 543867 - RNA, 19 nt, Artificial Sequence
  Description of Artificial Sequence: Synthetic oligonucleotide
  Sense strand starting at position 2549 of SEQ ID NO: 318192
uguaguucugagggacuga

SEQ ID NO: 543868 - RNA, 19 nt, Artificial Sequence
  Description of Artificial Sequence: Synthetic oligonucleotide
  Antisense strand to SEQ ID NO: 543867
ucagucccucagaacuaca

SEQ ID NO: 543869 - RNA, 19 nt, Artificial Sequence
  Description of Artificial Sequence: Synthetic oligonucleotide
  Sense strand starting at position 2638 of SEQ ID NO: 318192
gcagcuaaggucuauggaa

SEQ ID NO: 543870 - RNA, 19 nt, Artificial Sequence
  Description of Artificial Sequence: Synthetic oligonucleotide
  Antisense strand to SEQ ID NO: 543869
uuccauagaccuuagcugc

SEQ ID NO: 543871 - RNA, 19 nt, Artificial Sequence
  Description of Artificial Sequence: Synthetic oligonucleotide
  Sense strand starting at position 2640 of SEQ ID NO: 318192
agcuaaggucuauggaaac

SEQ ID NO: 543872 - RNA, 19 nt, Artificial Sequence
  Description of Artificial Sequence: Synthetic oligonucleotide
  Antisense strand to SEQ ID NO: 543871
guuuccauagaccuuagcu

SEQ ID NO: 543873 - RNA, 19 nt, Artificial Sequence
  Description of Artificial Sequence: Synthetic oligonucleotide
  Sense strand starting at position 2716 of SEQ ID NO: 318192
ggacguuuaucauuuaugu

SEQ ID NO: 543874 - RNA, 19 nt, Artificial Sequence
  Description of Artificial Sequence: Synthetic oligonucleotide
  Antisense strand to SEQ ID NO: 543873
acauaaaugauaaacgucc

SEQ ID NO: 543875 - RNA, 19 nt, Artificial Sequence
  Description of Artificial Sequence: Synthetic oligonucleotide
  Sense strand starting at position 2763 of SEQ ID NO: 318192
ugguuugagcaauauuccu

SEQ ID NO: 543876 - RNA, 19 nt, Artificial Sequence
  Description of Artificial Sequence: Synthetic oligonucleotide
  Antisense strand to SEQ ID NO: 543875
aggaauauugcucaaacca

SEQ ID NO: 543877 - RNA, 19 nt, Artificial Sequence
  Description of Artificial Sequence: Synthetic oligonucleotide
  Sense strand starting at position 2864 of SEQ ID NO: 318192
ggaguaacauccuuagcca

SEQ ID NO: 543878 - RNA, 19 nt, Artificial Sequence
  Description of Artificial Sequence: Synthetic oligonucleotide
  Antisense strand to SEQ ID NO: 543877
uggcuaaggauguuacucc

SEQ ID NO: 543879 - RNA, 19 nt, Artificial Sequence
  Description of Artificial Sequence: Synthetic oligonucleotide
  Sense strand starting at position 2867 of SEQ ID NO: 318192
guaacauccuuagccaaag

SEQ ID NO: 543880 - RNA, 19 nt, Artificial Sequence
  Description of Artificial Sequence: Synthetic oligonucleotide
  Antisense strand to SEQ ID NO: 543879
cuuuggcuaaggauguuac

SEQ ID NO: 543881 - RNA, 19 nt, Artificial Sequence
  Description of Artificial Sequence: Synthetic oligonucleotide
  Sense strand starting at position 2912 of SEQ ID NO: 318192
augauuucuuaaguguugu

SEQ ID NO: 543882 - RNA, 19 nt, Artificial Sequence
  Description of Artificial Sequence: Synthetic oligonucleotide
  Antisense strand to SEQ ID NO: 543881
acaacacuuaagaaaucau

SEQ ID NO: 543883 - RNA, 19 nt, Artificial Sequence
  Description of Artificial Sequence: Synthetic oligonucleotide
  Sense strand starting at position 2913 of SEQ ID NO: 318192
ugauuucuuaaguguuguu

SEQ ID NO: 543884 - RNA, 19 nt, Artificial Sequence
  Description of Artificial Sequence: Synthetic oligonucleotide
  Antisense strand to SEQ ID NO: 543883
aacaacacuuaagaaauca

SEQ ID NO: 543885 - RNA, 19 nt, Artificial Sequence
  Description of Artificial Sequence: Synthetic oligonucleotide
  Sense strand starting at position 2978 of SEQ ID NO: 318192
acaggaguugggugugaug

SEQ ID NO: 543886 - RNA, 19 nt, Artificial Sequence
  Description of Artificial Sequence: Synthetic oligonucleotide
  Antisense strand to SEQ ID NO: 543885
caucacacccaacuccugu

SEQ ID NO: 543887 - RNA, 19 nt, Artificial Sequence
  Description of Artificial Sequence: Synthetic oligonucleotide
  Sense strand starting at position 3210 of SEQ ID NO: 318192
aaccuagcugaguacugaa

SEQ ID NO: 543888 - RNA, 19 nt, Artificial Sequence
  Description of Artificial Sequence: Synthetic oligonucleotide
  Antisense strand to SEQ ID NO: 543887
uucaguacucagcuagguu

SEQ ID NO: 543889 - RNA, 19 nt, Artificial Sequence
  Description of Artificial Sequence: Synthetic oligonucleotide
  Sense strand starting at position 3289 of SEQ ID NO: 318192
gaaacagguucuuuauugu

SEQ ID NO: 543890 - RNA, 19 nt, Artificial Sequence
  Description of Artificial Sequence: Synthetic oligonucleotide
  Antisense strand to SEQ ID NO: 543889
acaauaaagaaccuguuuc

SEQ ID NO: 543891 - RNA, 19 nt, Artificial Sequence
  Description of Artificial Sequence: Synthetic oligonucleotide
  Sense strand starting at position 3304 of SEQ ID NO: 318192
uuguuaugugcgucauaac

SEQ ID NO: 543892 - RNA, 19 nt, Artificial Sequence
  Description of Artificial Sequence: Synthetic oligonucleotide
  Antisense strand to SEQ ID NO: 543891
guuaugacgcacauaacaa

SEQ ID NO: 543893 - RNA, 19 nt, Artificial Sequence
  Description of Artificial Sequence: Synthetic oligonucleotide
  Sense strand starting at position 3484 of SEQ ID NO: 318192
gggaguacuuucuuaauug

SEQ ID NO: 543894 - RNA, 19 nt, Artificial Sequence
  Description of Artificial Sequence: Synthetic oligonucleotide
  Antisense strand to SEQ ID NO: 543893
caauuaagaaaguacuccc

SEQ ID NO: 543895 - RNA, 19 nt, Artificial Sequence
  Description of Artificial Sequence: Synthetic oligonucleotide
  Sense strand starting at position 3562 of SEQ ID NO: 318192
uugguaaacauguauggca

SEQ ID NO: 543896 - RNA, 19 nt, Artificial Sequence
  Description of Artificial Sequence: Synthetic oligonucleotide
  Antisense strand to SEQ ID NO: 543895
ugccauacauguuuaccaa

SEQ ID NO: 543897 - RNA, 19 nt, Artificial Sequence
  Description of Artificial Sequence: Synthetic oligonucleotide
  Sense strand starting at position 3564 of SEQ ID NO: 318192
gguaaacauguauggcaau

SEQ ID NO: 543898 - RNA, 19 nt, Artificial Sequence
  Description of Artificial Sequence: Synthetic oligonucleotide
  Antisense strand to SEQ ID NO: 543897
auugccauacauguuuacc

SEQ ID NO: 543899 - RNA, 19 nt, Artificial Sequence
  Description of Artificial Sequence: Synthetic oligonucleotide
  Sense strand starting at position 3661 of SEQ ID NO: 318192
ucuugaaaguaaguguaau

SEQ ID NO: 543900 - RNA, 19 nt, Artificial Sequence
  Description of Artificial Sequence: Synthetic oligonucleotide
  Antisense strand to SEQ ID NO: 543899
auuacacuuacuuucaaga

SEQ ID NO: 543901 - RNA, 19 nt, Artificial Sequence
  Description of Artificial Sequence: Synthetic oligonucleotide
  Sense strand starting at position 3662 of SEQ ID NO: 318192
cuugaaaguaaguguaaug

SEQ ID NO: 543902 - RNA, 19 nt, Artificial Sequence
  Description of Artificial Sequence: Synthetic oligonucleotide
  Antisense strand to SEQ ID NO: 543901
cauuacacuuacuuucaag

SEQ ID NO: 543903 - RNA, 19 nt, Artificial Sequence
  Description of Artificial Sequence: Synthetic oligonucleotide
  Sense strand starting at position 3759 of SEQ ID NO: 318192
auguacauuucugcagcua

SEQ ID NO: 543904 - RNA, 19 nt, Artificial Sequence
  Description of Artificial Sequence: Synthetic oligonucleotide
  Antisense strand to SEQ ID NO: 543903
uagcugcagaaauguacau

SEQ ID NO: 543905 - RNA, 19 nt, Artificial Sequence
  Description of Artificial Sequence: Synthetic oligonucleotide
  Sense strand starting at position 3810 of SEQ ID NO: 318192
ugaaaucuacuguggaaau

SEQ ID NO: 543906 - RNA, 19 nt, Artificial Sequence
  Description of Artificial Sequence: Synthetic oligonucleotide
  Antisense strand to SEQ ID NO: 543905
auuuccacaguagauuuca

SEQ ID NO: 543907 - RNA, 19 nt, Artificial Sequence
  Description of Artificial Sequence: Synthetic oligonucleotide
  Sense strand starting at position 17 of SEQ ID NO: 318193
aaaugcuugagguagguau

SEQ ID NO: 543908 - RNA, 19 nt, Artificial Sequence
  Description of Artificial Sequence: Synthetic oligonucleotide
  Antisense strand to SEQ ID NO: 543907
auaccuaccucaagcauuu

SEQ ID NO: 543909 - RNA, 19 nt, Artificial Sequence
  Description of Artificial Sequence: Synthetic oligonucleotide
  Sense strand starting at position 28 of SEQ ID NO: 318193
guagguauaccucaauuac

SEQ ID NO: 543910 - RNA, 19 nt, Artificial Sequence
  Description of Artificial Sequence: Synthetic oligonucleotide
  Antisense strand to SEQ ID NO: 543909
guaauugagguauaccuac

SEQ ID NO: 543911 - RNA, 19 nt, Artificial Sequence
  Description of Artificial Sequence: Synthetic oligonucleotide
  Sense strand starting at position 332 of SEQ ID NO: 318193
uagguucugguccaaauaa

SEQ ID NO: 543912 - RNA, 19 nt, Artificial Sequence
  Description of Artificial Sequence: Synthetic oligonucleotide
  Antisense strand to SEQ ID NO: 543911
uuauuuggaccagaaccua

SEQ ID NO: 543913 - RNA, 19 nt, Artificial Sequence
  Description of Artificial Sequence: Synthetic oligonucleotide
  Sense strand starting at position 353 of SEQ ID NO: 318193
agguccaaacaguguuaca

SEQ ID NO: 543914 - RNA, 19 nt, Artificial Sequence
  Description of Artificial Sequence: Synthetic oligonucleotide
  Antisense strand to SEQ ID NO: 543913
uguaacacuguuuggaccu

SEQ ID NO: 543915 - RNA, 19 nt, Artificial Sequence
  Description of Artificial Sequence: Synthetic oligonucleotide
  Sense strand starting at position 745 of SEQ ID NO: 318193
guccuauuuguauguccaa

SEQ ID NO: 543916 - RNA, 19 nt, Artificial Sequence
  Description of Artificial Sequence: Synthetic oligonucleotide
  Antisense strand to SEQ ID NO: 543915
uuggacauacaaauaggac

SEQ ID NO: 543917 - RNA, 19 nt, Artificial Sequence
  Description of Artificial Sequence: Synthetic oligonucleotide
  Sense strand starting at position 786 of SEQ ID NO: 318193
ggacaugagugucuacauu

SEQ ID NO: 543918 - RNA, 19 nt, Artificial Sequence
  Description of Artificial Sequence: Synthetic oligonucleotide
  Antisense strand to SEQ ID NO: 543917
aauguagacacucaugucc

SEQ ID NO: 543919 - RNA, 19 nt, Artificial Sequence
  Description of Artificial Sequence: Synthetic oligonucleotide
  Sense strand starting at position 1121 of SEQ ID NO: 318193
gcauuugaauguguaaagu

SEQ ID NO: 543920 - RNA, 19 nt, Artificial Sequence
  Description of Artificial Sequence: Synthetic oligonucleotide
  Antisense strand to SEQ ID NO: 543919
acuuuacacauucaaaugc

SEQ ID NO: 543921 - RNA, 19 nt, Artificial Sequence
  Description of Artificial Sequence: Synthetic oligonucleotide
  Sense strand starting at position 1167 of SEQ ID NO: 318193
agacauuaucauuggcauu

SEQ ID NO: 543922 - RNA, 19 nt, Artificial Sequence
  Description of Artificial Sequence: Synthetic oligonucleotide
  Antisense strand to SEQ ID NO: 543921
aaugccaaugauaaugucu

SEQ ID NO: 543923 - RNA, 19 nt, Artificial Sequence
  Description of Artificial Sequence: Synthetic oligonucleotide
  Sense strand starting at position 1244 of SEQ ID NO: 318193
guaugaauuaaccgauagu

SEQ ID NO: 543924 - RNA, 19 nt, Artificial Sequence
  Description of Artificial Sequence: Synthetic oligonucleotide
  Antisense strand to SEQ ID NO: 543923
acuaucgguuaauucauac

SEQ ID NO: 543925 - RNA, 19 nt, Artificial Sequence
  Description of Artificial Sequence: Synthetic oligonucleotide
  Sense strand starting at position 1247 of SEQ ID NO: 318193
ugaauuaaccgauaguccu

SEQ ID NO: 543926 - RNA, 19 nt, Artificial Sequence
  Description of Artificial Sequence: Synthetic oligonucleotide
  Antisense strand to SEQ ID NO: 543925
aggacuaucgguuaauuca

SEQ ID NO: 543927 - RNA, 19 nt, Artificial Sequence
  Description of Artificial Sequence: Synthetic oligonucleotide
  Sense strand starting at position 1444 of SEQ ID NO: 318193
aaggucuaguucccaugaa

SEQ ID NO: 543928 - RNA, 19 nt, Artificial Sequence
  Description of Artificial Sequence: Synthetic oligonucleotide
  Antisense strand to SEQ ID NO: 543927
uucaugggaacuagaccuu

SEQ ID NO: 543929 - RNA, 19 nt, Artificial Sequence
  Description of Artificial Sequence: Synthetic oligonucleotide
  Sense strand starting at position 1467 of SEQ ID NO: 318193
agaauaucuuuguuugaug

SEQ ID NO: 543930 - RNA, 19 nt, Artificial Sequence
  Description of Artificial Sequence: Synthetic oligonucleotide
  Antisense strand to SEQ ID NO: 543929
caucaaacaaagauauucu

SEQ ID NO: 543931 - RNA, 19 nt, Artificial Sequence
  Description of Artificial Sequence: Synthetic oligonucleotide
  Sense strand starting at position 1468 of SEQ ID NO: 318193
gaauaucuuuguuugauga

SEQ ID NO: 543932 - RNA, 19 nt, Artificial Sequence
  Description of Artificial Sequence: Synthetic oligonucleotide
  Antisense strand to SEQ ID NO: 543931
ucaucaaacaaagauauuc

SEQ ID NO: 543933 - RNA, 19 nt, Artificial Sequence
  Description of Artificial Sequence: Synthetic oligonucleotide
  Sense strand starting at position 1742 of SEQ ID NO: 318193
cccuuaacauauguggaga

SEQ ID NO: 543934 - RNA, 19 nt, Artificial Sequence
  Description of Artificial Sequence: Synthetic oligonucleotide
  Antisense strand to SEQ ID NO: 543933
ucuccacauauguuaaggg

SEQ ID NO: 543935 - RNA, 19 nt, Artificial Sequence
  Description of Artificial Sequence: Synthetic oligonucleotide
  Sense strand starting at position 1881 of SEQ ID NO: 318193
ucucucgucccugaaauua

SEQ ID NO: 543936 - RNA, 19 nt, Artificial Sequence
  Description of Artificial Sequence: Synthetic oligonucleotide
  Antisense strand to SEQ ID NO: 543935
uaauuucagggacgagaga

SEQ ID NO: 543937 - RNA, 19 nt, Artificial Sequence
  Description of Artificial Sequence: Synthetic oligonucleotide
  Sense strand starting at position 1994 of SEQ ID NO: 318193
uucguuccugcugaacaaa

SEQ ID NO: 543938 - RNA, 19 nt, Artificial Sequence
  Description of Artificial Sequence: Synthetic oligonucleotide
  Antisense strand to SEQ ID NO: 543937
uuuguucagcaggaacgaa

SEQ ID NO: 543939 - RNA, 19 nt, Artificial Sequence
  Description of Artificial Sequence: Synthetic oligonucleotide
  Sense strand starting at position 2313 of SEQ ID NO: 318193
gaaauuaggugacaauuuc

SEQ ID NO: 543940 - RNA, 19 nt, Artificial Sequence
  Description of Artificial Sequence: Synthetic oligonucleotide
  Antisense strand to SEQ ID NO: 543939
gaaauugucaccuaauuuc

SEQ ID NO: 543941 - RNA, 19 nt, Artificial Sequence
  Description of Artificial Sequence: Synthetic oligonucleotide
  Sense strand starting at position 2465 of SEQ ID NO: 318193
ucguuaugcaaauaggaug

SEQ ID NO: 543942 - RNA, 19 nt, Artificial Sequence
  Description of Artificial Sequence: Synthetic oligonucleotide
  Antisense strand to SEQ ID NO: 543941
cauccuauuugcauaacga

SEQ ID NO: 543943 - RNA, 19 nt, Artificial Sequence
  Description of Artificial Sequence: Synthetic oligonucleotide
  Sense strand starting at position 2561 of SEQ ID NO: 318193
aaauuauugcugugagaac

SEQ ID NO: 543944 - RNA, 19 nt, Artificial Sequence
  Description of Artificial Sequence: Synthetic oligonucleotide
  Antisense strand to SEQ ID NO: 543943
guucucacagcaauaauuu

SEQ ID NO: 543945 - RNA, 19 nt, Artificial Sequence
  Description of Artificial Sequence: Synthetic oligonucleotide
  Sense strand starting at position 2622 of SEQ ID NO: 318193
aucuaucagcagugagauc

SEQ ID NO: 543946 - RNA, 19 nt, Artificial Sequence
  Description of Artificial Sequence: Synthetic oligonucleotide
  Antisense strand to SEQ ID NO: 543945
gaucucacugcugauagau

SEQ ID NO: 543947 - RNA, 19 nt, Artificial Sequence
  Description of Artificial Sequence: Synthetic oligonucleotide
  Sense strand starting at position 2805 of SEQ ID NO: 318193
cauaucaugucuuugugga

SEQ ID NO: 543948 - RNA, 19 nt, Artificial Sequence
  Description of Artificial Sequence: Synthetic oligonucleotide
  Antisense strand to SEQ ID NO: 543947
uccacaaagacaugauaug

SEQ ID NO: 543949 - RNA, 19 nt, Artificial Sequence
  Description of Artificial Sequence: Synthetic oligonucleotide
  Sense strand starting at position 2806 of SEQ ID NO: 318193
auaucaugucuuuguggag

SEQ ID NO: 543950 - RNA, 19 nt, Artificial Sequence
  Description of Artificial Sequence: Synthetic oligonucleotide
  Antisense strand to SEQ ID NO: 543949
cuccacaaagacaugauau

SEQ ID NO: 543951 - RNA, 19 nt, Artificial Sequence
  Description of Artificial Sequence: Synthetic oligonucleotide
  Sense strand starting at position 2810 of SEQ ID NO: 318193
caugucuuuguggaguaag

SEQ ID NO: 543952 - RNA, 19 nt, Artificial Sequence
  Description of Artificial Sequence: Synthetic oligonucleotide
  Antisense strand to SEQ ID NO: 543951
cuuacuccacaaagacaug

SEQ ID NO: 543953 - RNA, 19 nt, Artificial Sequence
  Description of Artificial Sequence: Synthetic oligonucleotide
  Sense strand starting at position 2813 of SEQ ID NO: 318193
gucuuuguggaguaagaua

SEQ ID NO: 543954 - RNA, 19 nt, Artificial Sequence
  Description of Artificial Sequence: Synthetic oligonucleotide
  Antisense strand to SEQ ID NO: 543953
uaucuuacuccacaaagac

SEQ ID NO: 543955 - RNA, 19 nt, Artificial Sequence
  Description of Artificial Sequence: Synthetic oligonucleotide
  Sense strand starting at position 2862 of SEQ ID NO: 318193
ggagaucucugggucagga

SEQ ID NO: 543956 - RNA, 19 nt, Artificial Sequence
  Description of Artificial Sequence: Synthetic oligonucleotide
  Antisense strand to SEQ ID NO: 543955
uccugacccagagaucucc

SEQ ID NO: 543957 - RNA, 19 nt, Artificial Sequence
  Description of Artificial Sequence: Synthetic oligonucleotide
  Sense strand starting at position 2996 of SEQ ID NO: 318193
ggaaguuaauugcucugaa

SEQ ID NO: 543958 - RNA, 19 nt, Artificial Sequence
  Description of Artificial Sequence: Synthetic oligonucleotide
  Antisense strand to SEQ ID NO: 543957
uucagagcaauuaacuucc

SEQ ID NO: 543959 - RNA, 19 nt, Artificial Sequence
  Description of Artificial Sequence: Synthetic oligonucleotide
  Sense strand starting at position 2999 of SEQ ID NO: 318193
aguuaauugcucugaaaug

SEQ ID NO: 543960 - RNA, 19 nt, Artificial Sequence
  Description of Artificial Sequence: Synthetic oligonucleotide
  Antisense strand to SEQ ID NO: 543959
cauuucagagcaauuaacu

SEQ ID NO: 543961 - RNA, 19 nt, Artificial Sequence
  Description of Artificial Sequence: Synthetic oligonucleotide
  Sense strand starting at position 3217 of SEQ ID NO: 318193
auagauuguuuggcuccaa

SEQ ID NO: 543962 - RNA, 19 nt, Artificial Sequence
  Description of Artificial Sequence: Synthetic oligonucleotide
  Antisense strand to SEQ ID NO: 543961
uuggagccaaacaaucuau

SEQ ID NO: 543963 - RNA, 19 nt, Artificial Sequence
  Description of Artificial Sequence: Synthetic oligonucleotide
  Sense strand starting at position 3265 of SEQ ID NO: 318193
acacauucggucugaccau

SEQ ID NO: 543964 - RNA, 19 nt, Artificial Sequence
  Description of Artificial Sequence: Synthetic oligonucleotide
  Antisense strand to SEQ ID NO: 543963
auggucagaccgaaugugu

SEQ ID NO: 543965 - RNA, 19 nt, Artificial Sequence
  Description of Artificial Sequence: Synthetic oligonucleotide
  Sense strand starting at position 3286 of SEQ ID NO: 318193
gcugucuucugauuucuuu

SEQ ID NO: 543966 - RNA, 19 nt, Artificial Sequence
  Description of Artificial Sequence: Synthetic oligonucleotide
  Antisense strand to SEQ ID NO: 543965
aaagaaaucagaagacagc

SEQ ID NO: 543967 - RNA, 19 nt, Artificial Sequence
  Description of Artificial Sequence: Synthetic oligonucleotide
  Sense strand starting at position 3321 of SEQ ID NO: 318193
ucuuuaucaccuuggguau

SEQ ID NO: 543968 - RNA, 19 nt, Artificial Sequence
  Description of Artificial Sequence: Synthetic oligonucleotide
  Antisense strand to SEQ ID NO: 543967
auacccaaggugauaaaga

SEQ ID NO: 543969 - RNA, 19 nt, Artificial Sequence
  Description of Artificial Sequence: Synthetic oligonucleotide
  Sense strand starting at position 3395 of SEQ ID NO: 318193
auuacuucugguggauuaa

SEQ ID NO: 543970 - RNA, 19 nt, Artificial Sequence
  Description of Artificial Sequence: Synthetic oligonucleotide
  Antisense strand to SEQ ID NO: 543969
uuaauccaccagaaguaau

SEQ ID NO: 543971 - RNA, 19 nt, Artificial Sequence
  Description of Artificial Sequence: Synthetic oligonucleotide
  Sense strand starting at position 3410 of SEQ ID NO: 318193
uuaagugcugcuuaaauac

SEQ ID NO: 543972 - RNA, 19 nt, Artificial Sequence
  Description of Artificial Sequence: Synthetic oligonucleotide
  Antisense strand to SEQ ID NO: 543971
guauuuaagcagcacuuaa

SEQ ID NO: 543973 - RNA, 19 nt, Artificial Sequence
  Description of Artificial Sequence: Synthetic oligonucleotide
  Sense strand starting at position 3492 of SEQ ID NO: 318193
cauaauauguauguugagu

SEQ ID NO: 543974 - RNA, 19 nt, Artificial Sequence
  Description of Artificial Sequence: Synthetic oligonucleotide
  Antisense strand to SEQ ID NO: 543973
acucaacauacauauuaug

SEQ ID NO: 543975 - RNA, 19 nt, Artificial Sequence
  Description of Artificial Sequence: Synthetic oligonucleotide
  Sense strand starting at position 3497 of SEQ ID NO: 318193
uauguauguugaguaacau

SEQ ID NO: 543976 - RNA, 19 nt, Artificial Sequence
  Description of Artificial Sequence: Synthetic oligonucleotide
  Antisense strand to SEQ ID NO: 543975
auguuacucaacauacaua

SEQ ID NO: 543977 - RNA, 19 nt, Artificial Sequence
  Description of Artificial Sequence: Synthetic oligonucleotide
  Sense strand starting at position 3498 of SEQ ID NO: 318193
auguauguugaguaacauu

SEQ ID NO: 543978 - RNA, 19 nt, Artificial Sequence
  Description of Artificial Sequence: Synthetic oligonucleotide
  Antisense strand to SEQ ID NO: 543977
aauguuacucaacauacau

SEQ ID NO: 543979 - RNA, 19 nt, Artificial Sequence
  Description of Artificial Sequence: Synthetic oligonucleotide
  Sense strand starting at position 3779 of SEQ ID NO: 318193
ccuauagucuuaccuuaga

SEQ ID NO: 543980 - RNA, 19 nt, Artificial Sequence
  Description of Artificial Sequence: Synthetic oligonucleotide
  Antisense strand to SEQ ID NO: 543979
ucuaagguaagacuauagg

SEQ ID NO: 543981 - RNA, 19 nt, Artificial Sequence
  Description of Artificial Sequence: Synthetic oligonucleotide
  Sense strand starting at position 3806 of SEQ ID NO: 318193
guguguuagaaugguauuu

SEQ ID NO: 543982 - RNA, 19 nt, Artificial Sequence
  Description of Artificial Sequence: Synthetic oligonucleotide
  Antisense strand to SEQ ID NO: 543981
aaauaccauucuaacacac

SEQ ID NO: 543983 - RNA, 19 nt, Artificial Sequence
  Description of Artificial Sequence: Synthetic oligonucleotide
  Sense strand starting at position 3817 of SEQ ID NO: 318193
ugguauuucccaugcacgu

SEQ ID NO: 543984 - RNA, 19 nt, Artificial Sequence
  Description of Artificial Sequence: Synthetic oligonucleotide
  Antisense strand to SEQ ID NO: 543983
acgugcaugggaaauacca

SEQ ID NO: 543985 - RNA, 19 nt, Artificial Sequence
  Description of Artificial Sequence: Synthetic oligonucleotide
  Sense strand starting at position 3949 of SEQ ID NO: 318193
gcacuaucggcuuacagga

SEQ ID NO: 543986 - RNA, 19 nt, Artificial Sequence
  Description of Artificial Sequence: Synthetic oligonucleotide
  Antisense strand to SEQ ID NO: 543985
uccuguaagccgauagugc

SEQ ID NO: 543987 - RNA, 19 nt, Artificial Sequence
  Description of Artificial Sequence: Synthetic oligonucleotide
  Sense strand starting at position 70 of SEQ ID NO: 318194
caaauuagagauuguugau

SEQ ID NO: 543988 - RNA, 19 nt, Artificial Sequence
  Description of Artificial Sequence: Synthetic oligonucleotide
  Antisense strand to SEQ ID NO: 543987
aucaacaaucucuaauuug

SEQ ID NO: 543989 - RNA, 19 nt, Artificial Sequence
  Description of Artificial Sequence: Synthetic oligonucleotide
  Sense strand starting at position 143 of SEQ ID NO: 318194
gucacauuuccauguccua

SEQ ID NO: 543990 - RNA, 19 nt, Artificial Sequence
  Description of Artificial Sequence: Synthetic oligonucleotide
  Antisense strand to SEQ ID NO: 543989
uaggacauggaaaugugac

SEQ ID NO: 543991 - RNA, 19 nt, Artificial Sequence
  Description of Artificial Sequence: Synthetic oligonucleotide
  Sense strand starting at position 167 of SEQ ID NO: 318194
ucucuagggauuggaguua

SEQ ID NO: 543992 - RNA, 19 nt, Artificial Sequence
  Description of Artificial Sequence: Synthetic oligonucleotide
  Antisense strand to SEQ ID NO: 543991
uaacuccaaucccuagaga

SEQ ID NO: 543993 - RNA, 19 nt, Artificial Sequence
  Description of Artificial Sequence: Synthetic oligonucleotide
  Sense strand starting at position 232 of SEQ ID NO: 318194
caaggugccagugaaagua

SEQ ID NO: 543994 - RNA, 19 nt, Artificial Sequence
  Description of Artificial Sequence: Synthetic oligonucleotide
  Antisense strand to SEQ ID NO: 543993
uacuuucacuggcaccuug

SEQ ID NO: 543995 - RNA, 19 nt, Artificial Sequence
  Description of Artificial Sequence: Synthetic oligonucleotide
  Sense strand starting at position 295 of SEQ ID NO: 318194
uggaguuuccuuuauagca

SEQ ID NO: 543996 - RNA, 19 nt, Artificial Sequence
  Description of Artificial Sequence: Synthetic oligonucleotide
  Antisense strand to SEQ ID NO: 543995
ugcuauaaaggaaacucca

SEQ ID NO: 543997 - RNA, 19 nt, Artificial Sequence
  Description of Artificial Sequence: Synthetic oligonucleotide
  Sense strand starting at position 409 of SEQ ID NO: 318194
gcaauucuccacugaggac

SEQ ID NO: 543998 - RNA, 19 nt, Artificial Sequence
  Description of Artificial Sequence: Synthetic oligonucleotide
  Antisense strand to SEQ ID NO: 543997
guccucaguggagaauugc

SEQ ID NO: 543999 - RNA, 19 nt, Artificial Sequence
  Description of Artificial Sequence: Synthetic oligonucleotide
  Sense strand starting at position 463 of SEQ ID NO: 318194
agucuacugucagcauuua

SEQ ID NO: 544000 - RNA, 19 nt, Artificial Sequence
  Description of Artificial Sequence: Synthetic oligonucleotide
  Antisense strand to SEQ ID NO: 543999
uaaaugcugacaguagacu

SEQ ID NO: 544001 - RNA, 19 nt, Artificial Sequence
  Description of Artificial Sequence: Synthetic oligonucleotide
  Sense strand starting at position 705 of SEQ ID NO: 318194
auauauacuuccuuuguga

SEQ ID NO: 544002 - RNA, 19 nt, Artificial Sequence
  Description of Artificial Sequence: Synthetic oligonucleotide
  Antisense strand to SEQ ID NO: 544001
ucacaaaggaaguauauau

SEQ ID NO: 544003 - RNA, 19 nt, Artificial Sequence
  Description of Artificial Sequence: Synthetic oligonucleotide
  Sense strand starting at position 721 of SEQ ID NO: 318194
ugacaaacuuuaucaucga

SEQ ID NO: 544004 - RNA, 19 nt, Artificial Sequence
  Description of Artificial Sequence: Synthetic oligonucleotide
  Antisense strand to SEQ ID NO: 544003
ucgaugauaaaguuuguca

SEQ ID NO: 544005 - RNA, 19 nt, Artificial Sequence
  Description of Artificial Sequence: Synthetic oligonucleotide
  Sense strand starting at position 836 of SEQ ID NO: 318194
agcaauccauaugcugaaa

SEQ ID NO: 544006 - RNA, 19 nt, Artificial Sequence
  Description of Artificial Sequence: Synthetic oligonucleotide
  Antisense strand to SEQ ID NO: 544005
uuucagcauauggauugcu

SEQ ID NO: 544007 - RNA, 19 nt, Artificial Sequence
  Description of Artificial Sequence: Synthetic oligonucleotide
  Sense strand starting at position 850 of SEQ ID NO: 318194
ugaaaucgaacgugaauug

SEQ ID NO: 544008 - RNA, 19 nt, Artificial Sequence
  Description of Artificial Sequence: Synthetic oligonucleotide
  Antisense strand to SEQ ID NO: 544007
caauucacguucgauuuca

SEQ ID NO: 544009 - RNA, 19 nt, Artificial Sequence
  Description of Artificial Sequence: Synthetic oligonucleotide
  Sense strand starting at position 851 of SEQ ID NO: 318194
gaaaucgaacgugaauugu

SEQ ID NO: 544010 - RNA, 19 nt, Artificial Sequence
  Description of Artificial Sequence: Synthetic oligonucleotide
  Antisense strand to SEQ ID NO: 544009
acaauucacguucgauuuc

SEQ ID NO: 544011 - RNA, 19 nt, Artificial Sequence
  Description of Artificial Sequence: Synthetic oligonucleotide
  Sense strand starting at position 866 of SEQ ID NO: 318194
uugugaaauguguagacua

SEQ ID NO: 544012 - RNA, 19 nt, Artificial Sequence
  Description of Artificial Sequence: Synthetic oligonucleotide
  Antisense strand to SEQ ID NO: 544011
uagucuacacauuucacaa

SEQ ID NO: 544013 - RNA, 19 nt, Artificial Sequence
  Description of Artificial Sequence: Synthetic oligonucleotide
  Sense strand starting at position 868 of SEQ ID NO: 318194
gugaaauguguagacuacu

SEQ ID NO: 544014 - RNA, 19 nt, Artificial Sequence
  Description of Artificial Sequence: Synthetic oligonucleotide
  Antisense strand to SEQ ID NO: 544013
aguagucuacacauuucac

SEQ ID NO: 544015 - RNA, 19 nt, Artificial Sequence
  Description of Artificial Sequence: Synthetic oligonucleotide
  Sense strand starting at position 881 of SEQ ID NO: 318194
acuacuauggcagggauau

SEQ ID NO: 544016 - RNA, 19 nt, Artificial Sequence
  Description of Artificial Sequence: Synthetic oligonucleotide
  Antisense strand to SEQ ID NO: 544015
auaucccugccauaguagu

SEQ ID NO: 544017 - RNA, 19 nt, Artificial Sequence
  Description of Artificial Sequence: Synthetic oligonucleotide
  Sense strand starting at position 882 of SEQ ID NO: 318194
cuacuauggcagggauauu

SEQ ID NO: 544018 - RNA, 19 nt, Artificial Sequence
  Description of Artificial Sequence: Synthetic oligonucleotide
  Antisense strand to SEQ ID NO: 544017
aauaucccugccauaguag

SEQ ID NO: 544019 - RNA, 19 nt, Artificial Sequence
  Description of Artificial Sequence: Synthetic oligonucleotide
  Sense strand starting at position 1016 of SEQ ID NO: 318194
aagaauuaguggcucagaa

SEQ ID NO: 544020 - RNA, 19 nt, Artificial Sequence
  Description of Artificial Sequence: Synthetic oligonucleotide
  Antisense strand to SEQ ID NO: 544019
uucugagccacuaauucuu

SEQ ID NO: 544021 - RNA, 19 nt, Artificial Sequence
  Description of Artificial Sequence: Synthetic oligonucleotide
  Sense strand starting at position 1068 of SEQ ID NO: 318194
gacucaugggagcaucuuu

SEQ ID NO: 544022 - RNA, 19 nt, Artificial Sequence
  Description of Artificial Sequence: Synthetic oligonucleotide
  Antisense strand to SEQ ID NO: 544021
aaagaugcucccaugaguc

SEQ ID NO: 544023 - RNA, 19 nt, Artificial Sequence
  Description of Artificial Sequence: Synthetic oligonucleotide
  Sense strand starting at position 1073 of SEQ ID NO: 318194
augggagcaucuuuccaca

SEQ ID NO: 544024 - RNA, 19 nt, Artificial Sequence
  Description of Artificial Sequence: Synthetic oligonucleotide
  Antisense strand to SEQ ID NO: 544023
uguggaaagaugcucccau

SEQ ID NO: 544025 - RNA, 19 nt, Artificial Sequence
  Description of Artificial Sequence: Synthetic oligonucleotide
  Sense strand starting at position 1078 of SEQ ID NO: 318194
agcaucuuuccacagugaa

SEQ ID NO: 544026 - RNA, 19 nt, Artificial Sequence
  Description of Artificial Sequence: Synthetic oligonucleotide
  Antisense strand to SEQ ID NO: 544025
uucacuguggaaagaugcu

SEQ ID NO: 544027 - RNA, 19 nt, Artificial Sequence
  Description of Artificial Sequence: Synthetic oligonucleotide
  Sense strand starting at position 1134 of SEQ ID NO: 318194
cagaacaugcugugaaaua

SEQ ID NO: 544028 - RNA, 19 nt, Artificial Sequence
  Description of Artificial Sequence: Synthetic oligonucleotide
  Antisense strand to SEQ ID NO: 544027
uauuucacagcauguucug

SEQ ID NO: 544029 - RNA, 19 nt, Artificial Sequence
  Description of Artificial Sequence: Synthetic oligonucleotide
  Sense strand starting at position 1194 of SEQ ID NO: 318194
ugcuaaugacgugaacuaa

SEQ ID NO: 544030 - RNA, 19 nt, Artificial Sequence
  Description of Artificial Sequence: Synthetic oligonucleotide
  Antisense strand to SEQ ID NO: 544029
uuaguucacgucauuagca

SEQ ID NO: 544031 - RNA, 19 nt, Artificial Sequence
  Description of Artificial Sequence: Synthetic oligonucleotide
  Sense strand starting at position 1505 of SEQ ID NO: 318194
ucagauuaguccuugggau

SEQ ID NO: 544032 - RNA, 19 nt, Artificial Sequence
  Description of Artificial Sequence: Synthetic oligonucleotide
  Antisense strand to SEQ ID NO: 544031
aucccaaggacuaaucuga

SEQ ID NO: 544033 - RNA, 19 nt, Artificial Sequence
  Description of Artificial Sequence: Synthetic oligonucleotide
  Sense strand starting at position 1506 of SEQ ID NO: 318194
cagauuaguccuugggaua

SEQ ID NO: 544034 - RNA, 19 nt, Artificial Sequence
  Description of Artificial Sequence: Synthetic oligonucleotide
  Antisense strand to SEQ ID NO: 544033
uaucccaaggacuaaucug

SEQ ID NO: 544035 - RNA, 19 nt, Artificial Sequence
  Description of Artificial Sequence: Synthetic oligonucleotide
  Sense strand starting at position 2004 of SEQ ID NO: 318194
gcguuugaaacaucgcgua

SEQ ID NO: 544036 - RNA, 19 nt, Artificial Sequence
  Description of Artificial Sequence: Synthetic oligonucleotide
  Antisense strand to SEQ ID NO: 544035
uacgcgauguuucaaacgc

SEQ ID NO: 544037 - RNA, 19 nt, Artificial Sequence
  Description of Artificial Sequence: Synthetic oligonucleotide
  Sense strand starting at position 2410 of SEQ ID NO: 318194
guauaugguaugcagaaua

SEQ ID NO: 544038 - RNA, 19 nt, Artificial Sequence
  Description of Artificial Sequence: Synthetic oligonucleotide
  Antisense strand to SEQ ID NO: 544037
uauucugcauaccauauac

SEQ ID NO: 544039 - RNA, 19 nt, Artificial Sequence
  Description of Artificial Sequence: Synthetic oligonucleotide
  Sense strand starting at position 2474 of SEQ ID NO: 318194
uugcaucuuggugaaucaa

SEQ ID NO: 544040 - RNA, 19 nt, Artificial Sequence
  Description of Artificial Sequence: Synthetic oligonucleotide
  Antisense strand to SEQ ID NO: 544039
uugauucaccaagaugcaa

SEQ ID NO: 544041 - RNA, 19 nt, Artificial Sequence
  Description of Artificial Sequence: Synthetic oligonucleotide
  Sense strand starting at position 2573 of SEQ ID NO: 318194
ucuuuauugcacgaaauga

SEQ ID NO: 544042 - RNA, 19 nt, Artificial Sequence
  Description of Artificial Sequence: Synthetic oligonucleotide
  Antisense strand to SEQ ID NO: 544041
ucauuucgugcaauaaaga

SEQ ID NO: 544043 - RNA, 19 nt, Artificial Sequence
  Description of Artificial Sequence: Synthetic oligonucleotide
  Sense strand starting at position 2717 of SEQ ID NO: 318194
gcaggaaaguccuucuaaa

SEQ ID NO: 544044 - RNA, 19 nt, Artificial Sequence
  Description of Artificial Sequence: Synthetic oligonucleotide
  Antisense strand to SEQ ID NO: 544043
uuuagaaggacuuuccugc

SEQ ID NO: 544045 - RNA, 19 nt, Artificial Sequence
  Description of Artificial Sequence: Synthetic oligonucleotide
  Sense strand starting at position 2729 of SEQ ID NO: 318194
uucuaaagucgggaucuuu

SEQ ID NO: 544046 - RNA, 19 nt, Artificial Sequence
  Description of Artificial Sequence: Synthetic oligonucleotide
  Antisense strand to SEQ ID NO: 544045
aaagaucccgacuuuagaa

SEQ ID NO: 544047 - RNA, 19 nt, Artificial Sequence
  Description of Artificial Sequence: Synthetic oligonucleotide
  Sense strand starting at position 2740 of SEQ ID NO: 318194
ggaucuuuccucugaccaa

SEQ ID NO: 544048 - RNA, 19 nt, Artificial Sequence
  Description of Artificial Sequence: Synthetic oligonucleotide
  Antisense strand to SEQ ID NO: 544047
uuggucagaggaaagaucc

SEQ ID NO: 544049 - RNA, 19 nt, Artificial Sequence
  Description of Artificial Sequence: Synthetic oligonucleotide
  Sense strand starting at position 2850 of SEQ ID NO: 318194
uccguuacucacgcguaaa

SEQ ID NO: 544050 - RNA, 19 nt, Artificial Sequence
  Description of Artificial Sequence: Synthetic oligonucleotide
  Antisense strand to SEQ ID NO: 544049
uuuacgcgugaguaacgga

SEQ ID NO: 544051 - RNA, 19 nt, Artificial Sequence
  Description of Artificial Sequence: Synthetic oligonucleotide
  Sense strand starting at position 2989 of SEQ ID NO: 318194
auguuaguaauguacgaaa

SEQ ID NO: 544052 - RNA, 19 nt, Artificial Sequence
  Description of Artificial Sequence: Synthetic oligonucleotide
  Antisense strand to SEQ ID NO: 544051
uuucguacauuacuaacau

SEQ ID NO: 544053 - RNA, 19 nt, Artificial Sequence
  Description of Artificial Sequence: Synthetic oligonucleotide
  Sense strand starting at position 3060 of SEQ ID NO: 318194
acuuucuaaucaguuugga

SEQ ID NO: 544054 - RNA, 19 nt, Artificial Sequence
  Description of Artificial Sequence: Synthetic oligonucleotide
  Antisense strand to SEQ ID NO: 544053
uccaaacugauuagaaagu

SEQ ID NO: 544055 - RNA, 19 nt, Artificial Sequence
  Description of Artificial Sequence: Synthetic oligonucleotide
  Sense strand starting at position 3063 of SEQ ID NO: 318194
uucuaaucaguuuggaaau

SEQ ID NO: 544056 - RNA, 19 nt, Artificial Sequence
  Description of Artificial Sequence: Synthetic oligonucleotide
  Antisense strand to SEQ ID NO: 544055
auuuccaaacugauuagaa

SEQ ID NO: 544057 - RNA, 19 nt, Artificial Sequence
  Description of Artificial Sequence: Synthetic oligonucleotide
  Sense strand starting at position 3076 of SEQ ID NO: 318194
ggaaauauuuaccgaggaa

SEQ ID NO: 544058 - RNA, 19 nt, Artificial Sequence
  Description of Artificial Sequence: Synthetic oligonucleotide
  Antisense strand to SEQ ID NO: 544057
uuccucgguaaauauuucc

SEQ ID NO: 544059 - RNA, 19 nt, Artificial Sequence
  Description of Artificial Sequence: Synthetic oligonucleotide
  Sense strand starting at position 3295 of SEQ ID NO: 318194
uuauguuaagguuaaagca

SEQ ID NO: 544060 - RNA, 19 nt, Artificial Sequence
  Description of Artificial Sequence: Synthetic oligonucleotide
  Antisense strand to SEQ ID NO: 544059
ugcuuuaaccuuaacauaa

SEQ ID NO: 544061 - RNA, 19 nt, Artificial Sequence
  Description of Artificial Sequence: Synthetic oligonucleotide
  Sense strand starting at position 3672 of SEQ ID NO: 318194
cuaguuguauuuccuguua

SEQ ID NO: 544062 - RNA, 19 nt, Artificial Sequence
  Description of Artificial Sequence: Synthetic oligonucleotide
  Antisense strand to SEQ ID NO: 544061
uaacaggaaauacaacuag

SEQ ID NO: 544063 - RNA, 19 nt, Artificial Sequence
  Description of Artificial Sequence: Synthetic oligonucleotide
  Sense strand starting at position 3697 of SEQ ID NO: 318194
gcaauaugccuccagauga

SEQ ID NO: 544064 - RNA, 19 nt, Artificial Sequence
  Description of Artificial Sequence: Synthetic oligonucleotide
  Antisense strand to SEQ ID NO: 544063
ucaucuggaggcauauugc

SEQ ID NO: 544065 - RNA, 19 nt, Artificial Sequence
  Description of Artificial Sequence: Synthetic oligonucleotide
  Sense strand starting at position 3951 of SEQ ID NO: 318194
uuauuauaggaaugcauca

SEQ ID NO: 544066 - RNA, 19 nt, Artificial Sequence
  Description of Artificial Sequence: Synthetic oligonucleotide
  Antisense strand to SEQ ID NO: 544065
ugaugcauuccuauaauaa

SEQ ID NO: 544067 - RNA, 19 nt, Artificial Sequence
  Description of Artificial Sequence: Synthetic oligonucleotide
  Sense strand starting at position 33 of SEQ ID NO: 318195
cugugaacugaguguagau

SEQ ID NO: 544068 - RNA, 19 nt, Artificial Sequence
  Description of Artificial Sequence: Synthetic oligonucleotide
  Antisense strand to SEQ ID NO: 544067
aucuacacucaguucacag

SEQ ID NO: 544069 - RNA, 19 nt, Artificial Sequence
  Description of Artificial Sequence: Synthetic oligonucleotide
  Sense strand starting at position 179 of SEQ ID NO: 318195
caaagaucaugucugagcu

SEQ ID NO: 544070 - RNA, 19 nt, Artificial Sequence
  Description of Artificial Sequence: Synthetic oligonucleotide
  Antisense strand to SEQ ID NO: 544069
agcucagacaugaucuuug

SEQ ID NO: 544071 - RNA, 19 nt, Artificial Sequence
  Description of Artificial Sequence: Synthetic oligonucleotide
  Sense strand starting at position 180 of SEQ ID NO: 318195
aaagaucaugucugagcua

SEQ ID NO: 544072 - RNA, 19 nt, Artificial Sequence
  Description of Artificial Sequence: Synthetic oligonucleotide
  Antisense strand to SEQ ID NO: 544071
uagcucagacaugaucuuu

SEQ ID NO: 544073 - RNA, 19 nt, Artificial Sequence
  Description of Artificial Sequence: Synthetic oligonucleotide
  Sense strand starting at position 183 of SEQ ID NO: 318195
gaucaugucugagcuaagu

SEQ ID NO: 544074 - RNA, 19 nt, Artificial Sequence
  Description of Artificial Sequence: Synthetic oligonucleotide
  Antisense strand to SEQ ID NO: 544073
acuuagcucagacaugauc

SEQ ID NO: 544075 - RNA, 19 nt, Artificial Sequence
  Description of Artificial Sequence: Synthetic oligonucleotide
  Sense strand starting at position 191 of SEQ ID NO: 318195
cugagcuaaguuugacaau

SEQ ID NO: 544076 - RNA, 19 nt, Artificial Sequence
  Description of Artificial Sequence: Synthetic oligonucleotide
  Antisense strand to SEQ ID NO: 544075
auugucaaacuuagcucag

SEQ ID NO: 544077 - RNA, 19 nt, Artificial Sequence
  Description of Artificial Sequence: Synthetic oligonucleotide
  Sense strand starting at position 214 of SEQ ID NO: 318195
gguagugaagcuuacagau

SEQ ID NO: 544078 - RNA, 19 nt, Artificial Sequence
  Description of Artificial Sequence: Synthetic oligonucleotide
  Antisense strand to SEQ ID NO: 544077
aucuguaagcuucacuacc

SEQ ID NO: 544079 - RNA, 19 nt, Artificial Sequence
  Description of Artificial Sequence: Synthetic oligonucleotide
  Sense strand starting at position 298 of SEQ ID NO: 318195
gcuauacuagagggauaca

SEQ ID NO: 544080 - RNA, 19 nt, Artificial Sequence
  Description of Artificial Sequence: Synthetic oligonucleotide
  Antisense strand to SEQ ID NO: 544079
uguaucccucuaguauagc

SEQ ID NO: 544081 - RNA, 19 nt, Artificial Sequence
  Description of Artificial Sequence: Synthetic oligonucleotide
  Sense strand starting at position 322 of SEQ ID NO: 318195
aguuaaugcuagcuauaca

SEQ ID NO: 544082 - RNA, 19 nt, Artificial Sequence
  Description of Artificial Sequence: Synthetic oligonucleotide
  Antisense strand to SEQ ID NO: 544081
uguauagcuagcauuaacu

SEQ ID NO: 544083 - RNA, 19 nt, Artificial Sequence
  Description of Artificial Sequence: Synthetic oligonucleotide
  Sense strand starting at position 352 of SEQ ID NO: 318195
gcuaauuugugccuacuau

SEQ ID NO: 544084 - RNA, 19 nt, Artificial Sequence
  Description of Artificial Sequence: Synthetic oligonucleotide
  Antisense strand to SEQ ID NO: 544083
auaguaggcacaaauuagc

SEQ ID NO: 544085 - RNA, 19 nt, Artificial Sequence
  Description of Artificial Sequence: Synthetic oligonucleotide
  Sense strand starting at position 416 of SEQ ID NO: 318195
cuuuaacaauugucugaug

SEQ ID NO: 544086 - RNA, 19 nt, Artificial Sequence
  Description of Artificial Sequence: Synthetic oligonucleotide
  Antisense strand to SEQ ID NO: 544085
caucagacaauuguuaaag

SEQ ID NO: 544087 - RNA, 19 nt, Artificial Sequence
  Description of Artificial Sequence: Synthetic oligonucleotide
  Sense strand starting at position 418 of SEQ ID NO: 318195
uuaacaauugucugaugua

SEQ ID NO: 544088 - RNA, 19 nt, Artificial Sequence
  Description of Artificial Sequence: Synthetic oligonucleotide
  Antisense strand to SEQ ID NO: 544087
uacaucagacaauuguuaa

SEQ ID NO: 544089 - RNA, 19 nt, Artificial Sequence
  Description of Artificial Sequence: Synthetic oligonucleotide
  Sense strand starting at position 546 of SEQ ID NO: 318195
ggcgggugcccagaguuua

SEQ ID NO: 544090 - RNA, 19 nt, Artificial Sequence
  Description of Artificial Sequence: Synthetic oligonucleotide
  Antisense strand to SEQ ID NO: 544089
uaaacucugggcacccgcc

SEQ ID NO: 544091 - RNA, 19 nt, Artificial Sequence
  Description of Artificial Sequence: Synthetic oligonucleotide
  Sense strand starting at position 577 of SEQ ID NO: 318195
uuugaacucucagugguaa

SEQ ID NO: 544092 - RNA, 19 nt, Artificial Sequence
  Description of Artificial Sequence: Synthetic oligonucleotide
  Antisense strand to SEQ ID NO: 544091
uuaccacugagaguucaaa

SEQ ID NO: 544093 - RNA, 19 nt, Artificial Sequence
  Description of Artificial Sequence: Synthetic oligonucleotide
  Sense strand starting at position 578 of SEQ ID NO: 318195
uugaacucucagugguaaa

SEQ ID NO: 544094 - RNA, 19 nt, Artificial Sequence
  Description of Artificial Sequence: Synthetic oligonucleotide
  Antisense strand to SEQ ID NO: 544093
uuuaccacugagaguucaa

SEQ ID NO: 544095 - RNA, 19 nt, Artificial Sequence
  Description of Artificial Sequence: Synthetic oligonucleotide
  Sense strand starting at position 635 of SEQ ID NO: 318195
gugucaggaagaugacauu

SEQ ID NO: 544096 - RNA, 19 nt, Artificial Sequence
  Description of Artificial Sequence: Synthetic oligonucleotide
  Antisense strand to SEQ ID NO: 544095
aaugucaucuuccugacac

SEQ ID NO: 544097 - RNA, 19 nt, Artificial Sequence
  Description of Artificial Sequence: Synthetic oligonucleotide
  Sense strand starting at position 644 of SEQ ID NO: 318195
agaugacauuucuggauaa

SEQ ID NO: 544098 - RNA, 19 nt, Artificial Sequence
  Description of Artificial Sequence: Synthetic oligonucleotide
  Antisense strand to SEQ ID NO: 544097
uuauccagaaaugucaucu

SEQ ID NO: 544099 - RNA, 19 nt, Artificial Sequence
  Description of Artificial Sequence: Synthetic oligonucleotide
  Sense strand starting at position 889 of SEQ ID NO: 318195
ggguccuugcgugaggaua

SEQ ID NO: 544100 - RNA, 19 nt, Artificial Sequence
  Description of Artificial Sequence: Synthetic oligonucleotide
  Antisense strand to SEQ ID NO: 544099
uauccucacgcaaggaccc

SEQ ID NO: 544101 - RNA, 19 nt, Artificial Sequence
  Description of Artificial Sequence: Synthetic oligonucleotide
  Sense strand starting at position 890 of SEQ ID NO: 318195
gguccuugcgugaggauau

SEQ ID NO: 544102 - RNA, 19 nt, Artificial Sequence
  Description of Artificial Sequence: Synthetic oligonucleotide
  Antisense strand to SEQ ID NO: 544101
auauccucacgcaaggacc

SEQ ID NO: 544103 - RNA, 19 nt, Artificial Sequence
  Description of Artificial Sequence: Synthetic oligonucleotide
  Sense strand starting at position 1175 of SEQ ID NO: 318195
cccuacugaucgcugagaa

SEQ ID NO: 544104 - RNA, 19 nt, Artificial Sequence
  Description of Artificial Sequence: Synthetic oligonucleotide
  Antisense strand to SEQ ID NO: 544103
uucucagcgaucaguaggg

SEQ ID NO: 544105 - RNA, 19 nt, Artificial Sequence
  Description of Artificial Sequence: Synthetic oligonucleotide
  Sense strand starting at position 1176 of SEQ ID NO: 318195
ccuacugaucgcugagaac

SEQ ID NO: 544106 - RNA, 19 nt, Artificial Sequence
  Description of Artificial Sequence: Synthetic oligonucleotide
  Antisense strand to SEQ ID NO: 544105
guucucagcgaucaguagg

SEQ ID NO: 544107 - RNA, 19 nt, Artificial Sequence
  Description of Artificial Sequence: Synthetic oligonucleotide
  Sense strand starting at position 1224 of SEQ ID NO: 318195
gagcguuaucugcacaauc

SEQ ID NO: 544108 - RNA, 19 nt, Artificial Sequence
  Description of Artificial Sequence: Synthetic oligonucleotide
  Antisense strand to SEQ ID NO: 544107
gauugugcagauaacgcuc

SEQ ID NO: 544109 - RNA, 19 nt, Artificial Sequence
  Description of Artificial Sequence: Synthetic oligonucleotide
  Sense strand starting at position 1226 of SEQ ID NO: 318195
gcguuaucugcacaaucug

SEQ ID NO: 544110 - RNA, 19 nt, Artificial Sequence
  Description of Artificial Sequence: Synthetic oligonucleotide
  Antisense strand to SEQ ID NO: 544109
cagauugugcagauaacgc

SEQ ID NO: 544111 - RNA, 19 nt, Artificial Sequence
  Description of Artificial Sequence: Synthetic oligonucleotide
  Sense strand starting at position 1382 of SEQ ID NO: 318195
cagcuauaucgcccggcaa

SEQ ID NO: 544112 - RNA, 19 nt, Artificial Sequence
  Description of Artificial Sequence: Synthetic oligonucleotide
  Antisense strand to SEQ ID NO: 544111
uugccgggcgauauagcug

SEQ ID NO: 544113 - RNA, 19 nt, Artificial Sequence
  Description of Artificial Sequence: Synthetic oligonucleotide
  Sense strand starting at position 1464 of SEQ ID NO: 318195
gaggaugucucuccaucaa

SEQ ID NO: 544114 - RNA, 19 nt, Artificial Sequence
  Description of Artificial Sequence: Synthetic oligonucleotide
  Antisense strand to SEQ ID NO: 544113
uugauggagagacauccuc

SEQ ID NO: 544115 - RNA, 19 nt, Artificial Sequence
  Description of Artificial Sequence: Synthetic oligonucleotide
  Sense strand starting at position 2321 of SEQ ID NO: 318195
gucccugggagguguucua

SEQ ID NO: 544116 - RNA, 19 nt, Artificial Sequence
  Description of Artificial Sequence: Synthetic oligonucleotide
  Antisense strand to SEQ ID NO: 544115
uagaacaccucccagggac

SEQ ID NO: 544117 - RNA, 19 nt, Artificial Sequence
  Description of Artificial Sequence: Synthetic oligonucleotide
  Sense strand starting at position 2541 of SEQ ID NO: 318195
gugggauagucugcuuuac

SEQ ID NO: 544118 - RNA, 19 nt, Artificial Sequence
  Description of Artificial Sequence: Synthetic oligonucleotide
  Antisense strand to SEQ ID NO: 544117
guaaagcagacuaucccac

SEQ ID NO: 544119 - RNA, 19 nt, Artificial Sequence
  Description of Artificial Sequence: Synthetic oligonucleotide
  Sense strand starting at position 2543 of SEQ ID NO: 318195
gggauagucugcuuuacca

SEQ ID NO: 544120 - RNA, 19 nt, Artificial Sequence
  Description of Artificial Sequence: Synthetic oligonucleotide
  Antisense strand to SEQ ID NO: 544119
ugguaaagcagacuauccc

SEQ ID NO: 544121 - RNA, 19 nt, Artificial Sequence
  Description of Artificial Sequence: Synthetic oligonucleotide
  Sense strand starting at position 2545 of SEQ ID NO: 318195
gauagucugcuuuaccaug

SEQ ID NO: 544122 - RNA, 19 nt, Artificial Sequence
  Description of Artificial Sequence: Synthetic oligonucleotide
  Antisense strand to SEQ ID NO: 544121
caugguaaagcagacuauc

SEQ ID NO: 544123 - RNA, 19 nt, Artificial Sequence
  Description of Artificial Sequence: Synthetic oligonucleotide
  Sense strand starting at position 2684 of SEQ ID NO: 318195
ggcccagugauggaauguu

SEQ ID NO: 544124 - RNA, 19 nt, Artificial Sequence
  Description of Artificial Sequence: Synthetic oligonucleotide
  Antisense strand to SEQ ID NO: 544123
aacauuccaucacugggcc

SEQ ID NO: 544125 - RNA, 19 nt, Artificial Sequence
  Description of Artificial Sequence: Synthetic oligonucleotide
  Sense strand starting at position 2754 of SEQ ID NO: 318195
ggaaucugcuucucugacu

SEQ ID NO: 544126 - RNA, 19 nt, Artificial Sequence
  Description of Artificial Sequence: Synthetic oligonucleotide
  Antisense strand to SEQ ID NO: 544125
agucagagaagcagauucc

SEQ ID NO: 544127 - RNA, 19 nt, Artificial Sequence
  Description of Artificial Sequence: Synthetic oligonucleotide
  Sense strand starting at position 3007 of SEQ ID NO: 318195
ucgagucccuacucaauaa

SEQ ID NO: 544128 - RNA, 19 nt, Artificial Sequence
  Description of Artificial Sequence: Synthetic oligonucleotide
  Antisense strand to SEQ ID NO: 544127
uuauugaguagggacucga

SEQ ID NO: 544129 - RNA, 19 nt, Artificial Sequence
  Description of Artificial Sequence: Synthetic oligonucleotide
  Sense strand starting at position 3049 of SEQ ID NO: 318195
uccauauuauguuugagug

SEQ ID NO: 544130 - RNA, 19 nt, Artificial Sequence
  Description of Artificial Sequence: Synthetic oligonucleotide
  Antisense strand to SEQ ID NO: 544129
cacucaaacauaauaugga

SEQ ID NO: 544131 - RNA, 19 nt, Artificial Sequence
  Description of Artificial Sequence: Synthetic oligonucleotide
  Sense strand starting at position 3050 of SEQ ID NO: 318195
ccauauuauguuugaguga

SEQ ID NO: 544132 - RNA, 19 nt, Artificial Sequence
  Description of Artificial Sequence: Synthetic oligonucleotide
  Antisense strand to SEQ ID NO: 544131
ucacucaaacauaauaugg

SEQ ID NO: 544133 - RNA, 19 nt, Artificial Sequence
  Description of Artificial Sequence: Synthetic oligonucleotide
  Sense strand starting at position 3365 of SEQ ID NO: 318195
cuuugaucugggcagcaca

SEQ ID NO: 544134 - RNA, 19 nt, Artificial Sequence
  Description of Artificial Sequence: Synthetic oligonucleotide
  Antisense strand to SEQ ID NO: 544133
ugugcugcccagaucaaag

SEQ ID NO: 544135 - RNA, 19 nt, Artificial Sequence
  Description of Artificial Sequence: Synthetic oligonucleotide
  Sense strand starting at position 3399 of SEQ ID NO: 318195
agaggugauuaauccauau

SEQ ID NO: 544136 - RNA, 19 nt, Artificial Sequence
  Description of Artificial Sequence: Synthetic oligonucleotide
  Antisense strand to SEQ ID NO: 544135
auauggauuaaucaccucu

SEQ ID NO: 544137 - RNA, 19 nt, Artificial Sequence
  Description of Artificial Sequence: Synthetic oligonucleotide
  Sense strand starting at position 3403 of SEQ ID NO: 318195
gugauuaauccauauggcu

SEQ ID NO: 544138 - RNA, 19 nt, Artificial Sequence
  Description of Artificial Sequence: Synthetic oligonucleotide
  Antisense strand to SEQ ID NO: 544137
agccauauggauuaaucac

SEQ ID NO: 544139 - RNA, 19 nt, Artificial Sequence
  Description of Artificial Sequence: Synthetic oligonucleotide
  Sense strand starting at position 3429 of SEQ ID NO: 318195
aaggaaauuggcuguuagu

SEQ ID NO: 544140 - RNA, 19 nt, Artificial Sequence
  Description of Artificial Sequence: Synthetic oligonucleotide
  Antisense strand to SEQ ID NO: 544139
acuaacagccaauuuccuu

SEQ ID NO: 544141 - RNA, 19 nt, Artificial Sequence
  Description of Artificial Sequence: Synthetic oligonucleotide
  Sense strand starting at position 3778 of SEQ ID NO: 318195
cuuacauauuccuuugugu

SEQ ID NO: 544142 - RNA, 19 nt, Artificial Sequence
  Description of Artificial Sequence: Synthetic oligonucleotide
  Antisense strand to SEQ ID NO: 544141
acacaaaggaauauguaag

SEQ ID NO: 544143 - RNA, 19 nt, Artificial Sequence
  Description of Artificial Sequence: Synthetic oligonucleotide
  Sense strand starting at position 3851 of SEQ ID NO: 318195
aucugaaguuuguuccuuu

SEQ ID NO: 544144 - RNA, 19 nt, Artificial Sequence
  Description of Artificial Sequence: Synthetic oligonucleotide
  Antisense strand to SEQ ID NO: 544143
aaaggaacaaacuucagau

SEQ ID NO: 544145 - RNA, 19 nt, Artificial Sequence
  Description of Artificial Sequence: Synthetic oligonucleotide
  Sense strand starting at position 3904 of SEQ ID NO: 318195
ccacaauuuguuugccagu

SEQ ID NO: 544146 - RNA, 19 nt, Artificial Sequence
  Description of Artificial Sequence: Synthetic oligonucleotide
  Antisense strand to SEQ ID NO: 544145
acuggcaaacaaauugugg

SEQ ID NO: 544147 - RNA, 19 nt, Artificial Sequence
  Description of Artificial Sequence: Synthetic oligonucleotide
  Sense strand starting at position 30 of SEQ ID NO: 318196
aggugucugcuacaaacuu

SEQ ID NO: 544148 - RNA, 19 nt, Artificial Sequence
  Description of Artificial Sequence: Synthetic oligonucleotide
  Antisense strand to SEQ ID NO: 544147
aaguuuguagcagacaccu

SEQ ID NO: 544149 - RNA, 19 nt, Artificial Sequence
  Description of Artificial Sequence: Synthetic oligonucleotide
  Sense strand starting at position 146 of SEQ ID NO: 318196
agagaaucauuugacuggu

SEQ ID NO: 544150 - RNA, 19 nt, Artificial Sequence
  Description of Artificial Sequence: Synthetic oligonucleotide
  Antisense strand to SEQ ID NO: 544149
accagucaaaugauucucu

SEQ ID NO: 544151 - RNA, 19 nt, Artificial Sequence
  Description of Artificial Sequence: Synthetic oligonucleotide
  Sense strand starting at position 205 of SEQ ID NO: 318196
auuuguggugcuuguuaaa

SEQ ID NO: 544152 - RNA, 19 nt, Artificial Sequence
  Description of Artificial Sequence: Synthetic oligonucleotide
  Antisense strand to SEQ ID NO: 544151
uuuaacaagcaccacaaau

SEQ ID NO: 544153 - RNA, 19 nt, Artificial Sequence
  Description of Artificial Sequence: Synthetic oligonucleotide
  Sense strand starting at position 300 of SEQ ID NO: 318196
ugcauauagguuuauugau

SEQ ID NO: 544154 - RNA, 19 nt, Artificial Sequence
  Description of Artificial Sequence: Synthetic oligonucleotide
  Antisense strand to SEQ ID NO: 544153
aucaauaaaccuauaugca

SEQ ID NO: 544155 - RNA, 19 nt, Artificial Sequence
  Description of Artificial Sequence: Synthetic oligonucleotide
  Sense strand starting at position 349 of SEQ ID NO: 318196
gcaugacaaucaccguaau

SEQ ID NO: 544156 - RNA, 19 nt, Artificial Sequence
  Description of Artificial Sequence: Synthetic oligonucleotide
  Antisense strand to SEQ ID NO: 544155
auuacggugauugucaugc

SEQ ID NO: 544157 - RNA, 19 nt, Artificial Sequence
  Description of Artificial Sequence: Synthetic oligonucleotide
  Sense strand starting at position 502 of SEQ ID NO: 318196
guuacaugaugauugauau

SEQ ID NO: 544158 - RNA, 19 nt, Artificial Sequence
  Description of Artificial Sequence: Synthetic oligonucleotide
  Antisense strand to SEQ ID NO: 544157
auaucaaucaucauguaac

SEQ ID NO: 544159 - RNA, 19 nt, Artificial Sequence
  Description of Artificial Sequence: Synthetic oligonucleotide
  Sense strand starting at position 692 of SEQ ID NO: 318196
augaauaaccuuuguugaa

SEQ ID NO: 544160 - RNA, 19 nt, Artificial Sequence
  Description of Artificial Sequence: Synthetic oligonucleotide
  Antisense strand to SEQ ID NO: 544159
uucaacaaagguuauucau

SEQ ID NO: 544161 - RNA, 19 nt, Artificial Sequence
  Description of Artificial Sequence: Synthetic oligonucleotide
  Sense strand starting at position 693 of SEQ ID NO: 318196
ugaauaaccuuuguugaaa

SEQ ID NO: 544162 - RNA, 19 nt, Artificial Sequence
  Description of Artificial Sequence: Synthetic oligonucleotide
  Antisense strand to SEQ ID NO: 544161
uuucaacaaagguuauuca

SEQ ID NO: 544163 - RNA, 19 nt, Artificial Sequence
  Description of Artificial Sequence: Synthetic oligonucleotide
  Sense strand starting at position 696 of SEQ ID NO: 318196
auaaccuuuguugaaaguu

SEQ ID NO: 544164 - RNA, 19 nt, Artificial Sequence
  Description of Artificial Sequence: Synthetic oligonucleotide
  Antisense strand to SEQ ID NO: 544163
aacuuucaacaaagguuau

SEQ ID NO: 544165 - RNA, 19 nt, Artificial Sequence
  Description of Artificial Sequence: Synthetic oligonucleotide
  Sense strand starting at position 854 of SEQ ID NO: 318196
auaaguggcuucccaagau

SEQ ID NO: 544166 - RNA, 19 nt, Artificial Sequence
  Description of Artificial Sequence: Synthetic oligonucleotide
  Antisense strand to SEQ ID NO: 544165
aucuugggaagccacuuau

SEQ ID NO: 544167 - RNA, 19 nt, Artificial Sequence
  Description of Artificial Sequence: Synthetic oligonucleotide
  Sense strand starting at position 858 of SEQ ID NO: 318196
guggcuucccaagauucca

SEQ ID NO: 544168 - RNA, 19 nt, Artificial Sequence
  Description of Artificial Sequence: Synthetic oligonucleotide
  Antisense strand to SEQ ID NO: 544167
uggaaucuugggaagccac

SEQ ID NO: 544169 - RNA, 19 nt, Artificial Sequence
  Description of Artificial Sequence: Synthetic oligonucleotide
  Sense strand starting at position 1099 of SEQ ID NO: 318196
ugauaauuccgagggcauu

SEQ ID NO: 544170 - RNA, 19 nt, Artificial Sequence
  Description of Artificial Sequence: Synthetic oligonucleotide
  Antisense strand to SEQ ID NO: 544169
aaugcccucggaauuauca

SEQ ID NO: 544171 - RNA, 19 nt, Artificial Sequence
  Description of Artificial Sequence: Synthetic oligonucleotide
  Sense strand starting at position 1100 of SEQ ID NO: 318196
gauaauuccgagggcauua

SEQ ID NO: 544172 - RNA, 19 nt, Artificial Sequence
  Description of Artificial Sequence: Synthetic oligonucleotide
  Antisense strand to SEQ ID NO: 544171
uaaugcccucggaauuauc

SEQ ID NO: 544173 - RNA, 19 nt, Artificial Sequence
  Description of Artificial Sequence: Synthetic oligonucleotide
  Sense strand starting at position 1271 of SEQ ID NO: 318196
agaguugcaucuuucugau

SEQ ID NO: 544174 - RNA, 19 nt, Artificial Sequence
  Description of Artificial Sequence: Synthetic oligonucleotide
  Antisense strand to SEQ ID NO: 544173
aucagaaagaugcaacucu

SEQ ID NO: 544175 - RNA, 19 nt, Artificial Sequence
  Description of Artificial Sequence: Synthetic oligonucleotide
  Sense strand starting at position 1273 of SEQ ID NO: 318196
aguugcaucuuucugauga

SEQ ID NO: 544176 - RNA, 19 nt, Artificial Sequence
  Description of Artificial Sequence: Synthetic oligonucleotide
  Antisense strand to SEQ ID NO: 544175
ucaucagaaagaugcaacu

SEQ ID NO: 544177 - RNA, 19 nt, Artificial Sequence
  Description of Artificial Sequence: Synthetic oligonucleotide
  Sense strand starting at position 1402 of SEQ ID NO: 318196
gcucauaagccuuacaaga

SEQ ID NO: 544178 - RNA, 19 nt, Artificial Sequence
  Description of Artificial Sequence: Synthetic oligonucleotide
  Antisense strand to SEQ ID NO: 544177
ucuuguaaggcuuaugagc

SEQ ID NO: 544179 - RNA, 19 nt, Artificial Sequence
  Description of Artificial Sequence: Synthetic oligonucleotide
  Sense strand starting at position 1558 of SEQ ID NO: 318196
ccuggaaugcucuauucca

SEQ ID NO: 544180 - RNA, 19 nt, Artificial Sequence
  Description of Artificial Sequence: Synthetic oligonucleotide
  Antisense strand to SEQ ID NO: 544179
uggaauagagcauuccagg

SEQ ID NO: 544181 - RNA, 19 nt, Artificial Sequence
  Description of Artificial Sequence: Synthetic oligonucleotide
  Sense strand starting at position 2218 of SEQ ID NO: 318196
agggucgagggcugugaaa

SEQ ID NO: 544182 - RNA, 19 nt, Artificial Sequence
  Description of Artificial Sequence: Synthetic oligonucleotide
  Antisense strand to SEQ ID NO: 544181
uuucacagcccucgacccu

SEQ ID NO: 544183 - RNA, 19 nt, Artificial Sequence
  Description of Artificial Sequence: Synthetic oligonucleotide
  Sense strand starting at position 2245 of SEQ ID NO: 318196
gugauugaagcgcuacguu

SEQ ID NO: 544184 - RNA, 19 nt, Artificial Sequence
  Description of Artificial Sequence: Synthetic oligonucleotide
  Antisense strand to SEQ ID NO: 544183
aacguagcgcuucaaucac

SEQ ID NO: 544185 - RNA, 19 nt, Artificial Sequence
  Description of Artificial Sequence: Synthetic oligonucleotide
  Sense strand starting at position 2282 of SEQ ID NO: 318196
cguugucagcgccugagaa

SEQ ID NO: 544186 - RNA, 19 nt, Artificial Sequence
  Description of Artificial Sequence: Synthetic oligonucleotide
  Antisense strand to SEQ ID NO: 544185
uucucaggcgcugacaacg

SEQ ID NO: 544187 - RNA, 19 nt, Artificial Sequence
  Description of Artificial Sequence: Synthetic oligonucleotide
  Sense strand starting at position 2345 of SEQ ID NO: 318196
cccauucuugaauguggga

SEQ ID NO: 544188 - RNA, 19 nt, Artificial Sequence
  Description of Artificial Sequence: Synthetic oligonucleotide
  Antisense strand to SEQ ID NO: 544187
ucccacauucaagaauggg

SEQ ID NO: 544189 - RNA, 19 nt, Artificial Sequence
  Description of Artificial Sequence: Synthetic oligonucleotide
  Sense strand starting at position 2377 of SEQ ID NO: 318196
cauguuugcucaucuagag

SEQ ID NO: 544190 - RNA, 19 nt, Artificial Sequence
  Description of Artificial Sequence: Synthetic oligonucleotide
  Antisense strand to SEQ ID NO: 544189
cucuagaugagcaaacaug

SEQ ID NO: 544191 - RNA, 19 nt, Artificial Sequence
  Description of Artificial Sequence: Synthetic oligonucleotide
  Sense strand starting at position 2391 of SEQ ID NO: 318196
uagagacagccguauuaau

SEQ ID NO: 544192 - RNA, 19 nt, Artificial Sequence
  Description of Artificial Sequence: Synthetic oligonucleotide
  Antisense strand to SEQ ID NO: 544191
auuaauacggcugucucua

SEQ ID NO: 544193 - RNA, 19 nt, Artificial Sequence
  Description of Artificial Sequence: Synthetic oligonucleotide
  Sense strand starting at position 2401 of SEQ ID NO: 318196
cguauuaauaacgauagga

SEQ ID NO: 544194 - RNA, 19 nt, Artificial Sequence
  Description of Artificial Sequence: Synthetic oligonucleotide
  Antisense strand to SEQ ID NO: 544193
uccuaucguuauuaauacg

SEQ ID NO: 544195 - RNA, 19 nt, Artificial Sequence
  Description of Artificial Sequence: Synthetic oligonucleotide
  Sense strand starting at position 2532 of SEQ ID NO: 318196
agaacuccauuugacagau

SEQ ID NO: 544196 - RNA, 19 nt, Artificial Sequence
  Description of Artificial Sequence: Synthetic oligonucleotide
  Antisense strand to SEQ ID NO: 544195
aucugucaaauggaguucu

SEQ ID NO: 544197 - RNA, 19 nt, Artificial Sequence
  Description of Artificial Sequence: Synthetic oligonucleotide
  Sense strand starting at position 2748 of SEQ ID NO: 318196
auggcucagccguauuuau

SEQ ID NO: 544198 - RNA, 19 nt, Artificial Sequence
  Description of Artificial Sequence: Synthetic oligonucleotide
  Antisense strand to SEQ ID NO: 544197
auaaauacggcugagccau

SEQ ID NO: 544199 - RNA, 19 nt, Artificial Sequence
  Description of Artificial Sequence: Synthetic oligonucleotide
  Sense strand starting at position 2843 of SEQ ID NO: 318196
cuacacaaugccuggaaga

SEQ ID NO: 544200 - RNA, 19 nt, Artificial Sequence
  Description of Artificial Sequence: Synthetic oligonucleotide
  Antisense strand to SEQ ID NO: 544199
ucuuccaggcauuguguag

SEQ ID NO: 544201 - RNA, 19 nt, Artificial Sequence
  Description of Artificial Sequence: Synthetic oligonucleotide
  Sense strand starting at position 2933 of SEQ ID NO: 318196
cuagauuaugaaugaguug

SEQ ID NO: 544202 - RNA, 19 nt, Artificial Sequence
  Description of Artificial Sequence: Synthetic oligonucleotide
  Antisense strand to SEQ ID NO: 544201
caacucauucauaaucuag

SEQ ID NO: 544203 - RNA, 19 nt, Artificial Sequence
  Description of Artificial Sequence: Synthetic oligonucleotide
  Sense strand starting at position 2961 of SEQ ID NO: 318196
augguacagucauucuaau

SEQ ID NO: 544204 - RNA, 19 nt, Artificial Sequence
  Description of Artificial Sequence: Synthetic oligonucleotide
  Antisense strand to SEQ ID NO: 544203
auuagaaugacuguaccau

SEQ ID NO: 544205 - RNA, 19 nt, Artificial Sequence
  Description of Artificial Sequence: Synthetic oligonucleotide
  Sense strand starting at position 3028 of SEQ ID NO: 318196
ucuggcuuagcucaaauau

SEQ ID NO: 544206 - RNA, 19 nt, Artificial Sequence
  Description of Artificial Sequence: Synthetic oligonucleotide
  Antisense strand to SEQ ID NO: 544205
auauuugagcuaagccaga

SEQ ID NO: 544207 - RNA, 19 nt, Artificial Sequence
  Description of Artificial Sequence: Synthetic oligonucleotide
  Sense strand starting at position 3066 of SEQ ID NO: 318196
agagauaaccaguguuuaa

SEQ ID NO: 544208 - RNA, 19 nt, Artificial Sequence
  Description of Artificial Sequence: Synthetic oligonucleotide
  Antisense strand to SEQ ID NO: 544207
uuaaacacugguuaucucu

SEQ ID NO: 544209 - RNA, 19 nt, Artificial Sequence
  Description of Artificial Sequence: Synthetic oligonucleotide
  Sense strand starting at position 3415 of SEQ ID NO: 318196
uuaauugaacuuugugcaa

SEQ ID NO: 544210 - RNA, 19 nt, Artificial Sequence
  Description of Artificial Sequence: Synthetic oligonucleotide
  Antisense strand to SEQ ID NO: 544209
uugcacaaaguucaauuaa

SEQ ID NO: 544211 - RNA, 19 nt, Artificial Sequence
  Description of Artificial Sequence: Synthetic oligonucleotide
  Sense strand starting at position 3467 of SEQ ID NO: 318196
uggagugaauggcuuacau

SEQ ID NO: 544212 - RNA, 19 nt, Artificial Sequence
  Description of Artificial Sequence: Synthetic oligonucleotide
  Antisense strand to SEQ ID NO: 544211
auguaagccauucacucca

SEQ ID NO: 544213 - RNA, 19 nt, Artificial Sequence
  Description of Artificial Sequence: Synthetic oligonucleotide
  Sense strand starting at position 3469 of SEQ ID NO: 318196
gagugaauggcuuacauua

SEQ ID NO: 544214 - RNA, 19 nt, Artificial Sequence
  Description of Artificial Sequence: Synthetic oligonucleotide
  Antisense strand to SEQ ID NO: 544213
uaauguaagccauucacuc

SEQ ID NO: 544215 - RNA, 19 nt, Artificial Sequence
  Description of Artificial Sequence: Synthetic oligonucleotide
  Sense strand starting at position 3545 of SEQ ID NO: 318196
auguuugcgagugaaugaa

SEQ ID NO: 544216 - RNA, 19 nt, Artificial Sequence
  Description of Artificial Sequence: Synthetic oligonucleotide
  Antisense strand to SEQ ID NO: 544215
uucauucacucgcaaacau

SEQ ID NO: 544217 - RNA, 19 nt, Artificial Sequence
  Description of Artificial Sequence: Synthetic oligonucleotide
  Sense strand starting at position 3596 of SEQ ID NO: 318196
aguaguuguaucuggauuu

SEQ ID NO: 544218 - RNA, 19 nt, Artificial Sequence
  Description of Artificial Sequence: Synthetic oligonucleotide
  Antisense strand to SEQ ID NO: 544217
aaauccagauacaacuacu

SEQ ID NO: 544219 - RNA, 19 nt, Artificial Sequence
  Description of Artificial Sequence: Synthetic oligonucleotide
  Sense strand starting at position 3668 of SEQ ID NO: 318196
uucugaacuccauaguguu

SEQ ID NO: 544220 - RNA, 19 nt, Artificial Sequence
  Description of Artificial Sequence: Synthetic oligonucleotide
  Antisense strand to SEQ ID NO: 544219
aacacuauggaguucagaa

SEQ ID NO: 544221 - RNA, 19 nt, Artificial Sequence
  Description of Artificial Sequence: Synthetic oligonucleotide
  Sense strand starting at position 3742 of SEQ ID NO: 318196
guaacuacucccuacugua

SEQ ID NO: 544222 - RNA, 19 nt, Artificial Sequence
  Description of Artificial Sequence: Synthetic oligonucleotide
  Antisense strand to SEQ ID NO: 544221
uacaguagggaguaguuac

SEQ ID NO: 544223 - RNA, 19 nt, Artificial Sequence
  Description of Artificial Sequence: Synthetic oligonucleotide
  Sense strand starting at position 3904 of SEQ ID NO: 318196
uacagagguuaaucaggua

SEQ ID NO: 544224 - RNA, 19 nt, Artificial Sequence
  Description of Artificial Sequence: Synthetic oligonucleotide
  Antisense strand to SEQ ID NO: 544223
uaccugauuaaccucugua

SEQ ID NO: 544225 - RNA, 19 nt, Artificial Sequence
  Description of Artificial Sequence: Synthetic oligonucleotide
  Sense strand starting at position 3909 of SEQ ID NO: 318196
agguuaaucagguagcaua

SEQ ID NO: 544226 - RNA, 19 nt, Artificial Sequence
  Description of Artificial Sequence: Synthetic oligonucleotide
  Antisense strand to SEQ ID NO: 544225
uaugcuaccugauuaaccu

SEQ ID NO: 544227 - RNA, 19 nt, Artificial Sequence
  Description of Artificial Sequence: Synthetic oligonucleotide
  Sense strand starting at position 185 of SEQ ID NO: 318197
ggaauccuauuaucucagu

SEQ ID NO: 544228 - RNA, 19 nt, Artificial Sequence
  Description of Artificial Sequence: Synthetic oligonucleotide
  Antisense strand to SEQ ID NO: 544227
acugagauaauaggauucc

SEQ ID NO: 544229 - RNA, 19 nt, Artificial Sequence
  Description of Artificial Sequence: Synthetic oligonucleotide
  Sense strand starting at position 191 of SEQ ID NO: 318197
cuauuaucucaguguugga

SEQ ID NO: 544230 - RNA, 19 nt, Artificial Sequence
  Description of Artificial Sequence: Synthetic oligonucleotide
  Antisense strand to SEQ ID NO: 544229
uccaacacugagauaauag

SEQ ID NO: 544231 - RNA, 19 nt, Artificial Sequence
  Description of Artificial Sequence: Synthetic oligonucleotide
  Sense strand starting at position 321 of SEQ ID NO: 318197
acucauccagcuuggguaa

SEQ ID NO: 544232 - RNA, 19 nt, Artificial Sequence
  Description of Artificial Sequence: Synthetic oligonucleotide
  Antisense strand to SEQ ID NO: 544231
uuacccaagcuggaugagu

SEQ ID NO: 544233 - RNA, 19 nt, Artificial Sequence
  Description of Artificial Sequence: Synthetic oligonucleotide
  Sense strand starting at position 355 of SEQ ID NO: 318197
aagucuauaccuggacaga

SEQ ID NO: 544234 - RNA, 19 nt, Artificial Sequence
  Description of Artificial Sequence: Synthetic oligonucleotide
  Antisense strand to SEQ ID NO: 544233
ucuguccagguauagacuu

SEQ ID NO: 544235 - RNA, 19 nt, Artificial Sequence
  Description of Artificial Sequence: Synthetic oligonucleotide
  Sense strand starting at position 474 of SEQ ID NO: 318197
gcaagacauuaagugggaa

SEQ ID NO: 544236 - RNA, 19 nt, Artificial Sequence
  Description of Artificial Sequence: Synthetic oligonucleotide
  Antisense strand to SEQ ID NO: 544235
uucccacuuaaugucuugc

SEQ ID NO: 544237 - RNA, 19 nt, Artificial Sequence
  Description of Artificial Sequence: Synthetic oligonucleotide
  Sense strand starting at position 526 of SEQ ID NO: 318197
ucaguugcucuccaggaga

SEQ ID NO: 544238 - RNA, 19 nt, Artificial Sequence
  Description of Artificial Sequence: Synthetic oligonucleotide
  Antisense strand to SEQ ID NO: 544237
ucuccuggagagcaacuga

SEQ ID NO: 544239 - RNA, 19 nt, Artificial Sequence
  Description of Artificial Sequence: Synthetic oligonucleotide
  Sense strand starting at position 529 of SEQ ID NO: 318197
guugcucuccaggagauca

SEQ ID NO: 544240 - RNA, 19 nt, Artificial Sequence
  Description of Artificial Sequence: Synthetic oligonucleotide
  Antisense strand to SEQ ID NO: 544239
ugaucuccuggagagcaac

SEQ ID NO: 544241 - RNA, 19 nt, Artificial Sequence
  Description of Artificial Sequence: Synthetic oligonucleotide
  Sense strand starting at position 780 of SEQ ID NO: 318197
gagucuggugauggacaga

SEQ ID NO: 544242 - RNA, 19 nt, Artificial Sequence
  Description of Artificial Sequence: Synthetic oligonucleotide
  Antisense strand to SEQ ID NO: 544241
ucuguccaucaccagacuc

SEQ ID NO: 544243 - RNA, 19 nt, Artificial Sequence
  Description of Artificial Sequence: Synthetic oligonucleotide
  Sense strand starting at position 834 of SEQ ID NO: 318197
gaaguuauccacugugaga

SEQ ID NO: 544244 - RNA, 19 nt, Artificial Sequence
  Description of Artificial Sequence: Synthetic oligonucleotide
  Antisense strand to SEQ ID NO: 544243
ucucacaguggauaacuuc

SEQ ID NO: 544245 - RNA, 19 nt, Artificial Sequence
  Description of Artificial Sequence: Synthetic oligonucleotide
  Sense strand starting at position 836 of SEQ ID NO: 318197
aguuauccacugugagaac

SEQ ID NO: 544246 - RNA, 19 nt, Artificial Sequence
  Description of Artificial Sequence: Synthetic oligonucleotide
  Antisense strand to SEQ ID NO: 544245
guucucacaguggauaacu

SEQ ID NO: 544247 - RNA, 19 nt, Artificial Sequence
  Description of Artificial Sequence: Synthetic oligonucleotide
  Sense strand starting at position 918 of SEQ ID NO: 318197
ggaggcagauuucuguguu

SEQ ID NO: 544248 - RNA, 19 nt, Artificial Sequence
  Description of Artificial Sequence: Synthetic oligonucleotide
  Antisense strand to SEQ ID NO: 544247
aacacagaaaucugccucc

SEQ ID NO: 544249 - RNA, 19 nt, Artificial Sequence
  Description of Artificial Sequence: Synthetic oligonucleotide
  Sense strand starting at position 921 of SEQ ID NO: 318197
ggcagauuucuguguuaac

SEQ ID NO: 544250 - RNA, 19 nt, Artificial Sequence
  Description of Artificial Sequence: Synthetic oligonucleotide
  Antisense strand to SEQ ID NO: 544249
guuaacacagaaaucugcc

SEQ ID NO: 544251 - RNA, 19 nt, Artificial Sequence
  Description of Artificial Sequence: Synthetic oligonucleotide
  Sense strand starting at position 922 of SEQ ID NO: 318197
gcagauuucuguguuaacc

SEQ ID NO: 544252 - RNA, 19 nt, Artificial Sequence
  Description of Artificial Sequence: Synthetic oligonucleotide
  Antisense strand to SEQ ID NO: 544251
gguuaacacagaaaucugc

SEQ ID NO: 544253 - RNA, 19 nt, Artificial Sequence
  Description of Artificial Sequence: Synthetic oligonucleotide
  Sense strand starting at position 931 of SEQ ID NO: 318197
uguguuaaccugcagaaca

SEQ ID NO: 544254 - RNA, 19 nt, Artificial Sequence
  Description of Artificial Sequence: Synthetic oligonucleotide
  Antisense strand to SEQ ID NO: 544253
uguucugcagguuaacaca

SEQ ID NO: 544255 - RNA, 19 nt, Artificial Sequence
  Description of Artificial Sequence: Synthetic oligonucleotide
  Sense strand starting at position 1066 of SEQ ID NO: 318197
aacacuccgcaagguuaua

SEQ ID NO: 544256 - RNA, 19 nt, Artificial Sequence
  Description of Artificial Sequence: Synthetic oligonucleotide
  Antisense strand to SEQ ID NO: 544255
uauaaccuugcggaguguu

SEQ ID NO: 544257 - RNA, 19 nt, Artificial Sequence
  Description of Artificial Sequence: Synthetic oligonucleotide
  Sense strand starting at position 1127 of SEQ ID NO: 318197
ucaccucaucaauaguguu

SEQ ID NO: 544258 - RNA, 19 nt, Artificial Sequence
  Description of Artificial Sequence: Synthetic oligonucleotide
  Antisense strand to SEQ ID NO: 544257
aacacuauugaugagguga

SEQ ID NO: 544259 - RNA, 19 nt, Artificial Sequence
  Description of Artificial Sequence: Synthetic oligonucleotide
  Sense strand starting at position 1225 of SEQ ID NO: 318197
acccguucucaccacagaa

SEQ ID NO: 544260 - RNA, 19 nt, Artificial Sequence
  Description of Artificial Sequence: Synthetic oligonucleotide
  Antisense strand to SEQ ID NO: 544259
uucuguggugagaacgggu

SEQ ID NO: 544261 - RNA, 19 nt, Artificial Sequence
  Description of Artificial Sequence: Synthetic oligonucleotide
  Sense strand starting at position 1249 of SEQ ID NO: 318197
accggagacucuucuaaga

SEQ ID NO: 544262 - RNA, 19 nt, Artificial Sequence
  Description of Artificial Sequence: Synthetic oligonucleotide
  Antisense strand to SEQ ID NO: 544261
ucuuagaagagucuccggu

SEQ ID NO: 544263 - RNA, 19 nt, Artificial Sequence
  Description of Artificial Sequence: Synthetic oligonucleotide
  Sense strand starting at position 1301 of SEQ ID NO: 318197
cugucuaaagcgcaacaua

SEQ ID NO: 544264 - RNA, 19 nt, Artificial Sequence
  Description of Artificial Sequence: Synthetic oligonucleotide
  Antisense strand to SEQ ID NO: 544263
uauguugcgcuuuagacag

SEQ ID NO: 544265 - RNA, 19 nt, Artificial Sequence
  Description of Artificial Sequence: Synthetic oligonucleotide
  Sense strand starting at position 1304 of SEQ ID NO: 318197
ucuaaagcgcaacauaaua

SEQ ID NO: 544266 - RNA, 19 nt, Artificial Sequence
  Description of Artificial Sequence: Synthetic oligonucleotide
  Antisense strand to SEQ ID NO: 544265
uauuauguugcgcuuuaga

SEQ ID NO: 544267 - RNA, 19 nt, Artificial Sequence
  Description of Artificial Sequence: Synthetic oligonucleotide
  Sense strand starting at position 1518 of SEQ ID NO: 318197
ggcuacucccgagaacacu

SEQ ID NO: 544268 - RNA, 19 nt, Artificial Sequence
  Description of Artificial Sequence: Synthetic oligonucleotide
  Antisense strand to SEQ ID NO: 544267
aguguucucgggaguagcc

SEQ ID NO: 544269 - RNA, 19 nt, Artificial Sequence
  Description of Artificial Sequence: Synthetic oligonucleotide
  Sense strand starting at position 1527 of SEQ ID NO: 318197
cgagaacacucuccuggaa

SEQ ID NO: 544270 - RNA, 19 nt, Artificial Sequence
  Description of Artificial Sequence: Synthetic oligonucleotide
  Antisense strand to SEQ ID NO: 544269
uuccaggagaguguucucg

SEQ ID NO: 544271 - RNA, 19 nt, Artificial Sequence
  Description of Artificial Sequence: Synthetic oligonucleotide
  Sense strand starting at position 1530 of SEQ ID NO: 318197
gaacacucuccuggaaugu

SEQ ID NO: 544272 - RNA, 19 nt, Artificial Sequence
  Description of Artificial Sequence: Synthetic oligonucleotide
  Antisense strand to SEQ ID NO: 544271
acauuccaggagaguguuc

SEQ ID NO: 544273 - RNA, 19 nt, Artificial Sequence
  Description of Artificial Sequence: Synthetic oligonucleotide
  Sense strand starting at position 1534 of SEQ ID NO: 318197
acucuccuggaauguuuaa

SEQ ID NO: 544274 - RNA, 19 nt, Artificial Sequence
  Description of Artificial Sequence: Synthetic oligonucleotide
  Antisense strand to SEQ ID NO: 544273
uuaaacauuccaggagagu

SEQ ID NO: 544275 - RNA, 19 nt, Artificial Sequence
  Description of Artificial Sequence: Synthetic oligonucleotide
  Sense strand starting at position 1587 of SEQ ID NO: 318197
ucccauuucucagcccgaa

SEQ ID NO: 544276 - RNA, 19 nt, Artificial Sequence
  Description of Artificial Sequence: Synthetic oligonucleotide
  Antisense strand to SEQ ID NO: 544275
uucgggcugagaaauggga

SEQ ID NO: 544277 - RNA, 19 nt, Artificial Sequence
  Description of Artificial Sequence: Synthetic oligonucleotide
  Sense strand starting at position 1632 of SEQ ID NO: 318197
ccaaguuuauucguaaaca

SEQ ID NO: 544278 - RNA, 19 nt, Artificial Sequence
  Description of Artificial Sequence: Synthetic oligonucleotide
  Antisense strand to SEQ ID NO: 544277
uguuuacgaauaaacuugg

SEQ ID NO: 544279 - RNA, 19 nt, Artificial Sequence
  Description of Artificial Sequence: Synthetic oligonucleotide
  Sense strand starting at position 1798 of SEQ ID NO: 318197
ccguguucacaagagaaga

SEQ ID NO: 544280 - RNA, 19 nt, Artificial Sequence
  Description of Artificial Sequence: Synthetic oligonucleotide
  Antisense strand to SEQ ID NO: 544279
ucuucucuugugaacacgg

SEQ ID NO: 544281 - RNA, 19 nt, Artificial Sequence
  Description of Artificial Sequence: Synthetic oligonucleotide
  Sense strand starting at position 2985 of SEQ ID NO: 318197
cgacauguucgagaaucuu

SEQ ID NO: 544282 - RNA, 19 nt, Artificial Sequence
  Description of Artificial Sequence: Synthetic oligonucleotide
  Antisense strand to SEQ ID NO: 544281
aagauucucgaacaugucg

SEQ ID NO: 544283 - RNA, 19 nt, Artificial Sequence
  Description of Artificial Sequence: Synthetic oligonucleotide
  Sense strand starting at position 3083 of SEQ ID NO: 318197
cuguguucugucgugggau

SEQ ID NO: 544284 - RNA, 19 nt, Artificial Sequence
  Description of Artificial Sequence: Synthetic oligonucleotide
  Antisense strand to SEQ ID NO: 544283
aucccacgacagaacacag

SEQ ID NO: 544285 - RNA, 19 nt, Artificial Sequence
  Description of Artificial Sequence: Synthetic oligonucleotide
  Sense strand starting at position 3085 of SEQ ID NO: 318197
guguucugucgugggauuu

SEQ ID NO: 544286 - RNA, 19 nt, Artificial Sequence
  Description of Artificial Sequence: Synthetic oligonucleotide
  Antisense strand to SEQ ID NO: 544285
aaaucccacgacagaacac

SEQ ID NO: 544287 - RNA, 19 nt, Artificial Sequence
  Description of Artificial Sequence: Synthetic oligonucleotide
  Sense strand starting at position 3129 of SEQ ID NO: 318197
uuuccauuacugggaaugu

SEQ ID NO: 544288 - RNA, 19 nt, Artificial Sequence
  Description of Artificial Sequence: Synthetic oligonucleotide
  Antisense strand to SEQ ID NO: 544287
acauucccaguaauggaaa

SEQ ID NO: 544289 - RNA, 19 nt, Artificial Sequence
  Description of Artificial Sequence: Synthetic oligonucleotide
  Sense strand starting at position 3158 of SEQ ID NO: 318197
gcgucaggacucuggagau

SEQ ID NO: 544290 - RNA, 19 nt, Artificial Sequence
  Description of Artificial Sequence: Synthetic oligonucleotide
  Antisense strand to SEQ ID NO: 544289
aucuccagaguccugacgc

SEQ ID NO: 544291 - RNA, 19 nt, Artificial Sequence
  Description of Artificial Sequence: Synthetic oligonucleotide
  Sense strand starting at position 3239 of SEQ ID NO: 318197
uuaauuauauugcuuggga

SEQ ID NO: 544292 - RNA, 19 nt, Artificial Sequence
  Description of Artificial Sequence: Synthetic oligonucleotide
  Antisense strand to SEQ ID NO: 544291
ucccaagcaauauaauuaa

SEQ ID NO: 544293 - RNA, 19 nt, Artificial Sequence
  Description of Artificial Sequence: Synthetic oligonucleotide
  Sense strand starting at position 3242 of SEQ ID NO: 318197
auuauauugcuugggauau

SEQ ID NO: 544294 - RNA, 19 nt, Artificial Sequence
  Description of Artificial Sequence: Synthetic oligonucleotide
  Antisense strand to SEQ ID NO: 544293
auaucccaagcaauauaau

SEQ ID NO: 544295 - RNA, 19 nt, Artificial Sequence
  Description of Artificial Sequence: Synthetic oligonucleotide
  Sense strand starting at position 3246 of SEQ ID NO: 318197
uauugcuugggauauauua

SEQ ID NO: 544296 - RNA, 19 nt, Artificial Sequence
  Description of Artificial Sequence: Synthetic oligonucleotide
  Antisense strand to SEQ ID NO: 544295
uaauauaucccaagcaaua

SEQ ID NO: 544297 - RNA, 19 nt, Artificial Sequence
  Description of Artificial Sequence: Synthetic oligonucleotide
  Sense strand starting at position 3253 of SEQ ID NO: 318197
ugggauauauuauugcaag

SEQ ID NO: 544298 - RNA, 19 nt, Artificial Sequence
  Description of Artificial Sequence: Synthetic oligonucleotide
  Antisense strand to SEQ ID NO: 544297
cuugcaauaauauauccca

SEQ ID NO: 544299 - RNA, 19 nt, Artificial Sequence
  Description of Artificial Sequence: Synthetic oligonucleotide
  Sense strand starting at position 3575 of SEQ ID NO: 318197
gucguuucugugcuccaaa

SEQ ID NO: 544300 - RNA, 19 nt, Artificial Sequence
  Description of Artificial Sequence: Synthetic oligonucleotide
  Antisense strand to SEQ ID NO: 544299
uuuggagcacagaaacgac

SEQ ID NO: 544301 - RNA, 19 nt, Artificial Sequence
  Description of Artificial Sequence: Synthetic oligonucleotide
  Sense strand starting at position 3629 of SEQ ID NO: 318197
cgccaaaguccuuacaaug

SEQ ID NO: 544302 - RNA, 19 nt, Artificial Sequence
  Description of Artificial Sequence: Synthetic oligonucleotide
  Antisense strand to SEQ ID NO: 544301
cauuguaaggacuuuggcg

SEQ ID NO: 544303 - RNA, 19 nt, Artificial Sequence
  Description of Artificial Sequence: Synthetic oligonucleotide
  Sense strand starting at position 3734 of SEQ ID NO: 318197
gcuguugucuauuuguaaa

SEQ ID NO: 544304 - RNA, 19 nt, Artificial Sequence
  Description of Artificial Sequence: Synthetic oligonucleotide
  Antisense strand to SEQ ID NO: 544303
uuuacaaauagacaacagc

SEQ ID NO: 544305 - RNA, 19 nt, Artificial Sequence
  Description of Artificial Sequence: Synthetic oligonucleotide
  Sense strand starting at position 3938 of SEQ ID NO: 318197
ggguuuaccauguauuguc

SEQ ID NO: 544306 - RNA, 19 nt, Artificial Sequence
  Description of Artificial Sequence: Synthetic oligonucleotide
  Antisense strand to SEQ ID NO: 544305
gacaauacaugguaaaccc

SEQ ID NO: 544307 - RNA, 19 nt, Artificial Sequence
  Description of Artificial Sequence: Synthetic oligonucleotide
  Sense strand starting at position 92 of SEQ ID NO: 318198
gagcaacaucgauguuauu

SEQ ID NO: 544308 - RNA, 19 nt, Artificial Sequence
  Description of Artificial Sequence: Synthetic oligonucleotide
  Antisense strand to SEQ ID NO: 544307
aauaacaucgauguugcuc

SEQ ID NO: 544309 - RNA, 19 nt, Artificial Sequence
  Description of Artificial Sequence: Synthetic oligonucleotide
  Sense strand starting at position 155 of SEQ ID NO: 318198
ucauuugcuccucguaaca

SEQ ID NO: 544310 - RNA, 19 nt, Artificial Sequence
  Description of Artificial Sequence: Synthetic oligonucleotide
  Antisense strand to SEQ ID NO: 544309
uguuacgaggagcaaauga

SEQ ID NO: 544311 - RNA, 19 nt, Artificial Sequence
  Description of Artificial Sequence: Synthetic oligonucleotide
  Sense strand starting at position 505 of SEQ ID NO: 318198
ggaauccuauuaucucagu

SEQ ID NO: 544312 - RNA, 19 nt, Artificial Sequence
  Description of Artificial Sequence: Synthetic oligonucleotide
  Antisense strand to SEQ ID NO: 544311
acugagauaauaggauucc

SEQ ID NO: 544313 - RNA, 19 nt, Artificial Sequence
  Description of Artificial Sequence: Synthetic oligonucleotide
  Sense strand starting at position 511 of SEQ ID NO: 318198
cuauuaucucaguguugga

SEQ ID NO: 544314 - RNA, 19 nt, Artificial Sequence
  Description of Artificial Sequence: Synthetic oligonucleotide
  Antisense strand to SEQ ID NO: 544313
uccaacacugagauaauag

SEQ ID NO: 544315 - RNA, 19 nt, Artificial Sequence
  Description of Artificial Sequence: Synthetic oligonucleotide
  Sense strand starting at position 641 of SEQ ID NO: 318198
acucauccagcuuggguaa

SEQ ID NO: 544316 - RNA, 19 nt, Artificial Sequence
  Description of Artificial Sequence: Synthetic oligonucleotide
  Antisense strand to SEQ ID NO: 544315
uuacccaagcuggaugagu

SEQ ID NO: 544317 - RNA, 19 nt, Artificial Sequence
  Description of Artificial Sequence: Synthetic oligonucleotide
  Sense strand starting at position 675 of SEQ ID NO: 318198
aagucuauaccuggacaga

SEQ ID NO: 544318 - RNA, 19 nt, Artificial Sequence
  Description of Artificial Sequence: Synthetic oligonucleotide
  Antisense strand to SEQ ID NO: 544317
ucuguccagguauagacuu

SEQ ID NO: 544319 - RNA, 19 nt, Artificial Sequence
  Description of Artificial Sequence: Synthetic oligonucleotide
  Sense strand starting at position 794 of SEQ ID NO: 318198
gcaagacauuaagugggaa

SEQ ID NO: 544320 - RNA, 19 nt, Artificial Sequence
  Description of Artificial Sequence: Synthetic oligonucleotide
  Antisense strand to SEQ ID NO: 544319
uucccacuuaaugucuugc

SEQ ID NO: 544321 - RNA, 19 nt, Artificial Sequence
  Description of Artificial Sequence: Synthetic oligonucleotide
  Sense strand starting at position 846 of SEQ ID NO: 318198
ucaguugcucuccaggaga

SEQ ID NO: 544322 - RNA, 19 nt, Artificial Sequence
  Description of Artificial Sequence: Synthetic oligonucleotide
  Antisense strand to SEQ ID NO: 544321
ucuccuggagagcaacuga

SEQ ID NO: 544323 - RNA, 19 nt, Artificial Sequence
  Description of Artificial Sequence: Synthetic oligonucleotide
  Sense strand starting at position 849 of SEQ ID NO: 318198
guugcucuccaggagauca

SEQ ID NO: 544324 - RNA, 19 nt, Artificial Sequence
  Description of Artificial Sequence: Synthetic oligonucleotide
  Antisense strand to SEQ ID NO: 544323
ugaucuccuggagagcaac

SEQ ID NO: 544325 - RNA, 19 nt, Artificial Sequence
  Description of Artificial Sequence: Synthetic oligonucleotide
  Sense strand starting at position 1100 of SEQ ID NO: 318198
gagucuggugauggacaga

SEQ ID NO: 544326 - RNA, 19 nt, Artificial Sequence
  Description of Artificial Sequence: Synthetic oligonucleotide
  Antisense strand to SEQ ID NO: 544325
ucuguccaucaccagacuc

SEQ ID NO: 544327 - RNA, 19 nt, Artificial Sequence
  Description of Artificial Sequence: Synthetic oligonucleotide
  Sense strand starting at position 1154 of SEQ ID NO: 318198
gaaguuauccacugugaga

SEQ ID NO: 544328 - RNA, 19 nt, Artificial Sequence
  Description of Artificial Sequence: Synthetic oligonucleotide
  Antisense strand to SEQ ID NO: 544327
ucucacaguggauaacuuc

SEQ ID NO: 544329 - RNA, 19 nt, Artificial Sequence
  Description of Artificial Sequence: Synthetic oligonucleotide
  Sense strand starting at position 1156 of SEQ ID NO: 318198
aguuauccacugugagaac

SEQ ID NO: 544330 - RNA, 19 nt, Artificial Sequence
  Description of Artificial Sequence: Synthetic oligonucleotide
  Antisense strand to SEQ ID NO: 544329
guucucacaguggauaacu

SEQ ID NO: 544331 - RNA, 19 nt, Artificial Sequence
  Description of Artificial Sequence: Synthetic oligonucleotide
  Sense strand starting at position 1238 of SEQ ID NO: 318198
ggaggcagauuucuguguu

SEQ ID NO: 544332 - RNA, 19 nt, Artificial Sequence
  Description of Artificial Sequence: Synthetic oligonucleotide
  Antisense strand to SEQ ID NO: 544331
aacacagaaaucugccucc

SEQ ID NO: 544333 - RNA, 19 nt, Artificial Sequence
  Description of Artificial Sequence: Synthetic oligonucleotide
  Sense strand starting at position 1241 of SEQ ID NO: 318198
ggcagauuucuguguuaac

SEQ ID NO: 544334 - RNA, 19 nt, Artificial Sequence
  Description of Artificial Sequence: Synthetic oligonucleotide
  Antisense strand to SEQ ID NO: 544333
guuaacacagaaaucugcc

SEQ ID NO: 544335 - RNA, 19 nt, Artificial Sequence
  Description of Artificial Sequence: Synthetic oligonucleotide
  Sense strand starting at position 1242 of SEQ ID NO: 318198
gcagauuucuguguuaacc

SEQ ID NO: 544336 - RNA, 19 nt, Artificial Sequence
  Description of Artificial Sequence: Synthetic oligonucleotide
  Antisense strand to SEQ ID NO: 544335
gguuaacacagaaaucugc

SEQ ID NO: 544337 - RNA, 19 nt, Artificial Sequence
  Description of Artificial Sequence: Synthetic oligonucleotide
  Sense strand starting at position 1251 of SEQ ID NO: 318198
uguguuaaccugcagaaca

SEQ ID NO: 544338 - RNA, 19 nt, Artificial Sequence
  Description of Artificial Sequence: Synthetic oligonucleotide
  Antisense strand to SEQ ID NO: 544337
uguucugcagguuaacaca

SEQ ID NO: 544339 - RNA, 19 nt, Artificial Sequence
  Description of Artificial Sequence: Synthetic oligonucleotide
  Sense strand starting at position 1386 of SEQ ID NO: 318198
aacacuccgcaagguuaua

SEQ ID NO: 544340 - RNA, 19 nt, Artificial Sequence
  Description of Artificial Sequence: Synthetic oligonucleotide
  Antisense strand to SEQ ID NO: 544339
uauaaccuugcggaguguu

SEQ ID NO: 544341 - RNA, 19 nt, Artificial Sequence
  Description of Artificial Sequence: Synthetic oligonucleotide
  Sense strand starting at position 1447 of SEQ ID NO: 318198
ucaccucaucaauaguguu

SEQ ID NO: 544342 - RNA, 19 nt, Artificial Sequence
  Description of Artificial Sequence: Synthetic oligonucleotide
  Antisense strand to SEQ ID NO: 544341
aacacuauugaugagguga

SEQ ID NO: 544343 - RNA, 19 nt, Artificial Sequence
  Description of Artificial Sequence: Synthetic oligonucleotide
  Sense strand starting at position 1545 of SEQ ID NO: 318198
acccguucucaccacagaa

SEQ ID NO: 544344 - RNA, 19 nt, Artificial Sequence
  Description of Artificial Sequence: Synthetic oligonucleotide
  Antisense strand to SEQ ID NO: 544343
uucuguggugagaacgggu

SEQ ID NO: 544345 - RNA, 19 nt, Artificial Sequence
  Description of Artificial Sequence: Synthetic oligonucleotide
  Sense strand starting at position 1569 of SEQ ID NO: 318198
accggagacucuucuaaga

SEQ ID NO: 544346 - RNA, 19 nt, Artificial Sequence
  Description of Artificial Sequence: Synthetic oligonucleotide
  Antisense strand to SEQ ID NO: 544345
ucuuagaagagucuccggu

SEQ ID NO: 544347 - RNA, 19 nt, Artificial Sequence
  Description of Artificial Sequence: Synthetic oligonucleotide
  Sense strand starting at position 1621 of SEQ ID NO: 318198
cugucuaaagcgcaacaua

SEQ ID NO: 544348 - RNA, 19 nt, Artificial Sequence
  Description of Artificial Sequence: Synthetic oligonucleotide
  Antisense strand to SEQ ID NO: 544347
uauguugcgcuuuagacag

SEQ ID NO: 544349 - RNA, 19 nt, Artificial Sequence
  Description of Artificial Sequence: Synthetic oligonucleotide
  Sense strand starting at position 1624 of SEQ ID NO: 318198
ucuaaagcgcaacauaaua

SEQ ID NO: 544350 - RNA, 19 nt, Artificial Sequence
  Description of Artificial Sequence: Synthetic oligonucleotide
  Antisense strand to SEQ ID NO: 544349
uauuauguugcgcuuuaga

SEQ ID NO: 544351 - RNA, 19 nt, Artificial Sequence
  Description of Artificial Sequence: Synthetic oligonucleotide
  Sense strand starting at position 1838 of SEQ ID NO: 318198
ggcuacucccgagaacacu

SEQ ID NO: 544352 - RNA, 19 nt, Artificial Sequence
  Description of Artificial Sequence: Synthetic oligonucleotide
  Antisense strand to SEQ ID NO: 544351
aguguucucgggaguagcc

SEQ ID NO: 544353 - RNA, 19 nt, Artificial Sequence
  Description of Artificial Sequence: Synthetic oligonucleotide
  Sense strand starting at position 1847 of SEQ ID NO: 318198
cgagaacacucuccuggaa

SEQ ID NO: 544354 - RNA, 19 nt, Artificial Sequence
  Description of Artificial Sequence: Synthetic oligonucleotide
  Antisense strand to SEQ ID NO: 544353
uuccaggagaguguucucg

SEQ ID NO: 544355 - RNA, 19 nt, Artificial Sequence
  Description of Artificial Sequence: Synthetic oligonucleotide
  Sense strand starting at position 1850 of SEQ ID NO: 318198
gaacacucuccuggaaugu

SEQ ID NO: 544356 - RNA, 19 nt, Artificial Sequence
  Description of Artificial Sequence: Synthetic oligonucleotide
  Antisense strand to SEQ ID NO: 544355
acauuccaggagaguguuc

SEQ ID NO: 544357 - RNA, 19 nt, Artificial Sequence
  Description of Artificial Sequence: Synthetic oligonucleotide
  Sense strand starting at position 1854 of SEQ ID NO: 318198
acucuccuggaauguuuaa

SEQ ID NO: 544358 - RNA, 19 nt, Artificial Sequence
  Description of Artificial Sequence: Synthetic oligonucleotide
  Antisense strand to SEQ ID NO: 544357
uuaaacauuccaggagagu

SEQ ID NO: 544359 - RNA, 19 nt, Artificial Sequence
  Description of Artificial Sequence: Synthetic oligonucleotide
  Sense strand starting at position 1907 of SEQ ID NO: 318198
ucccauuucucagcccgaa

SEQ ID NO: 544360 - RNA, 19 nt, Artificial Sequence
  Description of Artificial Sequence: Synthetic oligonucleotide
  Antisense strand to SEQ ID NO: 544359
uucgggcugagaaauggga

SEQ ID NO: 544361 - RNA, 19 nt, Artificial Sequence
  Description of Artificial Sequence: Synthetic oligonucleotide
  Sense strand starting at position 1952 of SEQ ID NO: 318198
ccaaguuuauucguaaaca

SEQ ID NO: 544362 - RNA, 19 nt, Artificial Sequence
  Description of Artificial Sequence: Synthetic oligonucleotide
  Antisense strand to SEQ ID NO: 544361
uguuuacgaauaaacuugg

SEQ ID NO: 544363 - RNA, 19 nt, Artificial Sequence
  Description of Artificial Sequence: Synthetic oligonucleotide
  Sense strand starting at position 2118 of SEQ ID NO: 318198
ccguguucacaagagaaga

SEQ ID NO: 544364 - RNA, 19 nt, Artificial Sequence
  Description of Artificial Sequence: Synthetic oligonucleotide
  Antisense strand to SEQ ID NO: 544363
ucuucucuugugaacacgg

SEQ ID NO: 544365 - RNA, 19 nt, Artificial Sequence
  Description of Artificial Sequence: Synthetic oligonucleotide
  Sense strand starting at position 3305 of SEQ ID NO: 318198
cgacauguucgagaaucuu

SEQ ID NO: 544366 - RNA, 19 nt, Artificial Sequence
  Description of Artificial Sequence: Synthetic oligonucleotide
  Antisense strand to SEQ ID NO: 544365
aagauucucgaacaugucg

SEQ ID NO: 544367 - RNA, 19 nt, Artificial Sequence
  Description of Artificial Sequence: Synthetic oligonucleotide
  Sense strand starting at position 3403 of SEQ ID NO: 318198
cuguguucugucgugggau

SEQ ID NO: 544368 - RNA, 19 nt, Artificial Sequence
  Description of Artificial Sequence: Synthetic oligonucleotide
  Antisense strand to SEQ ID NO: 544367
aucccacgacagaacacag

SEQ ID NO: 544369 - RNA, 19 nt, Artificial Sequence
  Description of Artificial Sequence: Synthetic oligonucleotide
  Sense strand starting at position 3405 of SEQ ID NO: 318198
guguucugucgugggauuu

SEQ ID NO: 544370 - RNA, 19 nt, Artificial Sequence
  Description of Artificial Sequence: Synthetic oligonucleotide
  Antisense strand to SEQ ID NO: 544369
aaaucccacgacagaacac

SEQ ID NO: 544371 - RNA, 19 nt, Artificial Sequence
  Description of Artificial Sequence: Synthetic oligonucleotide
  Sense strand starting at position 3449 of SEQ ID NO: 318198
uuuccauuacugggaaugu

SEQ ID NO: 544372 - RNA, 19 nt, Artificial Sequence
  Description of Artificial Sequence: Synthetic oligonucleotide
  Antisense strand to SEQ ID NO: 544371
acauucccaguaauggaaa

SEQ ID NO: 544373 - RNA, 19 nt, Artificial Sequence
  Description of Artificial Sequence: Synthetic oligonucleotide
  Sense strand starting at position 3478 of SEQ ID NO: 318198
gcgucaggacucuggagau

SEQ ID NO: 544374 - RNA, 19 nt, Artificial Sequence
  Description of Artificial Sequence: Synthetic oligonucleotide
  Antisense strand to SEQ ID NO: 544373
aucuccagaguccugacgc

SEQ ID NO: 544375 - RNA, 19 nt, Artificial Sequence
  Description of Artificial Sequence: Synthetic oligonucleotide
  Sense strand starting at position 3559 of SEQ ID NO: 318198
uuaauuauauugcuuggga

SEQ ID NO: 544376 - RNA, 19 nt, Artificial Sequence
  Description of Artificial Sequence: Synthetic oligonucleotide
  Antisense strand to SEQ ID NO: 544375
ucccaagcaauauaauuaa

SEQ ID NO: 544377 - RNA, 19 nt, Artificial Sequence
  Description of Artificial Sequence: Synthetic oligonucleotide
  Sense strand starting at position 3562 of SEQ ID NO: 318198
auuauauugcuugggauau

SEQ ID NO: 544378 - RNA, 19 nt, Artificial Sequence
  Description of Artificial Sequence: Synthetic oligonucleotide
  Antisense strand to SEQ ID NO: 544377
auaucccaagcaauauaau

SEQ ID NO: 544379 - RNA, 19 nt, Artificial Sequence
  Description of Artificial Sequence: Synthetic oligonucleotide
  Sense strand starting at position 3566 of SEQ ID NO: 318198
uauugcuugggauauauua

SEQ ID NO: 544380 - RNA, 19 nt, Artificial Sequence
  Description of Artificial Sequence: Synthetic oligonucleotide
  Antisense strand to SEQ ID NO: 544379
uaauauaucccaagcaaua

SEQ ID NO: 544381 - RNA, 19 nt, Artificial Sequence
  Description of Artificial Sequence: Synthetic oligonucleotide
  Sense strand starting at position 3573 of SEQ ID NO: 318198
ugggauauauuauugcaag

SEQ ID NO: 544382 - RNA, 19 nt, Artificial Sequence
  Description of Artificial Sequence: Synthetic oligonucleotide
  Antisense strand to SEQ ID NO: 544381
cuugcaauaauauauccca

SEQ ID NO: 544383 - RNA, 19 nt, Artificial Sequence
  Description of Artificial Sequence: Synthetic oligonucleotide
  Sense strand starting at position 3895 of SEQ ID NO: 318198
gucguuucugugcuccaaa

SEQ ID NO: 544384 - RNA, 19 nt, Artificial Sequence
  Description of Artificial Sequence: Synthetic oligonucleotide
  Antisense strand to SEQ ID NO: 544383
uuuggagcacagaaacgac

SEQ ID NO: 544385 - RNA, 19 nt, Artificial Sequence
  Description of Artificial Sequence: Synthetic oligonucleotide
  Sense strand starting at position 3949 of SEQ ID NO: 318198
cgccaaaguccuuacaaug

SEQ ID NO: 544386 - RNA, 19 nt, Artificial Sequence
  Description of Artificial Sequence: Synthetic oligonucleotide
  Antisense strand to SEQ ID NO: 544385
cauuguaaggacuuuggcg

SEQ ID NO: 544387 - RNA, 19 nt, Artificial Sequence
  Description of Artificial Sequence: Synthetic oligonucleotide
  Sense strand starting at position 27 of SEQ ID NO: 318199
cgcagugauugcugaugga

SEQ ID NO: 544388 - RNA, 19 nt, Artificial Sequence
  Description of Artificial Sequence: Synthetic oligonucleotide
  Antisense strand to SEQ ID NO: 544387
uccaucagcaaucacugcg

SEQ ID NO: 544389 - RNA, 19 nt, Artificial Sequence
  Description of Artificial Sequence: Synthetic oligonucleotide
  Sense strand starting at position 45 of SEQ ID NO: 318199
aaggcagauccuggaugau

SEQ ID NO: 544390 - RNA, 19 nt, Artificial Sequence
  Description of Artificial Sequence: Synthetic oligonucleotide
  Antisense strand to SEQ ID NO: 544389
aucauccaggaucugccuu

SEQ ID NO: 544391 - RNA, 19 nt, Artificial Sequence
  Description of Artificial Sequence: Synthetic oligonucleotide
  Sense strand starting at position 57 of SEQ ID NO: 318199
ggaugaugugagcacguaa

SEQ ID NO: 544392 - RNA, 19 nt, Artificial Sequence
  Description of Artificial Sequence: Synthetic oligonucleotide
  Antisense strand to SEQ ID NO: 544391
uuacgugcucacaucaucc

SEQ ID NO: 544393 - RNA, 19 nt, Artificial Sequence
  Description of Artificial Sequence: Synthetic oligonucleotide
  Sense strand starting at position 135 of SEQ ID NO: 318199
caucucagccagugauguu

SEQ ID NO: 544394 - RNA, 19 nt, Artificial Sequence
  Description of Artificial Sequence: Synthetic oligonucleotide
  Antisense strand to SEQ ID NO: 544393
aacaucacuggcugagaug

SEQ ID NO: 544395 - RNA, 19 nt, Artificial Sequence
  Description of Artificial Sequence: Synthetic oligonucleotide
  Sense strand starting at position 372 of SEQ ID NO: 318199
ccuuucugcugaggagaau

SEQ ID NO: 544396 - RNA, 19 nt, Artificial Sequence
  Description of Artificial Sequence: Synthetic oligonucleotide
  Antisense strand to SEQ ID NO: 544395
auucuccucagcagaaagg

SEQ ID NO: 544397 - RNA, 19 nt, Artificial Sequence
  Description of Artificial Sequence: Synthetic oligonucleotide
  Sense strand starting at position 1385 of SEQ ID NO: 318199
gggaaacaccugugccaaa

SEQ ID NO: 544398 - RNA, 19 nt, Artificial Sequence
  Description of Artificial Sequence: Synthetic oligonucleotide
  Antisense strand to SEQ ID NO: 544397
uuuggcacagguguuuccc

SEQ ID NO: 544399 - RNA, 19 nt, Artificial Sequence
  Description of Artificial Sequence: Synthetic oligonucleotide
  Sense strand starting at position 1702 of SEQ ID NO: 318199
gucgcugagccaggaguaa

SEQ ID NO: 544400 - RNA, 19 nt, Artificial Sequence
  Description of Artificial Sequence: Synthetic oligonucleotide
  Antisense strand to SEQ ID NO: 544399
uuacuccuggcucagcgac

SEQ ID NO: 544401 - RNA, 19 nt, Artificial Sequence
  Description of Artificial Sequence: Synthetic oligonucleotide
  Sense strand starting at position 1775 of SEQ ID NO: 318199
ccaguuucgccagcgauca

SEQ ID NO: 544402 - RNA, 19 nt, Artificial Sequence
  Description of Artificial Sequence: Synthetic oligonucleotide
  Antisense strand to SEQ ID NO: 544401
ugaucgcuggcgaaacugg

SEQ ID NO: 544403 - RNA, 19 nt, Artificial Sequence
  Description of Artificial Sequence: Synthetic oligonucleotide
  Sense strand starting at position 2069 of SEQ ID NO: 318199
gccugugguuacugacuga

SEQ ID NO: 544404 - RNA, 19 nt, Artificial Sequence
  Description of Artificial Sequence: Synthetic oligonucleotide
  Antisense strand to SEQ ID NO: 544403
ucagucaguaaccacaggc

SEQ ID NO: 544405 - RNA, 19 nt, Artificial Sequence
  Description of Artificial Sequence: Synthetic oligonucleotide
  Sense strand starting at position 2080 of SEQ ID NO: 318199
cugacugacugcucacuaa

SEQ ID NO: 544406 - RNA, 19 nt, Artificial Sequence
  Description of Artificial Sequence: Synthetic oligonucleotide
  Antisense strand to SEQ ID NO: 544405
uuagugagcagucagucag

SEQ ID NO: 544407 - RNA, 19 nt, Artificial Sequence
  Description of Artificial Sequence: Synthetic oligonucleotide
  Sense strand starting at position 2108 of SEQ ID NO: 318199
acaugaaaccacgaaucgu

SEQ ID NO: 544408 - RNA, 19 nt, Artificial Sequence
  Description of Artificial Sequence: Synthetic oligonucleotide
  Antisense strand to SEQ ID NO: 544407
acgauucgugguuucaugu

SEQ ID NO: 544409 - RNA, 19 nt, Artificial Sequence
  Description of Artificial Sequence: Synthetic oligonucleotide
  Sense strand starting at position 2116 of SEQ ID NO: 318199
ccacgaaucgugcaggguu

SEQ ID NO: 544410 - RNA, 19 nt, Artificial Sequence
  Description of Artificial Sequence: Synthetic oligonucleotide
  Antisense strand to SEQ ID NO: 544409
aacccugcacgauucgugg

SEQ ID NO: 544411 - RNA, 19 nt, Artificial Sequence
  Description of Artificial Sequence: Synthetic oligonucleotide
  Sense strand starting at position 2124 of SEQ ID NO: 318199
cgugcaggguucuagagaa

SEQ ID NO: 544412 - RNA, 19 nt, Artificial Sequence
  Description of Artificial Sequence: Synthetic oligonucleotide
  Antisense strand to SEQ ID NO: 544411
uucucuagaacccugcacg

SEQ ID NO: 544413 - RNA, 19 nt, Artificial Sequence
  Description of Artificial Sequence: Synthetic oligonucleotide
  Sense strand starting at position 2282 of SEQ ID NO: 318199
gcggagugagcguuaucau

SEQ ID NO: 544414 - RNA, 19 nt, Artificial Sequence
  Description of Artificial Sequence: Synthetic oligonucleotide
  Antisense strand to SEQ ID NO: 544413
augauaacgcucacuccgc

SEQ ID NO: 544415 - RNA, 19 nt, Artificial Sequence
  Description of Artificial Sequence: Synthetic oligonucleotide
  Sense strand starting at position 2283 of SEQ ID NO: 318199
cggagugagcguuaucauc

SEQ ID NO: 544416 - RNA, 19 nt, Artificial Sequence
  Description of Artificial Sequence: Synthetic oligonucleotide
  Antisense strand to SEQ ID NO: 544415
gaugauaacgcucacuccg

SEQ ID NO: 544417 - RNA, 19 nt, Artificial Sequence
  Description of Artificial Sequence: Synthetic oligonucleotide
  Sense strand starting at position 2482 of SEQ ID NO: 318199
ccgugaagccuccgcuuaa

SEQ ID NO: 544418 - RNA, 19 nt, Artificial Sequence
  Description of Artificial Sequence: Synthetic oligonucleotide
  Antisense strand to SEQ ID NO: 544417
uuaagcggaggcuucacgg

SEQ ID NO: 544419 - RNA, 19 nt, Artificial Sequence
  Description of Artificial Sequence: Synthetic oligonucleotide
  Sense strand starting at position 2679 of SEQ ID NO: 318199
ugcccuauguuugccuaau

SEQ ID NO: 544420 - RNA, 19 nt, Artificial Sequence
  Description of Artificial Sequence: Synthetic oligonucleotide
  Antisense strand to SEQ ID NO: 544419
auuaggcaaacauagggca

SEQ ID NO: 544421 - RNA, 19 nt, Artificial Sequence
  Description of Artificial Sequence: Synthetic oligonucleotide
  Sense strand starting at position 2680 of SEQ ID NO: 318199
gcccuauguuugccuaaug

SEQ ID NO: 544422 - RNA, 19 nt, Artificial Sequence
  Description of Artificial Sequence: Synthetic oligonucleotide
  Antisense strand to SEQ ID NO: 544421
cauuaggcaaacauagggc

SEQ ID NO: 544423 - RNA, 19 nt, Artificial Sequence
  Description of Artificial Sequence: Synthetic oligonucleotide
  Sense strand starting at position 2685 of SEQ ID NO: 318199
auguuugccuaauggagga

SEQ ID NO: 544424 - RNA, 19 nt, Artificial Sequence
  Description of Artificial Sequence: Synthetic oligonucleotide
  Antisense strand to SEQ ID NO: 544423
uccuccauuaggcaaacau

SEQ ID NO: 544425 - RNA, 19 nt, Artificial Sequence
  Description of Artificial Sequence: Synthetic oligonucleotide
  Sense strand starting at position 2738 of SEQ ID NO: 318199
ggugucaaggcguaaagga

SEQ ID NO: 544426 - RNA, 19 nt, Artificial Sequence
  Description of Artificial Sequence: Synthetic oligonucleotide
  Antisense strand to SEQ ID NO: 544425
uccuuuacgccuugacacc

SEQ ID NO: 544427 - RNA, 19 nt, Artificial Sequence
  Description of Artificial Sequence: Synthetic oligonucleotide
  Sense strand starting at position 2789 of SEQ ID NO: 318199
cugggaaacacugguuugu

SEQ ID NO: 544428 - RNA, 19 nt, Artificial Sequence
  Description of Artificial Sequence: Synthetic oligonucleotide
  Antisense strand to SEQ ID NO: 544427
acaaaccaguguuucccag

SEQ ID NO: 544429 - RNA, 19 nt, Artificial Sequence
  Description of Artificial Sequence: Synthetic oligonucleotide
  Sense strand starting at position 2791 of SEQ ID NO: 318199
gggaaacacugguuuguag

SEQ ID NO: 544430 - RNA, 19 nt, Artificial Sequence
  Description of Artificial Sequence: Synthetic oligonucleotide
  Antisense strand to SEQ ID NO: 544429
cuacaaaccaguguuuccc

SEQ ID NO: 544431 - RNA, 19 nt, Artificial Sequence
  Description of Artificial Sequence: Synthetic oligonucleotide
  Sense strand starting at position 2793 of SEQ ID NO: 318199
gaaacacugguuuguagau

SEQ ID NO: 544432 - RNA, 19 nt, Artificial Sequence
  Description of Artificial Sequence: Synthetic oligonucleotide
  Antisense strand to SEQ ID NO: 544431
aucuacaaaccaguguuuc

SEQ ID NO: 544433 - RNA, 19 nt, Artificial Sequence
  Description of Artificial Sequence: Synthetic oligonucleotide
  Sense strand starting at position 3030 of SEQ ID NO: 318199
aggagaaauucccggacug

SEQ ID NO: 544434 - RNA, 19 nt, Artificial Sequence
  Description of Artificial Sequence: Synthetic oligonucleotide
  Antisense strand to SEQ ID NO: 544433
caguccgggaauuucuccu

SEQ ID NO: 544435 - RNA, 19 nt, Artificial Sequence
  Description of Artificial Sequence: Synthetic oligonucleotide
  Sense strand starting at position 3032 of SEQ ID NO: 318199
gagaaauucccggacugca

SEQ ID NO: 544436 - RNA, 19 nt, Artificial Sequence
  Description of Artificial Sequence: Synthetic oligonucleotide
  Antisense strand to SEQ ID NO: 544435
ugcaguccgggaauuucuc

SEQ ID NO: 544437 - RNA, 19 nt, Artificial Sequence
  Description of Artificial Sequence: Synthetic oligonucleotide
  Sense strand starting at position 3114 of SEQ ID NO: 318199
gcaagcacuuggucugaga

SEQ ID NO: 544438 - RNA, 19 nt, Artificial Sequence
  Description of Artificial Sequence: Synthetic oligonucleotide
  Antisense strand to SEQ ID NO: 544437
ucucagaccaagugcuugc

SEQ ID NO: 544439 - RNA, 19 nt, Artificial Sequence
  Description of Artificial Sequence: Synthetic oligonucleotide
  Sense strand starting at position 3134 of SEQ ID NO: 318199
gcaagaaaccaggguaaau

SEQ ID NO: 544440 - RNA, 19 nt, Artificial Sequence
  Description of Artificial Sequence: Synthetic oligonucleotide
  Antisense strand to SEQ ID NO: 544439
auuuacccugguuucuugc

SEQ ID NO: 544441 - RNA, 19 nt, Artificial Sequence
  Description of Artificial Sequence: Synthetic oligonucleotide
  Sense strand starting at position 3182 of SEQ ID NO: 318199
cucugagcucuugauagag

SEQ ID NO: 544442 - RNA, 19 nt, Artificial Sequence
  Description of Artificial Sequence: Synthetic oligonucleotide
  Antisense strand to SEQ ID NO: 544441
cucuaucaagagcucagag

SEQ ID NO: 544443 - RNA, 19 nt, Artificial Sequence
  Description of Artificial Sequence: Synthetic oligonucleotide
  Sense strand starting at position 3184 of SEQ ID NO: 318199
cugagcucuugauagaggu

SEQ ID NO: 544444 - RNA, 19 nt, Artificial Sequence
  Description of Artificial Sequence: Synthetic oligonucleotide
  Antisense strand to SEQ ID NO: 544443
accucuaucaagagcucag

SEQ ID NO: 544445 - RNA, 19 nt, Artificial Sequence
  Description of Artificial Sequence: Synthetic oligonucleotide
  Sense strand starting at position 3188 of SEQ ID NO: 318199
gcucuugauagagguuaca

SEQ ID NO: 544446 - RNA, 19 nt, Artificial Sequence
  Description of Artificial Sequence: Synthetic oligonucleotide
  Antisense strand to SEQ ID NO: 544445
uguaaccucuaucaagagc

SEQ ID NO: 544447 - RNA, 19 nt, Artificial Sequence
  Description of Artificial Sequence: Synthetic oligonucleotide
  Sense strand starting at position 3210 of SEQ ID NO: 318199
ggagcagugacuggaguaa

SEQ ID NO: 544448 - RNA, 19 nt, Artificial Sequence
  Description of Artificial Sequence: Synthetic oligonucleotide
  Antisense strand to SEQ ID NO: 544447
uuacuccagucacugcucc

SEQ ID NO: 544449 - RNA, 19 nt, Artificial Sequence
  Description of Artificial Sequence: Synthetic oligonucleotide
  Sense strand starting at position 3270 of SEQ ID NO: 318199
gggauuggauuaugugcaa

SEQ ID NO: 544450 - RNA, 19 nt, Artificial Sequence
  Description of Artificial Sequence: Synthetic oligonucleotide
  Antisense strand to SEQ ID NO: 544449
uugcacauaauccaauccc

SEQ ID NO: 544451 - RNA, 19 nt, Artificial Sequence
  Description of Artificial Sequence: Synthetic oligonucleotide
  Sense strand starting at position 3472 of SEQ ID NO: 318199
gcccaagaucccugacacu

SEQ ID NO: 544452 - RNA, 19 nt, Artificial Sequence
  Description of Artificial Sequence: Synthetic oligonucleotide
  Antisense strand to SEQ ID NO: 544451
agugucagggaucuugggc

SEQ ID NO: 544453 - RNA, 19 nt, Artificial Sequence
  Description of Artificial Sequence: Synthetic oligonucleotide
  Sense strand starting at position 3527 of SEQ ID NO: 318199
aaacauauguuggcuugaa

SEQ ID NO: 544454 - RNA, 19 nt, Artificial Sequence
  Description of Artificial Sequence: Synthetic oligonucleotide
  Antisense strand to SEQ ID NO: 544453
uucaagccaacauauguuu

SEQ ID NO: 544455 - RNA, 19 nt, Artificial Sequence
  Description of Artificial Sequence: Synthetic oligonucleotide
  Sense strand starting at position 3528 of SEQ ID NO: 318199
aacauauguuggcuugaaa

SEQ ID NO: 544456 - RNA, 19 nt, Artificial Sequence
  Description of Artificial Sequence: Synthetic oligonucleotide
  Antisense strand to SEQ ID NO: 544455
uuucaagccaacauauguu

SEQ ID NO: 544457 - RNA, 19 nt, Artificial Sequence
  Description of Artificial Sequence: Synthetic oligonucleotide
  Sense strand starting at position 94 of SEQ ID NO: 318200
gugagauccuuucuaacac

SEQ ID NO: 544458 - RNA, 19 nt, Artificial Sequence
  Description of Artificial Sequence: Synthetic oligonucleotide
  Antisense strand to SEQ ID NO: 544457
guguuagaaaggaucucac

SEQ ID NO: 544459 - RNA, 19 nt, Artificial Sequence
  Description of Artificial Sequence: Synthetic oligonucleotide
  Sense strand starting at position 121 of SEQ ID NO: 318200
caugguguucuccagccua

SEQ ID NO: 544460 - RNA, 19 nt, Artificial Sequence
  Description of Artificial Sequence: Synthetic oligonucleotide
  Antisense strand to SEQ ID NO: 544459
uaggcuggagaacaccaug

SEQ ID NO: 544461 - RNA, 19 nt, Artificial Sequence
  Description of Artificial Sequence: Synthetic oligonucleotide
  Sense strand starting at position 207 of SEQ ID NO: 318200
ugagcaauaagcgagaagu

SEQ ID NO: 544462 - RNA, 19 nt, Artificial Sequence
  Description of Artificial Sequence: Synthetic oligonucleotide
  Antisense strand to SEQ ID NO: 544461
acuucucgcuuauugcuca

SEQ ID NO: 544463 - RNA, 19 nt, Artificial Sequence
  Description of Artificial Sequence: Synthetic oligonucleotide
  Sense strand starting at position 209 of SEQ ID NO: 318200
agcaauaagcgagaaguua

SEQ ID NO: 544464 - RNA, 19 nt, Artificial Sequence
  Description of Artificial Sequence: Synthetic oligonucleotide
  Antisense strand to SEQ ID NO: 544463
uaacuucucgcuuauugcu

SEQ ID NO: 544465 - RNA, 19 nt, Artificial Sequence
  Description of Artificial Sequence: Synthetic oligonucleotide
  Sense strand starting at position 288 of SEQ ID NO: 318200
cucugcuuugcuuaaaguu

SEQ ID NO: 544466 - RNA, 19 nt, Artificial Sequence
  Description of Artificial Sequence: Synthetic oligonucleotide
  Antisense strand to SEQ ID NO: 544465
aacuuuaagcaaagcagag

SEQ ID NO: 544467 - RNA, 19 nt, Artificial Sequence
  Description of Artificial Sequence: Synthetic oligonucleotide
  Sense strand starting at position 337 of SEQ ID NO: 318200
auagacaugucacagguaa

SEQ ID NO: 544468 - RNA, 19 nt, Artificial Sequence
  Description of Artificial Sequence: Synthetic oligonucleotide
  Antisense strand to SEQ ID NO: 544467
uuaccugugacaugucuau

SEQ ID NO: 544469 - RNA, 19 nt, Artificial Sequence
  Description of Artificial Sequence: Synthetic oligonucleotide
  Sense strand starting at position 339 of SEQ ID NO: 318200
agacaugucacagguaaug

SEQ ID NO: 544470 - RNA, 19 nt, Artificial Sequence
  Description of Artificial Sequence: Synthetic oligonucleotide
  Antisense strand to SEQ ID NO: 544469
cauuaccugugacaugucu

SEQ ID NO: 544471 - RNA, 19 nt, Artificial Sequence
  Description of Artificial Sequence: Synthetic oligonucleotide
  Sense strand starting at position 400 of SEQ ID NO: 318200
gcuggacuccuguaucaug

SEQ ID NO: 544472 - RNA, 19 nt, Artificial Sequence
  Description of Artificial Sequence: Synthetic oligonucleotide
  Antisense strand to SEQ ID NO: 544471
caugauacaggaguccagc

SEQ ID NO: 544473 - RNA, 19 nt, Artificial Sequence
  Description of Artificial Sequence: Synthetic oligonucleotide
  Sense strand starting at position 570 of SEQ ID NO: 318200
aggcaugaggccugggauu

SEQ ID NO: 544474 - RNA, 19 nt, Artificial Sequence
  Description of Artificial Sequence: Synthetic oligonucleotide
  Antisense strand to SEQ ID NO: 544473
aaucccaggccucaugccu

SEQ ID NO: 544475 - RNA, 19 nt, Artificial Sequence
  Description of Artificial Sequence: Synthetic oligonucleotide
  Sense strand starting at position 612 of SEQ ID NO: 318200
ggcaacuuuggacaaguca

SEQ ID NO: 544476 - RNA, 19 nt, Artificial Sequence
  Description of Artificial Sequence: Synthetic oligonucleotide
  Antisense strand to SEQ ID NO: 544475
ugacuuguccaaaguugcc

SEQ ID NO: 544477 - RNA, 19 nt, Artificial Sequence
  Description of Artificial Sequence: Synthetic oligonucleotide
  Sense strand starting at position 742 of SEQ ID NO: 318200
cccgaacaguaaugaguuu

SEQ ID NO: 544478 - RNA, 19 nt, Artificial Sequence
  Description of Artificial Sequence: Synthetic oligonucleotide
  Antisense strand to SEQ ID NO: 544477
aaacucauuacuguucggg

SEQ ID NO: 544479 - RNA, 19 nt, Artificial Sequence
  Description of Artificial Sequence: Synthetic oligonucleotide
  Sense strand starting at position 753 of SEQ ID NO: 318200
augaguuucccuuguuaac

SEQ ID NO: 544480 - RNA, 19 nt, Artificial Sequence
  Description of Artificial Sequence: Synthetic oligonucleotide
  Antisense strand to SEQ ID NO: 544479
guuaacaagggaaacucau

SEQ ID NO: 544481 - RNA, 19 nt, Artificial Sequence
  Description of Artificial Sequence: Synthetic oligonucleotide
  Sense strand starting at position 801 of SEQ ID NO: 318200
ugcuucuaacagugagaau

SEQ ID NO: 544482 - RNA, 19 nt, Artificial Sequence
  Description of Artificial Sequence: Synthetic oligonucleotide
  Antisense strand to SEQ ID NO: 544481
auucucacuguuagaagca

SEQ ID NO: 544483 - RNA, 19 nt, Artificial Sequence
  Description of Artificial Sequence: Synthetic oligonucleotide
  Sense strand starting at position 802 of SEQ ID NO: 318200
gcuucuaacagugagaaug

SEQ ID NO: 544484 - RNA, 19 nt, Artificial Sequence
  Description of Artificial Sequence: Synthetic oligonucleotide
  Antisense strand to SEQ ID NO: 544483
cauucucacuguuagaagc

SEQ ID NO: 544485 - RNA, 19 nt, Artificial Sequence
  Description of Artificial Sequence: Synthetic oligonucleotide
  Sense strand starting at position 835 of SEQ ID NO: 318200
ggaaaugggugagcucaau

SEQ ID NO: 544486 - RNA, 19 nt, Artificial Sequence
  Description of Artificial Sequence: Synthetic oligonucleotide
  Antisense strand to SEQ ID NO: 544485
auugagcucacccauuucc

SEQ ID NO: 544487 - RNA, 19 nt, Artificial Sequence
  Description of Artificial Sequence: Synthetic oligonucleotide
  Sense strand starting at position 899 of SEQ ID NO: 318200
aaggcagauccuggaugau

SEQ ID NO: 544488 - RNA, 19 nt, Artificial Sequence
  Description of Artificial Sequence: Synthetic oligonucleotide
  Antisense strand to SEQ ID NO: 544487
aucauccaggaucugccuu

SEQ ID NO: 544489 - RNA, 19 nt, Artificial Sequence
  Description of Artificial Sequence: Synthetic oligonucleotide
  Sense strand starting at position 911 of SEQ ID NO: 318200
ggaugaugugagcacguaa

SEQ ID NO: 544490 - RNA, 19 nt, Artificial Sequence
  Description of Artificial Sequence: Synthetic oligonucleotide
  Antisense strand to SEQ ID NO: 544489
uuacgugcucacaucaucc

SEQ ID NO: 544491 - RNA, 19 nt, Artificial Sequence
  Description of Artificial Sequence: Synthetic oligonucleotide
  Sense strand starting at position 989 of SEQ ID NO: 318200
caucucagccagugauguu

SEQ ID NO: 544492 - RNA, 19 nt, Artificial Sequence
  Description of Artificial Sequence: Synthetic oligonucleotide
  Antisense strand to SEQ ID NO: 544491
aacaucacuggcugagaug

SEQ ID NO: 544493 - RNA, 19 nt, Artificial Sequence
  Description of Artificial Sequence: Synthetic oligonucleotide
  Sense strand starting at position 1226 of SEQ ID NO: 318200
ccuuucugcugaggagaau

SEQ ID NO: 544494 - RNA, 19 nt, Artificial Sequence
  Description of Artificial Sequence: Synthetic oligonucleotide
  Antisense strand to SEQ ID NO: 544493
auucuccucagcagaaagg

SEQ ID NO: 544495 - RNA, 19 nt, Artificial Sequence
  Description of Artificial Sequence: Synthetic oligonucleotide
  Sense strand starting at position 2239 of SEQ ID NO: 318200
gggaaacaccugugccaaa

SEQ ID NO: 544496 - RNA, 19 nt, Artificial Sequence
  Description of Artificial Sequence: Synthetic oligonucleotide
  Antisense strand to SEQ ID NO: 544495
uuuggcacagguguuuccc

SEQ ID NO: 544497 - RNA, 19 nt, Artificial Sequence
  Description of Artificial Sequence: Synthetic oligonucleotide
  Sense strand starting at position 2556 of SEQ ID NO: 318200
gucgcugagccaggaguaa

SEQ ID NO: 544498 - RNA, 19 nt, Artificial Sequence
  Description of Artificial Sequence: Synthetic oligonucleotide
  Antisense strand to SEQ ID NO: 544497
uuacuccuggcucagcgac

SEQ ID NO: 544499 - RNA, 19 nt, Artificial Sequence
  Description of Artificial Sequence: Synthetic oligonucleotide
  Sense strand starting at position 2629 of SEQ ID NO: 318200
ccaguuucgccagcgauca

SEQ ID NO: 544500 - RNA, 19 nt, Artificial Sequence
  Description of Artificial Sequence: Synthetic oligonucleotide
  Antisense strand to SEQ ID NO: 544499
ugaucgcuggcgaaacugg

SEQ ID NO: 544501 - RNA, 19 nt, Artificial Sequence
  Description of Artificial Sequence: Synthetic oligonucleotide
  Sense strand starting at position 2923 of SEQ ID NO: 318200
gccugugguuacugacuga

SEQ ID NO: 544502 - RNA, 19 nt, Artificial Sequence
  Description of Artificial Sequence: Synthetic oligonucleotide
  Antisense strand to SEQ ID NO: 544501
ucagucaguaaccacaggc

SEQ ID NO: 544503 - RNA, 19 nt, Artificial Sequence
  Description of Artificial Sequence: Synthetic oligonucleotide
  Sense strand starting at position 2934 of SEQ ID NO: 318200
cugacugacugcucacuaa

SEQ ID NO: 544504 - RNA, 19 nt, Artificial Sequence
  Description of Artificial Sequence: Synthetic oligonucleotide
  Antisense strand to SEQ ID NO: 544503
uuagugagcagucagucag

SEQ ID NO: 544505 - RNA, 19 nt, Artificial Sequence
  Description of Artificial Sequence: Synthetic oligonucleotide
  Sense strand starting at position 2962 of SEQ ID NO: 318200
acaugaaaccacgaaucgu

SEQ ID NO: 544506 - RNA, 19 nt, Artificial Sequence
  Description of Artificial Sequence: Synthetic oligonucleotide
  Antisense strand to SEQ ID NO: 544505
acgauucgugguuucaugu

SEQ ID NO: 544507 - RNA, 19 nt, Artificial Sequence
  Description of Artificial Sequence: Synthetic oligonucleotide
  Sense strand starting at position 2970 of SEQ ID NO: 318200
ccacgaaucgugcaggguu

SEQ ID NO: 544508 - RNA, 19 nt, Artificial Sequence
  Description of Artificial Sequence: Synthetic oligonucleotide
  Antisense strand to SEQ ID NO: 544507
aacccugcacgauucgugg

SEQ ID NO: 544509 - RNA, 19 nt, Artificial Sequence
  Description of Artificial Sequence: Synthetic oligonucleotide
  Sense strand starting at position 2978 of SEQ ID NO: 318200
cgugcaggguucuagagaa

SEQ ID NO: 544510 - RNA, 19 nt, Artificial Sequence
  Description of Artificial Sequence: Synthetic oligonucleotide
  Antisense strand to SEQ ID NO: 544509
uucucuagaacccugcacg

SEQ ID NO: 544511 - RNA, 19 nt, Artificial Sequence
  Description of Artificial Sequence: Synthetic oligonucleotide
  Sense strand starting at position 3136 of SEQ ID NO: 318200
gcggagugagcguuaucau

SEQ ID NO: 544512 - RNA, 19 nt, Artificial Sequence
  Description of Artificial Sequence: Synthetic oligonucleotide
  Antisense strand to SEQ ID NO: 544511
augauaacgcucacuccgc

SEQ ID NO: 544513 - RNA, 19 nt, Artificial Sequence
  Description of Artificial Sequence: Synthetic oligonucleotide
  Sense strand starting at position 3137 of SEQ ID NO: 318200
cggagugagcguuaucauc

SEQ ID NO: 544514 - RNA, 19 nt, Artificial Sequence
  Description of Artificial Sequence: Synthetic oligonucleotide
  Antisense strand to SEQ ID NO: 544513
gaugauaacgcucacuccg

SEQ ID NO: 544515 - RNA, 19 nt, Artificial Sequence
  Description of Artificial Sequence: Synthetic oligonucleotide
  Sense strand starting at position 3336 of SEQ ID NO: 318200
ccgugaagccuccgcuuaa

SEQ ID NO: 544516 - RNA, 19 nt, Artificial Sequence
  Description of Artificial Sequence: Synthetic oligonucleotide
  Antisense strand to SEQ ID NO: 544515
uuaagcggaggcuucacgg

SEQ ID NO: 544517 - RNA, 19 nt, Artificial Sequence
  Description of Artificial Sequence: Synthetic oligonucleotide
  Sense strand starting at position 3533 of SEQ ID NO: 318200
ugcccuauguuugccuaau

SEQ ID NO: 544518 - RNA, 19 nt, Artificial Sequence
  Description of Artificial Sequence: Synthetic oligonucleotide
  Antisense strand to SEQ ID NO: 544517
auuaggcaaacauagggca

SEQ ID NO: 544519 - RNA, 19 nt, Artificial Sequence
  Description of Artificial Sequence: Synthetic oligonucleotide
  Sense strand starting at position 3534 of SEQ ID NO: 318200
gcccuauguuugccuaaug

SEQ ID NO: 544520 - RNA, 19 nt, Artificial Sequence
  Description of Artificial Sequence: Synthetic oligonucleotide
  Antisense strand to SEQ ID NO: 544519
cauuaggcaaacauagggc

SEQ ID NO: 544521 - RNA, 19 nt, Artificial Sequence
  Description of Artificial Sequence: Synthetic oligonucleotide
  Sense strand starting at position 3539 of SEQ ID NO: 318200
auguuugccuaauggagga

SEQ ID NO: 544522 - RNA, 19 nt, Artificial Sequence
  Description of Artificial Sequence: Synthetic oligonucleotide
  Antisense strand to SEQ ID NO: 544521
uccuccauuaggcaaacau

SEQ ID NO: 544523 - RNA, 19 nt, Artificial Sequence
  Description of Artificial Sequence: Synthetic oligonucleotide
  Sense strand starting at position 3592 of SEQ ID NO: 318200
ggugucaaggcguaaagga

SEQ ID NO: 544524 - RNA, 19 nt, Artificial Sequence
  Description of Artificial Sequence: Synthetic oligonucleotide
  Antisense strand to SEQ ID NO: 544523
uccuuuacgccuugacacc

SEQ ID NO: 544525 - RNA, 19 nt, Artificial Sequence
  Description of Artificial Sequence: Synthetic oligonucleotide
  Sense strand starting at position 3643 of SEQ ID NO: 318200
cugggaaacacugguuugu

SEQ ID NO: 544526 - RNA, 19 nt, Artificial Sequence
  Description of Artificial Sequence: Synthetic oligonucleotide
  Antisense strand to SEQ ID NO: 544525
acaaaccaguguuucccag

SEQ ID NO: 544527 - RNA, 19 nt, Artificial Sequence
  Description of Artificial Sequence: Synthetic oligonucleotide
  Sense strand starting at position 3645 of SEQ ID NO: 318200
gggaaacacugguuuguag

SEQ ID NO: 544528 - RNA, 19 nt, Artificial Sequence
  Description of Artificial Sequence: Synthetic oligonucleotide
  Antisense strand to SEQ ID NO: 544527
cuacaaaccaguguuuccc

SEQ ID NO: 544529 - RNA, 19 nt, Artificial Sequence
  Description of Artificial Sequence: Synthetic oligonucleotide
  Sense strand starting at position 3647 of SEQ ID NO: 318200
gaaacacugguuuguagau

SEQ ID NO: 544530 - RNA, 19 nt, Artificial Sequence
  Description of Artificial Sequence: Synthetic oligonucleotide
  Antisense strand to SEQ ID NO: 544529
aucuacaaaccaguguuuc

SEQ ID NO: 544531 - RNA, 19 nt, Artificial Sequence
  Description of Artificial Sequence: Synthetic oligonucleotide
  Sense strand starting at position 3884 of SEQ ID NO: 318200
aggagaaauucccggacug

SEQ ID NO: 544532 - RNA, 19 nt, Artificial Sequence
  Description of Artificial Sequence: Synthetic oligonucleotide
  Antisense strand to SEQ ID NO: 544531
caguccgggaauuucuccu

SEQ ID NO: 544533 - RNA, 19 nt, Artificial Sequence
  Description of Artificial Sequence: Synthetic oligonucleotide
  Sense strand starting at position 3886 of SEQ ID NO: 318200
gagaaauucccggacugca

SEQ ID NO: 544534 - RNA, 19 nt, Artificial Sequence
  Description of Artificial Sequence: Synthetic oligonucleotide
  Antisense strand to SEQ ID NO: 544533
ugcaguccgggaauuucuc

SEQ ID NO: 544535 - RNA, 19 nt, Artificial Sequence
  Description of Artificial Sequence: Synthetic oligonucleotide
  Sense strand starting at position 3968 of SEQ ID NO: 318200
gcaagcacuuggucugaga

SEQ ID NO: 544536 - RNA, 19 nt, Artificial Sequence
  Description of Artificial Sequence: Synthetic oligonucleotide
  Antisense strand to SEQ ID NO: 544535
ucucagaccaagugcuugc

SEQ ID NO: 544537 - RNA, 19 nt, Artificial Sequence
  Description of Artificial Sequence: Synthetic oligonucleotide
  Sense strand starting at position 190 of SEQ ID NO: 318201
agagguggcuccugacauc

SEQ ID NO: 544538 - RNA, 19 nt, Artificial Sequence
  Description of Artificial Sequence: Synthetic oligonucleotide
  Antisense strand to SEQ ID NO: 544537
gaugucaggagccaccucu

SEQ ID NO: 544539 - RNA, 19 nt, Artificial Sequence
  Description of Artificial Sequence: Synthetic oligonucleotide
  Sense strand starting at position 193 of SEQ ID NO: 318201
gguggcuccugacaucaau

SEQ ID NO: 544540 - RNA, 19 nt, Artificial Sequence
  Description of Artificial Sequence: Synthetic oligonucleotide
  Antisense strand to SEQ ID NO: 544539
auugaugucaggagccacc

SEQ ID NO: 544541 - RNA, 19 nt, Artificial Sequence
  Description of Artificial Sequence: Synthetic oligonucleotide
  Sense strand starting at position 429 of SEQ ID NO: 318201
augccugcccuugauaaua

SEQ ID NO: 544542 - RNA, 19 nt, Artificial Sequence
  Description of Artificial Sequence: Synthetic oligonucleotide
  Antisense strand to SEQ ID NO: 544541
uauuaucaagggcaggcau

SEQ ID NO: 544543 - RNA, 19 nt, Artificial Sequence
  Description of Artificial Sequence: Synthetic oligonucleotide
  Sense strand starting at position 431 of SEQ ID NO: 318201
gccugcccuugauaauaua

SEQ ID NO: 544544 - RNA, 19 nt, Artificial Sequence
  Description of Artificial Sequence: Synthetic oligonucleotide
  Antisense strand to SEQ ID NO: 544543
uauauuaucaagggcaggc

SEQ ID NO: 544545 - RNA, 19 nt, Artificial Sequence
  Description of Artificial Sequence: Synthetic oligonucleotide
  Sense strand starting at position 503 of SEQ ID NO: 318201
cgcagagucccugggugau

SEQ ID NO: 544546 - RNA, 19 nt, Artificial Sequence
  Description of Artificial Sequence: Synthetic oligonucleotide
  Antisense strand to SEQ ID NO: 544545
aucacccagggacucugcg

SEQ ID NO: 544547 - RNA, 19 nt, Artificial Sequence
  Description of Artificial Sequence: Synthetic oligonucleotide
  Sense strand starting at position 556 of SEQ ID NO: 318201
ggccucugcucuggcagaa

SEQ ID NO: 544548 - RNA, 19 nt, Artificial Sequence
  Description of Artificial Sequence: Synthetic oligonucleotide
  Antisense strand to SEQ ID NO: 544547
uucugccagagcagaggcc

SEQ ID NO: 544549 - RNA, 19 nt, Artificial Sequence
  Description of Artificial Sequence: Synthetic oligonucleotide
  Sense strand starting at position 1819 of SEQ ID NO: 318201
gcaagcuuugugcccugua

SEQ ID NO: 544550 - RNA, 19 nt, Artificial Sequence
  Description of Artificial Sequence: Synthetic oligonucleotide
  Antisense strand to SEQ ID NO: 544549
uacagggcacaaagcuugc

SEQ ID NO: 544551 - RNA, 19 nt, Artificial Sequence
  Description of Artificial Sequence: Synthetic oligonucleotide
  Sense strand starting at position 1879 of SEQ ID NO: 318201
ucaggcucacugcagauau

SEQ ID NO: 544552 - RNA, 19 nt, Artificial Sequence
  Description of Artificial Sequence: Synthetic oligonucleotide
  Antisense strand to SEQ ID NO: 544551
auaucugcagugagccuga

SEQ ID NO: 544553 - RNA, 19 nt, Artificial Sequence
  Description of Artificial Sequence: Synthetic oligonucleotide
  Sense strand starting at position 1881 of SEQ ID NO: 318201
aggcucacugcagauauca

SEQ ID NO: 544554 - RNA, 19 nt, Artificial Sequence
  Description of Artificial Sequence: Synthetic oligonucleotide
  Antisense strand to SEQ ID NO: 544553
ugauaucugcagugagccu

SEQ ID NO: 544555 - RNA, 19 nt, Artificial Sequence
  Description of Artificial Sequence: Synthetic oligonucleotide
  Sense strand starting at position 2157 of SEQ ID NO: 318201
gcgagucggccucagguaa

SEQ ID NO: 544556 - RNA, 19 nt, Artificial Sequence
  Description of Artificial Sequence: Synthetic oligonucleotide
  Antisense strand to SEQ ID NO: 544555
uuaccugaggccgacucgc

SEQ ID NO: 544557 - RNA, 19 nt, Artificial Sequence
  Description of Artificial Sequence: Synthetic oligonucleotide
  Sense strand starting at position 2633 of SEQ ID NO: 318201
agcccagcccgauauugau

SEQ ID NO: 544558 - RNA, 19 nt, Artificial Sequence
  Description of Artificial Sequence: Synthetic oligonucleotide
  Antisense strand to SEQ ID NO: 544557
aucaauaucgggcugggcu

SEQ ID NO: 544559 - RNA, 19 nt, Artificial Sequence
  Description of Artificial Sequence: Synthetic oligonucleotide
  Sense strand starting at position 2994 of SEQ ID NO: 318201
cggcccauuugcguucuaa

SEQ ID NO: 544560 - RNA, 19 nt, Artificial Sequence
  Description of Artificial Sequence: Synthetic oligonucleotide
  Antisense strand to SEQ ID NO: 544559
uuagaacgcaaaugggccg

SEQ ID NO: 544561 - RNA, 19 nt, Artificial Sequence
  Description of Artificial Sequence: Synthetic oligonucleotide
  Sense strand starting at position 2998 of SEQ ID NO: 318201
ccauuugcguucuaauuuc

SEQ ID NO: 544562 - RNA, 19 nt, Artificial Sequence
  Description of Artificial Sequence: Synthetic oligonucleotide
  Antisense strand to SEQ ID NO: 544561
gaaauuagaacgcaaaugg

SEQ ID NO: 544563 - RNA, 19 nt, Artificial Sequence
  Description of Artificial Sequence: Synthetic oligonucleotide
  Sense strand starting at position 3023 of SEQ ID NO: 318201
uccucaauccucuguggaa

SEQ ID NO: 544564 - RNA, 19 nt, Artificial Sequence
  Description of Artificial Sequence: Synthetic oligonucleotide
  Antisense strand to SEQ ID NO: 544563
uuccacagaggauugagga

SEQ ID NO: 544565 - RNA, 19 nt, Artificial Sequence
  Description of Artificial Sequence: Synthetic oligonucleotide
  Sense strand starting at position 3024 of SEQ ID NO: 318201
ccucaauccucuguggaac

SEQ ID NO: 544566 - RNA, 19 nt, Artificial Sequence
  Description of Artificial Sequence: Synthetic oligonucleotide
  Antisense strand to SEQ ID NO: 544565
guuccacagaggauugagg

SEQ ID NO: 544567 - RNA, 19 nt, Artificial Sequence
  Description of Artificial Sequence: Synthetic oligonucleotide
  Sense strand starting at position 3211 of SEQ ID NO: 318201
gacucagacugagauugaa

SEQ ID NO: 544568 - RNA, 19 nt, Artificial Sequence
  Description of Artificial Sequence: Synthetic oligonucleotide
  Antisense strand to SEQ ID NO: 544567
uucaaucucagucugaguc

SEQ ID NO: 544569 - RNA, 19 nt, Artificial Sequence
  Description of Artificial Sequence: Synthetic oligonucleotide
  Sense strand starting at position 3231 of SEQ ID NO: 318201
gcggcuuugucuuccuagu

SEQ ID NO: 544570 - RNA, 19 nt, Artificial Sequence
  Description of Artificial Sequence: Synthetic oligonucleotide
  Antisense strand to SEQ ID NO: 544569
acuaggaagacaaagccgc

SEQ ID NO: 544571 - RNA, 19 nt, Artificial Sequence
  Description of Artificial Sequence: Synthetic oligonucleotide
  Sense strand starting at position 3232 of SEQ ID NO: 318201
cggcuuugucuuccuaguu

SEQ ID NO: 544572 - RNA, 19 nt, Artificial Sequence
  Description of Artificial Sequence: Synthetic oligonucleotide
  Antisense strand to SEQ ID NO: 544571
aacuaggaagacaaagccg

SEQ ID NO: 544573 - RNA, 19 nt, Artificial Sequence
  Description of Artificial Sequence: Synthetic oligonucleotide
  Sense strand starting at position 3309 of SEQ ID NO: 318201
agagauugaugccaagaag

SEQ ID NO: 544574 - RNA, 19 nt, Artificial Sequence
  Description of Artificial Sequence: Synthetic oligonucleotide
  Antisense strand to SEQ ID NO: 544573
cuucuuggcaucaaucucu

SEQ ID NO: 544575 - RNA, 19 nt, Artificial Sequence
  Description of Artificial Sequence: Synthetic oligonucleotide
  Sense strand starting at position 3397 of SEQ ID NO: 318201
cucagugcuccuggaacuu

SEQ ID NO: 544576 - RNA, 19 nt, Artificial Sequence
  Description of Artificial Sequence: Synthetic oligonucleotide
  Antisense strand to SEQ ID NO: 544575
aaguuccaggagcacugag

SEQ ID NO: 544577 - RNA, 19 nt, Artificial Sequence
  Description of Artificial Sequence: Synthetic oligonucleotide
  Sense strand starting at position 3406 of SEQ ID NO: 318201
ccuggaacuuuccgaacua

SEQ ID NO: 544578 - RNA, 19 nt, Artificial Sequence
  Description of Artificial Sequence: Synthetic oligonucleotide
  Antisense strand to SEQ ID NO: 544577
uaguucggaaaguuccagg

SEQ ID NO: 544579 - RNA, 19 nt, Artificial Sequence
  Description of Artificial Sequence: Synthetic oligonucleotide
  Sense strand starting at position 3421 of SEQ ID NO: 318201
acuagagacugggacuuau

SEQ ID NO: 544580 - RNA, 19 nt, Artificial Sequence
  Description of Artificial Sequence: Synthetic oligonucleotide
  Antisense strand to SEQ ID NO: 544579
auaagucccagucucuagu

SEQ ID NO: 544581 - RNA, 19 nt, Artificial Sequence
  Description of Artificial Sequence: Synthetic oligonucleotide
  Sense strand starting at position 3438 of SEQ ID NO: 318201
auaggagccuucuagagga

SEQ ID NO: 544582 - RNA, 19 nt, Artificial Sequence
  Description of Artificial Sequence: Synthetic oligonucleotide
  Antisense strand to SEQ ID NO: 544581
uccucuagaaggcuccuau

SEQ ID NO: 544583 - RNA, 19 nt, Artificial Sequence
  Description of Artificial Sequence: Synthetic oligonucleotide
  Sense strand starting at position 3451 of SEQ ID NO: 318201
agaggaaacugucguguuu

SEQ ID NO: 544584 - RNA, 19 nt, Artificial Sequence
  Description of Artificial Sequence: Synthetic oligonucleotide
  Antisense strand to SEQ ID NO: 544583
aaacacgacaguuuccucu

SEQ ID NO: 544585 - RNA, 19 nt, Artificial Sequence
  Description of Artificial Sequence: Synthetic oligonucleotide
  Sense strand starting at position 3472 of SEQ ID NO: 318201
acaggugucuucuauuugu

SEQ ID NO: 544586 - RNA, 19 nt, Artificial Sequence
  Description of Artificial Sequence: Synthetic oligonucleotide
  Antisense strand to SEQ ID NO: 544585
acaaauagaagacaccugu

SEQ ID NO: 544587 - RNA, 19 nt, Artificial Sequence
  Description of Artificial Sequence: Synthetic oligonucleotide
  Sense strand starting at position 3476 of SEQ ID NO: 318201
gugucuucuauuuguggca

SEQ ID NO: 544588 - RNA, 19 nt, Artificial Sequence
  Description of Artificial Sequence: Synthetic oligonucleotide
  Antisense strand to SEQ ID NO: 544587
ugccacaaauagaagacac

SEQ ID NO: 544589 - RNA, 19 nt, Artificial Sequence
  Description of Artificial Sequence: Synthetic oligonucleotide
  Sense strand starting at position 3477 of SEQ ID NO: 318201
ugucuucuauuuguggcaa

SEQ ID NO: 544590 - RNA, 19 nt, Artificial Sequence
  Description of Artificial Sequence: Synthetic oligonucleotide
  Antisense strand to SEQ ID NO: 544589
uugccacaaauagaagaca

SEQ ID NO: 544591 - RNA, 19 nt, Artificial Sequence
  Description of Artificial Sequence: Synthetic oligonucleotide
  Sense strand starting at position 3478 of SEQ ID NO: 318201
gucuucuauuuguggcaaa

SEQ ID NO: 544592 - RNA, 19 nt, Artificial Sequence
  Description of Artificial Sequence: Synthetic oligonucleotide
  Antisense strand to SEQ ID NO: 544591
uuugccacaaauagaagac

SEQ ID NO: 544593 - RNA, 19 nt, Artificial Sequence
  Description of Artificial Sequence: Synthetic oligonucleotide
  Sense strand starting at position 3481 of SEQ ID NO: 318201
uucuauuuguggcaaagga

SEQ ID NO: 544594 - RNA, 19 nt, Artificial Sequence
  Description of Artificial Sequence: Synthetic oligonucleotide
  Antisense strand to SEQ ID NO: 544593
uccuuugccacaaauagaa

SEQ ID NO: 544595 - RNA, 19 nt, Artificial Sequence
  Description of Artificial Sequence: Synthetic oligonucleotide
  Sense strand starting at position 3510 of SEQ ID NO: 318201
ucacuuagguugugacaua

SEQ ID NO: 544596 - RNA, 19 nt, Artificial Sequence
  Description of Artificial Sequence: Synthetic oligonucleotide
  Antisense strand to SEQ ID NO: 544595
uaugucacaaccuaaguga

SEQ ID NO: 544597 - RNA, 19 nt, Artificial Sequence
  Description of Artificial Sequence: Synthetic oligonucleotide
  Sense strand starting at position 3511 of SEQ ID NO: 318201
cacuuagguugugacauaa

SEQ ID NO: 544598 - RNA, 19 nt, Artificial Sequence
  Description of Artificial Sequence: Synthetic oligonucleotide
  Antisense strand to SEQ ID NO: 544597
uuaugucacaaccuaagug

SEQ ID NO: 544599 - RNA, 19 nt, Artificial Sequence
  Description of Artificial Sequence: Synthetic oligonucleotide
  Sense strand starting at position 3535 of SEQ ID NO: 318201
cuuagaaauuguuaaugag

SEQ ID NO: 544600 - RNA, 19 nt, Artificial Sequence
  Description of Artificial Sequence: Synthetic oligonucleotide
  Antisense strand to SEQ ID NO: 544599
cucauuaacaauuucuaag

SEQ ID NO: 544601 - RNA, 19 nt, Artificial Sequence
  Description of Artificial Sequence: Synthetic oligonucleotide
  Sense strand starting at position 3545 of SEQ ID NO: 318201
guuaaugaguuacuuaaug

SEQ ID NO: 544602 - RNA, 19 nt, Artificial Sequence
  Description of Artificial Sequence: Synthetic oligonucleotide
  Antisense strand to SEQ ID NO: 544601
cauuaaguaacucauuaac

SEQ ID NO: 544603 - RNA, 19 nt, Artificial Sequence
  Description of Artificial Sequence: Synthetic oligonucleotide
  Sense strand starting at position 3819 of SEQ ID NO: 318201
agugacaccucaucucauu

SEQ ID NO: 544604 - RNA, 19 nt, Artificial Sequence
  Description of Artificial Sequence: Synthetic oligonucleotide
  Antisense strand to SEQ ID NO: 544603
aaugagaugaggugucacu

SEQ ID NO: 544605 - RNA, 19 nt, Artificial Sequence
  Description of Artificial Sequence: Synthetic oligonucleotide
  Sense strand starting at position 27 of SEQ ID NO: 318202
cucacaaggccuugauguu

SEQ ID NO: 544606 - RNA, 19 nt, Artificial Sequence
  Description of Artificial Sequence: Synthetic oligonucleotide
  Antisense strand to SEQ ID NO: 544605
aacaucaaggccuugugag

SEQ ID NO: 544607 - RNA, 19 nt, Artificial Sequence
  Description of Artificial Sequence: Synthetic oligonucleotide
  Sense strand starting at position 37 of SEQ ID NO: 318202
cuugauguucucugucacu

SEQ ID NO: 544608 - RNA, 19 nt, Artificial Sequence
  Description of Artificial Sequence: Synthetic oligonucleotide
  Antisense strand to SEQ ID NO: 544607
agugacagagaacaucaag

SEQ ID NO: 544609 - RNA, 19 nt, Artificial Sequence
  Description of Artificial Sequence: Synthetic oligonucleotide
  Sense strand starting at position 58 of SEQ ID NO: 318202
cgaaguguacugugaguca

SEQ ID NO: 544610 - RNA, 19 nt, Artificial Sequence
  Description of Artificial Sequence: Synthetic oligonucleotide
  Antisense strand to SEQ ID NO: 544609
ugacucacaguacacuucg

SEQ ID NO: 544611 - RNA, 19 nt, Artificial Sequence
  Description of Artificial Sequence: Synthetic oligonucleotide
  Sense strand starting at position 129 of SEQ ID NO: 318202
ccuggaagggcuuggagaa

SEQ ID NO: 544612 - RNA, 19 nt, Artificial Sequence
  Description of Artificial Sequence: Synthetic oligonucleotide
  Antisense strand to SEQ ID NO: 544611
uucuccaagcccuuccagg

SEQ ID NO: 544613 - RNA, 19 nt, Artificial Sequence
  Description of Artificial Sequence: Synthetic oligonucleotide
  Sense strand starting at position 318 of SEQ ID NO: 318202
acuuucuaucucggagcau

SEQ ID NO: 544614 - RNA, 19 nt, Artificial Sequence
  Description of Artificial Sequence: Synthetic oligonucleotide
  Antisense strand to SEQ ID NO: 544613
augcuccgagauagaaagu

SEQ ID NO: 544615 - RNA, 19 nt, Artificial Sequence
  Description of Artificial Sequence: Synthetic oligonucleotide
  Sense strand starting at position 329 of SEQ ID NO: 318202
cggagcauuugcgaaugaa

SEQ ID NO: 544616 - RNA, 19 nt, Artificial Sequence
  Description of Artificial Sequence: Synthetic oligonucleotide
  Antisense strand to SEQ ID NO: 544615
uucauucgcaaaugcuccg

SEQ ID NO: 544617 - RNA, 19 nt, Artificial Sequence
  Description of Artificial Sequence: Synthetic oligonucleotide
  Sense strand starting at position 367 of SEQ ID NO: 318202
acagcuuucuccucggaau

SEQ ID NO: 544618 - RNA, 19 nt, Artificial Sequence
  Description of Artificial Sequence: Synthetic oligonucleotide
  Antisense strand to SEQ ID NO: 544617
auuccgaggagaaagcugu

SEQ ID NO: 544619 - RNA, 19 nt, Artificial Sequence
  Description of Artificial Sequence: Synthetic oligonucleotide
  Sense strand starting at position 368 of SEQ ID NO: 318202
cagcuuucuccucggaaug

SEQ ID NO: 544620 - RNA, 19 nt, Artificial Sequence
  Description of Artificial Sequence: Synthetic oligonucleotide
  Antisense strand to SEQ ID NO: 544619
cauuccgaggagaaagcug

SEQ ID NO: 544621 - RNA, 19 nt, Artificial Sequence
  Description of Artificial Sequence: Synthetic oligonucleotide
  Sense strand starting at position 532 of SEQ ID NO: 318202
gugucagucagguacgagu

SEQ ID NO: 544622 - RNA, 19 nt, Artificial Sequence
  Description of Artificial Sequence: Synthetic oligonucleotide
  Antisense strand to SEQ ID NO: 544621
acucguaccugacugacac

SEQ ID NO: 544623 - RNA, 19 nt, Artificial Sequence
  Description of Artificial Sequence: Synthetic oligonucleotide
  Sense strand starting at position 926 of SEQ ID NO: 318202
gugcgauugccgucuccgu

SEQ ID NO: 544624 - RNA, 19 nt, Artificial Sequence
  Description of Artificial Sequence: Synthetic oligonucleotide
  Antisense strand to SEQ ID NO: 544623
acggagacggcaaucgcac

SEQ ID NO: 544625 - RNA, 19 nt, Artificial Sequence
  Description of Artificial Sequence: Synthetic oligonucleotide
  Sense strand starting at position 1061 of SEQ ID NO: 318202
aggaacucccgcugguaaa

SEQ ID NO: 544626 - RNA, 19 nt, Artificial Sequence
  Description of Artificial Sequence: Synthetic oligonucleotide
  Antisense strand to SEQ ID NO: 544625
uuuaccagcgggaguuccu

SEQ ID NO: 544627 - RNA, 19 nt, Artificial Sequence
  Description of Artificial Sequence: Synthetic oligonucleotide
  Sense strand starting at position 1178 of SEQ ID NO: 318202
gguguccaccucugcaaua

SEQ ID NO: 544628 - RNA, 19 nt, Artificial Sequence
  Description of Artificial Sequence: Synthetic oligonucleotide
  Antisense strand to SEQ ID NO: 544627
uauugcagagguggacacc

SEQ ID NO: 544629 - RNA, 19 nt, Artificial Sequence
  Description of Artificial Sequence: Synthetic oligonucleotide
  Sense strand starting at position 1190 of SEQ ID NO: 318202
ugcaauagcucauugacau

SEQ ID NO: 544630 - RNA, 19 nt, Artificial Sequence
  Description of Artificial Sequence: Synthetic oligonucleotide
  Antisense strand to SEQ ID NO: 544629
augucaaugagcuauugca

SEQ ID NO: 544631 - RNA, 19 nt, Artificial Sequence
  Description of Artificial Sequence: Synthetic oligonucleotide
  Sense strand starting at position 1191 of SEQ ID NO: 318202
gcaauagcucauugacauc

SEQ ID NO: 544632 - RNA, 19 nt, Artificial Sequence
  Description of Artificial Sequence: Synthetic oligonucleotide
  Antisense strand to SEQ ID NO: 544631
gaugucaaugagcuauugc

SEQ ID NO: 544633 - RNA, 19 nt, Artificial Sequence
  Description of Artificial Sequence: Synthetic oligonucleotide
  Sense strand starting at position 1219 of SEQ ID NO: 318202
gccugccacacgugacaua

SEQ ID NO: 544634 - RNA, 19 nt, Artificial Sequence
  Description of Artificial Sequence: Synthetic oligonucleotide
  Antisense strand to SEQ ID NO: 544633
uaugucacguguggcaggc

SEQ ID NO: 544635 - RNA, 19 nt, Artificial Sequence
  Description of Artificial Sequence: Synthetic oligonucleotide
  Sense strand starting at position 1349 of SEQ ID NO: 318202
aggcaucugaaguggaaau

SEQ ID NO: 544636 - RNA, 19 nt, Artificial Sequence
  Description of Artificial Sequence: Synthetic oligonucleotide
  Antisense strand to SEQ ID NO: 544635
auuuccacuucagaugccu

SEQ ID NO: 544637 - RNA, 19 nt, Artificial Sequence
  Description of Artificial Sequence: Synthetic oligonucleotide
  Sense strand starting at position 1350 of SEQ ID NO: 318202
ggcaucugaaguggaaaua

SEQ ID NO: 544638 - RNA, 19 nt, Artificial Sequence
  Description of Artificial Sequence: Synthetic oligonucleotide
  Antisense strand to SEQ ID NO: 544637
uauuuccacuucagaugcc

SEQ ID NO: 544639 - RNA, 19 nt, Artificial Sequence
  Description of Artificial Sequence: Synthetic oligonucleotide
  Sense strand starting at position 1566 of SEQ ID NO: 318202
gauucuuagccucacgaug

SEQ ID NO: 544640 - RNA, 19 nt, Artificial Sequence
  Description of Artificial Sequence: Synthetic oligonucleotide
  Antisense strand to SEQ ID NO: 544639
caucgugaggcuaagaauc

SEQ ID NO: 544641 - RNA, 19 nt, Artificial Sequence
  Description of Artificial Sequence: Synthetic oligonucleotide
  Sense strand starting at position 1723 of SEQ ID NO: 318202
gugccugugucucuggaga

SEQ ID NO: 544642 - RNA, 19 nt, Artificial Sequence
  Description of Artificial Sequence: Synthetic oligonucleotide
  Antisense strand to SEQ ID NO: 544641
ucuccagagacacaggcac

SEQ ID NO: 544643 - RNA, 19 nt, Artificial Sequence
  Description of Artificial Sequence: Synthetic oligonucleotide
  Sense strand starting at position 1907 of SEQ ID NO: 318202
gagcaagaaugagaucaac

SEQ ID NO: 544644 - RNA, 19 nt, Artificial Sequence
  Description of Artificial Sequence: Synthetic oligonucleotide
  Antisense strand to SEQ ID NO: 544643
guugaucucauucuugcuc

SEQ ID NO: 544645 - RNA, 19 nt, Artificial Sequence
  Description of Artificial Sequence: Synthetic oligonucleotide
  Sense strand starting at position 2026 of SEQ ID NO: 318202
uuuccaagucuccaaguuu

SEQ ID NO: 544646 - RNA, 19 nt, Artificial Sequence
  Description of Artificial Sequence: Synthetic oligonucleotide
  Antisense strand to SEQ ID NO: 544645
aaacuuggagacuuggaaa

SEQ ID NO: 544647 - RNA, 19 nt, Artificial Sequence
  Description of Artificial Sequence: Synthetic oligonucleotide
  Sense strand starting at position 2151 of SEQ ID NO: 318202
cagcccugugcaugaucaa

SEQ ID NO: 544648 - RNA, 19 nt, Artificial Sequence
  Description of Artificial Sequence: Synthetic oligonucleotide
  Antisense strand to SEQ ID NO: 544647
uugaucaugcacagggcug

SEQ ID NO: 544649 - RNA, 19 nt, Artificial Sequence
  Description of Artificial Sequence: Synthetic oligonucleotide
  Sense strand starting at position 2305 of SEQ ID NO: 318202
ccagguagaucuucccuga

SEQ ID NO: 544650 - RNA, 19 nt, Artificial Sequence
  Description of Artificial Sequence: Synthetic oligonucleotide
  Antisense strand to SEQ ID NO: 544649
ucagggaagaucuaccugg

SEQ ID NO: 544651 - RNA, 19 nt, Artificial Sequence
  Description of Artificial Sequence: Synthetic oligonucleotide
  Sense strand starting at position 2309 of SEQ ID NO: 318202
guagaucuucccugaggca

SEQ ID NO: 544652 - RNA, 19 nt, Artificial Sequence
  Description of Artificial Sequence: Synthetic oligonucleotide
  Antisense strand to SEQ ID NO: 544651
ugccucagggaagaucuac

SEQ ID NO: 544653 - RNA, 19 nt, Artificial Sequence
  Description of Artificial Sequence: Synthetic oligonucleotide
  Sense strand starting at position 2310 of SEQ ID NO: 318202
uagaucuucccugaggcau

SEQ ID NO: 544654 - RNA, 19 nt, Artificial Sequence
  Description of Artificial Sequence: Synthetic oligonucleotide
  Antisense strand to SEQ ID NO: 544653
augccucagggaagaucua

SEQ ID NO: 544655 - RNA, 19 nt, Artificial Sequence
  Description of Artificial Sequence: Synthetic oligonucleotide
  Sense strand starting at position 2323 of SEQ ID NO: 318202
aggcaucucuuacccaaga

SEQ ID NO: 544656 - RNA, 19 nt, Artificial Sequence
  Description of Artificial Sequence: Synthetic oligonucleotide
  Antisense strand to SEQ ID NO: 544655
ucuuggguaagagaugccu

SEQ ID NO: 544657 - RNA, 19 nt, Artificial Sequence
  Description of Artificial Sequence: Synthetic oligonucleotide
  Sense strand starting at position 2324 of SEQ ID NO: 318202
ggcaucucuuacccaagaa

SEQ ID NO: 544658 - RNA, 19 nt, Artificial Sequence
  Description of Artificial Sequence: Synthetic oligonucleotide
  Antisense strand to SEQ ID NO: 544657
uucuuggguaagagaugcc

SEQ ID NO: 544659 - RNA, 19 nt, Artificial Sequence
  Description of Artificial Sequence: Synthetic oligonucleotide
  Sense strand starting at position 2535 of SEQ ID NO: 318202
cacccauugcugggugaca

SEQ ID NO: 544660 - RNA, 19 nt, Artificial Sequence
  Description of Artificial Sequence: Synthetic oligonucleotide
  Antisense strand to SEQ ID NO: 544659
ugucacccagcaaugggug

SEQ ID NO: 544661 - RNA, 19 nt, Artificial Sequence
  Description of Artificial Sequence: Synthetic oligonucleotide
  Sense strand starting at position 2787 of SEQ ID NO: 318202
gggugaugcugccugaauc

SEQ ID NO: 544662 - RNA, 19 nt, Artificial Sequence
  Description of Artificial Sequence: Synthetic oligonucleotide
  Antisense strand to SEQ ID NO: 544661
gauucaggcagcaucaccc

SEQ ID NO: 544663 - RNA, 19 nt, Artificial Sequence
  Description of Artificial Sequence: Synthetic oligonucleotide
  Sense strand starting at position 2788 of SEQ ID NO: 318202
ggugaugcugccugaauca

SEQ ID NO: 544664 - RNA, 19 nt, Artificial Sequence
  Description of Artificial Sequence: Synthetic oligonucleotide
  Antisense strand to SEQ ID NO: 544663
ugauucaggcagcaucacc

SEQ ID NO: 544665 - RNA, 19 nt, Artificial Sequence
  Description of Artificial Sequence: Synthetic oligonucleotide
  Sense strand starting at position 2869 of SEQ ID NO: 318202
uccuguuuaccaggagaua

SEQ ID NO: 544666 - RNA, 19 nt, Artificial Sequence
  Description of Artificial Sequence: Synthetic oligonucleotide
  Antisense strand to SEQ ID NO: 544665
uaucuccugguaaacagga

SEQ ID NO: 544667 - RNA, 19 nt, Artificial Sequence
  Description of Artificial Sequence: Synthetic oligonucleotide
  Sense strand starting at position 3332 of SEQ ID NO: 318202
gugccuuguacucagggaa

SEQ ID NO: 544668 - RNA, 19 nt, Artificial Sequence
  Description of Artificial Sequence: Synthetic oligonucleotide
  Antisense strand to SEQ ID NO: 544667
uucccugaguacaaggcac

SEQ ID NO: 544669 - RNA, 19 nt, Artificial Sequence
  Description of Artificial Sequence: Synthetic oligonucleotide
  Sense strand starting at position 3378 of SEQ ID NO: 318202
agauaucaggcccguuaac

SEQ ID NO: 544670 - RNA, 19 nt, Artificial Sequence
  Description of Artificial Sequence: Synthetic oligonucleotide
  Antisense strand to SEQ ID NO: 544669
guuaacgggccugauaucu

SEQ ID NO: 544671 - RNA, 19 nt, Artificial Sequence
  Description of Artificial Sequence: Synthetic oligonucleotide
  Sense strand starting at position 3398 of SEQ ID NO: 318202
gucugcugucaccaugcau

SEQ ID NO: 544672 - RNA, 19 nt, Artificial Sequence
  Description of Artificial Sequence: Synthetic oligonucleotide
  Antisense strand to SEQ ID NO: 544671
augcauggugacagcagac

SEQ ID NO: 544673 - RNA, 19 nt, Artificial Sequence
  Description of Artificial Sequence: Synthetic oligonucleotide
  Sense strand starting at position 3451 of SEQ ID NO: 318202
ugcaaccuccuaggaguaa

SEQ ID NO: 544674 - RNA, 19 nt, Artificial Sequence
  Description of Artificial Sequence: Synthetic oligonucleotide
  Antisense strand to SEQ ID NO: 544673
uuacuccuaggagguugca

SEQ ID NO: 544675 - RNA, 19 nt, Artificial Sequence
  Description of Artificial Sequence: Synthetic oligonucleotide
  Sense strand starting at position 3464 of SEQ ID NO: 318202
gaguaaggguguccaucau

SEQ ID NO: 544676 - RNA, 19 nt, Artificial Sequence
  Description of Artificial Sequence: Synthetic oligonucleotide
  Antisense strand to SEQ ID NO: 544675
augauggacacccuuacuc

SEQ ID NO: 544677 - RNA, 19 nt, Artificial Sequence
  Description of Artificial Sequence: Synthetic oligonucleotide
  Sense strand starting at position 3473 of SEQ ID NO: 318202
uguccaucauugcugaagu

SEQ ID NO: 544678 - RNA, 19 nt, Artificial Sequence
  Description of Artificial Sequence: Synthetic oligonucleotide
  Antisense strand to SEQ ID NO: 544677
acuucagcaaugauggaca

SEQ ID NO: 544679 - RNA, 19 nt, Artificial Sequence
  Description of Artificial Sequence: Synthetic oligonucleotide
  Sense strand starting at position 3638 of SEQ ID NO: 318202
acgggcuagauaggaaauu

SEQ ID NO: 544680 - RNA, 19 nt, Artificial Sequence
  Description of Artificial Sequence: Synthetic oligonucleotide
  Antisense strand to SEQ ID NO: 544679
aauuuccuaucuagcccgu

SEQ ID NO: 544681 - RNA, 19 nt, Artificial Sequence
  Description of Artificial Sequence: Synthetic oligonucleotide
  Sense strand starting at position 3721 of SEQ ID NO: 318202
uugcguuuccaggaugaug

SEQ ID NO: 544682 - RNA, 19 nt, Artificial Sequence
  Description of Artificial Sequence: Synthetic oligonucleotide
  Antisense strand to SEQ ID NO: 544681
caucauccuggaaacgcaa

SEQ ID NO: 544683 - RNA, 19 nt, Artificial Sequence
  Description of Artificial Sequence: Synthetic oligonucleotide
  Sense strand starting at position 3981 of SEQ ID NO: 318202
cuccaaagaccugguacua

SEQ ID NO: 544684 - RNA, 19 nt, Artificial Sequence
  Description of Artificial Sequence: Synthetic oligonucleotide
  Antisense strand to SEQ ID NO: 544683
uaguaccaggucuuuggag

SEQ ID NO: 544685 - RNA, 19 nt, Artificial Sequence
  Description of Artificial Sequence: Synthetic oligonucleotide
  Sense strand starting at position 95 of SEQ ID NO: 318203
ggguuacaguuagugaagu

SEQ ID NO: 544686 - RNA, 19 nt, Artificial Sequence
  Description of Artificial Sequence: Synthetic oligonucleotide
  Antisense strand to SEQ ID NO: 544685
acuucacuaacuguaaccc

SEQ ID NO: 544687 - RNA, 19 nt, Artificial Sequence
  Description of Artificial Sequence: Synthetic oligonucleotide
  Sense strand starting at position 109 of SEQ ID NO: 318203
gaaguagucccagaguucu

SEQ ID NO: 544688 - RNA, 19 nt, Artificial Sequence
  Description of Artificial Sequence: Synthetic oligonucleotide
  Antisense strand to SEQ ID NO: 544687
agaacucugggacuacuuc

SEQ ID NO: 544689 - RNA, 19 nt, Artificial Sequence
  Description of Artificial Sequence: Synthetic oligonucleotide
  Sense strand starting at position 173 of SEQ ID NO: 318203
uugcuaaaguuggugucaa

SEQ ID NO: 544690 - RNA, 19 nt, Artificial Sequence
  Description of Artificial Sequence: Synthetic oligonucleotide
  Antisense strand to SEQ ID NO: 544689
uugacaccaacuuuagcaa

SEQ ID NO: 544691 - RNA, 19 nt, Artificial Sequence
  Description of Artificial Sequence: Synthetic oligonucleotide
  Sense strand starting at position 188 of SEQ ID NO: 318203
ucaaguuaauuugggauua

SEQ ID NO: 544692 - RNA, 19 nt, Artificial Sequence
  Description of Artificial Sequence: Synthetic oligonucleotide
  Antisense strand to SEQ ID NO: 544691
uaaucccaaauuaacuuga

SEQ ID NO: 544693 - RNA, 19 nt, Artificial Sequence
  Description of Artificial Sequence: Synthetic oligonucleotide
  Sense strand starting at position 407 of SEQ ID NO: 318203
auacauuucuauugggaau

SEQ ID NO: 544694 - RNA, 19 nt, Artificial Sequence
  Description of Artificial Sequence: Synthetic oligonucleotide
  Antisense strand to SEQ ID NO: 544693
auucccaauagaaauguau

SEQ ID NO: 544695 - RNA, 19 nt, Artificial Sequence
  Description of Artificial Sequence: Synthetic oligonucleotide
  Sense strand starting at position 421 of SEQ ID NO: 318203
ggaauccuuuagcaacaga

SEQ ID NO: 544696 - RNA, 19 nt, Artificial Sequence
  Description of Artificial Sequence: Synthetic oligonucleotide
  Antisense strand to SEQ ID NO: 544695
ucuguugcuaaaggauucc

SEQ ID NO: 544697 - RNA, 19 nt, Artificial Sequence
  Description of Artificial Sequence: Synthetic oligonucleotide
  Sense strand starting at position 709 of SEQ ID NO: 318203
ccgagucccaaguguacaa

SEQ ID NO: 544698 - RNA, 19 nt, Artificial Sequence
  Description of Artificial Sequence: Synthetic oligonucleotide
  Antisense strand to SEQ ID NO: 544697
uuguacacuugggacucgg

SEQ ID NO: 544699 - RNA, 19 nt, Artificial Sequence
  Description of Artificial Sequence: Synthetic oligonucleotide
  Sense strand starting at position 781 of SEQ ID NO: 318203
cuuggagcucagcaaguuu

SEQ ID NO: 544700 - RNA, 19 nt, Artificial Sequence
  Description of Artificial Sequence: Synthetic oligonucleotide
  Antisense strand to SEQ ID NO: 544699
aaacuugcugagcuccaag

SEQ ID NO: 544701 - RNA, 19 nt, Artificial Sequence
  Description of Artificial Sequence: Synthetic oligonucleotide
  Sense strand starting at position 2238 of SEQ ID NO: 318203
gguguaaaguuccugccga

SEQ ID NO: 544702 - RNA, 19 nt, Artificial Sequence
  Description of Artificial Sequence: Synthetic oligonucleotide
  Antisense strand to SEQ ID NO: 544701
ucggcaggaacuuuacacc

SEQ ID NO: 544703 - RNA, 19 nt, Artificial Sequence
  Description of Artificial Sequence: Synthetic oligonucleotide
  Sense strand starting at position 2461 of SEQ ID NO: 318203
ggaggcgaucuaugaaaua

SEQ ID NO: 544704 - RNA, 19 nt, Artificial Sequence
  Description of Artificial Sequence: Synthetic oligonucleotide
  Antisense strand to SEQ ID NO: 544703
uauuucauagaucgccucc

SEQ ID NO: 544705 - RNA, 19 nt, Artificial Sequence
  Description of Artificial Sequence: Synthetic oligonucleotide
  Sense strand starting at position 2571 of SEQ ID NO: 318203
ugccguuuccacgaaggga

SEQ ID NO: 544706 - RNA, 19 nt, Artificial Sequence
  Description of Artificial Sequence: Synthetic oligonucleotide
  Antisense strand to SEQ ID NO: 544705
ucccuucguggaaacggca

SEQ ID NO: 544707 - RNA, 19 nt, Artificial Sequence
  Description of Artificial Sequence: Synthetic oligonucleotide
  Sense strand starting at position 2718 of SEQ ID NO: 318203
ugcugaauauacuuguaca

SEQ ID NO: 544708 - RNA, 19 nt, Artificial Sequence
  Description of Artificial Sequence: Synthetic oligonucleotide
  Antisense strand to SEQ ID NO: 544707
uguacaaguauauucagca

SEQ ID NO: 544709 - RNA, 19 nt, Artificial Sequence
  Description of Artificial Sequence: Synthetic oligonucleotide
  Sense strand starting at position 2798 of SEQ ID NO: 318203
uuagaccaguucuaggaau

SEQ ID NO: 544710 - RNA, 19 nt, Artificial Sequence
  Description of Artificial Sequence: Synthetic oligonucleotide
  Antisense strand to SEQ ID NO: 544709
auuccuagaacuggucuaa

SEQ ID NO: 544711 - RNA, 19 nt, Artificial Sequence
  Description of Artificial Sequence: Synthetic oligonucleotide
  Sense strand starting at position 2800 of SEQ ID NO: 318203
agaccaguucuaggaauug

SEQ ID NO: 544712 - RNA, 19 nt, Artificial Sequence
  Description of Artificial Sequence: Synthetic oligonucleotide
  Antisense strand to SEQ ID NO: 544711
caauuccuagaacuggucu

SEQ ID NO: 544713 - RNA, 19 nt, Artificial Sequence
  Description of Artificial Sequence: Synthetic oligonucleotide
  Sense strand starting at position 2850 of SEQ ID NO: 318203
agagauacuugauacaucu

SEQ ID NO: 544714 - RNA, 19 nt, Artificial Sequence
  Description of Artificial Sequence: Synthetic oligonucleotide
  Antisense strand to SEQ ID NO: 544713
agauguaucaaguaucucu

SEQ ID NO: 544715 - RNA, 19 nt, Artificial Sequence
  Description of Artificial Sequence: Synthetic oligonucleotide
  Sense strand starting at position 2857 of SEQ ID NO: 318203
cuugauacaucuguugaag

SEQ ID NO: 544716 - RNA, 19 nt, Artificial Sequence
  Description of Artificial Sequence: Synthetic oligonucleotide
  Antisense strand to SEQ ID NO: 544715
cuucaacagauguaucaag

SEQ ID NO: 544717 - RNA, 19 nt, Artificial Sequence
  Description of Artificial Sequence: Synthetic oligonucleotide
  Sense strand starting at position 3035 of SEQ ID NO: 318203
aggaauaccugcucguaca

SEQ ID NO: 544718 - RNA, 19 nt, Artificial Sequence
  Description of Artificial Sequence: Synthetic oligonucleotide
  Antisense strand to SEQ ID NO: 544717
uguacgagcagguauuccu

SEQ ID NO: 544719 - RNA, 19 nt, Artificial Sequence
  Description of Artificial Sequence: Synthetic oligonucleotide
  Sense strand starting at position 3036 of SEQ ID NO: 318203
ggaauaccugcucguacau

SEQ ID NO: 544720 - RNA, 19 nt, Artificial Sequence
  Description of Artificial Sequence: Synthetic oligonucleotide
  Antisense strand to SEQ ID NO: 544719
auguacgagcagguauucc

SEQ ID NO: 544721 - RNA, 19 nt, Artificial Sequence
  Description of Artificial Sequence: Synthetic oligonucleotide
  Sense strand starting at position 3047 of SEQ ID NO: 318203
ucguacauguuccuuauga

SEQ ID NO: 544722 - RNA, 19 nt, Artificial Sequence
  Description of Artificial Sequence: Synthetic oligonucleotide
  Antisense strand to SEQ ID NO: 544721
ucauaaggaacauguacga

SEQ ID NO: 544723 - RNA, 19 nt, Artificial Sequence
  Description of Artificial Sequence: Synthetic oligonucleotide
  Sense strand starting at position 3048 of SEQ ID NO: 318203
cguacauguuccuuaugac

SEQ ID NO: 544724 - RNA, 19 nt, Artificial Sequence
  Description of Artificial Sequence: Synthetic oligonucleotide
  Antisense strand to SEQ ID NO: 544723
gucauaaggaacauguacg

SEQ ID NO: 544725 - RNA, 19 nt, Artificial Sequence
  Description of Artificial Sequence: Synthetic oligonucleotide
  Sense strand starting at position 3085 of SEQ ID NO: 318203
ggagauuacucuccggaag

SEQ ID NO: 544726 - RNA, 19 nt, Artificial Sequence
  Description of Artificial Sequence: Synthetic oligonucleotide
  Antisense strand to SEQ ID NO: 544725
cuuccggagaguaaucucc

SEQ ID NO: 544727 - RNA, 19 nt, Artificial Sequence
  Description of Artificial Sequence: Synthetic oligonucleotide
  Sense strand starting at position 3086 of SEQ ID NO: 318203
gagauuacucuccggaagg

SEQ ID NO: 544728 - RNA, 19 nt, Artificial Sequence
  Description of Artificial Sequence: Synthetic oligonucleotide
  Antisense strand to SEQ ID NO: 544727
ccuuccggagaguaaucuc

SEQ ID NO: 544729 - RNA, 19 nt, Artificial Sequence
  Description of Artificial Sequence: Synthetic oligonucleotide
  Sense strand starting at position 3117 of SEQ ID NO: 318203
cugaaagacuuugagccaa

SEQ ID NO: 544730 - RNA, 19 nt, Artificial Sequence
  Description of Artificial Sequence: Synthetic oligonucleotide
  Antisense strand to SEQ ID NO: 544729
uuggcucaaagucuuucag

SEQ ID NO: 544731 - RNA, 19 nt, Artificial Sequence
  Description of Artificial Sequence: Synthetic oligonucleotide
  Sense strand starting at position 3119 of SEQ ID NO: 318203
gaaagacuuugagccaagu

SEQ ID NO: 544732 - RNA, 19 nt, Artificial Sequence
  Description of Artificial Sequence: Synthetic oligonucleotide
  Antisense strand to SEQ ID NO: 544731
acuuggcucaaagucuuuc

SEQ ID NO: 544733 - RNA, 19 nt, Artificial Sequence
  Description of Artificial Sequence: Synthetic oligonucleotide
  Sense strand starting at position 3154 of SEQ ID NO: 318203
uaacgacugauuggagagu

SEQ ID NO: 544734 - RNA, 19 nt, Artificial Sequence
  Description of Artificial Sequence: Synthetic oligonucleotide
  Antisense strand to SEQ ID NO: 544733
acucuccaaucagucguua

SEQ ID NO: 544735 - RNA, 19 nt, Artificial Sequence
  Description of Artificial Sequence: Synthetic oligonucleotide
  Sense strand starting at position 3190 of SEQ ID NO: 318203
uaaaguaagguauggaguu

SEQ ID NO: 544736 - RNA, 19 nt, Artificial Sequence
  Description of Artificial Sequence: Synthetic oligonucleotide
  Antisense strand to SEQ ID NO: 544735
aacuccauaccuuacuuua

SEQ ID NO: 544737 - RNA, 19 nt, Artificial Sequence
  Description of Artificial Sequence: Synthetic oligonucleotide
  Sense strand starting at position 3224 of SEQ ID NO: 318203
gaggacacauuguccuaaa

SEQ ID NO: 544738 - RNA, 19 nt, Artificial Sequence
  Description of Artificial Sequence: Synthetic oligonucleotide
  Antisense strand to SEQ ID NO: 544737
uuuaggacaauguguccuc

SEQ ID NO: 544739 - RNA, 19 nt, Artificial Sequence
  Description of Artificial Sequence: Synthetic oligonucleotide
  Sense strand starting at position 3249 of SEQ ID NO: 318203
ggccaauucuaucugugga

SEQ ID NO: 544740 - RNA, 19 nt, Artificial Sequence
  Description of Artificial Sequence: Synthetic oligonucleotide
  Antisense strand to SEQ ID NO: 544739
uccacagauagaauuggcc

SEQ ID NO: 544741 - RNA, 19 nt, Artificial Sequence
  Description of Artificial Sequence: Synthetic oligonucleotide
  Sense strand starting at position 3251 of SEQ ID NO: 318203
ccaauucuaucuguggaaa

SEQ ID NO: 544742 - RNA, 19 nt, Artificial Sequence
  Description of Artificial Sequence: Synthetic oligonucleotide
  Antisense strand to SEQ ID NO: 544741
uuuccacagauagaauugg

SEQ ID NO: 544743 - RNA, 19 nt, Artificial Sequence
  Description of Artificial Sequence: Synthetic oligonucleotide
  Sense strand starting at position 3271 of SEQ ID NO: 318203
gaaagucggcuguaaggua

SEQ ID NO: 544744 - RNA, 19 nt, Artificial Sequence
  Description of Artificial Sequence: Synthetic oligonucleotide
  Antisense strand to SEQ ID NO: 544743
uaccuuacagccgacuuuc

SEQ ID NO: 544745 - RNA, 19 nt, Artificial Sequence
  Description of Artificial Sequence: Synthetic oligonucleotide
  Sense strand starting at position 3278 of SEQ ID NO: 318203
ggcuguaagguacaugaau

SEQ ID NO: 544746 - RNA, 19 nt, Artificial Sequence
  Description of Artificial Sequence: Synthetic oligonucleotide
  Antisense strand to SEQ ID NO: 544745
auucauguaccuuacagcc

SEQ ID NO: 544747 - RNA, 19 nt, Artificial Sequence
  Description of Artificial Sequence: Synthetic oligonucleotide
  Sense strand starting at position 3287 of SEQ ID NO: 318203
guacaugaauaagugagau

SEQ ID NO: 544748 - RNA, 19 nt, Artificial Sequence
  Description of Artificial Sequence: Synthetic oligonucleotide
  Antisense strand to SEQ ID NO: 544747
aucucacuuauucauguac

SEQ ID NO: 544749 - RNA, 19 nt, Artificial Sequence
  Description of Artificial Sequence: Synthetic oligonucleotide
  Sense strand starting at position 3291 of SEQ ID NO: 318203
augaauaagugagaugcaa

SEQ ID NO: 544750 - RNA, 19 nt, Artificial Sequence
  Description of Artificial Sequence: Synthetic oligonucleotide
  Antisense strand to SEQ ID NO: 544749
uugcaucucacuuauucau

SEQ ID NO: 544751 - RNA, 19 nt, Artificial Sequence
  Description of Artificial Sequence: Synthetic oligonucleotide
  Sense strand starting at position 3444 of SEQ ID NO: 318203
cuuuccauacgucauacuu

SEQ ID NO: 544752 - RNA, 19 nt, Artificial Sequence
  Description of Artificial Sequence: Synthetic oligonucleotide
  Antisense strand to SEQ ID NO: 544751
aaguaugacguauggaaag

SEQ ID NO: 544753 - RNA, 19 nt, Artificial Sequence
  Description of Artificial Sequence: Synthetic oligonucleotide
  Sense strand starting at position 3512 of SEQ ID NO: 318203
cccuuauugcuggagugca

SEQ ID NO: 544754 - RNA, 19 nt, Artificial Sequence
  Description of Artificial Sequence: Synthetic oligonucleotide
  Antisense strand to SEQ ID NO: 544753
ugcacuccagcaauaaggg

SEQ ID NO: 544755 - RNA, 19 nt, Artificial Sequence
  Description of Artificial Sequence: Synthetic oligonucleotide
  Sense strand starting at position 3606 of SEQ ID NO: 318203
aagcuuaugccacggguaa

SEQ ID NO: 544756 - RNA, 19 nt, Artificial Sequence
  Description of Artificial Sequence: Synthetic oligonucleotide
  Antisense strand to SEQ ID NO: 544755
uuacccguggcauaagcuu

SEQ ID NO: 544757 - RNA, 19 nt, Artificial Sequence
  Description of Artificial Sequence: Synthetic oligonucleotide
  Sense strand starting at position 3607 of SEQ ID NO: 318203
agcuuaugccacggguaaa

SEQ ID NO: 544758 - RNA, 19 nt, Artificial Sequence
  Description of Artificial Sequence: Synthetic oligonucleotide
  Antisense strand to SEQ ID NO: 544757
uuuacccguggcauaagcu

SEQ ID NO: 544759 - RNA, 19 nt, Artificial Sequence
  Description of Artificial Sequence: Synthetic oligonucleotide
  Sense strand starting at position 3713 of SEQ ID NO: 318203
ugugaaagauaucuuucga

SEQ ID NO: 544760 - RNA, 19 nt, Artificial Sequence
  Description of Artificial Sequence: Synthetic oligonucleotide
  Antisense strand to SEQ ID NO: 544759
ucgaaagauaucuuucaca

SEQ ID NO: 544761 - RNA, 19 nt, Artificial Sequence
  Description of Artificial Sequence: Synthetic oligonucleotide
  Sense strand starting at position 3847 of SEQ ID NO: 318203
gcuugaaauuaaguacaag

SEQ ID NO: 544762 - RNA, 19 nt, Artificial Sequence
  Description of Artificial Sequence: Synthetic oligonucleotide
  Antisense strand to SEQ ID NO: 544761
cuuguacuuaauuucaagc

SEQ ID NO: 544763 - RNA, 19 nt, Artificial Sequence
  Description of Artificial Sequence: Synthetic oligonucleotide
  Sense strand starting at position 3945 of SEQ ID NO: 318203
gucugagccacgugaagaa

SEQ ID NO: 544764 - RNA, 19 nt, Artificial Sequence
  Description of Artificial Sequence: Synthetic oligonucleotide
  Antisense strand to SEQ ID NO: 544763
uucuucacguggcucagac

SEQ ID NO: 544765 - RNA, 19 nt, Artificial Sequence
  Description of Artificial Sequence: Synthetic oligonucleotide
  Sense strand starting at position 52 of SEQ ID NO: 318204
ugauuaucaggccacugua

SEQ ID NO: 544766 - RNA, 19 nt, Artificial Sequence
  Description of Artificial Sequence: Synthetic oligonucleotide
  Antisense strand to SEQ ID NO: 544765
uacaguggccugauaauca

SEQ ID NO: 544767 - RNA, 19 nt, Artificial Sequence
  Description of Artificial Sequence: Synthetic oligonucleotide
  Sense strand starting at position 119 of SEQ ID NO: 318204
cuuauuauggaguaucuuu

SEQ ID NO: 544768 - RNA, 19 nt, Artificial Sequence
  Description of Artificial Sequence: Synthetic oligonucleotide
  Antisense strand to SEQ ID NO: 544767
aaagauacuccauaauaag

SEQ ID NO: 544769 - RNA, 19 nt, Artificial Sequence
  Description of Artificial Sequence: Synthetic oligonucleotide
  Sense strand starting at position 147 of SEQ ID NO: 318204
cuaggacuuccagguuaaa

SEQ ID NO: 544770 - RNA, 19 nt, Artificial Sequence
  Description of Artificial Sequence: Synthetic oligonucleotide
  Antisense strand to SEQ ID NO: 544769
uuuaaccuggaaguccuag

SEQ ID NO: 544771 - RNA, 19 nt, Artificial Sequence
  Description of Artificial Sequence: Synthetic oligonucleotide
  Sense strand starting at position 334 of SEQ ID NO: 318204
gcaucuaggauuuguugua

SEQ ID NO: 544772 - RNA, 19 nt, Artificial Sequence
  Description of Artificial Sequence: Synthetic oligonucleotide
  Antisense strand to SEQ ID NO: 544771
uacaacaaauccuagaugc

SEQ ID NO: 544773 - RNA, 19 nt, Artificial Sequence
  Description of Artificial Sequence: Synthetic oligonucleotide
  Sense strand starting at position 385 of SEQ ID NO: 318204
uguugagcucucuaaagag

SEQ ID NO: 544774 - RNA, 19 nt, Artificial Sequence
  Description of Artificial Sequence: Synthetic oligonucleotide
  Antisense strand to SEQ ID NO: 544773
cucuuuagagagcucaaca

SEQ ID NO: 544775 - RNA, 19 nt, Artificial Sequence
  Description of Artificial Sequence: Synthetic oligonucleotide
  Sense strand starting at position 645 of SEQ ID NO: 318204
ugacauuaagcacggaaau

SEQ ID NO: 544776 - RNA, 19 nt, Artificial Sequence
  Description of Artificial Sequence: Synthetic oligonucleotide
  Antisense strand to SEQ ID NO: 544775
auuuccgugcuuaauguca

SEQ ID NO: 544777 - RNA, 19 nt, Artificial Sequence
  Description of Artificial Sequence: Synthetic oligonucleotide
  Sense strand starting at position 646 of SEQ ID NO: 318204
gacauuaagcacggaaauc

SEQ ID NO: 544778 - RNA, 19 nt, Artificial Sequence
  Description of Artificial Sequence: Synthetic oligonucleotide
  Antisense strand to SEQ ID NO: 544777
gauuuccgugcuuaauguc

SEQ ID NO: 544779 - RNA, 19 nt, Artificial Sequence
  Description of Artificial Sequence: Synthetic oligonucleotide
  Sense strand starting at position 808 of SEQ ID NO: 318204
cagaaauggucucugaacg

SEQ ID NO: 544780 - RNA, 19 nt, Artificial Sequence
  Description of Artificial Sequence: Synthetic oligonucleotide
  Antisense strand to SEQ ID NO: 544779
cguucagagaccauuucug

SEQ ID NO: 544781 - RNA, 19 nt, Artificial Sequence
  Description of Artificial Sequence: Synthetic oligonucleotide
  Sense strand starting at position 809 of SEQ ID NO: 318204
agaaauggucucugaacga

SEQ ID NO: 544782 - RNA, 19 nt, Artificial Sequence
  Description of Artificial Sequence: Synthetic oligonucleotide
  Antisense strand to SEQ ID NO: 544781
ucguucagagaccauuucu

SEQ ID NO: 544783 - RNA, 19 nt, Artificial Sequence
  Description of Artificial Sequence: Synthetic oligonucleotide
  Sense strand starting at position 1014 of SEQ ID NO: 318204
ucaguauaccuacaaguuc

SEQ ID NO: 544784 - RNA, 19 nt, Artificial Sequence
  Description of Artificial Sequence: Synthetic oligonucleotide
  Antisense strand to SEQ ID NO: 544783
gaacuuguagguauacuga

SEQ ID NO: 544785 - RNA, 19 nt, Artificial Sequence
  Description of Artificial Sequence: Synthetic oligonucleotide
  Sense strand starting at position 1153 of SEQ ID NO: 318204
uuaagccugccuuaauuga

SEQ ID NO: 544786 - RNA, 19 nt, Artificial Sequence
  Description of Artificial Sequence: Synthetic oligonucleotide
  Antisense strand to SEQ ID NO: 544785
ucaauuaaggcaggcuuaa

SEQ ID NO: 544787 - RNA, 19 nt, Artificial Sequence
  Description of Artificial Sequence: Synthetic oligonucleotide
  Sense strand starting at position 1209 of SEQ ID NO: 318204
agaacaaauguuugaguca

SEQ ID NO: 544788 - RNA, 19 nt, Artificial Sequence
  Description of Artificial Sequence: Synthetic oligonucleotide
  Antisense strand to SEQ ID NO: 544787
ugacucaaacauuuguucu

SEQ ID NO: 544789 - RNA, 19 nt, Artificial Sequence
  Description of Artificial Sequence: Synthetic oligonucleotide
  Sense strand starting at position 1212 of SEQ ID NO: 318204
acaaauguuugagucaaga

SEQ ID NO: 544790 - RNA, 19 nt, Artificial Sequence
  Description of Artificial Sequence: Synthetic oligonucleotide
  Antisense strand to SEQ ID NO: 544789
ucuugacucaaacauuugu

SEQ ID NO: 544791 - RNA, 19 nt, Artificial Sequence
  Description of Artificial Sequence: Synthetic oligonucleotide
  Sense strand starting at position 1221 of SEQ ID NO: 318204
ugagucaagagaugaguua

SEQ ID NO: 544792 - RNA, 19 nt, Artificial Sequence
  Description of Artificial Sequence: Synthetic oligonucleotide
  Antisense strand to SEQ ID NO: 544791
uaacucaucucuugacuca

SEQ ID NO: 544793 - RNA, 19 nt, Artificial Sequence
  Description of Artificial Sequence: Synthetic oligonucleotide
  Sense strand starting at position 1287 of SEQ ID NO: 318204
guugucaaaugaccuuaga

SEQ ID NO: 544794 - RNA, 19 nt, Artificial Sequence
  Description of Artificial Sequence: Synthetic oligonucleotide
  Antisense strand to SEQ ID NO: 544793
ucuaaggucauuugacaac

SEQ ID NO: 544795 - RNA, 19 nt, Artificial Sequence
  Description of Artificial Sequence: Synthetic oligonucleotide
  Sense strand starting at position 1304 of SEQ ID NO: 318204
gauuccggucuguauaaca

SEQ ID NO: 544796 - RNA, 19 nt, Artificial Sequence
  Description of Artificial Sequence: Synthetic oligonucleotide
  Antisense strand to SEQ ID NO: 544795
uguuauacagaccggaauc

SEQ ID NO: 544797 - RNA, 19 nt, Artificial Sequence
  Description of Artificial Sequence: Synthetic oligonucleotide
  Sense strand starting at position 1332 of SEQ ID NO: 318204
gacgcuaaggauuaaguua

SEQ ID NO: 544798 - RNA, 19 nt, Artificial Sequence
  Description of Artificial Sequence: Synthetic oligonucleotide
  Antisense strand to SEQ ID NO: 544797
uaacuuaauccuuagcguc

SEQ ID NO: 544799 - RNA, 19 nt, Artificial Sequence
  Description of Artificial Sequence: Synthetic oligonucleotide
  Sense strand starting at position 1340 of SEQ ID NO: 318204
ggauuaaguuaugcaacau

SEQ ID NO: 544800 - RNA, 19 nt, Artificial Sequence
  Description of Artificial Sequence: Synthetic oligonucleotide
  Antisense strand to SEQ ID NO: 544799
auguugcauaacuuaaucc

SEQ ID NO: 544801 - RNA, 19 nt, Artificial Sequence
  Description of Artificial Sequence: Synthetic oligonucleotide
  Sense strand starting at position 1407 of SEQ ID NO: 318204
acuggaauuugcuagaaca

SEQ ID NO: 544802 - RNA, 19 nt, Artificial Sequence
  Description of Artificial Sequence: Synthetic oligonucleotide
  Antisense strand to SEQ ID NO: 544801
uguucuagcaaauuccagu

SEQ ID NO: 544803 - RNA, 19 nt, Artificial Sequence
  Description of Artificial Sequence: Synthetic oligonucleotide
  Sense strand starting at position 1447 of SEQ ID NO: 318204
auguaagggauccgacgaa

SEQ ID NO: 544804 - RNA, 19 nt, Artificial Sequence
  Description of Artificial Sequence: Synthetic oligonucleotide
  Antisense strand to SEQ ID NO: 544803
uucgucggaucccuuacau

SEQ ID NO: 544805 - RNA, 19 nt, Artificial Sequence
  Description of Artificial Sequence: Synthetic oligonucleotide
  Sense strand starting at position 1491 of SEQ ID NO: 318204
gcaaacaacucuuuacgaa

SEQ ID NO: 544806 - RNA, 19 nt, Artificial Sequence
  Description of Artificial Sequence: Synthetic oligonucleotide
  Antisense strand to SEQ ID NO: 544805
uucguaaagaguuguuugc

SEQ ID NO: 544807 - RNA, 19 nt, Artificial Sequence
  Description of Artificial Sequence: Synthetic oligonucleotide
  Sense strand starting at position 1524 of SEQ ID NO: 318204
gcaaaugaucaagggugua

SEQ ID NO: 544808 - RNA, 19 nt, Artificial Sequence
  Description of Artificial Sequence: Synthetic oligonucleotide
  Antisense strand to SEQ ID NO: 544807
uacacccuugaucauuugc

SEQ ID NO: 544809 - RNA, 19 nt, Artificial Sequence
  Description of Artificial Sequence: Synthetic oligonucleotide
  Sense strand starting at position 1573 of SEQ ID NO: 318204
aagaauucuccaugaggug

SEQ ID NO: 544810 - RNA, 19 nt, Artificial Sequence
  Description of Artificial Sequence: Synthetic oligonucleotide
  Antisense strand to SEQ ID NO: 544809
caccucauggagaauucuu

SEQ ID NO: 544811 - RNA, 19 nt, Artificial Sequence
  Description of Artificial Sequence: Synthetic oligonucleotide
  Sense strand starting at position 1637 of SEQ ID NO: 318204
cugggaaagagguggucau

SEQ ID NO: 544812 - RNA, 19 nt, Artificial Sequence
  Description of Artificial Sequence: Synthetic oligonucleotide
  Antisense strand to SEQ ID NO: 544811
augaccaccucuuucccag

SEQ ID NO: 544813 - RNA, 19 nt, Artificial Sequence
  Description of Artificial Sequence: Synthetic oligonucleotide
  Sense strand starting at position 1638 of SEQ ID NO: 318204
ugggaaagagguggucaua

SEQ ID NO: 544814 - RNA, 19 nt, Artificial Sequence
  Description of Artificial Sequence: Synthetic oligonucleotide
  Antisense strand to SEQ ID NO: 544813
uaugaccaccucuuuccca

SEQ ID NO: 544815 - RNA, 19 nt, Artificial Sequence
  Description of Artificial Sequence: Synthetic oligonucleotide
  Sense strand starting at position 1704 of SEQ ID NO: 318204
ugacaagaguucucggaga

SEQ ID NO: 544816 - RNA, 19 nt, Artificial Sequence
  Description of Artificial Sequence: Synthetic oligonucleotide
  Antisense strand to SEQ ID NO: 544815
ucuccgagaacucuuguca

SEQ ID NO: 544817 - RNA, 19 nt, Artificial Sequence
  Description of Artificial Sequence: Synthetic oligonucleotide
  Sense strand starting at position 1706 of SEQ ID NO: 318204
acaagaguucucggagagg

SEQ ID NO: 544818 - RNA, 19 nt, Artificial Sequence
  Description of Artificial Sequence: Synthetic oligonucleotide
  Antisense strand to SEQ ID NO: 544817
ccucuccgagaacucuugu

SEQ ID NO: 544819 - RNA, 19 nt, Artificial Sequence
  Description of Artificial Sequence: Synthetic oligonucleotide
  Sense strand starting at position 2637 of SEQ ID NO: 318204
gguaauagacaguagcauu

SEQ ID NO: 544820 - RNA, 19 nt, Artificial Sequence
  Description of Artificial Sequence: Synthetic oligonucleotide
  Antisense strand to SEQ ID NO: 544819
aaugcuacugucuauuacc

SEQ ID NO: 544821 - RNA, 19 nt, Artificial Sequence
  Description of Artificial Sequence: Synthetic oligonucleotide
  Sense strand starting at position 2668 of SEQ ID NO: 318204
ugauaagucuuucuaaagg

SEQ ID NO: 544822 - RNA, 19 nt, Artificial Sequence
  Description of Artificial Sequence: Synthetic oligonucleotide
  Antisense strand to SEQ ID NO: 544821
ccuuuagaaagacuuauca

SEQ ID NO: 544823 - RNA, 19 nt, Artificial Sequence
  Description of Artificial Sequence: Synthetic oligonucleotide
  Sense strand starting at position 2749 of SEQ ID NO: 318204
gcagauuugcccugaguaa

SEQ ID NO: 544824 - RNA, 19 nt, Artificial Sequence
  Description of Artificial Sequence: Synthetic oligonucleotide
  Antisense strand to SEQ ID NO: 544823
uuacucagggcaaaucugc

SEQ ID NO: 544825 - RNA, 19 nt, Artificial Sequence
  Description of Artificial Sequence: Synthetic oligonucleotide
  Sense strand starting at position 2805 of SEQ ID NO: 318204
cagguauaugauuaguguu

SEQ ID NO: 544826 - RNA, 19 nt, Artificial Sequence
  Description of Artificial Sequence: Synthetic oligonucleotide
  Antisense strand to SEQ ID NO: 544825
aacacuaaucauauaccug

SEQ ID NO: 544827 - RNA, 19 nt, Artificial Sequence
  Description of Artificial Sequence: Synthetic oligonucleotide
  Sense strand starting at position 2854 of SEQ ID NO: 318204
acauucgaacuguaugacu

SEQ ID NO: 544828 - RNA, 19 nt, Artificial Sequence
  Description of Artificial Sequence: Synthetic oligonucleotide
  Antisense strand to SEQ ID NO: 544827
agucauacaguucgaaugu

SEQ ID NO: 544829 - RNA, 19 nt, Artificial Sequence
  Description of Artificial Sequence: Synthetic oligonucleotide
  Sense strand starting at position 2879 of SEQ ID NO: 318204
guuuauuggcugcucggua

SEQ ID NO: 544830 - RNA, 19 nt, Artificial Sequence
  Description of Artificial Sequence: Synthetic oligonucleotide
  Antisense strand to SEQ ID NO: 544829
uaccgagcagccaauaaac

SEQ ID NO: 544831 - RNA, 19 nt, Artificial Sequence
  Description of Artificial Sequence: Synthetic oligonucleotide
  Sense strand starting at position 3124 of SEQ ID NO: 318204
agaugcugagaagguaaau

SEQ ID NO: 544832 - RNA, 19 nt, Artificial Sequence
  Description of Artificial Sequence: Synthetic oligonucleotide
  Antisense strand to SEQ ID NO: 544831
auuuaccuucucagcaucu

SEQ ID NO: 544833 - RNA, 19 nt, Artificial Sequence
  Description of Artificial Sequence: Synthetic oligonucleotide
  Sense strand starting at position 3133 of SEQ ID NO: 318204
gaagguaaaucugcuagaa

SEQ ID NO: 544834 - RNA, 19 nt, Artificial Sequence
  Description of Artificial Sequence: Synthetic oligonucleotide
  Antisense strand to SEQ ID NO: 544833
uucuagcagauuuaccuuc

SEQ ID NO: 544835 - RNA, 19 nt, Artificial Sequence
  Description of Artificial Sequence: Synthetic oligonucleotide
  Sense strand starting at position 3137 of SEQ ID NO: 318204
guaaaucugcuagaauggu

SEQ ID NO: 544836 - RNA, 19 nt, Artificial Sequence
  Description of Artificial Sequence: Synthetic oligonucleotide
  Antisense strand to SEQ ID NO: 544835
accauucuagcagauuuac

SEQ ID NO: 544837 - RNA, 19 nt, Artificial Sequence
  Description of Artificial Sequence: Synthetic oligonucleotide
  Sense strand starting at position 3270 of SEQ ID NO: 318204
gcaggugugccuccagcaa

SEQ ID NO: 544838 - RNA, 19 nt, Artificial Sequence
  Description of Artificial Sequence: Synthetic oligonucleotide
  Antisense strand to SEQ ID NO: 544837
uugcuggaggcacaccugc

SEQ ID NO: 544839 - RNA, 19 nt, Artificial Sequence
  Description of Artificial Sequence: Synthetic oligonucleotide
  Sense strand starting at position 3311 of SEQ ID NO: 318204
uggagaguccuugguagga

SEQ ID NO: 544840 - RNA, 19 nt, Artificial Sequence
  Description of Artificial Sequence: Synthetic oligonucleotide
  Antisense strand to SEQ ID NO: 544839
uccuaccaaggacucucca

SEQ ID NO: 544841 - RNA, 19 nt, Artificial Sequence
  Description of Artificial Sequence: Synthetic oligonucleotide
  Sense strand starting at position 3431 of SEQ ID NO: 318204
ugacaauaguggccuuaga

SEQ ID NO: 544842 - RNA, 19 nt, Artificial Sequence
  Description of Artificial Sequence: Synthetic oligonucleotide
  Antisense strand to SEQ ID NO: 544841
ucuaaggccacuauuguca

SEQ ID NO: 544843 - RNA, 19 nt, Artificial Sequence
  Description of Artificial Sequence: Synthetic oligonucleotide
  Sense strand starting at position 3802 of SEQ ID NO: 318204
aauggaaacuguccaaagu

SEQ ID NO: 544844 - RNA, 19 nt, Artificial Sequence
  Description of Artificial Sequence: Synthetic oligonucleotide
  Antisense strand to SEQ ID NO: 544843
acuuuggacaguuuccauu

SEQ ID NO: 544845 - RNA, 19 nt, Artificial Sequence
  Description of Artificial Sequence: Synthetic oligonucleotide
  Sense strand starting at position 933 of SEQ ID NO: 318205
accuaaauguguuugacuu

SEQ ID NO: 544846 - RNA, 19 nt, Artificial Sequence
  Description of Artificial Sequence: Synthetic oligonucleotide
  Antisense strand to SEQ ID NO: 544845
aagucaaacacauuuaggu

SEQ ID NO: 544847 - RNA, 19 nt, Artificial Sequence
  Description of Artificial Sequence: Synthetic oligonucleotide
  Sense strand starting at position 1012 of SEQ ID NO: 318205
agucaaaggaauugagcaa

SEQ ID NO: 544848 - RNA, 19 nt, Artificial Sequence
  Description of Artificial Sequence: Synthetic oligonucleotide
  Antisense strand to SEQ ID NO: 544847
uugcucaauuccuuugacu

SEQ ID NO: 544849 - RNA, 19 nt, Artificial Sequence
  Description of Artificial Sequence: Synthetic oligonucleotide
  Sense strand starting at position 1146 of SEQ ID NO: 318205
ggcagccauaccuggaaau

SEQ ID NO: 544850 - RNA, 19 nt, Artificial Sequence
  Description of Artificial Sequence: Synthetic oligonucleotide
  Antisense strand to SEQ ID NO: 544849
auuuccagguauggcugcc

SEQ ID NO: 544851 - RNA, 19 nt, Artificial Sequence
  Description of Artificial Sequence: Synthetic oligonucleotide
  Sense strand starting at position 1147 of SEQ ID NO: 318205
gcagccauaccuggaaauu

SEQ ID NO: 544852 - RNA, 19 nt, Artificial Sequence
  Description of Artificial Sequence: Synthetic oligonucleotide
  Antisense strand to SEQ ID NO: 544851
aauuuccagguauggcugc

SEQ ID NO: 544853 - RNA, 19 nt, Artificial Sequence
  Description of Artificial Sequence: Synthetic oligonucleotide
  Sense strand starting at position 1184 of SEQ ID NO: 318205
ggacucuucuaguauuuaa

SEQ ID NO: 544854 - RNA, 19 nt, Artificial Sequence
  Description of Artificial Sequence: Synthetic oligonucleotide
  Antisense strand to SEQ ID NO: 544853
uuaaauacuagaagagucc

SEQ ID NO: 544855 - RNA, 19 nt, Artificial Sequence
  Description of Artificial Sequence: Synthetic oligonucleotide
  Sense strand starting at position 1287 of SEQ ID NO: 318205
aggcuuccagucuauuauu

SEQ ID NO: 544856 - RNA, 19 nt, Artificial Sequence
  Description of Artificial Sequence: Synthetic oligonucleotide
  Antisense strand to SEQ ID NO: 544855
aauaauagacuggaagccu

SEQ ID NO: 544857 - RNA, 19 nt, Artificial Sequence
  Description of Artificial Sequence: Synthetic oligonucleotide
  Sense strand starting at position 1353 of SEQ ID NO: 318205
ucauaaauccuuugaggug

SEQ ID NO: 544858 - RNA, 19 nt, Artificial Sequence
  Description of Artificial Sequence: Synthetic oligonucleotide
  Antisense strand to SEQ ID NO: 544857
caccucaaaggauuuauga

SEQ ID NO: 544859 - RNA, 19 nt, Artificial Sequence
  Description of Artificial Sequence: Synthetic oligonucleotide
  Sense strand starting at position 1454 of SEQ ID NO: 318205
uuggcuucucaggaucuga

SEQ ID NO: 544860 - RNA, 19 nt, Artificial Sequence
  Description of Artificial Sequence: Synthetic oligonucleotide
  Antisense strand to SEQ ID NO: 544859
ucagauccugagaagccaa

SEQ ID NO: 544861 - RNA, 19 nt, Artificial Sequence
  Description of Artificial Sequence: Synthetic oligonucleotide
  Sense strand starting at position 1467 of SEQ ID NO: 318205
aucugaugaugcuuaccua

SEQ ID NO: 544862 - RNA, 19 nt, Artificial Sequence
  Description of Artificial Sequence: Synthetic oligonucleotide
  Antisense strand to SEQ ID NO: 544861
uagguaagcaucaucagau

SEQ ID NO: 544863 - RNA, 19 nt, Artificial Sequence
  Description of Artificial Sequence: Synthetic oligonucleotide
  Sense strand starting at position 1468 of SEQ ID NO: 318205
ucugaugaugcuuaccuau

SEQ ID NO: 544864 - RNA, 19 nt, Artificial Sequence
  Description of Artificial Sequence: Synthetic oligonucleotide
  Antisense strand to SEQ ID NO: 544863
auagguaagcaucaucaga

SEQ ID NO: 544865 - RNA, 19 nt, Artificial Sequence
  Description of Artificial Sequence: Synthetic oligonucleotide
  Sense strand starting at position 1471 of SEQ ID NO: 318205
gaugaugcuuaccuaugga

SEQ ID NO: 544866 - RNA, 19 nt, Artificial Sequence
  Description of Artificial Sequence: Synthetic oligonucleotide
  Antisense strand to SEQ ID NO: 544865
uccauagguaagcaucauc

SEQ ID NO: 544867 - RNA, 19 nt, Artificial Sequence
  Description of Artificial Sequence: Synthetic oligonucleotide
  Sense strand starting at position 1474 of SEQ ID NO: 318205
gaugcuuaccuauggauuc

SEQ ID NO: 544868 - RNA, 19 nt, Artificial Sequence
  Description of Artificial Sequence: Synthetic oligonucleotide
  Antisense strand to SEQ ID NO: 544867
gaauccauagguaagcauc

SEQ ID NO: 544869 - RNA, 19 nt, Artificial Sequence
  Description of Artificial Sequence: Synthetic oligonucleotide
  Sense strand starting at position 1481 of SEQ ID NO: 318205
accuauggauuccucugua

SEQ ID NO: 544870 - RNA, 19 nt, Artificial Sequence
  Description of Artificial Sequence: Synthetic oligonucleotide
  Antisense strand to SEQ ID NO: 544869
uacagaggaauccauaggu

SEQ ID NO: 544871 - RNA, 19 nt, Artificial Sequence
  Description of Artificial Sequence: Synthetic oligonucleotide
  Sense strand starting at position 1485 of SEQ ID NO: 318205
auggauuccucuguacuaa

SEQ ID NO: 544872 - RNA, 19 nt, Artificial Sequence
  Description of Artificial Sequence: Synthetic oligonucleotide
  Antisense strand to SEQ ID NO: 544871
uuaguacagaggaauccau

SEQ ID NO: 544873 - RNA, 19 nt, Artificial Sequence
  Description of Artificial Sequence: Synthetic oligonucleotide
  Sense strand starting at position 1486 of SEQ ID NO: 318205
uggauuccucuguacuaag

SEQ ID NO: 544874 - RNA, 19 nt, Artificial Sequence
  Description of Artificial Sequence: Synthetic oligonucleotide
  Antisense strand to SEQ ID NO: 544873
cuuaguacagaggaaucca

SEQ ID NO: 544875 - RNA, 19 nt, Artificial Sequence
  Description of Artificial Sequence: Synthetic oligonucleotide
  Sense strand starting at position 1644 of SEQ ID NO: 318205
uccacuugauuggcacaau

SEQ ID NO: 544876 - RNA, 19 nt, Artificial Sequence
  Description of Artificial Sequence: Synthetic oligonucleotide
  Antisense strand to SEQ ID NO: 544875
auugugccaaucaagugga

SEQ ID NO: 544877 - RNA, 19 nt, Artificial Sequence
  Description of Artificial Sequence: Synthetic oligonucleotide
  Sense strand starting at position 1647 of SEQ ID NO: 318205
acuugauuggcacaauggu

SEQ ID NO: 544878 - RNA, 19 nt, Artificial Sequence
  Description of Artificial Sequence: Synthetic oligonucleotide
  Antisense strand to SEQ ID NO: 544877
accauugugccaaucaagu

SEQ ID NO: 544879 - RNA, 19 nt, Artificial Sequence
  Description of Artificial Sequence: Synthetic oligonucleotide
  Sense strand starting at position 1796 of SEQ ID NO: 318205
accagaguauuugggaaag

SEQ ID NO: 544880 - RNA, 19 nt, Artificial Sequence
  Description of Artificial Sequence: Synthetic oligonucleotide
  Antisense strand to SEQ ID NO: 544879
cuuucccaaauacucuggu

SEQ ID NO: 544881 - RNA, 19 nt, Artificial Sequence
  Description of Artificial Sequence: Synthetic oligonucleotide
  Sense strand starting at position 1798 of SEQ ID NO: 318205
cagaguauuugggaaagaa

SEQ ID NO: 544882 - RNA, 19 nt, Artificial Sequence
  Description of Artificial Sequence: Synthetic oligonucleotide
  Antisense strand to SEQ ID NO: 544881
uucuuucccaaauacucug

SEQ ID NO: 544883 - RNA, 19 nt, Artificial Sequence
  Description of Artificial Sequence: Synthetic oligonucleotide
  Sense strand starting at position 1875 of SEQ ID NO: 318205
acuugaguccauugaucac

SEQ ID NO: 544884 - RNA, 19 nt, Artificial Sequence
  Description of Artificial Sequence: Synthetic oligonucleotide
  Antisense strand to SEQ ID NO: 544883
gugaucaauggacucaagu

SEQ ID NO: 544885 - RNA, 19 nt, Artificial Sequence
  Description of Artificial Sequence: Synthetic oligonucleotide
  Sense strand starting at position 1878 of SEQ ID NO: 318205
ugaguccauugaucacaaa

SEQ ID NO: 544886 - RNA, 19 nt, Artificial Sequence
  Description of Artificial Sequence: Synthetic oligonucleotide
  Antisense strand to SEQ ID NO: 544885
uuugugaucaauggacuca

SEQ ID NO: 544887 - RNA, 19 nt, Artificial Sequence
  Description of Artificial Sequence: Synthetic oligonucleotide
  Sense strand starting at position 2222 of SEQ ID NO: 318205
acuuaucuagcaugaauug

SEQ ID NO: 544888 - RNA, 19 nt, Artificial Sequence
  Description of Artificial Sequence: Synthetic oligonucleotide
  Antisense strand to SEQ ID NO: 544887
caauucaugcuagauaagu

SEQ ID NO: 544889 - RNA, 19 nt, Artificial Sequence
  Description of Artificial Sequence: Synthetic oligonucleotide
  Sense strand starting at position 2223 of SEQ ID NO: 318205
cuuaucuagcaugaauuga

SEQ ID NO: 544890 - RNA, 19 nt, Artificial Sequence
  Description of Artificial Sequence: Synthetic oligonucleotide
  Antisense strand to SEQ ID NO: 544889
ucaauucaugcuagauaag

SEQ ID NO: 544891 - RNA, 19 nt, Artificial Sequence
  Description of Artificial Sequence: Synthetic oligonucleotide
  Sense strand starting at position 2255 of SEQ ID NO: 318205
acuauaaaucuaugugaug

SEQ ID NO: 544892 - RNA, 19 nt, Artificial Sequence
  Description of Artificial Sequence: Synthetic oligonucleotide
  Antisense strand to SEQ ID NO: 544891
caucacauagauuuauagu

SEQ ID NO: 544893 - RNA, 19 nt, Artificial Sequence
  Description of Artificial Sequence: Synthetic oligonucleotide
  Sense strand starting at position 2256 of SEQ ID NO: 318205
cuauaaaucuaugugauga

SEQ ID NO: 544894 - RNA, 19 nt, Artificial Sequence
  Description of Artificial Sequence: Synthetic oligonucleotide
  Antisense strand to SEQ ID NO: 544893
ucaucacauagauuuauag

SEQ ID NO: 544895 - RNA, 19 nt, Artificial Sequence
  Description of Artificial Sequence: Synthetic oligonucleotide
  Sense strand starting at position 2291 of SEQ ID NO: 318205
uccagacucuaugugaaua

SEQ ID NO: 544896 - RNA, 19 nt, Artificial Sequence
  Description of Artificial Sequence: Synthetic oligonucleotide
  Antisense strand to SEQ ID NO: 544895
uauucacauagagucugga

SEQ ID NO: 544897 - RNA, 19 nt, Artificial Sequence
  Description of Artificial Sequence: Synthetic oligonucleotide
  Sense strand starting at position 2345 of SEQ ID NO: 318205
agucuauagggcuaaaugu

SEQ ID NO: 544898 - RNA, 19 nt, Artificial Sequence
  Description of Artificial Sequence: Synthetic oligonucleotide
  Antisense strand to SEQ ID NO: 544897
acauuuagcccuauagacu

SEQ ID NO: 544899 - RNA, 19 nt, Artificial Sequence
  Description of Artificial Sequence: Synthetic oligonucleotide
  Sense strand starting at position 2436 of SEQ ID NO: 318205
ggugaagcuuauuccagau

SEQ ID NO: 544900 - RNA, 19 nt, Artificial Sequence
  Description of Artificial Sequence: Synthetic oligonucleotide
  Antisense strand to SEQ ID NO: 544899
aucuggaauaagcuucacc

SEQ ID NO: 544901 - RNA, 19 nt, Artificial Sequence
  Description of Artificial Sequence: Synthetic oligonucleotide
  Sense strand starting at position 2590 of SEQ ID NO: 318205
acuuuaucaugggauuuac

SEQ ID NO: 544902 - RNA, 19 nt, Artificial Sequence
  Description of Artificial Sequence: Synthetic oligonucleotide
  Antisense strand to SEQ ID NO: 544901
guaaaucccaugauaaagu

SEQ ID NO: 544903 - RNA, 19 nt, Artificial Sequence
  Description of Artificial Sequence: Synthetic oligonucleotide
  Sense strand starting at position 2768 of SEQ ID NO: 318205
auuaguggaucaguaaaua

SEQ ID NO: 544904 - RNA, 19 nt, Artificial Sequence
  Description of Artificial Sequence: Synthetic oligonucleotide
  Antisense strand to SEQ ID NO: 544903
uauuuacugauccacuaau

SEQ ID NO: 544905 - RNA, 19 nt, Artificial Sequence
  Description of Artificial Sequence: Synthetic oligonucleotide
  Sense strand starting at position 2868 of SEQ ID NO: 318205
uugguuagucagggaggua

SEQ ID NO: 544906 - RNA, 19 nt, Artificial Sequence
  Description of Artificial Sequence: Synthetic oligonucleotide
  Antisense strand to SEQ ID NO: 544905
uaccucccugacuaaccaa

SEQ ID NO: 544907 - RNA, 19 nt, Artificial Sequence
  Description of Artificial Sequence: Synthetic oligonucleotide
  Sense strand starting at position 2925 of SEQ ID NO: 318205
auaagauguuaagucuacu

SEQ ID NO: 544908 - RNA, 19 nt, Artificial Sequence
  Description of Artificial Sequence: Synthetic oligonucleotide
  Antisense strand to SEQ ID NO: 544907
aguagacuuaacaucuuau

SEQ ID NO: 544909 - RNA, 19 nt, Artificial Sequence
  Description of Artificial Sequence: Synthetic oligonucleotide
  Sense strand starting at position 2992 of SEQ ID NO: 318205
gaaauuaugugcucuuaga

SEQ ID NO: 544910 - RNA, 19 nt, Artificial Sequence
  Description of Artificial Sequence: Synthetic oligonucleotide
  Antisense strand to SEQ ID NO: 544909
ucuaagagcacauaauuuc

SEQ ID NO: 544911 - RNA, 19 nt, Artificial Sequence
  Description of Artificial Sequence: Synthetic oligonucleotide
  Sense strand starting at position 3118 of SEQ ID NO: 318205
ucuguaugucuguauauaa

SEQ ID NO: 544912 - RNA, 19 nt, Artificial Sequence
  Description of Artificial Sequence: Synthetic oligonucleotide
  Antisense strand to SEQ ID NO: 544911
uuauauacagacauacaga

SEQ ID NO: 544913 - RNA, 19 nt, Artificial Sequence
  Description of Artificial Sequence: Synthetic oligonucleotide
  Sense strand starting at position 3274 of SEQ ID NO: 318205
accaauacugcagauaguu

SEQ ID NO: 544914 - RNA, 19 nt, Artificial Sequence
  Description of Artificial Sequence: Synthetic oligonucleotide
  Antisense strand to SEQ ID NO: 544913
aacuaucugcaguauuggu

SEQ ID NO: 544915 - RNA, 19 nt, Artificial Sequence
  Description of Artificial Sequence: Synthetic oligonucleotide
  Sense strand starting at position 3543 of SEQ ID NO: 318205
aaggaauuagagugucuca

SEQ ID NO: 544916 - RNA, 19 nt, Artificial Sequence
  Description of Artificial Sequence: Synthetic oligonucleotide
  Antisense strand to SEQ ID NO: 544915
ugagacacucuaauuccuu

SEQ ID NO: 544917 - RNA, 19 nt, Artificial Sequence
  Description of Artificial Sequence: Synthetic oligonucleotide
  Sense strand starting at position 3546 of SEQ ID NO: 318205
gaauuagagugucucacug

SEQ ID NO: 544918 - RNA, 19 nt, Artificial Sequence
  Description of Artificial Sequence: Synthetic oligonucleotide
  Antisense strand to SEQ ID NO: 544917
cagugagacacucuaauuc

SEQ ID NO: 544919 - RNA, 19 nt, Artificial Sequence
  Description of Artificial Sequence: Synthetic oligonucleotide
  Sense strand starting at position 3550 of SEQ ID NO: 318205
uagagugucucacuggaua

SEQ ID NO: 544920 - RNA, 19 nt, Artificial Sequence
  Description of Artificial Sequence: Synthetic oligonucleotide
  Antisense strand to SEQ ID NO: 544919
uauccagugagacacucua

SEQ ID NO: 544921 - RNA, 19 nt, Artificial Sequence
  Description of Artificial Sequence: Synthetic oligonucleotide
  Sense strand starting at position 3552 of SEQ ID NO: 318205
gagugucucacuggauaug

SEQ ID NO: 544922 - RNA, 19 nt, Artificial Sequence
  Description of Artificial Sequence: Synthetic oligonucleotide
  Antisense strand to SEQ ID NO: 544921
cauauccagugagacacuc

SEQ ID NO: 544923 - RNA, 19 nt, Artificial Sequence
  Description of Artificial Sequence: Synthetic oligonucleotide
  Sense strand starting at position 3663 of SEQ ID NO: 318205
uuaauaaggcaguaaaggu

SEQ ID NO: 544924 - RNA, 19 nt, Artificial Sequence
  Description of Artificial Sequence: Synthetic oligonucleotide
  Antisense strand to SEQ ID NO: 544923
accuuuacugccuuauuaa

SEQ ID NO: 544925 - RNA, 19 nt, Artificial Sequence
  Description of Artificial Sequence: Synthetic oligonucleotide
  Sense strand starting at position 89 of SEQ ID NO: 318206
ugcaaauagccuuagagau

SEQ ID NO: 544926 - RNA, 19 nt, Artificial Sequence
  Description of Artificial Sequence: Synthetic oligonucleotide
  Antisense strand to SEQ ID NO: 544925
aucucuaaggcuauuugca

SEQ ID NO: 544927 - RNA, 19 nt, Artificial Sequence
  Description of Artificial Sequence: Synthetic oligonucleotide
  Sense strand starting at position 99 of SEQ ID NO: 318206
cuuagagauuaucuagcaa

SEQ ID NO: 544928 - RNA, 19 nt, Artificial Sequence
  Description of Artificial Sequence: Synthetic oligonucleotide
  Antisense strand to SEQ ID NO: 544927
uugcuagauaaucucuaag

SEQ ID NO: 544929 - RNA, 19 nt, Artificial Sequence
  Description of Artificial Sequence: Synthetic oligonucleotide
  Sense strand starting at position 159 of SEQ ID NO: 318206
aggcaaacugcuuaaguuu

SEQ ID NO: 544930 - RNA, 19 nt, Artificial Sequence
  Description of Artificial Sequence: Synthetic oligonucleotide
  Antisense strand to SEQ ID NO: 544929
aaacuuaagcaguuugccu

SEQ ID NO: 544931 - RNA, 19 nt, Artificial Sequence
  Description of Artificial Sequence: Synthetic oligonucleotide
  Sense strand starting at position 249 of SEQ ID NO: 318206
agaccuuaugcuggaggua

SEQ ID NO: 544932 - RNA, 19 nt, Artificial Sequence
  Description of Artificial Sequence: Synthetic oligonucleotide
  Antisense strand to SEQ ID NO: 544931
uaccuccagcauaaggucu

SEQ ID NO: 544933 - RNA, 19 nt, Artificial Sequence
  Description of Artificial Sequence: Synthetic oligonucleotide
  Sense strand starting at position 443 of SEQ ID NO: 318206
guuugaauaauggguagga

SEQ ID NO: 544934 - RNA, 19 nt, Artificial Sequence
  Description of Artificial Sequence: Synthetic oligonucleotide
  Antisense strand to SEQ ID NO: 544933
uccuacccauuauucaaac

SEQ ID NO: 544935 - RNA, 19 nt, Artificial Sequence
  Description of Artificial Sequence: Synthetic oligonucleotide
  Sense strand starting at position 463 of SEQ ID NO: 318206
ugcuguuauagacaagaug

SEQ ID NO: 544936 - RNA, 19 nt, Artificial Sequence
  Description of Artificial Sequence: Synthetic oligonucleotide
  Antisense strand to SEQ ID NO: 544935
caucuugucuauaacagca

SEQ ID NO: 544937 - RNA, 19 nt, Artificial Sequence
  Description of Artificial Sequence: Synthetic oligonucleotide
  Sense strand starting at position 540 of SEQ ID NO: 318206
uaaguaaaucagcaugguu

SEQ ID NO: 544938 - RNA, 19 nt, Artificial Sequence
  Description of Artificial Sequence: Synthetic oligonucleotide
  Antisense strand to SEQ ID NO: 544937
aaccaugcugauuuacuua

SEQ ID NO: 544939 - RNA, 19 nt, Artificial Sequence
  Description of Artificial Sequence: Synthetic oligonucleotide
  Sense strand starting at position 694 of SEQ ID NO: 318206
ggaacucaguaauaauuua

SEQ ID NO: 544940 - RNA, 19 nt, Artificial Sequence
  Description of Artificial Sequence: Synthetic oligonucleotide
  Antisense strand to SEQ ID NO: 544939
uaaauuauuacugaguucc

SEQ ID NO: 544941 - RNA, 19 nt, Artificial Sequence
  Description of Artificial Sequence: Synthetic oligonucleotide
  Sense strand starting at position 1103 of SEQ ID NO: 318206
cugcaaagccuaugaacua

SEQ ID NO: 544942 - RNA, 19 nt, Artificial Sequence
  Description of Artificial Sequence: Synthetic oligonucleotide
  Antisense strand to SEQ ID NO: 544941
uaguucauaggcuuugcag

SEQ ID NO: 544943 - RNA, 19 nt, Artificial Sequence
  Description of Artificial Sequence: Synthetic oligonucleotide
  Sense strand starting at position 1262 of SEQ ID NO: 318206
uacagaaugcucugguaua

SEQ ID NO: 544944 - RNA, 19 nt, Artificial Sequence
  Description of Artificial Sequence: Synthetic oligonucleotide
  Antisense strand to SEQ ID NO: 544943
uauaccagagcauucugua

SEQ ID NO: 544945 - RNA, 19 nt, Artificial Sequence
  Description of Artificial Sequence: Synthetic oligonucleotide
  Sense strand starting at position 1374 of SEQ ID NO: 318206
aaccuacucguagaauguu

SEQ ID NO: 544946 - RNA, 19 nt, Artificial Sequence
  Description of Artificial Sequence: Synthetic oligonucleotide
  Antisense strand to SEQ ID NO: 544945
aacauucuacgaguagguu

SEQ ID NO: 544947 - RNA, 19 nt, Artificial Sequence
  Description of Artificial Sequence: Synthetic oligonucleotide
  Sense strand starting at position 1388 of SEQ ID NO: 318206
auguuaugagagugaguua

SEQ ID NO: 544948 - RNA, 19 nt, Artificial Sequence
  Description of Artificial Sequence: Synthetic oligonucleotide
  Antisense strand to SEQ ID NO: 544947
uaacucacucucauaacau

SEQ ID NO: 544949 - RNA, 19 nt, Artificial Sequence
  Description of Artificial Sequence: Synthetic oligonucleotide
  Sense strand starting at position 1389 of SEQ ID NO: 318206
uguuaugagagugaguuaa

SEQ ID NO: 544950 - RNA, 19 nt, Artificial Sequence
  Description of Artificial Sequence: Synthetic oligonucleotide
  Antisense strand to SEQ ID NO: 544949
uuaacucacucucauaaca

SEQ ID NO: 544951 - RNA, 19 nt, Artificial Sequence
  Description of Artificial Sequence: Synthetic oligonucleotide
  Sense strand starting at position 1391 of SEQ ID NO: 318206
uuaugagagugaguuaaag

SEQ ID NO: 544952 - RNA, 19 nt, Artificial Sequence
  Description of Artificial Sequence: Synthetic oligonucleotide
  Antisense strand to SEQ ID NO: 544951
cuuuaacucacucucauaa

SEQ ID NO: 544953 - RNA, 19 nt, Artificial Sequence
  Description of Artificial Sequence: Synthetic oligonucleotide
  Sense strand starting at position 1446 of SEQ ID NO: 318206
aaagcagaguuguccacaa

SEQ ID NO: 544954 - RNA, 19 nt, Artificial Sequence
  Description of Artificial Sequence: Synthetic oligonucleotide
  Antisense strand to SEQ ID NO: 544953
uuguggacaacucugcuuu

SEQ ID NO: 544955 - RNA, 19 nt, Artificial Sequence
  Description of Artificial Sequence: Synthetic oligonucleotide
  Sense strand starting at position 1448 of SEQ ID NO: 318206
agcagaguuguccacaaca

SEQ ID NO: 544956 - RNA, 19 nt, Artificial Sequence
  Description of Artificial Sequence: Synthetic oligonucleotide
  Antisense strand to SEQ ID NO: 544955
uguuguggacaacucugcu

SEQ ID NO: 544957 - RNA, 19 nt, Artificial Sequence
  Description of Artificial Sequence: Synthetic oligonucleotide
  Sense strand starting at position 1481 of SEQ ID NO: 318206
guaagcaaguaaucagaga

SEQ ID NO: 544958 - RNA, 19 nt, Artificial Sequence
  Description of Artificial Sequence: Synthetic oligonucleotide
  Antisense strand to SEQ ID NO: 544957
ucucugauuacuugcuuac

SEQ ID NO: 544959 - RNA, 19 nt, Artificial Sequence
  Description of Artificial Sequence: Synthetic oligonucleotide
  Sense strand starting at position 1488 of SEQ ID NO: 318206
aguaaucagagagguaacu

SEQ ID NO: 544960 - RNA, 19 nt, Artificial Sequence
  Description of Artificial Sequence: Synthetic oligonucleotide
  Antisense strand to SEQ ID NO: 544959
aguuaccucucugauuacu

SEQ ID NO: 544961 - RNA, 19 nt, Artificial Sequence
  Description of Artificial Sequence: Synthetic oligonucleotide
  Sense strand starting at position 1536 of SEQ ID NO: 318206
ggaauagucuaaccuuguc

SEQ ID NO: 544962 - RNA, 19 nt, Artificial Sequence
  Description of Artificial Sequence: Synthetic oligonucleotide
  Antisense strand to SEQ ID NO: 544961
gacaagguuagacuauucc

SEQ ID NO: 544963 - RNA, 19 nt, Artificial Sequence
  Description of Artificial Sequence: Synthetic oligonucleotide
  Sense strand starting at position 1541 of SEQ ID NO: 318206
agucuaaccuuguccagaa

SEQ ID NO: 544964 - RNA, 19 nt, Artificial Sequence
  Description of Artificial Sequence: Synthetic oligonucleotide
  Antisense strand to SEQ ID NO: 544963
uucuggacaagguuagacu

SEQ ID NO: 544965 - RNA, 19 nt, Artificial Sequence
  Description of Artificial Sequence: Synthetic oligonucleotide
  Sense strand starting at position 1542 of SEQ ID NO: 318206
gucuaaccuuguccagaaa

SEQ ID NO: 544966 - RNA, 19 nt, Artificial Sequence
  Description of Artificial Sequence: Synthetic oligonucleotide
  Antisense strand to SEQ ID NO: 544965
uuucuggacaagguuagac

SEQ ID NO: 544967 - RNA, 19 nt, Artificial Sequence
  Description of Artificial Sequence: Synthetic oligonucleotide
  Sense strand starting at position 1604 of SEQ ID NO: 318206
gguuauggguaauccugau

SEQ ID NO: 544968 - RNA, 19 nt, Artificial Sequence
  Description of Artificial Sequence: Synthetic oligonucleotide
  Antisense strand to SEQ ID NO: 544967
aucaggauuacccauaacc

SEQ ID NO: 544969 - RNA, 19 nt, Artificial Sequence
  Description of Artificial Sequence: Synthetic oligonucleotide
  Sense strand starting at position 1608 of SEQ ID NO: 318206
auggguaauccugaucccu

SEQ ID NO: 544970 - RNA, 19 nt, Artificial Sequence
  Description of Artificial Sequence: Synthetic oligonucleotide
  Antisense strand to SEQ ID NO: 544969
agggaucaggauuacccau

SEQ ID NO: 544971 - RNA, 19 nt, Artificial Sequence
  Description of Artificial Sequence: Synthetic oligonucleotide
  Sense strand starting at position 1616 of SEQ ID NO: 318206
uccugaucccuguacaguu

SEQ ID NO: 544972 - RNA, 19 nt, Artificial Sequence
  Description of Artificial Sequence: Synthetic oligonucleotide
  Antisense strand to SEQ ID NO: 544971
aacuguacagggaucagga

SEQ ID NO: 544973 - RNA, 19 nt, Artificial Sequence
  Description of Artificial Sequence: Synthetic oligonucleotide
  Sense strand starting at position 1910 of SEQ ID NO: 318206
ucgcuuaaccacuaagaaa

SEQ ID NO: 544974 - RNA, 19 nt, Artificial Sequence
  Description of Artificial Sequence: Synthetic oligonucleotide
  Antisense strand to SEQ ID NO: 544973
uuucuuagugguuaagcga

SEQ ID NO: 544975 - RNA, 19 nt, Artificial Sequence
  Description of Artificial Sequence: Synthetic oligonucleotide
  Sense strand starting at position 2021 of SEQ ID NO: 318206
ugcgcaauacucuggauuu

SEQ ID NO: 544976 - RNA, 19 nt, Artificial Sequence
  Description of Artificial Sequence: Synthetic oligonucleotide
  Antisense strand to SEQ ID NO: 544975
aaauccagaguauugcgca

SEQ ID NO: 544977 - RNA, 19 nt, Artificial Sequence
  Description of Artificial Sequence: Synthetic oligonucleotide
  Sense strand starting at position 2115 of SEQ ID NO: 318206
cgagguguggucaggcgaa

SEQ ID NO: 544978 - RNA, 19 nt, Artificial Sequence
  Description of Artificial Sequence: Synthetic oligonucleotide
  Antisense strand to SEQ ID NO: 544977
uucgccugaccacaccucg

SEQ ID NO: 544979 - RNA, 19 nt, Artificial Sequence
  Description of Artificial Sequence: Synthetic oligonucleotide
  Sense strand starting at position 2135 of SEQ ID NO: 318206
cuggcuugggaaugaauua

SEQ ID NO: 544980 - RNA, 19 nt, Artificial Sequence
  Description of Artificial Sequence: Synthetic oligonucleotide
  Antisense strand to SEQ ID NO: 544979
uaauucauucccaagccag

SEQ ID NO: 544981 - RNA, 19 nt, Artificial Sequence
  Description of Artificial Sequence: Synthetic oligonucleotide
  Sense strand starting at position 2245 of SEQ ID NO: 318206
ggaacagaauccgugaaca

SEQ ID NO: 544982 - RNA, 19 nt, Artificial Sequence
  Description of Artificial Sequence: Synthetic oligonucleotide
  Antisense strand to SEQ ID NO: 544981
uguucacggauucuguucc

SEQ ID NO: 544983 - RNA, 19 nt, Artificial Sequence
  Description of Artificial Sequence: Synthetic oligonucleotide
  Sense strand starting at position 2327 of SEQ ID NO: 318206
uguuguaaagaucaguuga

SEQ ID NO: 544984 - RNA, 19 nt, Artificial Sequence
  Description of Artificial Sequence: Synthetic oligonucleotide
  Antisense strand to SEQ ID NO: 544983
ucaacugaucuuuacaaca

SEQ ID NO: 544985 - RNA, 19 nt, Artificial Sequence
  Description of Artificial Sequence: Synthetic oligonucleotide
  Sense strand starting at position 2329 of SEQ ID NO: 318206
uuguaaagaucaguugaaa

SEQ ID NO: 544986 - RNA, 19 nt, Artificial Sequence
  Description of Artificial Sequence: Synthetic oligonucleotide
  Antisense strand to SEQ ID NO: 544985
uuucaacugaucuuuacaa

SEQ ID NO: 544987 - RNA, 19 nt, Artificial Sequence
  Description of Artificial Sequence: Synthetic oligonucleotide
  Sense strand starting at position 2713 of SEQ ID NO: 318206
cuacuaaucugguugaccu

SEQ ID NO: 544988 - RNA, 19 nt, Artificial Sequence
  Description of Artificial Sequence: Synthetic oligonucleotide
  Antisense strand to SEQ ID NO: 544987
aggucaaccagauuaguag

SEQ ID NO: 544989 - RNA, 19 nt, Artificial Sequence
  Description of Artificial Sequence: Synthetic oligonucleotide
  Sense strand starting at position 2769 of SEQ ID NO: 318206
uuaugucaggcagguauuu

SEQ ID NO: 544990 - RNA, 19 nt, Artificial Sequence
  Description of Artificial Sequence: Synthetic oligonucleotide
  Antisense strand to SEQ ID NO: 544989
aaauaccugccugacauaa

SEQ ID NO: 544991 - RNA, 19 nt, Artificial Sequence
  Description of Artificial Sequence: Synthetic oligonucleotide
  Sense strand starting at position 2818 of SEQ ID NO: 318206
ccaacaaggcauggauuau

SEQ ID NO: 544992 - RNA, 19 nt, Artificial Sequence
  Description of Artificial Sequence: Synthetic oligonucleotide
  Antisense strand to SEQ ID NO: 544991
auaauccaugccuuguugg

SEQ ID NO: 544993 - RNA, 19 nt, Artificial Sequence
  Description of Artificial Sequence: Synthetic oligonucleotide
  Sense strand starting at position 2874 of SEQ ID NO: 318206
auguuaaagucucucaacu

SEQ ID NO: 544994 - RNA, 19 nt, Artificial Sequence
  Description of Artificial Sequence: Synthetic oligonucleotide
  Antisense strand to SEQ ID NO: 544993
aguugagagacuuuaacau

SEQ ID NO: 544995 - RNA, 19 nt, Artificial Sequence
  Description of Artificial Sequence: Synthetic oligonucleotide
  Sense strand starting at position 2898 of SEQ ID NO: 318206
cuggcaaaccagugaucaa

SEQ ID NO: 544996 - RNA, 19 nt, Artificial Sequence
  Description of Artificial Sequence: Synthetic oligonucleotide
  Antisense strand to SEQ ID NO: 544995
uugaucacugguuugccag

SEQ ID NO: 544997 - RNA, 19 nt, Artificial Sequence
  Description of Artificial Sequence: Synthetic oligonucleotide
  Sense strand starting at position 2901 of SEQ ID NO: 318206
gcaaaccagugaucaaucu

SEQ ID NO: 544998 - RNA, 19 nt, Artificial Sequence
  Description of Artificial Sequence: Synthetic oligonucleotide
  Antisense strand to SEQ ID NO: 544997
agauugaucacugguuugc

SEQ ID NO: 544999 - RNA, 19 nt, Artificial Sequence
  Description of Artificial Sequence: Synthetic oligonucleotide
  Sense strand starting at position 3646 of SEQ ID NO: 318206
gaauucgucugauugauag

SEQ ID NO: 545000 - RNA, 19 nt, Artificial Sequence
  Description of Artificial Sequence: Synthetic oligonucleotide
  Antisense strand to SEQ ID NO: 544999
cuaucaaucagacgaauuc

SEQ ID NO: 545001 - RNA, 19 nt, Artificial Sequence
  Description of Artificial Sequence: Synthetic oligonucleotide
  Sense strand starting at position 3648 of SEQ ID NO: 318206
auucgucugauugauagca

SEQ ID NO: 545002 - RNA, 19 nt, Artificial Sequence
  Description of Artificial Sequence: Synthetic oligonucleotide
  Antisense strand to SEQ ID NO: 545001
ugcuaucaaucagacgaau

SEQ ID NO: 545003 - RNA, 19 nt, Artificial Sequence
  Description of Artificial Sequence: Synthetic oligonucleotide
  Sense strand starting at position 3846 of SEQ ID NO: 318206
cuucuuccggcugagagaa

SEQ ID NO: 545004 - RNA, 19 nt, Artificial Sequence
  Description of Artificial Sequence: Synthetic oligonucleotide
  Antisense strand to SEQ ID NO: 545003
uucucucagccggaagaag

SEQ ID NO: 545005 - RNA, 19 nt, Artificial Sequence
  Description of Artificial Sequence: Synthetic oligonucleotide
  Sense strand starting at position 70 of SEQ ID NO: 318207
gaaagagugcgguagaaau

SEQ ID NO: 545006 - RNA, 19 nt, Artificial Sequence
  Description of Artificial Sequence: Synthetic oligonucleotide
  Antisense strand to SEQ ID NO: 545005
auuucuaccgcacucuuuc

SEQ ID NO: 545007 - RNA, 19 nt, Artificial Sequence
  Description of Artificial Sequence: Synthetic oligonucleotide
  Sense strand starting at position 72 of SEQ ID NO: 318207
aagagugcgguagaaauga

SEQ ID NO: 545008 - RNA, 19 nt, Artificial Sequence
  Description of Artificial Sequence: Synthetic oligonucleotide
  Antisense strand to SEQ ID NO: 545007
ucauuucuaccgcacucuu

SEQ ID NO: 545009 - RNA, 19 nt, Artificial Sequence
  Description of Artificial Sequence: Synthetic oligonucleotide
  Sense strand starting at position 534 of SEQ ID NO: 318207
gaacuaagcuauucggaag

SEQ ID NO: 545010 - RNA, 19 nt, Artificial Sequence
  Description of Artificial Sequence: Synthetic oligonucleotide
  Antisense strand to SEQ ID NO: 545009
cuuccgaauagcuuaguuc

SEQ ID NO: 545011 - RNA, 19 nt, Artificial Sequence
  Description of Artificial Sequence: Synthetic oligonucleotide
  Sense strand starting at position 540 of SEQ ID NO: 318207
agcuauucggaaggucuau

SEQ ID NO: 545012 - RNA, 19 nt, Artificial Sequence
  Description of Artificial Sequence: Synthetic oligonucleotide
  Antisense strand to SEQ ID NO: 545011
auagaccuuccgaauagcu

SEQ ID NO: 545013 - RNA, 19 nt, Artificial Sequence
  Description of Artificial Sequence: Synthetic oligonucleotide
  Sense strand starting at position 605 of SEQ ID NO: 318207
aacgcaaugucuucuauag

SEQ ID NO: 545014 - RNA, 19 nt, Artificial Sequence
  Description of Artificial Sequence: Synthetic oligonucleotide
  Antisense strand to SEQ ID NO: 545013
cuauagaagacauugcguu

SEQ ID NO: 545015 - RNA, 19 nt, Artificial Sequence
  Description of Artificial Sequence: Synthetic oligonucleotide
  Sense strand starting at position 612 of SEQ ID NO: 318207
ugucuucuauaguuacuca

SEQ ID NO: 545016 - RNA, 19 nt, Artificial Sequence
  Description of Artificial Sequence: Synthetic oligonucleotide
  Antisense strand to SEQ ID NO: 545015
ugaguaacuauagaagaca

SEQ ID NO: 545017 - RNA, 19 nt, Artificial Sequence
  Description of Artificial Sequence: Synthetic oligonucleotide
  Sense strand starting at position 640 of SEQ ID NO: 318207
aaacgugauggguaacuuu

SEQ ID NO: 545018 - RNA, 19 nt, Artificial Sequence
  Description of Artificial Sequence: Synthetic oligonucleotide
  Antisense strand to SEQ ID NO: 545017
aaaguuacccaucacguuu

SEQ ID NO: 545019 - RNA, 19 nt, Artificial Sequence
  Description of Artificial Sequence: Synthetic oligonucleotide
  Sense strand starting at position 661 of SEQ ID NO: 318207
gggcguuugcuuccaguca

SEQ ID NO: 545020 - RNA, 19 nt, Artificial Sequence
  Description of Artificial Sequence: Synthetic oligonucleotide
  Antisense strand to SEQ ID NO: 545019
ugacuggaagcaaacgccc

SEQ ID NO: 545021 - RNA, 19 nt, Artificial Sequence
  Description of Artificial Sequence: Synthetic oligonucleotide
  Sense strand starting at position 685 of SEQ ID NO: 318207
cccugacuccuugauguga

SEQ ID NO: 545022 - RNA, 19 nt, Artificial Sequence
  Description of Artificial Sequence: Synthetic oligonucleotide
  Antisense strand to SEQ ID NO: 545021
ucacaucaaggagucaggg

SEQ ID NO: 545023 - RNA, 19 nt, Artificial Sequence
  Description of Artificial Sequence: Synthetic oligonucleotide
  Sense strand starting at position 736 of SEQ ID NO: 318207
aagugaugcgaugacgagu

SEQ ID NO: 545024 - RNA, 19 nt, Artificial Sequence
  Description of Artificial Sequence: Synthetic oligonucleotide
  Antisense strand to SEQ ID NO: 545023
acucgucaucgcaucacuu

SEQ ID NO: 545025 - RNA, 19 nt, Artificial Sequence
  Description of Artificial Sequence: Synthetic oligonucleotide
  Sense strand starting at position 759 of SEQ ID NO: 318207
gcgugacucuggagggaaa

SEQ ID NO: 545026 - RNA, 19 nt, Artificial Sequence
  Description of Artificial Sequence: Synthetic oligonucleotide
  Antisense strand to SEQ ID NO: 545025
uuucccuccagagucacgc

SEQ ID NO: 545027 - RNA, 19 nt, Artificial Sequence
  Description of Artificial Sequence: Synthetic oligonucleotide
  Sense strand starting at position 1033 of SEQ ID NO: 318207
ccgugugacgacugagaua

SEQ ID NO: 545028 - RNA, 19 nt, Artificial Sequence
  Description of Artificial Sequence: Synthetic oligonucleotide
  Antisense strand to SEQ ID NO: 545027
uaucucagucgucacacgg

SEQ ID NO: 545029 - RNA, 19 nt, Artificial Sequence
  Description of Artificial Sequence: Synthetic oligonucleotide
  Sense strand starting at position 1090 of SEQ ID NO: 318207
ccauguuguggugaaucua

SEQ ID NO: 545030 - RNA, 19 nt, Artificial Sequence
  Description of Artificial Sequence: Synthetic oligonucleotide
  Antisense strand to SEQ ID NO: 545029
uagauucaccacaacaugg

SEQ ID NO: 545031 - RNA, 19 nt, Artificial Sequence
  Description of Artificial Sequence: Synthetic oligonucleotide
  Sense strand starting at position 1215 of SEQ ID NO: 318207
gacugaggguguucccaua

SEQ ID NO: 545032 - RNA, 19 nt, Artificial Sequence
  Description of Artificial Sequence: Synthetic oligonucleotide
  Antisense strand to SEQ ID NO: 545031
uaugggaacacccucaguc

SEQ ID NO: 545033 - RNA, 19 nt, Artificial Sequence
  Description of Artificial Sequence: Synthetic oligonucleotide
  Sense strand starting at position 1264 of SEQ ID NO: 318207
cugccuuaaucagccaagu

SEQ ID NO: 545034 - RNA, 19 nt, Artificial Sequence
  Description of Artificial Sequence: Synthetic oligonucleotide
  Antisense strand to SEQ ID NO: 545033
acuuggcugauuaaggcag

SEQ ID NO: 545035 - RNA, 19 nt, Artificial Sequence
  Description of Artificial Sequence: Synthetic oligonucleotide
  Sense strand starting at position 1277 of SEQ ID NO: 318207
ccaagugugccaggagaau

SEQ ID NO: 545036 - RNA, 19 nt, Artificial Sequence
  Description of Artificial Sequence: Synthetic oligonucleotide
  Antisense strand to SEQ ID NO: 545035
auucuccuggcacacuugg

SEQ ID NO: 545037 - RNA, 19 nt, Artificial Sequence
  Description of Artificial Sequence: Synthetic oligonucleotide
  Sense strand starting at position 2106 of SEQ ID NO: 318207
uggagugcgacguaucacu

SEQ ID NO: 545038 - RNA, 19 nt, Artificial Sequence
  Description of Artificial Sequence: Synthetic oligonucleotide
  Antisense strand to SEQ ID NO: 545037
agugauacgucgcacucca

SEQ ID NO: 545039 - RNA, 19 nt, Artificial Sequence
  Description of Artificial Sequence: Synthetic oligonucleotide
  Sense strand starting at position 2213 of SEQ ID NO: 318207
aauggauauccgcaacgaa

SEQ ID NO: 545040 - RNA, 19 nt, Artificial Sequence
  Description of Artificial Sequence: Synthetic oligonucleotide
  Antisense strand to SEQ ID NO: 545039
uucguugcggauauccauu

SEQ ID NO: 545041 - RNA, 19 nt, Artificial Sequence
  Description of Artificial Sequence: Synthetic oligonucleotide
  Sense strand starting at position 2268 of SEQ ID NO: 318207
ggcaaauaccaaugucaaa

SEQ ID NO: 545042 - RNA, 19 nt, Artificial Sequence
  Description of Artificial Sequence: Synthetic oligonucleotide
  Antisense strand to SEQ ID NO: 545041
uuugacauugguauuugcc

SEQ ID NO: 545043 - RNA, 19 nt, Artificial Sequence
  Description of Artificial Sequence: Synthetic oligonucleotide
  Sense strand starting at position 2432 of SEQ ID NO: 318207
gaaagaacuguacggugaa

SEQ ID NO: 545044 - RNA, 19 nt, Artificial Sequence
  Description of Artificial Sequence: Synthetic oligonucleotide
  Antisense strand to SEQ ID NO: 545043
uucaccguacaguucuuuc

SEQ ID NO: 545045 - RNA, 19 nt, Artificial Sequence
  Description of Artificial Sequence: Synthetic oligonucleotide
  Sense strand starting at position 2505 of SEQ ID NO: 318207
ucagguaucuacccguaac

SEQ ID NO: 545046 - RNA, 19 nt, Artificial Sequence
  Description of Artificial Sequence: Synthetic oligonucleotide
  Antisense strand to SEQ ID NO: 545045
guuacggguagauaccuga

SEQ ID NO: 545047 - RNA, 19 nt, Artificial Sequence
  Description of Artificial Sequence: Synthetic oligonucleotide
  Sense strand starting at position 2666 of SEQ ID NO: 318207
guuuaucagcuccaggaca

SEQ ID NO: 545048 - RNA, 19 nt, Artificial Sequence
  Description of Artificial Sequence: Synthetic oligonucleotide
  Antisense strand to SEQ ID NO: 545047
uguccuggagcugauaaac

SEQ ID NO: 545049 - RNA, 19 nt, Artificial Sequence
  Description of Artificial Sequence: Synthetic oligonucleotide
  Sense strand starting at position 2668 of SEQ ID NO: 318207
uuaucagcuccaggacaaa

SEQ ID NO: 545050 - RNA, 19 nt, Artificial Sequence
  Description of Artificial Sequence: Synthetic oligonucleotide
  Antisense strand to SEQ ID NO: 545049
uuuguccuggagcugauaa

SEQ ID NO: 545051 - RNA, 19 nt, Artificial Sequence
  Description of Artificial Sequence: Synthetic oligonucleotide
  Sense strand starting at position 2680 of SEQ ID NO: 318207
ggacaaaucugccucugac

SEQ ID NO: 545052 - RNA, 19 nt, Artificial Sequence
  Description of Artificial Sequence: Synthetic oligonucleotide
  Antisense strand to SEQ ID NO: 545051
gucagaggcagauuugucc

SEQ ID NO: 545053 - RNA, 19 nt, Artificial Sequence
  Description of Artificial Sequence: Synthetic oligonucleotide
  Sense strand starting at position 2701 of SEQ ID NO: 318207
ccacguuugcugggacauc

SEQ ID NO: 545054 - RNA, 19 nt, Artificial Sequence
  Description of Artificial Sequence: Synthetic oligonucleotide
  Antisense strand to SEQ ID NO: 545053
gaugucccagcaaacgugg

SEQ ID NO: 545055 - RNA, 19 nt, Artificial Sequence
  Description of Artificial Sequence: Synthetic oligonucleotide
  Sense strand starting at position 2873 of SEQ ID NO: 318207
agcuuaagcugggauuuau

SEQ ID NO: 545056 - RNA, 19 nt, Artificial Sequence
  Description of Artificial Sequence: Synthetic oligonucleotide
  Antisense strand to SEQ ID NO: 545055
auaaaucccagcuuaagcu

SEQ ID NO: 545057 - RNA, 19 nt, Artificial Sequence
  Description of Artificial Sequence: Synthetic oligonucleotide
  Sense strand starting at position 2930 of SEQ ID NO: 318207
gcuguauuugcaugcugua

SEQ ID NO: 545058 - RNA, 19 nt, Artificial Sequence
  Description of Artificial Sequence: Synthetic oligonucleotide
  Antisense strand to SEQ ID NO: 545057
uacagcaugcaaauacagc

SEQ ID NO: 545059 - RNA, 19 nt, Artificial Sequence
  Description of Artificial Sequence: Synthetic oligonucleotide
  Sense strand starting at position 3028 of SEQ ID NO: 318207
gaacgcuugccuugaacga

SEQ ID NO: 545060 - RNA, 19 nt, Artificial Sequence
  Description of Artificial Sequence: Synthetic oligonucleotide
  Antisense strand to SEQ ID NO: 545059
ucguucaaggcaagcguuc

SEQ ID NO: 545061 - RNA, 19 nt, Artificial Sequence
  Description of Artificial Sequence: Synthetic oligonucleotide
  Sense strand starting at position 3035 of SEQ ID NO: 318207
ugccuugaacgaggagaau

SEQ ID NO: 545062 - RNA, 19 nt, Artificial Sequence
  Description of Artificial Sequence: Synthetic oligonucleotide
  Antisense strand to SEQ ID NO: 545061
auucuccucguucaaggca

SEQ ID NO: 545063 - RNA, 19 nt, Artificial Sequence
  Description of Artificial Sequence: Synthetic oligonucleotide
  Sense strand starting at position 3116 of SEQ ID NO: 318207
gucucaugauuaucgguua

SEQ ID NO: 545064 - RNA, 19 nt, Artificial Sequence
  Description of Artificial Sequence: Synthetic oligonucleotide
  Antisense strand to SEQ ID NO: 545063
uaaccgauaaucaugagac

SEQ ID NO: 545065 - RNA, 19 nt, Artificial Sequence
  Description of Artificial Sequence: Synthetic oligonucleotide
  Sense strand starting at position 3119 of SEQ ID NO: 318207
ucaugauuaucgguuacca

SEQ ID NO: 545066 - RNA, 19 nt, Artificial Sequence
  Description of Artificial Sequence: Synthetic oligonucleotide
  Antisense strand to SEQ ID NO: 545065
ugguaaccgauaaucauga

SEQ ID NO: 545067 - RNA, 19 nt, Artificial Sequence
  Description of Artificial Sequence: Synthetic oligonucleotide
  Sense strand starting at position 3121 of SEQ ID NO: 318207
augauuaucgguuaccaua

SEQ ID NO: 545068 - RNA, 19 nt, Artificial Sequence
  Description of Artificial Sequence: Synthetic oligonucleotide
  Antisense strand to SEQ ID NO: 545067
uaugguaaccgauaaucau

SEQ ID NO: 545069 - RNA, 19 nt, Artificial Sequence
  Description of Artificial Sequence: Synthetic oligonucleotide
  Sense strand starting at position 3123 of SEQ ID NO: 318207
gauuaucgguuaccauaag

SEQ ID NO: 545070 - RNA, 19 nt, Artificial Sequence
  Description of Artificial Sequence: Synthetic oligonucleotide
  Antisense strand to SEQ ID NO: 545069
cuuaugguaaccgauaauc

SEQ ID NO: 545071 - RNA, 19 nt, Artificial Sequence
  Description of Artificial Sequence: Synthetic oligonucleotide
  Sense strand starting at position 3177 of SEQ ID NO: 318207
cugccuguccgcuaaauaa

SEQ ID NO: 545072 - RNA, 19 nt, Artificial Sequence
  Description of Artificial Sequence: Synthetic oligonucleotide
  Antisense strand to SEQ ID NO: 545071
uuauuuagcggacaggcag

SEQ ID NO: 545073 - RNA, 19 nt, Artificial Sequence
  Description of Artificial Sequence: Synthetic oligonucleotide
  Sense strand starting at position 3208 of SEQ ID NO: 318207
acuccuaaucgcugaaggu

SEQ ID NO: 545074 - RNA, 19 nt, Artificial Sequence
  Description of Artificial Sequence: Synthetic oligonucleotide
  Antisense strand to SEQ ID NO: 545073
accuucagcgauuaggagu

SEQ ID NO: 545075 - RNA, 19 nt, Artificial Sequence
  Description of Artificial Sequence: Synthetic oligonucleotide
  Sense strand starting at position 3209 of SEQ ID NO: 318207
cuccuaaucgcugaagguu

SEQ ID NO: 545076 - RNA, 19 nt, Artificial Sequence
  Description of Artificial Sequence: Synthetic oligonucleotide
  Antisense strand to SEQ ID NO: 545075
aaccuucagcgauuaggag

SEQ ID NO: 545077 - RNA, 19 nt, Artificial Sequence
  Description of Artificial Sequence: Synthetic oligonucleotide
  Sense strand starting at position 3221 of SEQ ID NO: 318207
gaagguuucgcacaccauu

SEQ ID NO: 545078 - RNA, 19 nt, Artificial Sequence
  Description of Artificial Sequence: Synthetic oligonucleotide
  Antisense strand to SEQ ID NO: 545077
aauggugugcgaaaccuuc

SEQ ID NO: 545079 - RNA, 19 nt, Artificial Sequence
  Description of Artificial Sequence: Synthetic oligonucleotide
  Sense strand starting at position 3355 of SEQ ID NO: 318207
cacaguacucgguguaauc

SEQ ID NO: 545080 - RNA, 19 nt, Artificial Sequence
  Description of Artificial Sequence: Synthetic oligonucleotide
  Antisense strand to SEQ ID NO: 545079
gauuacaccgaguacugug

SEQ ID NO: 545081 - RNA, 19 nt, Artificial Sequence
  Description of Artificial Sequence: Synthetic oligonucleotide
  Sense strand starting at position 3387 of SEQ ID NO: 318207
gcgagauaccugggaugaa

SEQ ID NO: 545082 - RNA, 19 nt, Artificial Sequence
  Description of Artificial Sequence: Synthetic oligonucleotide
  Antisense strand to SEQ ID NO: 545081
uucaucccagguaucucgc

SEQ ID NO: 545083 - RNA, 19 nt, Artificial Sequence
  Description of Artificial Sequence: Synthetic oligonucleotide
  Sense strand starting at position 3388 of SEQ ID NO: 318207
cgagauaccugggaugaaa

SEQ ID NO: 545084 - RNA, 19 nt, Artificial Sequence
  Description of Artificial Sequence: Synthetic oligonucleotide
  Antisense strand to SEQ ID NO: 545083
uuucaucccagguaucucg

SEQ ID NO: 545085 - RNA, 19 nt, Artificial Sequence
  Description of Artificial Sequence: Synthetic oligonucleotide
  Sense strand starting at position 47 of SEQ ID NO: 318208
gaugcagaaugcucggaua

SEQ ID NO: 545086 - RNA, 19 nt, Artificial Sequence
  Description of Artificial Sequence: Synthetic oligonucleotide
  Antisense strand to SEQ ID NO: 545085
uauccgagcauucugcauc

SEQ ID NO: 545087 - RNA, 19 nt, Artificial Sequence
  Description of Artificial Sequence: Synthetic oligonucleotide
  Sense strand starting at position 49 of SEQ ID NO: 318208
ugcagaaugcucggauaag

SEQ ID NO: 545088 - RNA, 19 nt, Artificial Sequence
  Description of Artificial Sequence: Synthetic oligonucleotide
  Antisense strand to SEQ ID NO: 545087
cuuauccgagcauucugca

SEQ ID NO: 545089 - RNA, 19 nt, Artificial Sequence
  Description of Artificial Sequence: Synthetic oligonucleotide
  Sense strand starting at position 206 of SEQ ID NO: 318208
ucuagaucauugcucaaga

SEQ ID NO: 545090 - RNA, 19 nt, Artificial Sequence
  Description of Artificial Sequence: Synthetic oligonucleotide
  Antisense strand to SEQ ID NO: 545089
ucuugagcaaugaucuaga

SEQ ID NO: 545091 - RNA, 19 nt, Artificial Sequence
  Description of Artificial Sequence: Synthetic oligonucleotide
  Sense strand starting at position 207 of SEQ ID NO: 318208
cuagaucauugcucaagag

SEQ ID NO: 545092 - RNA, 19 nt, Artificial Sequence
  Description of Artificial Sequence: Synthetic oligonucleotide
  Antisense strand to SEQ ID NO: 545091
cucuugagcaaugaucuag

SEQ ID NO: 545093 - RNA, 19 nt, Artificial Sequence
  Description of Artificial Sequence: Synthetic oligonucleotide
  Sense strand starting at position 208 of SEQ ID NO: 318208
uagaucauugcucaagagu

SEQ ID NO: 545094 - RNA, 19 nt, Artificial Sequence
  Description of Artificial Sequence: Synthetic oligonucleotide
  Antisense strand to SEQ ID NO: 545093
acucuugagcaaugaucua

SEQ ID NO: 545095 - RNA, 19 nt, Artificial Sequence
  Description of Artificial Sequence: Synthetic oligonucleotide
  Sense strand starting at position 211 of SEQ ID NO: 318208
aucauugcucaagaguucu

SEQ ID NO: 545096 - RNA, 19 nt, Artificial Sequence
  Description of Artificial Sequence: Synthetic oligonucleotide
  Antisense strand to SEQ ID NO: 545095
agaacucuugagcaaugau

SEQ ID NO: 545097 - RNA, 19 nt, Artificial Sequence
  Description of Artificial Sequence: Synthetic oligonucleotide
  Sense strand starting at position 223 of SEQ ID NO: 318208
gaguucugaacugggagau

SEQ ID NO: 545098 - RNA, 19 nt, Artificial Sequence
  Description of Artificial Sequence: Synthetic oligonucleotide
  Antisense strand to SEQ ID NO: 545097
aucucccaguucagaacuc

SEQ ID NO: 545099 - RNA, 19 nt, Artificial Sequence
  Description of Artificial Sequence: Synthetic oligonucleotide
  Sense strand starting at position 660 of SEQ ID NO: 318208
gugucaagcguugugcaua

SEQ ID NO: 545100 - RNA, 19 nt, Artificial Sequence
  Description of Artificial Sequence: Synthetic oligonucleotide
  Antisense strand to SEQ ID NO: 545099
uaugcacaacgcuugacac

SEQ ID NO: 545101 - RNA, 19 nt, Artificial Sequence
  Description of Artificial Sequence: Synthetic oligonucleotide
  Sense strand starting at position 772 of SEQ ID NO: 318208
uuuaauggcuguuccuaaa

SEQ ID NO: 545102 - RNA, 19 nt, Artificial Sequence
  Description of Artificial Sequence: Synthetic oligonucleotide
  Antisense strand to SEQ ID NO: 545101
uuuaggaacagccauuaaa

SEQ ID NO: 545103 - RNA, 19 nt, Artificial Sequence
  Description of Artificial Sequence: Synthetic oligonucleotide
  Sense strand starting at position 890 of SEQ ID NO: 318208
aaauaugucugucuggauu

SEQ ID NO: 545104 - RNA, 19 nt, Artificial Sequence
  Description of Artificial Sequence: Synthetic oligonucleotide
  Antisense strand to SEQ ID NO: 545103
aauccagacagacauauuu

SEQ ID NO: 545105 - RNA, 19 nt, Artificial Sequence
  Description of Artificial Sequence: Synthetic oligonucleotide
  Sense strand starting at position 904 of SEQ ID NO: 318208
ggauuaugugguuagaauc

SEQ ID NO: 545106 - RNA, 19 nt, Artificial Sequence
  Description of Artificial Sequence: Synthetic oligonucleotide
  Antisense strand to SEQ ID NO: 545105
gauucuaaccacauaaucc

SEQ ID NO: 545107 - RNA, 19 nt, Artificial Sequence
  Description of Artificial Sequence: Synthetic oligonucleotide
  Sense strand starting at position 912 of SEQ ID NO: 318208
ugguuagaaucacugcaaa

SEQ ID NO: 545108 - RNA, 19 nt, Artificial Sequence
  Description of Artificial Sequence: Synthetic oligonucleotide
  Antisense strand to SEQ ID NO: 545107
uuugcagugauucuaacca

SEQ ID NO: 545109 - RNA, 19 nt, Artificial Sequence
  Description of Artificial Sequence: Synthetic oligonucleotide
  Sense strand starting at position 924 of SEQ ID NO: 318208
cugcaaauuuggcuucuau

SEQ ID NO: 545110 - RNA, 19 nt, Artificial Sequence
  Description of Artificial Sequence: Synthetic oligonucleotide
  Antisense strand to SEQ ID NO: 545109
auagaagccaaauuugcag

SEQ ID NO: 545111 - RNA, 19 nt, Artificial Sequence
  Description of Artificial Sequence: Synthetic oligonucleotide
  Sense strand starting at position 1100 of SEQ ID NO: 318208
aaaguugugcucuagguca

SEQ ID NO: 545112 - RNA, 19 nt, Artificial Sequence
  Description of Artificial Sequence: Synthetic oligonucleotide
  Antisense strand to SEQ ID NO: 545111
ugaccuagagcacaacuuu

SEQ ID NO: 545113 - RNA, 19 nt, Artificial Sequence
  Description of Artificial Sequence: Synthetic oligonucleotide
  Sense strand starting at position 1735 of SEQ ID NO: 318208
ucagauaccuugucuccuu

SEQ ID NO: 545114 - RNA, 19 nt, Artificial Sequence
  Description of Artificial Sequence: Synthetic oligonucleotide
  Antisense strand to SEQ ID NO: 545113
aaggagacaagguaucuga

SEQ ID NO: 545115 - RNA, 19 nt, Artificial Sequence
  Description of Artificial Sequence: Synthetic oligonucleotide
  Sense strand starting at position 1962 of SEQ ID NO: 318208
caucuuggagcguaccaaa

SEQ ID NO: 545116 - RNA, 19 nt, Artificial Sequence
  Description of Artificial Sequence: Synthetic oligonucleotide
  Antisense strand to SEQ ID NO: 545115
uuugguacgcuccaagaug

SEQ ID NO: 545117 - RNA, 19 nt, Artificial Sequence
  Description of Artificial Sequence: Synthetic oligonucleotide
  Sense strand starting at position 2865 of SEQ ID NO: 318208
uuuggaagcagaggucuua

SEQ ID NO: 545118 - RNA, 19 nt, Artificial Sequence
  Description of Artificial Sequence: Synthetic oligonucleotide
  Antisense strand to SEQ ID NO: 545117
uaagaccucugcuuccaaa

SEQ ID NO: 545119 - RNA, 19 nt, Artificial Sequence
  Description of Artificial Sequence: Synthetic oligonucleotide
  Sense strand starting at position 2973 of SEQ ID NO: 318208
guuaaaucugaagaugcua

SEQ ID NO: 545120 - RNA, 19 nt, Artificial Sequence
  Description of Artificial Sequence: Synthetic oligonucleotide
  Antisense strand to SEQ ID NO: 545119
uagcaucuucagauuuaac

SEQ ID NO: 545121 - RNA, 19 nt, Artificial Sequence
  Description of Artificial Sequence: Synthetic oligonucleotide
  Sense strand starting at position 2982 of SEQ ID NO: 318208
gaagaugcuagugagugau

SEQ ID NO: 545122 - RNA, 19 nt, Artificial Sequence
  Description of Artificial Sequence: Synthetic oligonucleotide
  Antisense strand to SEQ ID NO: 545121
aucacucacuagcaucuuc

SEQ ID NO: 545123 - RNA, 19 nt, Artificial Sequence
  Description of Artificial Sequence: Synthetic oligonucleotide
  Sense strand starting at position 2986 of SEQ ID NO: 318208
augcuagugagugauagua

SEQ ID NO: 545124 - RNA, 19 nt, Artificial Sequence
  Description of Artificial Sequence: Synthetic oligonucleotide
  Antisense strand to SEQ ID NO: 545123
uacuaucacucacuagcau

SEQ ID NO: 545125 - RNA, 19 nt, Artificial Sequence
  Description of Artificial Sequence: Synthetic oligonucleotide
  Sense strand starting at position 3011 of SEQ ID NO: 318208
uuugucaggcauuacuuua

SEQ ID NO: 545126 - RNA, 19 nt, Artificial Sequence
  Description of Artificial Sequence: Synthetic oligonucleotide
  Antisense strand to SEQ ID NO: 545125
uaaaguaaugccugacaaa

SEQ ID NO: 545127 - RNA, 19 nt, Artificial Sequence
  Description of Artificial Sequence: Synthetic oligonucleotide
  Sense strand starting at position 3139 of SEQ ID NO: 318208
gucagagggaacuguuaga

SEQ ID NO: 545128 - RNA, 19 nt, Artificial Sequence
  Description of Artificial Sequence: Synthetic oligonucleotide
  Antisense strand to SEQ ID NO: 545127
ucuaacaguucccucugac

SEQ ID NO: 545129 - RNA, 19 nt, Artificial Sequence
  Description of Artificial Sequence: Synthetic oligonucleotide
  Sense strand starting at position 3148 of SEQ ID NO: 318208
aacuguuagaggugggauu

SEQ ID NO: 545130 - RNA, 19 nt, Artificial Sequence
  Description of Artificial Sequence: Synthetic oligonucleotide
  Antisense strand to SEQ ID NO: 545129
aaucccaccucuaacaguu

SEQ ID NO: 545131 - RNA, 19 nt, Artificial Sequence
  Description of Artificial Sequence: Synthetic oligonucleotide
  Sense strand starting at position 3209 of SEQ ID NO: 318208
uggacugccuuucuguaaa

SEQ ID NO: 545132 - RNA, 19 nt, Artificial Sequence
  Description of Artificial Sequence: Synthetic oligonucleotide
  Antisense strand to SEQ ID NO: 545131
uuuacagaaaggcagucca

SEQ ID NO: 545133 - RNA, 19 nt, Artificial Sequence
  Description of Artificial Sequence: Synthetic oligonucleotide
  Sense strand starting at position 3264 of SEQ ID NO: 318208
cucacagaacucuguuagu

SEQ ID NO: 545134 - RNA, 19 nt, Artificial Sequence
  Description of Artificial Sequence: Synthetic oligonucleotide
  Antisense strand to SEQ ID NO: 545133
acuaacagaguucugugag

SEQ ID NO: 545135 - RNA, 19 nt, Artificial Sequence
  Description of Artificial Sequence: Synthetic oligonucleotide
  Sense strand starting at position 3343 of SEQ ID NO: 318208
aaaggaugauguuucccaa

SEQ ID NO: 545136 - RNA, 19 nt, Artificial Sequence
  Description of Artificial Sequence: Synthetic oligonucleotide
  Antisense strand to SEQ ID NO: 545135
uugggaaacaucauccuuu

SEQ ID NO: 545137 - RNA, 19 nt, Artificial Sequence
  Description of Artificial Sequence: Synthetic oligonucleotide
  Sense strand starting at position 3346 of SEQ ID NO: 318208
ggaugauguuucccaaauc

SEQ ID NO: 545138 - RNA, 19 nt, Artificial Sequence
  Description of Artificial Sequence: Synthetic oligonucleotide
  Antisense strand to SEQ ID NO: 545137
gauuugggaaacaucaucc

SEQ ID NO: 545139 - RNA, 19 nt, Artificial Sequence
  Description of Artificial Sequence: Synthetic oligonucleotide
  Sense strand starting at position 3363 of SEQ ID NO: 318208
ucuacuaagcugugaucaa

SEQ ID NO: 545140 - RNA, 19 nt, Artificial Sequence
  Description of Artificial Sequence: Synthetic oligonucleotide
  Antisense strand to SEQ ID NO: 545139
uugaucacagcuuaguaga

SEQ ID NO: 545141 - RNA, 19 nt, Artificial Sequence
  Description of Artificial Sequence: Synthetic oligonucleotide
  Sense strand starting at position 3367 of SEQ ID NO: 318208
cuaagcugugaucaaugau

SEQ ID NO: 545142 - RNA, 19 nt, Artificial Sequence
  Description of Artificial Sequence: Synthetic oligonucleotide
  Antisense strand to SEQ ID NO: 545141
aucauugaucacagcuuag

SEQ ID NO: 545143 - RNA, 19 nt, Artificial Sequence
  Description of Artificial Sequence: Synthetic oligonucleotide
  Sense strand starting at position 3461 of SEQ ID NO: 318208
gggaguuccaguggucaug

SEQ ID NO: 545144 - RNA, 19 nt, Artificial Sequence
  Description of Artificial Sequence: Synthetic oligonucleotide
  Antisense strand to SEQ ID NO: 545143
caugaccacuggaacuccc

SEQ ID NO: 545145 - RNA, 19 nt, Artificial Sequence
  Description of Artificial Sequence: Synthetic oligonucleotide
  Sense strand starting at position 3502 of SEQ ID NO: 318208
gugcuucucccuggauaaa

SEQ ID NO: 545146 - RNA, 19 nt, Artificial Sequence
  Description of Artificial Sequence: Synthetic oligonucleotide
  Antisense strand to SEQ ID NO: 545145
uuuauccagggagaagcac

SEQ ID NO: 545147 - RNA, 19 nt, Artificial Sequence
  Description of Artificial Sequence: Synthetic oligonucleotide
  Sense strand starting at position 3503 of SEQ ID NO: 318208
ugcuucucccuggauaaac

SEQ ID NO: 545148 - RNA, 19 nt, Artificial Sequence
  Description of Artificial Sequence: Synthetic oligonucleotide
  Antisense strand to SEQ ID NO: 545147
guuuauccagggagaagca

SEQ ID NO: 545149 - RNA, 19 nt, Artificial Sequence
  Description of Artificial Sequence: Synthetic oligonucleotide
  Sense strand starting at position 3578 of SEQ ID NO: 318208
ccuugauacccuuaaccga

SEQ ID NO: 545150 - RNA, 19 nt, Artificial Sequence
  Description of Artificial Sequence: Synthetic oligonucleotide
  Antisense strand to SEQ ID NO: 545149
ucgguuaaggguaucaagg

SEQ ID NO: 545151 - RNA, 19 nt, Artificial Sequence
  Description of Artificial Sequence: Synthetic oligonucleotide
  Sense strand starting at position 3585 of SEQ ID NO: 318208
acccuuaaccgauggcaaa

SEQ ID NO: 545152 - RNA, 19 nt, Artificial Sequence
  Description of Artificial Sequence: Synthetic oligonucleotide
  Antisense strand to SEQ ID NO: 545151
uuugccaucgguuaagggu

SEQ ID NO: 545153 - RNA, 19 nt, Artificial Sequence
  Description of Artificial Sequence: Synthetic oligonucleotide
  Sense strand starting at position 3586 of SEQ ID NO: 318208
cccuuaaccgauggcaaau

SEQ ID NO: 545154 - RNA, 19 nt, Artificial Sequence
  Description of Artificial Sequence: Synthetic oligonucleotide
  Antisense strand to SEQ ID NO: 545153
auuugccaucgguuaaggg

SEQ ID NO: 545155 - RNA, 19 nt, Artificial Sequence
  Description of Artificial Sequence: Synthetic oligonucleotide
  Sense strand starting at position 3651 of SEQ ID NO: 318208
acagguuuaucacuagcua

SEQ ID NO: 545156 - RNA, 19 nt, Artificial Sequence
  Description of Artificial Sequence: Synthetic oligonucleotide
  Antisense strand to SEQ ID NO: 545155
uagcuagugauaaaccugu

SEQ ID NO: 545157 - RNA, 19 nt, Artificial Sequence
  Description of Artificial Sequence: Synthetic oligonucleotide
  Sense strand starting at position 3723 of SEQ ID NO: 318208
auuugcauucucugguagu

SEQ ID NO: 545158 - RNA, 19 nt, Artificial Sequence
  Description of Artificial Sequence: Synthetic oligonucleotide
  Antisense strand to SEQ ID NO: 545157
acuaccagagaaugcaaau

SEQ ID NO: 545159 - RNA, 19 nt, Artificial Sequence
  Description of Artificial Sequence: Synthetic oligonucleotide
  Sense strand starting at position 3793 of SEQ ID NO: 318208
uuuguaccugucuaaugga

SEQ ID NO: 545160 - RNA, 19 nt, Artificial Sequence
  Description of Artificial Sequence: Synthetic oligonucleotide
  Antisense strand to SEQ ID NO: 545159
uccauuagacagguacaaa

SEQ ID NO: 545161 - RNA, 19 nt, Artificial Sequence
  Description of Artificial Sequence: Synthetic oligonucleotide
  Sense strand starting at position 3801 of SEQ ID NO: 318208
ugucuaauggauuaucuau

SEQ ID NO: 545162 - RNA, 19 nt, Artificial Sequence
  Description of Artificial Sequence: Synthetic oligonucleotide
  Antisense strand to SEQ ID NO: 545161
auagauaauccauuagaca

SEQ ID NO: 545163 - RNA, 19 nt, Artificial Sequence
  Description of Artificial Sequence: Synthetic oligonucleotide
  Sense strand starting at position 3821 of SEQ ID NO: 318208
auagauguuagagguaauc

SEQ ID NO: 545164 - RNA, 19 nt, Artificial Sequence
  Description of Artificial Sequence: Synthetic oligonucleotide
  Antisense strand to SEQ ID NO: 545163
gauuaccucuaacaucuau

SEQ ID NO: 545165 - RNA, 19 nt, Artificial Sequence
  Description of Artificial Sequence: Synthetic oligonucleotide
  Sense strand starting at position 27 of SEQ ID NO: 318209
gagguaagagucuggguua

SEQ ID NO: 545166 - RNA, 19 nt, Artificial Sequence
  Description of Artificial Sequence: Synthetic oligonucleotide
  Antisense strand to SEQ ID NO: 545165
uaacccagacucuuaccuc

SEQ ID NO: 545167 - RNA, 19 nt, Artificial Sequence
  Description of Artificial Sequence: Synthetic oligonucleotide
  Sense strand starting at position 283 of SEQ ID NO: 318209
ggagaagaaccugggucuu

SEQ ID NO: 545168 - RNA, 19 nt, Artificial Sequence
  Description of Artificial Sequence: Synthetic oligonucleotide
  Antisense strand to SEQ ID NO: 545167
aagacccagguucuucucc

SEQ ID NO: 545169 - RNA, 19 nt, Artificial Sequence
  Description of Artificial Sequence: Synthetic oligonucleotide
  Sense strand starting at position 329 of SEQ ID NO: 318209
auccaucaggaguagucua

SEQ ID NO: 545170 - RNA, 19 nt, Artificial Sequence
  Description of Artificial Sequence: Synthetic oligonucleotide
  Antisense strand to SEQ ID NO: 545169
uagacuacuccugauggau

SEQ ID NO: 545171 - RNA, 19 nt, Artificial Sequence
  Description of Artificial Sequence: Synthetic oligonucleotide
  Sense strand starting at position 648 of SEQ ID NO: 318209
gggugucaggcagacacau

SEQ ID NO: 545172 - RNA, 19 nt, Artificial Sequence
  Description of Artificial Sequence: Synthetic oligonucleotide
  Antisense strand to SEQ ID NO: 545171
augugucugccugacaccc

SEQ ID NO: 545173 - RNA, 19 nt, Artificial Sequence
  Description of Artificial Sequence: Synthetic oligonucleotide
  Sense strand starting at position 671 of SEQ ID NO: 318209
cguuucuaugccucaguuu

SEQ ID NO: 545174 - RNA, 19 nt, Artificial Sequence
  Description of Artificial Sequence: Synthetic oligonucleotide
  Antisense strand to SEQ ID NO: 545173
aaacugaggcauagaaacg

SEQ ID NO: 545175 - RNA, 19 nt, Artificial Sequence
  Description of Artificial Sequence: Synthetic oligonucleotide
  Sense strand starting at position 756 of SEQ ID NO: 318209
auuaauaaguuggcacaua

SEQ ID NO: 545176 - RNA, 19 nt, Artificial Sequence
  Description of Artificial Sequence: Synthetic oligonucleotide
  Antisense strand to SEQ ID NO: 545175
uaugugccaacuuauuaau

SEQ ID NO: 545177 - RNA, 19 nt, Artificial Sequence
  Description of Artificial Sequence: Synthetic oligonucleotide
  Sense strand starting at position 801 of SEQ ID NO: 318209
auaaauacugaguaaacgu

SEQ ID NO: 545178 - RNA, 19 nt, Artificial Sequence
  Description of Artificial Sequence: Synthetic oligonucleotide
  Antisense strand to SEQ ID NO: 545177
acguuuacucaguauuuau

SEQ ID NO: 545179 - RNA, 19 nt, Artificial Sequence
  Description of Artificial Sequence: Synthetic oligonucleotide
  Sense strand starting at position 808 of SEQ ID NO: 318209
cugaguaaacguuagguau

SEQ ID NO: 545180 - RNA, 19 nt, Artificial Sequence
  Description of Artificial Sequence: Synthetic oligonucleotide
  Antisense strand to SEQ ID NO: 545179
auaccuaacguuuacucag

SEQ ID NO: 545181 - RNA, 19 nt, Artificial Sequence
  Description of Artificial Sequence: Synthetic oligonucleotide
  Sense strand starting at position 812 of SEQ ID NO: 318209
guaaacguuagguaucuua

SEQ ID NO: 545182 - RNA, 19 nt, Artificial Sequence
  Description of Artificial Sequence: Synthetic oligonucleotide
  Antisense strand to SEQ ID NO: 545181
uaagauaccuaacguuuac

SEQ ID NO: 545183 - RNA, 19 nt, Artificial Sequence
  Description of Artificial Sequence: Synthetic oligonucleotide
  Sense strand starting at position 956 of SEQ ID NO: 318209
agaaguuacuacucagcca

SEQ ID NO: 545184 - RNA, 19 nt, Artificial Sequence
  Description of Artificial Sequence: Synthetic oligonucleotide
  Antisense strand to SEQ ID NO: 545183
uggcugaguaguaacuucu

SEQ ID NO: 545185 - RNA, 19 nt, Artificial Sequence
  Description of Artificial Sequence: Synthetic oligonucleotide
  Sense strand starting at position 2084 of SEQ ID NO: 318209
guggguuauguugcgucau

SEQ ID NO: 545186 - RNA, 19 nt, Artificial Sequence
  Description of Artificial Sequence: Synthetic oligonucleotide
  Antisense strand to SEQ ID NO: 545185
augacgcaacauaacccac

SEQ ID NO: 545187 - RNA, 19 nt, Artificial Sequence
  Description of Artificial Sequence: Synthetic oligonucleotide
  Sense strand starting at position 2087 of SEQ ID NO: 318209
gguuauguugcgucauuca

SEQ ID NO: 545188 - RNA, 19 nt, Artificial Sequence
  Description of Artificial Sequence: Synthetic oligonucleotide
  Antisense strand to SEQ ID NO: 545187
ugaaugacgcaacauaacc

SEQ ID NO: 545189 - RNA, 19 nt, Artificial Sequence
  Description of Artificial Sequence: Synthetic oligonucleotide
  Sense strand starting at position 2139 of SEQ ID NO: 318209
gguuuccugcguuuguaga

SEQ ID NO: 545190 - RNA, 19 nt, Artificial Sequence
  Description of Artificial Sequence: Synthetic oligonucleotide
  Antisense strand to SEQ ID NO: 545189
ucuacaaacgcaggaaacc

SEQ ID NO: 545191 - RNA, 19 nt, Artificial Sequence
  Description of Artificial Sequence: Synthetic oligonucleotide
  Sense strand starting at position 2242 of SEQ ID NO: 318209
cuccuuugccaggaacuau

SEQ ID NO: 545192 - RNA, 19 nt, Artificial Sequence
  Description of Artificial Sequence: Synthetic oligonucleotide
  Antisense strand to SEQ ID NO: 545191
auaguuccuggcaaaggag

SEQ ID NO: 545193 - RNA, 19 nt, Artificial Sequence
  Description of Artificial Sequence: Synthetic oligonucleotide
  Sense strand starting at position 2591 of SEQ ID NO: 318209
aucaaagaaguguguuuaa

SEQ ID NO: 545194 - RNA, 19 nt, Artificial Sequence
  Description of Artificial Sequence: Synthetic oligonucleotide
  Antisense strand to SEQ ID NO: 545193
uuaaacacacuucuuugau

SEQ ID NO: 545195 - RNA, 19 nt, Artificial Sequence
  Description of Artificial Sequence: Synthetic oligonucleotide
  Sense strand starting at position 2714 of SEQ ID NO: 318209
ucaauacuugugcauaaug

SEQ ID NO: 545196 - RNA, 19 nt, Artificial Sequence
  Description of Artificial Sequence: Synthetic oligonucleotide
  Antisense strand to SEQ ID NO: 545195
cauuaugcacaaguauuga

SEQ ID NO: 545197 - RNA, 19 nt, Artificial Sequence
  Description of Artificial Sequence: Synthetic oligonucleotide
  Sense strand starting at position 2726 of SEQ ID NO: 318209
cauaaugggugcucacuaa

SEQ ID NO: 545198 - RNA, 19 nt, Artificial Sequence
  Description of Artificial Sequence: Synthetic oligonucleotide
  Antisense strand to SEQ ID NO: 545197
uuagugagcacccauuaug

SEQ ID NO: 545199 - RNA, 19 nt, Artificial Sequence
  Description of Artificial Sequence: Synthetic oligonucleotide
  Sense strand starting at position 2730 of SEQ ID NO: 318209
augggugcucacuaaauau

SEQ ID NO: 545200 - RNA, 19 nt, Artificial Sequence
  Description of Artificial Sequence: Synthetic oligonucleotide
  Antisense strand to SEQ ID NO: 545199
auauuuagugagcacccau

SEQ ID NO: 545201 - RNA, 19 nt, Artificial Sequence
  Description of Artificial Sequence: Synthetic oligonucleotide
  Sense strand starting at position 2800 of SEQ ID NO: 318209
acucuucuguaauuaggga

SEQ ID NO: 545202 - RNA, 19 nt, Artificial Sequence
  Description of Artificial Sequence: Synthetic oligonucleotide
  Antisense strand to SEQ ID NO: 545201
ucccuaauuacagaagagu

SEQ ID NO: 545203 - RNA, 19 nt, Artificial Sequence
  Description of Artificial Sequence: Synthetic oligonucleotide
  Sense strand starting at position 2923 of SEQ ID NO: 318209
acgguuaaacuuugaaauu

SEQ ID NO: 545204 - RNA, 19 nt, Artificial Sequence
  Description of Artificial Sequence: Synthetic oligonucleotide
  Antisense strand to SEQ ID NO: 545203
aauuucaaaguuuaaccgu

SEQ ID NO: 545205 - RNA, 19 nt, Artificial Sequence
  Description of Artificial Sequence: Synthetic oligonucleotide
  Sense strand starting at position 2996 of SEQ ID NO: 318209
auaauaucuucugugagaa

SEQ ID NO: 545206 - RNA, 19 nt, Artificial Sequence
  Description of Artificial Sequence: Synthetic oligonucleotide
  Antisense strand to SEQ ID NO: 545205
uucucacagaagauauuau

SEQ ID NO: 545207 - RNA, 19 nt, Artificial Sequence
  Description of Artificial Sequence: Synthetic oligonucleotide
  Sense strand starting at position 2997 of SEQ ID NO: 318209
uaauaucuucugugagaag

SEQ ID NO: 545208 - RNA, 19 nt, Artificial Sequence
  Description of Artificial Sequence: Synthetic oligonucleotide
  Antisense strand to SEQ ID NO: 545207
cuucucacagaagauauua

SEQ ID NO: 545209 - RNA, 19 nt, Artificial Sequence
  Description of Artificial Sequence: Synthetic oligonucleotide
  Sense strand starting at position 3191 of SEQ ID NO: 318209
auagaaauccuagguugau

SEQ ID NO: 545210 - RNA, 19 nt, Artificial Sequence
  Description of Artificial Sequence: Synthetic oligonucleotide
  Antisense strand to SEQ ID NO: 545209
aucaaccuaggauuucuau

SEQ ID NO: 545211 - RNA, 19 nt, Artificial Sequence
  Description of Artificial Sequence: Synthetic oligonucleotide
  Sense strand starting at position 3192 of SEQ ID NO: 318209
uagaaauccuagguugaua

SEQ ID NO: 545212 - RNA, 19 nt, Artificial Sequence
  Description of Artificial Sequence: Synthetic oligonucleotide
  Antisense strand to SEQ ID NO: 545211
uaucaaccuaggauuucua

SEQ ID NO: 545213 - RNA, 19 nt, Artificial Sequence
  Description of Artificial Sequence: Synthetic oligonucleotide
  Sense strand starting at position 3194 of SEQ ID NO: 318209
gaaauccuagguugauauu

SEQ ID NO: 545214 - RNA, 19 nt, Artificial Sequence
  Description of Artificial Sequence: Synthetic oligonucleotide
  Antisense strand to SEQ ID NO: 545213
aauaucaaccuaggauuuc

SEQ ID NO: 545215 - RNA, 19 nt, Artificial Sequence
  Description of Artificial Sequence: Synthetic oligonucleotide
  Sense strand starting at position 3225 of SEQ ID NO: 318209
auaguauuacagcauagau

SEQ ID NO: 545216 - RNA, 19 nt, Artificial Sequence
  Description of Artificial Sequence: Synthetic oligonucleotide
  Antisense strand to SEQ ID NO: 545215
aucuaugcuguaauacuau

SEQ ID NO: 545217 - RNA, 19 nt, Artificial Sequence
  Description of Artificial Sequence: Synthetic oligonucleotide
  Sense strand starting at position 3478 of SEQ ID NO: 318209
acagccuacggaugagaaa

SEQ ID NO: 545218 - RNA, 19 nt, Artificial Sequence
  Description of Artificial Sequence: Synthetic oligonucleotide
  Antisense strand to SEQ ID NO: 545217
uuucucauccguaggcugu

SEQ ID NO: 545219 - RNA, 19 nt, Artificial Sequence
  Description of Artificial Sequence: Synthetic oligonucleotide
  Sense strand starting at position 3502 of SEQ ID NO: 318209
gagucagagccauggaaag

SEQ ID NO: 545220 - RNA, 19 nt, Artificial Sequence
  Description of Artificial Sequence: Synthetic oligonucleotide
  Antisense strand to SEQ ID NO: 545219
cuuuccauggcucugacuc

SEQ ID NO: 545221 - RNA, 19 nt, Artificial Sequence
  Description of Artificial Sequence: Synthetic oligonucleotide
  Sense strand starting at position 3504 of SEQ ID NO: 318209
gucagagccauggaaagua

SEQ ID NO: 545222 - RNA, 19 nt, Artificial Sequence
  Description of Artificial Sequence: Synthetic oligonucleotide
  Antisense strand to SEQ ID NO: 545221
uacuuuccauggcucugac

SEQ ID NO: 545223 - RNA, 19 nt, Artificial Sequence
  Description of Artificial Sequence: Synthetic oligonucleotide
  Sense strand starting at position 3604 of SEQ ID NO: 318209
caguauugggacuggaauc

SEQ ID NO: 545224 - RNA, 19 nt, Artificial Sequence
  Description of Artificial Sequence: Synthetic oligonucleotide
  Antisense strand to SEQ ID NO: 545223
gauuccagucccaauacug

SEQ ID NO: 545225 - RNA, 19 nt, Artificial Sequence
  Description of Artificial Sequence: Synthetic oligonucleotide
  Sense strand starting at position 3695 of SEQ ID NO: 318209
cuaagugcucaggauacuu

SEQ ID NO: 545226 - RNA, 19 nt, Artificial Sequence
  Description of Artificial Sequence: Synthetic oligonucleotide
  Antisense strand to SEQ ID NO: 545225
aaguauccugagcacuuag

SEQ ID NO: 545227 - RNA, 19 nt, Artificial Sequence
  Description of Artificial Sequence: Synthetic oligonucleotide
  Sense strand starting at position 3697 of SEQ ID NO: 318209
aagugcucaggauacuuaa

SEQ ID NO: 545228 - RNA, 19 nt, Artificial Sequence
  Description of Artificial Sequence: Synthetic oligonucleotide
  Antisense strand to SEQ ID NO: 545227
uuaaguauccugagcacuu

SEQ ID NO: 545229 - RNA, 19 nt, Artificial Sequence
  Description of Artificial Sequence: Synthetic oligonucleotide
  Sense strand starting at position 3700 of SEQ ID NO: 318209
ugcucaggauacuuaauga

SEQ ID NO: 545230 - RNA, 19 nt, Artificial Sequence
  Description of Artificial Sequence: Synthetic oligonucleotide
  Antisense strand to SEQ ID NO: 545229
ucauuaaguauccugagca

SEQ ID NO: 545231 - RNA, 19 nt, Artificial Sequence
  Description of Artificial Sequence: Synthetic oligonucleotide
  Sense strand starting at position 3841 of SEQ ID NO: 318209
ugaagaucaucagugcaau

SEQ ID NO: 545232 - RNA, 19 nt, Artificial Sequence
  Description of Artificial Sequence: Synthetic oligonucleotide
  Antisense strand to SEQ ID NO: 545231
auugcacugaugaucuuca

SEQ ID NO: 545233 - RNA, 19 nt, Artificial Sequence
  Description of Artificial Sequence: Synthetic oligonucleotide
  Sense strand starting at position 3842 of SEQ ID NO: 318209
gaagaucaucagugcaaug

SEQ ID NO: 545234 - RNA, 19 nt, Artificial Sequence
  Description of Artificial Sequence: Synthetic oligonucleotide
  Antisense strand to SEQ ID NO: 545233
cauugcacugaugaucuuc

SEQ ID NO: 545235 - RNA, 19 nt, Artificial Sequence
  Description of Artificial Sequence: Synthetic oligonucleotide
  Sense strand starting at position 3844 of SEQ ID NO: 318209
agaucaucagugcaaugua

SEQ ID NO: 545236 - RNA, 19 nt, Artificial Sequence
  Description of Artificial Sequence: Synthetic oligonucleotide
  Antisense strand to SEQ ID NO: 545235
uacauugcacugaugaucu

SEQ ID NO: 545237 - RNA, 19 nt, Artificial Sequence
  Description of Artificial Sequence: Synthetic oligonucleotide
  Sense strand starting at position 3915 of SEQ ID NO: 318209
ggauuacauucuucuagca

SEQ ID NO: 545238 - RNA, 19 nt, Artificial Sequence
  Description of Artificial Sequence: Synthetic oligonucleotide
  Antisense strand to SEQ ID NO: 545237
ugcuagaagaauguaaucc

SEQ ID NO: 545239 - RNA, 19 nt, Artificial Sequence
  Description of Artificial Sequence: Synthetic oligonucleotide
  Sense strand starting at position 3962 of SEQ ID NO: 318209
auaccaguaucagugaaug

SEQ ID NO: 545240 - RNA, 19 nt, Artificial Sequence
  Description of Artificial Sequence: Synthetic oligonucleotide
  Antisense strand to SEQ ID NO: 545239
cauucacugauacugguau

SEQ ID NO: 545241 - RNA, 19 nt, Artificial Sequence
  Description of Artificial Sequence: Synthetic oligonucleotide
  Sense strand starting at position 3964 of SEQ ID NO: 318209
accaguaucagugaauggu

SEQ ID NO: 545242 - RNA, 19 nt, Artificial Sequence
  Description of Artificial Sequence: Synthetic oligonucleotide
  Antisense strand to SEQ ID NO: 545241
accauucacugauacuggu

SEQ ID NO: 545243 - RNA, 19 nt, Artificial Sequence
  Description of Artificial Sequence: Synthetic oligonucleotide
  Sense strand starting at position 3973 of SEQ ID NO: 318209
agugaaugguauucuagaa

SEQ ID NO: 545244 - RNA, 19 nt, Artificial Sequence
  Description of Artificial Sequence: Synthetic oligonucleotide
  Antisense strand to SEQ ID NO: 545243
uucuagaauaccauucacu

SEQ ID NO: 545245 - RNA, 19 nt, Artificial Sequence
  Description of Artificial Sequence: Synthetic oligonucleotide
  Sense strand starting at position 84 of SEQ ID NO: 318210
aauucuaaauaggugagua

SEQ ID NO: 545246 - RNA, 19 nt, Artificial Sequence
  Description of Artificial Sequence: Synthetic oligonucleotide
  Antisense strand to SEQ ID NO: 545245
uacucaccuauuuagaauu

SEQ ID NO: 545247 - RNA, 19 nt, Artificial Sequence
  Description of Artificial Sequence: Synthetic oligonucleotide
  Sense strand starting at position 108 of SEQ ID NO: 318210
cuuuguuccuauguuagaa

SEQ ID NO: 545248 - RNA, 19 nt, Artificial Sequence
  Description of Artificial Sequence: Synthetic oligonucleotide
  Antisense strand to SEQ ID NO: 545247
uucuaacauaggaacaaag

SEQ ID NO: 545249 - RNA, 19 nt, Artificial Sequence
  Description of Artificial Sequence: Synthetic oligonucleotide
  Sense strand starting at position 197 of SEQ ID NO: 318210
ugcuuuggacuguacuauu

SEQ ID NO: 545250 - RNA, 19 nt, Artificial Sequence
  Description of Artificial Sequence: Synthetic oligonucleotide
  Antisense strand to SEQ ID NO: 545249
aauaguacaguccaaagca

SEQ ID NO: 545251 - RNA, 19 nt, Artificial Sequence
  Description of Artificial Sequence: Synthetic oligonucleotide
  Sense strand starting at position 251 of SEQ ID NO: 318210
agacauagagauuguuugu

SEQ ID NO: 545252 - RNA, 19 nt, Artificial Sequence
  Description of Artificial Sequence: Synthetic oligonucleotide
  Antisense strand to SEQ ID NO: 545251
acaaacaaucucuaugucu

SEQ ID NO: 545253 - RNA, 19 nt, Artificial Sequence
  Description of Artificial Sequence: Synthetic oligonucleotide
  Sense strand starting at position 254 of SEQ ID NO: 318210
cauagagauuguuuguggu

SEQ ID NO: 545254 - RNA, 19 nt, Artificial Sequence
  Description of Artificial Sequence: Synthetic oligonucleotide
  Antisense strand to SEQ ID NO: 545253
accacaaacaaucucuaug

SEQ ID NO: 545255 - RNA, 19 nt, Artificial Sequence
  Description of Artificial Sequence: Synthetic oligonucleotide
  Sense strand starting at position 448 of SEQ ID NO: 318210
acuucucuugggcaauaaa

SEQ ID NO: 545256 - RNA, 19 nt, Artificial Sequence
  Description of Artificial Sequence: Synthetic oligonucleotide
  Antisense strand to SEQ ID NO: 545255
uuuauugcccaagagaagu

SEQ ID NO: 545257 - RNA, 19 nt, Artificial Sequence
  Description of Artificial Sequence: Synthetic oligonucleotide
  Sense strand starting at position 459 of SEQ ID NO: 318210
gcaauaaaccuaugaguag

SEQ ID NO: 545258 - RNA, 19 nt, Artificial Sequence
  Description of Artificial Sequence: Synthetic oligonucleotide
  Antisense strand to SEQ ID NO: 545257
cuacucauagguuuauugc

SEQ ID NO: 545259 - RNA, 19 nt, Artificial Sequence
  Description of Artificial Sequence: Synthetic oligonucleotide
  Sense strand starting at position 486 of SEQ ID NO: 318210
ggucauacgguagauacau

SEQ ID NO: 545260 - RNA, 19 nt, Artificial Sequence
  Description of Artificial Sequence: Synthetic oligonucleotide
  Antisense strand to SEQ ID NO: 545259
auguaucuaccguaugacc

SEQ ID NO: 545261 - RNA, 19 nt, Artificial Sequence
  Description of Artificial Sequence: Synthetic oligonucleotide
  Sense strand starting at position 492 of SEQ ID NO: 318210
acgguagauacaugcuuaa

SEQ ID NO: 545262 - RNA, 19 nt, Artificial Sequence
  Description of Artificial Sequence: Synthetic oligonucleotide
  Antisense strand to SEQ ID NO: 545261
uuaagcauguaucuaccgu

SEQ ID NO: 545263 - RNA, 19 nt, Artificial Sequence
  Description of Artificial Sequence: Synthetic oligonucleotide
  Sense strand starting at position 495 of SEQ ID NO: 318210
guagauacaugcuuaacua

SEQ ID NO: 545264 - RNA, 19 nt, Artificial Sequence
  Description of Artificial Sequence: Synthetic oligonucleotide
  Antisense strand to SEQ ID NO: 545263
uaguuaagcauguaucuac

SEQ ID NO: 545265 - RNA, 19 nt, Artificial Sequence
  Description of Artificial Sequence: Synthetic oligonucleotide
  Sense strand starting at position 520 of SEQ ID NO: 318210
acugacagcuuuccaaagu

SEQ ID NO: 545266 - RNA, 19 nt, Artificial Sequence
  Description of Artificial Sequence: Synthetic oligonucleotide
  Antisense strand to SEQ ID NO: 545265
acuuuggaaagcugucagu

SEQ ID NO: 545267 - RNA, 19 nt, Artificial Sequence
  Description of Artificial Sequence: Synthetic oligonucleotide
  Sense strand starting at position 637 of SEQ ID NO: 318210
uguguaggaccucaugguu

SEQ ID NO: 545268 - RNA, 19 nt, Artificial Sequence
  Description of Artificial Sequence: Synthetic oligonucleotide
  Antisense strand to SEQ ID NO: 545267
aaccaugagguccuacaca

SEQ ID NO: 545269 - RNA, 19 nt, Artificial Sequence
  Description of Artificial Sequence: Synthetic oligonucleotide
  Sense strand starting at position 804 of SEQ ID NO: 318210
auaacagaccuuugucagu

SEQ ID NO: 545270 - RNA, 19 nt, Artificial Sequence
  Description of Artificial Sequence: Synthetic oligonucleotide
  Antisense strand to SEQ ID NO: 545269
acugacaaaggucuguuau

SEQ ID NO: 545271 - RNA, 19 nt, Artificial Sequence
  Description of Artificial Sequence: Synthetic oligonucleotide
  Sense strand starting at position 821 of SEQ ID NO: 318210
gucucucaguccuuacaga

SEQ ID NO: 545272 - RNA, 19 nt, Artificial Sequence
  Description of Artificial Sequence: Synthetic oligonucleotide
  Antisense strand to SEQ ID NO: 545271
ucuguaaggacugagagac

SEQ ID NO: 545273 - RNA, 19 nt, Artificial Sequence
  Description of Artificial Sequence: Synthetic oligonucleotide
  Sense strand starting at position 847 of SEQ ID NO: 318210
acuaguugaugcucaguaa

SEQ ID NO: 545274 - RNA, 19 nt, Artificial Sequence
  Description of Artificial Sequence: Synthetic oligonucleotide
  Antisense strand to SEQ ID NO: 545273
uuacugagcaucaacuagu

SEQ ID NO: 545275 - RNA, 19 nt, Artificial Sequence
  Description of Artificial Sequence: Synthetic oligonucleotide
  Sense strand starting at position 848 of SEQ ID NO: 318210
cuaguugaugcucaguaac

SEQ ID NO: 545276 - RNA, 19 nt, Artificial Sequence
  Description of Artificial Sequence: Synthetic oligonucleotide
  Antisense strand to SEQ ID NO: 545275
guuacugagcaucaacuag

SEQ ID NO: 545277 - RNA, 19 nt, Artificial Sequence
  Description of Artificial Sequence: Synthetic oligonucleotide
  Sense strand starting at position 850 of SEQ ID NO: 318210
aguugaugcucaguaacua

SEQ ID NO: 545278 - RNA, 19 nt, Artificial Sequence
  Description of Artificial Sequence: Synthetic oligonucleotide
  Antisense strand to SEQ ID NO: 545277
uaguuacugagcaucaacu

SEQ ID NO: 545279 - RNA, 19 nt, Artificial Sequence
  Description of Artificial Sequence: Synthetic oligonucleotide
  Sense strand starting at position 982 of SEQ ID NO: 318210
uuauauaaagcggaaugua

SEQ ID NO: 545280 - RNA, 19 nt, Artificial Sequence
  Description of Artificial Sequence: Synthetic oligonucleotide
  Antisense strand to SEQ ID NO: 545279
uacauuccgcuuuauauaa

SEQ ID NO: 545281 - RNA, 19 nt, Artificial Sequence
  Description of Artificial Sequence: Synthetic oligonucleotide
  Sense strand starting at position 1160 of SEQ ID NO: 318210
gaguuaguagcugauaggu

SEQ ID NO: 545282 - RNA, 19 nt, Artificial Sequence
  Description of Artificial Sequence: Synthetic oligonucleotide
  Antisense strand to SEQ ID NO: 545281
accuaucagcuacuaacuc

SEQ ID NO: 545283 - RNA, 19 nt, Artificial Sequence
  Description of Artificial Sequence: Synthetic oligonucleotide
  Sense strand starting at position 1166 of SEQ ID NO: 318210
guagcugauagguggauua

SEQ ID NO: 545284 - RNA, 19 nt, Artificial Sequence
  Description of Artificial Sequence: Synthetic oligonucleotide
  Antisense strand to SEQ ID NO: 545283
uaauccaccuaucagcuac

SEQ ID NO: 545285 - RNA, 19 nt, Artificial Sequence
  Description of Artificial Sequence: Synthetic oligonucleotide
  Sense strand starting at position 2109 of SEQ ID NO: 318210
acguguguucuauuguuuc

SEQ ID NO: 545286 - RNA, 19 nt, Artificial Sequence
  Description of Artificial Sequence: Synthetic oligonucleotide
  Antisense strand to SEQ ID NO: 545285
gaaacaauagaacacacgu

SEQ ID NO: 545287 - RNA, 19 nt, Artificial Sequence
  Description of Artificial Sequence: Synthetic oligonucleotide
  Sense strand starting at position 2111 of SEQ ID NO: 318210
guguguucuauuguuucgu

SEQ ID NO: 545288 - RNA, 19 nt, Artificial Sequence
  Description of Artificial Sequence: Synthetic oligonucleotide
  Antisense strand to SEQ ID NO: 545287
acgaaacaauagaacacac

SEQ ID NO: 545289 - RNA, 19 nt, Artificial Sequence
  Description of Artificial Sequence: Synthetic oligonucleotide
  Sense strand starting at position 2171 of SEQ ID NO: 318210
gccuauaaauugucuagga

SEQ ID NO: 545290 - RNA, 19 nt, Artificial Sequence
  Description of Artificial Sequence: Synthetic oligonucleotide
  Antisense strand to SEQ ID NO: 545289
uccuagacaauuuauaggc

SEQ ID NO: 545291 - RNA, 19 nt, Artificial Sequence
  Description of Artificial Sequence: Synthetic oligonucleotide
  Sense strand starting at position 2172 of SEQ ID NO: 318210
ccuauaaauugucuaggac

SEQ ID NO: 545292 - RNA, 19 nt, Artificial Sequence
  Description of Artificial Sequence: Synthetic oligonucleotide
  Antisense strand to SEQ ID NO: 545291
guccuagacaauuuauagg

SEQ ID NO: 545293 - RNA, 19 nt, Artificial Sequence
  Description of Artificial Sequence: Synthetic oligonucleotide
  Sense strand starting at position 2175 of SEQ ID NO: 318210
auaaauugucuaggaccau

SEQ ID NO: 545294 - RNA, 19 nt, Artificial Sequence
  Description of Artificial Sequence: Synthetic oligonucleotide
  Antisense strand to SEQ ID NO: 545293
augguccuagacaauuuau

SEQ ID NO: 545295 - RNA, 19 nt, Artificial Sequence
  Description of Artificial Sequence: Synthetic oligonucleotide
  Sense strand starting at position 2208 of SEQ ID NO: 318210
gccagucuauaauuucgau

SEQ ID NO: 545296 - RNA, 19 nt, Artificial Sequence
  Description of Artificial Sequence: Synthetic oligonucleotide
  Antisense strand to SEQ ID NO: 545295
aucgaaauuauagacuggc

SEQ ID NO: 545297 - RNA, 19 nt, Artificial Sequence
  Description of Artificial Sequence: Synthetic oligonucleotide
  Sense strand starting at position 2374 of SEQ ID NO: 318210
gcaagcucacaagaguuua

SEQ ID NO: 545298 - RNA, 19 nt, Artificial Sequence
  Description of Artificial Sequence: Synthetic oligonucleotide
  Antisense strand to SEQ ID NO: 545297
uaaacucuugugagcuugc

SEQ ID NO: 545299 - RNA, 19 nt, Artificial Sequence
  Description of Artificial Sequence: Synthetic oligonucleotide
  Sense strand starting at position 2382 of SEQ ID NO: 318210
acaagaguuuacucuggcu

SEQ ID NO: 545300 - RNA, 19 nt, Artificial Sequence
  Description of Artificial Sequence: Synthetic oligonucleotide
  Antisense strand to SEQ ID NO: 545299
agccagaguaaacucuugu

SEQ ID NO: 545301 - RNA, 19 nt, Artificial Sequence
  Description of Artificial Sequence: Synthetic oligonucleotide
  Sense strand starting at position 2384 of SEQ ID NO: 318210
aagaguuuacucuggcuua

SEQ ID NO: 545302 - RNA, 19 nt, Artificial Sequence
  Description of Artificial Sequence: Synthetic oligonucleotide
  Antisense strand to SEQ ID NO: 545301
uaagccagaguaaacucuu

SEQ ID NO: 545303 - RNA, 19 nt, Artificial Sequence
  Description of Artificial Sequence: Synthetic oligonucleotide
  Sense strand starting at position 2440 of SEQ ID NO: 318210
gcuugauuguaauuuguuu

SEQ ID NO: 545304 - RNA, 19 nt, Artificial Sequence
  Description of Artificial Sequence: Synthetic oligonucleotide
  Antisense strand to SEQ ID NO: 545303
aaacaaauuacaaucaagc

SEQ ID NO: 545305 - RNA, 19 nt, Artificial Sequence
  Description of Artificial Sequence: Synthetic oligonucleotide
  Sense strand starting at position 2444 of SEQ ID NO: 318210
gauuguaauuuguuucugu

SEQ ID NO: 545306 - RNA, 19 nt, Artificial Sequence
  Description of Artificial Sequence: Synthetic oligonucleotide
  Antisense strand to SEQ ID NO: 545305
acagaaacaaauuacaauc

SEQ ID NO: 545307 - RNA, 19 nt, Artificial Sequence
  Description of Artificial Sequence: Synthetic oligonucleotide
  Sense strand starting at position 2464 of SEQ ID NO: 318210
uucuuuaccguuuauuacu

SEQ ID NO: 545308 - RNA, 19 nt, Artificial Sequence
  Description of Artificial Sequence: Synthetic oligonucleotide
  Antisense strand to SEQ ID NO: 545307
aguaauaaacgguaaagaa

SEQ ID NO: 545309 - RNA, 19 nt, Artificial Sequence
  Description of Artificial Sequence: Synthetic oligonucleotide
  Sense strand starting at position 2886 of SEQ ID NO: 318210
acauuacguucugugauaa

SEQ ID NO: 545310 - RNA, 19 nt, Artificial Sequence
  Description of Artificial Sequence: Synthetic oligonucleotide
  Antisense strand to SEQ ID NO: 545309
uuaucacagaacguaaugu

SEQ ID NO: 545311 - RNA, 19 nt, Artificial Sequence
  Description of Artificial Sequence: Synthetic oligonucleotide
  Sense strand starting at position 2897 of SEQ ID NO: 318210
ugugauaaugcuuagguua

SEQ ID NO: 545312 - RNA, 19 nt, Artificial Sequence
  Description of Artificial Sequence: Synthetic oligonucleotide
  Antisense strand to SEQ ID NO: 545311
uaaccuaagcauuaucaca

SEQ ID NO: 545313 - RNA, 19 nt, Artificial Sequence
  Description of Artificial Sequence: Synthetic oligonucleotide
  Sense strand starting at position 2900 of SEQ ID NO: 318210
gauaaugcuuagguuauau

SEQ ID NO: 545314 - RNA, 19 nt, Artificial Sequence
  Description of Artificial Sequence: Synthetic oligonucleotide
  Antisense strand to SEQ ID NO: 545313
auauaaccuaagcauuauc

SEQ ID NO: 545315 - RNA, 19 nt, Artificial Sequence
  Description of Artificial Sequence: Synthetic oligonucleotide
  Sense strand starting at position 2934 of SEQ ID NO: 318210
ugaccaauguguuugauga

SEQ ID NO: 545316 - RNA, 19 nt, Artificial Sequence
  Description of Artificial Sequence: Synthetic oligonucleotide
  Antisense strand to SEQ ID NO: 545315
ucaucaaacacauugguca

SEQ ID NO: 545317 - RNA, 19 nt, Artificial Sequence
  Description of Artificial Sequence: Synthetic oligonucleotide
  Sense strand starting at position 2935 of SEQ ID NO: 318210
gaccaauguguuugaugau

SEQ ID NO: 545318 - RNA, 19 nt, Artificial Sequence
  Description of Artificial Sequence: Synthetic oligonucleotide
  Antisense strand to SEQ ID NO: 545317
aucaucaaacacauugguc

SEQ ID NO: 545319 - RNA, 19 nt, Artificial Sequence
  Description of Artificial Sequence: Synthetic oligonucleotide
  Sense strand starting at position 2966 of SEQ ID NO: 318210
uuucuaagucuugggaucu

SEQ ID NO: 545320 - RNA, 19 nt, Artificial Sequence
  Description of Artificial Sequence: Synthetic oligonucleotide
  Antisense strand to SEQ ID NO: 545319
agaucccaagacuuagaaa

SEQ ID NO: 545321 - RNA, 19 nt, Artificial Sequence
  Description of Artificial Sequence: Synthetic oligonucleotide
  Sense strand starting at position 3542 of SEQ ID NO: 318210
ugacuacuguggguacuua

SEQ ID NO: 545322 - RNA, 19 nt, Artificial Sequence
  Description of Artificial Sequence: Synthetic oligonucleotide
  Antisense strand to SEQ ID NO: 545321
uaaguacccacaguaguca

SEQ ID NO: 545323 - RNA, 19 nt, Artificial Sequence
  Description of Artificial Sequence: Synthetic oligonucleotide
  Sense strand starting at position 3543 of SEQ ID NO: 318210
gacuacuguggguacuuaa

SEQ ID NO: 545324 - RNA, 19 nt, Artificial Sequence
  Description of Artificial Sequence: Synthetic oligonucleotide
  Antisense strand to SEQ ID NO: 545323
uuaaguacccacaguaguc

SEQ ID NO: 545325 - RNA, 19 nt, Artificial Sequence
  Description of Artificial Sequence: Synthetic oligonucleotide
  Sense strand starting at position 47 of SEQ ID NO: 318211
uucugcccucuggagaauu

SEQ ID NO: 545326 - RNA, 19 nt, Artificial Sequence
  Description of Artificial Sequence: Synthetic oligonucleotide
  Antisense strand to SEQ ID NO: 545325
aauucuccagagggcagaa

SEQ ID NO: 545327 - RNA, 19 nt, Artificial Sequence
  Description of Artificial Sequence: Synthetic oligonucleotide
  Sense strand starting at position 236 of SEQ ID NO: 318211
agccuauaucgggaagguu

SEQ ID NO: 545328 - RNA, 19 nt, Artificial Sequence
  Description of Artificial Sequence: Synthetic oligonucleotide
  Antisense strand to SEQ ID NO: 545327
aaccuucccgauauaggcu

SEQ ID NO: 545329 - RNA, 19 nt, Artificial Sequence
  Description of Artificial Sequence: Synthetic oligonucleotide
  Sense strand starting at position 239 of SEQ ID NO: 318211
cuauaucgggaagguuaga

SEQ ID NO: 545330 - RNA, 19 nt, Artificial Sequence
  Description of Artificial Sequence: Synthetic oligonucleotide
  Antisense strand to SEQ ID NO: 545329
ucuaaccuucccgauauag

SEQ ID NO: 545331 - RNA, 19 nt, Artificial Sequence
  Description of Artificial Sequence: Synthetic oligonucleotide
  Sense strand starting at position 263 of SEQ ID NO: 318211
auguguuaucucuacucug

SEQ ID NO: 545332 - RNA, 19 nt, Artificial Sequence
  Description of Artificial Sequence: Synthetic oligonucleotide
  Antisense strand to SEQ ID NO: 545331
cagaguagagauaacacau

SEQ ID NO: 545333 - RNA, 19 nt, Artificial Sequence
  Description of Artificial Sequence: Synthetic oligonucleotide
  Sense strand starting at position 266 of SEQ ID NO: 318211
uguuaucucuacucugaga

SEQ ID NO: 545334 - RNA, 19 nt, Artificial Sequence
  Description of Artificial Sequence: Synthetic oligonucleotide
  Antisense strand to SEQ ID NO: 545333
ucucagaguagagauaaca

SEQ ID NO: 545335 - RNA, 19 nt, Artificial Sequence
  Description of Artificial Sequence: Synthetic oligonucleotide
  Sense strand starting at position 268 of SEQ ID NO: 318211
uuaucucuacucugagaag

SEQ ID NO: 545336 - RNA, 19 nt, Artificial Sequence
  Description of Artificial Sequence: Synthetic oligonucleotide
  Antisense strand to SEQ ID NO: 545335
cuucucagaguagagauaa

SEQ ID NO: 545337 - RNA, 19 nt, Artificial Sequence
  Description of Artificial Sequence: Synthetic oligonucleotide
  Sense strand starting at position 279 of SEQ ID NO: 318211
cugagaaggccugacguau

SEQ ID NO: 545338 - RNA, 19 nt, Artificial Sequence
  Description of Artificial Sequence: Synthetic oligonucleotide
  Antisense strand to SEQ ID NO: 545337
auacgucaggccuucucag

SEQ ID NO: 545339 - RNA, 19 nt, Artificial Sequence
  Description of Artificial Sequence: Synthetic oligonucleotide
  Sense strand starting at position 419 of SEQ ID NO: 318211
caagguagagucugauagu

SEQ ID NO: 545340 - RNA, 19 nt, Artificial Sequence
  Description of Artificial Sequence: Synthetic oligonucleotide
  Antisense strand to SEQ ID NO: 545339
acuaucagacucuaccuug

SEQ ID NO: 545341 - RNA, 19 nt, Artificial Sequence
  Description of Artificial Sequence: Synthetic oligonucleotide
  Sense strand starting at position 449 of SEQ ID NO: 318211
gcaacucaagccguguuua

SEQ ID NO: 545342 - RNA, 19 nt, Artificial Sequence
  Description of Artificial Sequence: Synthetic oligonucleotide
  Antisense strand to SEQ ID NO: 545341
uaaacacggcuugaguugc

SEQ ID NO: 545343 - RNA, 19 nt, Artificial Sequence
  Description of Artificial Sequence: Synthetic oligonucleotide
  Sense strand starting at position 460 of SEQ ID NO: 318211
cguguuuagaauuaauuga

SEQ ID NO: 545344 - RNA, 19 nt, Artificial Sequence
  Description of Artificial Sequence: Synthetic oligonucleotide
  Antisense strand to SEQ ID NO: 545343
ucaauuaauucuaaacacg

SEQ ID NO: 545345 - RNA, 19 nt, Artificial Sequence
  Description of Artificial Sequence: Synthetic oligonucleotide
  Sense strand starting at position 664 of SEQ ID NO: 318211
auuuaaguguuuccuguuu

SEQ ID NO: 545346 - RNA, 19 nt, Artificial Sequence
  Description of Artificial Sequence: Synthetic oligonucleotide
  Antisense strand to SEQ ID NO: 545345
aaacaggaaacacuuaaau

SEQ ID NO: 545347 - RNA, 19 nt, Artificial Sequence
  Description of Artificial Sequence: Synthetic oligonucleotide
  Sense strand starting at position 782 of SEQ ID NO: 318211
uuuaaauggugggugcaaa

SEQ ID NO: 545348 - RNA, 19 nt, Artificial Sequence
  Description of Artificial Sequence: Synthetic oligonucleotide
  Antisense strand to SEQ ID NO: 545347
uuugcacccaccauuuaaa

SEQ ID NO: 545349 - RNA, 19 nt, Artificial Sequence
  Description of Artificial Sequence: Synthetic oligonucleotide
  Sense strand starting at position 1068 of SEQ ID NO: 318211
acuuauugcguugaaggau

SEQ ID NO: 545350 - RNA, 19 nt, Artificial Sequence
  Description of Artificial Sequence: Synthetic oligonucleotide
  Antisense strand to SEQ ID NO: 545349
auccuucaacgcaauaagu

SEQ ID NO: 545351 - RNA, 19 nt, Artificial Sequence
  Description of Artificial Sequence: Synthetic oligonucleotide
  Sense strand starting at position 1100 of SEQ ID NO: 318211
acuccaugauuagucacau

SEQ ID NO: 545352 - RNA, 19 nt, Artificial Sequence
  Description of Artificial Sequence: Synthetic oligonucleotide
  Antisense strand to SEQ ID NO: 545351
augugacuaaucauggagu

SEQ ID NO: 545353 - RNA, 19 nt, Artificial Sequence
  Description of Artificial Sequence: Synthetic oligonucleotide
  Sense strand starting at position 2408 of SEQ ID NO: 318211
gcugauuucugcccggauu

SEQ ID NO: 545354 - RNA, 19 nt, Artificial Sequence
  Description of Artificial Sequence: Synthetic oligonucleotide
  Antisense strand to SEQ ID NO: 545353
aauccgggcagaaaucagc

SEQ ID NO: 545355 - RNA, 19 nt, Artificial Sequence
  Description of Artificial Sequence: Synthetic oligonucleotide
  Sense strand starting at position 2410 of SEQ ID NO: 318211
ugauuucugcccggauucu

SEQ ID NO: 545356 - RNA, 19 nt, Artificial Sequence
  Description of Artificial Sequence: Synthetic oligonucleotide
  Antisense strand to SEQ ID NO: 545355
agaauccgggcagaaauca

SEQ ID NO: 545357 - RNA, 19 nt, Artificial Sequence
  Description of Artificial Sequence: Synthetic oligonucleotide
  Sense strand starting at position 2550 of SEQ ID NO: 318211
aagggauaauguuucgagu

SEQ ID NO: 545358 - RNA, 19 nt, Artificial Sequence
  Description of Artificial Sequence: Synthetic oligonucleotide
  Antisense strand to SEQ ID NO: 545357
acucgaaacauuaucccuu

SEQ ID NO: 545359 - RNA, 19 nt, Artificial Sequence
  Description of Artificial Sequence: Synthetic oligonucleotide
  Sense strand starting at position 2564 of SEQ ID NO: 318211
cgaguaacgcuguuucucu

SEQ ID NO: 545360 - RNA, 19 nt, Artificial Sequence
  Description of Artificial Sequence: Synthetic oligonucleotide
  Antisense strand to SEQ ID NO: 545359
agagaaacagcguuacucg

SEQ ID NO: 545361 - RNA, 19 nt, Artificial Sequence
  Description of Artificial Sequence: Synthetic oligonucleotide
  Sense strand starting at position 2579 of SEQ ID NO: 318211
cucuaacuuguaggaauga

SEQ ID NO: 545362 - RNA, 19 nt, Artificial Sequence
  Description of Artificial Sequence: Synthetic oligonucleotide
  Antisense strand to SEQ ID NO: 545361
ucauuccuacaaguuagag

SEQ ID NO: 545363 - RNA, 19 nt, Artificial Sequence
  Description of Artificial Sequence: Synthetic oligonucleotide
  Sense strand starting at position 2638 of SEQ ID NO: 318211
gaagguaaugugggauuaa

SEQ ID NO: 545364 - RNA, 19 nt, Artificial Sequence
  Description of Artificial Sequence: Synthetic oligonucleotide
  Antisense strand to SEQ ID NO: 545363
uuaaucccacauuaccuuc

SEQ ID NO: 545365 - RNA, 19 nt, Artificial Sequence
  Description of Artificial Sequence: Synthetic oligonucleotide
  Sense strand starting at position 2691 of SEQ ID NO: 318211
auguuaguuaaauggaaag

SEQ ID NO: 545366 - RNA, 19 nt, Artificial Sequence
  Description of Artificial Sequence: Synthetic oligonucleotide
  Antisense strand to SEQ ID NO: 545365
cuuuccauuuaacuaacau

SEQ ID NO: 545367 - RNA, 19 nt, Artificial Sequence
  Description of Artificial Sequence: Synthetic oligonucleotide
  Sense strand starting at position 2693 of SEQ ID NO: 318211
guuaguuaaauggaaaguu

SEQ ID NO: 545368 - RNA, 19 nt, Artificial Sequence
  Description of Artificial Sequence: Synthetic oligonucleotide
  Antisense strand to SEQ ID NO: 545367
aacuuuccauuuaacuaac

SEQ ID NO: 545369 - RNA, 19 nt, Artificial Sequence
  Description of Artificial Sequence: Synthetic oligonucleotide
  Sense strand starting at position 2740 of SEQ ID NO: 318211
uauuauggaucuguaugau

SEQ ID NO: 545370 - RNA, 19 nt, Artificial Sequence
  Description of Artificial Sequence: Synthetic oligonucleotide
  Antisense strand to SEQ ID NO: 545369
aucauacagauccauaaua

SEQ ID NO: 545371 - RNA, 19 nt, Artificial Sequence
  Description of Artificial Sequence: Synthetic oligonucleotide
  Sense strand starting at position 2746 of SEQ ID NO: 318211
ggaucuguaugaucuguau

SEQ ID NO: 545372 - RNA, 19 nt, Artificial Sequence
  Description of Artificial Sequence: Synthetic oligonucleotide
  Antisense strand to SEQ ID NO: 545371
auacagaucauacagaucc

SEQ ID NO: 545373 - RNA, 19 nt, Artificial Sequence
  Description of Artificial Sequence: Synthetic oligonucleotide
  Sense strand starting at position 2750 of SEQ ID NO: 318211
cuguaugaucuguaugcag

SEQ ID NO: 545374 - RNA, 19 nt, Artificial Sequence
  Description of Artificial Sequence: Synthetic oligonucleotide
  Antisense strand to SEQ ID NO: 545373
cugcauacagaucauacag

SEQ ID NO: 545375 - RNA, 19 nt, Artificial Sequence
  Description of Artificial Sequence: Synthetic oligonucleotide
  Sense strand starting at position 2913 of SEQ ID NO: 318211
agaguaggccuuuggaaca

SEQ ID NO: 545376 - RNA, 19 nt, Artificial Sequence
  Description of Artificial Sequence: Synthetic oligonucleotide
  Antisense strand to SEQ ID NO: 545375
uguuccaaaggccuacucu

SEQ ID NO: 545377 - RNA, 19 nt, Artificial Sequence
  Description of Artificial Sequence: Synthetic oligonucleotide
  Sense strand starting at position 3077 of SEQ ID NO: 318211
uggcgugacauguaaagga

SEQ ID NO: 545378 - RNA, 19 nt, Artificial Sequence
  Description of Artificial Sequence: Synthetic oligonucleotide
  Antisense strand to SEQ ID NO: 545377
uccuuuacaugucacgcca

SEQ ID NO: 545379 - RNA, 19 nt, Artificial Sequence
  Description of Artificial Sequence: Synthetic oligonucleotide
  Sense strand starting at position 3170 of SEQ ID NO: 318211
ggugaauugaacuguugga

SEQ ID NO: 545380 - RNA, 19 nt, Artificial Sequence
  Description of Artificial Sequence: Synthetic oligonucleotide
  Antisense strand to SEQ ID NO: 545379
uccaacaguucaauucacc

SEQ ID NO: 545381 - RNA, 19 nt, Artificial Sequence
  Description of Artificial Sequence: Synthetic oligonucleotide
  Sense strand starting at position 3357 of SEQ ID NO: 318211
ggguuugacacuuagguca

SEQ ID NO: 545382 - RNA, 19 nt, Artificial Sequence
  Description of Artificial Sequence: Synthetic oligonucleotide
  Antisense strand to SEQ ID NO: 545381
ugaccuaagugucaaaccc

SEQ ID NO: 545383 - RNA, 19 nt, Artificial Sequence
  Description of Artificial Sequence: Synthetic oligonucleotide
  Sense strand starting at position 3365 of SEQ ID NO: 318211
cacuuaggucacugguaga

SEQ ID NO: 545384 - RNA, 19 nt, Artificial Sequence
  Description of Artificial Sequence: Synthetic oligonucleotide
  Antisense strand to SEQ ID NO: 545383
ucuaccagugaccuaagug

SEQ ID NO: 545385 - RNA, 19 nt, Artificial Sequence
  Description of Artificial Sequence: Synthetic oligonucleotide
  Sense strand starting at position 3435 of SEQ ID NO: 318211
aucccaauauagucuggua

SEQ ID NO: 545386 - RNA, 19 nt, Artificial Sequence
  Description of Artificial Sequence: Synthetic oligonucleotide
  Antisense strand to SEQ ID NO: 545385
uaccagacuauauugggau

SEQ ID NO: 545387 - RNA, 19 nt, Artificial Sequence
  Description of Artificial Sequence: Synthetic oligonucleotide
  Sense strand starting at position 3437 of SEQ ID NO: 318211
cccaauauagucugguaau

SEQ ID NO: 545388 - RNA, 19 nt, Artificial Sequence
  Description of Artificial Sequence: Synthetic oligonucleotide
  Antisense strand to SEQ ID NO: 545387
auuaccagacuauauuggg

SEQ ID NO: 545389 - RNA, 19 nt, Artificial Sequence
  Description of Artificial Sequence: Synthetic oligonucleotide
  Sense strand starting at position 3473 of SEQ ID NO: 318211
ucagauagcugacucucaa

SEQ ID NO: 545390 - RNA, 19 nt, Artificial Sequence
  Description of Artificial Sequence: Synthetic oligonucleotide
  Antisense strand to SEQ ID NO: 545389
uugagagucagcuaucuga

SEQ ID NO: 545391 - RNA, 19 nt, Artificial Sequence
  Description of Artificial Sequence: Synthetic oligonucleotide
  Sense strand starting at position 3553 of SEQ ID NO: 318211
guguuauaagaguaggaua

SEQ ID NO: 545392 - RNA, 19 nt, Artificial Sequence
  Description of Artificial Sequence: Synthetic oligonucleotide
  Antisense strand to SEQ ID NO: 545391
uauccuacucuuauaacac

SEQ ID NO: 545393 - RNA, 19 nt, Artificial Sequence
  Description of Artificial Sequence: Synthetic oligonucleotide
  Sense strand starting at position 3595 of SEQ ID NO: 318211
agguaauugaguggaacau

SEQ ID NO: 545394 - RNA, 19 nt, Artificial Sequence
  Description of Artificial Sequence: Synthetic oligonucleotide
  Antisense strand to SEQ ID NO: 545393
auguuccacucaauuaccu

SEQ ID NO: 545395 - RNA, 19 nt, Artificial Sequence
  Description of Artificial Sequence: Synthetic oligonucleotide
  Sense strand starting at position 3679 of SEQ ID NO: 318211
guaucagacaguugugaca

SEQ ID NO: 545396 - RNA, 19 nt, Artificial Sequence
  Description of Artificial Sequence: Synthetic oligonucleotide
  Antisense strand to SEQ ID NO: 545395
ugucacaacugucugauac

SEQ ID NO: 545397 - RNA, 19 nt, Artificial Sequence
  Description of Artificial Sequence: Synthetic oligonucleotide
  Sense strand starting at position 3691 of SEQ ID NO: 318211
ugugacagcacugauuaga

SEQ ID NO: 545398 - RNA, 19 nt, Artificial Sequence
  Description of Artificial Sequence: Synthetic oligonucleotide
  Antisense strand to SEQ ID NO: 545397
ucuaaucagugcugucaca

SEQ ID NO: 545399 - RNA, 19 nt, Artificial Sequence
  Description of Artificial Sequence: Synthetic oligonucleotide
  Sense strand starting at position 3701 of SEQ ID NO: 318211
cugauuagaggcugaacau

SEQ ID NO: 545400 - RNA, 19 nt, Artificial Sequence
  Description of Artificial Sequence: Synthetic oligonucleotide
  Antisense strand to SEQ ID NO: 545399
auguucagccucuaaucag

SEQ ID NO: 545401 - RNA, 19 nt, Artificial Sequence
  Description of Artificial Sequence: Synthetic oligonucleotide
  Sense strand starting at position 3710 of SEQ ID NO: 318211
ggcugaacauuauucuaag

SEQ ID NO: 545402 - RNA, 19 nt, Artificial Sequence
  Description of Artificial Sequence: Synthetic oligonucleotide
  Antisense strand to SEQ ID NO: 545401
cuuagaauaauguucagcc

SEQ ID NO: 545403 - RNA, 19 nt, Artificial Sequence
  Description of Artificial Sequence: Synthetic oligonucleotide
  Sense strand starting at position 3847 of SEQ ID NO: 318211
ugagcacuuugacucagaa

SEQ ID NO: 545404 - RNA, 19 nt, Artificial Sequence
  Description of Artificial Sequence: Synthetic oligonucleotide
  Antisense strand to SEQ ID NO: 545403
uucugagucaaagugcuca

SEQ ID NO: 545405 - RNA, 19 nt, Artificial Sequence
  Description of Artificial Sequence: Synthetic oligonucleotide
  Sense strand starting at position 14 of SEQ ID NO: 318212
cugaacuuugcugaaaugu

SEQ ID NO: 545406 - RNA, 19 nt, Artificial Sequence
  Description of Artificial Sequence: Synthetic oligonucleotide
  Antisense strand to SEQ ID NO: 545405
acauuucagcaaaguucag

SEQ ID NO: 545407 - RNA, 19 nt, Artificial Sequence
  Description of Artificial Sequence: Synthetic oligonucleotide
  Sense strand starting at position 29 of SEQ ID NO: 318212
auguccucaucuguuaaga

SEQ ID NO: 545408 - RNA, 19 nt, Artificial Sequence
  Description of Artificial Sequence: Synthetic oligonucleotide
  Antisense strand to SEQ ID NO: 545407
ucuuaacagaugaggacau

SEQ ID NO: 545409 - RNA, 19 nt, Artificial Sequence
  Description of Artificial Sequence: Synthetic oligonucleotide
  Sense strand starting at position 118 of SEQ ID NO: 318212
gaguuuaaauucuuugagu

SEQ ID NO: 545410 - RNA, 19 nt, Artificial Sequence
  Description of Artificial Sequence: Synthetic oligonucleotide
  Antisense strand to SEQ ID NO: 545409
acucaaagaauuuaaacuc

SEQ ID NO: 545411 - RNA, 19 nt, Artificial Sequence
  Description of Artificial Sequence: Synthetic oligonucleotide
  Sense strand starting at position 119 of SEQ ID NO: 318212
aguuuaaauucuuugaguc

SEQ ID NO: 545412 - RNA, 19 nt, Artificial Sequence
  Description of Artificial Sequence: Synthetic oligonucleotide
  Antisense strand to SEQ ID NO: 545411
gacucaaagaauuuaaacu

SEQ ID NO: 545413 - RNA, 19 nt, Artificial Sequence
  Description of Artificial Sequence: Synthetic oligonucleotide
  Sense strand starting at position 259 of SEQ ID NO: 318212
ucuagucuugagggcugaa

SEQ ID NO: 545414 - RNA, 19 nt, Artificial Sequence
  Description of Artificial Sequence: Synthetic oligonucleotide
  Antisense strand to SEQ ID NO: 545413
uucagcccucaagacuaga

SEQ ID NO: 545415 - RNA, 19 nt, Artificial Sequence
  Description of Artificial Sequence: Synthetic oligonucleotide
  Sense strand starting at position 262 of SEQ ID NO: 318212
agucuugagggcugaauga

SEQ ID NO: 545416 - RNA, 19 nt, Artificial Sequence
  Description of Artificial Sequence: Synthetic oligonucleotide
  Antisense strand to SEQ ID NO: 545415
ucauucagcccucaagacu

SEQ ID NO: 545417 - RNA, 19 nt, Artificial Sequence
  Description of Artificial Sequence: Synthetic oligonucleotide
  Sense strand starting at position 299 of SEQ ID NO: 318212
cucucucagcuuuggagaa

SEQ ID NO: 545418 - RNA, 19 nt, Artificial Sequence
  Description of Artificial Sequence: Synthetic oligonucleotide
  Antisense strand to SEQ ID NO: 545417
uucuccaaagcugagagag

SEQ ID NO: 545419 - RNA, 19 nt, Artificial Sequence
  Description of Artificial Sequence: Synthetic oligonucleotide
  Sense strand starting at position 311 of SEQ ID NO: 318212
uggagaaagucccuccaca

SEQ ID NO: 545420 - RNA, 19 nt, Artificial Sequence
  Description of Artificial Sequence: Synthetic oligonucleotide
  Antisense strand to SEQ ID NO: 545419
uguggagggacuuucucca

SEQ ID NO: 545421 - RNA, 19 nt, Artificial Sequence
  Description of Artificial Sequence: Synthetic oligonucleotide
  Sense strand starting at position 433 of SEQ ID NO: 318212
ggaugacgucuccaaauug

SEQ ID NO: 545422 - RNA, 19 nt, Artificial Sequence
  Description of Artificial Sequence: Synthetic oligonucleotide
  Antisense strand to SEQ ID NO: 545421
caauuuggagacgucaucc

SEQ ID NO: 545423 - RNA, 19 nt, Artificial Sequence
  Description of Artificial Sequence: Synthetic oligonucleotide
  Sense strand starting at position 477 of SEQ ID NO: 318212
gaugcugaagcggagaauu

SEQ ID NO: 545424 - RNA, 19 nt, Artificial Sequence
  Description of Artificial Sequence: Synthetic oligonucleotide
  Antisense strand to SEQ ID NO: 545423
aauucuccgcuucagcauc

SEQ ID NO: 545425 - RNA, 19 nt, Artificial Sequence
  Description of Artificial Sequence: Synthetic oligonucleotide
  Sense strand starting at position 570 of SEQ ID NO: 318212
guggucagggcauaucaaa

SEQ ID NO: 545426 - RNA, 19 nt, Artificial Sequence
  Description of Artificial Sequence: Synthetic oligonucleotide
  Antisense strand to SEQ ID NO: 545425
uuugauaugcccugaccac

SEQ ID NO: 545427 - RNA, 19 nt, Artificial Sequence
  Description of Artificial Sequence: Synthetic oligonucleotide
  Sense strand starting at position 799 of SEQ ID NO: 318212
cuggaaugcgguuaauuau

SEQ ID NO: 545428 - RNA, 19 nt, Artificial Sequence
  Description of Artificial Sequence: Synthetic oligonucleotide
  Antisense strand to SEQ ID NO: 545427
auaauuaaccgcauuccag

SEQ ID NO: 545429 - RNA, 19 nt, Artificial Sequence
  Description of Artificial Sequence: Synthetic oligonucleotide
  Sense strand starting at position 808 of SEQ ID NO: 318212
gguuaauuauuacugugag

SEQ ID NO: 545430 - RNA, 19 nt, Artificial Sequence
  Description of Artificial Sequence: Synthetic oligonucleotide
  Antisense strand to SEQ ID NO: 545429
cucacaguaauaauuaacc

SEQ ID NO: 545431 - RNA, 19 nt, Artificial Sequence
  Description of Artificial Sequence: Synthetic oligonucleotide
  Sense strand starting at position 814 of SEQ ID NO: 318212
uuauuacugugagccaaga

SEQ ID NO: 545432 - RNA, 19 nt, Artificial Sequence
  Description of Artificial Sequence: Synthetic oligonucleotide
  Antisense strand to SEQ ID NO: 545431
ucuuggcucacaguaauaa

SEQ ID NO: 545433 - RNA, 19 nt, Artificial Sequence
  Description of Artificial Sequence: Synthetic oligonucleotide
  Sense strand starting at position 1120 of SEQ ID NO: 318212
ccaagugcucacugaacau

SEQ ID NO: 545434 - RNA, 19 nt, Artificial Sequence
  Description of Artificial Sequence: Synthetic oligonucleotide
  Antisense strand to SEQ ID NO: 545433
auguucagugagcacuugg

SEQ ID NO: 545435 - RNA, 19 nt, Artificial Sequence
  Description of Artificial Sequence: Synthetic oligonucleotide
  Sense strand starting at position 1325 of SEQ ID NO: 318212
gguuauuacccagagggug

SEQ ID NO: 545436 - RNA, 19 nt, Artificial Sequence
  Description of Artificial Sequence: Synthetic oligonucleotide
  Antisense strand to SEQ ID NO: 545435
cacccucuggguaauaacc

SEQ ID NO: 545437 - RNA, 19 nt, Artificial Sequence
  Description of Artificial Sequence: Synthetic oligonucleotide
  Sense strand starting at position 1333 of SEQ ID NO: 318212
cccagagggugucuuggau

SEQ ID NO: 545438 - RNA, 19 nt, Artificial Sequence
  Description of Artificial Sequence: Synthetic oligonucleotide
  Antisense strand to SEQ ID NO: 545437
auccaagacacccucuggg

SEQ ID NO: 545439 - RNA, 19 nt, Artificial Sequence
  Description of Artificial Sequence: Synthetic oligonucleotide
  Sense strand starting at position 2180 of SEQ ID NO: 318212
aguuaauuacaggagcagu

SEQ ID NO: 545440 - RNA, 19 nt, Artificial Sequence
  Description of Artificial Sequence: Synthetic oligonucleotide
  Antisense strand to SEQ ID NO: 545439
acugcuccuguaauuaacu

SEQ ID NO: 545441 - RNA, 19 nt, Artificial Sequence
  Description of Artificial Sequence: Synthetic oligonucleotide
  Sense strand starting at position 2218 of SEQ ID NO: 318212
cgaucccugaaggguuaua

SEQ ID NO: 545442 - RNA, 19 nt, Artificial Sequence
  Description of Artificial Sequence: Synthetic oligonucleotide
  Antisense strand to SEQ ID NO: 545441
uauaacccuucagggaucg

SEQ ID NO: 545443 - RNA, 19 nt, Artificial Sequence
  Description of Artificial Sequence: Synthetic oligonucleotide
  Sense strand starting at position 2264 of SEQ ID NO: 318212
ccuaauuaagagcgauuau

SEQ ID NO: 545444 - RNA, 19 nt, Artificial Sequence
  Description of Artificial Sequence: Synthetic oligonucleotide
  Antisense strand to SEQ ID NO: 545443
auaaucgcucuuaauuagg

SEQ ID NO: 545445 - RNA, 19 nt, Artificial Sequence
  Description of Artificial Sequence: Synthetic oligonucleotide
  Sense strand starting at position 2290 of SEQ ID NO: 318212
ggaaguucgccgaguccca

SEQ ID NO: 545446 - RNA, 19 nt, Artificial Sequence
  Description of Artificial Sequence: Synthetic oligonucleotide
  Antisense strand to SEQ ID NO: 545445
ugggacucggcgaacuucc

SEQ ID NO: 545447 - RNA, 19 nt, Artificial Sequence
  Description of Artificial Sequence: Synthetic oligonucleotide
  Sense strand starting at position 2362 of SEQ ID NO: 318212
ucccucuaccgccagaaua

SEQ ID NO: 545448 - RNA, 19 nt, Artificial Sequence
  Description of Artificial Sequence: Synthetic oligonucleotide
  Antisense strand to SEQ ID NO: 545447
uauucuggcgguagaggga

SEQ ID NO: 545449 - RNA, 19 nt, Artificial Sequence
  Description of Artificial Sequence: Synthetic oligonucleotide
  Sense strand starting at position 2451 of SEQ ID NO: 318212
uuuacaguuccagaaaguc

SEQ ID NO: 545450 - RNA, 19 nt, Artificial Sequence
  Description of Artificial Sequence: Synthetic oligonucleotide
  Antisense strand to SEQ ID NO: 545449
gacuuucuggaacuguaaa

SEQ ID NO: 545451 - RNA, 19 nt, Artificial Sequence
  Description of Artificial Sequence: Synthetic oligonucleotide
  Sense strand starting at position 2488 of SEQ ID NO: 318212
ccaguaucccugugaaaga

SEQ ID NO: 545452 - RNA, 19 nt, Artificial Sequence
  Description of Artificial Sequence: Synthetic oligonucleotide
  Antisense strand to SEQ ID NO: 545451
ucuuucacagggauacugg

SEQ ID NO: 545453 - RNA, 19 nt, Artificial Sequence
  Description of Artificial Sequence: Synthetic oligonucleotide
  Sense strand starting at position 2501 of SEQ ID NO: 318212
gaaagaaauguaugcacuu

SEQ ID NO: 545454 - RNA, 19 nt, Artificial Sequence
  Description of Artificial Sequence: Synthetic oligonucleotide
  Antisense strand to SEQ ID NO: 545453
aagugcauacauuucuuuc

SEQ ID NO: 545455 - RNA, 19 nt, Artificial Sequence
  Description of Artificial Sequence: Synthetic oligonucleotide
  Sense strand starting at position 2610 of SEQ ID NO: 318212
ccgagaaguggucaggagu

SEQ ID NO: 545456 - RNA, 19 nt, Artificial Sequence
  Description of Artificial Sequence: Synthetic oligonucleotide
  Antisense strand to SEQ ID NO: 545455
acuccugaccacuucucgg

SEQ ID NO: 545457 - RNA, 19 nt, Artificial Sequence
  Description of Artificial Sequence: Synthetic oligonucleotide
  Sense strand starting at position 2641 of SEQ ID NO: 318212
aaugguucggagugaagaa

SEQ ID NO: 545458 - RNA, 19 nt, Artificial Sequence
  Description of Artificial Sequence: Synthetic oligonucleotide
  Antisense strand to SEQ ID NO: 545457
uucuucacuccgaaccauu

SEQ ID NO: 545459 - RNA, 19 nt, Artificial Sequence
  Description of Artificial Sequence: Synthetic oligonucleotide
  Sense strand starting at position 2642 of SEQ ID NO: 318212
augguucggagugaagaau

SEQ ID NO: 545460 - RNA, 19 nt, Artificial Sequence
  Description of Artificial Sequence: Synthetic oligonucleotide
  Antisense strand to SEQ ID NO: 545459
auucuucacuccgaaccau

SEQ ID NO: 545461 - RNA, 19 nt, Artificial Sequence
  Description of Artificial Sequence: Synthetic oligonucleotide
  Sense strand starting at position 2718 of SEQ ID NO: 318212
aguugaaaucucuguacuu

SEQ ID NO: 545462 - RNA, 19 nt, Artificial Sequence
  Description of Artificial Sequence: Synthetic oligonucleotide
  Antisense strand to SEQ ID NO: 545461
aaguacagagauuucaacu

SEQ ID NO: 545463 - RNA, 19 nt, Artificial Sequence
  Description of Artificial Sequence: Synthetic oligonucleotide
  Sense strand starting at position 2719 of SEQ ID NO: 318212
guugaaaucucuguacuug

SEQ ID NO: 545464 - RNA, 19 nt, Artificial Sequence
  Description of Artificial Sequence: Synthetic oligonucleotide
  Antisense strand to SEQ ID NO: 545463
caaguacagagauuucaac

SEQ ID NO: 545465 - RNA, 19 nt, Artificial Sequence
  Description of Artificial Sequence: Synthetic oligonucleotide
  Sense strand starting at position 2720 of SEQ ID NO: 318212
uugaaaucucuguacuugu

SEQ ID NO: 545466 - RNA, 19 nt, Artificial Sequence
  Description of Artificial Sequence: Synthetic oligonucleotide
  Antisense strand to SEQ ID NO: 545465
acaaguacagagauuucaa

SEQ ID NO: 545467 - RNA, 19 nt, Artificial Sequence
  Description of Artificial Sequence: Synthetic oligonucleotide
  Sense strand starting at position 2812 of SEQ ID NO: 318212
guuuguuugagccuguguu

SEQ ID NO: 545468 - RNA, 19 nt, Artificial Sequence
  Description of Artificial Sequence: Synthetic oligonucleotide
  Antisense strand to SEQ ID NO: 545467
aacacaggcucaaacaaac

SEQ ID NO: 545469 - RNA, 19 nt, Artificial Sequence
  Description of Artificial Sequence: Synthetic oligonucleotide
  Sense strand starting at position 2829 of SEQ ID NO: 318212
uuugucgugcguguuugaa

SEQ ID NO: 545470 - RNA, 19 nt, Artificial Sequence
  Description of Artificial Sequence: Synthetic oligonucleotide
  Antisense strand to SEQ ID NO: 545469
uucaaacacgcacgacaaa

SEQ ID NO: 545471 - RNA, 19 nt, Artificial Sequence
  Description of Artificial Sequence: Synthetic oligonucleotide
  Sense strand starting at position 3076 of SEQ ID NO: 318212
uccaaagccucagugauga

SEQ ID NO: 545472 - RNA, 19 nt, Artificial Sequence
  Description of Artificial Sequence: Synthetic oligonucleotide
  Antisense strand to SEQ ID NO: 545471
ucaucacugaggcuuugga

SEQ ID NO: 545473 - RNA, 19 nt, Artificial Sequence
  Description of Artificial Sequence: Synthetic oligonucleotide
  Sense strand starting at position 3225 of SEQ ID NO: 318212
ccuauaucugaacgauuau

SEQ ID NO: 545474 - RNA, 19 nt, Artificial Sequence
  Description of Artificial Sequence: Synthetic oligonucleotide
  Antisense strand to SEQ ID NO: 545473
auaaucguucagauauagg

SEQ ID NO: 545475 - RNA, 19 nt, Artificial Sequence
  Description of Artificial Sequence: Synthetic oligonucleotide
  Sense strand starting at position 3614 of SEQ ID NO: 318212
aagaguaaguaaguccuaa

SEQ ID NO: 545476 - RNA, 19 nt, Artificial Sequence
  Description of Artificial Sequence: Synthetic oligonucleotide
  Antisense strand to SEQ ID NO: 545475
uuaggacuuacuuacucuu

SEQ ID NO: 545477 - RNA, 19 nt, Artificial Sequence
  Description of Artificial Sequence: Synthetic oligonucleotide
  Sense strand starting at position 3769 of SEQ ID NO: 318212
uugagucauaccuggugau

SEQ ID NO: 545478 - RNA, 19 nt, Artificial Sequence
  Description of Artificial Sequence: Synthetic oligonucleotide
  Antisense strand to SEQ ID NO: 545477
aucaccagguaugacucaa

SEQ ID NO: 545479 - RNA, 19 nt, Artificial Sequence
  Description of Artificial Sequence: Synthetic oligonucleotide
  Sense strand starting at position 3770 of SEQ ID NO: 318212
ugagucauaccuggugaua

SEQ ID NO: 545480 - RNA, 19 nt, Artificial Sequence
  Description of Artificial Sequence: Synthetic oligonucleotide
  Antisense strand to SEQ ID NO: 545479
uaucaccagguaugacuca

SEQ ID NO: 545481 - RNA, 19 nt, Artificial Sequence
  Description of Artificial Sequence: Synthetic oligonucleotide
  Sense strand starting at position 3773 of SEQ ID NO: 318212
gucauaccuggugauaguu

SEQ ID NO: 545482 - RNA, 19 nt, Artificial Sequence
  Description of Artificial Sequence: Synthetic oligonucleotide
  Antisense strand to SEQ ID NO: 545481
aacuaucaccagguaugac

SEQ ID NO: 545483 - RNA, 19 nt, Artificial Sequence
  Description of Artificial Sequence: Synthetic oligonucleotide
  Sense strand starting at position 3863 of SEQ ID NO: 318212
caaggugcaggcuauauau

SEQ ID NO: 545484 - RNA, 19 nt, Artificial Sequence
  Description of Artificial Sequence: Synthetic oligonucleotide
  Antisense strand to SEQ ID NO: 545483
auauauagccugcaccuug

SEQ ID NO: 545485 - RNA, 19 nt, Artificial Sequence
  Description of Artificial Sequence: Synthetic oligonucleotide
  Sense strand starting at position 244 of SEQ ID NO: 318213
ugaccacauugcuuaaaug

SEQ ID NO: 545486 - RNA, 19 nt, Artificial Sequence
  Description of Artificial Sequence: Synthetic oligonucleotide
  Antisense strand to SEQ ID NO: 545485
cauuuaagcaaugugguca

SEQ ID NO: 545487 - RNA, 19 nt, Artificial Sequence
  Description of Artificial Sequence: Synthetic oligonucleotide
  Sense strand starting at position 447 of SEQ ID NO: 318213
ccagguggucuuuacggaa

SEQ ID NO: 545488 - RNA, 19 nt, Artificial Sequence
  Description of Artificial Sequence: Synthetic oligonucleotide
  Antisense strand to SEQ ID NO: 545487
uuccguaaagaccaccugg

SEQ ID NO: 545489 - RNA, 19 nt, Artificial Sequence
  Description of Artificial Sequence: Synthetic oligonucleotide
  Sense strand starting at position 463 of SEQ ID NO: 318213
gaagcagucccugaucaga

SEQ ID NO: 545490 - RNA, 19 nt, Artificial Sequence
  Description of Artificial Sequence: Synthetic oligonucleotide
  Antisense strand to SEQ ID NO: 545489
ucugaucagggacugcuuc

SEQ ID NO: 545491 - RNA, 19 nt, Artificial Sequence
  Description of Artificial Sequence: Synthetic oligonucleotide
  Sense strand starting at position 556 of SEQ ID NO: 318213
ugcacuucugcuggagaga

SEQ ID NO: 545492 - RNA, 19 nt, Artificial Sequence
  Description of Artificial Sequence: Synthetic oligonucleotide
  Antisense strand to SEQ ID NO: 545491
ucucuccagcagaagugca

SEQ ID NO: 545493 - RNA, 19 nt, Artificial Sequence
  Description of Artificial Sequence: Synthetic oligonucleotide
  Sense strand starting at position 557 of SEQ ID NO: 318213
gcacuucugcuggagagaa

SEQ ID NO: 545494 - RNA, 19 nt, Artificial Sequence
  Description of Artificial Sequence: Synthetic oligonucleotide
  Antisense strand to SEQ ID NO: 545493
uucucuccagcagaagugc

SEQ ID NO: 545495 - RNA, 19 nt, Artificial Sequence
  Description of Artificial Sequence: Synthetic oligonucleotide
  Sense strand starting at position 609 of SEQ ID NO: 318213
gaaggcuucucauuaggca

SEQ ID NO: 545496 - RNA, 19 nt, Artificial Sequence
  Description of Artificial Sequence: Synthetic oligonucleotide
  Antisense strand to SEQ ID NO: 545495
ugccuaaugagaagccuuc

SEQ ID NO: 545497 - RNA, 19 nt, Artificial Sequence
  Description of Artificial Sequence: Synthetic oligonucleotide
  Sense strand starting at position 815 of SEQ ID NO: 318213
ggacgacucuucucucaga

SEQ ID NO: 545498 - RNA, 19 nt, Artificial Sequence
  Description of Artificial Sequence: Synthetic oligonucleotide
  Antisense strand to SEQ ID NO: 545497
ucugagagaagagucgucc

SEQ ID NO: 545499 - RNA, 19 nt, Artificial Sequence
  Description of Artificial Sequence: Synthetic oligonucleotide
  Sense strand starting at position 865 of SEQ ID NO: 318213
ccaccuuugcgaggaggaa

SEQ ID NO: 545500 - RNA, 19 nt, Artificial Sequence
  Description of Artificial Sequence: Synthetic oligonucleotide
  Antisense strand to SEQ ID NO: 545499
uuccuccucgcaaaggugg

SEQ ID NO: 545501 - RNA, 19 nt, Artificial Sequence
  Description of Artificial Sequence: Synthetic oligonucleotide
  Sense strand starting at position 1037 of SEQ ID NO: 318213
gcacuuagugccugacaca

SEQ ID NO: 545502 - RNA, 19 nt, Artificial Sequence
  Description of Artificial Sequence: Synthetic oligonucleotide
  Antisense strand to SEQ ID NO: 545501
ugugucaggcacuaagugc

SEQ ID NO: 545503 - RNA, 19 nt, Artificial Sequence
  Description of Artificial Sequence: Synthetic oligonucleotide
  Sense strand starting at position 1058 of SEQ ID NO: 318213
guaggagcucgagaaguau

SEQ ID NO: 545504 - RNA, 19 nt, Artificial Sequence
  Description of Artificial Sequence: Synthetic oligonucleotide
  Antisense strand to SEQ ID NO: 545503
auacuucucgagcuccuac

SEQ ID NO: 545505 - RNA, 19 nt, Artificial Sequence
  Description of Artificial Sequence: Synthetic oligonucleotide
  Sense strand starting at position 2193 of SEQ ID NO: 318213
cccauucuugagugcacuu

SEQ ID NO: 545506 - RNA, 19 nt, Artificial Sequence
  Description of Artificial Sequence: Synthetic oligonucleotide
  Antisense strand to SEQ ID NO: 545505
aagugcacucaagaauggg

SEQ ID NO: 545507 - RNA, 19 nt, Artificial Sequence
  Description of Artificial Sequence: Synthetic oligonucleotide
  Sense strand starting at position 2205 of SEQ ID NO: 318213
ugcacuuggagagauguuu

SEQ ID NO: 545508 - RNA, 19 nt, Artificial Sequence
  Description of Artificial Sequence: Synthetic oligonucleotide
  Antisense strand to SEQ ID NO: 545507
aaacaucucuccaagugca

SEQ ID NO: 545509 - RNA, 19 nt, Artificial Sequence
  Description of Artificial Sequence: Synthetic oligonucleotide
  Sense strand starting at position 2213 of SEQ ID NO: 318213
gagagauguuuccuccaac

SEQ ID NO: 545510 - RNA, 19 nt, Artificial Sequence
  Description of Artificial Sequence: Synthetic oligonucleotide
  Antisense strand to SEQ ID NO: 545509
guuggaggaaacaucucuc

SEQ ID NO: 545511 - RNA, 19 nt, Artificial Sequence
  Description of Artificial Sequence: Synthetic oligonucleotide
  Sense strand starting at position 2214 of SEQ ID NO: 318213
agagauguuuccuccaacc

SEQ ID NO: 545512 - RNA, 19 nt, Artificial Sequence
  Description of Artificial Sequence: Synthetic oligonucleotide
  Antisense strand to SEQ ID NO: 545511
gguuggaggaaacaucucu

SEQ ID NO: 545513 - RNA, 19 nt, Artificial Sequence
  Description of Artificial Sequence: Synthetic oligonucleotide
  Sense strand starting at position 2241 of SEQ ID NO: 318213
gagcguucucuccggacuu

SEQ ID NO: 545514 - RNA, 19 nt, Artificial Sequence
  Description of Artificial Sequence: Synthetic oligonucleotide
  Antisense strand to SEQ ID NO: 545513
aaguccggagagaacgcuc

SEQ ID NO: 545515 - RNA, 19 nt, Artificial Sequence
  Description of Artificial Sequence: Synthetic oligonucleotide
  Sense strand starting at position 2265 of SEQ ID NO: 318213
cgauuggauggcgaggaua

SEQ ID NO: 545516 - RNA, 19 nt, Artificial Sequence
  Description of Artificial Sequence: Synthetic oligonucleotide
  Antisense strand to SEQ ID NO: 545515
uauccucgccauccaaucg

SEQ ID NO: 545517 - RNA, 19 nt, Artificial Sequence
  Description of Artificial Sequence: Synthetic oligonucleotide
  Sense strand starting at position 2267 of SEQ ID NO: 318213
auuggauggcgaggauaaa

SEQ ID NO: 545518 - RNA, 19 nt, Artificial Sequence
  Description of Artificial Sequence: Synthetic oligonucleotide
  Antisense strand to SEQ ID NO: 545517
uuuauccucgccauccaau

SEQ ID NO: 545519 - RNA, 19 nt, Artificial Sequence
  Description of Artificial Sequence: Synthetic oligonucleotide
  Sense strand starting at position 2355 of SEQ ID NO: 318213
guuugcuugugucuuugga

SEQ ID NO: 545520 - RNA, 19 nt, Artificial Sequence
  Description of Artificial Sequence: Synthetic oligonucleotide
  Antisense strand to SEQ ID NO: 545519
uccaaagacacaagcaaac

SEQ ID NO: 545521 - RNA, 19 nt, Artificial Sequence
  Description of Artificial Sequence: Synthetic oligonucleotide
  Sense strand starting at position 2357 of SEQ ID NO: 318213
uugcuugugucuuuggaau

SEQ ID NO: 545522 - RNA, 19 nt, Artificial Sequence
  Description of Artificial Sequence: Synthetic oligonucleotide
  Antisense strand to SEQ ID NO: 545521
auuccaaagacacaagcaa

SEQ ID NO: 545523 - RNA, 19 nt, Artificial Sequence
  Description of Artificial Sequence: Synthetic oligonucleotide
  Sense strand starting at position 2398 of SEQ ID NO: 318213
auggaaucuugcuauagga

SEQ ID NO: 545524 - RNA, 19 nt, Artificial Sequence
  Description of Artificial Sequence: Synthetic oligonucleotide
  Antisense strand to SEQ ID NO: 545523
uccuauagcaagauuccau

SEQ ID NO: 545525 - RNA, 19 nt, Artificial Sequence
  Description of Artificial Sequence: Synthetic oligonucleotide
  Sense strand starting at position 2400 of SEQ ID NO: 318213
ggaaucuugcuauaggagu

SEQ ID NO: 545526 - RNA, 19 nt, Artificial Sequence
  Description of Artificial Sequence: Synthetic oligonucleotide
  Antisense strand to SEQ ID NO: 545525
acuccuauagcaagauucc

SEQ ID NO: 545527 - RNA, 19 nt, Artificial Sequence
  Description of Artificial Sequence: Synthetic oligonucleotide
  Sense strand starting at position 2430 of SEQ ID NO: 318213
agcgaugacguucaagguu

SEQ ID NO: 545528 - RNA, 19 nt, Artificial Sequence
  Description of Artificial Sequence: Synthetic oligonucleotide
  Antisense strand to SEQ ID NO: 545527
aaccuugaacgucaucgcu

SEQ ID NO: 545529 - RNA, 19 nt, Artificial Sequence
  Description of Artificial Sequence: Synthetic oligonucleotide
  Sense strand starting at position 2678 of SEQ ID NO: 318213
agugcaauggcguaguaua

SEQ ID NO: 545530 - RNA, 19 nt, Artificial Sequence
  Description of Artificial Sequence: Synthetic oligonucleotide
  Antisense strand to SEQ ID NO: 545529
uauacuacgccauugcacu

SEQ ID NO: 545531 - RNA, 19 nt, Artificial Sequence
  Description of Artificial Sequence: Synthetic oligonucleotide
  Sense strand starting at position 2679 of SEQ ID NO: 318213
gugcaauggcguaguauag

SEQ ID NO: 545532 - RNA, 19 nt, Artificial Sequence
  Description of Artificial Sequence: Synthetic oligonucleotide
  Antisense strand to SEQ ID NO: 545531
cuauacuacgccauugcac

SEQ ID NO: 545533 - RNA, 19 nt, Artificial Sequence
  Description of Artificial Sequence: Synthetic oligonucleotide
  Sense strand starting at position 3057 of SEQ ID NO: 318213
gcccgaccucaagguuuau

SEQ ID NO: 545534 - RNA, 19 nt, Artificial Sequence
  Description of Artificial Sequence: Synthetic oligonucleotide
  Antisense strand to SEQ ID NO: 545533
auaaaccuugaggucgggc

SEQ ID NO: 545535 - RNA, 19 nt, Artificial Sequence
  Description of Artificial Sequence: Synthetic oligonucleotide
  Sense strand starting at position 3408 of SEQ ID NO: 318213
ggcagugaggaauaaguuu

SEQ ID NO: 545536 - RNA, 19 nt, Artificial Sequence
  Description of Artificial Sequence: Synthetic oligonucleotide
  Antisense strand to SEQ ID NO: 545535
aaacuuauuccucacugcc

SEQ ID NO: 545537 - RNA, 19 nt, Artificial Sequence
  Description of Artificial Sequence: Synthetic oligonucleotide
  Sense strand starting at position 3414 of SEQ ID NO: 318213
gaggaauaaguuugagcgu

SEQ ID NO: 545538 - RNA, 19 nt, Artificial Sequence
  Description of Artificial Sequence: Synthetic oligonucleotide
  Antisense strand to SEQ ID NO: 545537
acgcucaaacuuauuccuc

SEQ ID NO: 545539 - RNA, 19 nt, Artificial Sequence
  Description of Artificial Sequence: Synthetic oligonucleotide
  Sense strand starting at position 3417 of SEQ ID NO: 318213
gaauaaguuugagcguuug

SEQ ID NO: 545540 - RNA, 19 nt, Artificial Sequence
  Description of Artificial Sequence: Synthetic oligonucleotide
  Antisense strand to SEQ ID NO: 545539
caaacgcucaaacuuauuc

SEQ ID NO: 545541 - RNA, 19 nt, Artificial Sequence
  Description of Artificial Sequence: Synthetic oligonucleotide
  Sense strand starting at position 3483 of SEQ ID NO: 318213
uuguguuuccaacaggaag

SEQ ID NO: 545542 - RNA, 19 nt, Artificial Sequence
  Description of Artificial Sequence: Synthetic oligonucleotide
  Antisense strand to SEQ ID NO: 545541
cuuccuguuggaaacacaa

SEQ ID NO: 545543 - RNA, 19 nt, Artificial Sequence
  Description of Artificial Sequence: Synthetic oligonucleotide
  Sense strand starting at position 3485 of SEQ ID NO: 318213
guguuuccaacaggaagaa

SEQ ID NO: 545544 - RNA, 19 nt, Artificial Sequence
  Description of Artificial Sequence: Synthetic oligonucleotide
  Antisense strand to SEQ ID NO: 545543
uucuuccuguuggaaacac

SEQ ID NO: 545545 - RNA, 19 nt, Artificial Sequence
  Description of Artificial Sequence: Synthetic oligonucleotide
  Sense strand starting at position 3609 of SEQ ID NO: 318213
gugccaagcguuguuaguu

SEQ ID NO: 545546 - RNA, 19 nt, Artificial Sequence
  Description of Artificial Sequence: Synthetic oligonucleotide
  Antisense strand to SEQ ID NO: 545545
aacuaacaacgcuuggcac

SEQ ID NO: 545547 - RNA, 19 nt, Artificial Sequence
  Description of Artificial Sequence: Synthetic oligonucleotide
  Sense strand starting at position 3619 of SEQ ID NO: 318213
uuguuaguugcagauaaau

SEQ ID NO: 545548 - RNA, 19 nt, Artificial Sequence
  Description of Artificial Sequence: Synthetic oligonucleotide
  Antisense strand to SEQ ID NO: 545547
auuuaucugcaacuaacaa

SEQ ID NO: 545549 - RNA, 19 nt, Artificial Sequence
  Description of Artificial Sequence: Synthetic oligonucleotide
  Sense strand starting at position 3628 of SEQ ID NO: 318213
gcagauaaauaagauagaa

SEQ ID NO: 545550 - RNA, 19 nt, Artificial Sequence
  Description of Artificial Sequence: Synthetic oligonucleotide
  Antisense strand to SEQ ID NO: 545549
uucuaucuuauuuaucugc

SEQ ID NO: 545551 - RNA, 19 nt, Artificial Sequence
  Description of Artificial Sequence: Synthetic oligonucleotide
  Sense strand starting at position 3721 of SEQ ID NO: 318213
ugugcuaaguacucucauu

SEQ ID NO: 545552 - RNA, 19 nt, Artificial Sequence
  Description of Artificial Sequence: Synthetic oligonucleotide
  Antisense strand to SEQ ID NO: 545551
aaugagaguacuuagcaca

SEQ ID NO: 545553 - RNA, 19 nt, Artificial Sequence
  Description of Artificial Sequence: Synthetic oligonucleotide
  Sense strand starting at position 3726 of SEQ ID NO: 318213
uaaguacucucauugguga

SEQ ID NO: 545554 - RNA, 19 nt, Artificial Sequence
  Description of Artificial Sequence: Synthetic oligonucleotide
  Antisense strand to SEQ ID NO: 545553
ucaccaaugagaguacuua

SEQ ID NO: 545555 - RNA, 19 nt, Artificial Sequence
  Description of Artificial Sequence: Synthetic oligonucleotide
  Sense strand starting at position 3733 of SEQ ID NO: 318213
ucucauuggugaccuugau

SEQ ID NO: 545556 - RNA, 19 nt, Artificial Sequence
  Description of Artificial Sequence: Synthetic oligonucleotide
  Antisense strand to SEQ ID NO: 545555
aucaaggucaccaaugaga

SEQ ID NO: 545557 - RNA, 19 nt, Artificial Sequence
  Description of Artificial Sequence: Synthetic oligonucleotide
  Sense strand starting at position 3873 of SEQ ID NO: 318213
uccguuuccagcuagauug

SEQ ID NO: 545558 - RNA, 19 nt, Artificial Sequence
  Description of Artificial Sequence: Synthetic oligonucleotide
  Antisense strand to SEQ ID NO: 545557
caaucuagcuggaaacgga

SEQ ID NO: 545559 - RNA, 19 nt, Artificial Sequence
  Description of Artificial Sequence: Synthetic oligonucleotide
  Sense strand starting at position 3902 of SEQ ID NO: 318213
gccaauauuugguauagcu

SEQ ID NO: 545560 - RNA, 19 nt, Artificial Sequence
  Description of Artificial Sequence: Synthetic oligonucleotide
  Antisense strand to SEQ ID NO: 545559
agcuauaccaaauauuggc

SEQ ID NO: 545561 - RNA, 19 nt, Artificial Sequence
  Description of Artificial Sequence: Synthetic oligonucleotide
  Sense strand starting at position 3937 of SEQ ID NO: 318213
ugaguuuccuuaucccagu

SEQ ID NO: 545562 - RNA, 19 nt, Artificial Sequence
  Description of Artificial Sequence: Synthetic oligonucleotide
  Antisense strand to SEQ ID NO: 545561
acugggauaaggaaacuca

SEQ ID NO: 545563 - RNA, 19 nt, Artificial Sequence
  Description of Artificial Sequence: Synthetic oligonucleotide
  Sense strand starting at position 3978 of SEQ ID NO: 318213
gcaaguaauuugcccaggu

SEQ ID NO: 545564 - RNA, 19 nt, Artificial Sequence
  Description of Artificial Sequence: Synthetic oligonucleotide
  Antisense strand to SEQ ID NO: 545563
accugggcaaauuacuugc

SEQ ID NO: 545565 - RNA, 19 nt, Artificial Sequence
  Description of Artificial Sequence: Synthetic oligonucleotide
  Sense strand starting at position 38 of SEQ ID NO: 318214
acagguuauugauuacacu

SEQ ID NO: 545566 - RNA, 19 nt, Artificial Sequence
  Description of Artificial Sequence: Synthetic oligonucleotide
  Antisense strand to SEQ ID NO: 545565
aguguaaucaauaaccugu

SEQ ID NO: 545567 - RNA, 19 nt, Artificial Sequence
  Description of Artificial Sequence: Synthetic oligonucleotide
  Sense strand starting at position 298 of SEQ ID NO: 318214
ugaucuccacuaugagaca

SEQ ID NO: 545568 - RNA, 19 nt, Artificial Sequence
  Description of Artificial Sequence: Synthetic oligonucleotide
  Antisense strand to SEQ ID NO: 545567
ugucucauaguggagauca

SEQ ID NO: 545569 - RNA, 19 nt, Artificial Sequence
  Description of Artificial Sequence: Synthetic oligonucleotide
  Sense strand starting at position 342 of SEQ ID NO: 318214
uaagguacuuacuugaguu

SEQ ID NO: 545570 - RNA, 19 nt, Artificial Sequence
  Description of Artificial Sequence: Synthetic oligonucleotide
  Antisense strand to SEQ ID NO: 545569
aacucaaguaaguaccuua

SEQ ID NO: 545571 - RNA, 19 nt, Artificial Sequence
  Description of Artificial Sequence: Synthetic oligonucleotide
  Sense strand starting at position 444 of SEQ ID NO: 318214
accagauucuguuuaccua

SEQ ID NO: 545572 - RNA, 19 nt, Artificial Sequence
  Description of Artificial Sequence: Synthetic oligonucleotide
  Antisense strand to SEQ ID NO: 545571
uagguaaacagaaucuggu

SEQ ID NO: 545573 - RNA, 19 nt, Artificial Sequence
  Description of Artificial Sequence: Synthetic oligonucleotide
  Sense strand starting at position 445 of SEQ ID NO: 318214
ccagauucuguuuaccuau

SEQ ID NO: 545574 - RNA, 19 nt, Artificial Sequence
  Description of Artificial Sequence: Synthetic oligonucleotide
  Antisense strand to SEQ ID NO: 545573
auagguaaacagaaucugg

SEQ ID NO: 545575 - RNA, 19 nt, Artificial Sequence
  Description of Artificial Sequence: Synthetic oligonucleotide
  Sense strand starting at position 553 of SEQ ID NO: 318214
ucuucuaacguugaugaga

SEQ ID NO: 545576 - RNA, 19 nt, Artificial Sequence
  Description of Artificial Sequence: Synthetic oligonucleotide
  Antisense strand to SEQ ID NO: 545575
ucucaucaacguuagaaga

SEQ ID NO: 545577 - RNA, 19 nt, Artificial Sequence
  Description of Artificial Sequence: Synthetic oligonucleotide
  Sense strand starting at position 791 of SEQ ID NO: 318214
agcaauaugcccuaggaac

SEQ ID NO: 545578 - RNA, 19 nt, Artificial Sequence
  Description of Artificial Sequence: Synthetic oligonucleotide
  Antisense strand to SEQ ID NO: 545577
guuccuagggcauauugcu

SEQ ID NO: 545579 - RNA, 19 nt, Artificial Sequence
  Description of Artificial Sequence: Synthetic oligonucleotide
  Sense strand starting at position 910 of SEQ ID NO: 318214
ggacuuaucuaugugcaua

SEQ ID NO: 545580 - RNA, 19 nt, Artificial Sequence
  Description of Artificial Sequence: Synthetic oligonucleotide
  Antisense strand to SEQ ID NO: 545579
uaugcacauagauaagucc

SEQ ID NO: 545581 - RNA, 19 nt, Artificial Sequence
  Description of Artificial Sequence: Synthetic oligonucleotide
  Sense strand starting at position 912 of SEQ ID NO: 318214
acuuaucuaugugcauaga

SEQ ID NO: 545582 - RNA, 19 nt, Artificial Sequence
  Description of Artificial Sequence: Synthetic oligonucleotide
  Antisense strand to SEQ ID NO: 545581
ucuaugcacauagauaagu

SEQ ID NO: 545583 - RNA, 19 nt, Artificial Sequence
  Description of Artificial Sequence: Synthetic oligonucleotide
  Sense strand starting at position 913 of SEQ ID NO: 318214
cuuaucuaugugcauagau

SEQ ID NO: 545584 - RNA, 19 nt, Artificial Sequence
  Description of Artificial Sequence: Synthetic oligonucleotide
  Antisense strand to SEQ ID NO: 545583
aucuaugcacauagauaag

SEQ ID NO: 545585 - RNA, 19 nt, Artificial Sequence
  Description of Artificial Sequence: Synthetic oligonucleotide
  Sense strand starting at position 921 of SEQ ID NO: 318214
ugugcauagauaugaugga

SEQ ID NO: 545586 - RNA, 19 nt, Artificial Sequence
  Description of Artificial Sequence: Synthetic oligonucleotide
  Antisense strand to SEQ ID NO: 545585
uccaucauaucuaugcaca

SEQ ID NO: 545587 - RNA, 19 nt, Artificial Sequence
  Description of Artificial Sequence: Synthetic oligonucleotide
  Sense strand starting at position 936 of SEQ ID NO: 318214
uggacauccugacauuuag

SEQ ID NO: 545588 - RNA, 19 nt, Artificial Sequence
  Description of Artificial Sequence: Synthetic oligonucleotide
  Antisense strand to SEQ ID NO: 545587
cuaaaugucaggaugucca

SEQ ID NO: 545589 - RNA, 19 nt, Artificial Sequence
  Description of Artificial Sequence: Synthetic oligonucleotide
  Sense strand starting at position 950 of SEQ ID NO: 318214
uuuaguggaucuccuuuaa

SEQ ID NO: 545590 - RNA, 19 nt, Artificial Sequence
  Description of Artificial Sequence: Synthetic oligonucleotide
  Antisense strand to SEQ ID NO: 545589
uuaaaggagauccacuaaa

SEQ ID NO: 545591 - RNA, 19 nt, Artificial Sequence
  Description of Artificial Sequence: Synthetic oligonucleotide
  Sense strand starting at position 1295 of SEQ ID NO: 318214
uagauauuaggcuguuaau

SEQ ID NO: 545592 - RNA, 19 nt, Artificial Sequence
  Description of Artificial Sequence: Synthetic oligonucleotide
  Antisense strand to SEQ ID NO: 545591
auuaacagccuaauaucua

SEQ ID NO: 545593 - RNA, 19 nt, Artificial Sequence
  Description of Artificial Sequence: Synthetic oligonucleotide
  Sense strand starting at position 1341 of SEQ ID NO: 318214
aggcuuauguggaggagaa

SEQ ID NO: 545594 - RNA, 19 nt, Artificial Sequence
  Description of Artificial Sequence: Synthetic oligonucleotide
  Antisense strand to SEQ ID NO: 545593
uucuccuccacauaagccu

SEQ ID NO: 545595 - RNA, 19 nt, Artificial Sequence
  Description of Artificial Sequence: Synthetic oligonucleotide
  Sense strand starting at position 1342 of SEQ ID NO: 318214
ggcuuauguggaggagaau

SEQ ID NO: 545596 - RNA, 19 nt, Artificial Sequence
  Description of Artificial Sequence: Synthetic oligonucleotide
  Antisense strand to SEQ ID NO: 545595
auucuccuccacauaagcc

SEQ ID NO: 545597 - RNA, 19 nt, Artificial Sequence
  Description of Artificial Sequence: Synthetic oligonucleotide
  Sense strand starting at position 1351 of SEQ ID NO: 318214
ggaggagaaugcuuucaug

SEQ ID NO: 545598 - RNA, 19 nt, Artificial Sequence
  Description of Artificial Sequence: Synthetic oligonucleotide
  Antisense strand to SEQ ID NO: 545597
caugaaagcauucuccucc

SEQ ID NO: 545599 - RNA, 19 nt, Artificial Sequence
  Description of Artificial Sequence: Synthetic oligonucleotide
  Sense strand starting at position 1433 of SEQ ID NO: 318214
ucagucauauguuugggau

SEQ ID NO: 545600 - RNA, 19 nt, Artificial Sequence
  Description of Artificial Sequence: Synthetic oligonucleotide
  Antisense strand to SEQ ID NO: 545599
aucccaaacauaugacuga

SEQ ID NO: 545601 - RNA, 19 nt, Artificial Sequence
  Description of Artificial Sequence: Synthetic oligonucleotide
  Sense strand starting at position 1434 of SEQ ID NO: 318214
cagucauauguuugggauu

SEQ ID NO: 545602 - RNA, 19 nt, Artificial Sequence
  Description of Artificial Sequence: Synthetic oligonucleotide
  Antisense strand to SEQ ID NO: 545601
aaucccaaacauaugacug

SEQ ID NO: 545603 - RNA, 19 nt, Artificial Sequence
  Description of Artificial Sequence: Synthetic oligonucleotide
  Sense strand starting at position 1934 of SEQ ID NO: 318214
gccuauacuuuauuugagu

SEQ ID NO: 545604 - RNA, 19 nt, Artificial Sequence
  Description of Artificial Sequence: Synthetic oligonucleotide
  Antisense strand to SEQ ID NO: 545603
acucaaauaaaguauaggc

SEQ ID NO: 545605 - RNA, 19 nt, Artificial Sequence
  Description of Artificial Sequence: Synthetic oligonucleotide
  Sense strand starting at position 1949 of SEQ ID NO: 318214
gaguaaaugguuugguuaa

SEQ ID NO: 545606 - RNA, 19 nt, Artificial Sequence
  Description of Artificial Sequence: Synthetic oligonucleotide
  Antisense strand to SEQ ID NO: 545605
uuaaccaaaccauuuacuc

SEQ ID NO: 545607 - RNA, 19 nt, Artificial Sequence
  Description of Artificial Sequence: Synthetic oligonucleotide
  Sense strand starting at position 2155 of SEQ ID NO: 318214
uuaguuaaauguccuuuga

SEQ ID NO: 545608 - RNA, 19 nt, Artificial Sequence
  Description of Artificial Sequence: Synthetic oligonucleotide
  Antisense strand to SEQ ID NO: 545607
ucaaaggacauuuaacuaa

SEQ ID NO: 545609 - RNA, 19 nt, Artificial Sequence
  Description of Artificial Sequence: Synthetic oligonucleotide
  Sense strand starting at position 2157 of SEQ ID NO: 318214
aguuaaauguccuuugaag

SEQ ID NO: 545610 - RNA, 19 nt, Artificial Sequence
  Description of Artificial Sequence: Synthetic oligonucleotide
  Antisense strand to SEQ ID NO: 545609
cuucaaaggacauuuaacu

SEQ ID NO: 545611 - RNA, 19 nt, Artificial Sequence
  Description of Artificial Sequence: Synthetic oligonucleotide
  Sense strand starting at position 2159 of SEQ ID NO: 318214
uuaaauguccuuugaagua

SEQ ID NO: 545612 - RNA, 19 nt, Artificial Sequence
  Description of Artificial Sequence: Synthetic oligonucleotide
  Antisense strand to SEQ ID NO: 545611
uacuucaaaggacauuuaa

SEQ ID NO: 545613 - RNA, 19 nt, Artificial Sequence
  Description of Artificial Sequence: Synthetic oligonucleotide
  Sense strand starting at position 2631 of SEQ ID NO: 318214
guguguucagaugcguuaa

SEQ ID NO: 545614 - RNA, 19 nt, Artificial Sequence
  Description of Artificial Sequence: Synthetic oligonucleotide
  Antisense strand to SEQ ID NO: 545613
uuaacgcaucugaacacac

SEQ ID NO: 545615 - RNA, 19 nt, Artificial Sequence
  Description of Artificial Sequence: Synthetic oligonucleotide
  Sense strand starting at position 2643 of SEQ ID NO: 318214
gcguuaaagccacuuucgu

SEQ ID NO: 545616 - RNA, 19 nt, Artificial Sequence
  Description of Artificial Sequence: Synthetic oligonucleotide
  Antisense strand to SEQ ID NO: 545615
acgaaaguggcuuuaacgc

SEQ ID NO: 545617 - RNA, 19 nt, Artificial Sequence
  Description of Artificial Sequence: Synthetic oligonucleotide
  Sense strand starting at position 3071 of SEQ ID NO: 318214
uauugcuuugaggaaguaa

SEQ ID NO: 545618 - RNA, 19 nt, Artificial Sequence
  Description of Artificial Sequence: Synthetic oligonucleotide
  Antisense strand to SEQ ID NO: 545617
uuacuuccucaaagcaaua

SEQ ID NO: 545619 - RNA, 19 nt, Artificial Sequence
  Description of Artificial Sequence: Synthetic oligonucleotide
  Sense strand starting at position 3152 of SEQ ID NO: 318214
gguguauauguugaguaag

SEQ ID NO: 545620 - RNA, 19 nt, Artificial Sequence
  Description of Artificial Sequence: Synthetic oligonucleotide
  Antisense strand to SEQ ID NO: 545619
cuuacucaacauauacacc

SEQ ID NO: 545621 - RNA, 19 nt, Artificial Sequence
  Description of Artificial Sequence: Synthetic oligonucleotide
  Sense strand starting at position 3155 of SEQ ID NO: 318214
guauauguugaguaaggug

SEQ ID NO: 545622 - RNA, 19 nt, Artificial Sequence
  Description of Artificial Sequence: Synthetic oligonucleotide
  Antisense strand to SEQ ID NO: 545621
caccuuacucaacauauac

SEQ ID NO: 545623 - RNA, 19 nt, Artificial Sequence
  Description of Artificial Sequence: Synthetic oligonucleotide
  Sense strand starting at position 3201 of SEQ ID NO: 318214
uagaaugugaguugaggga

SEQ ID NO: 545624 - RNA, 19 nt, Artificial Sequence
  Description of Artificial Sequence: Synthetic oligonucleotide
  Antisense strand to SEQ ID NO: 545623
ucccucaacucacauucua

SEQ ID NO: 545625 - RNA, 19 nt, Artificial Sequence
  Description of Artificial Sequence: Synthetic oligonucleotide
  Sense strand starting at position 3205 of SEQ ID NO: 318214
augugaguugagggaggau

SEQ ID NO: 545626 - RNA, 19 nt, Artificial Sequence
  Description of Artificial Sequence: Synthetic oligonucleotide
  Antisense strand to SEQ ID NO: 545625
auccucccucaacucacau

SEQ ID NO: 545627 - RNA, 19 nt, Artificial Sequence
  Description of Artificial Sequence: Synthetic oligonucleotide
  Sense strand starting at position 3217 of SEQ ID NO: 318214
ggaggaugauguguuaguu

SEQ ID NO: 545628 - RNA, 19 nt, Artificial Sequence
  Description of Artificial Sequence: Synthetic oligonucleotide
  Antisense strand to SEQ ID NO: 545627
aacuaacacaucauccucc

SEQ ID NO: 545629 - RNA, 19 nt, Artificial Sequence
  Description of Artificial Sequence: Synthetic oligonucleotide
  Sense strand starting at position 3455 of SEQ ID NO: 318214
uuugcaauuguguaugaca

SEQ ID NO: 545630 - RNA, 19 nt, Artificial Sequence
  Description of Artificial Sequence: Synthetic oligonucleotide
  Antisense strand to SEQ ID NO: 545629
ugucauacacaauugcaaa

SEQ ID NO: 545631 - RNA, 19 nt, Artificial Sequence
  Description of Artificial Sequence: Synthetic oligonucleotide
  Sense strand starting at position 3462 of SEQ ID NO: 318214
uuguguaugacauaguaaa

SEQ ID NO: 545632 - RNA, 19 nt, Artificial Sequence
  Description of Artificial Sequence: Synthetic oligonucleotide
  Antisense strand to SEQ ID NO: 545631
uuuacuaugucauacacaa

SEQ ID NO: 545633 - RNA, 19 nt, Artificial Sequence
  Description of Artificial Sequence: Synthetic oligonucleotide
  Sense strand starting at position 3754 of SEQ ID NO: 318214
agucaaagugcucaaguug

SEQ ID NO: 545634 - RNA, 19 nt, Artificial Sequence
  Description of Artificial Sequence: Synthetic oligonucleotide
  Antisense strand to SEQ ID NO: 545633
caacuugagcacuuugacu

SEQ ID NO: 545635 - RNA, 19 nt, Artificial Sequence
  Description of Artificial Sequence: Synthetic oligonucleotide
  Sense strand starting at position 3763 of SEQ ID NO: 318214
gcucaaguugaaugcauuu

SEQ ID NO: 545636 - RNA, 19 nt, Artificial Sequence
  Description of Artificial Sequence: Synthetic oligonucleotide
  Antisense strand to SEQ ID NO: 545635
aaaugcauucaacuugagc

SEQ ID NO: 545637 - RNA, 19 nt, Artificial Sequence
  Description of Artificial Sequence: Synthetic oligonucleotide
  Sense strand starting at position 3814 of SEQ ID NO: 318214
ugugguuuacuuuaucuau

SEQ ID NO: 545638 - RNA, 19 nt, Artificial Sequence
  Description of Artificial Sequence: Synthetic oligonucleotide
  Antisense strand to SEQ ID NO: 545637
auagauaaaguaaaccaca

SEQ ID NO: 545639 - RNA, 19 nt, Artificial Sequence
  Description of Artificial Sequence: Synthetic oligonucleotide
  Sense strand starting at position 3918 of SEQ ID NO: 318214
gucacaacugucugauaca

SEQ ID NO: 545640 - RNA, 19 nt, Artificial Sequence
  Description of Artificial Sequence: Synthetic oligonucleotide
  Antisense strand to SEQ ID NO: 545639
uguaucagacaguugugac

SEQ ID NO: 545641 - RNA, 19 nt, Artificial Sequence
  Description of Artificial Sequence: Synthetic oligonucleotide
  Sense strand starting at position 3947 of SEQ ID NO: 318214
auuuguguacuuuguagau

SEQ ID NO: 545642 - RNA, 19 nt, Artificial Sequence
  Description of Artificial Sequence: Synthetic oligonucleotide
  Antisense strand to SEQ ID NO: 545641
aucuacaaaguacacaaau

SEQ ID NO: 545643 - RNA, 19 nt, Artificial Sequence
  Description of Artificial Sequence: Synthetic oligonucleotide
  Sense strand starting at position 3951 of SEQ ID NO: 318214
guguacuuuguagauugau

SEQ ID NO: 545644 - RNA, 19 nt, Artificial Sequence
  Description of Artificial Sequence: Synthetic oligonucleotide
  Antisense strand to SEQ ID NO: 545643
aucaaucuacaaaguacac

SEQ ID NO: 545645 - RNA, 19 nt, Artificial Sequence
  Description of Artificial Sequence: Synthetic oligonucleotide
  Sense strand starting at position 29 of SEQ ID NO: 318215
ggugauaucuuacuauacc

SEQ ID NO: 545646 - RNA, 19 nt, Artificial Sequence
  Description of Artificial Sequence: Synthetic oligonucleotide
  Antisense strand to SEQ ID NO: 545645
gguauaguaagauaucacc

SEQ ID NO: 545647 - RNA, 19 nt, Artificial Sequence
  Description of Artificial Sequence: Synthetic oligonucleotide
  Sense strand starting at position 79 of SEQ ID NO: 318215
agacuauguggugguauua

SEQ ID NO: 545648 - RNA, 19 nt, Artificial Sequence
  Description of Artificial Sequence: Synthetic oligonucleotide
  Antisense strand to SEQ ID NO: 545647
uaauaccaccacauagucu

SEQ ID NO: 545649 - RNA, 19 nt, Artificial Sequence
  Description of Artificial Sequence: Synthetic oligonucleotide
  Sense strand starting at position 539 of SEQ ID NO: 318215
cuaauuccauggcucagaa

SEQ ID NO: 545650 - RNA, 19 nt, Artificial Sequence
  Description of Artificial Sequence: Synthetic oligonucleotide
  Antisense strand to SEQ ID NO: 545649
uucugagccauggaauuag

SEQ ID NO: 545651 - RNA, 19 nt, Artificial Sequence
  Description of Artificial Sequence: Synthetic oligonucleotide
  Sense strand starting at position 558 of SEQ ID NO: 318215
aucagaugaucggcucgaa

SEQ ID NO: 545652 - RNA, 19 nt, Artificial Sequence
  Description of Artificial Sequence: Synthetic oligonucleotide
  Antisense strand to SEQ ID NO: 545651
uucgagccgaucaucugau

SEQ ID NO: 545653 - RNA, 19 nt, Artificial Sequence
  Description of Artificial Sequence: Synthetic oligonucleotide
  Sense strand starting at position 562 of SEQ ID NO: 318215
gaugaucggcucgaaacua

SEQ ID NO: 545654 - RNA, 19 nt, Artificial Sequence
  Description of Artificial Sequence: Synthetic oligonucleotide
  Antisense strand to SEQ ID NO: 545653
uaguuucgagccgaucauc

SEQ ID NO: 545655 - RNA, 19 nt, Artificial Sequence
  Description of Artificial Sequence: Synthetic oligonucleotide
  Sense strand starting at position 574 of SEQ ID NO: 318215
gaaacuacuugggcuugaa

SEQ ID NO: 545656 - RNA, 19 nt, Artificial Sequence
  Description of Artificial Sequence: Synthetic oligonucleotide
  Antisense strand to SEQ ID NO: 545655
uucaagcccaaguaguuuc

SEQ ID NO: 545657 - RNA, 19 nt, Artificial Sequence
  Description of Artificial Sequence: Synthetic oligonucleotide
  Sense strand starting at position 606 of SEQ ID NO: 318215
agugcaacccuguagacaa

SEQ ID NO: 545658 - RNA, 19 nt, Artificial Sequence
  Description of Artificial Sequence: Synthetic oligonucleotide
  Antisense strand to SEQ ID NO: 545657
uugucuacaggguugcacu

SEQ ID NO: 545659 - RNA, 19 nt, Artificial Sequence
  Description of Artificial Sequence: Synthetic oligonucleotide
  Sense strand starting at position 630 of SEQ ID NO: 318215
ccaaaugauccguaccaca

SEQ ID NO: 545660 - RNA, 19 nt, Artificial Sequence
  Description of Artificial Sequence: Synthetic oligonucleotide
  Antisense strand to SEQ ID NO: 545659
ugugguacggaucauuugg

SEQ ID NO: 545661 - RNA, 19 nt, Artificial Sequence
  Description of Artificial Sequence: Synthetic oligonucleotide
  Sense strand starting at position 666 of SEQ ID NO: 318215
augagaguauuaccaccua

SEQ ID NO: 545662 - RNA, 19 nt, Artificial Sequence
  Description of Artificial Sequence: Synthetic oligonucleotide
  Antisense strand to SEQ ID NO: 545661
uaggugguaauacucucau

SEQ ID NO: 545663 - RNA, 19 nt, Artificial Sequence
  Description of Artificial Sequence: Synthetic oligonucleotide
  Sense strand starting at position 816 of SEQ ID NO: 318215
auaggauucuugguucuua

SEQ ID NO: 545664 - RNA, 19 nt, Artificial Sequence
  Description of Artificial Sequence: Synthetic oligonucleotide
  Antisense strand to SEQ ID NO: 545663
uaagaaccaagaauccuau

SEQ ID NO: 545665 - RNA, 19 nt, Artificial Sequence
  Description of Artificial Sequence: Synthetic oligonucleotide
  Sense strand starting at position 817 of SEQ ID NO: 318215
uaggauucuugguucuuau

SEQ ID NO: 545666 - RNA, 19 nt, Artificial Sequence
  Description of Artificial Sequence: Synthetic oligonucleotide
  Antisense strand to SEQ ID NO: 545665
auaagaaccaagaauccua

SEQ ID NO: 545667 - RNA, 19 nt, Artificial Sequence
  Description of Artificial Sequence: Synthetic oligonucleotide
  Sense strand starting at position 837 of SEQ ID NO: 318215
ugauccuaacgcuaaacaa

SEQ ID NO: 545668 - RNA, 19 nt, Artificial Sequence
  Description of Artificial Sequence: Synthetic oligonucleotide
  Antisense strand to SEQ ID NO: 545667
uuguuuagcguuaggauca

SEQ ID NO: 545669 - RNA, 19 nt, Artificial Sequence
  Description of Artificial Sequence: Synthetic oligonucleotide
  Sense strand starting at position 928 of SEQ ID NO: 318215
aguguaugggcauauauac

SEQ ID NO: 545670 - RNA, 19 nt, Artificial Sequence
  Description of Artificial Sequence: Synthetic oligonucleotide
  Antisense strand to SEQ ID NO: 545669
guauauaugcccauacacu

SEQ ID NO: 545671 - RNA, 19 nt, Artificial Sequence
  Description of Artificial Sequence: Synthetic oligonucleotide
  Sense strand starting at position 1012 of SEQ ID NO: 318215
gcaagagauaagcaguagu

SEQ ID NO: 545672 - RNA, 19 nt, Artificial Sequence
  Description of Artificial Sequence: Synthetic oligonucleotide
  Antisense strand to SEQ ID NO: 545671
acuacugcuuaucucuugc

SEQ ID NO: 545673 - RNA, 19 nt, Artificial Sequence
  Description of Artificial Sequence: Synthetic oligonucleotide
  Sense strand starting at position 1137 of SEQ ID NO: 318215
uuggcuuucggugaaugaa

SEQ ID NO: 545674 - RNA, 19 nt, Artificial Sequence
  Description of Artificial Sequence: Synthetic oligonucleotide
  Antisense strand to SEQ ID NO: 545673
uucauucaccgaaagccaa

SEQ ID NO: 545675 - RNA, 19 nt, Artificial Sequence
  Description of Artificial Sequence: Synthetic oligonucleotide
  Sense strand starting at position 1178 of SEQ ID NO: 318215
ugaaacugguacucgauaa

SEQ ID NO: 545676 - RNA, 19 nt, Artificial Sequence
  Description of Artificial Sequence: Synthetic oligonucleotide
  Antisense strand to SEQ ID NO: 545675
uuaucgaguaccaguuuca

SEQ ID NO: 545677 - RNA, 19 nt, Artificial Sequence
  Description of Artificial Sequence: Synthetic oligonucleotide
  Sense strand starting at position 1182 of SEQ ID NO: 318215
acugguacucgauaaguua

SEQ ID NO: 545678 - RNA, 19 nt, Artificial Sequence
  Description of Artificial Sequence: Synthetic oligonucleotide
  Antisense strand to SEQ ID NO: 545677
uaacuuaucgaguaccagu

SEQ ID NO: 545679 - RNA, 19 nt, Artificial Sequence
  Description of Artificial Sequence: Synthetic oligonucleotide
  Sense strand starting at position 1189 of SEQ ID NO: 318215
cucgauaaguuaucugaau

SEQ ID NO: 545680 - RNA, 19 nt, Artificial Sequence
  Description of Artificial Sequence: Synthetic oligonucleotide
  Antisense strand to SEQ ID NO: 545679
auucagauaacuuaucgag

SEQ ID NO: 545681 - RNA, 19 nt, Artificial Sequence
  Description of Artificial Sequence: Synthetic oligonucleotide
  Sense strand starting at position 1190 of SEQ ID NO: 318215
ucgauaaguuaucugaaug

SEQ ID NO: 545682 - RNA, 19 nt, Artificial Sequence
  Description of Artificial Sequence: Synthetic oligonucleotide
  Antisense strand to SEQ ID NO: 545681
cauucagauaacuuaucga

SEQ ID NO: 545683 - RNA, 19 nt, Artificial Sequence
  Description of Artificial Sequence: Synthetic oligonucleotide
  Sense strand starting at position 1191 of SEQ ID NO: 318215
cgauaaguuaucugaauga

SEQ ID NO: 545684 - RNA, 19 nt, Artificial Sequence
  Description of Artificial Sequence: Synthetic oligonucleotide
  Antisense strand to SEQ ID NO: 545683
ucauucagauaacuuaucg

SEQ ID NO: 545685 - RNA, 19 nt, Artificial Sequence
  Description of Artificial Sequence: Synthetic oligonucleotide
  Sense strand starting at position 1195 of SEQ ID NO: 318215
aaguuaucugaaugaguga

SEQ ID NO: 545686 - RNA, 19 nt, Artificial Sequence
  Description of Artificial Sequence: Synthetic oligonucleotide
  Antisense strand to SEQ ID NO: 545685
ucacucauucagauaacuu

SEQ ID NO: 545687 - RNA, 19 nt, Artificial Sequence
  Description of Artificial Sequence: Synthetic oligonucleotide
  Sense strand starting at position 1198 of SEQ ID NO: 318215
uuaucugaaugagugaaua

SEQ ID NO: 545688 - RNA, 19 nt, Artificial Sequence
  Description of Artificial Sequence: Synthetic oligonucleotide
  Antisense strand to SEQ ID NO: 545687
uauucacucauucagauaa

SEQ ID NO: 545689 - RNA, 19 nt, Artificial Sequence
  Description of Artificial Sequence: Synthetic oligonucleotide
  Sense strand starting at position 1326 of SEQ ID NO: 318215
gagggcuucccaggaucaa

SEQ ID NO: 545690 - RNA, 19 nt, Artificial Sequence
  Description of Artificial Sequence: Synthetic oligonucleotide
  Antisense strand to SEQ ID NO: 545689
uugauccugggaagcccuc

SEQ ID NO: 545691 - RNA, 19 nt, Artificial Sequence
  Description of Artificial Sequence: Synthetic oligonucleotide
  Sense strand starting at position 1820 of SEQ ID NO: 318215
cgccucucccaggagauua

SEQ ID NO: 545692 - RNA, 19 nt, Artificial Sequence
  Description of Artificial Sequence: Synthetic oligonucleotide
  Antisense strand to SEQ ID NO: 545691
uaaucuccugggagaggcg

SEQ ID NO: 545693 - RNA, 19 nt, Artificial Sequence
  Description of Artificial Sequence: Synthetic oligonucleotide
  Sense strand starting at position 2093 of SEQ ID NO: 318215
gcgaccacccggagugauu

SEQ ID NO: 545694 - RNA, 19 nt, Artificial Sequence
  Description of Artificial Sequence: Synthetic oligonucleotide
  Antisense strand to SEQ ID NO: 545693
aaucacuccggguggucgc

SEQ ID NO: 545695 - RNA, 19 nt, Artificial Sequence
  Description of Artificial Sequence: Synthetic oligonucleotide
  Sense strand starting at position 2635 of SEQ ID NO: 318215
uacauugccugaguuugaa

SEQ ID NO: 545696 - RNA, 19 nt, Artificial Sequence
  Description of Artificial Sequence: Synthetic oligonucleotide
  Antisense strand to SEQ ID NO: 545695
uucaaacucaggcaaugua

SEQ ID NO: 545697 - RNA, 19 nt, Artificial Sequence
  Description of Artificial Sequence: Synthetic oligonucleotide
  Sense strand starting at position 2743 of SEQ ID NO: 318215
acugaaucuguguaaguua

SEQ ID NO: 545698 - RNA, 19 nt, Artificial Sequence
  Description of Artificial Sequence: Synthetic oligonucleotide
  Antisense strand to SEQ ID NO: 545697
uaacuuacacagauucagu

SEQ ID NO: 545699 - RNA, 19 nt, Artificial Sequence
  Description of Artificial Sequence: Synthetic oligonucleotide
  Sense strand starting at position 2746 of SEQ ID NO: 318215
gaaucuguguaaguuaaua

SEQ ID NO: 545700 - RNA, 19 nt, Artificial Sequence
  Description of Artificial Sequence: Synthetic oligonucleotide
  Antisense strand to SEQ ID NO: 545699
uauuaacuuacacagauuc

SEQ ID NO: 545701 - RNA, 19 nt, Artificial Sequence
  Description of Artificial Sequence: Synthetic oligonucleotide
  Sense strand starting at position 2930 of SEQ ID NO: 318215
aacauugauguugggucaa

SEQ ID NO: 545702 - RNA, 19 nt, Artificial Sequence
  Description of Artificial Sequence: Synthetic oligonucleotide
  Antisense strand to SEQ ID NO: 545701
uugacccaacaucaauguu

SEQ ID NO: 545703 - RNA, 19 nt, Artificial Sequence
  Description of Artificial Sequence: Synthetic oligonucleotide
  Sense strand starting at position 2932 of SEQ ID NO: 318215
cauugauguugggucaauc

SEQ ID NO: 545704 - RNA, 19 nt, Artificial Sequence
  Description of Artificial Sequence: Synthetic oligonucleotide
  Antisense strand to SEQ ID NO: 545703
gauugacccaacaucaaug

SEQ ID NO: 545705 - RNA, 19 nt, Artificial Sequence
  Description of Artificial Sequence: Synthetic oligonucleotide
  Sense strand starting at position 2943 of SEQ ID NO: 318215
ggucaaucauguucucaau

SEQ ID NO: 545706 - RNA, 19 nt, Artificial Sequence
  Description of Artificial Sequence: Synthetic oligonucleotide
  Antisense strand to SEQ ID NO: 545705
auugagaacaugauugacc

SEQ ID NO: 545707 - RNA, 19 nt, Artificial Sequence
  Description of Artificial Sequence: Synthetic oligonucleotide
  Sense strand starting at position 2961 of SEQ ID NO: 318215
uguauuuaaccauguguuu

SEQ ID NO: 545708 - RNA, 19 nt, Artificial Sequence
  Description of Artificial Sequence: Synthetic oligonucleotide
  Antisense strand to SEQ ID NO: 545707
aaacacaugguuaaauaca

SEQ ID NO: 545709 - RNA, 19 nt, Artificial Sequence
  Description of Artificial Sequence: Synthetic oligonucleotide
  Sense strand starting at position 3017 of SEQ ID NO: 318215
augguauggcauuaaucac

SEQ ID NO: 545710 - RNA, 19 nt, Artificial Sequence
  Description of Artificial Sequence: Synthetic oligonucleotide
  Antisense strand to SEQ ID NO: 545709
gugauuaaugccauaccau

SEQ ID NO: 545711 - RNA, 19 nt, Artificial Sequence
  Description of Artificial Sequence: Synthetic oligonucleotide
  Sense strand starting at position 3042 of SEQ ID NO: 318215
gaagaaccuuuaucguuua

SEQ ID NO: 545712 - RNA, 19 nt, Artificial Sequence
  Description of Artificial Sequence: Synthetic oligonucleotide
  Antisense strand to SEQ ID NO: 545711
uaaacgauaaagguucuuc

SEQ ID NO: 545713 - RNA, 19 nt, Artificial Sequence
  Description of Artificial Sequence: Synthetic oligonucleotide
  Sense strand starting at position 3047 of SEQ ID NO: 318215
accuuuaucguuuaucuga

SEQ ID NO: 545714 - RNA, 19 nt, Artificial Sequence
  Description of Artificial Sequence: Synthetic oligonucleotide
  Antisense strand to SEQ ID NO: 545713
ucagauaaacgauaaaggu

SEQ ID NO: 545715 - RNA, 19 nt, Artificial Sequence
  Description of Artificial Sequence: Synthetic oligonucleotide
  Sense strand starting at position 3253 of SEQ ID NO: 318215
ggaccaguguucucucaag

SEQ ID NO: 545716 - RNA, 19 nt, Artificial Sequence
  Description of Artificial Sequence: Synthetic oligonucleotide
  Antisense strand to SEQ ID NO: 545715
cuugagagaacacuggucc

SEQ ID NO: 545717 - RNA, 19 nt, Artificial Sequence
  Description of Artificial Sequence: Synthetic oligonucleotide
  Sense strand starting at position 3537 of SEQ ID NO: 318215
gcugucaaacacuaguuua

SEQ ID NO: 545718 - RNA, 19 nt, Artificial Sequence
  Description of Artificial Sequence: Synthetic oligonucleotide
  Antisense strand to SEQ ID NO: 545717
uaaacuaguguuugacagc

SEQ ID NO: 545719 - RNA, 19 nt, Artificial Sequence
  Description of Artificial Sequence: Synthetic oligonucleotide
  Sense strand starting at position 3686 of SEQ ID NO: 318215
gggaaagucugauuacacu

SEQ ID NO: 545720 - RNA, 19 nt, Artificial Sequence
  Description of Artificial Sequence: Synthetic oligonucleotide
  Antisense strand to SEQ ID NO: 545719
aguguaaucagacuuuccc

SEQ ID NO: 545721 - RNA, 19 nt, Artificial Sequence
  Description of Artificial Sequence: Synthetic oligonucleotide
  Sense strand starting at position 3896 of SEQ ID NO: 318215
guccuaaauugauuagcca

SEQ ID NO: 545722 - RNA, 19 nt, Artificial Sequence
  Description of Artificial Sequence: Synthetic oligonucleotide
  Antisense strand to SEQ ID NO: 545721
uggcuaaucaauuuaggac

SEQ ID NO: 545723 - RNA, 19 nt, Artificial Sequence
  Description of Artificial Sequence: Synthetic oligonucleotide
  Sense strand starting at position 3978 of SEQ ID NO: 318215
caaauaugucgugaggcau

SEQ ID NO: 545724 - RNA, 19 nt, Artificial Sequence
  Description of Artificial Sequence: Synthetic oligonucleotide
  Antisense strand to SEQ ID NO: 545723
augccucacgacauauuug

SEQ ID NO: 545725 - RNA, 19 nt, Artificial Sequence
  Description of Artificial Sequence: Synthetic oligonucleotide
  Sense strand starting at position 573 of SEQ ID NO: 318216
auguguaccaacuauguga

SEQ ID NO: 545726 - RNA, 19 nt, Artificial Sequence
  Description of Artificial Sequence: Synthetic oligonucleotide
  Antisense strand to SEQ ID NO: 545725
ucacauaguugguacacau

SEQ ID NO: 545727 - RNA, 19 nt, Artificial Sequence
  Description of Artificial Sequence: Synthetic oligonucleotide
  Sense strand starting at position 735 of SEQ ID NO: 318216
caugcuuuagagcagugau

SEQ ID NO: 545728 - RNA, 19 nt, Artificial Sequence
  Description of Artificial Sequence: Synthetic oligonucleotide
  Antisense strand to SEQ ID NO: 545727
aucacugcucuaaagcaug

SEQ ID NO: 545729 - RNA, 19 nt, Artificial Sequence
  Description of Artificial Sequence: Synthetic oligonucleotide
  Sense strand starting at position 787 of SEQ ID NO: 318216
ucuccaauugucuaaugag

SEQ ID NO: 545730 - RNA, 19 nt, Artificial Sequence
  Description of Artificial Sequence: Synthetic oligonucleotide
  Antisense strand to SEQ ID NO: 545729
cucauuagacaauuggaga

SEQ ID NO: 545731 - RNA, 19 nt, Artificial Sequence
  Description of Artificial Sequence: Synthetic oligonucleotide
  Sense strand starting at position 939 of SEQ ID NO: 318216
ugucgucuucaguugucaa

SEQ ID NO: 545732 - RNA, 19 nt, Artificial Sequence
  Description of Artificial Sequence: Synthetic oligonucleotide
  Antisense strand to SEQ ID NO: 545731
uugacaacugaagacgaca

SEQ ID NO: 545733 - RNA, 19 nt, Artificial Sequence
  Description of Artificial Sequence: Synthetic oligonucleotide
  Sense strand starting at position 961 of SEQ ID NO: 318216
ugguacaucgccuauaauc

SEQ ID NO: 545734 - RNA, 19 nt, Artificial Sequence
  Description of Artificial Sequence: Synthetic oligonucleotide
  Antisense strand to SEQ ID NO: 545733
gauuauaggcgauguacca

SEQ ID NO: 545735 - RNA, 19 nt, Artificial Sequence
  Description of Artificial Sequence: Synthetic oligonucleotide
  Sense strand starting at position 963 of SEQ ID NO: 318216
guacaucgccuauaaucaa

SEQ ID NO: 545736 - RNA, 19 nt, Artificial Sequence
  Description of Artificial Sequence: Synthetic oligonucleotide
  Antisense strand to SEQ ID NO: 545735
uugauuauaggcgauguac

SEQ ID NO: 545737 - RNA, 19 nt, Artificial Sequence
  Description of Artificial Sequence: Synthetic oligonucleotide
  Sense strand starting at position 1009 of SEQ ID NO: 318216
gugauuuccucugagagau

SEQ ID NO: 545738 - RNA, 19 nt, Artificial Sequence
  Description of Artificial Sequence: Synthetic oligonucleotide
  Antisense strand to SEQ ID NO: 545737
aucucucagaggaaaucac

SEQ ID NO: 545739 - RNA, 19 nt, Artificial Sequence
  Description of Artificial Sequence: Synthetic oligonucleotide
  Sense strand starting at position 1011 of SEQ ID NO: 318216
gauuuccucugagagauuc

SEQ ID NO: 545740 - RNA, 19 nt, Artificial Sequence
  Description of Artificial Sequence: Synthetic oligonucleotide
  Antisense strand to SEQ ID NO: 545739
gaaucucucagaggaaauc

SEQ ID NO: 545741 - RNA, 19 nt, Artificial Sequence
  Description of Artificial Sequence: Synthetic oligonucleotide
  Sense strand starting at position 1115 of SEQ ID NO: 318216
agcgguucuaaagaacauu

SEQ ID NO: 545742 - RNA, 19 nt, Artificial Sequence
  Description of Artificial Sequence: Synthetic oligonucleotide
  Antisense strand to SEQ ID NO: 545741
aauguucuuuagaaccgcu

SEQ ID NO: 545743 - RNA, 19 nt, Artificial Sequence
  Description of Artificial Sequence: Synthetic oligonucleotide
  Sense strand starting at position 1150 of SEQ ID NO: 318216
uccagugauuucgcuugca

SEQ ID NO: 545744 - RNA, 19 nt, Artificial Sequence
  Description of Artificial Sequence: Synthetic oligonucleotide
  Antisense strand to SEQ ID NO: 545743
ugcaagcgaaaucacugga

SEQ ID NO: 545745 - RNA, 19 nt, Artificial Sequence
  Description of Artificial Sequence: Synthetic oligonucleotide
  Sense strand starting at position 1307 of SEQ ID NO: 318216
aguguaaagguuuacacua

SEQ ID NO: 545746 - RNA, 19 nt, Artificial Sequence
  Description of Artificial Sequence: Synthetic oligonucleotide
  Antisense strand to SEQ ID NO: 545745
uaguguaaaccuuuacacu

SEQ ID NO: 545747 - RNA, 19 nt, Artificial Sequence
  Description of Artificial Sequence: Synthetic oligonucleotide
  Sense strand starting at position 1401 of SEQ ID NO: 318216
gaaacagaguuugcaauca

SEQ ID NO: 545748 - RNA, 19 nt, Artificial Sequence
  Description of Artificial Sequence: Synthetic oligonucleotide
  Antisense strand to SEQ ID NO: 545747
ugauugcaaacucuguuuc

SEQ ID NO: 545749 - RNA, 19 nt, Artificial Sequence
  Description of Artificial Sequence: Synthetic oligonucleotide
  Sense strand starting at position 1989 of SEQ ID NO: 318216
cuuuacuaucccggaagua

SEQ ID NO: 545750 - RNA, 19 nt, Artificial Sequence
  Description of Artificial Sequence: Synthetic oligonucleotide
  Antisense strand to SEQ ID NO: 545749
uacuuccgggauaguaaag

SEQ ID NO: 545751 - RNA, 19 nt, Artificial Sequence
  Description of Artificial Sequence: Synthetic oligonucleotide
  Sense strand starting at position 1990 of SEQ ID NO: 318216
uuuacuaucccggaaguac

SEQ ID NO: 545752 - RNA, 19 nt, Artificial Sequence
  Description of Artificial Sequence: Synthetic oligonucleotide
  Antisense strand to SEQ ID NO: 545751
guacuuccgggauaguaaa

SEQ ID NO: 545753 - RNA, 19 nt, Artificial Sequence
  Description of Artificial Sequence: Synthetic oligonucleotide
  Sense strand starting at position 2016 of SEQ ID NO: 318216
ccuaauuuccggcacguga

SEQ ID NO: 545754 - RNA, 19 nt, Artificial Sequence
  Description of Artificial Sequence: Synthetic oligonucleotide
  Antisense strand to SEQ ID NO: 545753
ucacgugccggaaauuagg

SEQ ID NO: 545755 - RNA, 19 nt, Artificial Sequence
  Description of Artificial Sequence: Synthetic oligonucleotide
  Sense strand starting at position 2018 of SEQ ID NO: 318216
uaauuuccggcacgugaaa

SEQ ID NO: 545756 - RNA, 19 nt, Artificial Sequence
  Description of Artificial Sequence: Synthetic oligonucleotide
  Antisense strand to SEQ ID NO: 545755
uuucacgugccggaaauua

SEQ ID NO: 545757 - RNA, 19 nt, Artificial Sequence
  Description of Artificial Sequence: Synthetic oligonucleotide
  Sense strand starting at position 2076 of SEQ ID NO: 318216
gcucuugagagaugagaga

SEQ ID NO: 545758 - RNA, 19 nt, Artificial Sequence
  Description of Artificial Sequence: Synthetic oligonucleotide
  Antisense strand to SEQ ID NO: 545757
ucucucaucucucaagagc

SEQ ID NO: 545759 - RNA, 19 nt, Artificial Sequence
  Description of Artificial Sequence: Synthetic oligonucleotide
  Sense strand starting at position 2202 of SEQ ID NO: 318216
uuuauuagaucccuagagu

SEQ ID NO: 545760 - RNA, 19 nt, Artificial Sequence
  Description of Artificial Sequence: Synthetic oligonucleotide
  Antisense strand to SEQ ID NO: 545759
acucuagggaucuaauaaa

SEQ ID NO: 545761 - RNA, 19 nt, Artificial Sequence
  Description of Artificial Sequence: Synthetic oligonucleotide
  Sense strand starting at position 2205 of SEQ ID NO: 318216
auuagaucccuagaguguu

SEQ ID NO: 545762 - RNA, 19 nt, Artificial Sequence
  Description of Artificial Sequence: Synthetic oligonucleotide
  Antisense strand to SEQ ID NO: 545761
aacacucuagggaucuaau

SEQ ID NO: 545763 - RNA, 19 nt, Artificial Sequence
  Description of Artificial Sequence: Synthetic oligonucleotide
  Sense strand starting at position 2211 of SEQ ID NO: 318216
ucccuagaguguuccaaac

SEQ ID NO: 545764 - RNA, 19 nt, Artificial Sequence
  Description of Artificial Sequence: Synthetic oligonucleotide
  Antisense strand to SEQ ID NO: 545763
guuuggaacacucuaggga

SEQ ID NO: 545765 - RNA, 19 nt, Artificial Sequence
  Description of Artificial Sequence: Synthetic oligonucleotide
  Sense strand starting at position 2237 of SEQ ID NO: 318216
acauuaaaucugugugaug

SEQ ID NO: 545766 - RNA, 19 nt, Artificial Sequence
  Description of Artificial Sequence: Synthetic oligonucleotide
  Antisense strand to SEQ ID NO: 545765
caucacacagauuuaaugu

SEQ ID NO: 545767 - RNA, 19 nt, Artificial Sequence
  Description of Artificial Sequence: Synthetic oligonucleotide
  Sense strand starting at position 2246 of SEQ ID NO: 318216
cugugugaugccuaaauua

SEQ ID NO: 545768 - RNA, 19 nt, Artificial Sequence
  Description of Artificial Sequence: Synthetic oligonucleotide
  Antisense strand to SEQ ID NO: 545767
uaauuuaggcaucacacag

SEQ ID NO: 545769 - RNA, 19 nt, Artificial Sequence
  Description of Artificial Sequence: Synthetic oligonucleotide
  Sense strand starting at position 2621 of SEQ ID NO: 318216
ccuugugcauauuugaauu

SEQ ID NO: 545770 - RNA, 19 nt, Artificial Sequence
  Description of Artificial Sequence: Synthetic oligonucleotide
  Antisense strand to SEQ ID NO: 545769
aauucaaauaugcacaagg

SEQ ID NO: 545771 - RNA, 19 nt, Artificial Sequence
  Description of Artificial Sequence: Synthetic oligonucleotide
  Sense strand starting at position 2864 of SEQ ID NO: 318216
gccuaaugagcacagacua

SEQ ID NO: 545772 - RNA, 19 nt, Artificial Sequence
  Description of Artificial Sequence: Synthetic oligonucleotide
  Antisense strand to SEQ ID NO: 545771
uagucugugcucauuaggc

SEQ ID NO: 545773 - RNA, 19 nt, Artificial Sequence
  Description of Artificial Sequence: Synthetic oligonucleotide
  Sense strand starting at position 2893 of SEQ ID NO: 318216
gacguuaaaccugacaguu

SEQ ID NO: 545774 - RNA, 19 nt, Artificial Sequence
  Description of Artificial Sequence: Synthetic oligonucleotide
  Antisense strand to SEQ ID NO: 545773
aacugucagguuuaacguc

SEQ ID NO: 545775 - RNA, 19 nt, Artificial Sequence
  Description of Artificial Sequence: Synthetic oligonucleotide
  Sense strand starting at position 2901 of SEQ ID NO: 318216
accugacaguuucucagaa

SEQ ID NO: 545776 - RNA, 19 nt, Artificial Sequence
  Description of Artificial Sequence: Synthetic oligonucleotide
  Antisense strand to SEQ ID NO: 545775
uucugagaaacugucaggu

SEQ ID NO: 545777 - RNA, 19 nt, Artificial Sequence
  Description of Artificial Sequence: Synthetic oligonucleotide
  Sense strand starting at position 2902 of SEQ ID NO: 318216
ccugacaguuucucagaaa

SEQ ID NO: 545778 - RNA, 19 nt, Artificial Sequence
  Description of Artificial Sequence: Synthetic oligonucleotide
  Antisense strand to SEQ ID NO: 545777
uuucugagaaacugucagg

SEQ ID NO: 545779 - RNA, 19 nt, Artificial Sequence
  Description of Artificial Sequence: Synthetic oligonucleotide
  Sense strand starting at position 2946 of SEQ ID NO: 318216
uuggaaaugcuaugaucca

SEQ ID NO: 545780 - RNA, 19 nt, Artificial Sequence
  Description of Artificial Sequence: Synthetic oligonucleotide
  Antisense strand to SEQ ID NO: 545779
uggaucauagcauuuccaa

SEQ ID NO: 545781 - RNA, 19 nt, Artificial Sequence
  Description of Artificial Sequence: Synthetic oligonucleotide
  Sense strand starting at position 2976 of SEQ ID NO: 318216
gggucucagaguuagaacu

SEQ ID NO: 545782 - RNA, 19 nt, Artificial Sequence
  Description of Artificial Sequence: Synthetic oligonucleotide
  Antisense strand to SEQ ID NO: 545781
aguucuaacucugagaccc

SEQ ID NO: 545783 - RNA, 19 nt, Artificial Sequence
  Description of Artificial Sequence: Synthetic oligonucleotide
  Sense strand starting at position 3047 of SEQ ID NO: 318216
cgcagucaugccucugagu

SEQ ID NO: 545784 - RNA, 19 nt, Artificial Sequence
  Description of Artificial Sequence: Synthetic oligonucleotide
  Antisense strand to SEQ ID NO: 545783
acucagaggcaugacugcg

SEQ ID NO: 545785 - RNA, 19 nt, Artificial Sequence
  Description of Artificial Sequence: Synthetic oligonucleotide
  Sense strand starting at position 3071 of SEQ ID NO: 318216
ccucuauuccacugagaug

SEQ ID NO: 545786 - RNA, 19 nt, Artificial Sequence
  Description of Artificial Sequence: Synthetic oligonucleotide
  Antisense strand to SEQ ID NO: 545785
caucucaguggaauagagg

SEQ ID NO: 545787 - RNA, 19 nt, Artificial Sequence
  Description of Artificial Sequence: Synthetic oligonucleotide
  Sense strand starting at position 3434 of SEQ ID NO: 318216
gggaguuuacagugcacaa

SEQ ID NO: 545788 - RNA, 19 nt, Artificial Sequence
  Description of Artificial Sequence: Synthetic oligonucleotide
  Antisense strand to SEQ ID NO: 545787
uugugcacuguaaacuccc

SEQ ID NO: 545789 - RNA, 19 nt, Artificial Sequence
  Description of Artificial Sequence: Synthetic oligonucleotide
  Sense strand starting at position 3487 of SEQ ID NO: 318216
gauaaucacgaguaggguu

SEQ ID NO: 545790 - RNA, 19 nt, Artificial Sequence
  Description of Artificial Sequence: Synthetic oligonucleotide
  Antisense strand to SEQ ID NO: 545789
aacccuacucgugauuauc

SEQ ID NO: 545791 - RNA, 19 nt, Artificial Sequence
  Description of Artificial Sequence: Synthetic oligonucleotide
  Sense strand starting at position 3557 of SEQ ID NO: 318216
cugugugaucaguggagac

SEQ ID NO: 545792 - RNA, 19 nt, Artificial Sequence
  Description of Artificial Sequence: Synthetic oligonucleotide
  Antisense strand to SEQ ID NO: 545791
gucuccacugaucacacag

SEQ ID NO: 545793 - RNA, 19 nt, Artificial Sequence
  Description of Artificial Sequence: Synthetic oligonucleotide
  Sense strand starting at position 3559 of SEQ ID NO: 318216
gugugaucaguggagacua

SEQ ID NO: 545794 - RNA, 19 nt, Artificial Sequence
  Description of Artificial Sequence: Synthetic oligonucleotide
  Antisense strand to SEQ ID NO: 545793
uagucuccacugaucacac

SEQ ID NO: 545795 - RNA, 19 nt, Artificial Sequence
  Description of Artificial Sequence: Synthetic oligonucleotide
  Sense strand starting at position 3569 of SEQ ID NO: 318216
uggagacuaucuguugagu

SEQ ID NO: 545796 - RNA, 19 nt, Artificial Sequence
  Description of Artificial Sequence: Synthetic oligonucleotide
  Antisense strand to SEQ ID NO: 545795
acucaacagauagucucca

SEQ ID NO: 545797 - RNA, 19 nt, Artificial Sequence
  Description of Artificial Sequence: Synthetic oligonucleotide
  Sense strand starting at position 3572 of SEQ ID NO: 318216
agacuaucuguugagucuu

SEQ ID NO: 545798 - RNA, 19 nt, Artificial Sequence
  Description of Artificial Sequence: Synthetic oligonucleotide
  Antisense strand to SEQ ID NO: 545797
aagacucaacagauagucu

SEQ ID NO: 545799 - RNA, 19 nt, Artificial Sequence
  Description of Artificial Sequence: Synthetic oligonucleotide
  Sense strand starting at position 3818 of SEQ ID NO: 318216
ugaacauucuuaguggaca

SEQ ID NO: 545800 - RNA, 19 nt, Artificial Sequence
  Description of Artificial Sequence: Synthetic oligonucleotide
  Antisense strand to SEQ ID NO: 545799
uguccacuaagaauguuca

SEQ ID NO: 545801 - RNA, 19 nt, Artificial Sequence
  Description of Artificial Sequence: Synthetic oligonucleotide
  Sense strand starting at position 3926 of SEQ ID NO: 318216
ucccuuaguguugaauuga

SEQ ID NO: 545802 - RNA, 19 nt, Artificial Sequence
  Description of Artificial Sequence: Synthetic oligonucleotide
  Antisense strand to SEQ ID NO: 545801
ucaauucaacacuaaggga

SEQ ID NO: 545803 - RNA, 19 nt, Artificial Sequence
  Description of Artificial Sequence: Synthetic oligonucleotide
  Sense strand starting at position 3945 of SEQ ID NO: 318216
gacagaauagcaugucauu

SEQ ID NO: 545804 - RNA, 19 nt, Artificial Sequence
  Description of Artificial Sequence: Synthetic oligonucleotide
  Antisense strand to SEQ ID NO: 545803
aaugacaugcuauucuguc

SEQ ID NO: 545805 - RNA, 19 nt, Artificial Sequence
  Description of Artificial Sequence: Synthetic oligonucleotide
  Sense strand starting at position 22 of SEQ ID NO: 318217
cacaguucuugagcucuga

SEQ ID NO: 545806 - RNA, 19 nt, Artificial Sequence
  Description of Artificial Sequence: Synthetic oligonucleotide
  Antisense strand to SEQ ID NO: 545805
ucagagcucaagaacugug

SEQ ID NO: 545807 - RNA, 19 nt, Artificial Sequence
  Description of Artificial Sequence: Synthetic oligonucleotide
  Sense strand starting at position 913 of SEQ ID NO: 318217
ugaauagaaaggugugagu

SEQ ID NO: 545808 - RNA, 19 nt, Artificial Sequence
  Description of Artificial Sequence: Synthetic oligonucleotide
  Antisense strand to SEQ ID NO: 545807
acucacaccuuucuauuca

SEQ ID NO: 545809 - RNA, 19 nt, Artificial Sequence
  Description of Artificial Sequence: Synthetic oligonucleotide
  Sense strand starting at position 915 of SEQ ID NO: 318217
aauagaaaggugugagugu

SEQ ID NO: 545810 - RNA, 19 nt, Artificial Sequence
  Description of Artificial Sequence: Synthetic oligonucleotide
  Antisense strand to SEQ ID NO: 545809
acacucacaccuuucuauu

SEQ ID NO: 545811 - RNA, 19 nt, Artificial Sequence
  Description of Artificial Sequence: Synthetic oligonucleotide
  Sense strand starting at position 1329 of SEQ ID NO: 318217
gggacuccucucgaguuga

SEQ ID NO: 545812 - RNA, 19 nt, Artificial Sequence
  Description of Artificial Sequence: Synthetic oligonucleotide
  Antisense strand to SEQ ID NO: 545811
ucaacucgagaggaguccc

SEQ ID NO: 545813 - RNA, 19 nt, Artificial Sequence
  Description of Artificial Sequence: Synthetic oligonucleotide
  Sense strand starting at position 1871 of SEQ ID NO: 318217
gcucauuggcgucuuugau

SEQ ID NO: 545814 - RNA, 19 nt, Artificial Sequence
  Description of Artificial Sequence: Synthetic oligonucleotide
  Antisense strand to SEQ ID NO: 545813
aucaaagacgccaaugagc

SEQ ID NO: 545815 - RNA, 19 nt, Artificial Sequence
  Description of Artificial Sequence: Synthetic oligonucleotide
  Sense strand starting at position 1879 of SEQ ID NO: 318217
gcgucuuugaucucagcuu

SEQ ID NO: 545816 - RNA, 19 nt, Artificial Sequence
  Description of Artificial Sequence: Synthetic oligonucleotide
  Antisense strand to SEQ ID NO: 545815
aagcugagaucaaagacgc

SEQ ID NO: 545817 - RNA, 19 nt, Artificial Sequence
  Description of Artificial Sequence: Synthetic oligonucleotide
  Sense strand starting at position 2033 of SEQ ID NO: 318217
gcacauggcuucucaagga

SEQ ID NO: 545818 - RNA, 19 nt, Artificial Sequence
  Description of Artificial Sequence: Synthetic oligonucleotide
  Antisense strand to SEQ ID NO: 545817
uccuugagaagccaugugc

SEQ ID NO: 545819 - RNA, 19 nt, Artificial Sequence
  Description of Artificial Sequence: Synthetic oligonucleotide
  Sense strand starting at position 2326 of SEQ ID NO: 318217
gcuuccuacugugucgaau

SEQ ID NO: 545820 - RNA, 19 nt, Artificial Sequence
  Description of Artificial Sequence: Synthetic oligonucleotide
  Antisense strand to SEQ ID NO: 545819
auucgacacaguaggaagc

SEQ ID NO: 545821 - RNA, 19 nt, Artificial Sequence
  Description of Artificial Sequence: Synthetic oligonucleotide
  Sense strand starting at position 2332 of SEQ ID NO: 318217
uacugugucgaaugggaau

SEQ ID NO: 545822 - RNA, 19 nt, Artificial Sequence
  Description of Artificial Sequence: Synthetic oligonucleotide
  Antisense strand to SEQ ID NO: 545821
auucccauucgacacagua

SEQ ID NO: 545823 - RNA, 19 nt, Artificial Sequence
  Description of Artificial Sequence: Synthetic oligonucleotide
  Sense strand starting at position 2334 of SEQ ID NO: 318217
cugugucgaaugggaauaa

SEQ ID NO: 545824 - RNA, 19 nt, Artificial Sequence
  Description of Artificial Sequence: Synthetic oligonucleotide
  Antisense strand to SEQ ID NO: 545823
uuauucccauucgacacag

SEQ ID NO: 545825 - RNA, 19 nt, Artificial Sequence
  Description of Artificial Sequence: Synthetic oligonucleotide
  Sense strand starting at position 2335 of SEQ ID NO: 318217
ugugucgaaugggaauaau

SEQ ID NO: 545826 - RNA, 19 nt, Artificial Sequence
  Description of Artificial Sequence: Synthetic oligonucleotide
  Antisense strand to SEQ ID NO: 545825
auuauucccauucgacaca

SEQ ID NO: 545827 - RNA, 19 nt, Artificial Sequence
  Description of Artificial Sequence: Synthetic oligonucleotide
  Sense strand starting at position 2365 of SEQ ID NO: 318217
ccuccucuucugugaggaa

SEQ ID NO: 545828 - RNA, 19 nt, Artificial Sequence
  Description of Artificial Sequence: Synthetic oligonucleotide
  Antisense strand to SEQ ID NO: 545827
uuccucacagaagaggagg

SEQ ID NO: 545829 - RNA, 19 nt, Artificial Sequence
  Description of Artificial Sequence: Synthetic oligonucleotide
  Sense strand starting at position 2374 of SEQ ID NO: 318217
cugugaggaagcuguuguu

SEQ ID NO: 545830 - RNA, 19 nt, Artificial Sequence
  Description of Artificial Sequence: Synthetic oligonucleotide
  Antisense strand to SEQ ID NO: 545829
aacaacagcuuccucacag

SEQ ID NO: 545831 - RNA, 19 nt, Artificial Sequence
  Description of Artificial Sequence: Synthetic oligonucleotide
  Sense strand starting at position 2501 of SEQ ID NO: 318217
guccucuccugucacugau

SEQ ID NO: 545832 - RNA, 19 nt, Artificial Sequence
  Description of Artificial Sequence: Synthetic oligonucleotide
  Antisense strand to SEQ ID NO: 545831
aucagugacaggagaggac

SEQ ID NO: 545833 - RNA, 19 nt, Artificial Sequence
  Description of Artificial Sequence: Synthetic oligonucleotide
  Sense strand starting at position 2516 of SEQ ID NO: 318217
ugaugucucagcuguguau

SEQ ID NO: 545834 - RNA, 19 nt, Artificial Sequence
  Description of Artificial Sequence: Synthetic oligonucleotide
  Antisense strand to SEQ ID NO: 545833
auacacagcugagacauca

SEQ ID NO: 545835 - RNA, 19 nt, Artificial Sequence
  Description of Artificial Sequence: Synthetic oligonucleotide
  Sense strand starting at position 2518 of SEQ ID NO: 318217
augucucagcuguguauga

SEQ ID NO: 545836 - RNA, 19 nt, Artificial Sequence
  Description of Artificial Sequence: Synthetic oligonucleotide
  Antisense strand to SEQ ID NO: 545835
ucauacacagcugagacau

SEQ ID NO: 545837 - RNA, 19 nt, Artificial Sequence
  Description of Artificial Sequence: Synthetic oligonucleotide
  Sense strand starting at position 2520 of SEQ ID NO: 318217
gucucagcuguguaugacu

SEQ ID NO: 545838 - RNA, 19 nt, Artificial Sequence
  Description of Artificial Sequence: Synthetic oligonucleotide
  Antisense strand to SEQ ID NO: 545837
agucauacacagcugagac

SEQ ID NO: 545839 - RNA, 19 nt, Artificial Sequence
  Description of Artificial Sequence: Synthetic oligonucleotide
  Sense strand starting at position 2911 of SEQ ID NO: 318217
agggauagaugcucuguaa

SEQ ID NO: 545840 - RNA, 19 nt, Artificial Sequence
  Description of Artificial Sequence: Synthetic oligonucleotide
  Antisense strand to SEQ ID NO: 545839
uuacagagcaucuaucccu

SEQ ID NO: 545841 - RNA, 19 nt, Artificial Sequence
  Description of Artificial Sequence: Synthetic oligonucleotide
  Sense strand starting at position 2914 of SEQ ID NO: 318217
gauagaugcucuguaaaga

SEQ ID NO: 545842 - RNA, 19 nt, Artificial Sequence
  Description of Artificial Sequence: Synthetic oligonucleotide
  Antisense strand to SEQ ID NO: 545841
ucuuuacagagcaucuauc

SEQ ID NO: 545843 - RNA, 19 nt, Artificial Sequence
  Description of Artificial Sequence: Synthetic oligonucleotide
  Sense strand starting at position 2929 of SEQ ID NO: 318217
aagagacaguccugguaaa

SEQ ID NO: 545844 - RNA, 19 nt, Artificial Sequence
  Description of Artificial Sequence: Synthetic oligonucleotide
  Antisense strand to SEQ ID NO: 545843
uuuaccaggacugucucuu

SEQ ID NO: 545845 - RNA, 19 nt, Artificial Sequence
  Description of Artificial Sequence: Synthetic oligonucleotide
  Sense strand starting at position 2930 of SEQ ID NO: 318217
agagacaguccugguaaac

SEQ ID NO: 545846 - RNA, 19 nt, Artificial Sequence
  Description of Artificial Sequence: Synthetic oligonucleotide
  Antisense strand to SEQ ID NO: 545845
guuuaccaggacugucucu

SEQ ID NO: 545847 - RNA, 19 nt, Artificial Sequence
  Description of Artificial Sequence: Synthetic oligonucleotide
  Sense strand starting at position 2967 of SEQ ID NO: 318217
ggccucaguuccuugggaa

SEQ ID NO: 545848 - RNA, 19 nt, Artificial Sequence
  Description of Artificial Sequence: Synthetic oligonucleotide
  Antisense strand to SEQ ID NO: 545847
uucccaaggaacugaggcc

SEQ ID NO: 545849 - RNA, 19 nt, Artificial Sequence
  Description of Artificial Sequence: Synthetic oligonucleotide
  Sense strand starting at position 2968 of SEQ ID NO: 318217
gccucaguuccuugggaaa

SEQ ID NO: 545850 - RNA, 19 nt, Artificial Sequence
  Description of Artificial Sequence: Synthetic oligonucleotide
  Antisense strand to SEQ ID NO: 545849
uuucccaaggaacugaggc

SEQ ID NO: 545851 - RNA, 19 nt, Artificial Sequence
  Description of Artificial Sequence: Synthetic oligonucleotide
  Sense strand starting at position 3271 of SEQ ID NO: 318217
guuccuggccgggaaacau

SEQ ID NO: 545852 - RNA, 19 nt, Artificial Sequence
  Description of Artificial Sequence: Synthetic oligonucleotide
  Antisense strand to SEQ ID NO: 545851
auguuucccggccaggaac

SEQ ID NO: 545853 - RNA, 19 nt, Artificial Sequence
  Description of Artificial Sequence: Synthetic oligonucleotide
  Sense strand starting at position 3280 of SEQ ID NO: 318217
cgggaaacaucuugaaguu

SEQ ID NO: 545854 - RNA, 19 nt, Artificial Sequence
  Description of Artificial Sequence: Synthetic oligonucleotide
  Antisense strand to SEQ ID NO: 545853
aacuucaagauguuucccg

SEQ ID NO: 545855 - RNA, 19 nt, Artificial Sequence
  Description of Artificial Sequence: Synthetic oligonucleotide
  Sense strand starting at position 3337 of SEQ ID NO: 318217
guugcucacagcggaauaa

SEQ ID NO: 545856 - RNA, 19 nt, Artificial Sequence
  Description of Artificial Sequence: Synthetic oligonucleotide
  Antisense strand to SEQ ID NO: 545855
uuauuccgcugugagcaac

SEQ ID NO: 545857 - RNA, 19 nt, Artificial Sequence
  Description of Artificial Sequence: Synthetic oligonucleotide
  Sense strand starting at position 3350 of SEQ ID NO: 318217
gaauaacugcccugucuag

SEQ ID NO: 545858 - RNA, 19 nt, Artificial Sequence
  Description of Artificial Sequence: Synthetic oligonucleotide
  Antisense strand to SEQ ID NO: 545857
cuagacagggcaguuauuc

SEQ ID NO: 545859 - RNA, 19 nt, Artificial Sequence
  Description of Artificial Sequence: Synthetic oligonucleotide
  Sense strand starting at position 3396 of SEQ ID NO: 318217
guccuuaacucacaaagua

SEQ ID NO: 545860 - RNA, 19 nt, Artificial Sequence
  Description of Artificial Sequence: Synthetic oligonucleotide
  Antisense strand to SEQ ID NO: 545859
uacuuugugaguuaaggac

SEQ ID NO: 545861 - RNA, 19 nt, Artificial Sequence
  Description of Artificial Sequence: Synthetic oligonucleotide
  Sense strand starting at position 3411 of SEQ ID NO: 318217
aguauuugcugagcucuca

SEQ ID NO: 545862 - RNA, 19 nt, Artificial Sequence
  Description of Artificial Sequence: Synthetic oligonucleotide
  Antisense strand to SEQ ID NO: 545861
ugagagcucagcaaauacu

SEQ ID NO: 545863 - RNA, 19 nt, Artificial Sequence
  Description of Artificial Sequence: Synthetic oligonucleotide
  Sense strand starting at position 3622 of SEQ ID NO: 318217
ccuaauuggugaggccaga

SEQ ID NO: 545864 - RNA, 19 nt, Artificial Sequence
  Description of Artificial Sequence: Synthetic oligonucleotide
  Antisense strand to SEQ ID NO: 545863
ucuggccucaccaauuagg

SEQ ID NO: 545865 - RNA, 19 nt, Artificial Sequence
  Description of Artificial Sequence: Synthetic oligonucleotide
  Sense strand starting at position 3658 of SEQ ID NO: 318217
aauggaugaagagguguua

SEQ ID NO: 545866 - RNA, 19 nt, Artificial Sequence
  Description of Artificial Sequence: Synthetic oligonucleotide
  Antisense strand to SEQ ID NO: 545865
uaacaccucuucauccauu

SEQ ID NO: 545867 - RNA, 19 nt, Artificial Sequence
  Description of Artificial Sequence: Synthetic oligonucleotide
  Sense strand starting at position 3667 of SEQ ID NO: 318217
agagguguuaucuaaguau

SEQ ID NO: 545868 - RNA, 19 nt, Artificial Sequence
  Description of Artificial Sequence: Synthetic oligonucleotide
  Antisense strand to SEQ ID NO: 545867
auacuuagauaacaccucu

SEQ ID NO: 545869 - RNA, 19 nt, Artificial Sequence
  Description of Artificial Sequence: Synthetic oligonucleotide
  Sense strand starting at position 3670 of SEQ ID NO: 318217
gguguuaucuaaguauagg

SEQ ID NO: 545870 - RNA, 19 nt, Artificial Sequence
  Description of Artificial Sequence: Synthetic oligonucleotide
  Antisense strand to SEQ ID NO: 545869
ccuauacuuagauaacacc

SEQ ID NO: 545871 - RNA, 19 nt, Artificial Sequence
  Description of Artificial Sequence: Synthetic oligonucleotide
  Sense strand starting at position 3671 of SEQ ID NO: 318217
guguuaucuaaguauagga

SEQ ID NO: 545872 - RNA, 19 nt, Artificial Sequence
  Description of Artificial Sequence: Synthetic oligonucleotide
  Antisense strand to SEQ ID NO: 545871
uccuauacuuagauaacac

SEQ ID NO: 545873 - RNA, 19 nt, Artificial Sequence
  Description of Artificial Sequence: Synthetic oligonucleotide
  Sense strand starting at position 3676 of SEQ ID NO: 318217
aucuaaguauaggagagau

SEQ ID NO: 545874 - RNA, 19 nt, Artificial Sequence
  Description of Artificial Sequence: Synthetic oligonucleotide
  Antisense strand to SEQ ID NO: 545873
aucucuccuauacuuagau

SEQ ID NO: 545875 - RNA, 19 nt, Artificial Sequence
  Description of Artificial Sequence: Synthetic oligonucleotide
  Sense strand starting at position 3693 of SEQ ID NO: 318217
augaaagaauucuagacaa

SEQ ID NO: 545876 - RNA, 19 nt, Artificial Sequence
  Description of Artificial Sequence: Synthetic oligonucleotide
  Antisense strand to SEQ ID NO: 545875
uugucuagaauucuuucau

SEQ ID NO: 545877 - RNA, 19 nt, Artificial Sequence
  Description of Artificial Sequence: Synthetic oligonucleotide
  Sense strand starting at position 3765 of SEQ ID NO: 318217
guggcuuacagagagcaaa

SEQ ID NO: 545878 - RNA, 19 nt, Artificial Sequence
  Description of Artificial Sequence: Synthetic oligonucleotide
  Antisense strand to SEQ ID NO: 545877
uuugcucucuguaagccac

SEQ ID NO: 545879 - RNA, 19 nt, Artificial Sequence
  Description of Artificial Sequence: Synthetic oligonucleotide
  Sense strand starting at position 3863 of SEQ ID NO: 318217
ucagccaucucugaaggaa

SEQ ID NO: 545880 - RNA, 19 nt, Artificial Sequence
  Description of Artificial Sequence: Synthetic oligonucleotide
  Antisense strand to SEQ ID NO: 545879
uuccuucagagauggcuga

SEQ ID NO: 545881 - RNA, 19 nt, Artificial Sequence
  Description of Artificial Sequence: Synthetic oligonucleotide
  Sense strand starting at position 3884 of SEQ ID NO: 318217
agccgcaaggguugugaau

SEQ ID NO: 545882 - RNA, 19 nt, Artificial Sequence
  Description of Artificial Sequence: Synthetic oligonucleotide
  Antisense strand to SEQ ID NO: 545881
auucacaacccuugcggcu

SEQ ID NO: 545883 - RNA, 19 nt, Artificial Sequence
  Description of Artificial Sequence: Synthetic oligonucleotide
  Sense strand starting at position 3959 of SEQ ID NO: 318217
cucagaugucugggcccua

SEQ ID NO: 545884 - RNA, 19 nt, Artificial Sequence
  Description of Artificial Sequence: Synthetic oligonucleotide
  Antisense strand to SEQ ID NO: 545883
uagggcccagacaucugag

SEQ ID NO: 545885 - RNA, 19 nt, Artificial Sequence
  Description of Artificial Sequence: Synthetic oligonucleotide
  Sense strand starting at position 188 of SEQ ID NO: 318218
guccuuuaccacuggacaa

SEQ ID NO: 545886 - RNA, 19 nt, Artificial Sequence
  Description of Artificial Sequence: Synthetic oligonucleotide
  Antisense strand to SEQ ID NO: 545885
uuguccagugguaaaggac

SEQ ID NO: 545887 - RNA, 19 nt, Artificial Sequence
  Description of Artificial Sequence: Synthetic oligonucleotide
  Sense strand starting at position 210 of SEQ ID NO: 318218
gcaacucuugcagaaaguu

SEQ ID NO: 545888 - RNA, 19 nt, Artificial Sequence
  Description of Artificial Sequence: Synthetic oligonucleotide
  Antisense strand to SEQ ID NO: 545887
aacuuucugcaagaguugc

SEQ ID NO: 545889 - RNA, 19 nt, Artificial Sequence
  Description of Artificial Sequence: Synthetic oligonucleotide
  Sense strand starting at position 338 of SEQ ID NO: 318218
auggauaauuccuuucuag

SEQ ID NO: 545890 - RNA, 19 nt, Artificial Sequence
  Description of Artificial Sequence: Synthetic oligonucleotide
  Antisense strand to SEQ ID NO: 545889
cuagaaaggaauuauccau

SEQ ID NO: 545891 - RNA, 19 nt, Artificial Sequence
  Description of Artificial Sequence: Synthetic oligonucleotide
  Sense strand starting at position 365 of SEQ ID NO: 318218
ccacaaugaauguggguau

SEQ ID NO: 545892 - RNA, 19 nt, Artificial Sequence
  Description of Artificial Sequence: Synthetic oligonucleotide
  Antisense strand to SEQ ID NO: 545891
auacccacauucauugugg

SEQ ID NO: 545893 - RNA, 19 nt, Artificial Sequence
  Description of Artificial Sequence: Synthetic oligonucleotide
  Sense strand starting at position 443 of SEQ ID NO: 318218
cacuuuggccaguaugaau

SEQ ID NO: 545894 - RNA, 19 nt, Artificial Sequence
  Description of Artificial Sequence: Synthetic oligonucleotide
  Antisense strand to SEQ ID NO: 545893
auucauacuggccaaagug

SEQ ID NO: 545895 - RNA, 19 nt, Artificial Sequence
  Description of Artificial Sequence: Synthetic oligonucleotide
  Sense strand starting at position 456 of SEQ ID NO: 318218
augaauagcugucugagaa

SEQ ID NO: 545896 - RNA, 19 nt, Artificial Sequence
  Description of Artificial Sequence: Synthetic oligonucleotide
  Antisense strand to SEQ ID NO: 545895
uucucagacagcuauucau

SEQ ID NO: 545897 - RNA, 19 nt, Artificial Sequence
  Description of Artificial Sequence: Synthetic oligonucleotide
  Sense strand starting at position 457 of SEQ ID NO: 318218
ugaauagcugucugagaau

SEQ ID NO: 545898 - RNA, 19 nt, Artificial Sequence
  Description of Artificial Sequence: Synthetic oligonucleotide
  Antisense strand to SEQ ID NO: 545897
auucucagacagcuauuca

SEQ ID NO: 545899 - RNA, 19 nt, Artificial Sequence
  Description of Artificial Sequence: Synthetic oligonucleotide
  Sense strand starting at position 472 of SEQ ID NO: 318218
gaauacagucagugagcau

SEQ ID NO: 545900 - RNA, 19 nt, Artificial Sequence
  Description of Artificial Sequence: Synthetic oligonucleotide
  Antisense strand to SEQ ID NO: 545899
augcucacugacuguauuc

SEQ ID NO: 545901 - RNA, 19 nt, Artificial Sequence
  Description of Artificial Sequence: Synthetic oligonucleotide
  Sense strand starting at position 756 of SEQ ID NO: 318218
acaguaagucucgauccca

SEQ ID NO: 545902 - RNA, 19 nt, Artificial Sequence
  Description of Artificial Sequence: Synthetic oligonucleotide
  Antisense strand to SEQ ID NO: 545901
ugggaucgagacuuacugu

SEQ ID NO: 545903 - RNA, 19 nt, Artificial Sequence
  Description of Artificial Sequence: Synthetic oligonucleotide
  Sense strand starting at position 787 of SEQ ID NO: 318218
ggguucucaaguuaaguuu

SEQ ID NO: 545904 - RNA, 19 nt, Artificial Sequence
  Description of Artificial Sequence: Synthetic oligonucleotide
  Antisense strand to SEQ ID NO: 545903
aaacuuaacuugagaaccc

SEQ ID NO: 545905 - RNA, 19 nt, Artificial Sequence
  Description of Artificial Sequence: Synthetic oligonucleotide
  Sense strand starting at position 1342 of SEQ ID NO: 318218
cgggcuuacucaucagaga

SEQ ID NO: 545906 - RNA, 19 nt, Artificial Sequence
  Description of Artificial Sequence: Synthetic oligonucleotide
  Antisense strand to SEQ ID NO: 545905
ucucugaugaguaagcccg

SEQ ID NO: 545907 - RNA, 19 nt, Artificial Sequence
  Description of Artificial Sequence: Synthetic oligonucleotide
  Sense strand starting at position 1505 of SEQ ID NO: 318218
cacuuaccucggugaagaa

SEQ ID NO: 545908 - RNA, 19 nt, Artificial Sequence
  Description of Artificial Sequence: Synthetic oligonucleotide
  Antisense strand to SEQ ID NO: 545907
uucuucaccgagguaagug

SEQ ID NO: 545909 - RNA, 19 nt, Artificial Sequence
  Description of Artificial Sequence: Synthetic oligonucleotide
  Sense strand starting at position 1514 of SEQ ID NO: 318218
cggugaagaaguuauccau

SEQ ID NO: 545910 - RNA, 19 nt, Artificial Sequence
  Description of Artificial Sequence: Synthetic oligonucleotide
  Antisense strand to SEQ ID NO: 545909
auggauaacuucuucaccg

SEQ ID NO: 545911 - RNA, 19 nt, Artificial Sequence
  Description of Artificial Sequence: Synthetic oligonucleotide
  Sense strand starting at position 2481 of SEQ ID NO: 318218
gacggaggcuaaucagaau

SEQ ID NO: 545912 - RNA, 19 nt, Artificial Sequence
  Description of Artificial Sequence: Synthetic oligonucleotide
  Antisense strand to SEQ ID NO: 545911
auucugauuagccuccguc

SEQ ID NO: 545913 - RNA, 19 nt, Artificial Sequence
  Description of Artificial Sequence: Synthetic oligonucleotide
  Sense strand starting at position 2509 of SEQ ID NO: 318218
cugcauucccguguugacu

SEQ ID NO: 545914 - RNA, 19 nt, Artificial Sequence
  Description of Artificial Sequence: Synthetic oligonucleotide
  Antisense strand to SEQ ID NO: 545913
agucaacacgggaaugcag

SEQ ID NO: 545915 - RNA, 19 nt, Artificial Sequence
  Description of Artificial Sequence: Synthetic oligonucleotide
  Sense strand starting at position 2510 of SEQ ID NO: 318218
ugcauucccguguugacuu

SEQ ID NO: 545916 - RNA, 19 nt, Artificial Sequence
  Description of Artificial Sequence: Synthetic oligonucleotide
  Antisense strand to SEQ ID NO: 545915
aagucaacacgggaaugca

SEQ ID NO: 545917 - RNA, 19 nt, Artificial Sequence
  Description of Artificial Sequence: Synthetic oligonucleotide
  Sense strand starting at position 2541 of SEQ ID NO: 318218
ucggguuugcuuaagacgu

SEQ ID NO: 545918 - RNA, 19 nt, Artificial Sequence
  Description of Artificial Sequence: Synthetic oligonucleotide
  Antisense strand to SEQ ID NO: 545917
acgucuuaagcaaacccga

SEQ ID NO: 545919 - RNA, 19 nt, Artificial Sequence
  Description of Artificial Sequence: Synthetic oligonucleotide
  Sense strand starting at position 2548 of SEQ ID NO: 318218
ugcuuaagacguuugcgua

SEQ ID NO: 545920 - RNA, 19 nt, Artificial Sequence
  Description of Artificial Sequence: Synthetic oligonucleotide
  Antisense strand to SEQ ID NO: 545919
uacgcaaacgucuuaagca

SEQ ID NO: 545921 - RNA, 19 nt, Artificial Sequence
  Description of Artificial Sequence: Synthetic oligonucleotide
  Sense strand starting at position 2662 of SEQ ID NO: 318218
ggcagauggcacugagaug

SEQ ID NO: 545922 - RNA, 19 nt, Artificial Sequence
  Description of Artificial Sequence: Synthetic oligonucleotide
  Antisense strand to SEQ ID NO: 545921
caucucagugccaucugcc

SEQ ID NO: 545923 - RNA, 19 nt, Artificial Sequence
  Description of Artificial Sequence: Synthetic oligonucleotide
  Sense strand starting at position 2762 of SEQ ID NO: 318218
cugggaaccuuguuagaac

SEQ ID NO: 545924 - RNA, 19 nt, Artificial Sequence
  Description of Artificial Sequence: Synthetic oligonucleotide
  Antisense strand to SEQ ID NO: 545923
guucuaacaagguucccag

SEQ ID NO: 545925 - RNA, 19 nt, Artificial Sequence
  Description of Artificial Sequence: Synthetic oligonucleotide
  Sense strand starting at position 2788 of SEQ ID NO: 318218
ggaacaaucugcuuuccag

SEQ ID NO: 545926 - RNA, 19 nt, Artificial Sequence
  Description of Artificial Sequence: Synthetic oligonucleotide
  Antisense strand to SEQ ID NO: 545925
cuggaaagcagauuguucc

SEQ ID NO: 545927 - RNA, 19 nt, Artificial Sequence
  Description of Artificial Sequence: Synthetic oligonucleotide
  Sense strand starting at position 2846 of SEQ ID NO: 318218
gcuuguaacaaguagagaa

SEQ ID NO: 545928 - RNA, 19 nt, Artificial Sequence
  Description of Artificial Sequence: Synthetic oligonucleotide
  Antisense strand to SEQ ID NO: 545927
uucucuacuuguuacaagc

SEQ ID NO: 545929 - RNA, 19 nt, Artificial Sequence
  Description of Artificial Sequence: Synthetic oligonucleotide
  Sense strand starting at position 2890 of SEQ ID NO: 318218
uuaauaaugccacgacauc

SEQ ID NO: 545930 - RNA, 19 nt, Artificial Sequence
  Description of Artificial Sequence: Synthetic oligonucleotide
  Antisense strand to SEQ ID NO: 545929
gaugucguggcauuauuaa

SEQ ID NO: 545931 - RNA, 19 nt, Artificial Sequence
  Description of Artificial Sequence: Synthetic oligonucleotide
  Sense strand starting at position 2930 of SEQ ID NO: 318218
cuuugaaccgaguauaaac

SEQ ID NO: 545932 - RNA, 19 nt, Artificial Sequence
  Description of Artificial Sequence: Synthetic oligonucleotide
  Antisense strand to SEQ ID NO: 545931
guuuauacucgguucaaag

SEQ ID NO: 545933 - RNA, 19 nt, Artificial Sequence
  Description of Artificial Sequence: Synthetic oligonucleotide
  Sense strand starting at position 3061 of SEQ ID NO: 318218
augcucucuccagggaauu

SEQ ID NO: 545934 - RNA, 19 nt, Artificial Sequence
  Description of Artificial Sequence: Synthetic oligonucleotide
  Antisense strand to SEQ ID NO: 545933
aauucccuggagagagcau

SEQ ID NO: 545935 - RNA, 19 nt, Artificial Sequence
  Description of Artificial Sequence: Synthetic oligonucleotide
  Sense strand starting at position 3195 of SEQ ID NO: 318218
gggcuagaugcccacucua

SEQ ID NO: 545936 - RNA, 19 nt, Artificial Sequence
  Description of Artificial Sequence: Synthetic oligonucleotide
  Antisense strand to SEQ ID NO: 545935
uagagugggcaucuagccc

SEQ ID NO: 545937 - RNA, 19 nt, Artificial Sequence
  Description of Artificial Sequence: Synthetic oligonucleotide
  Sense strand starting at position 3213 of SEQ ID NO: 318218
aggauuuauuccuaagacu

SEQ ID NO: 545938 - RNA, 19 nt, Artificial Sequence
  Description of Artificial Sequence: Synthetic oligonucleotide
  Antisense strand to SEQ ID NO: 545937
agucuuaggaauaaauccu

SEQ ID NO: 545939 - RNA, 19 nt, Artificial Sequence
  Description of Artificial Sequence: Synthetic oligonucleotide
  Sense strand starting at position 3238 of SEQ ID NO: 318218
gaaggacugugcuuuaaga

SEQ ID NO: 545940 - RNA, 19 nt, Artificial Sequence
  Description of Artificial Sequence: Synthetic oligonucleotide
  Antisense strand to SEQ ID NO: 545939
ucuuaaagcacaguccuuc

SEQ ID NO: 545941 - RNA, 19 nt, Artificial Sequence
  Description of Artificial Sequence: Synthetic oligonucleotide
  Sense strand starting at position 3240 of SEQ ID NO: 318218
aggacugugcuuuaagaug

SEQ ID NO: 545942 - RNA, 19 nt, Artificial Sequence
  Description of Artificial Sequence: Synthetic oligonucleotide
  Antisense strand to SEQ ID NO: 545941
caucuuaaagcacaguccu

SEQ ID NO: 545943 - RNA, 19 nt, Artificial Sequence
  Description of Artificial Sequence: Synthetic oligonucleotide
  Sense strand starting at position 3246 of SEQ ID NO: 318218
gugcuuuaagaugaguauc

SEQ ID NO: 545944 - RNA, 19 nt, Artificial Sequence
  Description of Artificial Sequence: Synthetic oligonucleotide
  Antisense strand to SEQ ID NO: 545943
gauacucaucuuaaagcac

SEQ ID NO: 545945 - RNA, 19 nt, Artificial Sequence
  Description of Artificial Sequence: Synthetic oligonucleotide
  Sense strand starting at position 3272 of SEQ ID NO: 318218
ugucucacagcaugaauga

SEQ ID NO: 545946 - RNA, 19 nt, Artificial Sequence
  Description of Artificial Sequence: Synthetic oligonucleotide
  Antisense strand to SEQ ID NO: 545945
ucauucaugcugugagaca

SEQ ID NO: 545947 - RNA, 19 nt, Artificial Sequence
  Description of Artificial Sequence: Synthetic oligonucleotide
  Sense strand starting at position 3273 of SEQ ID NO: 318218
gucucacagcaugaaugaa

SEQ ID NO: 545948 - RNA, 19 nt, Artificial Sequence
  Description of Artificial Sequence: Synthetic oligonucleotide
  Antisense strand to SEQ ID NO: 545947
uucauucaugcugugagac

SEQ ID NO: 545949 - RNA, 19 nt, Artificial Sequence
  Description of Artificial Sequence: Synthetic oligonucleotide
  Sense strand starting at position 3322 of SEQ ID NO: 318218
gggaaagucaagcauguuu

SEQ ID NO: 545950 - RNA, 19 nt, Artificial Sequence
  Description of Artificial Sequence: Synthetic oligonucleotide
  Antisense strand to SEQ ID NO: 545949
aaacaugcuugacuuuccc

SEQ ID NO: 545951 - RNA, 19 nt, Artificial Sequence
  Description of Artificial Sequence: Synthetic oligonucleotide
  Sense strand starting at position 3414 of SEQ ID NO: 318218
gguguaaauuaguuaauga

SEQ ID NO: 545952 - RNA, 19 nt, Artificial Sequence
  Description of Artificial Sequence: Synthetic oligonucleotide
  Antisense strand to SEQ ID NO: 545951
ucauuaacuaauuuacacc

SEQ ID NO: 545953 - RNA, 19 nt, Artificial Sequence
  Description of Artificial Sequence: Synthetic oligonucleotide
  Sense strand starting at position 3428 of SEQ ID NO: 318218
aaugauauugugcaauguu

SEQ ID NO: 545954 - RNA, 19 nt, Artificial Sequence
  Description of Artificial Sequence: Synthetic oligonucleotide
  Antisense strand to SEQ ID NO: 545953
aacauugcacaauaucauu

SEQ ID NO: 545955 - RNA, 19 nt, Artificial Sequence
  Description of Artificial Sequence: Synthetic oligonucleotide
  Sense strand starting at position 3621 of SEQ ID NO: 318218
ugguauuaaucugcacaca

SEQ ID NO: 545956 - RNA, 19 nt, Artificial Sequence
  Description of Artificial Sequence: Synthetic oligonucleotide
  Antisense strand to SEQ ID NO: 545955
ugugugcagauuaauacca

SEQ ID NO: 545957 - RNA, 19 nt, Artificial Sequence
  Description of Artificial Sequence: Synthetic oligonucleotide
  Sense strand starting at position 3622 of SEQ ID NO: 318218
gguauuaaucugcacacaa

SEQ ID NO: 545958 - RNA, 19 nt, Artificial Sequence
  Description of Artificial Sequence: Synthetic oligonucleotide
  Antisense strand to SEQ ID NO: 545957
uugugugcagauuaauacc

SEQ ID NO: 545959 - RNA, 19 nt, Artificial Sequence
  Description of Artificial Sequence: Synthetic oligonucleotide
  Sense strand starting at position 3664 of SEQ ID NO: 318218
gggagauuguugaagugag

SEQ ID NO: 545960 - RNA, 19 nt, Artificial Sequence
  Description of Artificial Sequence: Synthetic oligonucleotide
  Antisense strand to SEQ ID NO: 545959
cucacuucaacaaucuccc

SEQ ID NO: 545961 - RNA, 19 nt, Artificial Sequence
  Description of Artificial Sequence: Synthetic oligonucleotide
  Sense strand starting at position 3860 of SEQ ID NO: 318218
uggacacucucuguacuuu

SEQ ID NO: 545962 - RNA, 19 nt, Artificial Sequence
  Description of Artificial Sequence: Synthetic oligonucleotide
  Antisense strand to SEQ ID NO: 545961
aaaguacagagagugucca

SEQ ID NO: 545963 - RNA, 19 nt, Artificial Sequence
  Description of Artificial Sequence: Synthetic oligonucleotide
  Sense strand starting at position 3871 of SEQ ID NO: 318218
uguacuuucuggccaauuu

SEQ ID NO: 545964 - RNA, 19 nt, Artificial Sequence
  Description of Artificial Sequence: Synthetic oligonucleotide
  Antisense strand to SEQ ID NO: 545963
aaauuggccagaaaguaca

SEQ ID NO: 545965 - RNA, 19 nt, Artificial Sequence
  Description of Artificial Sequence: Synthetic oligonucleotide
  Sense strand starting at position 70 of SEQ ID NO: 318219
agauuauacuuccuaguug

SEQ ID NO: 545966 - RNA, 19 nt, Artificial Sequence
  Description of Artificial Sequence: Synthetic oligonucleotide
  Antisense strand to SEQ ID NO: 545965
caacuaggaaguauaaucu

SEQ ID NO: 545967 - RNA, 19 nt, Artificial Sequence
  Description of Artificial Sequence: Synthetic oligonucleotide
  Sense strand starting at position 403 of SEQ ID NO: 318219
ugaaacauuugccaugaaa

SEQ ID NO: 545968 - RNA, 19 nt, Artificial Sequence
  Description of Artificial Sequence: Synthetic oligonucleotide
  Antisense strand to SEQ ID NO: 545967
uuucauggcaaauguuuca

SEQ ID NO: 545969 - RNA, 19 nt, Artificial Sequence
  Description of Artificial Sequence: Synthetic oligonucleotide
  Sense strand starting at position 458 of SEQ ID NO: 318219
uuuccauuaguaugguaaa

SEQ ID NO: 545970 - RNA, 19 nt, Artificial Sequence
  Description of Artificial Sequence: Synthetic oligonucleotide
  Antisense strand to SEQ ID NO: 545969
uuuaccauacuaauggaaa

SEQ ID NO: 545971 - RNA, 19 nt, Artificial Sequence
  Description of Artificial Sequence: Synthetic oligonucleotide
  Sense strand starting at position 660 of SEQ ID NO: 318219
accaaauuguuugucauca

SEQ ID NO: 545972 - RNA, 19 nt, Artificial Sequence
  Description of Artificial Sequence: Synthetic oligonucleotide
  Antisense strand to SEQ ID NO: 545971
ugaugacaaacaauuuggu

SEQ ID NO: 545973 - RNA, 19 nt, Artificial Sequence
  Description of Artificial Sequence: Synthetic oligonucleotide
  Sense strand starting at position 665 of SEQ ID NO: 318219
auuguuugucaucauugaa

SEQ ID NO: 545974 - RNA, 19 nt, Artificial Sequence
  Description of Artificial Sequence: Synthetic oligonucleotide
  Antisense strand to SEQ ID NO: 545973
uucaaugaugacaaacaau

SEQ ID NO: 545975 - RNA, 19 nt, Artificial Sequence
  Description of Artificial Sequence: Synthetic oligonucleotide
  Sense strand starting at position 705 of SEQ ID NO: 318219
aguuacugucuuggauaaa

SEQ ID NO: 545976 - RNA, 19 nt, Artificial Sequence
  Description of Artificial Sequence: Synthetic oligonucleotide
  Antisense strand to SEQ ID NO: 545975
uuuauccaagacaguaacu

SEQ ID NO: 545977 - RNA, 19 nt, Artificial Sequence
  Description of Artificial Sequence: Synthetic oligonucleotide
  Sense strand starting at position 1020 of SEQ ID NO: 318219
gggccuugaguagaucuaa

SEQ ID NO: 545978 - RNA, 19 nt, Artificial Sequence
  Description of Artificial Sequence: Synthetic oligonucleotide
  Antisense strand to SEQ ID NO: 545977
uuagaucuacucaaggccc

SEQ ID NO: 545979 - RNA, 19 nt, Artificial Sequence
  Description of Artificial Sequence: Synthetic oligonucleotide
  Sense strand starting at position 1087 of SEQ ID NO: 318219
cagucuguugcagaauuga

SEQ ID NO: 545980 - RNA, 19 nt, Artificial Sequence
  Description of Artificial Sequence: Synthetic oligonucleotide
  Antisense strand to SEQ ID NO: 545979
ucaauucugcaacagacug

SEQ ID NO: 545981 - RNA, 19 nt, Artificial Sequence
  Description of Artificial Sequence: Synthetic oligonucleotide
  Sense strand starting at position 1107 of SEQ ID NO: 318219
uccagaguuugauuccuaa

SEQ ID NO: 545982 - RNA, 19 nt, Artificial Sequence
  Description of Artificial Sequence: Synthetic oligonucleotide
  Antisense strand to SEQ ID NO: 545981
uuaggaaucaaacucugga

SEQ ID NO: 545983 - RNA, 19 nt, Artificial Sequence
  Description of Artificial Sequence: Synthetic oligonucleotide
  Sense strand starting at position 1110 of SEQ ID NO: 318219
agaguuugauuccuaaauu

SEQ ID NO: 545984 - RNA, 19 nt, Artificial Sequence
  Description of Artificial Sequence: Synthetic oligonucleotide
  Antisense strand to SEQ ID NO: 545983
aauuuaggaaucaaacucu

SEQ ID NO: 545985 - RNA, 19 nt, Artificial Sequence
  Description of Artificial Sequence: Synthetic oligonucleotide
  Sense strand starting at position 1181 of SEQ ID NO: 318219
ccgcuuaugaaauaguaga

SEQ ID NO: 545986 - RNA, 19 nt, Artificial Sequence
  Description of Artificial Sequence: Synthetic oligonucleotide
  Antisense strand to SEQ ID NO: 545985
ucuacuauuucauaagcgg

SEQ ID NO: 545987 - RNA, 19 nt, Artificial Sequence
  Description of Artificial Sequence: Synthetic oligonucleotide
  Sense strand starting at position 1268 of SEQ ID NO: 318219
uugauauuggccuacauug

SEQ ID NO: 545988 - RNA, 19 nt, Artificial Sequence
  Description of Artificial Sequence: Synthetic oligonucleotide
  Antisense strand to SEQ ID NO: 545987
caauguaggccaauaucaa

SEQ ID NO: 545989 - RNA, 19 nt, Artificial Sequence
  Description of Artificial Sequence: Synthetic oligonucleotide
  Sense strand starting at position 1270 of SEQ ID NO: 318219
gauauuggccuacauuguu

SEQ ID NO: 545990 - RNA, 19 nt, Artificial Sequence
  Description of Artificial Sequence: Synthetic oligonucleotide
  Antisense strand to SEQ ID NO: 545989
aacaauguaggccaauauc

SEQ ID NO: 545991 - RNA, 19 nt, Artificial Sequence
  Description of Artificial Sequence: Synthetic oligonucleotide
  Sense strand starting at position 1275 of SEQ ID NO: 318219
uggccuacauuguuaauaa

SEQ ID NO: 545992 - RNA, 19 nt, Artificial Sequence
  Description of Artificial Sequence: Synthetic oligonucleotide
  Antisense strand to SEQ ID NO: 545991
uuauuaacaauguaggcca

SEQ ID NO: 545993 - RNA, 19 nt, Artificial Sequence
  Description of Artificial Sequence: Synthetic oligonucleotide
  Sense strand starting at position 1450 of SEQ ID NO: 318219
uguuauaugacagggucau

SEQ ID NO: 545994 - RNA, 19 nt, Artificial Sequence
  Description of Artificial Sequence: Synthetic oligonucleotide
  Antisense strand to SEQ ID NO: 545993
augacccugucauauaaca

SEQ ID NO: 545995 - RNA, 19 nt, Artificial Sequence
  Description of Artificial Sequence: Synthetic oligonucleotide
  Sense strand starting at position 1451 of SEQ ID NO: 318219
guuauaugacagggucauu

SEQ ID NO: 545996 - RNA, 19 nt, Artificial Sequence
  Description of Artificial Sequence: Synthetic oligonucleotide
  Antisense strand to SEQ ID NO: 545995
aaugacccugucauauaac

SEQ ID NO: 545997 - RNA, 19 nt, Artificial Sequence
  Description of Artificial Sequence: Synthetic oligonucleotide
  Sense strand starting at position 1773 of SEQ ID NO: 318219
guguaauaccauuauaaug

SEQ ID NO: 545998 - RNA, 19 nt, Artificial Sequence
  Description of Artificial Sequence: Synthetic oligonucleotide
  Antisense strand to SEQ ID NO: 545997
cauuauaaugguauuacac

SEQ ID NO: 545999 - RNA, 19 nt, Artificial Sequence
  Description of Artificial Sequence: Synthetic oligonucleotide
  Sense strand starting at position 1828 of SEQ ID NO: 318219
uguauacacucaucugauu

SEQ ID NO: 546000 - RNA, 19 nt, Artificial Sequence
  Description of Artificial Sequence: Synthetic oligonucleotide
  Antisense strand to SEQ ID NO: 545999
aaucagaugaguguauaca

SEQ ID NO: 546001 - RNA, 19 nt, Artificial Sequence
  Description of Artificial Sequence: Synthetic oligonucleotide
  Sense strand starting at position 2146 of SEQ ID NO: 318219
gggauuacaugagcuucuu

SEQ ID NO: 546002 - RNA, 19 nt, Artificial Sequence
  Description of Artificial Sequence: Synthetic oligonucleotide
  Antisense strand to SEQ ID NO: 546001
aagaagcucauguaauccc

SEQ ID NO: 546003 - RNA, 19 nt, Artificial Sequence
  Description of Artificial Sequence: Synthetic oligonucleotide
  Sense strand starting at position 2411 of SEQ ID NO: 318219
gcucccaauugauuuguau

SEQ ID NO: 546004 - RNA, 19 nt, Artificial Sequence
  Description of Artificial Sequence: Synthetic oligonucleotide
  Antisense strand to SEQ ID NO: 546003
auacaaaucaauugggagc

SEQ ID NO: 546005 - RNA, 19 nt, Artificial Sequence
  Description of Artificial Sequence: Synthetic oligonucleotide
  Sense strand starting at position 2495 of SEQ ID NO: 318219
ugaggucucucaguacuag

SEQ ID NO: 546006 - RNA, 19 nt, Artificial Sequence
  Description of Artificial Sequence: Synthetic oligonucleotide
  Antisense strand to SEQ ID NO: 546005
cuaguacugagagaccuca

SEQ ID NO: 546007 - RNA, 19 nt, Artificial Sequence
  Description of Artificial Sequence: Synthetic oligonucleotide
  Sense strand starting at position 2549 of SEQ ID NO: 318219
gcaggagaccgaggucaua

SEQ ID NO: 546008 - RNA, 19 nt, Artificial Sequence
  Description of Artificial Sequence: Synthetic oligonucleotide
  Antisense strand to SEQ ID NO: 546007
uaugaccucggucuccugc

SEQ ID NO: 546009 - RNA, 19 nt, Artificial Sequence
  Description of Artificial Sequence: Synthetic oligonucleotide
  Sense strand starting at position 2567 of SEQ ID NO: 318219
agugacaugucacugggaa

SEQ ID NO: 546010 - RNA, 19 nt, Artificial Sequence
  Description of Artificial Sequence: Synthetic oligonucleotide
  Antisense strand to SEQ ID NO: 546009
uucccagugacaugucacu

SEQ ID NO: 546011 - RNA, 19 nt, Artificial Sequence
  Description of Artificial Sequence: Synthetic oligonucleotide
  Sense strand starting at position 2568 of SEQ ID NO: 318219
gugacaugucacugggaag

SEQ ID NO: 546012 - RNA, 19 nt, Artificial Sequence
  Description of Artificial Sequence: Synthetic oligonucleotide
  Antisense strand to SEQ ID NO: 546011
cuucccagugacaugucac

SEQ ID NO: 546013 - RNA, 19 nt, Artificial Sequence
  Description of Artificial Sequence: Synthetic oligonucleotide
  Sense strand starting at position 2603 of SEQ ID NO: 318219
acaugaugguguuucuuga

SEQ ID NO: 546014 - RNA, 19 nt, Artificial Sequence
  Description of Artificial Sequence: Synthetic oligonucleotide
  Antisense strand to SEQ ID NO: 546013
ucaagaaacaccaucaugu

SEQ ID NO: 546015 - RNA, 19 nt, Artificial Sequence
  Description of Artificial Sequence: Synthetic oligonucleotide
  Sense strand starting at position 2838 of SEQ ID NO: 318219
ggaaguaaauaauugcaga

SEQ ID NO: 546016 - RNA, 19 nt, Artificial Sequence
  Description of Artificial Sequence: Synthetic oligonucleotide
  Antisense strand to SEQ ID NO: 546015
ucugcaauuauuuacuucc

SEQ ID NO: 546017 - RNA, 19 nt, Artificial Sequence
  Description of Artificial Sequence: Synthetic oligonucleotide
  Sense strand starting at position 2894 of SEQ ID NO: 318219
gguagguggcaugaggauu

SEQ ID NO: 546018 - RNA, 19 nt, Artificial Sequence
  Description of Artificial Sequence: Synthetic oligonucleotide
  Antisense strand to SEQ ID NO: 546017
aauccucaugccaccuacc

SEQ ID NO: 546019 - RNA, 19 nt, Artificial Sequence
  Description of Artificial Sequence: Synthetic oligonucleotide
  Sense strand starting at position 2921 of SEQ ID NO: 318219
ggaguagaauuaucuccau

SEQ ID NO: 546020 - RNA, 19 nt, Artificial Sequence
  Description of Artificial Sequence: Synthetic oligonucleotide
  Antisense strand to SEQ ID NO: 546019
auggagauaauucuacucc

SEQ ID NO: 546021 - RNA, 19 nt, Artificial Sequence
  Description of Artificial Sequence: Synthetic oligonucleotide
  Sense strand starting at position 2957 of SEQ ID NO: 318219
ccucccucauggguagaua

SEQ ID NO: 546022 - RNA, 19 nt, Artificial Sequence
  Description of Artificial Sequence: Synthetic oligonucleotide
  Antisense strand to SEQ ID NO: 546021
uaucuacccaugagggagg

SEQ ID NO: 546023 - RNA, 19 nt, Artificial Sequence
  Description of Artificial Sequence: Synthetic oligonucleotide
  Sense strand starting at position 3019 of SEQ ID NO: 318219
auagauguuugagcacaua

SEQ ID NO: 546024 - RNA, 19 nt, Artificial Sequence
  Description of Artificial Sequence: Synthetic oligonucleotide
  Antisense strand to SEQ ID NO: 546023
uaugugcucaaacaucuau

SEQ ID NO: 546025 - RNA, 19 nt, Artificial Sequence
  Description of Artificial Sequence: Synthetic oligonucleotide
  Sense strand starting at position 3022 of SEQ ID NO: 318219
gauguuugagcacauauga

SEQ ID NO: 546026 - RNA, 19 nt, Artificial Sequence
  Description of Artificial Sequence: Synthetic oligonucleotide
  Antisense strand to SEQ ID NO: 546025
ucauaugugcucaaacauc

SEQ ID NO: 546027 - RNA, 19 nt, Artificial Sequence
  Description of Artificial Sequence: Synthetic oligonucleotide
  Sense strand starting at position 3295 of SEQ ID NO: 318219
augcaagugauaggauaaa

SEQ ID NO: 546028 - RNA, 19 nt, Artificial Sequence
  Description of Artificial Sequence: Synthetic oligonucleotide
  Antisense strand to SEQ ID NO: 546027
uuuauccuaucacuugcau

SEQ ID NO: 546029 - RNA, 19 nt, Artificial Sequence
  Description of Artificial Sequence: Synthetic oligonucleotide
  Sense strand starting at position 3693 of SEQ ID NO: 318219
uuaaaugugguauauguga

SEQ ID NO: 546030 - RNA, 19 nt, Artificial Sequence
  Description of Artificial Sequence: Synthetic oligonucleotide
  Antisense strand to SEQ ID NO: 546029
ucacauauaccacauuuaa

SEQ ID NO: 546031 - RNA, 19 nt, Artificial Sequence
  Description of Artificial Sequence: Synthetic oligonucleotide
  Sense strand starting at position 3700 of SEQ ID NO: 318219
ugguauaugugacugacau

SEQ ID NO: 546032 - RNA, 19 nt, Artificial Sequence
  Description of Artificial Sequence: Synthetic oligonucleotide
  Antisense strand to SEQ ID NO: 546031
augucagucacauauacca

SEQ ID NO: 546033 - RNA, 19 nt, Artificial Sequence
  Description of Artificial Sequence: Synthetic oligonucleotide
  Sense strand starting at position 3701 of SEQ ID NO: 318219
gguauaugugacugacauu

SEQ ID NO: 546034 - RNA, 19 nt, Artificial Sequence
  Description of Artificial Sequence: Synthetic oligonucleotide
  Antisense strand to SEQ ID NO: 546033
aaugucagucacauauacc

SEQ ID NO: 546035 - RNA, 19 nt, Artificial Sequence
  Description of Artificial Sequence: Synthetic oligonucleotide
  Sense strand starting at position 3719 of SEQ ID NO: 318219
uugguucugcuggagaaca

SEQ ID NO: 546036 - RNA, 19 nt, Artificial Sequence
  Description of Artificial Sequence: Synthetic oligonucleotide
  Antisense strand to SEQ ID NO: 546035
uguucuccagcagaaccaa

SEQ ID NO: 546037 - RNA, 19 nt, Artificial Sequence
  Description of Artificial Sequence: Synthetic oligonucleotide
  Sense strand starting at position 3740 of SEQ ID NO: 318219
guuugauuagggcauggaa

SEQ ID NO: 546038 - RNA, 19 nt, Artificial Sequence
  Description of Artificial Sequence: Synthetic oligonucleotide
  Antisense strand to SEQ ID NO: 546037
uuccaugcccuaaucaaac

SEQ ID NO: 546039 - RNA, 19 nt, Artificial Sequence
  Description of Artificial Sequence: Synthetic oligonucleotide
  Sense strand starting at position 3776 of SEQ ID NO: 318219
gaggucucucugcacuaaa

SEQ ID NO: 546040 - RNA, 19 nt, Artificial Sequence
  Description of Artificial Sequence: Synthetic oligonucleotide
  Antisense strand to SEQ ID NO: 546039
uuuagugcagagagaccuc

SEQ ID NO: 546041 - RNA, 19 nt, Artificial Sequence
  Description of Artificial Sequence: Synthetic oligonucleotide
  Sense strand starting at position 3872 of SEQ ID NO: 318219
agguucuaagcauacuaca

SEQ ID NO: 546042 - RNA, 19 nt, Artificial Sequence
  Description of Artificial Sequence: Synthetic oligonucleotide
  Antisense strand to SEQ ID NO: 546041
uguaguaugcuuagaaccu

SEQ ID NO: 546043 - RNA, 19 nt, Artificial Sequence
  Description of Artificial Sequence: Synthetic oligonucleotide
  Sense strand starting at position 3881 of SEQ ID NO: 318219
gcauacuacacucgaggaa

SEQ ID NO: 546044 - RNA, 19 nt, Artificial Sequence
  Description of Artificial Sequence: Synthetic oligonucleotide
  Antisense strand to SEQ ID NO: 546043
uuccucgaguguaguaugc

SEQ ID NO: 546045 - RNA, 19 nt, Artificial Sequence
  Description of Artificial Sequence: Synthetic oligonucleotide
  Sense strand starting at position 26 of SEQ ID NO: 318220
agggaugucugagcuggaa

SEQ ID NO: 546046 - RNA, 19 nt, Artificial Sequence
  Description of Artificial Sequence: Synthetic oligonucleotide
  Antisense strand to SEQ ID NO: 546045
uuccagcucagacaucccu

SEQ ID NO: 546047 - RNA, 19 nt, Artificial Sequence
  Description of Artificial Sequence: Synthetic oligonucleotide
  Sense strand starting at position 92 of SEQ ID NO: 318220
gagggaggugcucaaguuu

SEQ ID NO: 546048 - RNA, 19 nt, Artificial Sequence
  Description of Artificial Sequence: Synthetic oligonucleotide
  Antisense strand to SEQ ID NO: 546047
aaacuugagcaccucccuc

SEQ ID NO: 546049 - RNA, 19 nt, Artificial Sequence
  Description of Artificial Sequence: Synthetic oligonucleotide
  Sense strand starting at position 103 of SEQ ID NO: 318220
ucaaguuugcacgaaucua

SEQ ID NO: 546050 - RNA, 19 nt, Artificial Sequence
  Description of Artificial Sequence: Synthetic oligonucleotide
  Antisense strand to SEQ ID NO: 546049
uagauucgugcaaacuuga

SEQ ID NO: 546051 - RNA, 19 nt, Artificial Sequence
  Description of Artificial Sequence: Synthetic oligonucleotide
  Sense strand starting at position 190 of SEQ ID NO: 318220
uccugaucagagggagagu

SEQ ID NO: 546052 - RNA, 19 nt, Artificial Sequence
  Description of Artificial Sequence: Synthetic oligonucleotide
  Antisense strand to SEQ ID NO: 546051
acucucccucugaucagga

SEQ ID NO: 546053 - RNA, 19 nt, Artificial Sequence
  Description of Artificial Sequence: Synthetic oligonucleotide
  Sense strand starting at position 271 of SEQ ID NO: 318220
ccaggagaguccuagucca

SEQ ID NO: 546054 - RNA, 19 nt, Artificial Sequence
  Description of Artificial Sequence: Synthetic oligonucleotide
  Antisense strand to SEQ ID NO: 546053
uggacuaggacucuccugg

SEQ ID NO: 546055 - RNA, 19 nt, Artificial Sequence
  Description of Artificial Sequence: Synthetic oligonucleotide
  Sense strand starting at position 478 of SEQ ID NO: 318220
ggcuaacuuccgugguguu

SEQ ID NO: 546056 - RNA, 19 nt, Artificial Sequence
  Description of Artificial Sequence: Synthetic oligonucleotide
  Antisense strand to SEQ ID NO: 546055
aacaccacggaaguuagcc

SEQ ID NO: 546057 - RNA, 19 nt, Artificial Sequence
  Description of Artificial Sequence: Synthetic oligonucleotide
  Sense strand starting at position 538 of SEQ ID NO: 318220
cuauuuguaucucauggca

SEQ ID NO: 546058 - RNA, 19 nt, Artificial Sequence
  Description of Artificial Sequence: Synthetic oligonucleotide
  Antisense strand to SEQ ID NO: 546057
ugccaugagauacaaauag

SEQ ID NO: 546059 - RNA, 19 nt, Artificial Sequence
  Description of Artificial Sequence: Synthetic oligonucleotide
  Sense strand starting at position 540 of SEQ ID NO: 318220
auuuguaucucauggcacu

SEQ ID NO: 546060 - RNA, 19 nt, Artificial Sequence
  Description of Artificial Sequence: Synthetic oligonucleotide
  Antisense strand to SEQ ID NO: 546059
agugccaugagauacaaau

SEQ ID NO: 546061 - RNA, 19 nt, Artificial Sequence
  Description of Artificial Sequence: Synthetic oligonucleotide
  Sense strand starting at position 561 of SEQ ID NO: 318220
caaagaaucuuggaagaga

SEQ ID NO: 546062 - RNA, 19 nt, Artificial Sequence
  Description of Artificial Sequence: Synthetic oligonucleotide
  Antisense strand to SEQ ID NO: 546061
ucucuuccaagauucuuug

SEQ ID NO: 546063 - RNA, 19 nt, Artificial Sequence
  Description of Artificial Sequence: Synthetic oligonucleotide
  Sense strand starting at position 572 of SEQ ID NO: 318220
ggaagagauuugcaaauaa

SEQ ID NO: 546064 - RNA, 19 nt, Artificial Sequence
  Description of Artificial Sequence: Synthetic oligonucleotide
  Antisense strand to SEQ ID NO: 546063
uuauuugcaaaucucuucc

SEQ ID NO: 546065 - RNA, 19 nt, Artificial Sequence
  Description of Artificial Sequence: Synthetic oligonucleotide
  Sense strand starting at position 656 of SEQ ID NO: 318220
ccuugagcuccucgacuga

SEQ ID NO: 546066 - RNA, 19 nt, Artificial Sequence
  Description of Artificial Sequence: Synthetic oligonucleotide
  Antisense strand to SEQ ID NO: 546065
ucagucgaggagcucaagg

SEQ ID NO: 546067 - RNA, 19 nt, Artificial Sequence
  Description of Artificial Sequence: Synthetic oligonucleotide
  Sense strand starting at position 828 of SEQ ID NO: 318220
ccuggcuuucucuguaacu

SEQ ID NO: 546068 - RNA, 19 nt, Artificial Sequence
  Description of Artificial Sequence: Synthetic oligonucleotide
  Antisense strand to SEQ ID NO: 546067
aguuacagagaaagccagg

SEQ ID NO: 546069 - RNA, 19 nt, Artificial Sequence
  Description of Artificial Sequence: Synthetic oligonucleotide
  Sense strand starting at position 972 of SEQ ID NO: 318220
aaacaugagugugucuaca

SEQ ID NO: 546070 - RNA, 19 nt, Artificial Sequence
  Description of Artificial Sequence: Synthetic oligonucleotide
  Antisense strand to SEQ ID NO: 546069
uguagacacacucauguuu

SEQ ID NO: 546071 - RNA, 19 nt, Artificial Sequence
  Description of Artificial Sequence: Synthetic oligonucleotide
  Sense strand starting at position 974 of SEQ ID NO: 318220
acaugagugugucuacaug

SEQ ID NO: 546072 - RNA, 19 nt, Artificial Sequence
  Description of Artificial Sequence: Synthetic oligonucleotide
  Antisense strand to SEQ ID NO: 546071
cauguagacacacucaugu

SEQ ID NO: 546073 - RNA, 19 nt, Artificial Sequence
  Description of Artificial Sequence: Synthetic oligonucleotide
  Sense strand starting at position 1017 of SEQ ID NO: 318220
gauugagaaugccucgauc

SEQ ID NO: 546074 - RNA, 19 nt, Artificial Sequence
  Description of Artificial Sequence: Synthetic oligonucleotide
  Antisense strand to SEQ ID NO: 546073
gaucgaggcauucucaauc

SEQ ID NO: 546075 - RNA, 19 nt, Artificial Sequence
  Description of Artificial Sequence: Synthetic oligonucleotide
  Sense strand starting at position 1019 of SEQ ID NO: 318220
uugagaaugccucgaucac

SEQ ID NO: 546076 - RNA, 19 nt, Artificial Sequence
  Description of Artificial Sequence: Synthetic oligonucleotide
  Antisense strand to SEQ ID NO: 546075
gugaucgaggcauucucaa

SEQ ID NO: 546077 - RNA, 19 nt, Artificial Sequence
  Description of Artificial Sequence: Synthetic oligonucleotide
  Sense strand starting at position 1020 of SEQ ID NO: 318220
ugagaaugccucgaucaca

SEQ ID NO: 546078 - RNA, 19 nt, Artificial Sequence
  Description of Artificial Sequence: Synthetic oligonucleotide
  Antisense strand to SEQ ID NO: 546077
ugugaucgaggcauucuca

SEQ ID NO: 546079 - RNA, 19 nt, Artificial Sequence
  Description of Artificial Sequence: Synthetic oligonucleotide
  Sense strand starting at position 1033 of SEQ ID NO: 318220
aucacaaccguuuaggauu

SEQ ID NO: 546080 - RNA, 19 nt, Artificial Sequence
  Description of Artificial Sequence: Synthetic oligonucleotide
  Antisense strand to SEQ ID NO: 546079
aauccuaaacgguugugau

SEQ ID NO: 546081 - RNA, 19 nt, Artificial Sequence
  Description of Artificial Sequence: Synthetic oligonucleotide
  Sense strand starting at position 1061 of SEQ ID NO: 318220
acagaucuguuucuugaua

SEQ ID NO: 546082 - RNA, 19 nt, Artificial Sequence
  Description of Artificial Sequence: Synthetic oligonucleotide
  Antisense strand to SEQ ID NO: 546081
uaucaagaaacagaucugu

SEQ ID NO: 546083 - RNA, 19 nt, Artificial Sequence
  Description of Artificial Sequence: Synthetic oligonucleotide
  Sense strand starting at position 1163 of SEQ ID NO: 318220
ucccaaaguccugagcaga

SEQ ID NO: 546084 - RNA, 19 nt, Artificial Sequence
  Description of Artificial Sequence: Synthetic oligonucleotide
  Antisense strand to SEQ ID NO: 546083
ucugcucaggacuuuggga

SEQ ID NO: 546085 - RNA, 19 nt, Artificial Sequence
  Description of Artificial Sequence: Synthetic oligonucleotide
  Sense strand starting at position 1234 of SEQ ID NO: 318220
caggguaaccuagagcuua

SEQ ID NO: 546086 - RNA, 19 nt, Artificial Sequence
  Description of Artificial Sequence: Synthetic oligonucleotide
  Antisense strand to SEQ ID NO: 546085
uaagcucuagguuacccug

SEQ ID NO: 546087 - RNA, 19 nt, Artificial Sequence
  Description of Artificial Sequence: Synthetic oligonucleotide
  Sense strand starting at position 1239 of SEQ ID NO: 318220
uaaccuagagcuuagaguu

SEQ ID NO: 546088 - RNA, 19 nt, Artificial Sequence
  Description of Artificial Sequence: Synthetic oligonucleotide
  Antisense strand to SEQ ID NO: 546087
aacucuaagcucuagguua

SEQ ID NO: 546089 - RNA, 19 nt, Artificial Sequence
  Description of Artificial Sequence: Synthetic oligonucleotide
  Sense strand starting at position 2082 of SEQ ID NO: 318220
agggcucugucuucaagga

SEQ ID NO: 546090 - RNA, 19 nt, Artificial Sequence
  Description of Artificial Sequence: Synthetic oligonucleotide
  Antisense strand to SEQ ID NO: 546089
uccuugaagacagagcccu

SEQ ID NO: 546091 - RNA, 19 nt, Artificial Sequence
  Description of Artificial Sequence: Synthetic oligonucleotide
  Sense strand starting at position 2112 of SEQ ID NO: 318220
ucagauucagacggguaaa

SEQ ID NO: 546092 - RNA, 19 nt, Artificial Sequence
  Description of Artificial Sequence: Synthetic oligonucleotide
  Antisense strand to SEQ ID NO: 546091
uuuacccgucugaaucuga

SEQ ID NO: 546093 - RNA, 19 nt, Artificial Sequence
  Description of Artificial Sequence: Synthetic oligonucleotide
  Sense strand starting at position 2252 of SEQ ID NO: 318220
ggaguucacugggcagaga

SEQ ID NO: 546094 - RNA, 19 nt, Artificial Sequence
  Description of Artificial Sequence: Synthetic oligonucleotide
  Antisense strand to SEQ ID NO: 546093
ucucugcccagugaacucc

SEQ ID NO: 546095 - RNA, 19 nt, Artificial Sequence
  Description of Artificial Sequence: Synthetic oligonucleotide
  Sense strand starting at position 2287 of SEQ ID NO: 318220
guggacaugucaccuacaa

SEQ ID NO: 546096 - RNA, 19 nt, Artificial Sequence
  Description of Artificial Sequence: Synthetic oligonucleotide
  Antisense strand to SEQ ID NO: 546095
uuguaggugacauguccac

SEQ ID NO: 546097 - RNA, 19 nt, Artificial Sequence
  Description of Artificial Sequence: Synthetic oligonucleotide
  Sense strand starting at position 2405 of SEQ ID NO: 318220
aaaggaaacuguguuuaua

SEQ ID NO: 546098 - RNA, 19 nt, Artificial Sequence
  Description of Artificial Sequence: Synthetic oligonucleotide
  Antisense strand to SEQ ID NO: 546097
uauaaacacaguuuccuuu

SEQ ID NO: 546099 - RNA, 19 nt, Artificial Sequence
  Description of Artificial Sequence: Synthetic oligonucleotide
  Sense strand starting at position 2424 of SEQ ID NO: 318220
aaggguugcugacaagauu

SEQ ID NO: 546100 - RNA, 19 nt, Artificial Sequence
  Description of Artificial Sequence: Synthetic oligonucleotide
  Antisense strand to SEQ ID NO: 546099
aaucuugucagcaacccuu

SEQ ID NO: 546101 - RNA, 19 nt, Artificial Sequence
  Description of Artificial Sequence: Synthetic oligonucleotide
  Sense strand starting at position 2438 of SEQ ID NO: 318220
agauuaaaguggugaaaug

SEQ ID NO: 546102 - RNA, 19 nt, Artificial Sequence
  Description of Artificial Sequence: Synthetic oligonucleotide
  Antisense strand to SEQ ID NO: 546101
cauuucaccacuuuaaucu

SEQ ID NO: 546103 - RNA, 19 nt, Artificial Sequence
  Description of Artificial Sequence: Synthetic oligonucleotide
  Sense strand starting at position 2457 of SEQ ID NO: 318220
gagugaucggauuggcauu

SEQ ID NO: 546104 - RNA, 19 nt, Artificial Sequence
  Description of Artificial Sequence: Synthetic oligonucleotide
  Antisense strand to SEQ ID NO: 546103
aaugccaauccgaucacuc

SEQ ID NO: 546105 - RNA, 19 nt, Artificial Sequence
  Description of Artificial Sequence: Synthetic oligonucleotide
  Sense strand starting at position 2489 of SEQ ID NO: 318220
uuugcugccaugugggaaa

SEQ ID NO: 546106 - RNA, 19 nt, Artificial Sequence
  Description of Artificial Sequence: Synthetic oligonucleotide
  Antisense strand to SEQ ID NO: 546105
uuucccacauggcagcaaa

SEQ ID NO: 546107 - RNA, 19 nt, Artificial Sequence
  Description of Artificial Sequence: Synthetic oligonucleotide
  Sense strand starting at position 2597 of SEQ ID NO: 318220
gagggaguugaggguuauu

SEQ ID NO: 546108 - RNA, 19 nt, Artificial Sequence
  Description of Artificial Sequence: Synthetic oligonucleotide
  Antisense strand to SEQ ID NO: 546107
aauaacccucaacucccuc

SEQ ID NO: 546109 - RNA, 19 nt, Artificial Sequence
  Description of Artificial Sequence: Synthetic oligonucleotide
  Sense strand starting at position 2616 of SEQ ID NO: 318220
ugaagaacccuugggucuu

SEQ ID NO: 546110 - RNA, 19 nt, Artificial Sequence
  Description of Artificial Sequence: Synthetic oligonucleotide
  Antisense strand to SEQ ID NO: 546109
aagacccaaggguucuuca

SEQ ID NO: 546111 - RNA, 19 nt, Artificial Sequence
  Description of Artificial Sequence: Synthetic oligonucleotide
  Sense strand starting at position 2681 of SEQ ID NO: 318220
cuguuucaugcuuggguga

SEQ ID NO: 546112 - RNA, 19 nt, Artificial Sequence
  Description of Artificial Sequence: Synthetic oligonucleotide
  Antisense strand to SEQ ID NO: 546111
ucacccaagcaugaaacag

SEQ ID NO: 546113 - RNA, 19 nt, Artificial Sequence
  Description of Artificial Sequence: Synthetic oligonucleotide
  Sense strand starting at position 2833 of SEQ ID NO: 318220
agauaaagauuggguccaa

SEQ ID NO: 546114 - RNA, 19 nt, Artificial Sequence
  Description of Artificial Sequence: Synthetic oligonucleotide
  Antisense strand to SEQ ID NO: 546113
uuggacccaaucuuuaucu

SEQ ID NO: 546115 - RNA, 19 nt, Artificial Sequence
  Description of Artificial Sequence: Synthetic oligonucleotide
  Sense strand starting at position 2919 of SEQ ID NO: 318220
gucugugugcuggcagacu

SEQ ID NO: 546116 - RNA, 19 nt, Artificial Sequence
  Description of Artificial Sequence: Synthetic oligonucleotide
  Antisense strand to SEQ ID NO: 546115
agucugccagcacacagac

SEQ ID NO: 546117 - RNA, 19 nt, Artificial Sequence
  Description of Artificial Sequence: Synthetic oligonucleotide
  Sense strand starting at position 2944 of SEQ ID NO: 318220
ggguguauuucugacaccu

SEQ ID NO: 546118 - RNA, 19 nt, Artificial Sequence
  Description of Artificial Sequence: Synthetic oligonucleotide
  Antisense strand to SEQ ID NO: 546117
aggugucagaaauacaccc

SEQ ID NO: 546119 - RNA, 19 nt, Artificial Sequence
  Description of Artificial Sequence: Synthetic oligonucleotide
  Sense strand starting at position 2946 of SEQ ID NO: 318220
guguauuucugacaccucu

SEQ ID NO: 546120 - RNA, 19 nt, Artificial Sequence
  Description of Artificial Sequence: Synthetic oligonucleotide
  Antisense strand to SEQ ID NO: 546119
agaggugucagaaauacac

SEQ ID NO: 546121 - RNA, 19 nt, Artificial Sequence
  Description of Artificial Sequence: Synthetic oligonucleotide
  Sense strand starting at position 3044 of SEQ ID NO: 318220
ggaagagugagguguguuc

SEQ ID NO: 546122 - RNA, 19 nt, Artificial Sequence
  Description of Artificial Sequence: Synthetic oligonucleotide
  Antisense strand to SEQ ID NO: 546121
gaacacaccucacucuucc

SEQ ID NO: 546123 - RNA, 19 nt, Artificial Sequence
  Description of Artificial Sequence: Synthetic oligonucleotide
  Sense strand starting at position 3295 of SEQ ID NO: 318220
gugauagugcucugugguc

SEQ ID NO: 546124 - RNA, 19 nt, Artificial Sequence
  Description of Artificial Sequence: Synthetic oligonucleotide
  Antisense strand to SEQ ID NO: 546123
gaccacagagcacuaucac

SEQ ID NO: 546125 - RNA, 19 nt, Artificial Sequence
  Description of Artificial Sequence: Synthetic oligonucleotide
  Sense strand starting at position 164 of SEQ ID NO: 318221
aaguccugggccugugaga

SEQ ID NO: 546126 - RNA, 19 nt, Artificial Sequence
  Description of Artificial Sequence: Synthetic oligonucleotide
  Antisense strand to SEQ ID NO: 546125
ucucacaggcccaggacuu

SEQ ID NO: 546127 - RNA, 19 nt, Artificial Sequence
  Description of Artificial Sequence: Synthetic oligonucleotide
  Sense strand starting at position 434 of SEQ ID NO: 318221
ggaccagaguccuagagga

SEQ ID NO: 546128 - RNA, 19 nt, Artificial Sequence
  Description of Artificial Sequence: Synthetic oligonucleotide
  Antisense strand to SEQ ID NO: 546127
uccucuaggacucuggucc

SEQ ID NO: 546129 - RNA, 19 nt, Artificial Sequence
  Description of Artificial Sequence: Synthetic oligonucleotide
  Sense strand starting at position 573 of SEQ ID NO: 318221
ccaggacauccguguagac

SEQ ID NO: 546130 - RNA, 19 nt, Artificial Sequence
  Description of Artificial Sequence: Synthetic oligonucleotide
  Antisense strand to SEQ ID NO: 546129
gucuacacggauguccugg

SEQ ID NO: 546131 - RNA, 19 nt, Artificial Sequence
  Description of Artificial Sequence: Synthetic oligonucleotide
  Sense strand starting at position 616 of SEQ ID NO: 318221
cccagaguuugagguauga

SEQ ID NO: 546132 - RNA, 19 nt, Artificial Sequence
  Description of Artificial Sequence: Synthetic oligonucleotide
  Antisense strand to SEQ ID NO: 546131
ucauaccucaaacucuggg

SEQ ID NO: 546133 - RNA, 19 nt, Artificial Sequence
  Description of Artificial Sequence: Synthetic oligonucleotide
  Sense strand starting at position 633 of SEQ ID NO: 318221
gaaguuuggucucugccuu

SEQ ID NO: 546134 - RNA, 19 nt, Artificial Sequence
  Description of Artificial Sequence: Synthetic oligonucleotide
  Antisense strand to SEQ ID NO: 546133
aaggcagagaccaaacuuc

SEQ ID NO: 546135 - RNA, 19 nt, Artificial Sequence
  Description of Artificial Sequence: Synthetic oligonucleotide
  Sense strand starting at position 640 of SEQ ID NO: 318221
ggucucugccuuugccaga

SEQ ID NO: 546136 - RNA, 19 nt, Artificial Sequence
  Description of Artificial Sequence: Synthetic oligonucleotide
  Antisense strand to SEQ ID NO: 546135
ucuggcaaaggcagagacc

SEQ ID NO: 546137 - RNA, 19 nt, Artificial Sequence
  Description of Artificial Sequence: Synthetic oligonucleotide
  Sense strand starting at position 702 of SEQ ID NO: 318221
caggacugcugcucaguua

SEQ ID NO: 546138 - RNA, 19 nt, Artificial Sequence
  Description of Artificial Sequence: Synthetic oligonucleotide
  Antisense strand to SEQ ID NO: 546137
uaacugagcagcaguccug

SEQ ID NO: 546139 - RNA, 19 nt, Artificial Sequence
  Description of Artificial Sequence: Synthetic oligonucleotide
  Sense strand starting at position 830 of SEQ ID NO: 318221
cccaaagcucucugggaug

SEQ ID NO: 546140 - RNA, 19 nt, Artificial Sequence
  Description of Artificial Sequence: Synthetic oligonucleotide
  Antisense strand to SEQ ID NO: 546139
caucccagagagcuuuggg

SEQ ID NO: 546141 - RNA, 19 nt, Artificial Sequence
  Description of Artificial Sequence: Synthetic oligonucleotide
  Sense strand starting at position 927 of SEQ ID NO: 318221
cccaguggcaagugucauu

SEQ ID NO: 546142 - RNA, 19 nt, Artificial Sequence
  Description of Artificial Sequence: Synthetic oligonucleotide
  Antisense strand to SEQ ID NO: 546141
aaugacacuugccacuggg

SEQ ID NO: 546143 - RNA, 19 nt, Artificial Sequence
  Description of Artificial Sequence: Synthetic oligonucleotide
  Sense strand starting at position 1513 of SEQ ID NO: 318221
ggagaagucuaaggacaag

SEQ ID NO: 546144 - RNA, 19 nt, Artificial Sequence
  Description of Artificial Sequence: Synthetic oligonucleotide
  Antisense strand to SEQ ID NO: 546143
cuuguccuuagacuucucc

SEQ ID NO: 546145 - RNA, 19 nt, Artificial Sequence
  Description of Artificial Sequence: Synthetic oligonucleotide
  Sense strand starting at position 1563 of SEQ ID NO: 318221
ggaggucucccagauuguc

SEQ ID NO: 546146 - RNA, 19 nt, Artificial Sequence
  Description of Artificial Sequence: Synthetic oligonucleotide
  Antisense strand to SEQ ID NO: 546145
gacaaucugggagaccucc

SEQ ID NO: 546147 - RNA, 19 nt, Artificial Sequence
  Description of Artificial Sequence: Synthetic oligonucleotide
  Sense strand starting at position 1571 of SEQ ID NO: 318221
cccagauugucugcuguua

SEQ ID NO: 546148 - RNA, 19 nt, Artificial Sequence
  Description of Artificial Sequence: Synthetic oligonucleotide
  Antisense strand to SEQ ID NO: 546147
uaacagcagacaaucuggg

SEQ ID NO: 546149 - RNA, 19 nt, Artificial Sequence
  Description of Artificial Sequence: Synthetic oligonucleotide
  Sense strand starting at position 1631 of SEQ ID NO: 318221
gcugcaucuguggcuugau

SEQ ID NO: 546150 - RNA, 19 nt, Artificial Sequence
  Description of Artificial Sequence: Synthetic oligonucleotide
  Antisense strand to SEQ ID NO: 546149
aucaagccacagaugcagc

SEQ ID NO: 546151 - RNA, 19 nt, Artificial Sequence
  Description of Artificial Sequence: Synthetic oligonucleotide
  Sense strand starting at position 1960 of SEQ ID NO: 318221
gcaaguguagucugugguu

SEQ ID NO: 546152 - RNA, 19 nt, Artificial Sequence
  Description of Artificial Sequence: Synthetic oligonucleotide
  Antisense strand to SEQ ID NO: 546151
aaccacagacuacacuugc

SEQ ID NO: 546153 - RNA, 19 nt, Artificial Sequence
  Description of Artificial Sequence: Synthetic oligonucleotide
  Sense strand starting at position 2323 of SEQ ID NO: 318221
auugaccuuucugagaaau

SEQ ID NO: 546154 - RNA, 19 nt, Artificial Sequence
  Description of Artificial Sequence: Synthetic oligonucleotide
  Antisense strand to SEQ ID NO: 546153
auuucucagaaaggucaau

SEQ ID NO: 546155 - RNA, 19 nt, Artificial Sequence
  Description of Artificial Sequence: Synthetic oligonucleotide
  Sense strand starting at position 2325 of SEQ ID NO: 318221
ugaccuuucugagaaauga

SEQ ID NO: 546156 - RNA, 19 nt, Artificial Sequence
  Description of Artificial Sequence: Synthetic oligonucleotide
  Antisense strand to SEQ ID NO: 546155
ucauuucucagaaagguca

SEQ ID NO: 546157 - RNA, 19 nt, Artificial Sequence
  Description of Artificial Sequence: Synthetic oligonucleotide
  Sense strand starting at position 2338 of SEQ ID NO: 318221
aaaugagacugucauguuu

SEQ ID NO: 546158 - RNA, 19 nt, Artificial Sequence
  Description of Artificial Sequence: Synthetic oligonucleotide
  Antisense strand to SEQ ID NO: 546157
aaacaugacagucucauuu

SEQ ID NO: 546159 - RNA, 19 nt, Artificial Sequence
  Description of Artificial Sequence: Synthetic oligonucleotide
  Sense strand starting at position 2340 of SEQ ID NO: 318221
augagacugucauguuuau

SEQ ID NO: 546160 - RNA, 19 nt, Artificial Sequence
  Description of Artificial Sequence: Synthetic oligonucleotide
  Antisense strand to SEQ ID NO: 546159
auaaacaugacagucucau

SEQ ID NO: 546161 - RNA, 19 nt, Artificial Sequence
  Description of Artificial Sequence: Synthetic oligonucleotide
  Sense strand starting at position 2539 of SEQ ID NO: 318221
gcuacaguguuuccaagac

SEQ ID NO: 546162 - RNA, 19 nt, Artificial Sequence
  Description of Artificial Sequence: Synthetic oligonucleotide
  Antisense strand to SEQ ID NO: 546161
gucuuggaaacacuguagc

SEQ ID NO: 546163 - RNA, 19 nt, Artificial Sequence
  Description of Artificial Sequence: Synthetic oligonucleotide
  Sense strand starting at position 2693 of SEQ ID NO: 318221
gcuccauggucagugauuu

SEQ ID NO: 546164 - RNA, 19 nt, Artificial Sequence
  Description of Artificial Sequence: Synthetic oligonucleotide
  Antisense strand to SEQ ID NO: 546163
aaaucacugaccauggagc

SEQ ID NO: 546165 - RNA, 19 nt, Artificial Sequence
  Description of Artificial Sequence: Synthetic oligonucleotide
  Sense strand starting at position 2704 of SEQ ID NO: 318221
agugauuuauuacacacca

SEQ ID NO: 546166 - RNA, 19 nt, Artificial Sequence
  Description of Artificial Sequence: Synthetic oligonucleotide
  Antisense strand to SEQ ID NO: 546165
ugguguguaauaaaucacu

SEQ ID NO: 546167 - RNA, 19 nt, Artificial Sequence
  Description of Artificial Sequence: Synthetic oligonucleotide
  Sense strand starting at position 2795 of SEQ ID NO: 318221
auggccaguuguucugauu

SEQ ID NO: 546168 - RNA, 19 nt, Artificial Sequence
  Description of Artificial Sequence: Synthetic oligonucleotide
  Antisense strand to SEQ ID NO: 546167
aaucagaacaacuggccau

SEQ ID NO: 546169 - RNA, 19 nt, Artificial Sequence
  Description of Artificial Sequence: Synthetic oligonucleotide
  Sense strand starting at position 2798 of SEQ ID NO: 318221
gccaguuguucugauucgu

SEQ ID NO: 546170 - RNA, 19 nt, Artificial Sequence
  Description of Artificial Sequence: Synthetic oligonucleotide
  Antisense strand to SEQ ID NO: 546169
acgaaucagaacaacuggc

SEQ ID NO: 546171 - RNA, 19 nt, Artificial Sequence
  Description of Artificial Sequence: Synthetic oligonucleotide
  Sense strand starting at position 2920 of SEQ ID NO: 318221
gccacugcuucucauggaa

SEQ ID NO: 546172 - RNA, 19 nt, Artificial Sequence
  Description of Artificial Sequence: Synthetic oligonucleotide
  Antisense strand to SEQ ID NO: 546171
uuccaugagaagcaguggc

SEQ ID NO: 546173 - RNA, 19 nt, Artificial Sequence
  Description of Artificial Sequence: Synthetic oligonucleotide
  Sense strand starting at position 2923 of SEQ ID NO: 318221
acugcuucucauggaaacu

SEQ ID NO: 546174 - RNA, 19 nt, Artificial Sequence
  Description of Artificial Sequence: Synthetic oligonucleotide
  Antisense strand to SEQ ID NO: 546173
aguuuccaugagaagcagu

SEQ ID NO: 546175 - RNA, 19 nt, Artificial Sequence
  Description of Artificial Sequence: Synthetic oligonucleotide
  Sense strand starting at position 2934 of SEQ ID NO: 318221
uggaaacuguccuucccaa

SEQ ID NO: 546176 - RNA, 19 nt, Artificial Sequence
  Description of Artificial Sequence: Synthetic oligonucleotide
  Antisense strand to SEQ ID NO: 546175
uugggaaggacaguuucca

SEQ ID NO: 546177 - RNA, 19 nt, Artificial Sequence
  Description of Artificial Sequence: Synthetic oligonucleotide
  Sense strand starting at position 3075 of SEQ ID NO: 318221
cuggaaucucagggcaacu

SEQ ID NO: 546178 - RNA, 19 nt, Artificial Sequence
  Description of Artificial Sequence: Synthetic oligonucleotide
  Antisense strand to SEQ ID NO: 546177
aguugcccugagauuccag

SEQ ID NO: 546179 - RNA, 19 nt, Artificial Sequence
  Description of Artificial Sequence: Synthetic oligonucleotide
  Sense strand starting at position 3204 of SEQ ID NO: 318221
ucagaucccucuggauacu

SEQ ID NO: 546180 - RNA, 19 nt, Artificial Sequence
  Description of Artificial Sequence: Synthetic oligonucleotide
  Antisense strand to SEQ ID NO: 546179
aguauccagagggaucuga

SEQ ID NO: 546181 - RNA, 19 nt, Artificial Sequence
  Description of Artificial Sequence: Synthetic oligonucleotide
  Sense strand starting at position 3323 of SEQ ID NO: 318221
cucagagcuuccugaugac

SEQ ID NO: 546182 - RNA, 19 nt, Artificial Sequence
  Description of Artificial Sequence: Synthetic oligonucleotide
  Antisense strand to SEQ ID NO: 546181
gucaucaggaagcucugag

SEQ ID NO: 546183 - RNA, 19 nt, Artificial Sequence
  Description of Artificial Sequence: Synthetic oligonucleotide
  Sense strand starting at position 3812 of SEQ ID NO: 318221
cuauuugcuugcccgcaua

SEQ ID NO: 546184 - RNA, 19 nt, Artificial Sequence
  Description of Artificial Sequence: Synthetic oligonucleotide
  Antisense strand to SEQ ID NO: 546183
uaugcgggcaagcaaauag

SEQ ID NO: 546185 - RNA, 19 nt, Artificial Sequence
  Description of Artificial Sequence: Synthetic oligonucleotide
  Sense strand starting at position 312 of SEQ ID NO: 318222
gcggaaguggugcuuagua

SEQ ID NO: 546186 - RNA, 19 nt, Artificial Sequence
  Description of Artificial Sequence: Synthetic oligonucleotide
  Antisense strand to SEQ ID NO: 546185
uacuaagcaccacuuccgc

SEQ ID NO: 546187 - RNA, 19 nt, Artificial Sequence
  Description of Artificial Sequence: Synthetic oligonucleotide
  Sense strand starting at position 314 of SEQ ID NO: 318222
ggaaguggugcuuaguauc

SEQ ID NO: 546188 - RNA, 19 nt, Artificial Sequence
  Description of Artificial Sequence: Synthetic oligonucleotide
  Antisense strand to SEQ ID NO: 546187
gauacuaagcaccacuucc

SEQ ID NO: 546189 - RNA, 19 nt, Artificial Sequence
  Description of Artificial Sequence: Synthetic oligonucleotide
  Sense strand starting at position 322 of SEQ ID NO: 318222
ugcuuaguaucaccauaua

SEQ ID NO: 546190 - RNA, 19 nt, Artificial Sequence
  Description of Artificial Sequence: Synthetic oligonucleotide
  Antisense strand to SEQ ID NO: 546189
uauauggugauacuaagca

SEQ ID NO: 546191 - RNA, 19 nt, Artificial Sequence
  Description of Artificial Sequence: Synthetic oligonucleotide
  Sense strand starting at position 325 of SEQ ID NO: 318222
uuaguaucaccauauagug

SEQ ID NO: 546192 - RNA, 19 nt, Artificial Sequence
  Description of Artificial Sequence: Synthetic oligonucleotide
  Antisense strand to SEQ ID NO: 546191
cacuauauggugauacuaa

SEQ ID NO: 546193 - RNA, 19 nt, Artificial Sequence
  Description of Artificial Sequence: Synthetic oligonucleotide
  Sense strand starting at position 492 of SEQ ID NO: 318222
cgaggugaguuauccaaga

SEQ ID NO: 546194 - RNA, 19 nt, Artificial Sequence
  Description of Artificial Sequence: Synthetic oligonucleotide
  Antisense strand to SEQ ID NO: 546193
ucuuggauaacucaccucg

SEQ ID NO: 546195 - RNA, 19 nt, Artificial Sequence
  Description of Artificial Sequence: Synthetic oligonucleotide
  Sense strand starting at position 619 of SEQ ID NO: 318222
guauguauugcauauaugu

SEQ ID NO: 546196 - RNA, 19 nt, Artificial Sequence
  Description of Artificial Sequence: Synthetic oligonucleotide
  Antisense strand to SEQ ID NO: 546195
acauauaugcaauacauac

SEQ ID NO: 546197 - RNA, 19 nt, Artificial Sequence
  Description of Artificial Sequence: Synthetic oligonucleotide
  Sense strand starting at position 781 of SEQ ID NO: 318222
ucgcuaugcuagcucuaga

SEQ ID NO: 546198 - RNA, 19 nt, Artificial Sequence
  Description of Artificial Sequence: Synthetic oligonucleotide
  Antisense strand to SEQ ID NO: 546197
ucuagagcuagcauagcga

SEQ ID NO: 546199 - RNA, 19 nt, Artificial Sequence
  Description of Artificial Sequence: Synthetic oligonucleotide
  Sense strand starting at position 1022 of SEQ ID NO: 318222
ucaguucucuuucuggaua

SEQ ID NO: 546200 - RNA, 19 nt, Artificial Sequence
  Description of Artificial Sequence: Synthetic oligonucleotide
  Antisense strand to SEQ ID NO: 546199
uauccagaaagagaacuga

SEQ ID NO: 546201 - RNA, 19 nt, Artificial Sequence
  Description of Artificial Sequence: Synthetic oligonucleotide
  Sense strand starting at position 1126 of SEQ ID NO: 318222
gcggucaagaccuaggaau

SEQ ID NO: 546202 - RNA, 19 nt, Artificial Sequence
  Description of Artificial Sequence: Synthetic oligonucleotide
  Antisense strand to SEQ ID NO: 546201
auuccuaggucuugaccgc

SEQ ID NO: 546203 - RNA, 19 nt, Artificial Sequence
  Description of Artificial Sequence: Synthetic oligonucleotide
  Sense strand starting at position 1128 of SEQ ID NO: 318222
ggucaagaccuaggaaugu

SEQ ID NO: 546204 - RNA, 19 nt, Artificial Sequence
  Description of Artificial Sequence: Synthetic oligonucleotide
  Antisense strand to SEQ ID NO: 546203
acauuccuaggucuugacc

SEQ ID NO: 546205 - RNA, 19 nt, Artificial Sequence
  Description of Artificial Sequence: Synthetic oligonucleotide
  Sense strand starting at position 1272 of SEQ ID NO: 318222
cggaauuugugucaggaaa

SEQ ID NO: 546206 - RNA, 19 nt, Artificial Sequence
  Description of Artificial Sequence: Synthetic oligonucleotide
  Antisense strand to SEQ ID NO: 546205
uuuccugacacaaauuccg

SEQ ID NO: 546207 - RNA, 19 nt, Artificial Sequence
  Description of Artificial Sequence: Synthetic oligonucleotide
  Sense strand starting at position 1274 of SEQ ID NO: 318222
gaauuugugucaggaaagc

SEQ ID NO: 546208 - RNA, 19 nt, Artificial Sequence
  Description of Artificial Sequence: Synthetic oligonucleotide
  Antisense strand to SEQ ID NO: 546207
gcuuuccugacacaaauuc

SEQ ID NO: 546209 - RNA, 19 nt, Artificial Sequence
  Description of Artificial Sequence: Synthetic oligonucleotide
  Sense strand starting at position 2424 of SEQ ID NO: 318222
acaguaguacuuugagaag

SEQ ID NO: 546210 - RNA, 19 nt, Artificial Sequence
  Description of Artificial Sequence: Synthetic oligonucleotide
  Antisense strand to SEQ ID NO: 546209
cuucucaaaguacuacugu

SEQ ID NO: 546211 - RNA, 19 nt, Artificial Sequence
  Description of Artificial Sequence: Synthetic oligonucleotide
  Sense strand starting at position 2427 of SEQ ID NO: 318222
guaguacuuugagaaguga

SEQ ID NO: 546212 - RNA, 19 nt, Artificial Sequence
  Description of Artificial Sequence: Synthetic oligonucleotide
  Antisense strand to SEQ ID NO: 546211
ucacuucucaaaguacuac

SEQ ID NO: 546213 - RNA, 19 nt, Artificial Sequence
  Description of Artificial Sequence: Synthetic oligonucleotide
  Sense strand starting at position 2458 of SEQ ID NO: 318222
ccacgacucuggcugaauu

SEQ ID NO: 546214 - RNA, 19 nt, Artificial Sequence
  Description of Artificial Sequence: Synthetic oligonucleotide
  Antisense strand to SEQ ID NO: 546213
aauucagccagagucgugg

SEQ ID NO: 546215 - RNA, 19 nt, Artificial Sequence
  Description of Artificial Sequence: Synthetic oligonucleotide
  Sense strand starting at position 2470 of SEQ ID NO: 318222
cugaauugggcacagaguu

SEQ ID NO: 546216 - RNA, 19 nt, Artificial Sequence
  Description of Artificial Sequence: Synthetic oligonucleotide
  Antisense strand to SEQ ID NO: 546215
aacucugugcccaauucag

SEQ ID NO: 546217 - RNA, 19 nt, Artificial Sequence
  Description of Artificial Sequence: Synthetic oligonucleotide
  Sense strand starting at position 2571 of SEQ ID NO: 318222
ugagcuuccuacuaagaca

SEQ ID NO: 546218 - RNA, 19 nt, Artificial Sequence
  Description of Artificial Sequence: Synthetic oligonucleotide
  Antisense strand to SEQ ID NO: 546217
ugucuuaguaggaagcuca

SEQ ID NO: 546219 - RNA, 19 nt, Artificial Sequence
  Description of Artificial Sequence: Synthetic oligonucleotide
  Sense strand starting at position 2618 of SEQ ID NO: 318222
acguaaaggagucauauuc

SEQ ID NO: 546220 - RNA, 19 nt, Artificial Sequence
  Description of Artificial Sequence: Synthetic oligonucleotide
  Antisense strand to SEQ ID NO: 546219
gaauaugacuccuuuacgu

SEQ ID NO: 546221 - RNA, 19 nt, Artificial Sequence
  Description of Artificial Sequence: Synthetic oligonucleotide
  Sense strand starting at position 2694 of SEQ ID NO: 318222
cggcaauuauaguccucaa

SEQ ID NO: 546222 - RNA, 19 nt, Artificial Sequence
  Description of Artificial Sequence: Synthetic oligonucleotide
  Antisense strand to SEQ ID NO: 546221
uugaggacuauaauugccg

SEQ ID NO: 546223 - RNA, 19 nt, Artificial Sequence
  Description of Artificial Sequence: Synthetic oligonucleotide
  Sense strand starting at position 2714 of SEQ ID NO: 318222
caaguaauguucuuggcag

SEQ ID NO: 546224 - RNA, 19 nt, Artificial Sequence
  Description of Artificial Sequence: Synthetic oligonucleotide
  Antisense strand to SEQ ID NO: 546223
cugccaagaacauuacuug

SEQ ID NO: 546225 - RNA, 19 nt, Artificial Sequence
  Description of Artificial Sequence: Synthetic oligonucleotide
  Sense strand starting at position 2716 of SEQ ID NO: 318222
aguaauguucuuggcagua

SEQ ID NO: 546226 - RNA, 19 nt, Artificial Sequence
  Description of Artificial Sequence: Synthetic oligonucleotide
  Antisense strand to SEQ ID NO: 546225
uacugccaagaacauuacu

SEQ ID NO: 546227 - RNA, 19 nt, Artificial Sequence
  Description of Artificial Sequence: Synthetic oligonucleotide
  Sense strand starting at position 2782 of SEQ ID NO: 318222
acaauugaugaggguguaa

SEQ ID NO: 546228 - RNA, 19 nt, Artificial Sequence
  Description of Artificial Sequence: Synthetic oligonucleotide
  Antisense strand to SEQ ID NO: 546227
uuacacccucaucaauugu

SEQ ID NO: 546229 - RNA, 19 nt, Artificial Sequence
  Description of Artificial Sequence: Synthetic oligonucleotide
  Sense strand starting at position 2849 of SEQ ID NO: 318222
agaaaugaacgccauguga

SEQ ID NO: 546230 - RNA, 19 nt, Artificial Sequence
  Description of Artificial Sequence: Synthetic oligonucleotide
  Antisense strand to SEQ ID NO: 546229
ucacauggcguucauuucu

SEQ ID NO: 546231 - RNA, 19 nt, Artificial Sequence
  Description of Artificial Sequence: Synthetic oligonucleotide
  Sense strand starting at position 2851 of SEQ ID NO: 318222
aaaugaacgccaugugaug

SEQ ID NO: 546232 - RNA, 19 nt, Artificial Sequence
  Description of Artificial Sequence: Synthetic oligonucleotide
  Antisense strand to SEQ ID NO: 546231
caucacauggcguucauuu

SEQ ID NO: 546233 - RNA, 19 nt, Artificial Sequence
  Description of Artificial Sequence: Synthetic oligonucleotide
  Sense strand starting at position 2857 of SEQ ID NO: 318222
acgccaugugaugacucau

SEQ ID NO: 546234 - RNA, 19 nt, Artificial Sequence
  Description of Artificial Sequence: Synthetic oligonucleotide
  Antisense strand to SEQ ID NO: 546233
augagucaucacauggcgu

SEQ ID NO: 546235 - RNA, 19 nt, Artificial Sequence
  Description of Artificial Sequence: Synthetic oligonucleotide
  Sense strand starting at position 2866 of SEQ ID NO: 318222
gaugacucaugucugaacu

SEQ ID NO: 546236 - RNA, 19 nt, Artificial Sequence
  Description of Artificial Sequence: Synthetic oligonucleotide
  Antisense strand to SEQ ID NO: 546235
aguucagacaugagucauc

SEQ ID NO: 546237 - RNA, 19 nt, Artificial Sequence
  Description of Artificial Sequence: Synthetic oligonucleotide
  Sense strand starting at position 2868 of SEQ ID NO: 318222
ugacucaugucugaacucu

SEQ ID NO: 546238 - RNA, 19 nt, Artificial Sequence
  Description of Artificial Sequence: Synthetic oligonucleotide
  Antisense strand to SEQ ID NO: 546237
agaguucagacaugaguca

SEQ ID NO: 546239 - RNA, 19 nt, Artificial Sequence
  Description of Artificial Sequence: Synthetic oligonucleotide
  Sense strand starting at position 3067 of SEQ ID NO: 318222
gcgaaauucuaucucuacc

SEQ ID NO: 546240 - RNA, 19 nt, Artificial Sequence
  Description of Artificial Sequence: Synthetic oligonucleotide
  Antisense strand to SEQ ID NO: 546239
gguagagauagaauuucgc

SEQ ID NO: 546241 - RNA, 19 nt, Artificial Sequence
  Description of Artificial Sequence: Synthetic oligonucleotide
  Sense strand starting at position 3229 of SEQ ID NO: 318222
uggcguaagccugucucaa

SEQ ID NO: 546242 - RNA, 19 nt, Artificial Sequence
  Description of Artificial Sequence: Synthetic oligonucleotide
  Antisense strand to SEQ ID NO: 546241
uugagacaggcuuacgcca

SEQ ID NO: 546243 - RNA, 19 nt, Artificial Sequence
  Description of Artificial Sequence: Synthetic oligonucleotide
  Sense strand starting at position 3366 of SEQ ID NO: 318222
uguuaaugaugccauuuau

SEQ ID NO: 546244 - RNA, 19 nt, Artificial Sequence
  Description of Artificial Sequence: Synthetic oligonucleotide
  Antisense strand to SEQ ID NO: 546243
auaaauggcaucauuaaca

SEQ ID NO: 546245 - RNA, 19 nt, Artificial Sequence
  Description of Artificial Sequence: Synthetic oligonucleotide
  Sense strand starting at position 3444 of SEQ ID NO: 318222
aaggcagagugauugccua

SEQ ID NO: 546246 - RNA, 19 nt, Artificial Sequence
  Description of Artificial Sequence: Synthetic oligonucleotide
  Antisense strand to SEQ ID NO: 546245
uaggcaaucacucugccuu

SEQ ID NO: 546247 - RNA, 19 nt, Artificial Sequence
  Description of Artificial Sequence: Synthetic oligonucleotide
  Sense strand starting at position 3448 of SEQ ID NO: 318222
cagagugauugccuaacaa

SEQ ID NO: 546248 - RNA, 19 nt, Artificial Sequence
  Description of Artificial Sequence: Synthetic oligonucleotide
  Antisense strand to SEQ ID NO: 546247
uuguuaggcaaucacucug

SEQ ID NO: 546249 - RNA, 19 nt, Artificial Sequence
  Description of Artificial Sequence: Synthetic oligonucleotide
  Sense strand starting at position 3471 of SEQ ID NO: 318222
aggguuuccuucugggaug

SEQ ID NO: 546250 - RNA, 19 nt, Artificial Sequence
  Description of Artificial Sequence: Synthetic oligonucleotide
  Antisense strand to SEQ ID NO: 546249
caucccagaaggaaacccu

SEQ ID NO: 546251 - RNA, 19 nt, Artificial Sequence
  Description of Artificial Sequence: Synthetic oligonucleotide
  Sense strand starting at position 3523 of SEQ ID NO: 318222
guugcacaacguuaugaau

SEQ ID NO: 546252 - RNA, 19 nt, Artificial Sequence
  Description of Artificial Sequence: Synthetic oligonucleotide
  Antisense strand to SEQ ID NO: 546251
auucauaacguugugcaac

SEQ ID NO: 546253 - RNA, 19 nt, Artificial Sequence
  Description of Artificial Sequence: Synthetic oligonucleotide
  Sense strand starting at position 3526 of SEQ ID NO: 318222
gcacaacguuaugaauaua

SEQ ID NO: 546254 - RNA, 19 nt, Artificial Sequence
  Description of Artificial Sequence: Synthetic oligonucleotide
  Antisense strand to SEQ ID NO: 546253
uauauucauaacguugugc

SEQ ID NO: 546255 - RNA, 19 nt, Artificial Sequence
  Description of Artificial Sequence: Synthetic oligonucleotide
  Sense strand starting at position 3550 of SEQ ID NO: 318222
gucauugaauuguuugcuu

SEQ ID NO: 546256 - RNA, 19 nt, Artificial Sequence
  Description of Artificial Sequence: Synthetic oligonucleotide
  Antisense strand to SEQ ID NO: 546255
aagcaaacaauucaaugac

SEQ ID NO: 546257 - RNA, 19 nt, Artificial Sequence
  Description of Artificial Sequence: Synthetic oligonucleotide
  Sense strand starting at position 3620 of SEQ ID NO: 318222
uugucacuuguggaacaga

SEQ ID NO: 546258 - RNA, 19 nt, Artificial Sequence
  Description of Artificial Sequence: Synthetic oligonucleotide
  Antisense strand to SEQ ID NO: 546257
ucuguuccacaagugacaa

SEQ ID NO: 546259 - RNA, 19 nt, Artificial Sequence
  Description of Artificial Sequence: Synthetic oligonucleotide
  Sense strand starting at position 3668 of SEQ ID NO: 318222
ccuuguguucuaugcuguu

SEQ ID NO: 546260 - RNA, 19 nt, Artificial Sequence
  Description of Artificial Sequence: Synthetic oligonucleotide
  Antisense strand to SEQ ID NO: 546259
aacagcauagaacacaagg

SEQ ID NO: 546261 - RNA, 19 nt, Artificial Sequence
  Description of Artificial Sequence: Synthetic oligonucleotide
  Sense strand starting at position 3672 of SEQ ID NO: 318222
guguucuaugcuguucuua

SEQ ID NO: 546262 - RNA, 19 nt, Artificial Sequence
  Description of Artificial Sequence: Synthetic oligonucleotide
  Antisense strand to SEQ ID NO: 546261
uaagaacagcauagaacac

SEQ ID NO: 546263 - RNA, 19 nt, Artificial Sequence
  Description of Artificial Sequence: Synthetic oligonucleotide
  Sense strand starting at position 3690 of SEQ ID NO: 318222
accaauucuugcuaggaca

SEQ ID NO: 546264 - RNA, 19 nt, Artificial Sequence
  Description of Artificial Sequence: Synthetic oligonucleotide
  Antisense strand to SEQ ID NO: 546263
uguccuagcaagaauuggu

SEQ ID NO: 546265 - RNA, 19 nt, Artificial Sequence
  Description of Artificial Sequence: Synthetic oligonucleotide
  Sense strand starting at position 166 of SEQ ID NO: 318223
uaaauuguugugggaagcu

SEQ ID NO: 546266 - RNA, 19 nt, Artificial Sequence
  Description of Artificial Sequence: Synthetic oligonucleotide
  Antisense strand to SEQ ID NO: 546265
agcuucccacaacaauuua

SEQ ID NO: 546267 - RNA, 19 nt, Artificial Sequence
  Description of Artificial Sequence: Synthetic oligonucleotide
  Sense strand starting at position 408 of SEQ ID NO: 318223
augcaaguguauucuauaa

SEQ ID NO: 546268 - RNA, 19 nt, Artificial Sequence
  Description of Artificial Sequence: Synthetic oligonucleotide
  Antisense strand to SEQ ID NO: 546267
uuauagaauacacuugcau

SEQ ID NO: 546269 - RNA, 19 nt, Artificial Sequence
  Description of Artificial Sequence: Synthetic oligonucleotide
  Sense strand starting at position 521 of SEQ ID NO: 318223
aaagaagcaggauguuuaa

SEQ ID NO: 546270 - RNA, 19 nt, Artificial Sequence
  Description of Artificial Sequence: Synthetic oligonucleotide
  Antisense strand to SEQ ID NO: 546269
uuaaacauccugcuucuuu

SEQ ID NO: 546271 - RNA, 19 nt, Artificial Sequence
  Description of Artificial Sequence: Synthetic oligonucleotide
  Sense strand starting at position 651 of SEQ ID NO: 318223
ucuagucuugcacagaauu

SEQ ID NO: 546272 - RNA, 19 nt, Artificial Sequence
  Description of Artificial Sequence: Synthetic oligonucleotide
  Antisense strand to SEQ ID NO: 546271
aauucugugcaagacuaga

SEQ ID NO: 546273 - RNA, 19 nt, Artificial Sequence
  Description of Artificial Sequence: Synthetic oligonucleotide
  Sense strand starting at position 677 of SEQ ID NO: 318223
aucaguuaugugcaauuaa

SEQ ID NO: 546274 - RNA, 19 nt, Artificial Sequence
  Description of Artificial Sequence: Synthetic oligonucleotide
  Antisense strand to SEQ ID NO: 546273
uuaauugcacauaacugau

SEQ ID NO: 546275 - RNA, 19 nt, Artificial Sequence
  Description of Artificial Sequence: Synthetic oligonucleotide
  Sense strand starting at position 720 of SEQ ID NO: 318223
gccaacaauuaagagauuu

SEQ ID NO: 546276 - RNA, 19 nt, Artificial Sequence
  Description of Artificial Sequence: Synthetic oligonucleotide
  Antisense strand to SEQ ID NO: 546275
aaaucucuuaauuguuggc

SEQ ID NO: 546277 - RNA, 19 nt, Artificial Sequence
  Description of Artificial Sequence: Synthetic oligonucleotide
  Sense strand starting at position 754 of SEQ ID NO: 318223
ggacauacugcucauggua

SEQ ID NO: 546278 - RNA, 19 nt, Artificial Sequence
  Description of Artificial Sequence: Synthetic oligonucleotide
  Antisense strand to SEQ ID NO: 546277
uaccaugagcaguaugucc

SEQ ID NO: 546279 - RNA, 19 nt, Artificial Sequence
  Description of Artificial Sequence: Synthetic oligonucleotide
  Sense strand starting at position 888 of SEQ ID NO: 318223
uuggauuuguaucuuugca

SEQ ID NO: 546280 - RNA, 19 nt, Artificial Sequence
  Description of Artificial Sequence: Synthetic oligonucleotide
  Antisense strand to SEQ ID NO: 546279
ugcaaagauacaaauccaa

SEQ ID NO: 546281 - RNA, 19 nt, Artificial Sequence
  Description of Artificial Sequence: Synthetic oligonucleotide
  Sense strand starting at position 944 of SEQ ID NO: 318223
gagauacugcugcacaaga

SEQ ID NO: 546282 - RNA, 19 nt, Artificial Sequence
  Description of Artificial Sequence: Synthetic oligonucleotide
  Antisense strand to SEQ ID NO: 546281
ucuugugcagcaguaucuc

SEQ ID NO: 546283 - RNA, 19 nt, Artificial Sequence
  Description of Artificial Sequence: Synthetic oligonucleotide
  Sense strand starting at position 1448 of SEQ ID NO: 318223
cuccuaagucccugcauga

SEQ ID NO: 546284 - RNA, 19 nt, Artificial Sequence
  Description of Artificial Sequence: Synthetic oligonucleotide
  Antisense strand to SEQ ID NO: 546283
ucaugcagggacuuaggag

SEQ ID NO: 546285 - RNA, 19 nt, Artificial Sequence
  Description of Artificial Sequence: Synthetic oligonucleotide
  Sense strand starting at position 1607 of SEQ ID NO: 318223
aagagucgucccgagaggu

SEQ ID NO: 546286 - RNA, 19 nt, Artificial Sequence
  Description of Artificial Sequence: Synthetic oligonucleotide
  Antisense strand to SEQ ID NO: 546285
accucucgggacgacucuu

SEQ ID NO: 546287 - RNA, 19 nt, Artificial Sequence
  Description of Artificial Sequence: Synthetic oligonucleotide
  Sense strand starting at position 1608 of SEQ ID NO: 318223
agagucgucccgagagguc

SEQ ID NO: 546288 - RNA, 19 nt, Artificial Sequence
  Description of Artificial Sequence: Synthetic oligonucleotide
  Antisense strand to SEQ ID NO: 546287
gaccucucgggacgacucu

SEQ ID NO: 546289 - RNA, 19 nt, Artificial Sequence
  Description of Artificial Sequence: Synthetic oligonucleotide
  Sense strand starting at position 2576 of SEQ ID NO: 318223
gcauaugcucgcuuggguu

SEQ ID NO: 546290 - RNA, 19 nt, Artificial Sequence
  Description of Artificial Sequence: Synthetic oligonucleotide
  Antisense strand to SEQ ID NO: 546289
aacccaagcgagcauaugc

SEQ ID NO: 546291 - RNA, 19 nt, Artificial Sequence
  Description of Artificial Sequence: Synthetic oligonucleotide
  Sense strand starting at position 2779 of SEQ ID NO: 318223
cccgaagagcccuaccuau

SEQ ID NO: 546292 - RNA, 19 nt, Artificial Sequence
  Description of Artificial Sequence: Synthetic oligonucleotide
  Antisense strand to SEQ ID NO: 546291
auagguagggcucuucggg

SEQ ID NO: 546293 - RNA, 19 nt, Artificial Sequence
  Description of Artificial Sequence: Synthetic oligonucleotide
  Sense strand starting at position 2813 of SEQ ID NO: 318223
ugaauuaguucuuugaaag

SEQ ID NO: 546294 - RNA, 19 nt, Artificial Sequence
  Description of Artificial Sequence: Synthetic oligonucleotide
  Antisense strand to SEQ ID NO: 546293
cuuucaaagaacuaauuca

SEQ ID NO: 546295 - RNA, 19 nt, Artificial Sequence
  Description of Artificial Sequence: Synthetic oligonucleotide
  Sense strand starting at position 2814 of SEQ ID NO: 318223
gaauuaguucuuugaaagc

SEQ ID NO: 546296 - RNA, 19 nt, Artificial Sequence
  Description of Artificial Sequence: Synthetic oligonucleotide
  Antisense strand to SEQ ID NO: 546295
gcuuucaaagaacuaauuc

SEQ ID NO: 546297 - RNA, 19 nt, Artificial Sequence
  Description of Artificial Sequence: Synthetic oligonucleotide
  Sense strand starting at position 2838 of SEQ ID NO: 318223
acuggaaaggagugaguua

SEQ ID NO: 546298 - RNA, 19 nt, Artificial Sequence
  Description of Artificial Sequence: Synthetic oligonucleotide
  Antisense strand to SEQ ID NO: 546297
uaacucacuccuuuccagu

SEQ ID NO: 546299 - RNA, 19 nt, Artificial Sequence
  Description of Artificial Sequence: Synthetic oligonucleotide
  Sense strand starting at position 2851 of SEQ ID NO: 318223
gaguuaaagcaauguuuga

SEQ ID NO: 546300 - RNA, 19 nt, Artificial Sequence
  Description of Artificial Sequence: Synthetic oligonucleotide
  Antisense strand to SEQ ID NO: 546299
ucaaacauugcuuuaacuc

SEQ ID NO: 546301 - RNA, 19 nt, Artificial Sequence
  Description of Artificial Sequence: Synthetic oligonucleotide
  Sense strand starting at position 2861 of SEQ ID NO: 318223
aauguuugaugacuauuga

SEQ ID NO: 546302 - RNA, 19 nt, Artificial Sequence
  Description of Artificial Sequence: Synthetic oligonucleotide
  Antisense strand to SEQ ID NO: 546301
ucaauagucaucaaacauu

SEQ ID NO: 546303 - RNA, 19 nt, Artificial Sequence
  Description of Artificial Sequence: Synthetic oligonucleotide
  Sense strand starting at position 2887 of SEQ ID NO: 318223
uuggaaucuuggguagcuu

SEQ ID NO: 546304 - RNA, 19 nt, Artificial Sequence
  Description of Artificial Sequence: Synthetic oligonucleotide
  Antisense strand to SEQ ID NO: 546303
aagcuacccaagauuccaa

SEQ ID NO: 546305 - RNA, 19 nt, Artificial Sequence
  Description of Artificial Sequence: Synthetic oligonucleotide
  Sense strand starting at position 2926 of SEQ ID NO: 318223
agggaugcuguugggauaa

SEQ ID NO: 546306 - RNA, 19 nt, Artificial Sequence
  Description of Artificial Sequence: Synthetic oligonucleotide
  Antisense strand to SEQ ID NO: 546305
uuaucccaacagcaucccu

SEQ ID NO: 546307 - RNA, 19 nt, Artificial Sequence
  Description of Artificial Sequence: Synthetic oligonucleotide
  Sense strand starting at position 2938 of SEQ ID NO: 318223
gggauaaugacccguggag

SEQ ID NO: 546308 - RNA, 19 nt, Artificial Sequence
  Description of Artificial Sequence: Synthetic oligonucleotide
  Antisense strand to SEQ ID NO: 546307
cuccacgggucauuauccc

SEQ ID NO: 546309 - RNA, 19 nt, Artificial Sequence
  Description of Artificial Sequence: Synthetic oligonucleotide
  Sense strand starting at position 2940 of SEQ ID NO: 318223
gauaaugacccguggagug

SEQ ID NO: 546310 - RNA, 19 nt, Artificial Sequence
  Description of Artificial Sequence: Synthetic oligonucleotide
  Antisense strand to SEQ ID NO: 546309
cacuccacgggucauuauc

SEQ ID NO: 546311 - RNA, 19 nt, Artificial Sequence
  Description of Artificial Sequence: Synthetic oligonucleotide
  Sense strand starting at position 2942 of SEQ ID NO: 318223
uaaugacccguggagugau

SEQ ID NO: 546312 - RNA, 19 nt, Artificial Sequence
  Description of Artificial Sequence: Synthetic oligonucleotide
  Antisense strand to SEQ ID NO: 546311
aucacuccacgggucauua

SEQ ID NO: 546313 - RNA, 19 nt, Artificial Sequence
  Description of Artificial Sequence: Synthetic oligonucleotide
  Sense strand starting at position 3083 of SEQ ID NO: 318223
cuguguuugcuccuuugua

SEQ ID NO: 546314 - RNA, 19 nt, Artificial Sequence
  Description of Artificial Sequence: Synthetic oligonucleotide
  Antisense strand to SEQ ID NO: 546313
uacaaaggagcaaacacag

SEQ ID NO: 546315 - RNA, 19 nt, Artificial Sequence
  Description of Artificial Sequence: Synthetic oligonucleotide
  Sense strand starting at position 3310 of SEQ ID NO: 318223
guguauuggacugggagca

SEQ ID NO: 546316 - RNA, 19 nt, Artificial Sequence
  Description of Artificial Sequence: Synthetic oligonucleotide
  Antisense strand to SEQ ID NO: 546315
ugcucccaguccaauacac

SEQ ID NO: 546317 - RNA, 19 nt, Artificial Sequence
  Description of Artificial Sequence: Synthetic oligonucleotide
  Sense strand starting at position 3311 of SEQ ID NO: 318223
uguauuggacugggagcau

SEQ ID NO: 546318 - RNA, 19 nt, Artificial Sequence
  Description of Artificial Sequence: Synthetic oligonucleotide
  Antisense strand to SEQ ID NO: 546317
augcucccaguccaauaca

SEQ ID NO: 546319 - RNA, 19 nt, Artificial Sequence
  Description of Artificial Sequence: Synthetic oligonucleotide
  Sense strand starting at position 3345 of SEQ ID NO: 318223
auagguguuuacuugguaa

SEQ ID NO: 546320 - RNA, 19 nt, Artificial Sequence
  Description of Artificial Sequence: Synthetic oligonucleotide
  Antisense strand to SEQ ID NO: 546319
uuaccaaguaaacaccuau

SEQ ID NO: 546321 - RNA, 19 nt, Artificial Sequence
  Description of Artificial Sequence: Synthetic oligonucleotide
  Sense strand starting at position 3347 of SEQ ID NO: 318223
agguguuuacuugguaaag

SEQ ID NO: 546322 - RNA, 19 nt, Artificial Sequence
  Description of Artificial Sequence: Synthetic oligonucleotide
  Antisense strand to SEQ ID NO: 546321
cuuuaccaaguaaacaccu

SEQ ID NO: 546323 - RNA, 19 nt, Artificial Sequence
  Description of Artificial Sequence: Synthetic oligonucleotide
  Sense strand starting at position 3380 of SEQ ID NO: 318223
cguucucaccaagaacuuu

SEQ ID NO: 546324 - RNA, 19 nt, Artificial Sequence
  Description of Artificial Sequence: Synthetic oligonucleotide
  Antisense strand to SEQ ID NO: 546323
aaaguucuuggugagaacg

SEQ ID NO: 546325 - RNA, 19 nt, Artificial Sequence
  Description of Artificial Sequence: Synthetic oligonucleotide
  Sense strand starting at position 3450 of SEQ ID NO: 318223
ugagcuucuagagguaaca

SEQ ID NO: 546326 - RNA, 19 nt, Artificial Sequence
  Description of Artificial Sequence: Synthetic oligonucleotide
  Antisense strand to SEQ ID NO: 546325
uguuaccucuagaagcuca

SEQ ID NO: 546327 - RNA, 19 nt, Artificial Sequence
  Description of Artificial Sequence: Synthetic oligonucleotide
  Sense strand starting at position 3553 of SEQ ID NO: 318223
acagaugacgcuuagguuu

SEQ ID NO: 546328 - RNA, 19 nt, Artificial Sequence
  Description of Artificial Sequence: Synthetic oligonucleotide
  Antisense strand to SEQ ID NO: 546327
aaaccuaagcgucaucugu

SEQ ID NO: 546329 - RNA, 19 nt, Artificial Sequence
  Description of Artificial Sequence: Synthetic oligonucleotide
  Sense strand starting at position 3589 of SEQ ID NO: 318223
gggaauguuaauugaucca

SEQ ID NO: 546330 - RNA, 19 nt, Artificial Sequence
  Description of Artificial Sequence: Synthetic oligonucleotide
  Antisense strand to SEQ ID NO: 546329
uggaucaauuaacauuccc

SEQ ID NO: 546331 - RNA, 19 nt, Artificial Sequence
  Description of Artificial Sequence: Synthetic oligonucleotide
  Sense strand starting at position 3634 of SEQ ID NO: 318223
ggagaaacuguuugggauc

SEQ ID NO: 546332 - RNA, 19 nt, Artificial Sequence
  Description of Artificial Sequence: Synthetic oligonucleotide
  Antisense strand to SEQ ID NO: 546331
gaucccaaacaguuucucc

SEQ ID NO: 546333 - RNA, 19 nt, Artificial Sequence
  Description of Artificial Sequence: Synthetic oligonucleotide
  Sense strand starting at position 3647 of SEQ ID NO: 318223
gggaucaaagucugaguuu

SEQ ID NO: 546334 - RNA, 19 nt, Artificial Sequence
  Description of Artificial Sequence: Synthetic oligonucleotide
  Antisense strand to SEQ ID NO: 546333
aaacucagacuuugauccc

SEQ ID NO: 546335 - RNA, 19 nt, Artificial Sequence
  Description of Artificial Sequence: Synthetic oligonucleotide
  Sense strand starting at position 3760 of SEQ ID NO: 318223
auugacaucucaguuggaa

SEQ ID NO: 546336 - RNA, 19 nt, Artificial Sequence
  Description of Artificial Sequence: Synthetic oligonucleotide
  Antisense strand to SEQ ID NO: 546335
uuccaacugagaugucaau

SEQ ID NO: 546337 - RNA, 19 nt, Artificial Sequence
  Description of Artificial Sequence: Synthetic oligonucleotide
  Sense strand starting at position 3775 of SEQ ID NO: 318223
ggaauagcccuuuguccau

SEQ ID NO: 546338 - RNA, 19 nt, Artificial Sequence
  Description of Artificial Sequence: Synthetic oligonucleotide
  Antisense strand to SEQ ID NO: 546337
auggacaaagggcuauucc

SEQ ID NO: 546339 - RNA, 19 nt, Artificial Sequence
  Description of Artificial Sequence: Synthetic oligonucleotide
  Sense strand starting at position 3850 of SEQ ID NO: 318223
ucucacagguaucuugaau

SEQ ID NO: 546340 - RNA, 19 nt, Artificial Sequence
  Description of Artificial Sequence: Synthetic oligonucleotide
  Antisense strand to SEQ ID NO: 546339
auucaagauaccugugaga

SEQ ID NO: 546341 - RNA, 19 nt, Artificial Sequence
  Description of Artificial Sequence: Synthetic oligonucleotide
  Sense strand starting at position 3877 of SEQ ID NO: 318223
ccaaaugaguuugccucuu

SEQ ID NO: 546342 - RNA, 19 nt, Artificial Sequence
  Description of Artificial Sequence: Synthetic oligonucleotide
  Antisense strand to SEQ ID NO: 546341
aagaggcaaacucauuugg

SEQ ID NO: 546343 - RNA, 19 nt, Artificial Sequence
  Description of Artificial Sequence: Synthetic oligonucleotide
  Sense strand starting at position 3909 of SEQ ID NO: 318223
ugcucaugucuaugacauc

SEQ ID NO: 546344 - RNA, 19 nt, Artificial Sequence
  Description of Artificial Sequence: Synthetic oligonucleotide
  Antisense strand to SEQ ID NO: 546343
gaugucauagacaugagca

SEQ ID NO: 546345 - RNA, 19 nt, Artificial Sequence
  Description of Artificial Sequence: Synthetic oligonucleotide
  Sense strand starting at position 73 of SEQ ID NO: 318224
cuguguauucuacagccca

SEQ ID NO: 546346 - RNA, 19 nt, Artificial Sequence
  Description of Artificial Sequence: Synthetic oligonucleotide
  Antisense strand to SEQ ID NO: 546345
ugggcuguagaauacacag

SEQ ID NO: 546347 - RNA, 19 nt, Artificial Sequence
  Description of Artificial Sequence: Synthetic oligonucleotide
  Sense strand starting at position 252 of SEQ ID NO: 318224
gugguaaucuaguucagag

SEQ ID NO: 546348 - RNA, 19 nt, Artificial Sequence
  Description of Artificial Sequence: Synthetic oligonucleotide
  Antisense strand to SEQ ID NO: 546347
cucugaacuagauuaccac

SEQ ID NO: 546349 - RNA, 19 nt, Artificial Sequence
  Description of Artificial Sequence: Synthetic oligonucleotide
  Sense strand starting at position 254 of SEQ ID NO: 318224
gguaaucuaguucagaggu

SEQ ID NO: 546350 - RNA, 19 nt, Artificial Sequence
  Description of Artificial Sequence: Synthetic oligonucleotide
  Antisense strand to SEQ ID NO: 546349
accucugaacuagauuacc

SEQ ID NO: 546351 - RNA, 19 nt, Artificial Sequence
  Description of Artificial Sequence: Synthetic oligonucleotide
  Sense strand starting at position 262 of SEQ ID NO: 318224
aguucagagguccaagagu

SEQ ID NO: 546352 - RNA, 19 nt, Artificial Sequence
  Description of Artificial Sequence: Synthetic oligonucleotide
  Antisense strand to SEQ ID NO: 546351
acucuuggaccucugaacu

SEQ ID NO: 546353 - RNA, 19 nt, Artificial Sequence
  Description of Artificial Sequence: Synthetic oligonucleotide
  Sense strand starting at position 278 of SEQ ID NO: 318224
aguuaauccuaacugagau

SEQ ID NO: 546354 - RNA, 19 nt, Artificial Sequence
  Description of Artificial Sequence: Synthetic oligonucleotide
  Antisense strand to SEQ ID NO: 546353
aucucaguuaggauuaacu

SEQ ID NO: 546355 - RNA, 19 nt, Artificial Sequence
  Description of Artificial Sequence: Synthetic oligonucleotide
  Sense strand starting at position 377 of SEQ ID NO: 318224
ugguacuaccucugcaauu

SEQ ID NO: 546356 - RNA, 19 nt, Artificial Sequence
  Description of Artificial Sequence: Synthetic oligonucleotide
  Antisense strand to SEQ ID NO: 546355
aauugcagagguaguacca

SEQ ID NO: 546357 - RNA, 19 nt, Artificial Sequence
  Description of Artificial Sequence: Synthetic oligonucleotide
  Sense strand starting at position 573 of SEQ ID NO: 318224
uaaauuguugugggaagcu

SEQ ID NO: 546358 - RNA, 19 nt, Artificial Sequence
  Description of Artificial Sequence: Synthetic oligonucleotide
  Antisense strand to SEQ ID NO: 546357
agcuucccacaacaauuua

SEQ ID NO: 546359 - RNA, 19 nt, Artificial Sequence
  Description of Artificial Sequence: Synthetic oligonucleotide
  Sense strand starting at position 815 of SEQ ID NO: 318224
augcaaguguauucuauaa

SEQ ID NO: 546360 - RNA, 19 nt, Artificial Sequence
  Description of Artificial Sequence: Synthetic oligonucleotide
  Antisense strand to SEQ ID NO: 546359
uuauagaauacacuugcau

SEQ ID NO: 546361 - RNA, 19 nt, Artificial Sequence
  Description of Artificial Sequence: Synthetic oligonucleotide
  Sense strand starting at position 928 of SEQ ID NO: 318224
aaagaagcaggauguuuaa

SEQ ID NO: 546362 - RNA, 19 nt, Artificial Sequence
  Description of Artificial Sequence: Synthetic oligonucleotide
  Antisense strand to SEQ ID NO: 546361
uuaaacauccugcuucuuu

SEQ ID NO: 546363 - RNA, 19 nt, Artificial Sequence
  Description of Artificial Sequence: Synthetic oligonucleotide
  Sense strand starting at position 1058 of SEQ ID NO: 318224
ucuagucuugcacagaauu

SEQ ID NO: 546364 - RNA, 19 nt, Artificial Sequence
  Description of Artificial Sequence: Synthetic oligonucleotide
  Antisense strand to SEQ ID NO: 546363
aauucugugcaagacuaga

SEQ ID NO: 546365 - RNA, 19 nt, Artificial Sequence
  Description of Artificial Sequence: Synthetic oligonucleotide
  Sense strand starting at position 1084 of SEQ ID NO: 318224
aucaguuaugugcaauuaa

SEQ ID NO: 546366 - RNA, 19 nt, Artificial Sequence
  Description of Artificial Sequence: Synthetic oligonucleotide
  Antisense strand to SEQ ID NO: 546365
uuaauugcacauaacugau

SEQ ID NO: 546367 - RNA, 19 nt, Artificial Sequence
  Description of Artificial Sequence: Synthetic oligonucleotide
  Sense strand starting at position 1127 of SEQ ID NO: 318224
gccaacaauuaagagauuu

SEQ ID NO: 546368 - RNA, 19 nt, Artificial Sequence
  Description of Artificial Sequence: Synthetic oligonucleotide
  Antisense strand to SEQ ID NO: 546367
aaaucucuuaauuguuggc

SEQ ID NO: 546369 - RNA, 19 nt, Artificial Sequence
  Description of Artificial Sequence: Synthetic oligonucleotide
  Sense strand starting at position 1161 of SEQ ID NO: 318224
ggacauacugcucauggua

SEQ ID NO: 546370 - RNA, 19 nt, Artificial Sequence
  Description of Artificial Sequence: Synthetic oligonucleotide
  Antisense strand to SEQ ID NO: 546369
uaccaugagcaguaugucc

SEQ ID NO: 546371 - RNA, 19 nt, Artificial Sequence
  Description of Artificial Sequence: Synthetic oligonucleotide
  Sense strand starting at position 1295 of SEQ ID NO: 318224
uuggauuuguaucuuugca

SEQ ID NO: 546372 - RNA, 19 nt, Artificial Sequence
  Description of Artificial Sequence: Synthetic oligonucleotide
  Antisense strand to SEQ ID NO: 546371
ugcaaagauacaaauccaa

SEQ ID NO: 546373 - RNA, 19 nt, Artificial Sequence
  Description of Artificial Sequence: Synthetic oligonucleotide
  Sense strand starting at position 1351 of SEQ ID NO: 318224
gagauacugcugcacaaga

SEQ ID NO: 546374 - RNA, 19 nt, Artificial Sequence
  Description of Artificial Sequence: Synthetic oligonucleotide
  Antisense strand to SEQ ID NO: 546373
ucuugugcagcaguaucuc

SEQ ID NO: 546375 - RNA, 19 nt, Artificial Sequence
  Description of Artificial Sequence: Synthetic oligonucleotide
  Sense strand starting at position 1855 of SEQ ID NO: 318224
cuccuaagucccugcauga

SEQ ID NO: 546376 - RNA, 19 nt, Artificial Sequence
  Description of Artificial Sequence: Synthetic oligonucleotide
  Antisense strand to SEQ ID NO: 546375
ucaugcagggacuuaggag

SEQ ID NO: 546377 - RNA, 19 nt, Artificial Sequence
  Description of Artificial Sequence: Synthetic oligonucleotide
  Sense strand starting at position 2014 of SEQ ID NO: 318224
aagagucgucccgagaggu

SEQ ID NO: 546378 - RNA, 19 nt, Artificial Sequence
  Description of Artificial Sequence: Synthetic oligonucleotide
  Antisense strand to SEQ ID NO: 546377
accucucgggacgacucuu

SEQ ID NO: 546379 - RNA, 19 nt, Artificial Sequence
  Description of Artificial Sequence: Synthetic oligonucleotide
  Sense strand starting at position 2015 of SEQ ID NO: 318224
agagucgucccgagagguc

SEQ ID NO: 546380 - RNA, 19 nt, Artificial Sequence
  Description of Artificial Sequence: Synthetic oligonucleotide
  Antisense strand to SEQ ID NO: 546379
gaccucucgggacgacucu

SEQ ID NO: 546381 - RNA, 19 nt, Artificial Sequence
  Description of Artificial Sequence: Synthetic oligonucleotide
  Sense strand starting at position 2384 of SEQ ID NO: 318224
caagaagccucgguagcaa

SEQ ID NO: 546382 - RNA, 19 nt, Artificial Sequence
  Description of Artificial Sequence: Synthetic oligonucleotide
  Antisense strand to SEQ ID NO: 546381
uugcuaccgaggcuucuug

SEQ ID NO: 546383 - RNA, 19 nt, Artificial Sequence
  Description of Artificial Sequence: Synthetic oligonucleotide
  Sense strand starting at position 2983 of SEQ ID NO: 318224
gcauaugcucgcuuggguu

SEQ ID NO: 546384 - RNA, 19 nt, Artificial Sequence
  Description of Artificial Sequence: Synthetic oligonucleotide
  Antisense strand to SEQ ID NO: 546383
aacccaagcgagcauaugc

SEQ ID NO: 546385 - RNA, 19 nt, Artificial Sequence
  Description of Artificial Sequence: Synthetic oligonucleotide
  Sense strand starting at position 3186 of SEQ ID NO: 318224
cccgaagagcccuaccuau

SEQ ID NO: 546386 - RNA, 19 nt, Artificial Sequence
  Description of Artificial Sequence: Synthetic oligonucleotide
  Antisense strand to SEQ ID NO: 546385
auagguagggcucuucggg

SEQ ID NO: 546387 - RNA, 19 nt, Artificial Sequence
  Description of Artificial Sequence: Synthetic oligonucleotide
  Sense strand starting at position 3220 of SEQ ID NO: 318224
ugaauuaguucuuugaaag

SEQ ID NO: 546388 - RNA, 19 nt, Artificial Sequence
  Description of Artificial Sequence: Synthetic oligonucleotide
  Antisense strand to SEQ ID NO: 546387
cuuucaaagaacuaauuca

SEQ ID NO: 546389 - RNA, 19 nt, Artificial Sequence
  Description of Artificial Sequence: Synthetic oligonucleotide
  Sense strand starting at position 3221 of SEQ ID NO: 318224
gaauuaguucuuugaaagc

SEQ ID NO: 546390 - RNA, 19 nt, Artificial Sequence
  Description of Artificial Sequence: Synthetic oligonucleotide
  Antisense strand to SEQ ID NO: 546389
gcuuucaaagaacuaauuc

SEQ ID NO: 546391 - RNA, 19 nt, Artificial Sequence
  Description of Artificial Sequence: Synthetic oligonucleotide
  Sense strand starting at position 3245 of SEQ ID NO: 318224
acuggaaaggagugaguua

SEQ ID NO: 546392 - RNA, 19 nt, Artificial Sequence
  Description of Artificial Sequence: Synthetic oligonucleotide
  Antisense strand to SEQ ID NO: 546391
uaacucacuccuuuccagu

SEQ ID NO: 546393 - RNA, 19 nt, Artificial Sequence
  Description of Artificial Sequence: Synthetic oligonucleotide
  Sense strand starting at position 3258 of SEQ ID NO: 318224
gaguuaaagcaauguuuga

SEQ ID NO: 546394 - RNA, 19 nt, Artificial Sequence
  Description of Artificial Sequence: Synthetic oligonucleotide
  Antisense strand to SEQ ID NO: 546393
ucaaacauugcuuuaacuc

SEQ ID NO: 546395 - RNA, 19 nt, Artificial Sequence
  Description of Artificial Sequence: Synthetic oligonucleotide
  Sense strand starting at position 3268 of SEQ ID NO: 318224
aauguuugaugacuauuga

SEQ ID NO: 546396 - RNA, 19 nt, Artificial Sequence
  Description of Artificial Sequence: Synthetic oligonucleotide
  Antisense strand to SEQ ID NO: 546395
ucaauagucaucaaacauu

SEQ ID NO: 546397 - RNA, 19 nt, Artificial Sequence
  Description of Artificial Sequence: Synthetic oligonucleotide
  Sense strand starting at position 3294 of SEQ ID NO: 318224
uuggaaucuuggguagcuu

SEQ ID NO: 546398 - RNA, 19 nt, Artificial Sequence
  Description of Artificial Sequence: Synthetic oligonucleotide
  Antisense strand to SEQ ID NO: 546397
aagcuacccaagauuccaa

SEQ ID NO: 546399 - RNA, 19 nt, Artificial Sequence
  Description of Artificial Sequence: Synthetic oligonucleotide
  Sense strand starting at position 3333 of SEQ ID NO: 318224
agggaugcuguugggauaa

SEQ ID NO: 546400 - RNA, 19 nt, Artificial Sequence
  Description of Artificial Sequence: Synthetic oligonucleotide
  Antisense strand to SEQ ID NO: 546399
uuaucccaacagcaucccu

SEQ ID NO: 546401 - RNA, 19 nt, Artificial Sequence
  Description of Artificial Sequence: Synthetic oligonucleotide
  Sense strand starting at position 3345 of SEQ ID NO: 318224
gggauaaugacccguggag

SEQ ID NO: 546402 - RNA, 19 nt, Artificial Sequence
  Description of Artificial Sequence: Synthetic oligonucleotide
  Antisense strand to SEQ ID NO: 546401
cuccacgggucauuauccc

SEQ ID NO: 546403 - RNA, 19 nt, Artificial Sequence
  Description of Artificial Sequence: Synthetic oligonucleotide
  Sense strand starting at position 3347 of SEQ ID NO: 318224
gauaaugacccguggagug

SEQ ID NO: 546404 - RNA, 19 nt, Artificial Sequence
  Description of Artificial Sequence: Synthetic oligonucleotide
  Antisense strand to SEQ ID NO: 546403
cacuccacgggucauuauc

SEQ ID NO: 546405 - RNA, 19 nt, Artificial Sequence
  Description of Artificial Sequence: Synthetic oligonucleotide
  Sense strand starting at position 3349 of SEQ ID NO: 318224
uaaugacccguggagugau

SEQ ID NO: 546406 - RNA, 19 nt, Artificial Sequence
  Description of Artificial Sequence: Synthetic oligonucleotide
  Antisense strand to SEQ ID NO: 546405
aucacuccacgggucauua

SEQ ID NO: 546407 - RNA, 19 nt, Artificial Sequence
  Description of Artificial Sequence: Synthetic oligonucleotide
  Sense strand starting at position 3490 of SEQ ID NO: 318224
cuguguuugcuccuuugua

SEQ ID NO: 546408 - RNA, 19 nt, Artificial Sequence
  Description of Artificial Sequence: Synthetic oligonucleotide
  Antisense strand to SEQ ID NO: 546407
uacaaaggagcaaacacag

SEQ ID NO: 546409 - RNA, 19 nt, Artificial Sequence
  Description of Artificial Sequence: Synthetic oligonucleotide
  Sense strand starting at position 3717 of SEQ ID NO: 318224
guguauuggacugggagca

SEQ ID NO: 546410 - RNA, 19 nt, Artificial Sequence
  Description of Artificial Sequence: Synthetic oligonucleotide
  Antisense strand to SEQ ID NO: 546409
ugcucccaguccaauacac

SEQ ID NO: 546411 - RNA, 19 nt, Artificial Sequence
  Description of Artificial Sequence: Synthetic oligonucleotide
  Sense strand starting at position 3718 of SEQ ID NO: 318224
uguauuggacugggagcau

SEQ ID NO: 546412 - RNA, 19 nt, Artificial Sequence
  Description of Artificial Sequence: Synthetic oligonucleotide
  Antisense strand to SEQ ID NO: 546411
augcucccaguccaauaca

SEQ ID NO: 546413 - RNA, 19 nt, Artificial Sequence
  Description of Artificial Sequence: Synthetic oligonucleotide
  Sense strand starting at position 3752 of SEQ ID NO: 318224
auagguguuuacuugguaa

SEQ ID NO: 546414 - RNA, 19 nt, Artificial Sequence
  Description of Artificial Sequence: Synthetic oligonucleotide
  Antisense strand to SEQ ID NO: 546413
uuaccaaguaaacaccuau

SEQ ID NO: 546415 - RNA, 19 nt, Artificial Sequence
  Description of Artificial Sequence: Synthetic oligonucleotide
  Sense strand starting at position 3754 of SEQ ID NO: 318224
agguguuuacuugguaaag

SEQ ID NO: 546416 - RNA, 19 nt, Artificial Sequence
  Description of Artificial Sequence: Synthetic oligonucleotide
  Antisense strand to SEQ ID NO: 546415
cuuuaccaaguaaacaccu

SEQ ID NO: 546417 - RNA, 19 nt, Artificial Sequence
  Description of Artificial Sequence: Synthetic oligonucleotide
  Sense strand starting at position 3787 of SEQ ID NO: 318224
cguucucaccaagaacuuu

SEQ ID NO: 546418 - RNA, 19 nt, Artificial Sequence
  Description of Artificial Sequence: Synthetic oligonucleotide
  Antisense strand to SEQ ID NO: 546417
aaaguucuuggugagaacg

SEQ ID NO: 546419 - RNA, 19 nt, Artificial Sequence
  Description of Artificial Sequence: Synthetic oligonucleotide
  Sense strand starting at position 3823 of SEQ ID NO: 318224
aauagugacguguagugua

SEQ ID NO: 546420 - RNA, 19 nt, Artificial Sequence
  Description of Artificial Sequence: Synthetic oligonucleotide
  Antisense strand to SEQ ID NO: 546419
uacacuacacgucacuauu

SEQ ID NO: 546421 - RNA, 19 nt, Artificial Sequence
  Description of Artificial Sequence: Synthetic oligonucleotide
  Sense strand starting at position 3857 of SEQ ID NO: 318224
ugagcuucuagagguaaca

SEQ ID NO: 546422 - RNA, 19 nt, Artificial Sequence
  Description of Artificial Sequence: Synthetic oligonucleotide
  Antisense strand to SEQ ID NO: 546421
uguuaccucuagaagcuca

SEQ ID NO: 546423 - RNA, 19 nt, Artificial Sequence
  Description of Artificial Sequence: Synthetic oligonucleotide
  Sense strand starting at position 3960 of SEQ ID NO: 318224
acagaugacgcuuagguuu

SEQ ID NO: 546424 - RNA, 19 nt, Artificial Sequence
  Description of Artificial Sequence: Synthetic oligonucleotide
  Antisense strand to SEQ ID NO: 546423
aaaccuaagcgucaucugu

SEQ ID NO: 546425 - RNA, 19 nt, Artificial Sequence
  Description of Artificial Sequence: Synthetic oligonucleotide
  Sense strand starting at position 40 of SEQ ID NO: 318225
aaagaagcaggauguuuaa

SEQ ID NO: 546426 - RNA, 19 nt, Artificial Sequence
  Description of Artificial Sequence: Synthetic oligonucleotide
  Antisense strand to SEQ ID NO: 546425
uuaaacauccugcuucuuu

SEQ ID NO: 546427 - RNA, 19 nt, Artificial Sequence
  Description of Artificial Sequence: Synthetic oligonucleotide
  Sense strand starting at position 170 of SEQ ID NO: 318225
ucuagucuugcacagaauu

SEQ ID NO: 546428 - RNA, 19 nt, Artificial Sequence
  Description of Artificial Sequence: Synthetic oligonucleotide
  Antisense strand to SEQ ID NO: 546427
aauucugugcaagacuaga

SEQ ID NO: 546429 - RNA, 19 nt, Artificial Sequence
  Description of Artificial Sequence: Synthetic oligonucleotide
  Sense strand starting at position 196 of SEQ ID NO: 318225
aucaguuaugugcaauuaa

SEQ ID NO: 546430 - RNA, 19 nt, Artificial Sequence
  Description of Artificial Sequence: Synthetic oligonucleotide
  Antisense strand to SEQ ID NO: 546429
uuaauugcacauaacugau

SEQ ID NO: 546431 - RNA, 19 nt, Artificial Sequence
  Description of Artificial Sequence: Synthetic oligonucleotide
  Sense strand starting at position 239 of SEQ ID NO: 318225
gccaacaauuaagagauuu

SEQ ID NO: 546432 - RNA, 19 nt, Artificial Sequence
  Description of Artificial Sequence: Synthetic oligonucleotide
  Antisense strand to SEQ ID NO: 546431
aaaucucuuaauuguuggc

SEQ ID NO: 546433 - RNA, 19 nt, Artificial Sequence
  Description of Artificial Sequence: Synthetic oligonucleotide
  Sense strand starting at position 273 of SEQ ID NO: 318225
ggacauacugcucauggua

SEQ ID NO: 546434 - RNA, 19 nt, Artificial Sequence
  Description of Artificial Sequence: Synthetic oligonucleotide
  Antisense strand to SEQ ID NO: 546433
uaccaugagcaguaugucc

SEQ ID NO: 546435 - RNA, 19 nt, Artificial Sequence
  Description of Artificial Sequence: Synthetic oligonucleotide
  Sense strand starting at position 407 of SEQ ID NO: 318225
uuggauuuguaucuuugca

SEQ ID NO: 546436 - RNA, 19 nt, Artificial Sequence
  Description of Artificial Sequence: Synthetic oligonucleotide
  Antisense strand to SEQ ID NO: 546435
ugcaaagauacaaauccaa

SEQ ID NO: 546437 - RNA, 19 nt, Artificial Sequence
  Description of Artificial Sequence: Synthetic oligonucleotide
  Sense strand starting at position 463 of SEQ ID NO: 318225
gagauacugcugcacaaga

SEQ ID NO: 546438 - RNA, 19 nt, Artificial Sequence
  Description of Artificial Sequence: Synthetic oligonucleotide
  Antisense strand to SEQ ID NO: 546437
ucuugugcagcaguaucuc

SEQ ID NO: 546439 - RNA, 19 nt, Artificial Sequence
  Description of Artificial Sequence: Synthetic oligonucleotide
  Sense strand starting at position 1126 of SEQ ID NO: 318225
aagagucgucccgagaggu

SEQ ID NO: 546440 - RNA, 19 nt, Artificial Sequence
  Description of Artificial Sequence: Synthetic oligonucleotide
  Antisense strand to SEQ ID NO: 546439
accucucgggacgacucuu

SEQ ID NO: 546441 - RNA, 19 nt, Artificial Sequence
  Description of Artificial Sequence: Synthetic oligonucleotide
  Sense strand starting at position 1127 of SEQ ID NO: 318225
agagucgucccgagagguc

SEQ ID NO: 546442 - RNA, 19 nt, Artificial Sequence
  Description of Artificial Sequence: Synthetic oligonucleotide
  Antisense strand to SEQ ID NO: 546441
gaccucucgggacgacucu

SEQ ID NO: 546443 - RNA, 19 nt, Artificial Sequence
  Description of Artificial Sequence: Synthetic oligonucleotide
  Sense strand starting at position 2095 of SEQ ID NO: 318225
gcauaugcucgcuuggguu

SEQ ID NO: 546444 - RNA, 19 nt, Artificial Sequence
  Description of Artificial Sequence: Synthetic oligonucleotide
  Antisense strand to SEQ ID NO: 546443
aacccaagcgagcauaugc

SEQ ID NO: 546445 - RNA, 19 nt, Artificial Sequence
  Description of Artificial Sequence: Synthetic oligonucleotide
  Sense strand starting at position 2298 of SEQ ID NO: 318225
cccgaagagcccuaccuau

SEQ ID NO: 546446 - RNA, 19 nt, Artificial Sequence
  Description of Artificial Sequence: Synthetic oligonucleotide
  Antisense strand to SEQ ID NO: 546445
auagguagggcucuucggg

SEQ ID NO: 546447 - RNA, 19 nt, Artificial Sequence
  Description of Artificial Sequence: Synthetic oligonucleotide
  Sense strand starting at position 2332 of SEQ ID NO: 318225
ugaauuaguucuuugaaag

SEQ ID NO: 546448 - RNA, 19 nt, Artificial Sequence
  Description of Artificial Sequence: Synthetic oligonucleotide
  Antisense strand to SEQ ID NO: 546447
cuuucaaagaacuaauuca

SEQ ID NO: 546449 - RNA, 19 nt, Artificial Sequence
  Description of Artificial Sequence: Synthetic oligonucleotide
  Sense strand starting at position 2333 of SEQ ID NO: 318225
gaauuaguucuuugaaagc

SEQ ID NO: 546450 - RNA, 19 nt, Artificial Sequence
  Description of Artificial Sequence: Synthetic oligonucleotide
  Antisense strand to SEQ ID NO: 546449
gcuuucaaagaacuaauuc

SEQ ID NO: 546451 - RNA, 19 nt, Artificial Sequence
  Description of Artificial Sequence: Synthetic oligonucleotide
  Sense strand starting at position 2357 of SEQ ID NO: 318225
acuggaaaggagugaguua

SEQ ID NO: 546452 - RNA, 19 nt, Artificial Sequence
  Description of Artificial Sequence: Synthetic oligonucleotide
  Antisense strand to SEQ ID NO: 546451
uaacucacuccuuuccagu

SEQ ID NO: 546453 - RNA, 19 nt, Artificial Sequence
  Description of Artificial Sequence: Synthetic oligonucleotide
  Sense strand starting at position 2370 of SEQ ID NO: 318225
gaguuaaagcaauguuuga

SEQ ID NO: 546454 - RNA, 19 nt, Artificial Sequence
  Description of Artificial Sequence: Synthetic oligonucleotide
  Antisense strand to SEQ ID NO: 546453
ucaaacauugcuuuaacuc

SEQ ID NO: 546455 - RNA, 19 nt, Artificial Sequence
  Description of Artificial Sequence: Synthetic oligonucleotide
  Sense strand starting at position 2380 of SEQ ID NO: 318225
aauguuugaugacuauuga

SEQ ID NO: 546456 - RNA, 19 nt, Artificial Sequence
  Description of Artificial Sequence: Synthetic oligonucleotide
  Antisense strand to SEQ ID NO: 546455
ucaauagucaucaaacauu

SEQ ID NO: 546457 - RNA, 19 nt, Artificial Sequence
  Description of Artificial Sequence: Synthetic oligonucleotide
  Sense strand starting at position 2406 of SEQ ID NO: 318225
uuggaaucuuggguagcuu

SEQ ID NO: 546458 - RNA, 19 nt, Artificial Sequence
  Description of Artificial Sequence: Synthetic oligonucleotide
  Antisense strand to SEQ ID NO: 546457
aagcuacccaagauuccaa

SEQ ID NO: 546459 - RNA, 19 nt, Artificial Sequence
  Description of Artificial Sequence: Synthetic oligonucleotide
  Sense strand starting at position 2445 of SEQ ID NO: 318225
agggaugcuguugggauaa

SEQ ID NO: 546460 - RNA, 19 nt, Artificial Sequence
  Description of Artificial Sequence: Synthetic oligonucleotide
  Antisense strand to SEQ ID NO: 546459
uuaucccaacagcaucccu

SEQ ID NO: 546461 - RNA, 19 nt, Artificial Sequence
  Description of Artificial Sequence: Synthetic oligonucleotide
  Sense strand starting at position 2457 of SEQ ID NO: 318225
gggauaaugacccguggag

SEQ ID NO: 546462 - RNA, 19 nt, Artificial Sequence
  Description of Artificial Sequence: Synthetic oligonucleotide
  Antisense strand to SEQ ID NO: 546461
cuccacgggucauuauccc

SEQ ID NO: 546463 - RNA, 19 nt, Artificial Sequence
  Description of Artificial Sequence: Synthetic oligonucleotide
  Sense strand starting at position 2459 of SEQ ID NO: 318225
gauaaugacccguggagug

SEQ ID NO: 546464 - RNA, 19 nt, Artificial Sequence
  Description of Artificial Sequence: Synthetic oligonucleotide
  Antisense strand to SEQ ID NO: 546463
cacuccacgggucauuauc

SEQ ID NO: 546465 - RNA, 19 nt, Artificial Sequence
  Description of Artificial Sequence: Synthetic oligonucleotide
  Sense strand starting at position 2461 of SEQ ID NO: 318225
uaaugacccguggagugau

SEQ ID NO: 546466 - RNA, 19 nt, Artificial Sequence
  Description of Artificial Sequence: Synthetic oligonucleotide
  Antisense strand to SEQ ID NO: 546465
aucacuccacgggucauua

SEQ ID NO: 546467 - RNA, 19 nt, Artificial Sequence
  Description of Artificial Sequence: Synthetic oligonucleotide
  Sense strand starting at position 2602 of SEQ ID NO: 318225
cuguguuugcuccuuugua

SEQ ID NO: 546468 - RNA, 19 nt, Artificial Sequence
  Description of Artificial Sequence: Synthetic oligonucleotide
  Antisense strand to SEQ ID NO: 546467
uacaaaggagcaaacacag

SEQ ID NO: 546469 - RNA, 19 nt, Artificial Sequence
  Description of Artificial Sequence: Synthetic oligonucleotide
  Sense strand starting at position 2829 of SEQ ID NO: 318225
guguauuggacugggagca

SEQ ID NO: 546470 - RNA, 19 nt, Artificial Sequence
  Description of Artificial Sequence: Synthetic oligonucleotide
  Antisense strand to SEQ ID NO: 546469
ugcucccaguccaauacac

SEQ ID NO: 546471 - RNA, 19 nt, Artificial Sequence
  Description of Artificial Sequence: Synthetic oligonucleotide
  Sense strand starting at position 2830 of SEQ ID NO: 318225
uguauuggacugggagcau

SEQ ID NO: 546472 - RNA, 19 nt, Artificial Sequence
  Description of Artificial Sequence: Synthetic oligonucleotide
  Antisense strand to SEQ ID NO: 546471
augcucccaguccaauaca

SEQ ID NO: 546473 - RNA, 19 nt, Artificial Sequence
  Description of Artificial Sequence: Synthetic oligonucleotide
  Sense strand starting at position 2864 of SEQ ID NO: 318225
auagguguuuacuugguaa

SEQ ID NO: 546474 - RNA, 19 nt, Artificial Sequence
  Description of Artificial Sequence: Synthetic oligonucleotide
  Antisense strand to SEQ ID NO: 546473
uuaccaaguaaacaccuau

SEQ ID NO: 546475 - RNA, 19 nt, Artificial Sequence
  Description of Artificial Sequence: Synthetic oligonucleotide
  Sense strand starting at position 2866 of SEQ ID NO: 318225
agguguuuacuugguaaag

SEQ ID NO: 546476 - RNA, 19 nt, Artificial Sequence
  Description of Artificial Sequence: Synthetic oligonucleotide
  Antisense strand to SEQ ID NO: 546475
cuuuaccaaguaaacaccu

SEQ ID NO: 546477 - RNA, 19 nt, Artificial Sequence
  Description of Artificial Sequence: Synthetic oligonucleotide
  Sense strand starting at position 2899 of SEQ ID NO: 318225
cguucucaccaagaacuuu

SEQ ID NO: 546478 - RNA, 19 nt, Artificial Sequence
  Description of Artificial Sequence: Synthetic oligonucleotide
  Antisense strand to SEQ ID NO: 546477
aaaguucuuggugagaacg

SEQ ID NO: 546479 - RNA, 19 nt, Artificial Sequence
  Description of Artificial Sequence: Synthetic oligonucleotide
  Sense strand starting at position 2969 of SEQ ID NO: 318225
ugagcuucuagagguaaca

SEQ ID NO: 546480 - RNA, 19 nt, Artificial Sequence
  Description of Artificial Sequence: Synthetic oligonucleotide
  Antisense strand to SEQ ID NO: 546479
uguuaccucuagaagcuca

SEQ ID NO: 546481 - RNA, 19 nt, Artificial Sequence
  Description of Artificial Sequence: Synthetic oligonucleotide
  Sense strand starting at position 3072 of SEQ ID NO: 318225
acagaugacgcuuagguuu

SEQ ID NO: 546482 - RNA, 19 nt, Artificial Sequence
  Description of Artificial Sequence: Synthetic oligonucleotide
  Antisense strand to SEQ ID NO: 546481
aaaccuaagcgucaucugu

SEQ ID NO: 546483 - RNA, 19 nt, Artificial Sequence
  Description of Artificial Sequence: Synthetic oligonucleotide
  Sense strand starting at position 3108 of SEQ ID NO: 318225
gggaauguuaauugaucca

SEQ ID NO: 546484 - RNA, 19 nt, Artificial Sequence
  Description of Artificial Sequence: Synthetic oligonucleotide
  Antisense strand to SEQ ID NO: 546483
uggaucaauuaacauuccc

SEQ ID NO: 546485 - RNA, 19 nt, Artificial Sequence
  Description of Artificial Sequence: Synthetic oligonucleotide
  Sense strand starting at position 3153 of SEQ ID NO: 318225
ggagaaacuguuugggauc

SEQ ID NO: 546486 - RNA, 19 nt, Artificial Sequence
  Description of Artificial Sequence: Synthetic oligonucleotide
  Antisense strand to SEQ ID NO: 546485
gaucccaaacaguuucucc

SEQ ID NO: 546487 - RNA, 19 nt, Artificial Sequence
  Description of Artificial Sequence: Synthetic oligonucleotide
  Sense strand starting at position 3166 of SEQ ID NO: 318225
gggaucaaagucugaguuu

SEQ ID NO: 546488 - RNA, 19 nt, Artificial Sequence
  Description of Artificial Sequence: Synthetic oligonucleotide
  Antisense strand to SEQ ID NO: 546487
aaacucagacuuugauccc

SEQ ID NO: 546489 - RNA, 19 nt, Artificial Sequence
  Description of Artificial Sequence: Synthetic oligonucleotide
  Sense strand starting at position 3279 of SEQ ID NO: 318225
auugacaucucaguuggaa

SEQ ID NO: 546490 - RNA, 19 nt, Artificial Sequence
  Description of Artificial Sequence: Synthetic oligonucleotide
  Antisense strand to SEQ ID NO: 546489
uuccaacugagaugucaau

SEQ ID NO: 546491 - RNA, 19 nt, Artificial Sequence
  Description of Artificial Sequence: Synthetic oligonucleotide
  Sense strand starting at position 3294 of SEQ ID NO: 318225
ggaauagcccuuuguccau

SEQ ID NO: 546492 - RNA, 19 nt, Artificial Sequence
  Description of Artificial Sequence: Synthetic oligonucleotide
  Antisense strand to SEQ ID NO: 546491
auggacaaagggcuauucc

SEQ ID NO: 546493 - RNA, 19 nt, Artificial Sequence
  Description of Artificial Sequence: Synthetic oligonucleotide
  Sense strand starting at position 3369 of SEQ ID NO: 318225
ucucacagguaucuugaau

SEQ ID NO: 546494 - RNA, 19 nt, Artificial Sequence
  Description of Artificial Sequence: Synthetic oligonucleotide
  Antisense strand to SEQ ID NO: 546493
auucaagauaccugugaga

SEQ ID NO: 546495 - RNA, 19 nt, Artificial Sequence
  Description of Artificial Sequence: Synthetic oligonucleotide
  Sense strand starting at position 3522 of SEQ ID NO: 318225
ugauucucgaaagaguagu

SEQ ID NO: 546496 - RNA, 19 nt, Artificial Sequence
  Description of Artificial Sequence: Synthetic oligonucleotide
  Antisense strand to SEQ ID NO: 546495
acuacucuuucgagaauca

SEQ ID NO: 546497 - RNA, 19 nt, Artificial Sequence
  Description of Artificial Sequence: Synthetic oligonucleotide
  Sense strand starting at position 3920 of SEQ ID NO: 318225
uucaguguuguguaaugga

SEQ ID NO: 546498 - RNA, 19 nt, Artificial Sequence
  Description of Artificial Sequence: Synthetic oligonucleotide
  Antisense strand to SEQ ID NO: 546497
uccauuacacaacacugaa

SEQ ID NO: 546499 - RNA, 19 nt, Artificial Sequence
  Description of Artificial Sequence: Synthetic oligonucleotide
  Sense strand starting at position 3925 of SEQ ID NO: 318225
uguuguguaauggaaggau

SEQ ID NO: 546500 - RNA, 19 nt, Artificial Sequence
  Description of Artificial Sequence: Synthetic oligonucleotide
  Antisense strand to SEQ ID NO: 546499
auccuuccauuacacaaca

SEQ ID NO: 546501 - RNA, 19 nt, Artificial Sequence
  Description of Artificial Sequence: Synthetic oligonucleotide
  Sense strand starting at position 3928 of SEQ ID NO: 318225
uguguaauggaaggaucuu

SEQ ID NO: 546502 - RNA, 19 nt, Artificial Sequence
  Description of Artificial Sequence: Synthetic oligonucleotide
  Antisense strand to SEQ ID NO: 546501
aagauccuuccauuacaca

SEQ ID NO: 546503 - RNA, 19 nt, Artificial Sequence
  Description of Artificial Sequence: Synthetic oligonucleotide
  Sense strand starting at position 3969 of SEQ ID NO: 318225
uuuauuagcuuugugaaac

SEQ ID NO: 546504 - RNA, 19 nt, Artificial Sequence
  Description of Artificial Sequence: Synthetic oligonucleotide
  Antisense strand to SEQ ID NO: 546503
guuucacaaagcuaauaaa

SEQ ID NO: 546505 - RNA, 19 nt, Artificial Sequence
  Description of Artificial Sequence: Synthetic oligonucleotide
  Sense strand starting at position 94 of SEQ ID NO: 318226
gaugcuaauuaaccagagu

SEQ ID NO: 546506 - RNA, 19 nt, Artificial Sequence
  Description of Artificial Sequence: Synthetic oligonucleotide
  Antisense strand to SEQ ID NO: 546505
acucugguuaauuagcauc

SEQ ID NO: 546507 - RNA, 19 nt, Artificial Sequence
  Description of Artificial Sequence: Synthetic oligonucleotide
  Sense strand starting at position 97 of SEQ ID NO: 318226
gcuaauuaaccagaguuag

SEQ ID NO: 546508 - RNA, 19 nt, Artificial Sequence
  Description of Artificial Sequence: Synthetic oligonucleotide
  Antisense strand to SEQ ID NO: 546507
cuaacucugguuaauuagc

SEQ ID NO: 546509 - RNA, 19 nt, Artificial Sequence
  Description of Artificial Sequence: Synthetic oligonucleotide
  Sense strand starting at position 254 of SEQ ID NO: 318226
guucgauaauuucuuucuu

SEQ ID NO: 546510 - RNA, 19 nt, Artificial Sequence
  Description of Artificial Sequence: Synthetic oligonucleotide
  Antisense strand to SEQ ID NO: 546509
aagaaagaaauuaucgaac

SEQ ID NO: 546511 - RNA, 19 nt, Artificial Sequence
  Description of Artificial Sequence: Synthetic oligonucleotide
  Sense strand starting at position 330 of SEQ ID NO: 318226
acagaucucucccuuguga

SEQ ID NO: 546512 - RNA, 19 nt, Artificial Sequence
  Description of Artificial Sequence: Synthetic oligonucleotide
  Antisense strand to SEQ ID NO: 546511
ucacaagggagagaucugu

SEQ ID NO: 546513 - RNA, 19 nt, Artificial Sequence
  Description of Artificial Sequence: Synthetic oligonucleotide
  Sense strand starting at position 446 of SEQ ID NO: 318226
uugguuugaacagguguga

SEQ ID NO: 546514 - RNA, 19 nt, Artificial Sequence
  Description of Artificial Sequence: Synthetic oligonucleotide
  Antisense strand to SEQ ID NO: 546513
ucacaccuguucaaaccaa

SEQ ID NO: 546515 - RNA, 19 nt, Artificial Sequence
  Description of Artificial Sequence: Synthetic oligonucleotide
  Sense strand starting at position 545 of SEQ ID NO: 318226
augugcuuuccagagcaag

SEQ ID NO: 546516 - RNA, 19 nt, Artificial Sequence
  Description of Artificial Sequence: Synthetic oligonucleotide
  Antisense strand to SEQ ID NO: 546515
cuugcucuggaaagcacau

SEQ ID NO: 546517 - RNA, 19 nt, Artificial Sequence
  Description of Artificial Sequence: Synthetic oligonucleotide
  Sense strand starting at position 594 of SEQ ID NO: 318226
aggagacccucuguuccua

SEQ ID NO: 546518 - RNA, 19 nt, Artificial Sequence
  Description of Artificial Sequence: Synthetic oligonucleotide
  Antisense strand to SEQ ID NO: 546517
uaggaacagagggucuccu

SEQ ID NO: 546519 - RNA, 19 nt, Artificial Sequence
  Description of Artificial Sequence: Synthetic oligonucleotide
  Sense strand starting at position 665 of SEQ ID NO: 318226
uuuguucuugccuaacaag

SEQ ID NO: 546520 - RNA, 19 nt, Artificial Sequence
  Description of Artificial Sequence: Synthetic oligonucleotide
  Antisense strand to SEQ ID NO: 546519
cuuguuaggcaagaacaaa

SEQ ID NO: 546521 - RNA, 19 nt, Artificial Sequence
  Description of Artificial Sequence: Synthetic oligonucleotide
  Sense strand starting at position 745 of SEQ ID NO: 318226
gguggucguggauaggaaa

SEQ ID NO: 546522 - RNA, 19 nt, Artificial Sequence
  Description of Artificial Sequence: Synthetic oligonucleotide
  Antisense strand to SEQ ID NO: 546521
uuuccuauccacgaccacc

SEQ ID NO: 546523 - RNA, 19 nt, Artificial Sequence
  Description of Artificial Sequence: Synthetic oligonucleotide
  Sense strand starting at position 766 of SEQ ID NO: 318226
agggaauuaugauaggaaa

SEQ ID NO: 546524 - RNA, 19 nt, Artificial Sequence
  Description of Artificial Sequence: Synthetic oligonucleotide
  Antisense strand to SEQ ID NO: 546523
uuuccuaucauaauucccu

SEQ ID NO: 546525 - RNA, 19 nt, Artificial Sequence
  Description of Artificial Sequence: Synthetic oligonucleotide
  Sense strand starting at position 1117 of SEQ ID NO: 318226
cccaguauuugguuugguu

SEQ ID NO: 546526 - RNA, 19 nt, Artificial Sequence
  Description of Artificial Sequence: Synthetic oligonucleotide
  Antisense strand to SEQ ID NO: 546525
aaccaaaccaaauacuggg

SEQ ID NO: 546527 - RNA, 19 nt, Artificial Sequence
  Description of Artificial Sequence: Synthetic oligonucleotide
  Sense strand starting at position 1121 of SEQ ID NO: 318226
guauuugguuugguuugau

SEQ ID NO: 546528 - RNA, 19 nt, Artificial Sequence
  Description of Artificial Sequence: Synthetic oligonucleotide
  Antisense strand to SEQ ID NO: 546527
aucaaaccaaaccaaauac

SEQ ID NO: 546529 - RNA, 19 nt, Artificial Sequence
  Description of Artificial Sequence: Synthetic oligonucleotide
  Sense strand starting at position 1287 of SEQ ID NO: 318226
cgucgucucgcaccaacaa

SEQ ID NO: 546530 - RNA, 19 nt, Artificial Sequence
  Description of Artificial Sequence: Synthetic oligonucleotide
  Antisense strand to SEQ ID NO: 546529
uuguuggugcgagacgacg

SEQ ID NO: 546531 - RNA, 19 nt, Artificial Sequence
  Description of Artificial Sequence: Synthetic oligonucleotide
  Sense strand starting at position 1629 of SEQ ID NO: 318226
ccgaaagcucuccaaaccu

SEQ ID NO: 546532 - RNA, 19 nt, Artificial Sequence
  Description of Artificial Sequence: Synthetic oligonucleotide
  Antisense strand to SEQ ID NO: 546531
agguuuggagagcuuucgg

SEQ ID NO: 546533 - RNA, 19 nt, Artificial Sequence
  Description of Artificial Sequence: Synthetic oligonucleotide
  Sense strand starting at position 1668 of SEQ ID NO: 318226
ggugccaucacuuaggcau

SEQ ID NO: 546534 - RNA, 19 nt, Artificial Sequence
  Description of Artificial Sequence: Synthetic oligonucleotide
  Antisense strand to SEQ ID NO: 546533
augccuaagugauggcacc

SEQ ID NO: 546535 - RNA, 19 nt, Artificial Sequence
  Description of Artificial Sequence: Synthetic oligonucleotide
  Sense strand starting at position 1679 of SEQ ID NO: 318226
uuaggcaugauugguuaaa

SEQ ID NO: 546536 - RNA, 19 nt, Artificial Sequence
  Description of Artificial Sequence: Synthetic oligonucleotide
  Antisense strand to SEQ ID NO: 546535
uuuaaccaaucaugccuaa

SEQ ID NO: 546537 - RNA, 19 nt, Artificial Sequence
  Description of Artificial Sequence: Synthetic oligonucleotide
  Sense strand starting at position 1690 of SEQ ID NO: 318226
ugguuaaaucacuggcaac

SEQ ID NO: 546538 - RNA, 19 nt, Artificial Sequence
  Description of Artificial Sequence: Synthetic oligonucleotide
  Antisense strand to SEQ ID NO: 546537
guugccagugauuuaacca

SEQ ID NO: 546539 - RNA, 19 nt, Artificial Sequence
  Description of Artificial Sequence: Synthetic oligonucleotide
  Sense strand starting at position 1703 of SEQ ID NO: 318226
ggcaacuggugguuaauca

SEQ ID NO: 546540 - RNA, 19 nt, Artificial Sequence
  Description of Artificial Sequence: Synthetic oligonucleotide
  Antisense strand to SEQ ID NO: 546539
ugauuaaccaccaguugcc

SEQ ID NO: 546541 - RNA, 19 nt, Artificial Sequence
  Description of Artificial Sequence: Synthetic oligonucleotide
  Sense strand starting at position 1704 of SEQ ID NO: 318226
gcaacuggugguuaaucaa

SEQ ID NO: 546542 - RNA, 19 nt, Artificial Sequence
  Description of Artificial Sequence: Synthetic oligonucleotide
  Antisense strand to SEQ ID NO: 546541
uugauuaaccaccaguugc

SEQ ID NO: 546543 - RNA, 19 nt, Artificial Sequence
  Description of Artificial Sequence: Synthetic oligonucleotide
  Sense strand starting at position 1868 of SEQ ID NO: 318226
cucuuaucacuuggagauu

SEQ ID NO: 546544 - RNA, 19 nt, Artificial Sequence
  Description of Artificial Sequence: Synthetic oligonucleotide
  Antisense strand to SEQ ID NO: 546543
aaucuccaagugauaagag

SEQ ID NO: 546545 - RNA, 19 nt, Artificial Sequence
  Description of Artificial Sequence: Synthetic oligonucleotide
  Sense strand starting at position 1978 of SEQ ID NO: 318226
aggguuucuggagaucugu

SEQ ID NO: 546546 - RNA, 19 nt, Artificial Sequence
  Description of Artificial Sequence: Synthetic oligonucleotide
  Antisense strand to SEQ ID NO: 546545
acagaucuccagaaacccu

SEQ ID NO: 546547 - RNA, 19 nt, Artificial Sequence
  Description of Artificial Sequence: Synthetic oligonucleotide
  Sense strand starting at position 2180 of SEQ ID NO: 318226
aagguuaaccagugaucug

SEQ ID NO: 546548 - RNA, 19 nt, Artificial Sequence
  Description of Artificial Sequence: Synthetic oligonucleotide
  Antisense strand to SEQ ID NO: 546547
cagaucacugguuaaccuu

SEQ ID NO: 546549 - RNA, 19 nt, Artificial Sequence
  Description of Artificial Sequence: Synthetic oligonucleotide
  Sense strand starting at position 2652 of SEQ ID NO: 318226
guaugugaaccacaguuaa

SEQ ID NO: 546550 - RNA, 19 nt, Artificial Sequence
  Description of Artificial Sequence: Synthetic oligonucleotide
  Antisense strand to SEQ ID NO: 546549
uuaacugugguucacauac

SEQ ID NO: 546551 - RNA, 19 nt, Artificial Sequence
  Description of Artificial Sequence: Synthetic oligonucleotide
  Sense strand starting at position 2663 of SEQ ID NO: 318226
acaguuaagcucuagucca

SEQ ID NO: 546552 - RNA, 19 nt, Artificial Sequence
  Description of Artificial Sequence: Synthetic oligonucleotide
  Antisense strand to SEQ ID NO: 546551
uggacuagagcuuaacugu

SEQ ID NO: 546553 - RNA, 19 nt, Artificial Sequence
  Description of Artificial Sequence: Synthetic oligonucleotide
  Sense strand starting at position 3056 of SEQ ID NO: 318226
cuccuucuggacuguuuaa

SEQ ID NO: 546554 - RNA, 19 nt, Artificial Sequence
  Description of Artificial Sequence: Synthetic oligonucleotide
  Antisense strand to SEQ ID NO: 546553
uuaaacaguccagaaggag

SEQ ID NO: 546555 - RNA, 19 nt, Artificial Sequence
  Description of Artificial Sequence: Synthetic oligonucleotide
  Sense strand starting at position 3113 of SEQ ID NO: 318226
uguaguaucugauuaugac

SEQ ID NO: 546556 - RNA, 19 nt, Artificial Sequence
  Description of Artificial Sequence: Synthetic oligonucleotide
  Antisense strand to SEQ ID NO: 546555
gucauaaucagauacuaca

SEQ ID NO: 546557 - RNA, 19 nt, Artificial Sequence
  Description of Artificial Sequence: Synthetic oligonucleotide
  Sense strand starting at position 3114 of SEQ ID NO: 318226
guaguaucugauuaugaca

SEQ ID NO: 546558 - RNA, 19 nt, Artificial Sequence
  Description of Artificial Sequence: Synthetic oligonucleotide
  Antisense strand to SEQ ID NO: 546557
ugucauaaucagauacuac

SEQ ID NO: 546559 - RNA, 19 nt, Artificial Sequence
  Description of Artificial Sequence: Synthetic oligonucleotide
  Sense strand starting at position 3163 of SEQ ID NO: 318226
uugauuagguccucuaaua

SEQ ID NO: 546560 - RNA, 19 nt, Artificial Sequence
  Description of Artificial Sequence: Synthetic oligonucleotide
  Antisense strand to SEQ ID NO: 546559
uauuagaggaccuaaucaa

SEQ ID NO: 546561 - RNA, 19 nt, Artificial Sequence
  Description of Artificial Sequence: Synthetic oligonucleotide
  Sense strand starting at position 3232 of SEQ ID NO: 318226
gguauaaauucuucuaaag

SEQ ID NO: 546562 - RNA, 19 nt, Artificial Sequence
  Description of Artificial Sequence: Synthetic oligonucleotide
  Antisense strand to SEQ ID NO: 546561
cuuuagaagaauuuauacc

SEQ ID NO: 546563 - RNA, 19 nt, Artificial Sequence
  Description of Artificial Sequence: Synthetic oligonucleotide
  Sense strand starting at position 3255 of SEQ ID NO: 318226
agcauuaaacaugauguuu

SEQ ID NO: 546564 - RNA, 19 nt, Artificial Sequence
  Description of Artificial Sequence: Synthetic oligonucleotide
  Antisense strand to SEQ ID NO: 546563
aaacaucauguuuaaugcu

SEQ ID NO: 546565 - RNA, 19 nt, Artificial Sequence
  Description of Artificial Sequence: Synthetic oligonucleotide
  Sense strand starting at position 3261 of SEQ ID NO: 318226
aaacaugauguuugaugua

SEQ ID NO: 546566 - RNA, 19 nt, Artificial Sequence
  Description of Artificial Sequence: Synthetic oligonucleotide
  Antisense strand to SEQ ID NO: 546565
uacaucaaacaucauguuu

SEQ ID NO: 546567 - RNA, 19 nt, Artificial Sequence
  Description of Artificial Sequence: Synthetic oligonucleotide
  Sense strand starting at position 3266 of SEQ ID NO: 318226
ugauguuugauguagauuc

SEQ ID NO: 546568 - RNA, 19 nt, Artificial Sequence
  Description of Artificial Sequence: Synthetic oligonucleotide
  Antisense strand to SEQ ID NO: 546567
gaaucuacaucaaacauca

SEQ ID NO: 546569 - RNA, 19 nt, Artificial Sequence
  Description of Artificial Sequence: Synthetic oligonucleotide
  Sense strand starting at position 3268 of SEQ ID NO: 318226
auguuugauguagauucuu

SEQ ID NO: 546570 - RNA, 19 nt, Artificial Sequence
  Description of Artificial Sequence: Synthetic oligonucleotide
  Antisense strand to SEQ ID NO: 546569
aagaaucuacaucaaacau

SEQ ID NO: 546571 - RNA, 19 nt, Artificial Sequence
  Description of Artificial Sequence: Synthetic oligonucleotide
  Sense strand starting at position 3276 of SEQ ID NO: 318226
uguagauucuuaguggaua

SEQ ID NO: 546572 - RNA, 19 nt, Artificial Sequence
  Description of Artificial Sequence: Synthetic oligonucleotide
  Antisense strand to SEQ ID NO: 546571
uauccacuaagaaucuaca

SEQ ID NO: 546573 - RNA, 19 nt, Artificial Sequence
  Description of Artificial Sequence: Synthetic oligonucleotide
  Sense strand starting at position 3287 of SEQ ID NO: 318226
aguggauacucuuuagcag

SEQ ID NO: 546574 - RNA, 19 nt, Artificial Sequence
  Description of Artificial Sequence: Synthetic oligonucleotide
  Antisense strand to SEQ ID NO: 546573
cugcuaaagaguauccacu

SEQ ID NO: 546575 - RNA, 19 nt, Artificial Sequence
  Description of Artificial Sequence: Synthetic oligonucleotide
  Sense strand starting at position 3288 of SEQ ID NO: 318226
guggauacucuuuagcagu

SEQ ID NO: 546576 - RNA, 19 nt, Artificial Sequence
  Description of Artificial Sequence: Synthetic oligonucleotide
  Antisense strand to SEQ ID NO: 546575
acugcuaaagaguauccac

SEQ ID NO: 546577 - RNA, 19 nt, Artificial Sequence
  Description of Artificial Sequence: Synthetic oligonucleotide
  Sense strand starting at position 3290 of SEQ ID NO: 318226
ggauacucuuuagcaguua

SEQ ID NO: 546578 - RNA, 19 nt, Artificial Sequence
  Description of Artificial Sequence: Synthetic oligonucleotide
  Antisense strand to SEQ ID NO: 546577
uaacugcuaaagaguaucc

SEQ ID NO: 546579 - RNA, 19 nt, Artificial Sequence
  Description of Artificial Sequence: Synthetic oligonucleotide
  Sense strand starting at position 3340 of SEQ ID NO: 318226
acuaccuaauuugaagaga

SEQ ID NO: 546580 - RNA, 19 nt, Artificial Sequence
  Description of Artificial Sequence: Synthetic oligonucleotide
  Antisense strand to SEQ ID NO: 546579
ucucuucaaauuagguagu

SEQ ID NO: 546581 - RNA, 19 nt, Artificial Sequence
  Description of Artificial Sequence: Synthetic oligonucleotide
  Sense strand starting at position 3464 of SEQ ID NO: 318226
auauguguauacucacuga

SEQ ID NO: 546582 - RNA, 19 nt, Artificial Sequence
  Description of Artificial Sequence: Synthetic oligonucleotide
  Antisense strand to SEQ ID NO: 546581
ucagugaguauacacauau

SEQ ID NO: 546583 - RNA, 19 nt, Artificial Sequence
  Description of Artificial Sequence: Synthetic oligonucleotide
  Sense strand starting at position 3513 of SEQ ID NO: 318226
auguaucuucuuugguaag

SEQ ID NO: 546584 - RNA, 19 nt, Artificial Sequence
  Description of Artificial Sequence: Synthetic oligonucleotide
  Antisense strand to SEQ ID NO: 546583
cuuaccaaagaagauacau

SEQ ID NO: 546585 - RNA, 19 nt, Artificial Sequence
  Description of Artificial Sequence: Synthetic oligonucleotide
  Sense strand starting at position 3673 of SEQ ID NO: 318227
caacgcaggucacugaaua

SEQ ID NO: 546586 - RNA, 19 nt, Artificial Sequence
  Description of Artificial Sequence: Synthetic oligonucleotide
  Antisense strand to SEQ ID NO: 546585
uauucagugaccugcguug

SEQ ID NO: 546587 - RNA, 19 nt, Artificial Sequence
  Description of Artificial Sequence: Synthetic oligonucleotide
  Sense strand starting at position 3674 of SEQ ID NO: 318227
aacgcaggucacugaauau

SEQ ID NO: 546588 - RNA, 19 nt, Artificial Sequence
  Description of Artificial Sequence: Synthetic oligonucleotide
  Antisense strand to SEQ ID NO: 546587
auauucagugaccugcguu

SEQ ID NO: 546589 - RNA, 19 nt, Artificial Sequence
  Description of Artificial Sequence: Synthetic oligonucleotide
  Sense strand starting at position 3670 of SEQ ID NO: 318228
caacgcaggucacugaaua

SEQ ID NO: 546590 - RNA, 19 nt, Artificial Sequence
  Description of Artificial Sequence: Synthetic oligonucleotide
  Antisense strand to SEQ ID NO: 546589
uauucagugaccugcguug

SEQ ID NO: 546591 - RNA, 19 nt, Artificial Sequence
  Description of Artificial Sequence: Synthetic oligonucleotide
  Sense strand starting at position 3671 of SEQ ID NO: 318228
aacgcaggucacugaauau

SEQ ID NO: 546592 - RNA, 19 nt, Artificial Sequence
  Description of Artificial Sequence: Synthetic oligonucleotide
  Antisense strand to SEQ ID NO: 546591
auauucagugaccugcguu

SEQ ID NO: 546593 - RNA, 19 nt, Artificial Sequence
  Description of Artificial Sequence: Synthetic oligonucleotide
  Sense strand starting at position 49 of SEQ ID NO: 318229
auuaccuuugguuaucuau

SEQ ID NO: 546594 - RNA, 19 nt, Artificial Sequence
  Description of Artificial Sequence: Synthetic oligonucleotide
  Antisense strand to SEQ ID NO: 546593
auagauaaccaaagguaau

SEQ ID NO: 546595 - RNA, 19 nt, Artificial Sequence
  Description of Artificial Sequence: Synthetic oligonucleotide
  Sense strand starting at position 56 of SEQ ID NO: 318229
uugguuaucuauuugguuu

SEQ ID NO: 546596 - RNA, 19 nt, Artificial Sequence
  Description of Artificial Sequence: Synthetic oligonucleotide
  Antisense strand to SEQ ID NO: 546595
aaaccaaauagauaaccaa

SEQ ID NO: 546597 - RNA, 19 nt, Artificial Sequence
  Description of Artificial Sequence: Synthetic oligonucleotide
  Sense strand starting at position 234 of SEQ ID NO: 318229
auauucuagcaguauguca

SEQ ID NO: 546598 - RNA, 19 nt, Artificial Sequence
  Description of Artificial Sequence: Synthetic oligonucleotide
  Antisense strand to SEQ ID NO: 546597
ugacauacugcuagaauau

SEQ ID NO: 546599 - RNA, 19 nt, Artificial Sequence
  Description of Artificial Sequence: Synthetic oligonucleotide
  Sense strand starting at position 245 of SEQ ID NO: 318229
guaugucagcauuaccuaa

SEQ ID NO: 546600 - RNA, 19 nt, Artificial Sequence
  Description of Artificial Sequence: Synthetic oligonucleotide
  Antisense strand to SEQ ID NO: 546599
uuagguaaugcugacauac

SEQ ID NO: 546601 - RNA, 19 nt, Artificial Sequence
  Description of Artificial Sequence: Synthetic oligonucleotide
  Sense strand starting at position 470 of SEQ ID NO: 318229
aagcaugugcuagauccau

SEQ ID NO: 546602 - RNA, 19 nt, Artificial Sequence
  Description of Artificial Sequence: Synthetic oligonucleotide
  Antisense strand to SEQ ID NO: 546601
auggaucuagcacaugcuu

SEQ ID NO: 546603 - RNA, 19 nt, Artificial Sequence
  Description of Artificial Sequence: Synthetic oligonucleotide
  Sense strand starting at position 483 of SEQ ID NO: 318229
auccaugugcucugaagag

SEQ ID NO: 546604 - RNA, 19 nt, Artificial Sequence
  Description of Artificial Sequence: Synthetic oligonucleotide
  Antisense strand to SEQ ID NO: 546603
cucuucagagcacauggau

SEQ ID NO: 546605 - RNA, 19 nt, Artificial Sequence
  Description of Artificial Sequence: Synthetic oligonucleotide
  Sense strand starting at position 489 of SEQ ID NO: 318229
gugcucugaagagaucuaa

SEQ ID NO: 546606 - RNA, 19 nt, Artificial Sequence
  Description of Artificial Sequence: Synthetic oligonucleotide
  Antisense strand to SEQ ID NO: 546605
uuagaucucuucagagcac

SEQ ID NO: 546607 - RNA, 19 nt, Artificial Sequence
  Description of Artificial Sequence: Synthetic oligonucleotide
  Sense strand starting at position 526 of SEQ ID NO: 318229
caauuugggccguguuuau

SEQ ID NO: 546608 - RNA, 19 nt, Artificial Sequence
  Description of Artificial Sequence: Synthetic oligonucleotide
  Antisense strand to SEQ ID NO: 546607
auaaacacggcccaaauug

SEQ ID NO: 546609 - RNA, 19 nt, Artificial Sequence
  Description of Artificial Sequence: Synthetic oligonucleotide
  Sense strand starting at position 609 of SEQ ID NO: 318229
gcaacacauggcugaugau

SEQ ID NO: 546610 - RNA, 19 nt, Artificial Sequence
  Description of Artificial Sequence: Synthetic oligonucleotide
  Antisense strand to SEQ ID NO: 546609
aucaucagccauguguugc

SEQ ID NO: 546611 - RNA, 19 nt, Artificial Sequence
  Description of Artificial Sequence: Synthetic oligonucleotide
  Sense strand starting at position 717 of SEQ ID NO: 318229
aauuguagaucgucuaaga

SEQ ID NO: 546612 - RNA, 19 nt, Artificial Sequence
  Description of Artificial Sequence: Synthetic oligonucleotide
  Antisense strand to SEQ ID NO: 546611
ucuuagacgaucuacaauu

SEQ ID NO: 546613 - RNA, 19 nt, Artificial Sequence
  Description of Artificial Sequence: Synthetic oligonucleotide
  Sense strand starting at position 726 of SEQ ID NO: 318229
ucgucuaagauaggacauu

SEQ ID NO: 546614 - RNA, 19 nt, Artificial Sequence
  Description of Artificial Sequence: Synthetic oligonucleotide
  Antisense strand to SEQ ID NO: 546613
aauguccuaucuuagacga

SEQ ID NO: 546615 - RNA, 19 nt, Artificial Sequence
  Description of Artificial Sequence: Synthetic oligonucleotide
  Sense strand starting at position 762 of SEQ ID NO: 318229
gauugacaucuguaugcac

SEQ ID NO: 546616 - RNA, 19 nt, Artificial Sequence
  Description of Artificial Sequence: Synthetic oligonucleotide
  Antisense strand to SEQ ID NO: 546615
gugcauacagaugucaauc

SEQ ID NO: 546617 - RNA, 19 nt, Artificial Sequence
  Description of Artificial Sequence: Synthetic oligonucleotide
  Sense strand starting at position 860 of SEQ ID NO: 318229
ccaccauuacuguauguua

SEQ ID NO: 546618 - RNA, 19 nt, Artificial Sequence
  Description of Artificial Sequence: Synthetic oligonucleotide
  Antisense strand to SEQ ID NO: 546617
uaacauacaguaauggugg

SEQ ID NO: 546619 - RNA, 19 nt, Artificial Sequence
  Description of Artificial Sequence: Synthetic oligonucleotide
  Sense strand starting at position 862 of SEQ ID NO: 318229
accauuacuguauguuaga

SEQ ID NO: 546620 - RNA, 19 nt, Artificial Sequence
  Description of Artificial Sequence: Synthetic oligonucleotide
  Antisense strand to SEQ ID NO: 546619
ucuaacauacaguaauggu

SEQ ID NO: 546621 - RNA, 19 nt, Artificial Sequence
  Description of Artificial Sequence: Synthetic oligonucleotide
  Sense strand starting at position 863 of SEQ ID NO: 318229
ccauuacuguauguuagau

SEQ ID NO: 546622 - RNA, 19 nt, Artificial Sequence
  Description of Artificial Sequence: Synthetic oligonucleotide
  Antisense strand to SEQ ID NO: 546621
aucuaacauacaguaaugg

SEQ ID NO: 546623 - RNA, 19 nt, Artificial Sequence
  Description of Artificial Sequence: Synthetic oligonucleotide
  Sense strand starting at position 900 of SEQ ID NO: 318229
ugcagaaggucucuaaauu

SEQ ID NO: 546624 - RNA, 19 nt, Artificial Sequence
  Description of Artificial Sequence: Synthetic oligonucleotide
  Antisense strand to SEQ ID NO: 546623
aauuuagagaccuucugca

SEQ ID NO: 546625 - RNA, 19 nt, Artificial Sequence
  Description of Artificial Sequence: Synthetic oligonucleotide
  Sense strand starting at position 1256 of SEQ ID NO: 318229
cucugaaacccugagcaau

SEQ ID NO: 546626 - RNA, 19 nt, Artificial Sequence
  Description of Artificial Sequence: Synthetic oligonucleotide
  Antisense strand to SEQ ID NO: 546625
auugcucaggguuucagag

SEQ ID NO: 546627 - RNA, 19 nt, Artificial Sequence
  Description of Artificial Sequence: Synthetic oligonucleotide
  Sense strand starting at position 2107 of SEQ ID NO: 318229
gguguaguugcuccgacga

SEQ ID NO: 546628 - RNA, 19 nt, Artificial Sequence
  Description of Artificial Sequence: Synthetic oligonucleotide
  Antisense strand to SEQ ID NO: 546627
ucgucggagcaacuacacc

SEQ ID NO: 546629 - RNA, 19 nt, Artificial Sequence
  Description of Artificial Sequence: Synthetic oligonucleotide
  Sense strand starting at position 2468 of SEQ ID NO: 318229
ugccaccaugacugugaaa

SEQ ID NO: 546630 - RNA, 19 nt, Artificial Sequence
  Description of Artificial Sequence: Synthetic oligonucleotide
  Antisense strand to SEQ ID NO: 546629
uuucacagucaugguggca

SEQ ID NO: 546631 - RNA, 19 nt, Artificial Sequence
  Description of Artificial Sequence: Synthetic oligonucleotide
  Sense strand starting at position 2543 of SEQ ID NO: 318229
gcacccauuuguuugguau

SEQ ID NO: 546632 - RNA, 19 nt, Artificial Sequence
  Description of Artificial Sequence: Synthetic oligonucleotide
  Antisense strand to SEQ ID NO: 546631
auaccaaacaaaugggugc

SEQ ID NO: 546633 - RNA, 19 nt, Artificial Sequence
  Description of Artificial Sequence: Synthetic oligonucleotide
  Sense strand starting at position 2628 of SEQ ID NO: 318229
uugagaacugcuuggaucu

SEQ ID NO: 546634 - RNA, 19 nt, Artificial Sequence
  Description of Artificial Sequence: Synthetic oligonucleotide
  Antisense strand to SEQ ID NO: 546633
agauccaagcaguucucaa

SEQ ID NO: 546635 - RNA, 19 nt, Artificial Sequence
  Description of Artificial Sequence: Synthetic oligonucleotide
  Sense strand starting at position 2855 of SEQ ID NO: 318229
gauugucuuguggaagaac

SEQ ID NO: 546636 - RNA, 19 nt, Artificial Sequence
  Description of Artificial Sequence: Synthetic oligonucleotide
  Antisense strand to SEQ ID NO: 546635
guucuuccacaagacaauc

SEQ ID NO: 546637 - RNA, 19 nt, Artificial Sequence
  Description of Artificial Sequence: Synthetic oligonucleotide
  Sense strand starting at position 2904 of SEQ ID NO: 318229
gagauacaauuaucagugu

SEQ ID NO: 546638 - RNA, 19 nt, Artificial Sequence
  Description of Artificial Sequence: Synthetic oligonucleotide
  Antisense strand to SEQ ID NO: 546637
acacugauaauuguaucuc

SEQ ID NO: 546639 - RNA, 19 nt, Artificial Sequence
  Description of Artificial Sequence: Synthetic oligonucleotide
  Sense strand starting at position 2907 of SEQ ID NO: 318229
auacaauuaucaguguuuc

SEQ ID NO: 546640 - RNA, 19 nt, Artificial Sequence
  Description of Artificial Sequence: Synthetic oligonucleotide
  Antisense strand to SEQ ID NO: 546639
gaaacacugauaauuguau

SEQ ID NO: 546641 - RNA, 19 nt, Artificial Sequence
  Description of Artificial Sequence: Synthetic oligonucleotide
  Sense strand starting at position 2931 of SEQ ID NO: 318229
ugaggaaguuaugcccaaa

SEQ ID NO: 546642 - RNA, 19 nt, Artificial Sequence
  Description of Artificial Sequence: Synthetic oligonucleotide
  Antisense strand to SEQ ID NO: 546641
uuugggcauaacuuccuca

SEQ ID NO: 546643 - RNA, 19 nt, Artificial Sequence
  Description of Artificial Sequence: Synthetic oligonucleotide
  Sense strand starting at position 3023 of SEQ ID NO: 318229
uuucuuacccaguauugca

SEQ ID NO: 546644 - RNA, 19 nt, Artificial Sequence
  Description of Artificial Sequence: Synthetic oligonucleotide
  Antisense strand to SEQ ID NO: 546643
ugcaauacuggguaagaaa

SEQ ID NO: 546645 - RNA, 19 nt, Artificial Sequence
  Description of Artificial Sequence: Synthetic oligonucleotide
  Sense strand starting at position 3049 of SEQ ID NO: 318229
auuauaagcuuugugaaga

SEQ ID NO: 546646 - RNA, 19 nt, Artificial Sequence
  Description of Artificial Sequence: Synthetic oligonucleotide
  Antisense strand to SEQ ID NO: 546645
ucuucacaaagcuuauaau

SEQ ID NO: 546647 - RNA, 19 nt, Artificial Sequence
  Description of Artificial Sequence: Synthetic oligonucleotide
  Sense strand starting at position 3116 of SEQ ID NO: 318229
acaguauagcuauauagca

SEQ ID NO: 546648 - RNA, 19 nt, Artificial Sequence
  Description of Artificial Sequence: Synthetic oligonucleotide
  Antisense strand to SEQ ID NO: 546647
ugcuauauagcuauacugu

SEQ ID NO: 546649 - RNA, 19 nt, Artificial Sequence
  Description of Artificial Sequence: Synthetic oligonucleotide
  Sense strand starting at position 3273 of SEQ ID NO: 318229
caguguagagguuauauua

SEQ ID NO: 546650 - RNA, 19 nt, Artificial Sequence
  Description of Artificial Sequence: Synthetic oligonucleotide
  Antisense strand to SEQ ID NO: 546649
uaauauaaccucuacacug

SEQ ID NO: 546651 - RNA, 19 nt, Artificial Sequence
  Description of Artificial Sequence: Synthetic oligonucleotide
  Sense strand starting at position 3348 of SEQ ID NO: 318229
agagaacuguguuuagaac

SEQ ID NO: 546652 - RNA, 19 nt, Artificial Sequence
  Description of Artificial Sequence: Synthetic oligonucleotide
  Antisense strand to SEQ ID NO: 546651
guucuaaacacaguucucu

SEQ ID NO: 546653 - RNA, 19 nt, Artificial Sequence
  Description of Artificial Sequence: Synthetic oligonucleotide
  Sense strand starting at position 3376 of SEQ ID NO: 318229
gguuucuguauauaugaga

SEQ ID NO: 546654 - RNA, 19 nt, Artificial Sequence
  Description of Artificial Sequence: Synthetic oligonucleotide
  Antisense strand to SEQ ID NO: 546653
ucucauauauacagaaacc

SEQ ID NO: 546655 - RNA, 19 nt, Artificial Sequence
  Description of Artificial Sequence: Synthetic oligonucleotide
  Sense strand starting at position 3415 of SEQ ID NO: 318229
ucuagauguuuaccaucuu

SEQ ID NO: 546656 - RNA, 19 nt, Artificial Sequence
  Description of Artificial Sequence: Synthetic oligonucleotide
  Antisense strand to SEQ ID NO: 546655
aagaugguaaacaucuaga

SEQ ID NO: 546657 - RNA, 19 nt, Artificial Sequence
  Description of Artificial Sequence: Synthetic oligonucleotide
  Sense strand starting at position 3583 of SEQ ID NO: 318229
ucaguuguuguuuauaauc

SEQ ID NO: 546658 - RNA, 19 nt, Artificial Sequence
  Description of Artificial Sequence: Synthetic oligonucleotide
  Antisense strand to SEQ ID NO: 546657
gauuauaaacaacaacuga

SEQ ID NO: 546659 - RNA, 19 nt, Artificial Sequence
  Description of Artificial Sequence: Synthetic oligonucleotide
  Sense strand starting at position 3588 of SEQ ID NO: 318229
uguuguuuauaauccagaa

SEQ ID NO: 546660 - RNA, 19 nt, Artificial Sequence
  Description of Artificial Sequence: Synthetic oligonucleotide
  Antisense strand to SEQ ID NO: 546659
uucuggauuauaaacaaca

SEQ ID NO: 546661 - RNA, 19 nt, Artificial Sequence
  Description of Artificial Sequence: Synthetic oligonucleotide
  Sense strand starting at position 3706 of SEQ ID NO: 318229
aaaugucagcaguggaaag

SEQ ID NO: 546662 - RNA, 19 nt, Artificial Sequence
  Description of Artificial Sequence: Synthetic oligonucleotide
  Antisense strand to SEQ ID NO: 546661
cuuuccacugcugacauuu

SEQ ID NO: 546663 - RNA, 19 nt, Artificial Sequence
  Description of Artificial Sequence: Synthetic oligonucleotide
  Sense strand starting at position 3732 of SEQ ID NO: 318229
ccagacuucuuuguccaga

SEQ ID NO: 546664 - RNA, 19 nt, Artificial Sequence
  Description of Artificial Sequence: Synthetic oligonucleotide
  Antisense strand to SEQ ID NO: 546663
ucuggacaaagaagucugg

SEQ ID NO: 546665 - RNA, 19 nt, Artificial Sequence
  Description of Artificial Sequence: Synthetic oligonucleotide
  Sense strand starting at position 3734 of SEQ ID NO: 318229
agacuucuuuguccagauu

SEQ ID NO: 546666 - RNA, 19 nt, Artificial Sequence
  Description of Artificial Sequence: Synthetic oligonucleotide
  Antisense strand to SEQ ID NO: 546665
aaucuggacaaagaagucu

SEQ ID NO: 546667 - RNA, 19 nt, Artificial Sequence
  Description of Artificial Sequence: Synthetic oligonucleotide
  Sense strand starting at position 3735 of SEQ ID NO: 318229
gacuucuuuguccagauug

SEQ ID NO: 546668 - RNA, 19 nt, Artificial Sequence
  Description of Artificial Sequence: Synthetic oligonucleotide
  Antisense strand to SEQ ID NO: 546667
caaucuggacaaagaaguc

SEQ ID NO: 546669 - RNA, 19 nt, Artificial Sequence
  Description of Artificial Sequence: Synthetic oligonucleotide
  Sense strand starting at position 3759 of SEQ ID NO: 318229
auuuacguguaagaaagaa

SEQ ID NO: 546670 - RNA, 19 nt, Artificial Sequence
  Description of Artificial Sequence: Synthetic oligonucleotide
  Antisense strand to SEQ ID NO: 546669
uucuuucuuacacguaaau

SEQ ID NO: 546671 - RNA, 19 nt, Artificial Sequence
  Description of Artificial Sequence: Synthetic oligonucleotide
  Sense strand starting at position 3834 of SEQ ID NO: 318229
gagccugagacucgaggau

SEQ ID NO: 546672 - RNA, 19 nt, Artificial Sequence
  Description of Artificial Sequence: Synthetic oligonucleotide
  Antisense strand to SEQ ID NO: 546671
auccucgagucucaggcuc

SEQ ID NO: 546673 - RNA, 19 nt, Artificial Sequence
  Description of Artificial Sequence: Synthetic oligonucleotide
  Sense strand starting at position 19 of SEQ ID NO: 318230
gggacuguuaucugcagcu

SEQ ID NO: 546674 - RNA, 19 nt, Artificial Sequence
  Description of Artificial Sequence: Synthetic oligonucleotide
  Antisense strand to SEQ ID NO: 546673
agcugcagauaacaguccc

SEQ ID NO: 546675 - RNA, 19 nt, Artificial Sequence
  Description of Artificial Sequence: Synthetic oligonucleotide
  Sense strand starting at position 21 of SEQ ID NO: 318230
gacuguuaucugcagcuua

SEQ ID NO: 546676 - RNA, 19 nt, Artificial Sequence
  Description of Artificial Sequence: Synthetic oligonucleotide
  Antisense strand to SEQ ID NO: 546675
uaagcugcagauaacaguc

SEQ ID NO: 546677 - RNA, 19 nt, Artificial Sequence
  Description of Artificial Sequence: Synthetic oligonucleotide
  Sense strand starting at position 86 of SEQ ID NO: 318230
ggaggauucgagggucaca

SEQ ID NO: 546678 - RNA, 19 nt, Artificial Sequence
  Description of Artificial Sequence: Synthetic oligonucleotide
  Antisense strand to SEQ ID NO: 546677
ugugacccucgaauccucc

SEQ ID NO: 546679 - RNA, 19 nt, Artificial Sequence
  Description of Artificial Sequence: Synthetic oligonucleotide
  Sense strand starting at position 116 of SEQ ID NO: 318230
cccagaggccucuagcaaa

SEQ ID NO: 546680 - RNA, 19 nt, Artificial Sequence
  Description of Artificial Sequence: Synthetic oligonucleotide
  Antisense strand to SEQ ID NO: 546679
uuugcuagaggccucuggg

SEQ ID NO: 546681 - RNA, 19 nt, Artificial Sequence
  Description of Artificial Sequence: Synthetic oligonucleotide
  Sense strand starting at position 184 of SEQ ID NO: 318230
acaggaagcacuuguuaug

SEQ ID NO: 546682 - RNA, 19 nt, Artificial Sequence
  Description of Artificial Sequence: Synthetic oligonucleotide
  Antisense strand to SEQ ID NO: 546681
cauaacaagugcuuccugu

SEQ ID NO: 546683 - RNA, 19 nt, Artificial Sequence
  Description of Artificial Sequence: Synthetic oligonucleotide
  Sense strand starting at position 252 of SEQ ID NO: 318230
ccaugcuucgagggacaca

SEQ ID NO: 546684 - RNA, 19 nt, Artificial Sequence
  Description of Artificial Sequence: Synthetic oligonucleotide
  Antisense strand to SEQ ID NO: 546683
ugugucccucgaagcaugg

SEQ ID NO: 546685 - RNA, 19 nt, Artificial Sequence
  Description of Artificial Sequence: Synthetic oligonucleotide
  Sense strand starting at position 393 of SEQ ID NO: 318230
ccagaaagaucauguaagc

SEQ ID NO: 546686 - RNA, 19 nt, Artificial Sequence
  Description of Artificial Sequence: Synthetic oligonucleotide
  Antisense strand to SEQ ID NO: 546685
gcuuacaugaucuuucugg

SEQ ID NO: 546687 - RNA, 19 nt, Artificial Sequence
  Description of Artificial Sequence: Synthetic oligonucleotide
  Sense strand starting at position 521 of SEQ ID NO: 318230
aagccagaagucugaguuu

SEQ ID NO: 546688 - RNA, 19 nt, Artificial Sequence
  Description of Artificial Sequence: Synthetic oligonucleotide
  Antisense strand to SEQ ID NO: 546687
aaacucagacuucuggcuu

SEQ ID NO: 546689 - RNA, 19 nt, Artificial Sequence
  Description of Artificial Sequence: Synthetic oligonucleotide
  Sense strand starting at position 558 of SEQ ID NO: 318230
uggcaaccagcucaauauu

SEQ ID NO: 546690 - RNA, 19 nt, Artificial Sequence
  Description of Artificial Sequence: Synthetic oligonucleotide
  Antisense strand to SEQ ID NO: 546689
aauauugagcugguugcca

SEQ ID NO: 546691 - RNA, 19 nt, Artificial Sequence
  Description of Artificial Sequence: Synthetic oligonucleotide
  Sense strand starting at position 608 of SEQ ID NO: 318230
gcaaauguggccugccagu

SEQ ID NO: 546692 - RNA, 19 nt, Artificial Sequence
  Description of Artificial Sequence: Synthetic oligonucleotide
  Antisense strand to SEQ ID NO: 546691
acuggcaggccacauuugc

SEQ ID NO: 546693 - RNA, 19 nt, Artificial Sequence
  Description of Artificial Sequence: Synthetic oligonucleotide
  Sense strand starting at position 621 of SEQ ID NO: 318230
gccaguuugugaccucugu

SEQ ID NO: 546694 - RNA, 19 nt, Artificial Sequence
  Description of Artificial Sequence: Synthetic oligonucleotide
  Antisense strand to SEQ ID NO: 546693
acagaggucacaaacuggc

SEQ ID NO: 546695 - RNA, 19 nt, Artificial Sequence
  Description of Artificial Sequence: Synthetic oligonucleotide
  Sense strand starting at position 832 of SEQ ID NO: 318230
ggaacauccugucccuaca

SEQ ID NO: 546696 - RNA, 19 nt, Artificial Sequence
  Description of Artificial Sequence: Synthetic oligonucleotide
  Antisense strand to SEQ ID NO: 546695
uguagggacaggauguucc

SEQ ID NO: 546697 - RNA, 19 nt, Artificial Sequence
  Description of Artificial Sequence: Synthetic oligonucleotide
  Sense strand starting at position 923 of SEQ ID NO: 318230
caggcauagagguaucagu

SEQ ID NO: 546698 - RNA, 19 nt, Artificial Sequence
  Description of Artificial Sequence: Synthetic oligonucleotide
  Antisense strand to SEQ ID NO: 546697
acugauaccucuaugccug

SEQ ID NO: 546699 - RNA, 19 nt, Artificial Sequence
  Description of Artificial Sequence: Synthetic oligonucleotide
  Sense strand starting at position 931 of SEQ ID NO: 318230
gagguaucaguuuagugcu

SEQ ID NO: 546700 - RNA, 19 nt, Artificial Sequence
  Description of Artificial Sequence: Synthetic oligonucleotide
  Antisense strand to SEQ ID NO: 546699
agcacuaaacugauaccuc

SEQ ID NO: 546701 - RNA, 19 nt, Artificial Sequence
  Description of Artificial Sequence: Synthetic oligonucleotide
  Sense strand starting at position 982 of SEQ ID NO: 318230
ccagcaaaccucuggacua

SEQ ID NO: 546702 - RNA, 19 nt, Artificial Sequence
  Description of Artificial Sequence: Synthetic oligonucleotide
  Antisense strand to SEQ ID NO: 546701
uaguccagagguuugcugg

SEQ ID NO: 546703 - RNA, 19 nt, Artificial Sequence
  Description of Artificial Sequence: Synthetic oligonucleotide
  Sense strand starting at position 1004 of SEQ ID NO: 318230
uaaaucaauugguggcaga

SEQ ID NO: 546704 - RNA, 19 nt, Artificial Sequence
  Description of Artificial Sequence: Synthetic oligonucleotide
  Antisense strand to SEQ ID NO: 546703
ucugccaccaauugauuua

SEQ ID NO: 546705 - RNA, 19 nt, Artificial Sequence
  Description of Artificial Sequence: Synthetic oligonucleotide
  Sense strand starting at position 1005 of SEQ ID NO: 318230
aaaucaauugguggcagaa

SEQ ID NO: 546706 - RNA, 19 nt, Artificial Sequence
  Description of Artificial Sequence: Synthetic oligonucleotide
  Antisense strand to SEQ ID NO: 546705
uucugccaccaauugauuu

SEQ ID NO: 546707 - RNA, 19 nt, Artificial Sequence
  Description of Artificial Sequence: Synthetic oligonucleotide
  Sense strand starting at position 1007 of SEQ ID NO: 318230
aucaauugguggcagaaua

SEQ ID NO: 546708 - RNA, 19 nt, Artificial Sequence
  Description of Artificial Sequence: Synthetic oligonucleotide
  Antisense strand to SEQ ID NO: 546707
uauucugccaccaauugau

SEQ ID NO: 546709 - RNA, 19 nt, Artificial Sequence
  Description of Artificial Sequence: Synthetic oligonucleotide
  Sense strand starting at position 1430 of SEQ ID NO: 318230
cgagguaaguccuuuacaa

SEQ ID NO: 546710 - RNA, 19 nt, Artificial Sequence
  Description of Artificial Sequence: Synthetic oligonucleotide
  Antisense strand to SEQ ID NO: 546709
uuguaaaggacuuaccucg

SEQ ID NO: 546711 - RNA, 19 nt, Artificial Sequence
  Description of Artificial Sequence: Synthetic oligonucleotide
  Sense strand starting at position 1432 of SEQ ID NO: 318230
agguaaguccuuuacaaac

SEQ ID NO: 546712 - RNA, 19 nt, Artificial Sequence
  Description of Artificial Sequence: Synthetic oligonucleotide
  Antisense strand to SEQ ID NO: 546711
guuuguaaaggacuuaccu

SEQ ID NO: 546713 - RNA, 19 nt, Artificial Sequence
  Description of Artificial Sequence: Synthetic oligonucleotide
  Sense strand starting at position 1434 of SEQ ID NO: 318230
guaaguccuuuacaaacau

SEQ ID NO: 546714 - RNA, 19 nt, Artificial Sequence
  Description of Artificial Sequence: Synthetic oligonucleotide
  Antisense strand to SEQ ID NO: 546713
auguuuguaaaggacuuac

SEQ ID NO: 546715 - RNA, 19 nt, Artificial Sequence
  Description of Artificial Sequence: Synthetic oligonucleotide
  Sense strand starting at position 1719 of SEQ ID NO: 318230
cagccuucugaugaucuga

SEQ ID NO: 546716 - RNA, 19 nt, Artificial Sequence
  Description of Artificial Sequence: Synthetic oligonucleotide
  Antisense strand to SEQ ID NO: 546715
ucagaucaucagaaggcug

SEQ ID NO: 546717 - RNA, 19 nt, Artificial Sequence
  Description of Artificial Sequence: Synthetic oligonucleotide
  Sense strand starting at position 1724 of SEQ ID NO: 318230
uucugaugaucugaugaaa

SEQ ID NO: 546718 - RNA, 19 nt, Artificial Sequence
  Description of Artificial Sequence: Synthetic oligonucleotide
  Antisense strand to SEQ ID NO: 546717
uuucaucagaucaucagaa

SEQ ID NO: 546719 - RNA, 19 nt, Artificial Sequence
  Description of Artificial Sequence: Synthetic oligonucleotide
  Sense strand starting at position 2105 of SEQ ID NO: 318230
ggcauuaccagguguacca

SEQ ID NO: 546720 - RNA, 19 nt, Artificial Sequence
  Description of Artificial Sequence: Synthetic oligonucleotide
  Antisense strand to SEQ ID NO: 546719
ugguacaccugguaaugcc

SEQ ID NO: 546721 - RNA, 19 nt, Artificial Sequence
  Description of Artificial Sequence: Synthetic oligonucleotide
  Sense strand starting at position 2146 of SEQ ID NO: 318230
gggcucaucuugcccaaga

SEQ ID NO: 546722 - RNA, 19 nt, Artificial Sequence
  Description of Artificial Sequence: Synthetic oligonucleotide
  Antisense strand to SEQ ID NO: 546721
ucuugggcaagaugagccc

SEQ ID NO: 546723 - RNA, 19 nt, Artificial Sequence
  Description of Artificial Sequence: Synthetic oligonucleotide
  Sense strand starting at position 2263 of SEQ ID NO: 318230
ggugguaagucaagaugga

SEQ ID NO: 546724 - RNA, 19 nt, Artificial Sequence
  Description of Artificial Sequence: Synthetic oligonucleotide
  Antisense strand to SEQ ID NO: 546723
uccaucuugacuuaccacc

SEQ ID NO: 546725 - RNA, 19 nt, Artificial Sequence
  Description of Artificial Sequence: Synthetic oligonucleotide
  Sense strand starting at position 2389 of SEQ ID NO: 318230
gagacuacuugaucgaguc

SEQ ID NO: 546726 - RNA, 19 nt, Artificial Sequence
  Description of Artificial Sequence: Synthetic oligonucleotide
  Antisense strand to SEQ ID NO: 546725
gacucgaucaaguagucuc

SEQ ID NO: 546727 - RNA, 19 nt, Artificial Sequence
  Description of Artificial Sequence: Synthetic oligonucleotide
  Sense strand starting at position 2992 of SEQ ID NO: 318230
gcucuuccucuuggaaguu

SEQ ID NO: 546728 - RNA, 19 nt, Artificial Sequence
  Description of Artificial Sequence: Synthetic oligonucleotide
  Antisense strand to SEQ ID NO: 546727
aacuuccaagaggaagagc

SEQ ID NO: 546729 - RNA, 19 nt, Artificial Sequence
  Description of Artificial Sequence: Synthetic oligonucleotide
  Sense strand starting at position 3154 of SEQ ID NO: 318230
ccugguuggaacugaaaca

SEQ ID NO: 546730 - RNA, 19 nt, Artificial Sequence
  Description of Artificial Sequence: Synthetic oligonucleotide
  Antisense strand to SEQ ID NO: 546729
uguuucaguuccaaccagg

SEQ ID NO: 546731 - RNA, 19 nt, Artificial Sequence
  Description of Artificial Sequence: Synthetic oligonucleotide
  Sense strand starting at position 3166 of SEQ ID NO: 318230
ugaaacaauucuggauucu

SEQ ID NO: 546732 - RNA, 19 nt, Artificial Sequence
  Description of Artificial Sequence: Synthetic oligonucleotide
  Antisense strand to SEQ ID NO: 546731
agaauccagaauuguuuca

SEQ ID NO: 546733 - RNA, 19 nt, Artificial Sequence
  Description of Artificial Sequence: Synthetic oligonucleotide
  Sense strand starting at position 3175 of SEQ ID NO: 318230
ucuggauucuggccucaac

SEQ ID NO: 546734 - RNA, 19 nt, Artificial Sequence
  Description of Artificial Sequence: Synthetic oligonucleotide
  Antisense strand to SEQ ID NO: 546733
guugaggccagaauccaga

SEQ ID NO: 546735 - RNA, 19 nt, Artificial Sequence
  Description of Artificial Sequence: Synthetic oligonucleotide
  Sense strand starting at position 3178 of SEQ ID NO: 318230
ggauucuggccucaacagu

SEQ ID NO: 546736 - RNA, 19 nt, Artificial Sequence
  Description of Artificial Sequence: Synthetic oligonucleotide
  Antisense strand to SEQ ID NO: 546735
acuguugaggccagaaucc

SEQ ID NO: 546737 - RNA, 19 nt, Artificial Sequence
  Description of Artificial Sequence: Synthetic oligonucleotide
  Sense strand starting at position 3223 of SEQ ID NO: 318230
gugagucccugcuccacua

SEQ ID NO: 546738 - RNA, 19 nt, Artificial Sequence
  Description of Artificial Sequence: Synthetic oligonucleotide
  Antisense strand to SEQ ID NO: 546737
uaguggagcagggacucac

SEQ ID NO: 546739 - RNA, 19 nt, Artificial Sequence
  Description of Artificial Sequence: Synthetic oligonucleotide
  Sense strand starting at position 3358 of SEQ ID NO: 318230
gacagugggcucugaucuu

SEQ ID NO: 546740 - RNA, 19 nt, Artificial Sequence
  Description of Artificial Sequence: Synthetic oligonucleotide
  Antisense strand to SEQ ID NO: 546739
aagaucagagcccacuguc

SEQ ID NO: 546741 - RNA, 19 nt, Artificial Sequence
  Description of Artificial Sequence: Synthetic oligonucleotide
  Sense strand starting at position 3794 of SEQ ID NO: 318230
guaaguugugccuaugaua

SEQ ID NO: 546742 - RNA, 19 nt, Artificial Sequence
  Description of Artificial Sequence: Synthetic oligonucleotide
  Antisense strand to SEQ ID NO: 546741
uaucauaggcacaacuuac

SEQ ID NO: 546743 - RNA, 19 nt, Artificial Sequence
  Description of Artificial Sequence: Synthetic oligonucleotide
  Sense strand starting at position 3851 of SEQ ID NO: 318230
augagaucaugccuuuaag

SEQ ID NO: 546744 - RNA, 19 nt, Artificial Sequence
  Description of Artificial Sequence: Synthetic oligonucleotide
  Antisense strand to SEQ ID NO: 546743
cuuaaaggcaugaucucau

SEQ ID NO: 546745 - RNA, 19 nt, Artificial Sequence
  Description of Artificial Sequence: Synthetic oligonucleotide
  Sense strand starting at position 3913 of SEQ ID NO: 318230
agcuguguggccucaguau

SEQ ID NO: 546746 - RNA, 19 nt, Artificial Sequence
  Description of Artificial Sequence: Synthetic oligonucleotide
  Antisense strand to SEQ ID NO: 546745
auacugaggccacacagcu

SEQ ID NO: 546747 - RNA, 19 nt, Artificial Sequence
  Description of Artificial Sequence: Synthetic oligonucleotide
  Sense strand starting at position 3952 of SEQ ID NO: 318230
caguaauagugaugauacu

SEQ ID NO: 546748 - RNA, 19 nt, Artificial Sequence
  Description of Artificial Sequence: Synthetic oligonucleotide
  Antisense strand to SEQ ID NO: 546747
aguaucaucacuauuacug

SEQ ID NO: 546749 - RNA, 19 nt, Artificial Sequence
  Description of Artificial Sequence: Synthetic oligonucleotide
  Sense strand starting at position 3961 of SEQ ID NO: 318230
ugaugauacugccuaccua

SEQ ID NO: 546750 - RNA, 19 nt, Artificial Sequence
  Description of Artificial Sequence: Synthetic oligonucleotide
  Antisense strand to SEQ ID NO: 546749
uagguaggcaguaucauca

SEQ ID NO: 546751 - RNA, 19 nt, Artificial Sequence
  Description of Artificial Sequence: Synthetic oligonucleotide
  Sense strand starting at position 3968 of SEQ ID NO: 318230
acugccuaccuauaggauu

SEQ ID NO: 546752 - RNA, 19 nt, Artificial Sequence
  Description of Artificial Sequence: Synthetic oligonucleotide
  Antisense strand to SEQ ID NO: 546751
aauccuauagguaggcagu

SEQ ID NO: 546753 - RNA, 19 nt, Artificial Sequence
  Description of Artificial Sequence: Synthetic oligonucleotide
  Sense strand starting at position 364 of SEQ ID NO: 318231
aucacaagguccugagauc

SEQ ID NO: 546754 - RNA, 19 nt, Artificial Sequence
  Description of Artificial Sequence: Synthetic oligonucleotide
  Antisense strand to SEQ ID NO: 546753
gaucucaggaccuugugau

SEQ ID NO: 546755 - RNA, 19 nt, Artificial Sequence
  Description of Artificial Sequence: Synthetic oligonucleotide
  Sense strand starting at position 616 of SEQ ID NO: 318231
gaggccucaugcuaaggaa

SEQ ID NO: 546756 - RNA, 19 nt, Artificial Sequence
  Description of Artificial Sequence: Synthetic oligonucleotide
  Antisense strand to SEQ ID NO: 546755
uuccuuagcaugaggccuc

SEQ ID NO: 546757 - RNA, 19 nt, Artificial Sequence
  Description of Artificial Sequence: Synthetic oligonucleotide
  Sense strand starting at position 772 of SEQ ID NO: 318231
ugucauuuaugcccaguga

SEQ ID NO: 546758 - RNA, 19 nt, Artificial Sequence
  Description of Artificial Sequence: Synthetic oligonucleotide
  Antisense strand to SEQ ID NO: 546757
ucacugggcauaaaugaca

SEQ ID NO: 546759 - RNA, 19 nt, Artificial Sequence
  Description of Artificial Sequence: Synthetic oligonucleotide
  Sense strand starting at position 854 of SEQ ID NO: 318231
ggaaaugugggucaccacu

SEQ ID NO: 546760 - RNA, 19 nt, Artificial Sequence
  Description of Artificial Sequence: Synthetic oligonucleotide
  Antisense strand to SEQ ID NO: 546759
aguggugacccacauuucc

SEQ ID NO: 546761 - RNA, 19 nt, Artificial Sequence
  Description of Artificial Sequence: Synthetic oligonucleotide
  Sense strand starting at position 910 of SEQ ID NO: 318231
gauacacccugagagauuc

SEQ ID NO: 546762 - RNA, 19 nt, Artificial Sequence
  Description of Artificial Sequence: Synthetic oligonucleotide
  Antisense strand to SEQ ID NO: 546761
gaaucucucaggguguauc

SEQ ID NO: 546763 - RNA, 19 nt, Artificial Sequence
  Description of Artificial Sequence: Synthetic oligonucleotide
  Sense strand starting at position 1095 of SEQ ID NO: 318231
cuuguaaggucaggcagaa

SEQ ID NO: 546764 - RNA, 19 nt, Artificial Sequence
  Description of Artificial Sequence: Synthetic oligonucleotide
  Antisense strand to SEQ ID NO: 546763
uucugccugaccuuacaag

SEQ ID NO: 546765 - RNA, 19 nt, Artificial Sequence
  Description of Artificial Sequence: Synthetic oligonucleotide
  Sense strand starting at position 1237 of SEQ ID NO: 318231
aggagaagucugugaccuu

SEQ ID NO: 546766 - RNA, 19 nt, Artificial Sequence
  Description of Artificial Sequence: Synthetic oligonucleotide
  Antisense strand to SEQ ID NO: 546765
aaggucacagacuucuccu

SEQ ID NO: 546767 - RNA, 19 nt, Artificial Sequence
  Description of Artificial Sequence: Synthetic oligonucleotide
  Sense strand starting at position 1238 of SEQ ID NO: 318231
ggagaagucugugaccuuc

SEQ ID NO: 546768 - RNA, 19 nt, Artificial Sequence
  Description of Artificial Sequence: Synthetic oligonucleotide
  Antisense strand to SEQ ID NO: 546767
gaaggucacagacuucucc

SEQ ID NO: 546769 - RNA, 19 nt, Artificial Sequence
  Description of Artificial Sequence: Synthetic oligonucleotide
  Sense strand starting at position 1278 of SEQ ID NO: 318231
agaaucuaaugauggcuau

SEQ ID NO: 546770 - RNA, 19 nt, Artificial Sequence
  Description of Artificial Sequence: Synthetic oligonucleotide
  Antisense strand to SEQ ID NO: 546769
auagccaucauuagauucu

SEQ ID NO: 546771 - RNA, 19 nt, Artificial Sequence
  Description of Artificial Sequence: Synthetic oligonucleotide
  Sense strand starting at position 1285 of SEQ ID NO: 318231
aaugauggcuauuagcaga

SEQ ID NO: 546772 - RNA, 19 nt, Artificial Sequence
  Description of Artificial Sequence: Synthetic oligonucleotide
  Antisense strand to SEQ ID NO: 546771
ucugcuaauagccaucauu

SEQ ID NO: 546773 - RNA, 19 nt, Artificial Sequence
  Description of Artificial Sequence: Synthetic oligonucleotide
  Sense strand starting at position 1553 of SEQ ID NO: 318231
ugccuagcugucuggagaa

SEQ ID NO: 546774 - RNA, 19 nt, Artificial Sequence
  Description of Artificial Sequence: Synthetic oligonucleotide
  Antisense strand to SEQ ID NO: 546773
uucuccagacagcuaggca

SEQ ID NO: 546775 - RNA, 19 nt, Artificial Sequence
  Description of Artificial Sequence: Synthetic oligonucleotide
  Sense strand starting at position 1632 of SEQ ID NO: 318231
ucaggaaucugccagguca

SEQ ID NO: 546776 - RNA, 19 nt, Artificial Sequence
  Description of Artificial Sequence: Synthetic oligonucleotide
  Antisense strand to SEQ ID NO: 546775
ugaccuggcagauuccuga

SEQ ID NO: 546777 - RNA, 19 nt, Artificial Sequence
  Description of Artificial Sequence: Synthetic oligonucleotide
  Sense strand starting at position 1681 of SEQ ID NO: 318231
agcugcuucugaucuggaa

SEQ ID NO: 546778 - RNA, 19 nt, Artificial Sequence
  Description of Artificial Sequence: Synthetic oligonucleotide
  Antisense strand to SEQ ID NO: 546777
uuccagaucagaagcagcu

SEQ ID NO: 546779 - RNA, 19 nt, Artificial Sequence
  Description of Artificial Sequence: Synthetic oligonucleotide
  Sense strand starting at position 1683 of SEQ ID NO: 318231
cugcuucugaucuggaaug

SEQ ID NO: 546780 - RNA, 19 nt, Artificial Sequence
  Description of Artificial Sequence: Synthetic oligonucleotide
  Antisense strand to SEQ ID NO: 546779
cauuccagaucagaagcag

SEQ ID NO: 546781 - RNA, 19 nt, Artificial Sequence
  Description of Artificial Sequence: Synthetic oligonucleotide
  Sense strand starting at position 1684 of SEQ ID NO: 318231
ugcuucugaucuggaauga

SEQ ID NO: 546782 - RNA, 19 nt, Artificial Sequence
  Description of Artificial Sequence: Synthetic oligonucleotide
  Antisense strand to SEQ ID NO: 546781
ucauuccagaucagaagca

SEQ ID NO: 546783 - RNA, 19 nt, Artificial Sequence
  Description of Artificial Sequence: Synthetic oligonucleotide
  Sense strand starting at position 2146 of SEQ ID NO: 318231
uccuuaaccucagaaagag

SEQ ID NO: 546784 - RNA, 19 nt, Artificial Sequence
  Description of Artificial Sequence: Synthetic oligonucleotide
  Antisense strand to SEQ ID NO: 546783
cucuuucugagguuaagga

SEQ ID NO: 546785 - RNA, 19 nt, Artificial Sequence
  Description of Artificial Sequence: Synthetic oligonucleotide
  Sense strand starting at position 2240 of SEQ ID NO: 318231
aggagccuuccacgggaaa

SEQ ID NO: 546786 - RNA, 19 nt, Artificial Sequence
  Description of Artificial Sequence: Synthetic oligonucleotide
  Antisense strand to SEQ ID NO: 546785
uuucccguggaaggcuccu

SEQ ID NO: 546787 - RNA, 19 nt, Artificial Sequence
  Description of Artificial Sequence: Synthetic oligonucleotide
  Sense strand starting at position 2296 of SEQ ID NO: 318231
uucugacccucucaagaga

SEQ ID NO: 546788 - RNA, 19 nt, Artificial Sequence
  Description of Artificial Sequence: Synthetic oligonucleotide
  Antisense strand to SEQ ID NO: 546787
ucucuugagagggucagaa

SEQ ID NO: 546789 - RNA, 19 nt, Artificial Sequence
  Description of Artificial Sequence: Synthetic oligonucleotide
  Sense strand starting at position 2335 of SEQ ID NO: 318231
ggagcacucacuggcaaua

SEQ ID NO: 546790 - RNA, 19 nt, Artificial Sequence
  Description of Artificial Sequence: Synthetic oligonucleotide
  Antisense strand to SEQ ID NO: 546789
uauugccagugagugcucc

SEQ ID NO: 546791 - RNA, 19 nt, Artificial Sequence
  Description of Artificial Sequence: Synthetic oligonucleotide
  Sense strand starting at position 2568 of SEQ ID NO: 318231
guguggaggguguaagaau

SEQ ID NO: 546792 - RNA, 19 nt, Artificial Sequence
  Description of Artificial Sequence: Synthetic oligonucleotide
  Antisense strand to SEQ ID NO: 546791
auucuuacacccuccacac

SEQ ID NO: 546793 - RNA, 19 nt, Artificial Sequence
  Description of Artificial Sequence: Synthetic oligonucleotide
  Sense strand starting at position 2597 of SEQ ID NO: 318231
gccucaaagugcuagagcu

SEQ ID NO: 546794 - RNA, 19 nt, Artificial Sequence
  Description of Artificial Sequence: Synthetic oligonucleotide
  Antisense strand to SEQ ID NO: 546793
agcucuagcacuuugaggc

SEQ ID NO: 546795 - RNA, 19 nt, Artificial Sequence
  Description of Artificial Sequence: Synthetic oligonucleotide
  Sense strand starting at position 2707 of SEQ ID NO: 318231
cuugcuucuugacagcaaa

SEQ ID NO: 546796 - RNA, 19 nt, Artificial Sequence
  Description of Artificial Sequence: Synthetic oligonucleotide
  Antisense strand to SEQ ID NO: 546795
uuugcugucaagaagcaag

SEQ ID NO: 546797 - RNA, 19 nt, Artificial Sequence
  Description of Artificial Sequence: Synthetic oligonucleotide
  Sense strand starting at position 2814 of SEQ ID NO: 318231
ggcucugagagcugcaguu

SEQ ID NO: 546798 - RNA, 19 nt, Artificial Sequence
  Description of Artificial Sequence: Synthetic oligonucleotide
  Antisense strand to SEQ ID NO: 546797
aacugcagcucucagagcc

SEQ ID NO: 546799 - RNA, 19 nt, Artificial Sequence
  Description of Artificial Sequence: Synthetic oligonucleotide
  Sense strand starting at position 2816 of SEQ ID NO: 318231
cucugagagcugcaguuaa

SEQ ID NO: 546800 - RNA, 19 nt, Artificial Sequence
  Description of Artificial Sequence: Synthetic oligonucleotide
  Antisense strand to SEQ ID NO: 546799
uuaacugcagcucucagag

SEQ ID NO: 546801 - RNA, 19 nt, Artificial Sequence
  Description of Artificial Sequence: Synthetic oligonucleotide
  Sense strand starting at position 3446 of SEQ ID NO: 318231
cccggcuuucucuaggaca

SEQ ID NO: 546802 - RNA, 19 nt, Artificial Sequence
  Description of Artificial Sequence: Synthetic oligonucleotide
  Antisense strand to SEQ ID NO: 546801
uguccuagagaaagccggg

SEQ ID NO: 546803 - RNA, 19 nt, Artificial Sequence
  Description of Artificial Sequence: Synthetic oligonucleotide
  Sense strand starting at position 3448 of SEQ ID NO: 318231
cggcuuucucuaggacaca

SEQ ID NO: 546804 - RNA, 19 nt, Artificial Sequence
  Description of Artificial Sequence: Synthetic oligonucleotide
  Antisense strand to SEQ ID NO: 546803
uguguccuagagaaagccg

SEQ ID NO: 546805 - RNA, 19 nt, Artificial Sequence
  Description of Artificial Sequence: Synthetic oligonucleotide
  Sense strand starting at position 3616 of SEQ ID NO: 318231
ggguuccaguccuagauca

SEQ ID NO: 546806 - RNA, 19 nt, Artificial Sequence
  Description of Artificial Sequence: Synthetic oligonucleotide
  Antisense strand to SEQ ID NO: 546805
ugaucuaggacuggaaccc

SEQ ID NO: 546807 - RNA, 19 nt, Artificial Sequence
  Description of Artificial Sequence: Synthetic oligonucleotide
  Sense strand starting at position 3748 of SEQ ID NO: 318231
cagguugacccaggaguuu

SEQ ID NO: 546808 - RNA, 19 nt, Artificial Sequence
  Description of Artificial Sequence: Synthetic oligonucleotide
  Antisense strand to SEQ ID NO: 546807
aaacuccugggucaaccug

SEQ ID NO: 546809 - RNA, 19 nt, Artificial Sequence
  Description of Artificial Sequence: Synthetic oligonucleotide
  Sense strand starting at position 3853 of SEQ ID NO: 318231
gcgugugccuauagucagu

SEQ ID NO: 546810 - RNA, 19 nt, Artificial Sequence
  Description of Artificial Sequence: Synthetic oligonucleotide
  Antisense strand to SEQ ID NO: 546809
acugacuauaggcacacgc

SEQ ID NO: 546811 - RNA, 19 nt, Artificial Sequence
  Description of Artificial Sequence: Synthetic oligonucleotide
  Sense strand starting at position 3855 of SEQ ID NO: 318231
gugugccuauagucaguua

SEQ ID NO: 546812 - RNA, 19 nt, Artificial Sequence
  Description of Artificial Sequence: Synthetic oligonucleotide
  Antisense strand to SEQ ID NO: 546811
uaacugacuauaggcacac

SEQ ID NO: 546813 - RNA, 19 nt, Artificial Sequence
  Description of Artificial Sequence: Synthetic oligonucleotide
  Sense strand starting at position 3856 of SEQ ID NO: 318231
ugugccuauagucaguuau

SEQ ID NO: 546814 - RNA, 19 nt, Artificial Sequence
  Description of Artificial Sequence: Synthetic oligonucleotide
  Antisense strand to SEQ ID NO: 546813
auaacugacuauaggcaca

SEQ ID NO: 546815 - RNA, 19 nt, Artificial Sequence
  Description of Artificial Sequence: Synthetic oligonucleotide
  Sense strand starting at position 3858 of SEQ ID NO: 318231
ugccuauagucaguuauau

SEQ ID NO: 546816 - RNA, 19 nt, Artificial Sequence
  Description of Artificial Sequence: Synthetic oligonucleotide
  Antisense strand to SEQ ID NO: 546815
auauaacugacuauaggca

SEQ ID NO: 546817 - RNA, 19 nt, Artificial Sequence
  Description of Artificial Sequence: Synthetic oligonucleotide
  Sense strand starting at position 3862 of SEQ ID NO: 318231
uauagucaguuauauggga

SEQ ID NO: 546818 - RNA, 19 nt, Artificial Sequence
  Description of Artificial Sequence: Synthetic oligonucleotide
  Antisense strand to SEQ ID NO: 546817
ucccauauaacugacuaua

SEQ ID NO: 546819 - RNA, 19 nt, Artificial Sequence
  Description of Artificial Sequence: Synthetic oligonucleotide
  Sense strand starting at position 27 of SEQ ID NO: 318232
uugguaugccuagaauuaa

SEQ ID NO: 546820 - RNA, 19 nt, Artificial Sequence
  Description of Artificial Sequence: Synthetic oligonucleotide
  Antisense strand to SEQ ID NO: 546819
uuaauucuaggcauaccaa

SEQ ID NO: 546821 - RNA, 19 nt, Artificial Sequence
  Description of Artificial Sequence: Synthetic oligonucleotide
  Sense strand starting at position 655 of SEQ ID NO: 318232
auuauuagugcaugucuaa

SEQ ID NO: 546822 - RNA, 19 nt, Artificial Sequence
  Description of Artificial Sequence: Synthetic oligonucleotide
  Antisense strand to SEQ ID NO: 546821
uuagacaugcacuaauaau

SEQ ID NO: 546823 - RNA, 19 nt, Artificial Sequence
  Description of Artificial Sequence: Synthetic oligonucleotide
  Sense strand starting at position 822 of SEQ ID NO: 318232
gcauaccuacaauguguua

SEQ ID NO: 546824 - RNA, 19 nt, Artificial Sequence
  Description of Artificial Sequence: Synthetic oligonucleotide
  Antisense strand to SEQ ID NO: 546823
uaacacauuguagguaugc

SEQ ID NO: 546825 - RNA, 19 nt, Artificial Sequence
  Description of Artificial Sequence: Synthetic oligonucleotide
  Sense strand starting at position 834 of SEQ ID NO: 318232
uguguuaggcaacaugaua

SEQ ID NO: 546826 - RNA, 19 nt, Artificial Sequence
  Description of Artificial Sequence: Synthetic oligonucleotide
  Antisense strand to SEQ ID NO: 546825
uaucauguugccuaacaca

SEQ ID NO: 546827 - RNA, 19 nt, Artificial Sequence
  Description of Artificial Sequence: Synthetic oligonucleotide
  Sense strand starting at position 969 of SEQ ID NO: 318232
gcagcuagaguuuaacaau

SEQ ID NO: 546828 - RNA, 19 nt, Artificial Sequence
  Description of Artificial Sequence: Synthetic oligonucleotide
  Antisense strand to SEQ ID NO: 546827
auuguuaaacucuagcugc

SEQ ID NO: 546829 - RNA, 19 nt, Artificial Sequence
  Description of Artificial Sequence: Synthetic oligonucleotide
  Sense strand starting at position 975 of SEQ ID NO: 318232
agaguuuaacaauagugca

SEQ ID NO: 546830 - RNA, 19 nt, Artificial Sequence
  Description of Artificial Sequence: Synthetic oligonucleotide
  Antisense strand to SEQ ID NO: 546829
ugcacuauuguuaaacucu

SEQ ID NO: 546831 - RNA, 19 nt, Artificial Sequence
  Description of Artificial Sequence: Synthetic oligonucleotide
  Sense strand starting at position 1164 of SEQ ID NO: 318232
acacguuauuuggagaaac

SEQ ID NO: 546832 - RNA, 19 nt, Artificial Sequence
  Description of Artificial Sequence: Synthetic oligonucleotide
  Antisense strand to SEQ ID NO: 546831
guuucuccaaauaacgugu

SEQ ID NO: 546833 - RNA, 19 nt, Artificial Sequence
  Description of Artificial Sequence: Synthetic oligonucleotide
  Sense strand starting at position 1273 of SEQ ID NO: 318232
auacuuauguugcccggaa

SEQ ID NO: 546834 - RNA, 19 nt, Artificial Sequence
  Description of Artificial Sequence: Synthetic oligonucleotide
  Antisense strand to SEQ ID NO: 546833
uuccgggcaacauaaguau

SEQ ID NO: 546835 - RNA, 19 nt, Artificial Sequence
  Description of Artificial Sequence: Synthetic oligonucleotide
  Sense strand starting at position 1274 of SEQ ID NO: 318232
uacuuauguugcccggaau

SEQ ID NO: 546836 - RNA, 19 nt, Artificial Sequence
  Description of Artificial Sequence: Synthetic oligonucleotide
  Antisense strand to SEQ ID NO: 546835
auuccgggcaacauaagua

SEQ ID NO: 546837 - RNA, 19 nt, Artificial Sequence
  Description of Artificial Sequence: Synthetic oligonucleotide
  Sense strand starting at position 1275 of SEQ ID NO: 318232
acuuauguugcccggaaua

SEQ ID NO: 546838 - RNA, 19 nt, Artificial Sequence
  Description of Artificial Sequence: Synthetic oligonucleotide
  Antisense strand to SEQ ID NO: 546837
uauuccgggcaacauaagu

SEQ ID NO: 546839 - RNA, 19 nt, Artificial Sequence
  Description of Artificial Sequence: Synthetic oligonucleotide
  Sense strand starting at position 1277 of SEQ ID NO: 318232
uuauguugcccggaauaca

SEQ ID NO: 546840 - RNA, 19 nt, Artificial Sequence
  Description of Artificial Sequence: Synthetic oligonucleotide
  Antisense strand to SEQ ID NO: 546839
uguauuccgggcaacauaa

SEQ ID NO: 546841 - RNA, 19 nt, Artificial Sequence
  Description of Artificial Sequence: Synthetic oligonucleotide
  Sense strand starting at position 1300 of SEQ ID NO: 318232
aucauauaacccugcgaau

SEQ ID NO: 546842 - RNA, 19 nt, Artificial Sequence
  Description of Artificial Sequence: Synthetic oligonucleotide
  Antisense strand to SEQ ID NO: 546841
auucgcaggguuauaugau

SEQ ID NO: 546843 - RNA, 19 nt, Artificial Sequence
  Description of Artificial Sequence: Synthetic oligonucleotide
  Sense strand starting at position 1502 of SEQ ID NO: 318232
ggagcauucgcggauuagg

SEQ ID NO: 546844 - RNA, 19 nt, Artificial Sequence
  Description of Artificial Sequence: Synthetic oligonucleotide
  Antisense strand to SEQ ID NO: 546843
ccuaauccgcgaaugcucc

SEQ ID NO: 546845 - RNA, 19 nt, Artificial Sequence
  Description of Artificial Sequence: Synthetic oligonucleotide
  Sense strand starting at position 1552 of SEQ ID NO: 318232
ccacguagcguuucucaau

SEQ ID NO: 546846 - RNA, 19 nt, Artificial Sequence
  Description of Artificial Sequence: Synthetic oligonucleotide
  Antisense strand to SEQ ID NO: 546845
auugagaaacgcuacgugg

SEQ ID NO: 546847 - RNA, 19 nt, Artificial Sequence
  Description of Artificial Sequence: Synthetic oligonucleotide
  Sense strand starting at position 1726 of SEQ ID NO: 318232
gacauaaguggaugcgaau

SEQ ID NO: 546848 - RNA, 19 nt, Artificial Sequence
  Description of Artificial Sequence: Synthetic oligonucleotide
  Antisense strand to SEQ ID NO: 546847
auucgcauccacuuauguc

SEQ ID NO: 546849 - RNA, 19 nt, Artificial Sequence
  Description of Artificial Sequence: Synthetic oligonucleotide
  Sense strand starting at position 1907 of SEQ ID NO: 318232
gguaaagcuuggccaauga

SEQ ID NO: 546850 - RNA, 19 nt, Artificial Sequence
  Description of Artificial Sequence: Synthetic oligonucleotide
  Antisense strand to SEQ ID NO: 546849
ucauuggccaagcuuuacc

SEQ ID NO: 546851 - RNA, 19 nt, Artificial Sequence
  Description of Artificial Sequence: Synthetic oligonucleotide
  Sense strand starting at position 2182 of SEQ ID NO: 318232
gggcacuuggcgcauuauu

SEQ ID NO: 546852 - RNA, 19 nt, Artificial Sequence
  Description of Artificial Sequence: Synthetic oligonucleotide
  Antisense strand to SEQ ID NO: 546851
aauaaugcgccaagugccc

SEQ ID NO: 546853 - RNA, 19 nt, Artificial Sequence
  Description of Artificial Sequence: Synthetic oligonucleotide
  Sense strand starting at position 2193 of SEQ ID NO: 318232
gcauuauuguagcuucuga

SEQ ID NO: 546854 - RNA, 19 nt, Artificial Sequence
  Description of Artificial Sequence: Synthetic oligonucleotide
  Antisense strand to SEQ ID NO: 546853
ucagaagcuacaauaaugc

SEQ ID NO: 546855 - RNA, 19 nt, Artificial Sequence
  Description of Artificial Sequence: Synthetic oligonucleotide
  Sense strand starting at position 2275 of SEQ ID NO: 318232
gacgcuugagcccggagaa

SEQ ID NO: 546856 - RNA, 19 nt, Artificial Sequence
  Description of Artificial Sequence: Synthetic oligonucleotide
  Antisense strand to SEQ ID NO: 546855
uucuccgggcucaagcguc

SEQ ID NO: 546857 - RNA, 19 nt, Artificial Sequence
  Description of Artificial Sequence: Synthetic oligonucleotide
  Sense strand starting at position 2421 of SEQ ID NO: 318232
cuggguugcgcguauuuau

SEQ ID NO: 546858 - RNA, 19 nt, Artificial Sequence
  Description of Artificial Sequence: Synthetic oligonucleotide
  Antisense strand to SEQ ID NO: 546857
auaaauacgcgcaacccag

SEQ ID NO: 546859 - RNA, 19 nt, Artificial Sequence
  Description of Artificial Sequence: Synthetic oligonucleotide
  Sense strand starting at position 2460 of SEQ ID NO: 318232
cgugaucuuccggaagucu

SEQ ID NO: 546860 - RNA, 19 nt, Artificial Sequence
  Description of Artificial Sequence: Synthetic oligonucleotide
  Antisense strand to SEQ ID NO: 546859
agacuuccggaagaucacg

SEQ ID NO: 546861 - RNA, 19 nt, Artificial Sequence
  Description of Artificial Sequence: Synthetic oligonucleotide
  Sense strand starting at position 2469 of SEQ ID NO: 318232
ccggaagucuucucugauc

SEQ ID NO: 546862 - RNA, 19 nt, Artificial Sequence
  Description of Artificial Sequence: Synthetic oligonucleotide
  Antisense strand to SEQ ID NO: 546861
gaucagagaagacuuccgg

SEQ ID NO: 546863 - RNA, 19 nt, Artificial Sequence
  Description of Artificial Sequence: Synthetic oligonucleotide
  Sense strand starting at position 2471 of SEQ ID NO: 318232
ggaagucuucucugauccu

SEQ ID NO: 546864 - RNA, 19 nt, Artificial Sequence
  Description of Artificial Sequence: Synthetic oligonucleotide
  Antisense strand to SEQ ID NO: 546863
aggaucagagaagacuucc

SEQ ID NO: 546865 - RNA, 19 nt, Artificial Sequence
  Description of Artificial Sequence: Synthetic oligonucleotide
  Sense strand starting at position 2498 of SEQ ID NO: 318232
ggauuaggguccucugcuu

SEQ ID NO: 546866 - RNA, 19 nt, Artificial Sequence
  Description of Artificial Sequence: Synthetic oligonucleotide
  Antisense strand to SEQ ID NO: 546865
aagcagaggacccuaaucc

SEQ ID NO: 546867 - RNA, 19 nt, Artificial Sequence
  Description of Artificial Sequence: Synthetic oligonucleotide
  Sense strand starting at position 2556 of SEQ ID NO: 318232
uuauuacauuguguugaca

SEQ ID NO: 546868 - RNA, 19 nt, Artificial Sequence
  Description of Artificial Sequence: Synthetic oligonucleotide
  Antisense strand to SEQ ID NO: 546867
ugucaacacaauguaauaa

SEQ ID NO: 546869 - RNA, 19 nt, Artificial Sequence
  Description of Artificial Sequence: Synthetic oligonucleotide
  Sense strand starting at position 2643 of SEQ ID NO: 318232
cacguaagagacugauuaa

SEQ ID NO: 546870 - RNA, 19 nt, Artificial Sequence
  Description of Artificial Sequence: Synthetic oligonucleotide
  Antisense strand to SEQ ID NO: 546869
uuaaucagucucuuacgug

SEQ ID NO: 546871 - RNA, 19 nt, Artificial Sequence
  Description of Artificial Sequence: Synthetic oligonucleotide
  Sense strand starting at position 2742 of SEQ ID NO: 318232
uccuuccaccagugaguau

SEQ ID NO: 546872 - RNA, 19 nt, Artificial Sequence
  Description of Artificial Sequence: Synthetic oligonucleotide
  Antisense strand to SEQ ID NO: 546871
auacucacugguggaagga

SEQ ID NO: 546873 - RNA, 19 nt, Artificial Sequence
  Description of Artificial Sequence: Synthetic oligonucleotide
  Sense strand starting at position 2764 of SEQ ID NO: 318232
gugcuaggaccauggaaau

SEQ ID NO: 546874 - RNA, 19 nt, Artificial Sequence
  Description of Artificial Sequence: Synthetic oligonucleotide
  Antisense strand to SEQ ID NO: 546873
auuuccaugguccuagcac

SEQ ID NO: 546875 - RNA, 19 nt, Artificial Sequence
  Description of Artificial Sequence: Synthetic oligonucleotide
  Sense strand starting at position 2775 of SEQ ID NO: 318232
auggaaaugaguugggcaa

SEQ ID NO: 546876 - RNA, 19 nt, Artificial Sequence
  Description of Artificial Sequence: Synthetic oligonucleotide
  Antisense strand to SEQ ID NO: 546875
uugcccaacucauuuccau

SEQ ID NO: 546877 - RNA, 19 nt, Artificial Sequence
  Description of Artificial Sequence: Synthetic oligonucleotide
  Sense strand starting at position 2776 of SEQ ID NO: 318232
uggaaaugaguugggcaau

SEQ ID NO: 546878 - RNA, 19 nt, Artificial Sequence
  Description of Artificial Sequence: Synthetic oligonucleotide
  Antisense strand to SEQ ID NO: 546877
auugcccaacucauuucca

SEQ ID NO: 546879 - RNA, 19 nt, Artificial Sequence
  Description of Artificial Sequence: Synthetic oligonucleotide
  Sense strand starting at position 2782 of SEQ ID NO: 318232
ugaguugggcaaugaauag

SEQ ID NO: 546880 - RNA, 19 nt, Artificial Sequence
  Description of Artificial Sequence: Synthetic oligonucleotide
  Antisense strand to SEQ ID NO: 546879
cuauucauugcccaacuca

SEQ ID NO: 546881 - RNA, 19 nt, Artificial Sequence
  Description of Artificial Sequence: Synthetic oligonucleotide
  Sense strand starting at position 2828 of SEQ ID NO: 318232
cugaaugucuugucaucaa

SEQ ID NO: 546882 - RNA, 19 nt, Artificial Sequence
  Description of Artificial Sequence: Synthetic oligonucleotide
  Antisense strand to SEQ ID NO: 546881
uugaugacaagacauucag

SEQ ID NO: 546883 - RNA, 19 nt, Artificial Sequence
  Description of Artificial Sequence: Synthetic oligonucleotide
  Sense strand starting at position 2831 of SEQ ID NO: 318232
aaugucuugucaucaagga

SEQ ID NO: 546884 - RNA, 19 nt, Artificial Sequence
  Description of Artificial Sequence: Synthetic oligonucleotide
  Antisense strand to SEQ ID NO: 546883
uccuugaugacaagacauu

SEQ ID NO: 546885 - RNA, 19 nt, Artificial Sequence
  Description of Artificial Sequence: Synthetic oligonucleotide
  Sense strand starting at position 2832 of SEQ ID NO: 318232
augucuugucaucaaggau

SEQ ID NO: 546886 - RNA, 19 nt, Artificial Sequence
  Description of Artificial Sequence: Synthetic oligonucleotide
  Antisense strand to SEQ ID NO: 546885
auccuugaugacaagacau

SEQ ID NO: 546887 - RNA, 19 nt, Artificial Sequence
  Description of Artificial Sequence: Synthetic oligonucleotide
  Sense strand starting at position 2836 of SEQ ID NO: 318232
cuugucaucaaggauggua

SEQ ID NO: 546888 - RNA, 19 nt, Artificial Sequence
  Description of Artificial Sequence: Synthetic oligonucleotide
  Antisense strand to SEQ ID NO: 546887
uaccauccuugaugacaag

SEQ ID NO: 546889 - RNA, 19 nt, Artificial Sequence
  Description of Artificial Sequence: Synthetic oligonucleotide
  Sense strand starting at position 2838 of SEQ ID NO: 318232
ugucaucaaggaugguaaa

SEQ ID NO: 546890 - RNA, 19 nt, Artificial Sequence
  Description of Artificial Sequence: Synthetic oligonucleotide
  Antisense strand to SEQ ID NO: 546889
uuuaccauccuugaugaca

SEQ ID NO: 546891 - RNA, 19 nt, Artificial Sequence
  Description of Artificial Sequence: Synthetic oligonucleotide
  Sense strand starting at position 2877 of SEQ ID NO: 318232
uuaucucugugagccuuaa

SEQ ID NO: 546892 - RNA, 19 nt, Artificial Sequence
  Description of Artificial Sequence: Synthetic oligonucleotide
  Antisense strand to SEQ ID NO: 546891
uuaaggcucacagagauaa

SEQ ID NO: 546893 - RNA, 19 nt, Artificial Sequence
  Description of Artificial Sequence: Synthetic oligonucleotide
  Sense strand starting at position 2909 of SEQ ID NO: 318232
agugcauaaggguauuaga

SEQ ID NO: 546894 - RNA, 19 nt, Artificial Sequence
  Description of Artificial Sequence: Synthetic oligonucleotide
  Antisense strand to SEQ ID NO: 546893
ucuaauacccuuaugcacu

SEQ ID NO: 546895 - RNA, 19 nt, Artificial Sequence
  Description of Artificial Sequence: Synthetic oligonucleotide
  Sense strand starting at position 2972 of SEQ ID NO: 318232
auacguguuguguaauuac

SEQ ID NO: 546896 - RNA, 19 nt, Artificial Sequence
  Description of Artificial Sequence: Synthetic oligonucleotide
  Antisense strand to SEQ ID NO: 546895
guaauuacacaacacguau

SEQ ID NO: 546897 - RNA, 19 nt, Artificial Sequence
  Description of Artificial Sequence: Synthetic oligonucleotide
  Sense strand starting at position 3809 of SEQ ID NO: 318232
ggcauuauuucugcucaca

SEQ ID NO: 546898 - RNA, 19 nt, Artificial Sequence
  Description of Artificial Sequence: Synthetic oligonucleotide
  Antisense strand to SEQ ID NO: 546897
ugugagcagaaauaaugcc

SEQ ID NO: 546899 - RNA, 19 nt, Artificial Sequence
  Description of Artificial Sequence: Synthetic oligonucleotide
  Sense strand starting at position 31 of SEQ ID NO: 318233
acaaauccuguaugggaau

SEQ ID NO: 546900 - RNA, 19 nt, Artificial Sequence
  Description of Artificial Sequence: Synthetic oligonucleotide
  Antisense strand to SEQ ID NO: 546899
auucccauacaggauuugu

SEQ ID NO: 546901 - RNA, 19 nt, Artificial Sequence
  Description of Artificial Sequence: Synthetic oligonucleotide
  Sense strand starting at position 102 of SEQ ID NO: 318233
ucagcuugugaacagauaa

SEQ ID NO: 546902 - RNA, 19 nt, Artificial Sequence
  Description of Artificial Sequence: Synthetic oligonucleotide
  Antisense strand to SEQ ID NO: 546901
uuaucuguucacaagcuga

SEQ ID NO: 546903 - RNA, 19 nt, Artificial Sequence
  Description of Artificial Sequence: Synthetic oligonucleotide
  Sense strand starting at position 231 of SEQ ID NO: 318233
gucuaaauccuguauaauu

SEQ ID NO: 546904 - RNA, 19 nt, Artificial Sequence
  Description of Artificial Sequence: Synthetic oligonucleotide
  Antisense strand to SEQ ID NO: 546903
aauuauacaggauuuagac

SEQ ID NO: 546905 - RNA, 19 nt, Artificial Sequence
  Description of Artificial Sequence: Synthetic oligonucleotide
  Sense strand starting at position 347 of SEQ ID NO: 318233
ggaaauucugauggugaug

SEQ ID NO: 546906 - RNA, 19 nt, Artificial Sequence
  Description of Artificial Sequence: Synthetic oligonucleotide
  Antisense strand to SEQ ID NO: 546905
caucaccaucagaauuucc

SEQ ID NO: 546907 - RNA, 19 nt, Artificial Sequence
  Description of Artificial Sequence: Synthetic oligonucleotide
  Sense strand starting at position 353 of SEQ ID NO: 318233
ucugauggugauggaauua

SEQ ID NO: 546908 - RNA, 19 nt, Artificial Sequence
  Description of Artificial Sequence: Synthetic oligonucleotide
  Antisense strand to SEQ ID NO: 546907
uaauuccaucaccaucaga

SEQ ID NO: 546909 - RNA, 19 nt, Artificial Sequence
  Description of Artificial Sequence: Synthetic oligonucleotide
  Sense strand starting at position 379 of SEQ ID NO: 318233
acuugaauccagugagguu

SEQ ID NO: 546910 - RNA, 19 nt, Artificial Sequence
  Description of Artificial Sequence: Synthetic oligonucleotide
  Antisense strand to SEQ ID NO: 546909
aaccucacuggauucaagu

SEQ ID NO: 546911 - RNA, 19 nt, Artificial Sequence
  Description of Artificial Sequence: Synthetic oligonucleotide
  Sense strand starting at position 380 of SEQ ID NO: 318233
cuugaauccagugagguua

SEQ ID NO: 546912 - RNA, 19 nt, Artificial Sequence
  Description of Artificial Sequence: Synthetic oligonucleotide
  Antisense strand to SEQ ID NO: 546911
uaaccucacuggauucaag

SEQ ID NO: 546913 - RNA, 19 nt, Artificial Sequence
  Description of Artificial Sequence: Synthetic oligonucleotide
  Sense strand starting at position 553 of SEQ ID NO: 318233
gcaaccugucaagaaauac

SEQ ID NO: 546914 - RNA, 19 nt, Artificial Sequence
  Description of Artificial Sequence: Synthetic oligonucleotide
  Antisense strand to SEQ ID NO: 546913
guauuucuugacagguugc

SEQ ID NO: 546915 - RNA, 19 nt, Artificial Sequence
  Description of Artificial Sequence: Synthetic oligonucleotide
  Sense strand starting at position 617 of SEQ ID NO: 318233
agacauauucccugccuga

SEQ ID NO: 546916 - RNA, 19 nt, Artificial Sequence
  Description of Artificial Sequence: Synthetic oligonucleotide
  Antisense strand to SEQ ID NO: 546915
ucaggcagggaauaugucu

SEQ ID NO: 546917 - RNA, 19 nt, Artificial Sequence
  Description of Artificial Sequence: Synthetic oligonucleotide
  Sense strand starting at position 736 of SEQ ID NO: 318233
uuuauaugugugggaaaug

SEQ ID NO: 546918 - RNA, 19 nt, Artificial Sequence
  Description of Artificial Sequence: Synthetic oligonucleotide
  Antisense strand to SEQ ID NO: 546917
cauuucccacacauauaaa

SEQ ID NO: 546919 - RNA, 19 nt, Artificial Sequence
  Description of Artificial Sequence: Synthetic oligonucleotide
  Sense strand starting at position 745 of SEQ ID NO: 318233
gugggaaaugaauggcaca

SEQ ID NO: 546920 - RNA, 19 nt, Artificial Sequence
  Description of Artificial Sequence: Synthetic oligonucleotide
  Antisense strand to SEQ ID NO: 546919
ugugccauucauuucccac

SEQ ID NO: 546921 - RNA, 19 nt, Artificial Sequence
  Description of Artificial Sequence: Synthetic oligonucleotide
  Sense strand starting at position 1050 of SEQ ID NO: 318233
gcacgaauccuacacagua

SEQ ID NO: 546922 - RNA, 19 nt, Artificial Sequence
  Description of Artificial Sequence: Synthetic oligonucleotide
  Antisense strand to SEQ ID NO: 546921
uacuguguaggauucgugc

SEQ ID NO: 546923 - RNA, 19 nt, Artificial Sequence
  Description of Artificial Sequence: Synthetic oligonucleotide
  Sense strand starting at position 1619 of SEQ ID NO: 318233
gggaaauucucuccgguga

SEQ ID NO: 546924 - RNA, 19 nt, Artificial Sequence
  Description of Artificial Sequence: Synthetic oligonucleotide
  Antisense strand to SEQ ID NO: 546923
ucaccggagagaauuuccc

SEQ ID NO: 546925 - RNA, 19 nt, Artificial Sequence
  Description of Artificial Sequence: Synthetic oligonucleotide
  Sense strand starting at position 2008 of SEQ ID NO: 318233
caccauuggccggauauau

SEQ ID NO: 546926 - RNA, 19 nt, Artificial Sequence
  Description of Artificial Sequence: Synthetic oligonucleotide
  Antisense strand to SEQ ID NO: 546925
auauauccggccaauggug

SEQ ID NO: 546927 - RNA, 19 nt, Artificial Sequence
  Description of Artificial Sequence: Synthetic oligonucleotide
  Sense strand starting at position 2018 of SEQ ID NO: 318233
cggauauaucaccgacuga

SEQ ID NO: 546928 - RNA, 19 nt, Artificial Sequence
  Description of Artificial Sequence: Synthetic oligonucleotide
  Antisense strand to SEQ ID NO: 546927
ucagucggugauauauccg

SEQ ID NO: 546929 - RNA, 19 nt, Artificial Sequence
  Description of Artificial Sequence: Synthetic oligonucleotide
  Sense strand starting at position 2244 of SEQ ID NO: 318233
gaccaaugacuguaagcuu

SEQ ID NO: 546930 - RNA, 19 nt, Artificial Sequence
  Description of Artificial Sequence: Synthetic oligonucleotide
  Antisense strand to SEQ ID NO: 546929
aagcuuacagucauugguc

SEQ ID NO: 546931 - RNA, 19 nt, Artificial Sequence
  Description of Artificial Sequence: Synthetic oligonucleotide
  Sense strand starting at position 2561 of SEQ ID NO: 318233
agugaauuccuacagugug

SEQ ID NO: 546932 - RNA, 19 nt, Artificial Sequence
  Description of Artificial Sequence: Synthetic oligonucleotide
  Antisense strand to SEQ ID NO: 546931
cacacuguaggaauucacu

SEQ ID NO: 546933 - RNA, 19 nt, Artificial Sequence
  Description of Artificial Sequence: Synthetic oligonucleotide
  Sense strand starting at position 2708 of SEQ ID NO: 318233
ccuuguguacuugaguaga

SEQ ID NO: 546934 - RNA, 19 nt, Artificial Sequence
  Description of Artificial Sequence: Synthetic oligonucleotide
  Antisense strand to SEQ ID NO: 546933
ucuacucaaguacacaagg

SEQ ID NO: 546935 - RNA, 19 nt, Artificial Sequence
  Description of Artificial Sequence: Synthetic oligonucleotide
  Sense strand starting at position 2719 of SEQ ID NO: 318233
ugaguagaggugugaagau

SEQ ID NO: 546936 - RNA, 19 nt, Artificial Sequence
  Description of Artificial Sequence: Synthetic oligonucleotide
  Antisense strand to SEQ ID NO: 546935
aucuucacaccucuacuca

SEQ ID NO: 546937 - RNA, 19 nt, Artificial Sequence
  Description of Artificial Sequence: Synthetic oligonucleotide
  Sense strand starting at position 2776 of SEQ ID NO: 318233
uggagaauggguugcaacu

SEQ ID NO: 546938 - RNA, 19 nt, Artificial Sequence
  Description of Artificial Sequence: Synthetic oligonucleotide
  Antisense strand to SEQ ID NO: 546937
aguugcaacccauucucca

SEQ ID NO: 546939 - RNA, 19 nt, Artificial Sequence
  Description of Artificial Sequence: Synthetic oligonucleotide
  Sense strand starting at position 2782 of SEQ ID NO: 318233
auggguugcaacugagaac

SEQ ID NO: 546940 - RNA, 19 nt, Artificial Sequence
  Description of Artificial Sequence: Synthetic oligonucleotide
  Antisense strand to SEQ ID NO: 546939
guucucaguugcaacccau

SEQ ID NO: 546941 - RNA, 19 nt, Artificial Sequence
  Description of Artificial Sequence: Synthetic oligonucleotide
  Sense strand starting at position 2833 of SEQ ID NO: 318233
auuacacuuguccgggaga

SEQ ID NO: 546942 - RNA, 19 nt, Artificial Sequence
  Description of Artificial Sequence: Synthetic oligonucleotide
  Antisense strand to SEQ ID NO: 546941
ucucccggacaaguguaau

SEQ ID NO: 546943 - RNA, 19 nt, Artificial Sequence
  Description of Artificial Sequence: Synthetic oligonucleotide
  Sense strand starting at position 2835 of SEQ ID NO: 318233
uacacuuguccgggagaga

SEQ ID NO: 546944 - RNA, 19 nt, Artificial Sequence
  Description of Artificial Sequence: Synthetic oligonucleotide
  Antisense strand to SEQ ID NO: 546943
ucucucccggacaagugua

SEQ ID NO: 546945 - RNA, 19 nt, Artificial Sequence
  Description of Artificial Sequence: Synthetic oligonucleotide
  Sense strand starting at position 2838 of SEQ ID NO: 318233
acuuguccgggagagaguu

SEQ ID NO: 546946 - RNA, 19 nt, Artificial Sequence
  Description of Artificial Sequence: Synthetic oligonucleotide
  Antisense strand to SEQ ID NO: 546945
aacucucucccggacaagu

SEQ ID NO: 546947 - RNA, 19 nt, Artificial Sequence
  Description of Artificial Sequence: Synthetic oligonucleotide
  Sense strand starting at position 2875 of SEQ ID NO: 318233
agaguugccaaguagaaua

SEQ ID NO: 546948 - RNA, 19 nt, Artificial Sequence
  Description of Artificial Sequence: Synthetic oligonucleotide
  Antisense strand to SEQ ID NO: 546947
uauucuacuuggcaacucu

SEQ ID NO: 546949 - RNA, 19 nt, Artificial Sequence
  Description of Artificial Sequence: Synthetic oligonucleotide
  Sense strand starting at position 2910 of SEQ ID NO: 318233
uugaacaacgucugagaaa

SEQ ID NO: 546950 - RNA, 19 nt, Artificial Sequence
  Description of Artificial Sequence: Synthetic oligonucleotide
  Antisense strand to SEQ ID NO: 546949
uuucucagacguuguucaa

SEQ ID NO: 546951 - RNA, 19 nt, Artificial Sequence
  Description of Artificial Sequence: Synthetic oligonucleotide
  Sense strand starting at position 2934 of SEQ ID NO: 318233
ucaacaggccauggaaauu

SEQ ID NO: 546952 - RNA, 19 nt, Artificial Sequence
  Description of Artificial Sequence: Synthetic oligonucleotide
  Antisense strand to SEQ ID NO: 546951
aauuuccauggccuguuga

SEQ ID NO: 546953 - RNA, 19 nt, Artificial Sequence
  Description of Artificial Sequence: Synthetic oligonucleotide
  Sense strand starting at position 2946 of SEQ ID NO: 318233
ggaaauugaguggauacgu

SEQ ID NO: 546954 - RNA, 19 nt, Artificial Sequence
  Description of Artificial Sequence: Synthetic oligonucleotide
  Antisense strand to SEQ ID NO: 546953
acguauccacucaauuucc

SEQ ID NO: 546955 - RNA, 19 nt, Artificial Sequence
  Description of Artificial Sequence: Synthetic oligonucleotide
  Sense strand starting at position 2956 of SEQ ID NO: 318233
uggauacgugaaugacaaa

SEQ ID NO: 546956 - RNA, 19 nt, Artificial Sequence
  Description of Artificial Sequence: Synthetic oligonucleotide
  Antisense strand to SEQ ID NO: 546955
uuugucauucacguaucca

SEQ ID NO: 546957 - RNA, 19 nt, Artificial Sequence
  Description of Artificial Sequence: Synthetic oligonucleotide
  Sense strand starting at position 3012 of SEQ ID NO: 318233
uguauaagaaguugaaugu

SEQ ID NO: 546958 - RNA, 19 nt, Artificial Sequence
  Description of Artificial Sequence: Synthetic oligonucleotide
  Antisense strand to SEQ ID NO: 546957
acauucaacuucuuauaca

SEQ ID NO: 546959 - RNA, 19 nt, Artificial Sequence
  Description of Artificial Sequence: Synthetic oligonucleotide
  Sense strand starting at position 3013 of SEQ ID NO: 318233
guauaagaaguugaauguu

SEQ ID NO: 546960 - RNA, 19 nt, Artificial Sequence
  Description of Artificial Sequence: Synthetic oligonucleotide
  Antisense strand to SEQ ID NO: 546959
aacauucaacuucuuauac

SEQ ID NO: 546961 - RNA, 19 nt, Artificial Sequence
  Description of Artificial Sequence: Synthetic oligonucleotide
  Sense strand starting at position 3030 of SEQ ID NO: 318233
uugguaauauacucugaga

SEQ ID NO: 546962 - RNA, 19 nt, Artificial Sequence
  Description of Artificial Sequence: Synthetic oligonucleotide
  Antisense strand to SEQ ID NO: 546961
ucucagaguauauuaccaa

SEQ ID NO: 546963 - RNA, 19 nt, Artificial Sequence
  Description of Artificial Sequence: Synthetic oligonucleotide
  Sense strand starting at position 3130 of SEQ ID NO: 318233
ggagaacacaguugcuuau

SEQ ID NO: 546964 - RNA, 19 nt, Artificial Sequence
  Description of Artificial Sequence: Synthetic oligonucleotide
  Antisense strand to SEQ ID NO: 546963
auaagcaacuguguucucc

SEQ ID NO: 546965 - RNA, 19 nt, Artificial Sequence
  Description of Artificial Sequence: Synthetic oligonucleotide
  Sense strand starting at position 3134 of SEQ ID NO: 318233
aacacaguugcuuaugagu

SEQ ID NO: 546966 - RNA, 19 nt, Artificial Sequence
  Description of Artificial Sequence: Synthetic oligonucleotide
  Antisense strand to SEQ ID NO: 546965
acucauaagcaacuguguu

SEQ ID NO: 546967 - RNA, 19 nt, Artificial Sequence
  Description of Artificial Sequence: Synthetic oligonucleotide
  Sense strand starting at position 3141 of SEQ ID NO: 318233
uugcuuaugaguucugcgu

SEQ ID NO: 546968 - RNA, 19 nt, Artificial Sequence
  Description of Artificial Sequence: Synthetic oligonucleotide
  Antisense strand to SEQ ID NO: 546967
acgcagaacucauaagcaa

SEQ ID NO: 546969 - RNA, 19 nt, Artificial Sequence
  Description of Artificial Sequence: Synthetic oligonucleotide
  Sense strand starting at position 3142 of SEQ ID NO: 318233
ugcuuaugaguucugcguu

SEQ ID NO: 546970 - RNA, 19 nt, Artificial Sequence
  Description of Artificial Sequence: Synthetic oligonucleotide
  Antisense strand to SEQ ID NO: 546969
aacgcagaacucauaagca

SEQ ID NO: 546971 - RNA, 19 nt, Artificial Sequence
  Description of Artificial Sequence: Synthetic oligonucleotide
  Sense strand starting at position 3336 of SEQ ID NO: 318233
cugauuuccucagucugca

SEQ ID NO: 546972 - RNA, 19 nt, Artificial Sequence
  Description of Artificial Sequence: Synthetic oligonucleotide
  Antisense strand to SEQ ID NO: 546971
ugcagacugaggaaaucag

SEQ ID NO: 546973 - RNA, 19 nt, Artificial Sequence
  Description of Artificial Sequence: Synthetic oligonucleotide
  Sense strand starting at position 3377 of SEQ ID NO: 318233
ggcagugucauuguugcca

SEQ ID NO: 546974 - RNA, 19 nt, Artificial Sequence
  Description of Artificial Sequence: Synthetic oligonucleotide
  Antisense strand to SEQ ID NO: 546973
uggcaacaaugacacugcc

SEQ ID NO: 546975 - RNA, 19 nt, Artificial Sequence
  Description of Artificial Sequence: Synthetic oligonucleotide
  Sense strand starting at position 3738 of SEQ ID NO: 318233
gcuauuucucacgguuaau

SEQ ID NO: 546976 - RNA, 19 nt, Artificial Sequence
  Description of Artificial Sequence: Synthetic oligonucleotide
  Antisense strand to SEQ ID NO: 546975
auuaaccgugagaaauagc

SEQ ID NO: 546977 - RNA, 19 nt, Artificial Sequence
  Description of Artificial Sequence: Synthetic oligonucleotide
  Sense strand starting at position 3793 of SEQ ID NO: 318233
aagugaggauugcuuauac

SEQ ID NO: 546978 - RNA, 19 nt, Artificial Sequence
  Description of Artificial Sequence: Synthetic oligonucleotide
  Antisense strand to SEQ ID NO: 546977
guauaagcaauccucacuu

SEQ ID NO: 546979 - RNA, 19 nt, Artificial Sequence
  Description of Artificial Sequence: Synthetic oligonucleotide
  Sense strand starting at position 42 of SEQ ID NO: 318234
cuucccuggcauuaagauu

SEQ ID NO: 546980 - RNA, 19 nt, Artificial Sequence
  Description of Artificial Sequence: Synthetic oligonucleotide
  Antisense strand to SEQ ID NO: 546979
aaucuuaaugccagggaag

SEQ ID NO: 546981 - RNA, 19 nt, Artificial Sequence
  Description of Artificial Sequence: Synthetic oligonucleotide
  Sense strand starting at position 120 of SEQ ID NO: 318234
aaguuuggauauguaguaa

SEQ ID NO: 546982 - RNA, 19 nt, Artificial Sequence
  Description of Artificial Sequence: Synthetic oligonucleotide
  Antisense strand to SEQ ID NO: 546981
uuacuacauauccaaacuu

SEQ ID NO: 546983 - RNA, 19 nt, Artificial Sequence
  Description of Artificial Sequence: Synthetic oligonucleotide
  Sense strand starting at position 278 of SEQ ID NO: 318234
gggcuaccaugaguacauu

SEQ ID NO: 546984 - RNA, 19 nt, Artificial Sequence
  Description of Artificial Sequence: Synthetic oligonucleotide
  Antisense strand to SEQ ID NO: 546983
aauguacucaugguagccc

SEQ ID NO: 546985 - RNA, 19 nt, Artificial Sequence
  Description of Artificial Sequence: Synthetic oligonucleotide
  Sense strand starting at position 279 of SEQ ID NO: 318234
ggcuaccaugaguacauua

SEQ ID NO: 546986 - RNA, 19 nt, Artificial Sequence
  Description of Artificial Sequence: Synthetic oligonucleotide
  Antisense strand to SEQ ID NO: 546985
uaauguacucaugguagcc

SEQ ID NO: 546987 - RNA, 19 nt, Artificial Sequence
  Description of Artificial Sequence: Synthetic oligonucleotide
  Sense strand starting at position 289 of SEQ ID NO: 318234
aguacauuauuaucuggga

SEQ ID NO: 546988 - RNA, 19 nt, Artificial Sequence
  Description of Artificial Sequence: Synthetic oligonucleotide
  Antisense strand to SEQ ID NO: 546987
ucccagauaauaauguacu

SEQ ID NO: 546989 - RNA, 19 nt, Artificial Sequence
  Description of Artificial Sequence: Synthetic oligonucleotide
  Sense strand starting at position 290 of SEQ ID NO: 318234
guacauuauuaucugggaa

SEQ ID NO: 546990 - RNA, 19 nt, Artificial Sequence
  Description of Artificial Sequence: Synthetic oligonucleotide
  Antisense strand to SEQ ID NO: 546989
uucccagauaauaauguac

SEQ ID NO: 546991 - RNA, 19 nt, Artificial Sequence
  Description of Artificial Sequence: Synthetic oligonucleotide
  Sense strand starting at position 320 of SEQ ID NO: 318234
cccuauaaucuguacggga

SEQ ID NO: 546992 - RNA, 19 nt, Artificial Sequence
  Description of Artificial Sequence: Synthetic oligonucleotide
  Antisense strand to SEQ ID NO: 546991
ucccguacagauuauaggg

SEQ ID NO: 546993 - RNA, 19 nt, Artificial Sequence
  Description of Artificial Sequence: Synthetic oligonucleotide
  Sense strand starting at position 324 of SEQ ID NO: 318234
auaaucuguacgggaggaa

SEQ ID NO: 546994 - RNA, 19 nt, Artificial Sequence
  Description of Artificial Sequence: Synthetic oligonucleotide
  Antisense strand to SEQ ID NO: 546993
uuccucccguacagauuau

SEQ ID NO: 546995 - RNA, 19 nt, Artificial Sequence
  Description of Artificial Sequence: Synthetic oligonucleotide
  Sense strand starting at position 353 of SEQ ID NO: 318234
uggucaccgcuauauuaac

SEQ ID NO: 546996 - RNA, 19 nt, Artificial Sequence
  Description of Artificial Sequence: Synthetic oligonucleotide
  Antisense strand to SEQ ID NO: 546995
guuaauauagcggugacca

SEQ ID NO: 546997 - RNA, 19 nt, Artificial Sequence
  Description of Artificial Sequence: Synthetic oligonucleotide
  Sense strand starting at position 374 of SEQ ID NO: 318234
uaaguuaaccagugaagua

SEQ ID NO: 546998 - RNA, 19 nt, Artificial Sequence
  Description of Artificial Sequence: Synthetic oligonucleotide
  Antisense strand to SEQ ID NO: 546997
uacuucacugguuaacuua

SEQ ID NO: 546999 - RNA, 19 nt, Artificial Sequence
  Description of Artificial Sequence: Synthetic oligonucleotide
  Sense strand starting at position 716 of SEQ ID NO: 318234
gagugacucuauucuaugu

SEQ ID NO: 547000 - RNA, 19 nt, Artificial Sequence
  Description of Artificial Sequence: Synthetic oligonucleotide
  Antisense strand to SEQ ID NO: 546999
acauagaauagagucacuc

SEQ ID NO: 547001 - RNA, 19 nt, Artificial Sequence
  Description of Artificial Sequence: Synthetic oligonucleotide
  Sense strand starting at position 1204 of SEQ ID NO: 318234
uacuuuagguucucaagga

SEQ ID NO: 547002 - RNA, 19 nt, Artificial Sequence
  Description of Artificial Sequence: Synthetic oligonucleotide
  Antisense strand to SEQ ID NO: 547001
uccuugagaaccuaaagua

SEQ ID NO: 547003 - RNA, 19 nt, Artificial Sequence
  Description of Artificial Sequence: Synthetic oligonucleotide
  Sense strand starting at position 1868 of SEQ ID NO: 318234
ucuauuaccuggucggaac

SEQ ID NO: 547004 - RNA, 19 nt, Artificial Sequence
  Description of Artificial Sequence: Synthetic oligonucleotide
  Antisense strand to SEQ ID NO: 547003
guuccgaccagguaauaga

SEQ ID NO: 547005 - RNA, 19 nt, Artificial Sequence
  Description of Artificial Sequence: Synthetic oligonucleotide
  Sense strand starting at position 2060 of SEQ ID NO: 318234
uugcgaaauucuuugggau

SEQ ID NO: 547006 - RNA, 19 nt, Artificial Sequence
  Description of Artificial Sequence: Synthetic oligonucleotide
  Antisense strand to SEQ ID NO: 547005
aucccaaagaauuucgcaa

SEQ ID NO: 547007 - RNA, 19 nt, Artificial Sequence
  Description of Artificial Sequence: Synthetic oligonucleotide
  Sense strand starting at position 2116 of SEQ ID NO: 318234
gggaaacgcuuaguuuaaa

SEQ ID NO: 547008 - RNA, 19 nt, Artificial Sequence
  Description of Artificial Sequence: Synthetic oligonucleotide
  Antisense strand to SEQ ID NO: 547007
uuuaaacuaagcguuuccc

SEQ ID NO: 547009 - RNA, 19 nt, Artificial Sequence
  Description of Artificial Sequence: Synthetic oligonucleotide
  Sense strand starting at position 2117 of SEQ ID NO: 318234
ggaaacgcuuaguuuaaau

SEQ ID NO: 547010 - RNA, 19 nt, Artificial Sequence
  Description of Artificial Sequence: Synthetic oligonucleotide
  Antisense strand to SEQ ID NO: 547009
auuuaaacuaagcguuucc

SEQ ID NO: 547011 - RNA, 19 nt, Artificial Sequence
  Description of Artificial Sequence: Synthetic oligonucleotide
  Sense strand starting at position 2172 of SEQ ID NO: 318234
gugcauuaacuguaaauau

SEQ ID NO: 547012 - RNA, 19 nt, Artificial Sequence
  Description of Artificial Sequence: Synthetic oligonucleotide
  Antisense strand to SEQ ID NO: 547011
auauuuacaguuaaugcac

SEQ ID NO: 547013 - RNA, 19 nt, Artificial Sequence
  Description of Artificial Sequence: Synthetic oligonucleotide
  Sense strand starting at position 2350 of SEQ ID NO: 318234
cucuuuggguccuugagaa

SEQ ID NO: 547014 - RNA, 19 nt, Artificial Sequence
  Description of Artificial Sequence: Synthetic oligonucleotide
  Antisense strand to SEQ ID NO: 547013
uucucaaggacccaaagag

SEQ ID NO: 547015 - RNA, 19 nt, Artificial Sequence
  Description of Artificial Sequence: Synthetic oligonucleotide
  Sense strand starting at position 2385 of SEQ ID NO: 318234
uccaaaguauugccagauu

SEQ ID NO: 547016 - RNA, 19 nt, Artificial Sequence
  Description of Artificial Sequence: Synthetic oligonucleotide
  Antisense strand to SEQ ID NO: 547015
aaucuggcaauacuuugga

SEQ ID NO: 547017 - RNA, 19 nt, Artificial Sequence
  Description of Artificial Sequence: Synthetic oligonucleotide
  Sense strand starting at position 2439 of SEQ ID NO: 318234
uuugauauucuguaguagu

SEQ ID NO: 547018 - RNA, 19 nt, Artificial Sequence
  Description of Artificial Sequence: Synthetic oligonucleotide
  Antisense strand to SEQ ID NO: 547017
acuacuacagaauaucaaa

SEQ ID NO: 547019 - RNA, 19 nt, Artificial Sequence
  Description of Artificial Sequence: Synthetic oligonucleotide
  Sense strand starting at position 2452 of SEQ ID NO: 318234
aguaguaauguucguauuu

SEQ ID NO: 547020 - RNA, 19 nt, Artificial Sequence
  Description of Artificial Sequence: Synthetic oligonucleotide
  Antisense strand to SEQ ID NO: 547019
aaauacgaacauuacuacu

SEQ ID NO: 547021 - RNA, 19 nt, Artificial Sequence
  Description of Artificial Sequence: Synthetic oligonucleotide
  Sense strand starting at position 2487 of SEQ ID NO: 318234
ggauacgugaucuggcaaa

SEQ ID NO: 547022 - RNA, 19 nt, Artificial Sequence
  Description of Artificial Sequence: Synthetic oligonucleotide
  Antisense strand to SEQ ID NO: 547021
uuugccagaucacguaucc

SEQ ID NO: 547023 - RNA, 19 nt, Artificial Sequence
  Description of Artificial Sequence: Synthetic oligonucleotide
  Sense strand starting at position 2494 of SEQ ID NO: 318234
ugaucuggcaaaggauuau

SEQ ID NO: 547024 - RNA, 19 nt, Artificial Sequence
  Description of Artificial Sequence: Synthetic oligonucleotide
  Antisense strand to SEQ ID NO: 547023
auaauccuuugccagauca

SEQ ID NO: 547025 - RNA, 19 nt, Artificial Sequence
  Description of Artificial Sequence: Synthetic oligonucleotide
  Sense strand starting at position 2520 of SEQ ID NO: 318234
cauguagauuuauaugaag

SEQ ID NO: 547026 - RNA, 19 nt, Artificial Sequence
  Description of Artificial Sequence: Synthetic oligonucleotide
  Antisense strand to SEQ ID NO: 547025
cuucauauaaaucuacaug

SEQ ID NO: 547027 - RNA, 19 nt, Artificial Sequence
  Description of Artificial Sequence: Synthetic oligonucleotide
  Sense strand starting at position 2666 of SEQ ID NO: 318234
aauacaaguguuggaaaca

SEQ ID NO: 547028 - RNA, 19 nt, Artificial Sequence
  Description of Artificial Sequence: Synthetic oligonucleotide
  Antisense strand to SEQ ID NO: 547027
uguuuccaacacuuguauu

SEQ ID NO: 547029 - RNA, 19 nt, Artificial Sequence
  Description of Artificial Sequence: Synthetic oligonucleotide
  Sense strand starting at position 2676 of SEQ ID NO: 318234
uuggaaacauguuuguauu

SEQ ID NO: 547030 - RNA, 19 nt, Artificial Sequence
  Description of Artificial Sequence: Synthetic oligonucleotide
  Antisense strand to SEQ ID NO: 547029
aauacaaacauguuuccaa

SEQ ID NO: 547031 - RNA, 19 nt, Artificial Sequence
  Description of Artificial Sequence: Synthetic oligonucleotide
  Sense strand starting at position 2677 of SEQ ID NO: 318234
uggaaacauguuuguauug

SEQ ID NO: 547032 - RNA, 19 nt, Artificial Sequence
  Description of Artificial Sequence: Synthetic oligonucleotide
  Antisense strand to SEQ ID NO: 547031
caauacaaacauguuucca

SEQ ID NO: 547033 - RNA, 19 nt, Artificial Sequence
  Description of Artificial Sequence: Synthetic oligonucleotide
  Sense strand starting at position 2783 of SEQ ID NO: 318234
uguuuaaagaguuaguacu

SEQ ID NO: 547034 - RNA, 19 nt, Artificial Sequence
  Description of Artificial Sequence: Synthetic oligonucleotide
  Antisense strand to SEQ ID NO: 547033
aguacuaacucuuuaaaca

SEQ ID NO: 547035 - RNA, 19 nt, Artificial Sequence
  Description of Artificial Sequence: Synthetic oligonucleotide
  Sense strand starting at position 3057 of SEQ ID NO: 318234
ugaaguugcaaagauagua

SEQ ID NO: 547036 - RNA, 19 nt, Artificial Sequence
  Description of Artificial Sequence: Synthetic oligonucleotide
  Antisense strand to SEQ ID NO: 547035
uacuaucuuugcaacuuca

SEQ ID NO: 547037 - RNA, 19 nt, Artificial Sequence
  Description of Artificial Sequence: Synthetic oligonucleotide
  Sense strand starting at position 3114 of SEQ ID NO: 318234
cucguauaacucuaguaca

SEQ ID NO: 547038 - RNA, 19 nt, Artificial Sequence
  Description of Artificial Sequence: Synthetic oligonucleotide
  Antisense strand to SEQ ID NO: 547037
uguacuagaguuauacgag

SEQ ID NO: 547039 - RNA, 19 nt, Artificial Sequence
  Description of Artificial Sequence: Synthetic oligonucleotide
  Sense strand starting at position 3145 of SEQ ID NO: 318234
ggaaacuggcauugauaua

SEQ ID NO: 547040 - RNA, 19 nt, Artificial Sequence
  Description of Artificial Sequence: Synthetic oligonucleotide
  Antisense strand to SEQ ID NO: 547039
uauaucaaugccaguuucc

SEQ ID NO: 547041 - RNA, 19 nt, Artificial Sequence
  Description of Artificial Sequence: Synthetic oligonucleotide
  Sense strand starting at position 3166 of SEQ ID NO: 318234
guauuuguguaguccuaug

SEQ ID NO: 547042 - RNA, 19 nt, Artificial Sequence
  Description of Artificial Sequence: Synthetic oligonucleotide
  Antisense strand to SEQ ID NO: 547041
cauaggacuacacaaauac

SEQ ID NO: 547043 - RNA, 19 nt, Artificial Sequence
  Description of Artificial Sequence: Synthetic oligonucleotide
  Sense strand starting at position 3355 of SEQ ID NO: 318234
ggacucaugcaguacauga

SEQ ID NO: 547044 - RNA, 19 nt, Artificial Sequence
  Description of Artificial Sequence: Synthetic oligonucleotide
  Antisense strand to SEQ ID NO: 547043
ucauguacugcaugagucc

SEQ ID NO: 547045 - RNA, 19 nt, Artificial Sequence
  Description of Artificial Sequence: Synthetic oligonucleotide
  Sense strand starting at position 3468 of SEQ ID NO: 318234
aguaauauuccaugacaug

SEQ ID NO: 547046 - RNA, 19 nt, Artificial Sequence
  Description of Artificial Sequence: Synthetic oligonucleotide
  Antisense strand to SEQ ID NO: 547045
caugucauggaauauuacu

SEQ ID NO: 547047 - RNA, 19 nt, Artificial Sequence
  Description of Artificial Sequence: Synthetic oligonucleotide
  Sense strand starting at position 3655 of SEQ ID NO: 318234
augugauacauguaugugu

SEQ ID NO: 547048 - RNA, 19 nt, Artificial Sequence
  Description of Artificial Sequence: Synthetic oligonucleotide
  Antisense strand to SEQ ID NO: 547047
acacauacauguaucacau

SEQ ID NO: 547049 - RNA, 19 nt, Artificial Sequence
  Description of Artificial Sequence: Synthetic oligonucleotide
  Sense strand starting at position 3660 of SEQ ID NO: 318234
auacauguaugugucauuu

SEQ ID NO: 547050 - RNA, 19 nt, Artificial Sequence
  Description of Artificial Sequence: Synthetic oligonucleotide
  Antisense strand to SEQ ID NO: 547049
aaaugacacauacauguau

SEQ ID NO: 547051 - RNA, 19 nt, Artificial Sequence
  Description of Artificial Sequence: Synthetic oligonucleotide
  Sense strand starting at position 3732 of SEQ ID NO: 318234
uccagcaauguaugagaga

SEQ ID NO: 547052 - RNA, 19 nt, Artificial Sequence
  Description of Artificial Sequence: Synthetic oligonucleotide
  Antisense strand to SEQ ID NO: 547051
ucucucauacauugcugga

SEQ ID NO: 547053 - RNA, 19 nt, Artificial Sequence
  Description of Artificial Sequence: Synthetic oligonucleotide
  Sense strand starting at position 3833 of SEQ ID NO: 318234
aguaauaccucaucacagu

SEQ ID NO: 547054 - RNA, 19 nt, Artificial Sequence
  Description of Artificial Sequence: Synthetic oligonucleotide
  Antisense strand to SEQ ID NO: 547053
acugugaugagguauuacu

SEQ ID NO: 547055 - RNA, 19 nt, Artificial Sequence
  Description of Artificial Sequence: Synthetic oligonucleotide
  Sense strand starting at position 3834 of SEQ ID NO: 318234
guaauaccucaucacaguu

SEQ ID NO: 547056 - RNA, 19 nt, Artificial Sequence
  Description of Artificial Sequence: Synthetic oligonucleotide
  Antisense strand to SEQ ID NO: 547055
aacugugaugagguauuac

SEQ ID NO: 547057 - RNA, 19 nt, Artificial Sequence
  Description of Artificial Sequence: Synthetic oligonucleotide
  Sense strand starting at position 3927 of SEQ ID NO: 318234
ucaguuaaauguccuuaug

SEQ ID NO: 547058 - RNA, 19 nt, Artificial Sequence
  Description of Artificial Sequence: Synthetic oligonucleotide
  Antisense strand to SEQ ID NO: 547057
cauaaggacauuuaacuga

SEQ ID NO: 547059 - RNA, 19 nt, Artificial Sequence
  Description of Artificial Sequence: Synthetic oligonucleotide
  Sense strand starting at position 178 of SEQ ID NO: 318235
ccuguagcucuggaauaga

SEQ ID NO: 547060 - RNA, 19 nt, Artificial Sequence
  Description of Artificial Sequence: Synthetic oligonucleotide
  Antisense strand to SEQ ID NO: 547059
ucuauuccagagcuacagg

SEQ ID NO: 547061 - RNA, 19 nt, Artificial Sequence
  Description of Artificial Sequence: Synthetic oligonucleotide
  Sense strand starting at position 221 of SEQ ID NO: 318235
uggauaacguaaccaagau

SEQ ID NO: 547062 - RNA, 19 nt, Artificial Sequence
  Description of Artificial Sequence: Synthetic oligonucleotide
  Antisense strand to SEQ ID NO: 547061
aucuugguuacguuaucca

SEQ ID NO: 547063 - RNA, 19 nt, Artificial Sequence
  Description of Artificial Sequence: Synthetic oligonucleotide
  Sense strand starting at position 325 of SEQ ID NO: 318235
ugaauaagguggcugugaa

SEQ ID NO: 547064 - RNA, 19 nt, Artificial Sequence
  Description of Artificial Sequence: Synthetic oligonucleotide
  Antisense strand to SEQ ID NO: 547063
uucacagccaccuuauuca

SEQ ID NO: 547065 - RNA, 19 nt, Artificial Sequence
  Description of Artificial Sequence: Synthetic oligonucleotide
  Sense strand starting at position 326 of SEQ ID NO: 318235
gaauaagguggcugugaag

SEQ ID NO: 547066 - RNA, 19 nt, Artificial Sequence
  Description of Artificial Sequence: Synthetic oligonucleotide
  Antisense strand to SEQ ID NO: 547065
cuucacagccaccuuauuc

SEQ ID NO: 547067 - RNA, 19 nt, Artificial Sequence
  Description of Artificial Sequence: Synthetic oligonucleotide
  Sense strand starting at position 387 of SEQ ID NO: 318235
ggaggcaugccugaucuaa

SEQ ID NO: 547068 - RNA, 19 nt, Artificial Sequence
  Description of Artificial Sequence: Synthetic oligonucleotide
  Antisense strand to SEQ ID NO: 547067
uuagaucaggcaugccucc

SEQ ID NO: 547069 - RNA, 19 nt, Artificial Sequence
  Description of Artificial Sequence: Synthetic oligonucleotide
  Sense strand starting at position 389 of SEQ ID NO: 318235
aggcaugccugaucuaauu

SEQ ID NO: 547070 - RNA, 19 nt, Artificial Sequence
  Description of Artificial Sequence: Synthetic oligonucleotide
  Antisense strand to SEQ ID NO: 547069
aauuagaucaggcaugccu

SEQ ID NO: 547071 - RNA, 19 nt, Artificial Sequence
  Description of Artificial Sequence: Synthetic oligonucleotide
  Sense strand starting at position 414 of SEQ ID NO: 318235
ucaggagcucauugacaug

SEQ ID NO: 547072 - RNA, 19 nt, Artificial Sequence
  Description of Artificial Sequence: Synthetic oligonucleotide
  Antisense strand to SEQ ID NO: 547071
caugucaaugagcuccuga

SEQ ID NO: 547073 - RNA, 19 nt, Artificial Sequence
  Description of Artificial Sequence: Synthetic oligonucleotide
  Sense strand starting at position 419 of SEQ ID NO: 318235
agcucauugacaugaguga

SEQ ID NO: 547074 - RNA, 19 nt, Artificial Sequence
  Description of Artificial Sequence: Synthetic oligonucleotide
  Antisense strand to SEQ ID NO: 547073
ucacucaugucaaugagcu

SEQ ID NO: 547075 - RNA, 19 nt, Artificial Sequence
  Description of Artificial Sequence: Synthetic oligonucleotide
  Sense strand starting at position 420 of SEQ ID NO: 318235
gcucauugacaugagugau

SEQ ID NO: 547076 - RNA, 19 nt, Artificial Sequence
  Description of Artificial Sequence: Synthetic oligonucleotide
  Antisense strand to SEQ ID NO: 547075
aucacucaugucaaugagc

SEQ ID NO: 547077 - RNA, 19 nt, Artificial Sequence
  Description of Artificial Sequence: Synthetic oligonucleotide
  Sense strand starting at position 426 of SEQ ID NO: 318235
ugacaugagugauagagaa

SEQ ID NO: 547078 - RNA, 19 nt, Artificial Sequence
  Description of Artificial Sequence: Synthetic oligonucleotide
  Antisense strand to SEQ ID NO: 547077
uucucuaucacucauguca

SEQ ID NO: 547079 - RNA, 19 nt, Artificial Sequence
  Description of Artificial Sequence: Synthetic oligonucleotide
  Sense strand starting at position 480 of SEQ ID NO: 318235
gcagaaggauucuaauuuc

SEQ ID NO: 547080 - RNA, 19 nt, Artificial Sequence
  Description of Artificial Sequence: Synthetic oligonucleotide
  Antisense strand to SEQ ID NO: 547079
gaaauuagaauccuucugc

SEQ ID NO: 547081 - RNA, 19 nt, Artificial Sequence
  Description of Artificial Sequence: Synthetic oligonucleotide
  Sense strand starting at position 613 of SEQ ID NO: 318235
caguguaagucccuguaaa

SEQ ID NO: 547082 - RNA, 19 nt, Artificial Sequence
  Description of Artificial Sequence: Synthetic oligonucleotide
  Antisense strand to SEQ ID NO: 547081
uuuacagggacuuacacug

SEQ ID NO: 547083 - RNA, 19 nt, Artificial Sequence
  Description of Artificial Sequence: Synthetic oligonucleotide
  Sense strand starting at position 827 of SEQ ID NO: 318235
ggaaacaagucagaaauag

SEQ ID NO: 547084 - RNA, 19 nt, Artificial Sequence
  Description of Artificial Sequence: Synthetic oligonucleotide
  Antisense strand to SEQ ID NO: 547083
cuauuucugacuuguuucc

SEQ ID NO: 547085 - RNA, 19 nt, Artificial Sequence
  Description of Artificial Sequence: Synthetic oligonucleotide
  Sense strand starting at position 942 of SEQ ID NO: 318235
uuauuucuuguugguuaca

SEQ ID NO: 547086 - RNA, 19 nt, Artificial Sequence
  Description of Artificial Sequence: Synthetic oligonucleotide
  Antisense strand to SEQ ID NO: 547085
uguaaccaacaagaaauaa

SEQ ID NO: 547087 - RNA, 19 nt, Artificial Sequence
  Description of Artificial Sequence: Synthetic oligonucleotide
  Sense strand starting at position 945 of SEQ ID NO: 318235
uuucuuguugguuacauaa

SEQ ID NO: 547088 - RNA, 19 nt, Artificial Sequence
  Description of Artificial Sequence: Synthetic oligonucleotide
  Antisense strand to SEQ ID NO: 547087
uuauguaaccaacaagaaa

SEQ ID NO: 547089 - RNA, 19 nt, Artificial Sequence
  Description of Artificial Sequence: Synthetic oligonucleotide
  Sense strand starting at position 1194 of SEQ ID NO: 318235
cacaguacucgguguaauc

SEQ ID NO: 547090 - RNA, 19 nt, Artificial Sequence
  Description of Artificial Sequence: Synthetic oligonucleotide
  Antisense strand to SEQ ID NO: 547089
gauuacaccgaguacugug

SEQ ID NO: 547091 - RNA, 19 nt, Artificial Sequence
  Description of Artificial Sequence: Synthetic oligonucleotide
  Sense strand starting at position 1226 of SEQ ID NO: 318235
gcgagauaccugggaugaa

SEQ ID NO: 547092 - RNA, 19 nt, Artificial Sequence
  Description of Artificial Sequence: Synthetic oligonucleotide
  Antisense strand to SEQ ID NO: 547091
uucaucccagguaucucgc

SEQ ID NO: 547093 - RNA, 19 nt, Artificial Sequence
  Description of Artificial Sequence: Synthetic oligonucleotide
  Sense strand starting at position 1227 of SEQ ID NO: 318235
cgagauaccugggaugaaa

SEQ ID NO: 547094 - RNA, 19 nt, Artificial Sequence
  Description of Artificial Sequence: Synthetic oligonucleotide
  Antisense strand to SEQ ID NO: 547093
uuucaucccagguaucucg

SEQ ID NO: 547095 - RNA, 19 nt, Artificial Sequence
  Description of Artificial Sequence: Synthetic oligonucleotide
  Sense strand starting at position 1249 of SEQ ID NO: 318235
gguggucaccuggaucaga

SEQ ID NO: 547096 - RNA, 19 nt, Artificial Sequence
  Description of Artificial Sequence: Synthetic oligonucleotide
  Antisense strand to SEQ ID NO: 547095
ucugauccaggugaccacc

SEQ ID NO: 547097 - RNA, 19 nt, Artificial Sequence
  Description of Artificial Sequence: Synthetic oligonucleotide
  Sense strand starting at position 1354 of SEQ ID NO: 318235
ggcauauggccugagagcu

SEQ ID NO: 547098 - RNA, 19 nt, Artificial Sequence
  Description of Artificial Sequence: Synthetic oligonucleotide
  Antisense strand to SEQ ID NO: 547097
agcucucaggccauaugcc

SEQ ID NO: 547099 - RNA, 19 nt, Artificial Sequence
  Description of Artificial Sequence: Synthetic oligonucleotide
  Sense strand starting at position 1362 of SEQ ID NO: 318235
gccugagagcuuuacuauc

SEQ ID NO: 547100 - RNA, 19 nt, Artificial Sequence
  Description of Artificial Sequence: Synthetic oligonucleotide
  Antisense strand to SEQ ID NO: 547099
gauaguaaagcucucaggc

SEQ ID NO: 547101 - RNA, 19 nt, Artificial Sequence
  Description of Artificial Sequence: Synthetic oligonucleotide
  Sense strand starting at position 2100 of SEQ ID NO: 318235
gccggagcugcucucugau

SEQ ID NO: 547102 - RNA, 19 nt, Artificial Sequence
  Description of Artificial Sequence: Synthetic oligonucleotide
  Antisense strand to SEQ ID NO: 547101
aucagagagcagcuccggc

SEQ ID NO: 547103 - RNA, 19 nt, Artificial Sequence
  Description of Artificial Sequence: Synthetic oligonucleotide
  Sense strand starting at position 2177 of SEQ ID NO: 318235
gaguacugugcgcuuguuu

SEQ ID NO: 547104 - RNA, 19 nt, Artificial Sequence
  Description of Artificial Sequence: Synthetic oligonucleotide
  Antisense strand to SEQ ID NO: 547103
aaacaagcgcacaguacuc

SEQ ID NO: 547105 - RNA, 19 nt, Artificial Sequence
  Description of Artificial Sequence: Synthetic oligonucleotide
  Sense strand starting at position 2308 of SEQ ID NO: 318235
gugcgaaaccuucagcgau

SEQ ID NO: 547106 - RNA, 19 nt, Artificial Sequence
  Description of Artificial Sequence: Synthetic oligonucleotide
  Antisense strand to SEQ ID NO: 547105
aucgcugaagguuucgcac

SEQ ID NO: 547107 - RNA, 19 nt, Artificial Sequence
  Description of Artificial Sequence: Synthetic oligonucleotide
  Sense strand starting at position 2329 of SEQ ID NO: 318235
ggaguacccagugguucuu

SEQ ID NO: 547108 - RNA, 19 nt, Artificial Sequence
  Description of Artificial Sequence: Synthetic oligonucleotide
  Antisense strand to SEQ ID NO: 547107
aagaaccacuggguacucc

SEQ ID NO: 547109 - RNA, 19 nt, Artificial Sequence
  Description of Artificial Sequence: Synthetic oligonucleotide
  Sense strand starting at position 2341 of SEQ ID NO: 318235
gguucuuauuuagcggaca

SEQ ID NO: 547110 - RNA, 19 nt, Artificial Sequence
  Description of Artificial Sequence: Synthetic oligonucleotide
  Antisense strand to SEQ ID NO: 547109
uguccgcuaaauaagaacc

SEQ ID NO: 547111 - RNA, 19 nt, Artificial Sequence
  Description of Artificial Sequence: Synthetic oligonucleotide
  Sense strand starting at position 2398 of SEQ ID NO: 318235
uucuuaugguaaccgauaa

SEQ ID NO: 547112 - RNA, 19 nt, Artificial Sequence
  Description of Artificial Sequence: Synthetic oligonucleotide
  Antisense strand to SEQ ID NO: 547111
uuaucgguuaccauaagaa

SEQ ID NO: 547113 - RNA, 19 nt, Artificial Sequence
  Description of Artificial Sequence: Synthetic oligonucleotide
  Sense strand starting at position 2402 of SEQ ID NO: 318235
uaugguaaccgauaaucau

SEQ ID NO: 547114 - RNA, 19 nt, Artificial Sequence
  Description of Artificial Sequence: Synthetic oligonucleotide
  Antisense strand to SEQ ID NO: 547113
augauuaucgguuaccaua

SEQ ID NO: 547115 - RNA, 19 nt, Artificial Sequence
  Description of Artificial Sequence: Synthetic oligonucleotide
  Sense strand starting at position 2411 of SEQ ID NO: 318235
cgauaaucaugagacauuu

SEQ ID NO: 547116 - RNA, 19 nt, Artificial Sequence
  Description of Artificial Sequence: Synthetic oligonucleotide
  Antisense strand to SEQ ID NO: 547115
aaaugucucaugauuaucg

SEQ ID NO: 547117 - RNA, 19 nt, Artificial Sequence
  Description of Artificial Sequence: Synthetic oligonucleotide
  Sense strand starting at position 2454 of SEQ ID NO: 318235
gagucaacugcuuagcaga

SEQ ID NO: 547118 - RNA, 19 nt, Artificial Sequence
  Description of Artificial Sequence: Synthetic oligonucleotide
  Antisense strand to SEQ ID NO: 547117
ucugcuaagcaguugacuc

SEQ ID NO: 547119 - RNA, 19 nt, Artificial Sequence
  Description of Artificial Sequence: Synthetic oligonucleotide
  Sense strand starting at position 2634 of SEQ ID NO: 318235
uagaguugacuuggguaua

SEQ ID NO: 547120 - RNA, 19 nt, Artificial Sequence
  Description of Artificial Sequence: Synthetic oligonucleotide
  Antisense strand to SEQ ID NO: 547119
uauacccaagucaacucua

SEQ ID NO: 547121 - RNA, 19 nt, Artificial Sequence
  Description of Artificial Sequence: Synthetic oligonucleotide
  Sense strand starting at position 2856 of SEQ ID NO: 318235
uuguccuggagcugauaaa

SEQ ID NO: 547122 - RNA, 19 nt, Artificial Sequence
  Description of Artificial Sequence: Synthetic oligonucleotide
  Antisense strand to SEQ ID NO: 547121
uuuaucagcuccaggacaa

SEQ ID NO: 547123 - RNA, 19 nt, Artificial Sequence
  Description of Artificial Sequence: Synthetic oligonucleotide
  Sense strand starting at position 3012 of SEQ ID NO: 318235
aauggaguuacggguagau

SEQ ID NO: 547124 - RNA, 19 nt, Artificial Sequence
  Description of Artificial Sequence: Synthetic oligonucleotide
  Antisense strand to SEQ ID NO: 547123
aucuacccguaacuccauu

SEQ ID NO: 547125 - RNA, 19 nt, Artificial Sequence
  Description of Artificial Sequence: Synthetic oligonucleotide
  Sense strand starting at position 3014 of SEQ ID NO: 318235
uggaguuacggguagauac

SEQ ID NO: 547126 - RNA, 19 nt, Artificial Sequence
  Description of Artificial Sequence: Synthetic oligonucleotide
  Antisense strand to SEQ ID NO: 547125
guaucuacccguaacucca

SEQ ID NO: 547127 - RNA, 19 nt, Artificial Sequence
  Description of Artificial Sequence: Synthetic oligonucleotide
  Sense strand starting at position 3061 of SEQ ID NO: 318235
gguagaaucuagguggcaa

SEQ ID NO: 547128 - RNA, 19 nt, Artificial Sequence
  Description of Artificial Sequence: Synthetic oligonucleotide
  Antisense strand to SEQ ID NO: 547127
uugccaccuagauucuacc

SEQ ID NO: 547129 - RNA, 19 nt, Artificial Sequence
  Description of Artificial Sequence: Synthetic oligonucleotide
  Sense strand starting at position 3062 of SEQ ID NO: 318235
guagaaucuagguggcaag

SEQ ID NO: 547130 - RNA, 19 nt, Artificial Sequence
  Description of Artificial Sequence: Synthetic oligonucleotide
  Antisense strand to SEQ ID NO: 547129
cuugccaccuagauucuac

SEQ ID NO: 547131 - RNA, 19 nt, Artificial Sequence
  Description of Artificial Sequence: Synthetic oligonucleotide
  Sense strand starting at position 3076 of SEQ ID NO: 318235
gcaaguauauggguguuca

SEQ ID NO: 547132 - RNA, 19 nt, Artificial Sequence
  Description of Artificial Sequence: Synthetic oligonucleotide
  Antisense strand to SEQ ID NO: 547131
ugaacacccauauacuugc

SEQ ID NO: 547133 - RNA, 19 nt, Artificial Sequence
  Description of Artificial Sequence: Synthetic oligonucleotide
  Sense strand starting at position 3086 of SEQ ID NO: 318235
ggguguucaccguacaguu

SEQ ID NO: 547134 - RNA, 19 nt, Artificial Sequence
  Description of Artificial Sequence: Synthetic oligonucleotide
  Antisense strand to SEQ ID NO: 547133
aacuguacggugaacaccc

SEQ ID NO: 547135 - RNA, 19 nt, Artificial Sequence
  Description of Artificial Sequence: Synthetic oligonucleotide
  Sense strand starting at position 3155 of SEQ ID NO: 318235
gccguaaccaguugaaacu

SEQ ID NO: 547136 - RNA, 19 nt, Artificial Sequence
  Description of Artificial Sequence: Synthetic oligonucleotide
  Antisense strand to SEQ ID NO: 547135
aguuucaacugguuacggc

SEQ ID NO: 547137 - RNA, 19 nt, Artificial Sequence
  Description of Artificial Sequence: Synthetic oligonucleotide
  Sense strand starting at position 3285 of SEQ ID NO: 318235
aggccuaagugguuguaau

SEQ ID NO: 547138 - RNA, 19 nt, Artificial Sequence
  Description of Artificial Sequence: Synthetic oligonucleotide
  Antisense strand to SEQ ID NO: 547137
auuacaaccacuuaggccu

SEQ ID NO: 547139 - RNA, 19 nt, Artificial Sequence
  Description of Artificial Sequence: Synthetic oligonucleotide
  Sense strand starting at position 217 of SEQ ID NO: 318236
gugucugucccuuuacgca

SEQ ID NO: 547140 - RNA, 19 nt, Artificial Sequence
  Description of Artificial Sequence: Synthetic oligonucleotide
  Antisense strand to SEQ ID NO: 547139
ugcguaaagggacagacac

SEQ ID NO: 547141 - RNA, 19 nt, Artificial Sequence
  Description of Artificial Sequence: Synthetic oligonucleotide
  Sense strand starting at position 345 of SEQ ID NO: 318236
ugucuauguggcgagaaua

SEQ ID NO: 547142 - RNA, 19 nt, Artificial Sequence
  Description of Artificial Sequence: Synthetic oligonucleotide
  Antisense strand to SEQ ID NO: 547141
uauucucgccacauagaca

SEQ ID NO: 547143 - RNA, 19 nt, Artificial Sequence
  Description of Artificial Sequence: Synthetic oligonucleotide
  Sense strand starting at position 515 of SEQ ID NO: 318236
ggugacucugcugaugauu

SEQ ID NO: 547144 - RNA, 19 nt, Artificial Sequence
  Description of Artificial Sequence: Synthetic oligonucleotide
  Antisense strand to SEQ ID NO: 547143
aaucaucagcagagucacc

SEQ ID NO: 547145 - RNA, 19 nt, Artificial Sequence
  Description of Artificial Sequence: Synthetic oligonucleotide
  Sense strand starting at position 518 of SEQ ID NO: 318236
gacucugcugaugauuaca

SEQ ID NO: 547146 - RNA, 19 nt, Artificial Sequence
  Description of Artificial Sequence: Synthetic oligonucleotide
  Antisense strand to SEQ ID NO: 547145
uguaaucaucagcagaguc

SEQ ID NO: 547147 - RNA, 19 nt, Artificial Sequence
  Description of Artificial Sequence: Synthetic oligonucleotide
  Sense strand starting at position 530 of SEQ ID NO: 318236
gauuacagcucucugggaa

SEQ ID NO: 547148 - RNA, 19 nt, Artificial Sequence
  Description of Artificial Sequence: Synthetic oligonucleotide
  Antisense strand to SEQ ID NO: 547147
uucccagagagcuguaauc

SEQ ID NO: 547149 - RNA, 19 nt, Artificial Sequence
  Description of Artificial Sequence: Synthetic oligonucleotide
  Sense strand starting at position 531 of SEQ ID NO: 318236
auuacagcucucugggaau

SEQ ID NO: 547150 - RNA, 19 nt, Artificial Sequence
  Description of Artificial Sequence: Synthetic oligonucleotide
  Antisense strand to SEQ ID NO: 547149
auucccagagagcuguaau

SEQ ID NO: 547151 - RNA, 19 nt, Artificial Sequence
  Description of Artificial Sequence: Synthetic oligonucleotide
  Sense strand starting at position 569 of SEQ ID NO: 318236
ugcucagaggcuuguaaag

SEQ ID NO: 547152 - RNA, 19 nt, Artificial Sequence
  Description of Artificial Sequence: Synthetic oligonucleotide
  Antisense strand to SEQ ID NO: 547151
cuuuacaagccucugagca

SEQ ID NO: 547153 - RNA, 19 nt, Artificial Sequence
  Description of Artificial Sequence: Synthetic oligonucleotide
  Sense strand starting at position 590 of SEQ ID NO: 318236
ggaguuggcuccucuucca

SEQ ID NO: 547154 - RNA, 19 nt, Artificial Sequence
  Description of Artificial Sequence: Synthetic oligonucleotide
  Antisense strand to SEQ ID NO: 547153
uggaagaggagccaacucc

SEQ ID NO: 547155 - RNA, 19 nt, Artificial Sequence
  Description of Artificial Sequence: Synthetic oligonucleotide
  Sense strand starting at position 593 of SEQ ID NO: 318236
guuggcuccucuuccauaa

SEQ ID NO: 547156 - RNA, 19 nt, Artificial Sequence
  Description of Artificial Sequence: Synthetic oligonucleotide
  Antisense strand to SEQ ID NO: 547155
uuauggaagaggagccaac

SEQ ID NO: 547157 - RNA, 19 nt, Artificial Sequence
  Description of Artificial Sequence: Synthetic oligonucleotide
  Sense strand starting at position 608 of SEQ ID NO: 318236
auaagcugacccugggaau

SEQ ID NO: 547158 - RNA, 19 nt, Artificial Sequence
  Description of Artificial Sequence: Synthetic oligonucleotide
  Antisense strand to SEQ ID NO: 547157
auucccagggucagcuuau

SEQ ID NO: 547159 - RNA, 19 nt, Artificial Sequence
  Description of Artificial Sequence: Synthetic oligonucleotide
  Sense strand starting at position 671 of SEQ ID NO: 318236
auucuuuaagagcauguaa

SEQ ID NO: 547160 - RNA, 19 nt, Artificial Sequence
  Description of Artificial Sequence: Synthetic oligonucleotide
  Antisense strand to SEQ ID NO: 547159
uuacaugcucuuaaagaau

SEQ ID NO: 547161 - RNA, 19 nt, Artificial Sequence
  Description of Artificial Sequence: Synthetic oligonucleotide
  Sense strand starting at position 673 of SEQ ID NO: 318236
ucuuuaagagcauguaaug

SEQ ID NO: 547162 - RNA, 19 nt, Artificial Sequence
  Description of Artificial Sequence: Synthetic oligonucleotide
  Antisense strand to SEQ ID NO: 547161
cauuacaugcucuuaaaga

SEQ ID NO: 547163 - RNA, 19 nt, Artificial Sequence
  Description of Artificial Sequence: Synthetic oligonucleotide
  Sense strand starting at position 682 of SEQ ID NO: 318236
gcauguaaugccuagaagg

SEQ ID NO: 547164 - RNA, 19 nt, Artificial Sequence
  Description of Artificial Sequence: Synthetic oligonucleotide
  Antisense strand to SEQ ID NO: 547163
ccuucuaggcauuacaugc

SEQ ID NO: 547165 - RNA, 19 nt, Artificial Sequence
  Description of Artificial Sequence: Synthetic oligonucleotide
  Sense strand starting at position 699 of SEQ ID NO: 318236
gggagagcuauaugggagu

SEQ ID NO: 547166 - RNA, 19 nt, Artificial Sequence
  Description of Artificial Sequence: Synthetic oligonucleotide
  Antisense strand to SEQ ID NO: 547165
acucccauauagcucuccc

SEQ ID NO: 547167 - RNA, 19 nt, Artificial Sequence
  Description of Artificial Sequence: Synthetic oligonucleotide
  Sense strand starting at position 705 of SEQ ID NO: 318236
gcuauaugggaguguuaua

SEQ ID NO: 547168 - RNA, 19 nt, Artificial Sequence
  Description of Artificial Sequence: Synthetic oligonucleotide
  Antisense strand to SEQ ID NO: 547167
uauaacacucccauauagc

SEQ ID NO: 547169 - RNA, 19 nt, Artificial Sequence
  Description of Artificial Sequence: Synthetic oligonucleotide
  Sense strand starting at position 806 of SEQ ID NO: 318236
gccuuugugcuuuagacac

SEQ ID NO: 547170 - RNA, 19 nt, Artificial Sequence
  Description of Artificial Sequence: Synthetic oligonucleotide
  Antisense strand to SEQ ID NO: 547169
gugucuaaagcacaaaggc

SEQ ID NO: 547171 - RNA, 19 nt, Artificial Sequence
  Description of Artificial Sequence: Synthetic oligonucleotide
  Sense strand starting at position 1035 of SEQ ID NO: 318236
caucuuuaucgcgaagcuu

SEQ ID NO: 547172 - RNA, 19 nt, Artificial Sequence
  Description of Artificial Sequence: Synthetic oligonucleotide
  Antisense strand to SEQ ID NO: 547171
aagcuucgcgauaaagaug

SEQ ID NO: 547173 - RNA, 19 nt, Artificial Sequence
  Description of Artificial Sequence: Synthetic oligonucleotide
  Sense strand starting at position 1126 of SEQ ID NO: 318236
gcugaucuguucccacaau

SEQ ID NO: 547174 - RNA, 19 nt, Artificial Sequence
  Description of Artificial Sequence: Synthetic oligonucleotide
  Antisense strand to SEQ ID NO: 547173
auugugggaacagaucagc

SEQ ID NO: 547175 - RNA, 19 nt, Artificial Sequence
  Description of Artificial Sequence: Synthetic oligonucleotide
  Sense strand starting at position 1505 of SEQ ID NO: 318236
ccuugaguuugcucaucag

SEQ ID NO: 547176 - RNA, 19 nt, Artificial Sequence
  Description of Artificial Sequence: Synthetic oligonucleotide
  Antisense strand to SEQ ID NO: 547175
cugaugagcaaacucaagg

SEQ ID NO: 547177 - RNA, 19 nt, Artificial Sequence
  Description of Artificial Sequence: Synthetic oligonucleotide
  Sense strand starting at position 2520 of SEQ ID NO: 318236
gaagaaacccaguguccaa

SEQ ID NO: 547178 - RNA, 19 nt, Artificial Sequence
  Description of Artificial Sequence: Synthetic oligonucleotide
  Antisense strand to SEQ ID NO: 547177
uuggacacuggguuucuuc

SEQ ID NO: 547179 - RNA, 19 nt, Artificial Sequence
  Description of Artificial Sequence: Synthetic oligonucleotide
  Sense strand starting at position 2696 of SEQ ID NO: 318236
agcaauuacgaucacauua

SEQ ID NO: 547180 - RNA, 19 nt, Artificial Sequence
  Description of Artificial Sequence: Synthetic oligonucleotide
  Antisense strand to SEQ ID NO: 547179
uaaugugaucguaauugcu

SEQ ID NO: 547181 - RNA, 19 nt, Artificial Sequence
  Description of Artificial Sequence: Synthetic oligonucleotide
  Sense strand starting at position 2808 of SEQ ID NO: 318236
gcacauaagcuccaucuga

SEQ ID NO: 547182 - RNA, 19 nt, Artificial Sequence
  Description of Artificial Sequence: Synthetic oligonucleotide
  Antisense strand to SEQ ID NO: 547181
ucagauggagcuuaugugc

SEQ ID NO: 547183 - RNA, 19 nt, Artificial Sequence
  Description of Artificial Sequence: Synthetic oligonucleotide
  Sense strand starting at position 2862 of SEQ ID NO: 318236
uagaguguuccuggcagag

SEQ ID NO: 547184 - RNA, 19 nt, Artificial Sequence
  Description of Artificial Sequence: Synthetic oligonucleotide
  Antisense strand to SEQ ID NO: 547183
cucugccaggaacacucua

SEQ ID NO: 547185 - RNA, 19 nt, Artificial Sequence
  Description of Artificial Sequence: Synthetic oligonucleotide
  Sense strand starting at position 3054 of SEQ ID NO: 318236
gcucuuguaucccuugaga

SEQ ID NO: 547186 - RNA, 19 nt, Artificial Sequence
  Description of Artificial Sequence: Synthetic oligonucleotide
  Antisense strand to SEQ ID NO: 547185
ucucaagggauacaagagc

SEQ ID NO: 547187 - RNA, 19 nt, Artificial Sequence
  Description of Artificial Sequence: Synthetic oligonucleotide
  Sense strand starting at position 3056 of SEQ ID NO: 318236
ucuuguaucccuugagacu

SEQ ID NO: 547188 - RNA, 19 nt, Artificial Sequence
  Description of Artificial Sequence: Synthetic oligonucleotide
  Antisense strand to SEQ ID NO: 547187
agucucaagggauacaaga

SEQ ID NO: 547189 - RNA, 19 nt, Artificial Sequence
  Description of Artificial Sequence: Synthetic oligonucleotide
  Sense strand starting at position 3057 of SEQ ID NO: 318236
cuuguaucccuugagacuu

SEQ ID NO: 547190 - RNA, 19 nt, Artificial Sequence
  Description of Artificial Sequence: Synthetic oligonucleotide
  Antisense strand to SEQ ID NO: 547189
aagucucaagggauacaag

SEQ ID NO: 547191 - RNA, 19 nt, Artificial Sequence
  Description of Artificial Sequence: Synthetic oligonucleotide
  Sense strand starting at position 3179 of SEQ ID NO: 318236
gccugaagcuaugcgaaua

SEQ ID NO: 547192 - RNA, 19 nt, Artificial Sequence
  Description of Artificial Sequence: Synthetic oligonucleotide
  Antisense strand to SEQ ID NO: 547191
uauucgcauagcuucaggc

SEQ ID NO: 547193 - RNA, 19 nt, Artificial Sequence
  Description of Artificial Sequence: Synthetic oligonucleotide
  Sense strand starting at position 3341 of SEQ ID NO: 318236
gacgucauaugucugaaca

SEQ ID NO: 547194 - RNA, 19 nt, Artificial Sequence
  Description of Artificial Sequence: Synthetic oligonucleotide
  Antisense strand to SEQ ID NO: 547193
uguucagacauaugacguc

SEQ ID NO: 547195 - RNA, 19 nt, Artificial Sequence
  Description of Artificial Sequence: Synthetic oligonucleotide
  Sense strand starting at position 3342 of SEQ ID NO: 318236
acgucauaugucugaacau

SEQ ID NO: 547196 - RNA, 19 nt, Artificial Sequence
  Description of Artificial Sequence: Synthetic oligonucleotide
  Antisense strand to SEQ ID NO: 547195
auguucagacauaugacgu

SEQ ID NO: 547197 - RNA, 19 nt, Artificial Sequence
  Description of Artificial Sequence: Synthetic oligonucleotide
  Sense strand starting at position 3357 of SEQ ID NO: 318236
acauaagauugccuugcau

SEQ ID NO: 547198 - RNA, 19 nt, Artificial Sequence
  Description of Artificial Sequence: Synthetic oligonucleotide
  Antisense strand to SEQ ID NO: 547197
augcaaggcaaucuuaugu

SEQ ID NO: 547199 - RNA, 19 nt, Artificial Sequence
  Description of Artificial Sequence: Synthetic oligonucleotide
  Sense strand starting at position 3359 of SEQ ID NO: 318236
auaagauugccuugcauuu

SEQ ID NO: 547200 - RNA, 19 nt, Artificial Sequence
  Description of Artificial Sequence: Synthetic oligonucleotide
  Antisense strand to SEQ ID NO: 547199
aaaugcaaggcaaucuuau

SEQ ID NO: 547201 - RNA, 19 nt, Artificial Sequence
  Description of Artificial Sequence: Synthetic oligonucleotide
  Sense strand starting at position 3368 of SEQ ID NO: 318236
ccuugcauuugaguuacua

SEQ ID NO: 547202 - RNA, 19 nt, Artificial Sequence
  Description of Artificial Sequence: Synthetic oligonucleotide
  Antisense strand to SEQ ID NO: 547201
uaguaacucaaaugcaagg

SEQ ID NO: 547203 - RNA, 19 nt, Artificial Sequence
  Description of Artificial Sequence: Synthetic oligonucleotide
  Sense strand starting at position 3433 of SEQ ID NO: 318236
caaaguucuguuugagaaa

SEQ ID NO: 547204 - RNA, 19 nt, Artificial Sequence
  Description of Artificial Sequence: Synthetic oligonucleotide
  Antisense strand to SEQ ID NO: 547203
uuucucaaacagaacuuug

SEQ ID NO: 547205 - RNA, 19 nt, Artificial Sequence
  Description of Artificial Sequence: Synthetic oligonucleotide
  Sense strand starting at position 3771 of SEQ ID NO: 318236
ggcugauccuccuuuaauc

SEQ ID NO: 547206 - RNA, 19 nt, Artificial Sequence
  Description of Artificial Sequence: Synthetic oligonucleotide
  Antisense strand to SEQ ID NO: 547205
gauuaaaggaggaucagcc

SEQ ID NO: 547207 - RNA, 19 nt, Artificial Sequence
  Description of Artificial Sequence: Synthetic oligonucleotide
  Sense strand starting at position 3791 of SEQ ID NO: 318236
augugacauuggguugcau

SEQ ID NO: 547208 - RNA, 19 nt, Artificial Sequence
  Description of Artificial Sequence: Synthetic oligonucleotide
  Antisense strand to SEQ ID NO: 547207
augcaacccaaugucacau

SEQ ID NO: 547209 - RNA, 19 nt, Artificial Sequence
  Description of Artificial Sequence: Synthetic oligonucleotide
  Sense strand starting at position 3793 of SEQ ID NO: 318236
gugacauuggguugcauau

SEQ ID NO: 547210 - RNA, 19 nt, Artificial Sequence
  Description of Artificial Sequence: Synthetic oligonucleotide
  Antisense strand to SEQ ID NO: 547209
auaugcaacccaaugucac

SEQ ID NO: 547211 - RNA, 19 nt, Artificial Sequence
  Description of Artificial Sequence: Synthetic oligonucleotide
  Sense strand starting at position 3806 of SEQ ID NO: 318236
gcauauggaggucagcaau

SEQ ID NO: 547212 - RNA, 19 nt, Artificial Sequence
  Description of Artificial Sequence: Synthetic oligonucleotide
  Antisense strand to SEQ ID NO: 547211
auugcugaccuccauaugc

SEQ ID NO: 547213 - RNA, 19 nt, Artificial Sequence
  Description of Artificial Sequence: Synthetic oligonucleotide
  Sense strand starting at position 3809 of SEQ ID NO: 318236
uauggaggucagcaauauu

SEQ ID NO: 547214 - RNA, 19 nt, Artificial Sequence
  Description of Artificial Sequence: Synthetic oligonucleotide
  Antisense strand to SEQ ID NO: 547213
aauauugcugaccuccaua

SEQ ID NO: 547215 - RNA, 19 nt, Artificial Sequence
  Description of Artificial Sequence: Synthetic oligonucleotide
  Sense strand starting at position 3954 of SEQ ID NO: 318236
ccauguugugcagaucaca

SEQ ID NO: 547216 - RNA, 19 nt, Artificial Sequence
  Description of Artificial Sequence: Synthetic oligonucleotide
  Antisense strand to SEQ ID NO: 547215
ugugaucugcacaacaugg

SEQ ID NO: 547217 - RNA, 19 nt, Artificial Sequence
  Description of Artificial Sequence: Synthetic oligonucleotide
  Sense strand starting at position 3957 of SEQ ID NO: 318236
uguugugcagaucacaaau

SEQ ID NO: 547218 - RNA, 19 nt, Artificial Sequence
  Description of Artificial Sequence: Synthetic oligonucleotide
  Antisense strand to SEQ ID NO: 547217
auuugugaucugcacaaca

SEQ ID NO: 547219 - RNA, 19 nt, Artificial Sequence
  Description of Artificial Sequence: Synthetic oligonucleotide
  Sense strand starting at position 53 of SEQ ID NO: 318237
gggcuaauucccuacuaaa

SEQ ID NO: 547220 - RNA, 19 nt, Artificial Sequence
  Description of Artificial Sequence: Synthetic oligonucleotide
  Antisense strand to SEQ ID NO: 547219
uuuaguagggaauuagccc

SEQ ID NO: 547221 - RNA, 19 nt, Artificial Sequence
  Description of Artificial Sequence: Synthetic oligonucleotide
  Sense strand starting at position 96 of SEQ ID NO: 318237
ccugaaagaucucccuugu

SEQ ID NO: 547222 - RNA, 19 nt, Artificial Sequence
  Description of Artificial Sequence: Synthetic oligonucleotide
  Antisense strand to SEQ ID NO: 547221
acaagggagaucuuucagg

SEQ ID NO: 547223 - RNA, 19 nt, Artificial Sequence
  Description of Artificial Sequence: Synthetic oligonucleotide
  Sense strand starting at position 111 of SEQ ID NO: 318237
uuguguuuacaaggugaaa

SEQ ID NO: 547224 - RNA, 19 nt, Artificial Sequence
  Description of Artificial Sequence: Synthetic oligonucleotide
  Antisense strand to SEQ ID NO: 547223
uuucaccuuguaaacacaa

SEQ ID NO: 547225 - RNA, 19 nt, Artificial Sequence
  Description of Artificial Sequence: Synthetic oligonucleotide
  Sense strand starting at position 152 of SEQ ID NO: 318237
cuagucugucuuuauccau

SEQ ID NO: 547226 - RNA, 19 nt, Artificial Sequence
  Description of Artificial Sequence: Synthetic oligonucleotide
  Antisense strand to SEQ ID NO: 547225
auggauaaagacagacuag

SEQ ID NO: 547227 - RNA, 19 nt, Artificial Sequence
  Description of Artificial Sequence: Synthetic oligonucleotide
  Sense strand starting at position 236 of SEQ ID NO: 318237
aggugagugggauaguguu

SEQ ID NO: 547228 - RNA, 19 nt, Artificial Sequence
  Description of Artificial Sequence: Synthetic oligonucleotide
  Antisense strand to SEQ ID NO: 547227
aacacuaucccacucaccu

SEQ ID NO: 547229 - RNA, 19 nt, Artificial Sequence
  Description of Artificial Sequence: Synthetic oligonucleotide
  Sense strand starting at position 242 of SEQ ID NO: 318237
gugggauaguguuucacuu

SEQ ID NO: 547230 - RNA, 19 nt, Artificial Sequence
  Description of Artificial Sequence: Synthetic oligonucleotide
  Antisense strand to SEQ ID NO: 547229
aagugaaacacuaucccac

SEQ ID NO: 547231 - RNA, 19 nt, Artificial Sequence
  Description of Artificial Sequence: Synthetic oligonucleotide
  Sense strand starting at position 316 of SEQ ID NO: 318237
gcaagaaacuuggcgacuu

SEQ ID NO: 547232 - RNA, 19 nt, Artificial Sequence
  Description of Artificial Sequence: Synthetic oligonucleotide
  Antisense strand to SEQ ID NO: 547231
aagucgccaaguuucuugc

SEQ ID NO: 547233 - RNA, 19 nt, Artificial Sequence
  Description of Artificial Sequence: Synthetic oligonucleotide
  Sense strand starting at position 318 of SEQ ID NO: 318237
aagaaacuuggcgacuuau

SEQ ID NO: 547234 - RNA, 19 nt, Artificial Sequence
  Description of Artificial Sequence: Synthetic oligonucleotide
  Antisense strand to SEQ ID NO: 547233
auaagucgccaaguuucuu

SEQ ID NO: 547235 - RNA, 19 nt, Artificial Sequence
  Description of Artificial Sequence: Synthetic oligonucleotide
  Sense strand starting at position 484 of SEQ ID NO: 318237
ugaauagcuaagcaagagu

SEQ ID NO: 547236 - RNA, 19 nt, Artificial Sequence
  Description of Artificial Sequence: Synthetic oligonucleotide
  Antisense strand to SEQ ID NO: 547235
acucuugcuuagcuauuca

SEQ ID NO: 547237 - RNA, 19 nt, Artificial Sequence
  Description of Artificial Sequence: Synthetic oligonucleotide
  Sense strand starting at position 501 of SEQ ID NO: 318237
gucuccaguucuuccuaga

SEQ ID NO: 547238 - RNA, 19 nt, Artificial Sequence
  Description of Artificial Sequence: Synthetic oligonucleotide
  Antisense strand to SEQ ID NO: 547237
ucuaggaagaacuggagac

SEQ ID NO: 547239 - RNA, 19 nt, Artificial Sequence
  Description of Artificial Sequence: Synthetic oligonucleotide
  Sense strand starting at position 1955 of SEQ ID NO: 318237
gccggucuccugagugaug

SEQ ID NO: 547240 - RNA, 19 nt, Artificial Sequence
  Description of Artificial Sequence: Synthetic oligonucleotide
  Antisense strand to SEQ ID NO: 547239
caucacucaggagaccggc

SEQ ID NO: 547241 - RNA, 19 nt, Artificial Sequence
  Description of Artificial Sequence: Synthetic oligonucleotide
  Sense strand starting at position 2154 of SEQ ID NO: 318237
auaauuuaugcucgcggga

SEQ ID NO: 547242 - RNA, 19 nt, Artificial Sequence
  Description of Artificial Sequence: Synthetic oligonucleotide
  Antisense strand to SEQ ID NO: 547241
ucccgcgagcauaaauuau

SEQ ID NO: 547243 - RNA, 19 nt, Artificial Sequence
  Description of Artificial Sequence: Synthetic oligonucleotide
  Sense strand starting at position 2198 of SEQ ID NO: 318237
cggagugugcccguaauua

SEQ ID NO: 547244 - RNA, 19 nt, Artificial Sequence
  Description of Artificial Sequence: Synthetic oligonucleotide
  Antisense strand to SEQ ID NO: 547243
uaauuacgggcacacuccg

SEQ ID NO: 547245 - RNA, 19 nt, Artificial Sequence
  Description of Artificial Sequence: Synthetic oligonucleotide
  Sense strand starting at position 2415 of SEQ ID NO: 318237
cagugaguugcggaaaccu

SEQ ID NO: 547246 - RNA, 19 nt, Artificial Sequence
  Description of Artificial Sequence: Synthetic oligonucleotide
  Antisense strand to SEQ ID NO: 547245
agguuuccgcaacucacug

SEQ ID NO: 547247 - RNA, 19 nt, Artificial Sequence
  Description of Artificial Sequence: Synthetic oligonucleotide
  Sense strand starting at position 2476 of SEQ ID NO: 318237
cuuaguggucgcgugacuu

SEQ ID NO: 547248 - RNA, 19 nt, Artificial Sequence
  Description of Artificial Sequence: Synthetic oligonucleotide
  Antisense strand to SEQ ID NO: 547247
aagucacgcgaccacuaag

SEQ ID NO: 547249 - RNA, 19 nt, Artificial Sequence
  Description of Artificial Sequence: Synthetic oligonucleotide
  Sense strand starting at position 2486 of SEQ ID NO: 318237
gcgugacuuuggacgagua

SEQ ID NO: 547250 - RNA, 19 nt, Artificial Sequence
  Description of Artificial Sequence: Synthetic oligonucleotide
  Antisense strand to SEQ ID NO: 547249
uacucguccaaagucacgc

SEQ ID NO: 547251 - RNA, 19 nt, Artificial Sequence
  Description of Artificial Sequence: Synthetic oligonucleotide
  Sense strand starting at position 2487 of SEQ ID NO: 318237
cgugacuuuggacgaguaa

SEQ ID NO: 547252 - RNA, 19 nt, Artificial Sequence
  Description of Artificial Sequence: Synthetic oligonucleotide
  Antisense strand to SEQ ID NO: 547251
uuacucguccaaagucacg

SEQ ID NO: 547253 - RNA, 19 nt, Artificial Sequence
  Description of Artificial Sequence: Synthetic oligonucleotide
  Sense strand starting at position 2488 of SEQ ID NO: 318237
gugacuuuggacgaguaau

SEQ ID NO: 547254 - RNA, 19 nt, Artificial Sequence
  Description of Artificial Sequence: Synthetic oligonucleotide
  Antisense strand to SEQ ID NO: 547253
auuacucguccaaagucac

SEQ ID NO: 547255 - RNA, 19 nt, Artificial Sequence
  Description of Artificial Sequence: Synthetic oligonucleotide
  Sense strand starting at position 2552 of SEQ ID NO: 318237
aaguuuacccuguggagga

SEQ ID NO: 547256 - RNA, 19 nt, Artificial Sequence
  Description of Artificial Sequence: Synthetic oligonucleotide
  Antisense strand to SEQ ID NO: 547255
uccuccacaggguaaacuu

SEQ ID NO: 547257 - RNA, 19 nt, Artificial Sequence
  Description of Artificial Sequence: Synthetic oligonucleotide
  Sense strand starting at position 2565 of SEQ ID NO: 318237
ggaggaugaucagauauaa

SEQ ID NO: 547258 - RNA, 19 nt, Artificial Sequence
  Description of Artificial Sequence: Synthetic oligonucleotide
  Antisense strand to SEQ ID NO: 547257
uuauaucugaucauccucc

SEQ ID NO: 547259 - RNA, 19 nt, Artificial Sequence
  Description of Artificial Sequence: Synthetic oligonucleotide
  Sense strand starting at position 2575 of SEQ ID NO: 318237
cagauauaauguuugugga

SEQ ID NO: 547260 - RNA, 19 nt, Artificial Sequence
  Description of Artificial Sequence: Synthetic oligonucleotide
  Antisense strand to SEQ ID NO: 547259
uccacaaacauuauaucug

SEQ ID NO: 547261 - RNA, 19 nt, Artificial Sequence
  Description of Artificial Sequence: Synthetic oligonucleotide
  Sense strand starting at position 2576 of SEQ ID NO: 318237
agauauaauguuuguggaa

SEQ ID NO: 547262 - RNA, 19 nt, Artificial Sequence
  Description of Artificial Sequence: Synthetic oligonucleotide
  Antisense strand to SEQ ID NO: 547261
uuccacaaacauuauaucu

SEQ ID NO: 547263 - RNA, 19 nt, Artificial Sequence
  Description of Artificial Sequence: Synthetic oligonucleotide
  Sense strand starting at position 2577 of SEQ ID NO: 318237
gauauaauguuuguggaac

SEQ ID NO: 547264 - RNA, 19 nt, Artificial Sequence
  Description of Artificial Sequence: Synthetic oligonucleotide
  Antisense strand to SEQ ID NO: 547263
guuccacaaacauuauauc

SEQ ID NO: 547265 - RNA, 19 nt, Artificial Sequence
  Description of Artificial Sequence: Synthetic oligonucleotide
  Sense strand starting at position 2724 of SEQ ID NO: 318237
cgggaaagaaucugaccuu

SEQ ID NO: 547266 - RNA, 19 nt, Artificial Sequence
  Description of Artificial Sequence: Synthetic oligonucleotide
  Antisense strand to SEQ ID NO: 547265
aaggucagauucuuucccg

SEQ ID NO: 547267 - RNA, 19 nt, Artificial Sequence
  Description of Artificial Sequence: Synthetic oligonucleotide
  Sense strand starting at position 2780 of SEQ ID NO: 318237
ucgggugauuucccagguu

SEQ ID NO: 547268 - RNA, 19 nt, Artificial Sequence
  Description of Artificial Sequence: Synthetic oligonucleotide
  Antisense strand to SEQ ID NO: 547267
aaccugggaaaucacccga

SEQ ID NO: 547269 - RNA, 19 nt, Artificial Sequence
  Description of Artificial Sequence: Synthetic oligonucleotide
  Sense strand starting at position 2792 of SEQ ID NO: 318237
ccagguugccuugagucuu

SEQ ID NO: 547270 - RNA, 19 nt, Artificial Sequence
  Description of Artificial Sequence: Synthetic oligonucleotide
  Antisense strand to SEQ ID NO: 547269
aagacucaaggcaaccugg

SEQ ID NO: 547271 - RNA, 19 nt, Artificial Sequence
  Description of Artificial Sequence: Synthetic oligonucleotide
  Sense strand starting at position 3001 of SEQ ID NO: 318237
ggagaaauccguugcacac

SEQ ID NO: 547272 - RNA, 19 nt, Artificial Sequence
  Description of Artificial Sequence: Synthetic oligonucleotide
  Antisense strand to SEQ ID NO: 547271
gugugcaacggauuucucc

SEQ ID NO: 547273 - RNA, 19 nt, Artificial Sequence
  Description of Artificial Sequence: Synthetic oligonucleotide
  Sense strand starting at position 3162 of SEQ ID NO: 318237
ccgccuucggugucuuaaa

SEQ ID NO: 547274 - RNA, 19 nt, Artificial Sequence
  Description of Artificial Sequence: Synthetic oligonucleotide
  Antisense strand to SEQ ID NO: 547273
uuuaagacaccgaaggcgg

SEQ ID NO: 547275 - RNA, 19 nt, Artificial Sequence
  Description of Artificial Sequence: Synthetic oligonucleotide
  Sense strand starting at position 3282 of SEQ ID NO: 318237
uuuguacuuggaggauaaa

SEQ ID NO: 547276 - RNA, 19 nt, Artificial Sequence
  Description of Artificial Sequence: Synthetic oligonucleotide
  Antisense strand to SEQ ID NO: 547275
uuuauccuccaaguacaaa

SEQ ID NO: 547277 - RNA, 19 nt, Artificial Sequence
  Description of Artificial Sequence: Synthetic oligonucleotide
  Sense strand starting at position 3292 of SEQ ID NO: 318237
gaggauaaauaguaaggaa

SEQ ID NO: 547278 - RNA, 19 nt, Artificial Sequence
  Description of Artificial Sequence: Synthetic oligonucleotide
  Antisense strand to SEQ ID NO: 547277
uuccuuacuauuuauccuc

SEQ ID NO: 547279 - RNA, 19 nt, Artificial Sequence
  Description of Artificial Sequence: Synthetic oligonucleotide
  Sense strand starting at position 3306 of SEQ ID NO: 318237
aggaacagcacucgauuau

SEQ ID NO: 547280 - RNA, 19 nt, Artificial Sequence
  Description of Artificial Sequence: Synthetic oligonucleotide
  Antisense strand to SEQ ID NO: 547279
auaaucgagugcuguuccu

SEQ ID NO: 547281 - RNA, 19 nt, Artificial Sequence
  Description of Artificial Sequence: Synthetic oligonucleotide
  Sense strand starting at position 3307 of SEQ ID NO: 318237
ggaacagcacucgauuaua

SEQ ID NO: 547282 - RNA, 19 nt, Artificial Sequence
  Description of Artificial Sequence: Synthetic oligonucleotide
  Antisense strand to SEQ ID NO: 547281
uauaaucgagugcuguucc

SEQ ID NO: 547283 - RNA, 19 nt, Artificial Sequence
  Description of Artificial Sequence: Synthetic oligonucleotide
  Sense strand starting at position 3310 of SEQ ID NO: 318237
acagcacucgauuauagga

SEQ ID NO: 547284 - RNA, 19 nt, Artificial Sequence
  Description of Artificial Sequence: Synthetic oligonucleotide
  Antisense strand to SEQ ID NO: 547283
uccuauaaucgagugcugu

SEQ ID NO: 547285 - RNA, 19 nt, Artificial Sequence
  Description of Artificial Sequence: Synthetic oligonucleotide
  Sense strand starting at position 3623 of SEQ ID NO: 318237
uauauaagggcucgagauu

SEQ ID NO: 547286 - RNA, 19 nt, Artificial Sequence
  Description of Artificial Sequence: Synthetic oligonucleotide
  Antisense strand to SEQ ID NO: 547285
aaucucgagcccuuauaua

SEQ ID NO: 547287 - RNA, 19 nt, Artificial Sequence
  Description of Artificial Sequence: Synthetic oligonucleotide
  Sense strand starting at position 3635 of SEQ ID NO: 318237
cgagauuuauuagaaguca

SEQ ID NO: 547288 - RNA, 19 nt, Artificial Sequence
  Description of Artificial Sequence: Synthetic oligonucleotide
  Antisense strand to SEQ ID NO: 547287
ugacuucuaauaaaucucg

SEQ ID NO: 547289 - RNA, 19 nt, Artificial Sequence
  Description of Artificial Sequence: Synthetic oligonucleotide
  Sense strand starting at position 3689 of SEQ ID NO: 318237
gcaguuguuggauggauac

SEQ ID NO: 547290 - RNA, 19 nt, Artificial Sequence
  Description of Artificial Sequence: Synthetic oligonucleotide
  Antisense strand to SEQ ID NO: 547289
guauccauccaacaacugc

SEQ ID NO: 547291 - RNA, 19 nt, Artificial Sequence
  Description of Artificial Sequence: Synthetic oligonucleotide
  Sense strand starting at position 3735 of SEQ ID NO: 318237
cgaggacuuguguaaacca

SEQ ID NO: 547292 - RNA, 19 nt, Artificial Sequence
  Description of Artificial Sequence: Synthetic oligonucleotide
  Antisense strand to SEQ ID NO: 547291
ugguuuacacaaguccucg

SEQ ID NO: 547293 - RNA, 19 nt, Artificial Sequence
  Description of Artificial Sequence: Synthetic oligonucleotide
  Sense strand starting at position 3855 of SEQ ID NO: 318237
gguuuaaggcaacagaagu

SEQ ID NO: 547294 - RNA, 19 nt, Artificial Sequence
  Description of Artificial Sequence: Synthetic oligonucleotide
  Antisense strand to SEQ ID NO: 547293
acuucuguugccuuaaacc

SEQ ID NO: 547295 - RNA, 19 nt, Artificial Sequence
  Description of Artificial Sequence: Synthetic oligonucleotide
  Sense strand starting at position 3896 of SEQ ID NO: 318237
gccagaagucuguaagcaa

SEQ ID NO: 547296 - RNA, 19 nt, Artificial Sequence
  Description of Artificial Sequence: Synthetic oligonucleotide
  Antisense strand to SEQ ID NO: 547295
uugcuuacagacuucuggc

SEQ ID NO: 547297 - RNA, 19 nt, Artificial Sequence
  Description of Artificial Sequence: Synthetic oligonucleotide
  Sense strand starting at position 3899 of SEQ ID NO: 318237
agaagucuguaagcaaguu

SEQ ID NO: 547298 - RNA, 19 nt, Artificial Sequence
  Description of Artificial Sequence: Synthetic oligonucleotide
  Antisense strand to SEQ ID NO: 547297
aacuugcuuacagacuucu

SEQ ID NO: 547299 - RNA, 19 nt, Artificial Sequence
  Description of Artificial Sequence: Synthetic oligonucleotide
  Sense strand starting at position 148 of SEQ ID NO: 318238
ggacuacaguagucuacua

SEQ ID NO: 547300 - RNA, 19 nt, Artificial Sequence
  Description of Artificial Sequence: Synthetic oligonucleotide
  Antisense strand to SEQ ID NO: 547299
uaguagacuacuguagucc

SEQ ID NO: 547301 - RNA, 19 nt, Artificial Sequence
  Description of Artificial Sequence: Synthetic oligonucleotide
  Sense strand starting at position 285 of SEQ ID NO: 318238
cuccaaagugcugaguaua

SEQ ID NO: 547302 - RNA, 19 nt, Artificial Sequence
  Description of Artificial Sequence: Synthetic oligonucleotide
  Antisense strand to SEQ ID NO: 547301
uauacucagcacuuuggag

SEQ ID NO: 547303 - RNA, 19 nt, Artificial Sequence
  Description of Artificial Sequence: Synthetic oligonucleotide
  Sense strand starting at position 346 of SEQ ID NO: 318238
agcacuucugcucaccaga

SEQ ID NO: 547304 - RNA, 19 nt, Artificial Sequence
  Description of Artificial Sequence: Synthetic oligonucleotide
  Antisense strand to SEQ ID NO: 547303
ucuggugagcagaagugcu

SEQ ID NO: 547305 - RNA, 19 nt, Artificial Sequence
  Description of Artificial Sequence: Synthetic oligonucleotide
  Sense strand starting at position 421 of SEQ ID NO: 318238
ccaauuaaucccugugucu

SEQ ID NO: 547306 - RNA, 19 nt, Artificial Sequence
  Description of Artificial Sequence: Synthetic oligonucleotide
  Antisense strand to SEQ ID NO: 547305
agacacagggauuaauugg

SEQ ID NO: 547307 - RNA, 19 nt, Artificial Sequence
  Description of Artificial Sequence: Synthetic oligonucleotide
  Sense strand starting at position 424 of SEQ ID NO: 318238
auuaaucccugugucuuaa

SEQ ID NO: 547308 - RNA, 19 nt, Artificial Sequence
  Description of Artificial Sequence: Synthetic oligonucleotide
  Antisense strand to SEQ ID NO: 547307
uuaagacacagggauuaau

SEQ ID NO: 547309 - RNA, 19 nt, Artificial Sequence
  Description of Artificial Sequence: Synthetic oligonucleotide
  Sense strand starting at position 436 of SEQ ID NO: 318238
gucuuaagaccucagcuca

SEQ ID NO: 547310 - RNA, 19 nt, Artificial Sequence
  Description of Artificial Sequence: Synthetic oligonucleotide
  Antisense strand to SEQ ID NO: 547309
ugagcugaggucuuaagac

SEQ ID NO: 547311 - RNA, 19 nt, Artificial Sequence
  Description of Artificial Sequence: Synthetic oligonucleotide
  Sense strand starting at position 450 of SEQ ID NO: 318238
gcucaaaugugacugcuga

SEQ ID NO: 547312 - RNA, 19 nt, Artificial Sequence
  Description of Artificial Sequence: Synthetic oligonucleotide
  Antisense strand to SEQ ID NO: 547311
ucagcagucacauuugagc

SEQ ID NO: 547313 - RNA, 19 nt, Artificial Sequence
  Description of Artificial Sequence: Synthetic oligonucleotide
  Sense strand starting at position 690 of SEQ ID NO: 318238
gggugaugaaguuaucauu

SEQ ID NO: 547314 - RNA, 19 nt, Artificial Sequence
  Description of Artificial Sequence: Synthetic oligonucleotide
  Antisense strand to SEQ ID NO: 547313
aaugauaacuucaucaccc

SEQ ID NO: 547315 - RNA, 19 nt, Artificial Sequence
  Description of Artificial Sequence: Synthetic oligonucleotide
  Sense strand starting at position 696 of SEQ ID NO: 318238
ugaaguuaucauugcacuc

SEQ ID NO: 547316 - RNA, 19 nt, Artificial Sequence
  Description of Artificial Sequence: Synthetic oligonucleotide
  Antisense strand to SEQ ID NO: 547315
gagugcaaugauaacuuca

SEQ ID NO: 547317 - RNA, 19 nt, Artificial Sequence
  Description of Artificial Sequence: Synthetic oligonucleotide
  Sense strand starting at position 763 of SEQ ID NO: 318238
gugugucauuaucugauga

SEQ ID NO: 547318 - RNA, 19 nt, Artificial Sequence
  Description of Artificial Sequence: Synthetic oligonucleotide
  Antisense strand to SEQ ID NO: 547317
ucaucagauaaugacacac

SEQ ID NO: 547319 - RNA, 19 nt, Artificial Sequence
  Description of Artificial Sequence: Synthetic oligonucleotide
  Sense strand starting at position 771 of SEQ ID NO: 318238
uuaucugaugaaugaaugu

SEQ ID NO: 547320 - RNA, 19 nt, Artificial Sequence
  Description of Artificial Sequence: Synthetic oligonucleotide
  Antisense strand to SEQ ID NO: 547319
acauucauucaucagauaa

SEQ ID NO: 547321 - RNA, 19 nt, Artificial Sequence
  Description of Artificial Sequence: Synthetic oligonucleotide
  Sense strand starting at position 780 of SEQ ID NO: 318238
gaaugaaugucacuguuuc

SEQ ID NO: 547322 - RNA, 19 nt, Artificial Sequence
  Description of Artificial Sequence: Synthetic oligonucleotide
  Antisense strand to SEQ ID NO: 547321
gaaacagugacauucauuc

SEQ ID NO: 547323 - RNA, 19 nt, Artificial Sequence
  Description of Artificial Sequence: Synthetic oligonucleotide
  Sense strand starting at position 1177 of SEQ ID NO: 318238
gggucaucccuaggacuga

SEQ ID NO: 547324 - RNA, 19 nt, Artificial Sequence
  Description of Artificial Sequence: Synthetic oligonucleotide
  Antisense strand to SEQ ID NO: 547323
ucaguccuagggaugaccc

SEQ ID NO: 547325 - RNA, 19 nt, Artificial Sequence
  Description of Artificial Sequence: Synthetic oligonucleotide
  Sense strand starting at position 1181 of SEQ ID NO: 318238
caucccuaggacugagauu

SEQ ID NO: 547326 - RNA, 19 nt, Artificial Sequence
  Description of Artificial Sequence: Synthetic oligonucleotide
  Antisense strand to SEQ ID NO: 547325
aaucucaguccuagggaug

SEQ ID NO: 547327 - RNA, 19 nt, Artificial Sequence
  Description of Artificial Sequence: Synthetic oligonucleotide
  Sense strand starting at position 1260 of SEQ ID NO: 318238
ggaggagggucccugaauu

SEQ ID NO: 547328 - RNA, 19 nt, Artificial Sequence
  Description of Artificial Sequence: Synthetic oligonucleotide
  Antisense strand to SEQ ID NO: 547327
aauucagggacccuccucc

SEQ ID NO: 547329 - RNA, 19 nt, Artificial Sequence
  Description of Artificial Sequence: Synthetic oligonucleotide
  Sense strand starting at position 1286 of SEQ ID NO: 318238
guggguuuacucuaaggga

SEQ ID NO: 547330 - RNA, 19 nt, Artificial Sequence
  Description of Artificial Sequence: Synthetic oligonucleotide
  Antisense strand to SEQ ID NO: 547329
ucccuuagaguaaacccac

SEQ ID NO: 547331 - RNA, 19 nt, Artificial Sequence
  Description of Artificial Sequence: Synthetic oligonucleotide
  Sense strand starting at position 1366 of SEQ ID NO: 318238
gguauugucguaccgguau

SEQ ID NO: 547332 - RNA, 19 nt, Artificial Sequence
  Description of Artificial Sequence: Synthetic oligonucleotide
  Antisense strand to SEQ ID NO: 547331
auaccgguacgacaauacc

SEQ ID NO: 547333 - RNA, 19 nt, Artificial Sequence
  Description of Artificial Sequence: Synthetic oligonucleotide
  Sense strand starting at position 1396 of SEQ ID NO: 318238
gacuuuaccgacugcuuga

SEQ ID NO: 547334 - RNA, 19 nt, Artificial Sequence
  Description of Artificial Sequence: Synthetic oligonucleotide
  Antisense strand to SEQ ID NO: 547333
ucaagcagucgguaaaguc

SEQ ID NO: 547335 - RNA, 19 nt, Artificial Sequence
  Description of Artificial Sequence: Synthetic oligonucleotide
  Sense strand starting at position 1461 of SEQ ID NO: 318238
gcgccuacuaaguagagau

SEQ ID NO: 547336 - RNA, 19 nt, Artificial Sequence
  Description of Artificial Sequence: Synthetic oligonucleotide
  Antisense strand to SEQ ID NO: 547335
aucucuacuuaguaggcgc

SEQ ID NO: 547337 - RNA, 19 nt, Artificial Sequence
  Description of Artificial Sequence: Synthetic oligonucleotide
  Sense strand starting at position 1476 of SEQ ID NO: 318238
agauuucuccguuaacguu

SEQ ID NO: 547338 - RNA, 19 nt, Artificial Sequence
  Description of Artificial Sequence: Synthetic oligonucleotide
  Antisense strand to SEQ ID NO: 547337
aacguuaacggagaaaucu

SEQ ID NO: 547339 - RNA, 19 nt, Artificial Sequence
  Description of Artificial Sequence: Synthetic oligonucleotide
  Sense strand starting at position 1483 of SEQ ID NO: 318238
uccguuaacguuuagaaau

SEQ ID NO: 547340 - RNA, 19 nt, Artificial Sequence
  Description of Artificial Sequence: Synthetic oligonucleotide
  Antisense strand to SEQ ID NO: 547339
auuucuaaacguuaacgga

SEQ ID NO: 547341 - RNA, 19 nt, Artificial Sequence
  Description of Artificial Sequence: Synthetic oligonucleotide
  Sense strand starting at position 1515 of SEQ ID NO: 318238
gaaggaagguucuuacccu

SEQ ID NO: 547342 - RNA, 19 nt, Artificial Sequence
  Description of Artificial Sequence: Synthetic oligonucleotide
  Antisense strand to SEQ ID NO: 547341
aggguaagaaccuuccuuc

SEQ ID NO: 547343 - RNA, 19 nt, Artificial Sequence
  Description of Artificial Sequence: Synthetic oligonucleotide
  Sense strand starting at position 1917 of SEQ ID NO: 318238
gcaucacuuccaggucauc

SEQ ID NO: 547344 - RNA, 19 nt, Artificial Sequence
  Description of Artificial Sequence: Synthetic oligonucleotide
  Antisense strand to SEQ ID NO: 547343
gaugaccuggaagugaugc

SEQ ID NO: 547345 - RNA, 19 nt, Artificial Sequence
  Description of Artificial Sequence: Synthetic oligonucleotide
  Sense strand starting at position 1975 of SEQ ID NO: 318238
aaaggaagucuccgacuca

SEQ ID NO: 547346 - RNA, 19 nt, Artificial Sequence
  Description of Artificial Sequence: Synthetic oligonucleotide
  Antisense strand to SEQ ID NO: 547345
ugagucggagacuuccuuu

SEQ ID NO: 547347 - RNA, 19 nt, Artificial Sequence
  Description of Artificial Sequence: Synthetic oligonucleotide
  Sense strand starting at position 2657 of SEQ ID NO: 318238
caguguuucccaugggaga

SEQ ID NO: 547348 - RNA, 19 nt, Artificial Sequence
  Description of Artificial Sequence: Synthetic oligonucleotide
  Antisense strand to SEQ ID NO: 547347
ucucccaugggaaacacug

SEQ ID NO: 547349 - RNA, 19 nt, Artificial Sequence
  Description of Artificial Sequence: Synthetic oligonucleotide
  Sense strand starting at position 2658 of SEQ ID NO: 318238
aguguuucccaugggagag

SEQ ID NO: 547350 - RNA, 19 nt, Artificial Sequence
  Description of Artificial Sequence: Synthetic oligonucleotide
  Antisense strand to SEQ ID NO: 547349
cucucccaugggaaacacu

SEQ ID NO: 547351 - RNA, 19 nt, Artificial Sequence
  Description of Artificial Sequence: Synthetic oligonucleotide
  Sense strand starting at position 2673 of SEQ ID NO: 318238
agagguuucccuggugauu

SEQ ID NO: 547352 - RNA, 19 nt, Artificial Sequence
  Description of Artificial Sequence: Synthetic oligonucleotide
  Antisense strand to SEQ ID NO: 547351
aaucaccagggaaaccucu

SEQ ID NO: 547353 - RNA, 19 nt, Artificial Sequence
  Description of Artificial Sequence: Synthetic oligonucleotide
  Sense strand starting at position 2915 of SEQ ID NO: 318238
uuuggacgggucuguagaa

SEQ ID NO: 547354 - RNA, 19 nt, Artificial Sequence
  Description of Artificial Sequence: Synthetic oligonucleotide
  Antisense strand to SEQ ID NO: 547353
uucuacagacccguccaaa

SEQ ID NO: 547355 - RNA, 19 nt, Artificial Sequence
  Description of Artificial Sequence: Synthetic oligonucleotide
  Sense strand starting at position 2977 of SEQ ID NO: 318238
ccgagauccaguggaucuu

SEQ ID NO: 547356 - RNA, 19 nt, Artificial Sequence
  Description of Artificial Sequence: Synthetic oligonucleotide
  Antisense strand to SEQ ID NO: 547355
aagauccacuggaucucgg

SEQ ID NO: 547357 - RNA, 19 nt, Artificial Sequence
  Description of Artificial Sequence: Synthetic oligonucleotide
  Sense strand starting at position 2989 of SEQ ID NO: 318238
ggaucuugguaucucugau

SEQ ID NO: 547358 - RNA, 19 nt, Artificial Sequence
  Description of Artificial Sequence: Synthetic oligonucleotide
  Antisense strand to SEQ ID NO: 547357
aucagagauaccaagaucc

SEQ ID NO: 547359 - RNA, 19 nt, Artificial Sequence
  Description of Artificial Sequence: Synthetic oligonucleotide
  Sense strand starting at position 3049 of SEQ ID NO: 318238
auuagauaaucgcugcaaa

SEQ ID NO: 547360 - RNA, 19 nt, Artificial Sequence
  Description of Artificial Sequence: Synthetic oligonucleotide
  Antisense strand to SEQ ID NO: 547359
uuugcagcgauuaucuaau

SEQ ID NO: 547361 - RNA, 19 nt, Artificial Sequence
  Description of Artificial Sequence: Synthetic oligonucleotide
  Sense strand starting at position 3050 of SEQ ID NO: 318238
uuagauaaucgcugcaaau

SEQ ID NO: 547362 - RNA, 19 nt, Artificial Sequence
  Description of Artificial Sequence: Synthetic oligonucleotide
  Antisense strand to SEQ ID NO: 547361
auuugcagcgauuaucuaa

SEQ ID NO: 547363 - RNA, 19 nt, Artificial Sequence
  Description of Artificial Sequence: Synthetic oligonucleotide
  Sense strand starting at position 3052 of SEQ ID NO: 318238
agauaaucgcugcaaauua

SEQ ID NO: 547364 - RNA, 19 nt, Artificial Sequence
  Description of Artificial Sequence: Synthetic oligonucleotide
  Antisense strand to SEQ ID NO: 547363
uaauuugcagcgauuaucu

SEQ ID NO: 547365 - RNA, 19 nt, Artificial Sequence
  Description of Artificial Sequence: Synthetic oligonucleotide
  Sense strand starting at position 3169 of SEQ ID NO: 318238
gguaguugugggugggaac

SEQ ID NO: 547366 - RNA, 19 nt, Artificial Sequence
  Description of Artificial Sequence: Synthetic oligonucleotide
  Antisense strand to SEQ ID NO: 547365
guucccacccacaacuacc

SEQ ID NO: 547367 - RNA, 19 nt, Artificial Sequence
  Description of Artificial Sequence: Synthetic oligonucleotide
  Sense strand starting at position 3170 of SEQ ID NO: 318238
guaguugugggugggaaca

SEQ ID NO: 547368 - RNA, 19 nt, Artificial Sequence
  Description of Artificial Sequence: Synthetic oligonucleotide
  Antisense strand to SEQ ID NO: 547367
uguucccacccacaacuac

SEQ ID NO: 547369 - RNA, 19 nt, Artificial Sequence
  Description of Artificial Sequence: Synthetic oligonucleotide
  Sense strand starting at position 3731 of SEQ ID NO: 318238
uuauguggcgagcauauua

SEQ ID NO: 547370 - RNA, 19 nt, Artificial Sequence
  Description of Artificial Sequence: Synthetic oligonucleotide
  Antisense strand to SEQ ID NO: 547369
uaauaugcucgccacauaa

SEQ ID NO: 547371 - RNA, 19 nt, Artificial Sequence
  Description of Artificial Sequence: Synthetic oligonucleotide
  Sense strand starting at position 3865 of SEQ ID NO: 318238
aaagaugaauaguuuggua

SEQ ID NO: 547372 - RNA, 19 nt, Artificial Sequence
  Description of Artificial Sequence: Synthetic oligonucleotide
  Antisense strand to SEQ ID NO: 547371
uaccaaacuauucaucuuu

SEQ ID NO: 547373 - RNA, 19 nt, Artificial Sequence
  Description of Artificial Sequence: Synthetic oligonucleotide
  Sense strand starting at position 3867 of SEQ ID NO: 318238
agaugaauaguuugguaca

SEQ ID NO: 547374 - RNA, 19 nt, Artificial Sequence
  Description of Artificial Sequence: Synthetic oligonucleotide
  Antisense strand to SEQ ID NO: 547373
uguaccaaacuauucaucu

SEQ ID NO: 547375 - RNA, 19 nt, Artificial Sequence
  Description of Artificial Sequence: Synthetic oligonucleotide
  Sense strand starting at position 3934 of SEQ ID NO: 318238
agacuuuacccauaccugu

SEQ ID NO: 547376 - RNA, 19 nt, Artificial Sequence
  Description of Artificial Sequence: Synthetic oligonucleotide
  Antisense strand to SEQ ID NO: 547375
acagguauggguaaagucu

SEQ ID NO: 547377 - RNA, 19 nt, Artificial Sequence
  Description of Artificial Sequence: Synthetic oligonucleotide
  Sense strand starting at position 3941 of SEQ ID NO: 318238
acccauaccugugauuuga

SEQ ID NO: 547378 - RNA, 19 nt, Artificial Sequence
  Description of Artificial Sequence: Synthetic oligonucleotide
  Antisense strand to SEQ ID NO: 547377
ucaaaucacagguaugggu

SEQ ID NO: 547379 - RNA, 19 nt, Artificial Sequence
  Description of Artificial Sequence: Synthetic oligonucleotide
  Sense strand starting at position 7 of SEQ ID NO: 318239
ggcaguguuuacucucauu

SEQ ID NO: 547380 - RNA, 19 nt, Artificial Sequence
  Description of Artificial Sequence: Synthetic oligonucleotide
  Antisense strand to SEQ ID NO: 547379
aaugagaguaaacacugcc

SEQ ID NO: 547381 - RNA, 19 nt, Artificial Sequence
  Description of Artificial Sequence: Synthetic oligonucleotide
  Sense strand starting at position 12 of SEQ ID NO: 318239
uguuuacucucauuugucu

SEQ ID NO: 547382 - RNA, 19 nt, Artificial Sequence
  Description of Artificial Sequence: Synthetic oligonucleotide
  Antisense strand to SEQ ID NO: 547381
agacaaaugagaguaaaca

SEQ ID NO: 547383 - RNA, 19 nt, Artificial Sequence
  Description of Artificial Sequence: Synthetic oligonucleotide
  Sense strand starting at position 238 of SEQ ID NO: 318239
gggcgacuucuucaguaac

SEQ ID NO: 547384 - RNA, 19 nt, Artificial Sequence
  Description of Artificial Sequence: Synthetic oligonucleotide
  Antisense strand to SEQ ID NO: 547383
guuacugaagaagucgccc

SEQ ID NO: 547385 - RNA, 19 nt, Artificial Sequence
  Description of Artificial Sequence: Synthetic oligonucleotide
  Sense strand starting at position 320 of SEQ ID NO: 318239
ugugaaucacauugaauac

SEQ ID NO: 547386 - RNA, 19 nt, Artificial Sequence
  Description of Artificial Sequence: Synthetic oligonucleotide
  Antisense strand to SEQ ID NO: 547385
guauucaaugugauucaca

SEQ ID NO: 547387 - RNA, 19 nt, Artificial Sequence
  Description of Artificial Sequence: Synthetic oligonucleotide
  Sense strand starting at position 2078 of SEQ ID NO: 318239
gugauugggccugacgcaa

SEQ ID NO: 547388 - RNA, 19 nt, Artificial Sequence
  Description of Artificial Sequence: Synthetic oligonucleotide
  Antisense strand to SEQ ID NO: 547387
uugcgucaggcccaaucac

SEQ ID NO: 547389 - RNA, 19 nt, Artificial Sequence
  Description of Artificial Sequence: Synthetic oligonucleotide
  Sense strand starting at position 2208 of SEQ ID NO: 318239
guuuccauguccuugggaa

SEQ ID NO: 547390 - RNA, 19 nt, Artificial Sequence
  Description of Artificial Sequence: Synthetic oligonucleotide
  Antisense strand to SEQ ID NO: 547389
uucccaaggacauggaaac

SEQ ID NO: 547391 - RNA, 19 nt, Artificial Sequence
  Description of Artificial Sequence: Synthetic oligonucleotide
  Sense strand starting at position 2209 of SEQ ID NO: 318239
uuuccauguccuugggaaa

SEQ ID NO: 547392 - RNA, 19 nt, Artificial Sequence
  Description of Artificial Sequence: Synthetic oligonucleotide
  Antisense strand to SEQ ID NO: 547391
uuucccaaggacauggaaa

SEQ ID NO: 547393 - RNA, 19 nt, Artificial Sequence
  Description of Artificial Sequence: Synthetic oligonucleotide
  Sense strand starting at position 2210 of SEQ ID NO: 318239
uuccauguccuugggaaac

SEQ ID NO: 547394 - RNA, 19 nt, Artificial Sequence
  Description of Artificial Sequence: Synthetic oligonucleotide
  Antisense strand to SEQ ID NO: 547393
guuucccaaggacauggaa

SEQ ID NO: 547395 - RNA, 19 nt, Artificial Sequence
  Description of Artificial Sequence: Synthetic oligonucleotide
  Sense strand starting at position 2307 of SEQ ID NO: 318239
gguuuagguucugcagaaa

SEQ ID NO: 547396 - RNA, 19 nt, Artificial Sequence
  Description of Artificial Sequence: Synthetic oligonucleotide
  Antisense strand to SEQ ID NO: 547395
uuucugcagaaccuaaacc

SEQ ID NO: 547397 - RNA, 19 nt, Artificial Sequence
  Description of Artificial Sequence: Synthetic oligonucleotide
  Sense strand starting at position 2318 of SEQ ID NO: 318239
ugcagaaagaagugcuaau

SEQ ID NO: 547398 - RNA, 19 nt, Artificial Sequence
  Description of Artificial Sequence: Synthetic oligonucleotide
  Antisense strand to SEQ ID NO: 547397
auuagcacuucuuucugca

SEQ ID NO: 547399 - RNA, 19 nt, Artificial Sequence
  Description of Artificial Sequence: Synthetic oligonucleotide
  Sense strand starting at position 2417 of SEQ ID NO: 318239
gagauacucucggcuguga

SEQ ID NO: 547400 - RNA, 19 nt, Artificial Sequence
  Description of Artificial Sequence: Synthetic oligonucleotide
  Antisense strand to SEQ ID NO: 547399
ucacagccgagaguaucuc

SEQ ID NO: 547401 - RNA, 19 nt, Artificial Sequence
  Description of Artificial Sequence: Synthetic oligonucleotide
  Sense strand starting at position 2476 of SEQ ID NO: 318239
gaaauaccgucacuggauu

SEQ ID NO: 547402 - RNA, 19 nt, Artificial Sequence
  Description of Artificial Sequence: Synthetic oligonucleotide
  Antisense strand to SEQ ID NO: 547401
aauccagugacgguauuuc

SEQ ID NO: 547403 - RNA, 19 nt, Artificial Sequence
  Description of Artificial Sequence: Synthetic oligonucleotide
  Sense strand starting at position 2488 of SEQ ID NO: 318239
cuggauugaacguagaguu

SEQ ID NO: 547404 - RNA, 19 nt, Artificial Sequence
  Description of Artificial Sequence: Synthetic oligonucleotide
  Antisense strand to SEQ ID NO: 547403
aacucuacguucaauccag

SEQ ID NO: 547405 - RNA, 19 nt, Artificial Sequence
  Description of Artificial Sequence: Synthetic oligonucleotide
  Sense strand starting at position 2495 of SEQ ID NO: 318239
gaacguagaguuggaaaug

SEQ ID NO: 547406 - RNA, 19 nt, Artificial Sequence
  Description of Artificial Sequence: Synthetic oligonucleotide
  Antisense strand to SEQ ID NO: 547405
cauuuccaacucuacguuc

SEQ ID NO: 547407 - RNA, 19 nt, Artificial Sequence
  Description of Artificial Sequence: Synthetic oligonucleotide
  Sense strand starting at position 2685 of SEQ ID NO: 318239
cgagcauucuuucuacuuc

SEQ ID NO: 547408 - RNA, 19 nt, Artificial Sequence
  Description of Artificial Sequence: Synthetic oligonucleotide
  Antisense strand to SEQ ID NO: 547407
gaaguagaaagaaugcucg

SEQ ID NO: 547409 - RNA, 19 nt, Artificial Sequence
  Description of Artificial Sequence: Synthetic oligonucleotide
  Sense strand starting at position 2710 of SEQ ID NO: 318239
cucuccauccuguauugau

SEQ ID NO: 547410 - RNA, 19 nt, Artificial Sequence
  Description of Artificial Sequence: Synthetic oligonucleotide
  Antisense strand to SEQ ID NO: 547409
aucaauacaggauggagag

SEQ ID NO: 547411 - RNA, 19 nt, Artificial Sequence
  Description of Artificial Sequence: Synthetic oligonucleotide
  Sense strand starting at position 2717 of SEQ ID NO: 318239
uccuguauugauugccaga

SEQ ID NO: 547412 - RNA, 19 nt, Artificial Sequence
  Description of Artificial Sequence: Synthetic oligonucleotide
  Antisense strand to SEQ ID NO: 547411
ucuggcaaucaauacagga

SEQ ID NO: 547413 - RNA, 19 nt, Artificial Sequence
  Description of Artificial Sequence: Synthetic oligonucleotide
  Sense strand starting at position 2836 of SEQ ID NO: 318239
uuugccaggcauuguaaua

SEQ ID NO: 547414 - RNA, 19 nt, Artificial Sequence
  Description of Artificial Sequence: Synthetic oligonucleotide
  Antisense strand to SEQ ID NO: 547413
uauuacaaugccuggcaaa

SEQ ID NO: 547415 - RNA, 19 nt, Artificial Sequence
  Description of Artificial Sequence: Synthetic oligonucleotide
  Sense strand starting at position 2888 of SEQ ID NO: 318239
caugauaaucuauggguua

SEQ ID NO: 547416 - RNA, 19 nt, Artificial Sequence
  Description of Artificial Sequence: Synthetic oligonucleotide
  Antisense strand to SEQ ID NO: 547415
uaacccauagauuaucaug

SEQ ID NO: 547417 - RNA, 19 nt, Artificial Sequence
  Description of Artificial Sequence: Synthetic oligonucleotide
  Sense strand starting at position 2891 of SEQ ID NO: 318239
gauaaucuauggguuaggu

SEQ ID NO: 547418 - RNA, 19 nt, Artificial Sequence
  Description of Artificial Sequence: Synthetic oligonucleotide
  Antisense strand to SEQ ID NO: 547417
accuaacccauagauuauc

SEQ ID NO: 547419 - RNA, 19 nt, Artificial Sequence
  Description of Artificial Sequence: Synthetic oligonucleotide
  Sense strand starting at position 2995 of SEQ ID NO: 318239
gaaugcuggcucugggacu

SEQ ID NO: 547420 - RNA, 19 nt, Artificial Sequence
  Description of Artificial Sequence: Synthetic oligonucleotide
  Antisense strand to SEQ ID NO: 547419
agucccagagccagcauuc

SEQ ID NO: 547421 - RNA, 19 nt, Artificial Sequence
  Description of Artificial Sequence: Synthetic oligonucleotide
  Sense strand starting at position 3020 of SEQ ID NO: 318239
caguuuguuugacuccaga

SEQ ID NO: 547422 - RNA, 19 nt, Artificial Sequence
  Description of Artificial Sequence: Synthetic oligonucleotide
  Antisense strand to SEQ ID NO: 547421
ucuggagucaaacaaacug

SEQ ID NO: 547423 - RNA, 19 nt, Artificial Sequence
  Description of Artificial Sequence: Synthetic oligonucleotide
  Sense strand starting at position 3023 of SEQ ID NO: 318239
uuuguuugacuccagaguu

SEQ ID NO: 547424 - RNA, 19 nt, Artificial Sequence
  Description of Artificial Sequence: Synthetic oligonucleotide
  Antisense strand to SEQ ID NO: 547423
aacucuggagucaaacaaa

SEQ ID NO: 547425 - RNA, 19 nt, Artificial Sequence
  Description of Artificial Sequence: Synthetic oligonucleotide
  Sense strand starting at position 3139 of SEQ ID NO: 318239
ugcacugacgguugagauu

SEQ ID NO: 547426 - RNA, 19 nt, Artificial Sequence
  Description of Artificial Sequence: Synthetic oligonucleotide
  Antisense strand to SEQ ID NO: 547425
aaucucaaccgucagugca

SEQ ID NO: 547427 - RNA, 19 nt, Artificial Sequence
  Description of Artificial Sequence: Synthetic oligonucleotide
  Sense strand starting at position 3145 of SEQ ID NO: 318239
gacgguugagauuggaaag

SEQ ID NO: 547428 - RNA, 19 nt, Artificial Sequence
  Description of Artificial Sequence: Synthetic oligonucleotide
  Antisense strand to SEQ ID NO: 547427
cuuuccaaucucaaccguc

SEQ ID NO: 547429 - RNA, 19 nt, Artificial Sequence
  Description of Artificial Sequence: Synthetic oligonucleotide
  Sense strand starting at position 3146 of SEQ ID NO: 318239
acgguugagauuggaaaga

SEQ ID NO: 547430 - RNA, 19 nt, Artificial Sequence
  Description of Artificial Sequence: Synthetic oligonucleotide
  Antisense strand to SEQ ID NO: 547429
ucuuuccaaucucaaccgu

SEQ ID NO: 547431 - RNA, 19 nt, Artificial Sequence
  Description of Artificial Sequence: Synthetic oligonucleotide
  Sense strand starting at position 3197 of SEQ ID NO: 318239
ggcuucugagaguggucau

SEQ ID NO: 547432 - RNA, 19 nt, Artificial Sequence
  Description of Artificial Sequence: Synthetic oligonucleotide
  Antisense strand to SEQ ID NO: 547431
augaccacucucagaagcc

SEQ ID NO: 547433 - RNA, 19 nt, Artificial Sequence
  Description of Artificial Sequence: Synthetic oligonucleotide
  Sense strand starting at position 3198 of SEQ ID NO: 318239
gcuucugagaguggucauc

SEQ ID NO: 547434 - RNA, 19 nt, Artificial Sequence
  Description of Artificial Sequence: Synthetic oligonucleotide
  Antisense strand to SEQ ID NO: 547433
gaugaccacucucagaagc

SEQ ID NO: 547435 - RNA, 19 nt, Artificial Sequence
  Description of Artificial Sequence: Synthetic oligonucleotide
  Sense strand starting at position 3200 of SEQ ID NO: 318239
uucugagaguggucaucua

SEQ ID NO: 547436 - RNA, 19 nt, Artificial Sequence
  Description of Artificial Sequence: Synthetic oligonucleotide
  Antisense strand to SEQ ID NO: 547435
uagaugaccacucucagaa

SEQ ID NO: 547437 - RNA, 19 nt, Artificial Sequence
  Description of Artificial Sequence: Synthetic oligonucleotide
  Sense strand starting at position 3208 of SEQ ID NO: 318239
guggucaucuauuuaugua

SEQ ID NO: 547438 - RNA, 19 nt, Artificial Sequence
  Description of Artificial Sequence: Synthetic oligonucleotide
  Antisense strand to SEQ ID NO: 547437
uacauaaauagaugaccac

SEQ ID NO: 547439 - RNA, 19 nt, Artificial Sequence
  Description of Artificial Sequence: Synthetic oligonucleotide
  Sense strand starting at position 3281 of SEQ ID NO: 318239
agacaagagguuuguuguu

SEQ ID NO: 547440 - RNA, 19 nt, Artificial Sequence
  Description of Artificial Sequence: Synthetic oligonucleotide
  Antisense strand to SEQ ID NO: 547439
aacaacaaaccucuugucu

SEQ ID NO: 547441 - RNA, 19 nt, Artificial Sequence
  Description of Artificial Sequence: Synthetic oligonucleotide
  Sense strand starting at position 3328 of SEQ ID NO: 318239
aguacaugccaucagucua

SEQ ID NO: 547442 - RNA, 19 nt, Artificial Sequence
  Description of Artificial Sequence: Synthetic oligonucleotide
  Antisense strand to SEQ ID NO: 547441
uagacugauggcauguacu

SEQ ID NO: 547443 - RNA, 19 nt, Artificial Sequence
  Description of Artificial Sequence: Synthetic oligonucleotide
  Sense strand starting at position 3488 of SEQ ID NO: 318239
agaggcucucugugacaua

SEQ ID NO: 547444 - RNA, 19 nt, Artificial Sequence
  Description of Artificial Sequence: Synthetic oligonucleotide
  Antisense strand to SEQ ID NO: 547443
uaugucacagagagccucu

SEQ ID NO: 547445 - RNA, 19 nt, Artificial Sequence
  Description of Artificial Sequence: Synthetic oligonucleotide
  Sense strand starting at position 3582 of SEQ ID NO: 318239
ugaacacuuuaggcuaaua

SEQ ID NO: 547446 - RNA, 19 nt, Artificial Sequence
  Description of Artificial Sequence: Synthetic oligonucleotide
  Antisense strand to SEQ ID NO: 547445
uauuagccuaaaguguuca

SEQ ID NO: 547447 - RNA, 19 nt, Artificial Sequence
  Description of Artificial Sequence: Synthetic oligonucleotide
  Sense strand starting at position 3627 of SEQ ID NO: 318239
auauaugaauugggagaua

SEQ ID NO: 547448 - RNA, 19 nt, Artificial Sequence
  Description of Artificial Sequence: Synthetic oligonucleotide
  Antisense strand to SEQ ID NO: 547447
uaucucccaauucauauau

SEQ ID NO: 547449 - RNA, 19 nt, Artificial Sequence
  Description of Artificial Sequence: Synthetic oligonucleotide
  Sense strand starting at position 3708 of SEQ ID NO: 318239
uuauacuaugugugucaga

SEQ ID NO: 547450 - RNA, 19 nt, Artificial Sequence
  Description of Artificial Sequence: Synthetic oligonucleotide
  Antisense strand to SEQ ID NO: 547449
ucugacacacauaguauaa

SEQ ID NO: 547451 - RNA, 19 nt, Artificial Sequence
  Description of Artificial Sequence: Synthetic oligonucleotide
  Sense strand starting at position 3782 of SEQ ID NO: 318239
ugcuacauucuagguaauu

SEQ ID NO: 547452 - RNA, 19 nt, Artificial Sequence
  Description of Artificial Sequence: Synthetic oligonucleotide
  Antisense strand to SEQ ID NO: 547451
aauuaccuagaauguagca

SEQ ID NO: 547453 - RNA, 19 nt, Artificial Sequence
  Description of Artificial Sequence: Synthetic oligonucleotide
  Sense strand starting at position 3847 of SEQ ID NO: 318239
gcacacugacuuuaugaua

SEQ ID NO: 547454 - RNA, 19 nt, Artificial Sequence
  Description of Artificial Sequence: Synthetic oligonucleotide
  Antisense strand to SEQ ID NO: 547453
uaucauaaagucagugugc

SEQ ID NO: 547455 - RNA, 19 nt, Artificial Sequence
  Description of Artificial Sequence: Synthetic oligonucleotide
  Sense strand starting at position 3881 of SEQ ID NO: 318239
aaucaagagguuugagagu

SEQ ID NO: 547456 - RNA, 19 nt, Artificial Sequence
  Description of Artificial Sequence: Synthetic oligonucleotide
  Antisense strand to SEQ ID NO: 547455
acucucaaaccucuugauu

SEQ ID NO: 547457 - RNA, 19 nt, Artificial Sequence
  Description of Artificial Sequence: Synthetic oligonucleotide
  Sense strand starting at position 3887 of SEQ ID NO: 318239
gagguuugagagugccgau

SEQ ID NO: 547458 - RNA, 19 nt, Artificial Sequence
  Description of Artificial Sequence: Synthetic oligonucleotide
  Antisense strand to SEQ ID NO: 547457
aucggcacucucaaaccuc

SEQ ID NO: 547459 - RNA, 19 nt, Artificial Sequence
  Description of Artificial Sequence: Synthetic oligonucleotide
  Sense strand starting at position 80 of SEQ ID NO: 318240
ggcaucuugguggaacaga

SEQ ID NO: 547460 - RNA, 19 nt, Artificial Sequence
  Description of Artificial Sequence: Synthetic oligonucleotide
  Antisense strand to SEQ ID NO: 547459
ucuguuccaccaagaugcc

SEQ ID NO: 547461 - RNA, 19 nt, Artificial Sequence
  Description of Artificial Sequence: Synthetic oligonucleotide
  Sense strand starting at position 215 of SEQ ID NO: 318240
aagggaagagcuugcuuaa

SEQ ID NO: 547462 - RNA, 19 nt, Artificial Sequence
  Description of Artificial Sequence: Synthetic oligonucleotide
  Antisense strand to SEQ ID NO: 547461
uuaagcaagcucuucccuu

SEQ ID NO: 547463 - RNA, 19 nt, Artificial Sequence
  Description of Artificial Sequence: Synthetic oligonucleotide
  Sense strand starting at position 218 of SEQ ID NO: 318240
ggaagagcuugcuuaaguc

SEQ ID NO: 547464 - RNA, 19 nt, Artificial Sequence
  Description of Artificial Sequence: Synthetic oligonucleotide
  Antisense strand to SEQ ID NO: 547463
gacuuaagcaagcucuucc

SEQ ID NO: 547465 - RNA, 19 nt, Artificial Sequence
  Description of Artificial Sequence: Synthetic oligonucleotide
  Sense strand starting at position 303 of SEQ ID NO: 318240
ugugauaucucucuuucca

SEQ ID NO: 547466 - RNA, 19 nt, Artificial Sequence
  Description of Artificial Sequence: Synthetic oligonucleotide
  Antisense strand to SEQ ID NO: 547465
uggaaagagagauaucaca

SEQ ID NO: 547467 - RNA, 19 nt, Artificial Sequence
  Description of Artificial Sequence: Synthetic oligonucleotide
  Sense strand starting at position 581 of SEQ ID NO: 318240
caacgaacccucuguggau

SEQ ID NO: 547468 - RNA, 19 nt, Artificial Sequence
  Description of Artificial Sequence: Synthetic oligonucleotide
  Antisense strand to SEQ ID NO: 547467
auccacagaggguucguug

SEQ ID NO: 547469 - RNA, 19 nt, Artificial Sequence
  Description of Artificial Sequence: Synthetic oligonucleotide
  Sense strand starting at position 597 of SEQ ID NO: 318240
gauggacuuggcugucaca

SEQ ID NO: 547470 - RNA, 19 nt, Artificial Sequence
  Description of Artificial Sequence: Synthetic oligonucleotide
  Antisense strand to SEQ ID NO: 547469
ugugacagccaaguccauc

SEQ ID NO: 547471 - RNA, 19 nt, Artificial Sequence
  Description of Artificial Sequence: Synthetic oligonucleotide
  Sense strand starting at position 702 of SEQ ID NO: 318240
uggccaaaguaauccaauu

SEQ ID NO: 547472 - RNA, 19 nt, Artificial Sequence
  Description of Artificial Sequence: Synthetic oligonucleotide
  Antisense strand to SEQ ID NO: 547471
aauuggauuacuuuggcca

SEQ ID NO: 547473 - RNA, 19 nt, Artificial Sequence
  Description of Artificial Sequence: Synthetic oligonucleotide
  Sense strand starting at position 723 of SEQ ID NO: 318240
gagcaugggccagaugauu

SEQ ID NO: 547474 - RNA, 19 nt, Artificial Sequence
  Description of Artificial Sequence: Synthetic oligonucleotide
  Antisense strand to SEQ ID NO: 547473
aaucaucuggcccaugcuc

SEQ ID NO: 547475 - RNA, 19 nt, Artificial Sequence
  Description of Artificial Sequence: Synthetic oligonucleotide
  Sense strand starting at position 731 of SEQ ID NO: 318240
gccagaugauuccuguuau

SEQ ID NO: 547476 - RNA, 19 nt, Artificial Sequence
  Description of Artificial Sequence: Synthetic oligonucleotide
  Antisense strand to SEQ ID NO: 547475
auaacaggaaucaucuggc

SEQ ID NO: 547477 - RNA, 19 nt, Artificial Sequence
  Description of Artificial Sequence: Synthetic oligonucleotide
  Sense strand starting at position 1016 of SEQ ID NO: 318240
guauuaccuugagcaaauu

SEQ ID NO: 547478 - RNA, 19 nt, Artificial Sequence
  Description of Artificial Sequence: Synthetic oligonucleotide
  Antisense strand to SEQ ID NO: 547477
aauuugcucaagguaauac

SEQ ID NO: 547479 - RNA, 19 nt, Artificial Sequence
  Description of Artificial Sequence: Synthetic oligonucleotide
  Sense strand starting at position 1055 of SEQ ID NO: 318240
guuucuggaucuuuagagu

SEQ ID NO: 547480 - RNA, 19 nt, Artificial Sequence
  Description of Artificial Sequence: Synthetic oligonucleotide
  Antisense strand to SEQ ID NO: 547479
acucuaaagauccagaaac

SEQ ID NO: 547481 - RNA, 19 nt, Artificial Sequence
  Description of Artificial Sequence: Synthetic oligonucleotide
  Sense strand starting at position 1138 of SEQ ID NO: 318240
ugagauaaugcggguaaag

SEQ ID NO: 547482 - RNA, 19 nt, Artificial Sequence
  Description of Artificial Sequence: Synthetic oligonucleotide
  Antisense strand to SEQ ID NO: 547481
cuuuacccgcauuaucuca

SEQ ID NO: 547483 - RNA, 19 nt, Artificial Sequence
  Description of Artificial Sequence: Synthetic oligonucleotide
  Sense strand starting at position 1171 of SEQ ID NO: 318240
ccugcuuuauggucagaac

SEQ ID NO: 547484 - RNA, 19 nt, Artificial Sequence
  Description of Artificial Sequence: Synthetic oligonucleotide
  Antisense strand to SEQ ID NO: 547483
guucugaccauaaagcagg

SEQ ID NO: 547485 - RNA, 19 nt, Artificial Sequence
  Description of Artificial Sequence: Synthetic oligonucleotide
  Sense strand starting at position 1376 of SEQ ID NO: 318240
gggugucugcugucgucaa

SEQ ID NO: 547486 - RNA, 19 nt, Artificial Sequence
  Description of Artificial Sequence: Synthetic oligonucleotide
  Antisense strand to SEQ ID NO: 547485
uugacgacagcagacaccc

SEQ ID NO: 547487 - RNA, 19 nt, Artificial Sequence
  Description of Artificial Sequence: Synthetic oligonucleotide
  Sense strand starting at position 1486 of SEQ ID NO: 318240
agugaagucucagccagaa

SEQ ID NO: 547488 - RNA, 19 nt, Artificial Sequence
  Description of Artificial Sequence: Synthetic oligonucleotide
  Antisense strand to SEQ ID NO: 547487
uucuggcugagacuucacu

SEQ ID NO: 547489 - RNA, 19 nt, Artificial Sequence
  Description of Artificial Sequence: Synthetic oligonucleotide
  Sense strand starting at position 2094 of SEQ ID NO: 318240
gaccuagauggcuggagaa

SEQ ID NO: 547490 - RNA, 19 nt, Artificial Sequence
  Description of Artificial Sequence: Synthetic oligonucleotide
  Antisense strand to SEQ ID NO: 547489
uucuccagccaucuagguc

SEQ ID NO: 547491 - RNA, 19 nt, Artificial Sequence
  Description of Artificial Sequence: Synthetic oligonucleotide
  Sense strand starting at position 2374 of SEQ ID NO: 318240
gguacauagugaguuaaug

SEQ ID NO: 547492 - RNA, 19 nt, Artificial Sequence
  Description of Artificial Sequence: Synthetic oligonucleotide
  Antisense strand to SEQ ID NO: 547491
cauuaacucacuauguacc

SEQ ID NO: 547493 - RNA, 19 nt, Artificial Sequence
  Description of Artificial Sequence: Synthetic oligonucleotide
  Sense strand starting at position 2382 of SEQ ID NO: 318240
gugaguuaaugcucaauau

SEQ ID NO: 547494 - RNA, 19 nt, Artificial Sequence
  Description of Artificial Sequence: Synthetic oligonucleotide
  Antisense strand to SEQ ID NO: 547493
auauugagcauuaacucac

SEQ ID NO: 547495 - RNA, 19 nt, Artificial Sequence
  Description of Artificial Sequence: Synthetic oligonucleotide
  Sense strand starting at position 2383 of SEQ ID NO: 318240
ugaguuaaugcucaauaua

SEQ ID NO: 547496 - RNA, 19 nt, Artificial Sequence
  Description of Artificial Sequence: Synthetic oligonucleotide
  Antisense strand to SEQ ID NO: 547495
uauauugagcauuaacuca

SEQ ID NO: 547497 - RNA, 19 nt, Artificial Sequence
  Description of Artificial Sequence: Synthetic oligonucleotide
  Sense strand starting at position 2422 of SEQ ID NO: 318240
auaauaggagcuugguaaa

SEQ ID NO: 547498 - RNA, 19 nt, Artificial Sequence
  Description of Artificial Sequence: Synthetic oligonucleotide
  Antisense strand to SEQ ID NO: 547497
uuuaccaagcuccuauuau

SEQ ID NO: 547499 - RNA, 19 nt, Artificial Sequence
  Description of Artificial Sequence: Synthetic oligonucleotide
  Sense strand starting at position 2536 of SEQ ID NO: 318240
augugaucaucucuuagag

SEQ ID NO: 547500 - RNA, 19 nt, Artificial Sequence
  Description of Artificial Sequence: Synthetic oligonucleotide
  Antisense strand to SEQ ID NO: 547499
cucuaagagaugaucacau

SEQ ID NO: 547501 - RNA, 19 nt, Artificial Sequence
  Description of Artificial Sequence: Synthetic oligonucleotide
  Sense strand starting at position 2633 of SEQ ID NO: 318240
uguuacuauggguaacagu

SEQ ID NO: 547502 - RNA, 19 nt, Artificial Sequence
  Description of Artificial Sequence: Synthetic oligonucleotide
  Antisense strand to SEQ ID NO: 547501
acuguuacccauaguaaca

SEQ ID NO: 547503 - RNA, 19 nt, Artificial Sequence
  Description of Artificial Sequence: Synthetic oligonucleotide
  Sense strand starting at position 2696 of SEQ ID NO: 318240
uauguagaguuugcuauag

SEQ ID NO: 547504 - RNA, 19 nt, Artificial Sequence
  Description of Artificial Sequence: Synthetic oligonucleotide
  Antisense strand to SEQ ID NO: 547503
cuauagcaaacucuacaua

SEQ ID NO: 547505 - RNA, 19 nt, Artificial Sequence
  Description of Artificial Sequence: Synthetic oligonucleotide
  Sense strand starting at position 2700 of SEQ ID NO: 318240
uagaguuugcuauaggcca

SEQ ID NO: 547506 - RNA, 19 nt, Artificial Sequence
  Description of Artificial Sequence: Synthetic oligonucleotide
  Antisense strand to SEQ ID NO: 547505
uggccuauagcaaacucua

SEQ ID NO: 547507 - RNA, 19 nt, Artificial Sequence
  Description of Artificial Sequence: Synthetic oligonucleotide
  Sense strand starting at position 2761 of SEQ ID NO: 318240
ucaugaccgccuuauaaug

SEQ ID NO: 547508 - RNA, 19 nt, Artificial Sequence
  Description of Artificial Sequence: Synthetic oligonucleotide
  Antisense strand to SEQ ID NO: 547507
cauuauaaggcggucauga

SEQ ID NO: 547509 - RNA, 19 nt, Artificial Sequence
  Description of Artificial Sequence: Synthetic oligonucleotide
  Sense strand starting at position 2815 of SEQ ID NO: 318240
gcacaaagugcucaaguaa

SEQ ID NO: 547510 - RNA, 19 nt, Artificial Sequence
  Description of Artificial Sequence: Synthetic oligonucleotide
  Antisense strand to SEQ ID NO: 547509
uuacuugagcacuuugugc

SEQ ID NO: 547511 - RNA, 19 nt, Artificial Sequence
  Description of Artificial Sequence: Synthetic oligonucleotide
  Sense strand starting at position 2962 of SEQ ID NO: 318240
ugagaaagcagugauuggu

SEQ ID NO: 547512 - RNA, 19 nt, Artificial Sequence
  Description of Artificial Sequence: Synthetic oligonucleotide
  Antisense strand to SEQ ID NO: 547511
accaaucacugcuuucuca

SEQ ID NO: 547513 - RNA, 19 nt, Artificial Sequence
  Description of Artificial Sequence: Synthetic oligonucleotide
  Sense strand starting at position 3024 of SEQ ID NO: 318240
aagaauuguuauguaugga

SEQ ID NO: 547514 - RNA, 19 nt, Artificial Sequence
  Description of Artificial Sequence: Synthetic oligonucleotide
  Antisense strand to SEQ ID NO: 547513
uccauacauaacaauucuu

SEQ ID NO: 547515 - RNA, 19 nt, Artificial Sequence
  Description of Artificial Sequence: Synthetic oligonucleotide
  Sense strand starting at position 3027 of SEQ ID NO: 318240
aauuguuauguauggaguc

SEQ ID NO: 547516 - RNA, 19 nt, Artificial Sequence
  Description of Artificial Sequence: Synthetic oligonucleotide
  Antisense strand to SEQ ID NO: 547515
gacuccauacauaacaauu

SEQ ID NO: 547517 - RNA, 19 nt, Artificial Sequence
  Description of Artificial Sequence: Synthetic oligonucleotide
  Sense strand starting at position 3340 of SEQ ID NO: 318240
gagggugccagguguaaac

SEQ ID NO: 547518 - RNA, 19 nt, Artificial Sequence
  Description of Artificial Sequence: Synthetic oligonucleotide
  Antisense strand to SEQ ID NO: 547517
guuuacaccuggcacccuc

SEQ ID NO: 547519 - RNA, 19 nt, Artificial Sequence
  Description of Artificial Sequence: Synthetic oligonucleotide
  Sense strand starting at position 3472 of SEQ ID NO: 318240
uuugcuggaugacuuuaaa

SEQ ID NO: 547520 - RNA, 19 nt, Artificial Sequence
  Description of Artificial Sequence: Synthetic oligonucleotide
  Antisense strand to SEQ ID NO: 547519
uuuaaagucauccagcaaa

SEQ ID NO: 547521 - RNA, 19 nt, Artificial Sequence
  Description of Artificial Sequence: Synthetic oligonucleotide
  Sense strand starting at position 3664 of SEQ ID NO: 318240
gcccuugauucuguaauga

SEQ ID NO: 547522 - RNA, 19 nt, Artificial Sequence
  Description of Artificial Sequence: Synthetic oligonucleotide
  Antisense strand to SEQ ID NO: 547521
ucauuacagaaucaagggc

SEQ ID NO: 547523 - RNA, 19 nt, Artificial Sequence
  Description of Artificial Sequence: Synthetic oligonucleotide
  Sense strand starting at position 3682 of SEQ ID NO: 318240
augugcaccucucuggaaa

SEQ ID NO: 547524 - RNA, 19 nt, Artificial Sequence
  Description of Artificial Sequence: Synthetic oligonucleotide
  Antisense strand to SEQ ID NO: 547523
uuuccagagaggugcacau

SEQ ID NO: 547525 - RNA, 19 nt, Artificial Sequence
  Description of Artificial Sequence: Synthetic oligonucleotide
  Sense strand starting at position 3816 of SEQ ID NO: 318240
aauguuugacaagguuagu

SEQ ID NO: 547526 - RNA, 19 nt, Artificial Sequence
  Description of Artificial Sequence: Synthetic oligonucleotide
  Antisense strand to SEQ ID NO: 547525
acuaaccuugucaaacauu

SEQ ID NO: 547527 - RNA, 19 nt, Artificial Sequence
  Description of Artificial Sequence: Synthetic oligonucleotide
  Sense strand starting at position 3888 of SEQ ID NO: 318240
gugauucugcuuuacugua

SEQ ID NO: 547528 - RNA, 19 nt, Artificial Sequence
  Description of Artificial Sequence: Synthetic oligonucleotide
  Antisense strand to SEQ ID NO: 547527
uacaguaaagcagaaucac

SEQ ID NO: 547529 - RNA, 19 nt, Artificial Sequence
  Description of Artificial Sequence: Synthetic oligonucleotide
  Sense strand starting at position 3896 of SEQ ID NO: 318240
gcuuuacuguaacuucuga

SEQ ID NO: 547530 - RNA, 19 nt, Artificial Sequence
  Description of Artificial Sequence: Synthetic oligonucleotide
  Antisense strand to SEQ ID NO: 547529
ucagaaguuacaguaaagc

SEQ ID NO: 547531 - RNA, 19 nt, Artificial Sequence
  Description of Artificial Sequence: Synthetic oligonucleotide
  Sense strand starting at position 3915 of SEQ ID NO: 318240
gcaaguuugauguaauguu

SEQ ID NO: 547532 - RNA, 19 nt, Artificial Sequence
  Description of Artificial Sequence: Synthetic oligonucleotide
  Antisense strand to SEQ ID NO: 547531
aacauuacaucaaacuugc

SEQ ID NO: 547533 - RNA, 19 nt, Artificial Sequence
  Description of Artificial Sequence: Synthetic oligonucleotide
  Sense strand starting at position 3922 of SEQ ID NO: 318240
ugauguaauguuugagcac

SEQ ID NO: 547534 - RNA, 19 nt, Artificial Sequence
  Description of Artificial Sequence: Synthetic oligonucleotide
  Antisense strand to SEQ ID NO: 547533
gugcucaaacauuacauca

SEQ ID NO: 547535 - RNA, 19 nt, Artificial Sequence
  Description of Artificial Sequence: Synthetic oligonucleotide
  Sense strand starting at position 3925 of SEQ ID NO: 318240
uguaauguuugagcacaua

SEQ ID NO: 547536 - RNA, 19 nt, Artificial Sequence
  Description of Artificial Sequence: Synthetic oligonucleotide
  Antisense strand to SEQ ID NO: 547535
uaugugcucaaacauuaca

SEQ ID NO: 547537 - RNA, 19 nt, Artificial Sequence
  Description of Artificial Sequence: Synthetic oligonucleotide
  Sense strand starting at position 3959 of SEQ ID NO: 318240
guguauaucagcuaugagc

SEQ ID NO: 547538 - RNA, 19 nt, Artificial Sequence
  Description of Artificial Sequence: Synthetic oligonucleotide
  Antisense strand to SEQ ID NO: 547537
gcucauagcugauauacac

SEQ ID NO: 547539 - RNA, 19 nt, Artificial Sequence
  Description of Artificial Sequence: Synthetic oligonucleotide
  Sense strand starting at position 2 of SEQ ID NO: 318241
guacgugacagcuauauua

SEQ ID NO: 547540 - RNA, 19 nt, Artificial Sequence
  Description of Artificial Sequence: Synthetic oligonucleotide
  Antisense strand to SEQ ID NO: 547539
uaauauagcugucacguac

SEQ ID NO: 547541 - RNA, 19 nt, Artificial Sequence
  Description of Artificial Sequence: Synthetic oligonucleotide
  Sense strand starting at position 4 of SEQ ID NO: 318241
acgugacagcuauauuaac

SEQ ID NO: 547542 - RNA, 19 nt, Artificial Sequence
  Description of Artificial Sequence: Synthetic oligonucleotide
  Antisense strand to SEQ ID NO: 547541
guuaauauagcugucacgu

SEQ ID NO: 547543 - RNA, 19 nt, Artificial Sequence
  Description of Artificial Sequence: Synthetic oligonucleotide
  Sense strand starting at position 34 of SEQ ID NO: 318241
aaacauuuauccguacguu

SEQ ID NO: 547544 - RNA, 19 nt, Artificial Sequence
  Description of Artificial Sequence: Synthetic oligonucleotide
  Antisense strand to SEQ ID NO: 547543
aacguacggauaaauguuu

SEQ ID NO: 547545 - RNA, 19 nt, Artificial Sequence
  Description of Artificial Sequence: Synthetic oligonucleotide
  Sense strand starting at position 35 of SEQ ID NO: 318241
aacauuuauccguacguuu

SEQ ID NO: 547546 - RNA, 19 nt, Artificial Sequence
  Description of Artificial Sequence: Synthetic oligonucleotide
  Antisense strand to SEQ ID NO: 547545
aaacguacggauaaauguu

SEQ ID NO: 547547 - RNA, 19 nt, Artificial Sequence
  Description of Artificial Sequence: Synthetic oligonucleotide
  Sense strand starting at position 46 of SEQ ID NO: 318241
guacguuugcaggaaaugu

SEQ ID NO: 547548 - RNA, 19 nt, Artificial Sequence
  Description of Artificial Sequence: Synthetic oligonucleotide
  Antisense strand to SEQ ID NO: 547547
acauuuccugcaaacguac

SEQ ID NO: 547549 - RNA, 19 nt, Artificial Sequence
  Description of Artificial Sequence: Synthetic oligonucleotide
  Sense strand starting at position 50 of SEQ ID NO: 318241
guuugcaggaaaugugaaa

SEQ ID NO: 547550 - RNA, 19 nt, Artificial Sequence
  Description of Artificial Sequence: Synthetic oligonucleotide
  Antisense strand to SEQ ID NO: 547549
uuucacauuuccugcaaac

SEQ ID NO: 547551 - RNA, 19 nt, Artificial Sequence
  Description of Artificial Sequence: Synthetic oligonucleotide
  Sense strand starting at position 74 of SEQ ID NO: 318241
uauuguaaucaggacgcua

SEQ ID NO: 547552 - RNA, 19 nt, Artificial Sequence
  Description of Artificial Sequence: Synthetic oligonucleotide
  Antisense strand to SEQ ID NO: 547551
uagcguccugauuacaaua

SEQ ID NO: 547553 - RNA, 19 nt, Artificial Sequence
  Description of Artificial Sequence: Synthetic oligonucleotide
  Sense strand starting at position 76 of SEQ ID NO: 318241
uuguaaucaggacgcuaaa

SEQ ID NO: 547554 - RNA, 19 nt, Artificial Sequence
  Description of Artificial Sequence: Synthetic oligonucleotide
  Antisense strand to SEQ ID NO: 547553
uuuagcguccugauuacaa

SEQ ID NO: 547555 - RNA, 19 nt, Artificial Sequence
  Description of Artificial Sequence: Synthetic oligonucleotide
  Sense strand starting at position 647 of SEQ ID NO: 318241
cccguaucucagcacaauu

SEQ ID NO: 547556 - RNA, 19 nt, Artificial Sequence
  Description of Artificial Sequence: Synthetic oligonucleotide
  Antisense strand to SEQ ID NO: 547555
aauugugcugagauacggg

SEQ ID NO: 547557 - RNA, 19 nt, Artificial Sequence
  Description of Artificial Sequence: Synthetic oligonucleotide
  Sense strand starting at position 709 of SEQ ID NO: 318241
ucaggaaguaccugagugu

SEQ ID NO: 547558 - RNA, 19 nt, Artificial Sequence
  Description of Artificial Sequence: Synthetic oligonucleotide
  Antisense strand to SEQ ID NO: 547557
acacucagguacuuccuga

SEQ ID NO: 547559 - RNA, 19 nt, Artificial Sequence
  Description of Artificial Sequence: Synthetic oligonucleotide
  Sense strand starting at position 710 of SEQ ID NO: 318241
caggaaguaccugaguguu

SEQ ID NO: 547560 - RNA, 19 nt, Artificial Sequence
  Description of Artificial Sequence: Synthetic oligonucleotide
  Antisense strand to SEQ ID NO: 547559
aacacucagguacuuccug

SEQ ID NO: 547561 - RNA, 19 nt, Artificial Sequence
  Description of Artificial Sequence: Synthetic oligonucleotide
  Sense strand starting at position 794 of SEQ ID NO: 318241
ugucaaguacuuuauacuu

SEQ ID NO: 547562 - RNA, 19 nt, Artificial Sequence
  Description of Artificial Sequence: Synthetic oligonucleotide
  Antisense strand to SEQ ID NO: 547561
aaguauaaaguacuugaca

SEQ ID NO: 547563 - RNA, 19 nt, Artificial Sequence
  Description of Artificial Sequence: Synthetic oligonucleotide
  Sense strand starting at position 802 of SEQ ID NO: 318241
acuuuauacuugucuuuga

SEQ ID NO: 547564 - RNA, 19 nt, Artificial Sequence
  Description of Artificial Sequence: Synthetic oligonucleotide
  Antisense strand to SEQ ID NO: 547563
ucaaagacaaguauaaagu

SEQ ID NO: 547565 - RNA, 19 nt, Artificial Sequence
  Description of Artificial Sequence: Synthetic oligonucleotide
  Sense strand starting at position 973 of SEQ ID NO: 318241
ugaacuuuccaacguccaa

SEQ ID NO: 547566 - RNA, 19 nt, Artificial Sequence
  Description of Artificial Sequence: Synthetic oligonucleotide
  Antisense strand to SEQ ID NO: 547565
uuggacguuggaaaguuca

SEQ ID NO: 547567 - RNA, 19 nt, Artificial Sequence
  Description of Artificial Sequence: Synthetic oligonucleotide
  Sense strand starting at position 1025 of SEQ ID NO: 318241
auccgcgucugaguauuua

SEQ ID NO: 547568 - RNA, 19 nt, Artificial Sequence
  Description of Artificial Sequence: Synthetic oligonucleotide
  Antisense strand to SEQ ID NO: 547567
uaaauacucagacgcggau

SEQ ID NO: 547569 - RNA, 19 nt, Artificial Sequence
  Description of Artificial Sequence: Synthetic oligonucleotide
  Sense strand starting at position 1036 of SEQ ID NO: 318241
aguauuuacguuugucuca

SEQ ID NO: 547570 - RNA, 19 nt, Artificial Sequence
  Description of Artificial Sequence: Synthetic oligonucleotide
  Antisense strand to SEQ ID NO: 547569
ugagacaaacguaaauacu

SEQ ID NO: 547571 - RNA, 19 nt, Artificial Sequence
  Description of Artificial Sequence: Synthetic oligonucleotide
  Sense strand starting at position 1178 of SEQ ID NO: 318241
auuugcuguuaguuguauu

SEQ ID NO: 547572 - RNA, 19 nt, Artificial Sequence
  Description of Artificial Sequence: Synthetic oligonucleotide
  Antisense strand to SEQ ID NO: 547571
aauacaacuaacagcaaau

SEQ ID NO: 547573 - RNA, 19 nt, Artificial Sequence
  Description of Artificial Sequence: Synthetic oligonucleotide
  Sense strand starting at position 1453 of SEQ ID NO: 318241
uagacucgccuguggaaga

SEQ ID NO: 547574 - RNA, 19 nt, Artificial Sequence
  Description of Artificial Sequence: Synthetic oligonucleotide
  Antisense strand to SEQ ID NO: 547573
ucuuccacaggcgagucua

SEQ ID NO: 547575 - RNA, 19 nt, Artificial Sequence
  Description of Artificial Sequence: Synthetic oligonucleotide
  Sense strand starting at position 2565 of SEQ ID NO: 318241
cguguuauuucugcgaaua

SEQ ID NO: 547576 - RNA, 19 nt, Artificial Sequence
  Description of Artificial Sequence: Synthetic oligonucleotide
  Antisense strand to SEQ ID NO: 547575
uauucgcagaaauaacacg

SEQ ID NO: 547577 - RNA, 19 nt, Artificial Sequence
  Description of Artificial Sequence: Synthetic oligonucleotide
  Sense strand starting at position 2566 of SEQ ID NO: 318241
guguuauuucugcgaauaa

SEQ ID NO: 547578 - RNA, 19 nt, Artificial Sequence
  Description of Artificial Sequence: Synthetic oligonucleotide
  Antisense strand to SEQ ID NO: 547577
uuauucgcagaaauaacac

SEQ ID NO: 547579 - RNA, 19 nt, Artificial Sequence
  Description of Artificial Sequence: Synthetic oligonucleotide
  Sense strand starting at position 2610 of SEQ ID NO: 318241
gacugucggcuggauugaa

SEQ ID NO: 547580 - RNA, 19 nt, Artificial Sequence
  Description of Artificial Sequence: Synthetic oligonucleotide
  Antisense strand to SEQ ID NO: 547579
uucaauccagccgacaguc

SEQ ID NO: 547581 - RNA, 19 nt, Artificial Sequence
  Description of Artificial Sequence: Synthetic oligonucleotide
  Sense strand starting at position 2618 of SEQ ID NO: 318241
gcuggauugaauuggaauc

SEQ ID NO: 547582 - RNA, 19 nt, Artificial Sequence
  Description of Artificial Sequence: Synthetic oligonucleotide
  Antisense strand to SEQ ID NO: 547581
gauuccaauucaauccagc

SEQ ID NO: 547583 - RNA, 19 nt, Artificial Sequence
  Description of Artificial Sequence: Synthetic oligonucleotide
  Sense strand starting at position 2624 of SEQ ID NO: 318241
uugaauuggaaucguguuu

SEQ ID NO: 547584 - RNA, 19 nt, Artificial Sequence
  Description of Artificial Sequence: Synthetic oligonucleotide
  Antisense strand to SEQ ID NO: 547583
aaacacgauuccaauucaa

SEQ ID NO: 547585 - RNA, 19 nt, Artificial Sequence
  Description of Artificial Sequence: Synthetic oligonucleotide
  Sense strand starting at position 2649 of SEQ ID NO: 318241
augcguuuauuucuggaaa

SEQ ID NO: 547586 - RNA, 19 nt, Artificial Sequence
  Description of Artificial Sequence: Synthetic oligonucleotide
  Antisense strand to SEQ ID NO: 547585
uuuccagaaauaaacgcau

SEQ ID NO: 547587 - RNA, 19 nt, Artificial Sequence
  Description of Artificial Sequence: Synthetic oligonucleotide
  Sense strand starting at position 2704 of SEQ ID NO: 318241
agguuuggguucuucucua

SEQ ID NO: 547588 - RNA, 19 nt, Artificial Sequence
  Description of Artificial Sequence: Synthetic oligonucleotide
  Antisense strand to SEQ ID NO: 547587
uagagaagaacccaaaccu

SEQ ID NO: 547589 - RNA, 19 nt, Artificial Sequence
  Description of Artificial Sequence: Synthetic oligonucleotide
  Sense strand starting at position 2716 of SEQ ID NO: 318241
uucucuaacggucaggaua

SEQ ID NO: 547590 - RNA, 19 nt, Artificial Sequence
  Description of Artificial Sequence: Synthetic oligonucleotide
  Antisense strand to SEQ ID NO: 547589
uauccugaccguuagagaa

SEQ ID NO: 547591 - RNA, 19 nt, Artificial Sequence
  Description of Artificial Sequence: Synthetic oligonucleotide
  Sense strand starting at position 2952 of SEQ ID NO: 318241
acaauaugugauuauacgu

SEQ ID NO: 547592 - RNA, 19 nt, Artificial Sequence
  Description of Artificial Sequence: Synthetic oligonucleotide
  Antisense strand to SEQ ID NO: 547591
acguauaaucacauauugu

SEQ ID NO: 547593 - RNA, 19 nt, Artificial Sequence
  Description of Artificial Sequence: Synthetic oligonucleotide
  Sense strand starting at position 2958 of SEQ ID NO: 318241
ugugauuauacguacagua

SEQ ID NO: 547594 - RNA, 19 nt, Artificial Sequence
  Description of Artificial Sequence: Synthetic oligonucleotide
  Antisense strand to SEQ ID NO: 547593
uacuguacguauaaucaca

SEQ ID NO: 547595 - RNA, 19 nt, Artificial Sequence
  Description of Artificial Sequence: Synthetic oligonucleotide
  Sense strand starting at position 2960 of SEQ ID NO: 318241
ugauuauacguacaguacu

SEQ ID NO: 547596 - RNA, 19 nt, Artificial Sequence
  Description of Artificial Sequence: Synthetic oligonucleotide
  Antisense strand to SEQ ID NO: 547595
aguacuguacguauaauca

SEQ ID NO: 547597 - RNA, 19 nt, Artificial Sequence
  Description of Artificial Sequence: Synthetic oligonucleotide
  Sense strand starting at position 3010 of SEQ ID NO: 318241
agaaguaaccauuguucca

SEQ ID NO: 547598 - RNA, 19 nt, Artificial Sequence
  Description of Artificial Sequence: Synthetic oligonucleotide
  Antisense strand to SEQ ID NO: 547597
uggaacaaugguuacuucu

SEQ ID NO: 547599 - RNA, 19 nt, Artificial Sequence
  Description of Artificial Sequence: Synthetic oligonucleotide
  Sense strand starting at position 3120 of SEQ ID NO: 318241
auucguguuauaugaauug

SEQ ID NO: 547600 - RNA, 19 nt, Artificial Sequence
  Description of Artificial Sequence: Synthetic oligonucleotide
  Antisense strand to SEQ ID NO: 547599
caauucauauaacacgaau

SEQ ID NO: 547601 - RNA, 19 nt, Artificial Sequence
  Description of Artificial Sequence: Synthetic oligonucleotide
  Sense strand starting at position 3153 of SEQ ID NO: 318241
guguguaccagugcgcuaa

SEQ ID NO: 547602 - RNA, 19 nt, Artificial Sequence
  Description of Artificial Sequence: Synthetic oligonucleotide
  Antisense strand to SEQ ID NO: 547601
uuagcgcacugguacacac

SEQ ID NO: 547603 - RNA, 19 nt, Artificial Sequence
  Description of Artificial Sequence: Synthetic oligonucleotide
  Sense strand starting at position 3354 of SEQ ID NO: 318241
ggcauccuugcgaguagga

SEQ ID NO: 547604 - RNA, 19 nt, Artificial Sequence
  Description of Artificial Sequence: Synthetic oligonucleotide
  Antisense strand to SEQ ID NO: 547603
uccuacucgcaaggaugcc

SEQ ID NO: 547605 - RNA, 19 nt, Artificial Sequence
  Description of Artificial Sequence: Synthetic oligonucleotide
  Sense strand starting at position 3356 of SEQ ID NO: 318241
cauccuugcgaguaggacu

SEQ ID NO: 547606 - RNA, 19 nt, Artificial Sequence
  Description of Artificial Sequence: Synthetic oligonucleotide
  Antisense strand to SEQ ID NO: 547605
aguccuacucgcaaggaug

SEQ ID NO: 547607 - RNA, 19 nt, Artificial Sequence
  Description of Artificial Sequence: Synthetic oligonucleotide
  Sense strand starting at position 3611 of SEQ ID NO: 318241
ccuagaaugccacacagua

SEQ ID NO: 547608 - RNA, 19 nt, Artificial Sequence
  Description of Artificial Sequence: Synthetic oligonucleotide
  Antisense strand to SEQ ID NO: 547607
uacuguguggcauucuagg

SEQ ID NO: 547609 - RNA, 19 nt, Artificial Sequence
  Description of Artificial Sequence: Synthetic oligonucleotide
  Sense strand starting at position 3624 of SEQ ID NO: 318241
acaguagaugcguaguaug

SEQ ID NO: 547610 - RNA, 19 nt, Artificial Sequence
  Description of Artificial Sequence: Synthetic oligonucleotide
  Antisense strand to SEQ ID NO: 547609
cauacuacgcaucuacugu

SEQ ID NO: 547611 - RNA, 19 nt, Artificial Sequence
  Description of Artificial Sequence: Synthetic oligonucleotide
  Sense strand starting at position 3635 of SEQ ID NO: 318241
guaguaugugguuaaggaa

SEQ ID NO: 547612 - RNA, 19 nt, Artificial Sequence
  Description of Artificial Sequence: Synthetic oligonucleotide
  Antisense strand to SEQ ID NO: 547611
uuccuuaaccacauacuac

SEQ ID NO: 547613 - RNA, 19 nt, Artificial Sequence
  Description of Artificial Sequence: Synthetic oligonucleotide
  Sense strand starting at position 3777 of SEQ ID NO: 318241
gcuucuaaacauuggaaag

SEQ ID NO: 547614 - RNA, 19 nt, Artificial Sequence
  Description of Artificial Sequence: Synthetic oligonucleotide
  Antisense strand to SEQ ID NO: 547613
cuuuccaauguuuagaagc

SEQ ID NO: 547615 - RNA, 19 nt, Artificial Sequence
  Description of Artificial Sequence: Synthetic oligonucleotide
  Sense strand starting at position 3893 of SEQ ID NO: 318241
uccauacugggccgauuau

SEQ ID NO: 547616 - RNA, 19 nt, Artificial Sequence
  Description of Artificial Sequence: Synthetic oligonucleotide
  Antisense strand to SEQ ID NO: 547615
auaaucggcccaguaugga

SEQ ID NO: 547617 - RNA, 19 nt, Artificial Sequence
  Description of Artificial Sequence: Synthetic oligonucleotide
  Sense strand starting at position 3981 of SEQ ID NO: 318241
gugagaauuugguuggcuc

SEQ ID NO: 547618 - RNA, 19 nt, Artificial Sequence
  Description of Artificial Sequence: Synthetic oligonucleotide
  Antisense strand to SEQ ID NO: 547617
gagccaaccaaauucucac

SEQ ID NO: 547619 - RNA, 19 nt, Artificial Sequence
  Description of Artificial Sequence: Synthetic oligonucleotide
  Sense strand starting at position 32 of SEQ ID NO: 318242
gggcgcuggcucagggauu

SEQ ID NO: 547620 - RNA, 19 nt, Artificial Sequence
  Description of Artificial Sequence: Synthetic oligonucleotide
  Antisense strand to SEQ ID NO: 547619
aaucccugagccagcgccc

SEQ ID NO: 547621 - RNA, 19 nt, Artificial Sequence
  Description of Artificial Sequence: Synthetic oligonucleotide
  Sense strand starting at position 164 of SEQ ID NO: 318242
gugcucacaucacugacua

SEQ ID NO: 547622 - RNA, 19 nt, Artificial Sequence
  Description of Artificial Sequence: Synthetic oligonucleotide
  Antisense strand to SEQ ID NO: 547621
uagucagugaugugagcac

SEQ ID NO: 547623 - RNA, 19 nt, Artificial Sequence
  Description of Artificial Sequence: Synthetic oligonucleotide
  Sense strand starting at position 241 of SEQ ID NO: 318242
ugcaaauguaacuggcaga

SEQ ID NO: 547624 - RNA, 19 nt, Artificial Sequence
  Description of Artificial Sequence: Synthetic oligonucleotide
  Antisense strand to SEQ ID NO: 547623
ucugccaguuacauuugca

SEQ ID NO: 547625 - RNA, 19 nt, Artificial Sequence
  Description of Artificial Sequence: Synthetic oligonucleotide
  Sense strand starting at position 278 of SEQ ID NO: 318242
gggacagcucccuggauga

SEQ ID NO: 547626 - RNA, 19 nt, Artificial Sequence
  Description of Artificial Sequence: Synthetic oligonucleotide
  Antisense strand to SEQ ID NO: 547625
ucauccagggagcuguccc

SEQ ID NO: 547627 - RNA, 19 nt, Artificial Sequence
  Description of Artificial Sequence: Synthetic oligonucleotide
  Sense strand starting at position 427 of SEQ ID NO: 318242
gcauguuaauuuccaagca

SEQ ID NO: 547628 - RNA, 19 nt, Artificial Sequence
  Description of Artificial Sequence: Synthetic oligonucleotide
  Antisense strand to SEQ ID NO: 547627
ugcuuggaaauuaacaugc

SEQ ID NO: 547629 - RNA, 19 nt, Artificial Sequence
  Description of Artificial Sequence: Synthetic oligonucleotide
  Sense strand starting at position 541 of SEQ ID NO: 318242
aaggaaacugauugcguga

SEQ ID NO: 547630 - RNA, 19 nt, Artificial Sequence
  Description of Artificial Sequence: Synthetic oligonucleotide
  Antisense strand to SEQ ID NO: 547629
ucacgcaaucaguuuccuu

SEQ ID NO: 547631 - RNA, 19 nt, Artificial Sequence
  Description of Artificial Sequence: Synthetic oligonucleotide
  Sense strand starting at position 642 of SEQ ID NO: 318242
ggcugucugcaccgauaca

SEQ ID NO: 547632 - RNA, 19 nt, Artificial Sequence
  Description of Artificial Sequence: Synthetic oligonucleotide
  Antisense strand to SEQ ID NO: 547631
uguaucggugcagacagcc

SEQ ID NO: 547633 - RNA, 19 nt, Artificial Sequence
  Description of Artificial Sequence: Synthetic oligonucleotide
  Sense strand starting at position 694 of SEQ ID NO: 318242
gcuuucucacgcucagcaa

SEQ ID NO: 547634 - RNA, 19 nt, Artificial Sequence
  Description of Artificial Sequence: Synthetic oligonucleotide
  Antisense strand to SEQ ID NO: 547633
uugcugagcgugagaaagc

SEQ ID NO: 547635 - RNA, 19 nt, Artificial Sequence
  Description of Artificial Sequence: Synthetic oligonucleotide
  Sense strand starting at position 764 of SEQ ID NO: 318242
guucucugcuccuggacau

SEQ ID NO: 547636 - RNA, 19 nt, Artificial Sequence
  Description of Artificial Sequence: Synthetic oligonucleotide
  Antisense strand to SEQ ID NO: 547635
auguccaggagcagagaac

SEQ ID NO: 547637 - RNA, 19 nt, Artificial Sequence
  Description of Artificial Sequence: Synthetic oligonucleotide
  Sense strand starting at position 765 of SEQ ID NO: 318242
uucucugcuccuggacaua

SEQ ID NO: 547638 - RNA, 19 nt, Artificial Sequence
  Description of Artificial Sequence: Synthetic oligonucleotide
  Antisense strand to SEQ ID NO: 547637
uauguccaggagcagagaa

SEQ ID NO: 547639 - RNA, 19 nt, Artificial Sequence
  Description of Artificial Sequence: Synthetic oligonucleotide
  Sense strand starting at position 945 of SEQ ID NO: 318242
ggccauguuugcugauuga

SEQ ID NO: 547640 - RNA, 19 nt, Artificial Sequence
  Description of Artificial Sequence: Synthetic oligonucleotide
  Antisense strand to SEQ ID NO: 547639
ucaaucagcaaacauggcc

SEQ ID NO: 547641 - RNA, 19 nt, Artificial Sequence
  Description of Artificial Sequence: Synthetic oligonucleotide
  Sense strand starting at position 948 of SEQ ID NO: 318242
cauguuugcugauugagca

SEQ ID NO: 547642 - RNA, 19 nt, Artificial Sequence
  Description of Artificial Sequence: Synthetic oligonucleotide
  Antisense strand to SEQ ID NO: 547641
ugcucaaucagcaaacaug

SEQ ID NO: 547643 - RNA, 19 nt, Artificial Sequence
  Description of Artificial Sequence: Synthetic oligonucleotide
  Sense strand starting at position 968 of SEQ ID NO: 318242
ugaggcuaugaccagugau

SEQ ID NO: 547644 - RNA, 19 nt, Artificial Sequence
  Description of Artificial Sequence: Synthetic oligonucleotide
  Antisense strand to SEQ ID NO: 547643
aucacuggucauagccuca

SEQ ID NO: 547645 - RNA, 19 nt, Artificial Sequence
  Description of Artificial Sequence: Synthetic oligonucleotide
  Sense strand starting at position 2480 of SEQ ID NO: 318242
ggugguauccggcaggacu

SEQ ID NO: 547646 - RNA, 19 nt, Artificial Sequence
  Description of Artificial Sequence: Synthetic oligonucleotide
  Antisense strand to SEQ ID NO: 547645
aguccugccggauaccacc

SEQ ID NO: 547647 - RNA, 19 nt, Artificial Sequence
  Description of Artificial Sequence: Synthetic oligonucleotide
  Sense strand starting at position 2517 of SEQ ID NO: 318242
ggcgcuccaaauugaugaa

SEQ ID NO: 547648 - RNA, 19 nt, Artificial Sequence
  Description of Artificial Sequence: Synthetic oligonucleotide
  Antisense strand to SEQ ID NO: 547647
uucaucaauuuggagcgcc

SEQ ID NO: 547649 - RNA, 19 nt, Artificial Sequence
  Description of Artificial Sequence: Synthetic oligonucleotide
  Sense strand starting at position 2520 of SEQ ID NO: 318242
gcuccaaauugaugaagaa

SEQ ID NO: 547650 - RNA, 19 nt, Artificial Sequence
  Description of Artificial Sequence: Synthetic oligonucleotide
  Antisense strand to SEQ ID NO: 547649
uucuucaucaauuuggagc

SEQ ID NO: 547651 - RNA, 19 nt, Artificial Sequence
  Description of Artificial Sequence: Synthetic oligonucleotide
  Sense strand starting at position 2587 of SEQ ID NO: 318242
cacuuuguccuugguuuga

SEQ ID NO: 547652 - RNA, 19 nt, Artificial Sequence
  Description of Artificial Sequence: Synthetic oligonucleotide
  Antisense strand to SEQ ID NO: 547651
ucaaaccaaggacaaagug

SEQ ID NO: 547653 - RNA, 19 nt, Artificial Sequence
  Description of Artificial Sequence: Synthetic oligonucleotide
  Sense strand starting at position 2821 of SEQ ID NO: 318242
agggcucucuuccuuauuu

SEQ ID NO: 547654 - RNA, 19 nt, Artificial Sequence
  Description of Artificial Sequence: Synthetic oligonucleotide
  Antisense strand to SEQ ID NO: 547653
aaauaaggaagagagcccu

SEQ ID NO: 547655 - RNA, 19 nt, Artificial Sequence
  Description of Artificial Sequence: Synthetic oligonucleotide
  Sense strand starting at position 2822 of SEQ ID NO: 318242
gggcucucuuccuuauuua

SEQ ID NO: 547656 - RNA, 19 nt, Artificial Sequence
  Description of Artificial Sequence: Synthetic oligonucleotide
  Antisense strand to SEQ ID NO: 547655
uaaauaaggaagagagccc

SEQ ID NO: 547657 - RNA, 19 nt, Artificial Sequence
  Description of Artificial Sequence: Synthetic oligonucleotide
  Sense strand starting at position 2888 of SEQ ID NO: 318242
gcuccuguuucugggacau

SEQ ID NO: 547658 - RNA, 19 nt, Artificial Sequence
  Description of Artificial Sequence: Synthetic oligonucleotide
  Antisense strand to SEQ ID NO: 547657
augucccagaaacaggagc

SEQ ID NO: 547659 - RNA, 19 nt, Artificial Sequence
  Description of Artificial Sequence: Synthetic oligonucleotide
  Sense strand starting at position 2890 of SEQ ID NO: 318242
uccuguuucugggacauuu

SEQ ID NO: 547660 - RNA, 19 nt, Artificial Sequence
  Description of Artificial Sequence: Synthetic oligonucleotide
  Antisense strand to SEQ ID NO: 547659
aaaugucccagaaacagga

SEQ ID NO: 547661 - RNA, 19 nt, Artificial Sequence
  Description of Artificial Sequence: Synthetic oligonucleotide
  Sense strand starting at position 3329 of SEQ ID NO: 318242
ggcagaugccgccaucaca

SEQ ID NO: 547662 - RNA, 19 nt, Artificial Sequence
  Description of Artificial Sequence: Synthetic oligonucleotide
  Antisense strand to SEQ ID NO: 547661
ugugauggcggcaucugcc

SEQ ID NO: 547663 - RNA, 19 nt, Artificial Sequence
  Description of Artificial Sequence: Synthetic oligonucleotide
  Sense strand starting at position 3496 of SEQ ID NO: 318242
ggaguagucuugccugcga

SEQ ID NO: 547664 - RNA, 19 nt, Artificial Sequence
  Description of Artificial Sequence: Synthetic oligonucleotide
  Antisense strand to SEQ ID NO: 547663
ucgcaggcaagacuacucc

SEQ ID NO: 547665 - RNA, 19 nt, Artificial Sequence
  Description of Artificial Sequence: Synthetic oligonucleotide
  Sense strand starting at position 3783 of SEQ ID NO: 318242
gguccuagugaguguguga

SEQ ID NO: 547666 - RNA, 19 nt, Artificial Sequence
  Description of Artificial Sequence: Synthetic oligonucleotide
  Antisense strand to SEQ ID NO: 547665
ucacacacucacuaggacc

SEQ ID NO: 547667 - RNA, 19 nt, Artificial Sequence
  Description of Artificial Sequence: Synthetic oligonucleotide
  Sense strand starting at position 3790 of SEQ ID NO: 318242
gugagugugugaggaugau

SEQ ID NO: 547668 - RNA, 19 nt, Artificial Sequence
  Description of Artificial Sequence: Synthetic oligonucleotide
  Antisense strand to SEQ ID NO: 547667
aucauccucacacacucac

SEQ ID NO: 547669 - RNA, 19 nt, Artificial Sequence
  Description of Artificial Sequence: Synthetic oligonucleotide
  Sense strand starting at position 3796 of SEQ ID NO: 318242
gugugaggaugauaguguu

SEQ ID NO: 547670 - RNA, 19 nt, Artificial Sequence
  Description of Artificial Sequence: Synthetic oligonucleotide
  Antisense strand to SEQ ID NO: 547669
aacacuaucauccucacac

SEQ ID NO: 547671 - RNA, 19 nt, Artificial Sequence
  Description of Artificial Sequence: Synthetic oligonucleotide
  Sense strand starting at position 3799 of SEQ ID NO: 318242
ugaggaugauaguguuaca

SEQ ID NO: 547672 - RNA, 19 nt, Artificial Sequence
  Description of Artificial Sequence: Synthetic oligonucleotide
  Antisense strand to SEQ ID NO: 547671
uguaacacuaucauccuca

SEQ ID NO: 547673 - RNA, 19 nt, Artificial Sequence
  Description of Artificial Sequence: Synthetic oligonucleotide
  Sense strand starting at position 3802 of SEQ ID NO: 318242
ggaugauaguguuacaugu

SEQ ID NO: 547674 - RNA, 19 nt, Artificial Sequence
  Description of Artificial Sequence: Synthetic oligonucleotide
  Antisense strand to SEQ ID NO: 547673
acauguaacacuaucaucc

SEQ ID NO: 547675 - RNA, 19 nt, Artificial Sequence
  Description of Artificial Sequence: Synthetic oligonucleotide
  Sense strand starting at position 3804 of SEQ ID NO: 318242
augauaguguuacauguua

SEQ ID NO: 547676 - RNA, 19 nt, Artificial Sequence
  Description of Artificial Sequence: Synthetic oligonucleotide
  Antisense strand to SEQ ID NO: 547675
uaacauguaacacuaucau

SEQ ID NO: 547677 - RNA, 19 nt, Artificial Sequence
  Description of Artificial Sequence: Synthetic oligonucleotide
  Sense strand starting at position 3809 of SEQ ID NO: 318242
aguguuacauguuaugcaa

SEQ ID NO: 547678 - RNA, 19 nt, Artificial Sequence
  Description of Artificial Sequence: Synthetic oligonucleotide
  Antisense strand to SEQ ID NO: 547677
uugcauaacauguaacacu

SEQ ID NO: 547679 - RNA, 19 nt, Artificial Sequence
  Description of Artificial Sequence: Synthetic oligonucleotide
  Sense strand starting at position 3812 of SEQ ID NO: 318242
guuacauguuaugcaaagu

SEQ ID NO: 547680 - RNA, 19 nt, Artificial Sequence
  Description of Artificial Sequence: Synthetic oligonucleotide
  Antisense strand to SEQ ID NO: 547679
acuuugcauaacauguaac

SEQ ID NO: 547681 - RNA, 19 nt, Artificial Sequence
  Description of Artificial Sequence: Synthetic oligonucleotide
  Sense strand starting at position 3829 of SEQ ID NO: 318242
guagcacagccugaggauu

SEQ ID NO: 547682 - RNA, 19 nt, Artificial Sequence
  Description of Artificial Sequence: Synthetic oligonucleotide
  Antisense strand to SEQ ID NO: 547681
aauccucaggcugugcuac

SEQ ID NO: 547683 - RNA, 19 nt, Artificial Sequence
  Description of Artificial Sequence: Synthetic oligonucleotide
  Sense strand starting at position 3947 of SEQ ID NO: 318242
ggagccuugccucacacau

SEQ ID NO: 547684 - RNA, 19 nt, Artificial Sequence
  Description of Artificial Sequence: Synthetic oligonucleotide
  Antisense strand to SEQ ID NO: 547683
augugugaggcaaggcucc

SEQ ID NO: 547685 - RNA, 19 nt, Artificial Sequence
  Description of Artificial Sequence: Synthetic oligonucleotide
  Sense strand starting at position 269 of SEQ ID NO: 318243
gggcuaguuugguuugaga

SEQ ID NO: 547686 - RNA, 19 nt, Artificial Sequence
  Description of Artificial Sequence: Synthetic oligonucleotide
  Antisense strand to SEQ ID NO: 547685
ucucaaaccaaacuagccc

SEQ ID NO: 547687 - RNA, 19 nt, Artificial Sequence
  Description of Artificial Sequence: Synthetic oligonucleotide
  Sense strand starting at position 271 of SEQ ID NO: 318243
gcuaguuugguuugagaag

SEQ ID NO: 547688 - RNA, 19 nt, Artificial Sequence
  Description of Artificial Sequence: Synthetic oligonucleotide
  Antisense strand to SEQ ID NO: 547687
cuucucaaaccaaacuagc

SEQ ID NO: 547689 - RNA, 19 nt, Artificial Sequence
  Description of Artificial Sequence: Synthetic oligonucleotide
  Sense strand starting at position 369 of SEQ ID NO: 318243
ggaguguugguuuggugau

SEQ ID NO: 547690 - RNA, 19 nt, Artificial Sequence
  Description of Artificial Sequence: Synthetic oligonucleotide
  Antisense strand to SEQ ID NO: 547689
aucaccaaaccaacacucc

SEQ ID NO: 547691 - RNA, 19 nt, Artificial Sequence
  Description of Artificial Sequence: Synthetic oligonucleotide
  Sense strand starting at position 373 of SEQ ID NO: 318243
uguugguuuggugaucgga

SEQ ID NO: 547692 - RNA, 19 nt, Artificial Sequence
  Description of Artificial Sequence: Synthetic oligonucleotide
  Antisense strand to SEQ ID NO: 547691
uccgaucaccaaaccaaca

SEQ ID NO: 547693 - RNA, 19 nt, Artificial Sequence
  Description of Artificial Sequence: Synthetic oligonucleotide
  Sense strand starting at position 481 of SEQ ID NO: 318243
cgaauugguagcgaucagu

SEQ ID NO: 547694 - RNA, 19 nt, Artificial Sequence
  Description of Artificial Sequence: Synthetic oligonucleotide
  Antisense strand to SEQ ID NO: 547693
acugaucgcuaccaauucg

SEQ ID NO: 547695 - RNA, 19 nt, Artificial Sequence
  Description of Artificial Sequence: Synthetic oligonucleotide
  Sense strand starting at position 533 of SEQ ID NO: 318243
ggccucugcuccucaacaa

SEQ ID NO: 547696 - RNA, 19 nt, Artificial Sequence
  Description of Artificial Sequence: Synthetic oligonucleotide
  Antisense strand to SEQ ID NO: 547695
uuguugaggagcagaggcc

SEQ ID NO: 547697 - RNA, 19 nt, Artificial Sequence
  Description of Artificial Sequence: Synthetic oligonucleotide
  Sense strand starting at position 909 of SEQ ID NO: 318243
acuuuccuggcgcaaagaa

SEQ ID NO: 547698 - RNA, 19 nt, Artificial Sequence
  Description of Artificial Sequence: Synthetic oligonucleotide
  Antisense strand to SEQ ID NO: 547697
uucuuugcgccaggaaagu

SEQ ID NO: 547699 - RNA, 19 nt, Artificial Sequence
  Description of Artificial Sequence: Synthetic oligonucleotide
  Sense strand starting at position 1006 of SEQ ID NO: 318243
cugucuggugagcaacauu

SEQ ID NO: 547700 - RNA, 19 nt, Artificial Sequence
  Description of Artificial Sequence: Synthetic oligonucleotide
  Antisense strand to SEQ ID NO: 547699
aauguugcucaccagacag

SEQ ID NO: 547701 - RNA, 19 nt, Artificial Sequence
  Description of Artificial Sequence: Synthetic oligonucleotide
  Sense strand starting at position 1030 of SEQ ID NO: 318243
uucuguuuagcgguucuca

SEQ ID NO: 547702 - RNA, 19 nt, Artificial Sequence
  Description of Artificial Sequence: Synthetic oligonucleotide
  Antisense strand to SEQ ID NO: 547701
ugagaaccgcuaaacagaa

SEQ ID NO: 547703 - RNA, 19 nt, Artificial Sequence
  Description of Artificial Sequence: Synthetic oligonucleotide
  Sense strand starting at position 1031 of SEQ ID NO: 318243
ucuguuuagcgguucucau

SEQ ID NO: 547704 - RNA, 19 nt, Artificial Sequence
  Description of Artificial Sequence: Synthetic oligonucleotide
  Antisense strand to SEQ ID NO: 547703
augagaaccgcuaaacaga

SEQ ID NO: 547705 - RNA, 19 nt, Artificial Sequence
  Description of Artificial Sequence: Synthetic oligonucleotide
  Sense strand starting at position 1038 of SEQ ID NO: 318243
agcgguucucaucagaucu

SEQ ID NO: 547706 - RNA, 19 nt, Artificial Sequence
  Description of Artificial Sequence: Synthetic oligonucleotide
  Antisense strand to SEQ ID NO: 547705
agaucugaugagaaccgcu

SEQ ID NO: 547707 - RNA, 19 nt, Artificial Sequence
  Description of Artificial Sequence: Synthetic oligonucleotide
  Sense strand starting at position 1068 of SEQ ID NO: 318243
cguaaauccaaaggagauu

SEQ ID NO: 547708 - RNA, 19 nt, Artificial Sequence
  Description of Artificial Sequence: Synthetic oligonucleotide
  Antisense strand to SEQ ID NO: 547707
aaucuccuuuggauuuacg

SEQ ID NO: 547709 - RNA, 19 nt, Artificial Sequence
  Description of Artificial Sequence: Synthetic oligonucleotide
  Sense strand starting at position 1093 of SEQ ID NO: 318243
cagagauuaucugcuuguc

SEQ ID NO: 547710 - RNA, 19 nt, Artificial Sequence
  Description of Artificial Sequence: Synthetic oligonucleotide
  Antisense strand to SEQ ID NO: 547709
gacaagcagauaaucucug

SEQ ID NO: 547711 - RNA, 19 nt, Artificial Sequence
  Description of Artificial Sequence: Synthetic oligonucleotide
  Sense strand starting at position 1095 of SEQ ID NO: 318243
gagauuaucugcuugucuc

SEQ ID NO: 547712 - RNA, 19 nt, Artificial Sequence
  Description of Artificial Sequence: Synthetic oligonucleotide
  Antisense strand to SEQ ID NO: 547711
gagacaagcagauaaucuc

SEQ ID NO: 547713 - RNA, 19 nt, Artificial Sequence
  Description of Artificial Sequence: Synthetic oligonucleotide
  Sense strand starting at position 1096 of SEQ ID NO: 318243
agauuaucugcuugucucu

SEQ ID NO: 547714 - RNA, 19 nt, Artificial Sequence
  Description of Artificial Sequence: Synthetic oligonucleotide
  Antisense strand to SEQ ID NO: 547713
agagacaagcagauaaucu

SEQ ID NO: 547715 - RNA, 19 nt, Artificial Sequence
  Description of Artificial Sequence: Synthetic oligonucleotide
  Sense strand starting at position 1113 of SEQ ID NO: 318243
cucuguucugucuaccaua

SEQ ID NO: 547716 - RNA, 19 nt, Artificial Sequence
  Description of Artificial Sequence: Synthetic oligonucleotide
  Antisense strand to SEQ ID NO: 547715
uaugguagacagaacagag

SEQ ID NO: 547717 - RNA, 19 nt, Artificial Sequence
  Description of Artificial Sequence: Synthetic oligonucleotide
  Sense strand starting at position 1243 of SEQ ID NO: 318243
cggcauuuccucugaaccu

SEQ ID NO: 547718 - RNA, 19 nt, Artificial Sequence
  Description of Artificial Sequence: Synthetic oligonucleotide
  Antisense strand to SEQ ID NO: 547717
agguucagaggaaaugccg

SEQ ID NO: 547719 - RNA, 19 nt, Artificial Sequence
  Description of Artificial Sequence: Synthetic oligonucleotide
  Sense strand starting at position 1717 of SEQ ID NO: 318243
uuaggaugucuuugacuga

SEQ ID NO: 547720 - RNA, 19 nt, Artificial Sequence
  Description of Artificial Sequence: Synthetic oligonucleotide
  Antisense strand to SEQ ID NO: 547719
ucagucaaagacauccuaa

SEQ ID NO: 547721 - RNA, 19 nt, Artificial Sequence
  Description of Artificial Sequence: Synthetic oligonucleotide
  Sense strand starting at position 1720 of SEQ ID NO: 318243
ggaugucuuugacugagaa

SEQ ID NO: 547722 - RNA, 19 nt, Artificial Sequence
  Description of Artificial Sequence: Synthetic oligonucleotide
  Antisense strand to SEQ ID NO: 547721
uucucagucaaagacaucc

SEQ ID NO: 547723 - RNA, 19 nt, Artificial Sequence
  Description of Artificial Sequence: Synthetic oligonucleotide
  Sense strand starting at position 1721 of SEQ ID NO: 318243
gaugucuuugacugagaag

SEQ ID NO: 547724 - RNA, 19 nt, Artificial Sequence
  Description of Artificial Sequence: Synthetic oligonucleotide
  Antisense strand to SEQ ID NO: 547723
cuucucagucaaagacauc

SEQ ID NO: 547725 - RNA, 19 nt, Artificial Sequence
  Description of Artificial Sequence: Synthetic oligonucleotide
  Sense strand starting at position 2005 of SEQ ID NO: 318243
agcaguuucgugucaccua

SEQ ID NO: 547726 - RNA, 19 nt, Artificial Sequence
  Description of Artificial Sequence: Synthetic oligonucleotide
  Antisense strand to SEQ ID NO: 547725
uaggugacacgaaacugcu

SEQ ID NO: 547727 - RNA, 19 nt, Artificial Sequence
  Description of Artificial Sequence: Synthetic oligonucleotide
  Sense strand starting at position 2145 of SEQ ID NO: 318243
cugcguuugcucccuaaug

SEQ ID NO: 547728 - RNA, 19 nt, Artificial Sequence
  Description of Artificial Sequence: Synthetic oligonucleotide
  Antisense strand to SEQ ID NO: 547727
cauuagggagcaaacgcag

SEQ ID NO: 547729 - RNA, 19 nt, Artificial Sequence
  Description of Artificial Sequence: Synthetic oligonucleotide
  Sense strand starting at position 2155 of SEQ ID NO: 318243
ucccuaaugugagccugaa

SEQ ID NO: 547730 - RNA, 19 nt, Artificial Sequence
  Description of Artificial Sequence: Synthetic oligonucleotide
  Antisense strand to SEQ ID NO: 547729
uucaggcucacauuaggga

SEQ ID NO: 547731 - RNA, 19 nt, Artificial Sequence
  Description of Artificial Sequence: Synthetic oligonucleotide
  Sense strand starting at position 2220 of SEQ ID NO: 318243
uggguguggguuugaagaa

SEQ ID NO: 547732 - RNA, 19 nt, Artificial Sequence
  Description of Artificial Sequence: Synthetic oligonucleotide
  Antisense strand to SEQ ID NO: 547731
uucuucaaacccacaccca

SEQ ID NO: 547733 - RNA, 19 nt, Artificial Sequence
  Description of Artificial Sequence: Synthetic oligonucleotide
  Sense strand starting at position 2486 of SEQ ID NO: 318243
gggcgagucaacgaaagua

SEQ ID NO: 547734 - RNA, 19 nt, Artificial Sequence
  Description of Artificial Sequence: Synthetic oligonucleotide
  Antisense strand to SEQ ID NO: 547733
uacuuucguugacucgccc

SEQ ID NO: 547735 - RNA, 19 nt, Artificial Sequence
  Description of Artificial Sequence: Synthetic oligonucleotide
  Sense strand starting at position 2554 of SEQ ID NO: 318243
aguaguguuaugcacagca

SEQ ID NO: 547736 - RNA, 19 nt, Artificial Sequence
  Description of Artificial Sequence: Synthetic oligonucleotide
  Antisense strand to SEQ ID NO: 547735
ugcugugcauaacacuacu

SEQ ID NO: 547737 - RNA, 19 nt, Artificial Sequence
  Description of Artificial Sequence: Synthetic oligonucleotide
  Sense strand starting at position 2556 of SEQ ID NO: 318243
uaguguuaugcacagcaca

SEQ ID NO: 547738 - RNA, 19 nt, Artificial Sequence
  Description of Artificial Sequence: Synthetic oligonucleotide
  Antisense strand to SEQ ID NO: 547737
ugugcugugcauaacacua

SEQ ID NO: 547739 - RNA, 19 nt, Artificial Sequence
  Description of Artificial Sequence: Synthetic oligonucleotide
  Sense strand starting at position 2666 of SEQ ID NO: 318243
cucagcuucccaggagaca

SEQ ID NO: 547740 - RNA, 19 nt, Artificial Sequence
  Description of Artificial Sequence: Synthetic oligonucleotide
  Antisense strand to SEQ ID NO: 547739
ugucuccugggaagcugag

SEQ ID NO: 547741 - RNA, 19 nt, Artificial Sequence
  Description of Artificial Sequence: Synthetic oligonucleotide
  Sense strand starting at position 3022 of SEQ ID NO: 318243
acaaaucugccagaguuuc

SEQ ID NO: 547742 - RNA, 19 nt, Artificial Sequence
  Description of Artificial Sequence: Synthetic oligonucleotide
  Antisense strand to SEQ ID NO: 547741
gaaacucuggcagauuugu

SEQ ID NO: 547743 - RNA, 19 nt, Artificial Sequence
  Description of Artificial Sequence: Synthetic oligonucleotide
  Sense strand starting at position 3327 of SEQ ID NO: 318243
cguggacuugcugagaaug

SEQ ID NO: 547744 - RNA, 19 nt, Artificial Sequence
  Description of Artificial Sequence: Synthetic oligonucleotide
  Antisense strand to SEQ ID NO: 547743
cauucucagcaaguccacg

SEQ ID NO: 547745 - RNA, 19 nt, Artificial Sequence
  Description of Artificial Sequence: Synthetic oligonucleotide
  Sense strand starting at position 3390 of SEQ ID NO: 318243
aggcgcuuggaguagaaua

SEQ ID NO: 547746 - RNA, 19 nt, Artificial Sequence
  Description of Artificial Sequence: Synthetic oligonucleotide
  Antisense strand to SEQ ID NO: 547745
uauucuacuccaagcgccu

SEQ ID NO: 547747 - RNA, 19 nt, Artificial Sequence
  Description of Artificial Sequence: Synthetic oligonucleotide
  Sense strand starting at position 3392 of SEQ ID NO: 318243
gcgcuuggaguagaauaaa

SEQ ID NO: 547748 - RNA, 19 nt, Artificial Sequence
  Description of Artificial Sequence: Synthetic oligonucleotide
  Antisense strand to SEQ ID NO: 547747
uuuauucuacuccaagcgc

SEQ ID NO: 547749 - RNA, 19 nt, Artificial Sequence
  Description of Artificial Sequence: Synthetic oligonucleotide
  Sense strand starting at position 3471 of SEQ ID NO: 318243
gaggaaacgcuccauguau

SEQ ID NO: 547750 - RNA, 19 nt, Artificial Sequence
  Description of Artificial Sequence: Synthetic oligonucleotide
  Antisense strand to SEQ ID NO: 547749
auacauggagcguuuccuc

SEQ ID NO: 547751 - RNA, 19 nt, Artificial Sequence
  Description of Artificial Sequence: Synthetic oligonucleotide
  Sense strand starting at position 3498 of SEQ ID NO: 318243
aauagugucuguccagaac

SEQ ID NO: 547752 - RNA, 19 nt, Artificial Sequence
  Description of Artificial Sequence: Synthetic oligonucleotide
  Antisense strand to SEQ ID NO: 547751
guucuggacagacacuauu

SEQ ID NO: 547753 - RNA, 19 nt, Artificial Sequence
  Description of Artificial Sequence: Synthetic oligonucleotide
  Sense strand starting at position 3501 of SEQ ID NO: 318243
agugucuguccagaacgua

SEQ ID NO: 547754 - RNA, 19 nt, Artificial Sequence
  Description of Artificial Sequence: Synthetic oligonucleotide
  Antisense strand to SEQ ID NO: 547753
uacguucuggacagacacu

SEQ ID NO: 547755 - RNA, 19 nt, Artificial Sequence
  Description of Artificial Sequence: Synthetic oligonucleotide
  Sense strand starting at position 3517 of SEQ ID NO: 318243
guacaucuugggugcucaa

SEQ ID NO: 547756 - RNA, 19 nt, Artificial Sequence
  Description of Artificial Sequence: Synthetic oligonucleotide
  Antisense strand to SEQ ID NO: 547755
uugagcacccaagauguac

SEQ ID NO: 547757 - RNA, 19 nt, Artificial Sequence
  Description of Artificial Sequence: Synthetic oligonucleotide
  Sense strand starting at position 3770 of SEQ ID NO: 318243
guuucugagccagggacua

SEQ ID NO: 547758 - RNA, 19 nt, Artificial Sequence
  Description of Artificial Sequence: Synthetic oligonucleotide
  Antisense strand to SEQ ID NO: 547757
uagucccuggcucagaaac

SEQ ID NO: 547759 - RNA, 19 nt, Artificial Sequence
  Description of Artificial Sequence: Synthetic oligonucleotide
  Sense strand starting at position 3807 of SEQ ID NO: 318243
uagucuagucuguggagga

SEQ ID NO: 547760 - RNA, 19 nt, Artificial Sequence
  Description of Artificial Sequence: Synthetic oligonucleotide
  Antisense strand to SEQ ID NO: 547759
uccuccacagacuagacua

SEQ ID NO: 547761 - RNA, 19 nt, Artificial Sequence
  Description of Artificial Sequence: Synthetic oligonucleotide
  Sense strand starting at position 3896 of SEQ ID NO: 318243
caaauucuccuuggacgga

SEQ ID NO: 547762 - RNA, 19 nt, Artificial Sequence
  Description of Artificial Sequence: Synthetic oligonucleotide
  Antisense strand to SEQ ID NO: 547761
uccguccaaggagaauuug

SEQ ID NO: 547763 - RNA, 19 nt, Artificial Sequence
  Description of Artificial Sequence: Synthetic oligonucleotide
  Sense strand starting at position 3969 of SEQ ID NO: 318243
ccguuauggcuguaaauua

SEQ ID NO: 547764 - RNA, 19 nt, Artificial Sequence
  Description of Artificial Sequence: Synthetic oligonucleotide
  Antisense strand to SEQ ID NO: 547763
uaauuuacagccauaacgg

SEQ ID NO: 547765 - RNA, 19 nt, Artificial Sequence
  Description of Artificial Sequence: Synthetic oligonucleotide
  Sense strand starting at position 294 of SEQ ID NO: 318244
cucuuagguccacgguaau

SEQ ID NO: 547766 - RNA, 19 nt, Artificial Sequence
  Description of Artificial Sequence: Synthetic oligonucleotide
  Antisense strand to SEQ ID NO: 547765
auuaccguggaccuaagag

SEQ ID NO: 547767 - RNA, 19 nt, Artificial Sequence
  Description of Artificial Sequence: Synthetic oligonucleotide
  Sense strand starting at position 794 of SEQ ID NO: 318244
gcugaaauauggucaccaa

SEQ ID NO: 547768 - RNA, 19 nt, Artificial Sequence
  Description of Artificial Sequence: Synthetic oligonucleotide
  Antisense strand to SEQ ID NO: 547767
uuggugaccauauuucagc

SEQ ID NO: 547769 - RNA, 19 nt, Artificial Sequence
  Description of Artificial Sequence: Synthetic oligonucleotide
  Sense strand starting at position 935 of SEQ ID NO: 318244
agcuuaaaugcugacaugu

SEQ ID NO: 547770 - RNA, 19 nt, Artificial Sequence
  Description of Artificial Sequence: Synthetic oligonucleotide
  Antisense strand to SEQ ID NO: 547769
acaugucagcauuuaagcu

SEQ ID NO: 547771 - RNA, 19 nt, Artificial Sequence
  Description of Artificial Sequence: Synthetic oligonucleotide
  Sense strand starting at position 1024 of SEQ ID NO: 318244
uuuacaguucugggcagau

SEQ ID NO: 547772 - RNA, 19 nt, Artificial Sequence
  Description of Artificial Sequence: Synthetic oligonucleotide
  Antisense strand to SEQ ID NO: 547771
aucugcccagaacuguaaa

SEQ ID NO: 547773 - RNA, 19 nt, Artificial Sequence
  Description of Artificial Sequence: Synthetic oligonucleotide
  Sense strand starting at position 1337 of SEQ ID NO: 318244
agguuucaucucgggugga

SEQ ID NO: 547774 - RNA, 19 nt, Artificial Sequence
  Description of Artificial Sequence: Synthetic oligonucleotide
  Antisense strand to SEQ ID NO: 547773
uccacccgagaugaaaccu

SEQ ID NO: 547775 - RNA, 19 nt, Artificial Sequence
  Description of Artificial Sequence: Synthetic oligonucleotide
  Sense strand starting at position 1355 of SEQ ID NO: 318244
auguuaaacgauuggaaug

SEQ ID NO: 547776 - RNA, 19 nt, Artificial Sequence
  Description of Artificial Sequence: Synthetic oligonucleotide
  Antisense strand to SEQ ID NO: 547775
cauuccaaucguuuaacau

SEQ ID NO: 547777 - RNA, 19 nt, Artificial Sequence
  Description of Artificial Sequence: Synthetic oligonucleotide
  Sense strand starting at position 1360 of SEQ ID NO: 318244
aaacgauuggaaugcuaau

SEQ ID NO: 547778 - RNA, 19 nt, Artificial Sequence
  Description of Artificial Sequence: Synthetic oligonucleotide
  Antisense strand to SEQ ID NO: 547777
auuagcauuccaaucguuu

SEQ ID NO: 547779 - RNA, 19 nt, Artificial Sequence
  Description of Artificial Sequence: Synthetic oligonucleotide
  Sense strand starting at position 1432 of SEQ ID NO: 318244
uaaugacaggucuguaguu

SEQ ID NO: 547780 - RNA, 19 nt, Artificial Sequence
  Description of Artificial Sequence: Synthetic oligonucleotide
  Antisense strand to SEQ ID NO: 547779
aacuacagaccugucauua

SEQ ID NO: 547781 - RNA, 19 nt, Artificial Sequence
  Description of Artificial Sequence: Synthetic oligonucleotide
  Sense strand starting at position 1457 of SEQ ID NO: 318244
ugggauugaacgugaaaug

SEQ ID NO: 547782 - RNA, 19 nt, Artificial Sequence
  Description of Artificial Sequence: Synthetic oligonucleotide
  Antisense strand to SEQ ID NO: 547781
cauuucacguucaauccca

SEQ ID NO: 547783 - RNA, 19 nt, Artificial Sequence
  Description of Artificial Sequence: Synthetic oligonucleotide
  Sense strand starting at position 2502 of SEQ ID NO: 318244
gggccuuauuuagugcuua

SEQ ID NO: 547784 - RNA, 19 nt, Artificial Sequence
  Description of Artificial Sequence: Synthetic oligonucleotide
  Antisense strand to SEQ ID NO: 547783
uaagcacuaaauaaggccc

SEQ ID NO: 547785 - RNA, 19 nt, Artificial Sequence
  Description of Artificial Sequence: Synthetic oligonucleotide
  Sense strand starting at position 2596 of SEQ ID NO: 318244
acacccuggcuuugaauua

SEQ ID NO: 547786 - RNA, 19 nt, Artificial Sequence
  Description of Artificial Sequence: Synthetic oligonucleotide
  Antisense strand to SEQ ID NO: 547785
uaauucaaagccagggugu

SEQ ID NO: 547787 - RNA, 19 nt, Artificial Sequence
  Description of Artificial Sequence: Synthetic oligonucleotide
  Sense strand starting at position 2699 of SEQ ID NO: 318244
gauaguauuccaugugaau

SEQ ID NO: 547788 - RNA, 19 nt, Artificial Sequence
  Description of Artificial Sequence: Synthetic oligonucleotide
  Antisense strand to SEQ ID NO: 547787
auucacauggaauacuauc

SEQ ID NO: 547789 - RNA, 19 nt, Artificial Sequence
  Description of Artificial Sequence: Synthetic oligonucleotide
  Sense strand starting at position 2705 of SEQ ID NO: 318244
auuccaugugaaugaacau

SEQ ID NO: 547790 - RNA, 19 nt, Artificial Sequence
  Description of Artificial Sequence: Synthetic oligonucleotide
  Antisense strand to SEQ ID NO: 547789
auguucauucacauggaau

SEQ ID NO: 547791 - RNA, 19 nt, Artificial Sequence
  Description of Artificial Sequence: Synthetic oligonucleotide
  Sense strand starting at position 2803 of SEQ ID NO: 318244
ggcagcgauuuccugacau

SEQ ID NO: 547792 - RNA, 19 nt, Artificial Sequence
  Description of Artificial Sequence: Synthetic oligonucleotide
  Antisense strand to SEQ ID NO: 547791
augucaggaaaucgcugcc

SEQ ID NO: 547793 - RNA, 19 nt, Artificial Sequence
  Description of Artificial Sequence: Synthetic oligonucleotide
  Sense strand starting at position 2813 of SEQ ID NO: 318244
uccugacaugucugcugau

SEQ ID NO: 547794 - RNA, 19 nt, Artificial Sequence
  Description of Artificial Sequence: Synthetic oligonucleotide
  Antisense strand to SEQ ID NO: 547793
aucagcagacaugucagga

SEQ ID NO: 547795 - RNA, 19 nt, Artificial Sequence
  Description of Artificial Sequence: Synthetic oligonucleotide
  Sense strand starting at position 2814 of SEQ ID NO: 318244
ccugacaugucugcugauu

SEQ ID NO: 547796 - RNA, 19 nt, Artificial Sequence
  Description of Artificial Sequence: Synthetic oligonucleotide
  Antisense strand to SEQ ID NO: 547795
aaucagcagacaugucagg

SEQ ID NO: 547797 - RNA, 19 nt, Artificial Sequence
  Description of Artificial Sequence: Synthetic oligonucleotide
  Sense strand starting at position 2875 of SEQ ID NO: 318244
gaauaaccuuucgcgaaug

SEQ ID NO: 547798 - RNA, 19 nt, Artificial Sequence
  Description of Artificial Sequence: Synthetic oligonucleotide
  Antisense strand to SEQ ID NO: 547797
cauucgcgaaagguuauuc

SEQ ID NO: 547799 - RNA, 19 nt, Artificial Sequence
  Description of Artificial Sequence: Synthetic oligonucleotide
  Sense strand starting at position 2886 of SEQ ID NO: 318244
cgcgaauguguuuccucau

SEQ ID NO: 547800 - RNA, 19 nt, Artificial Sequence
  Description of Artificial Sequence: Synthetic oligonucleotide
  Antisense strand to SEQ ID NO: 547799
augaggaaacacauucgcg

SEQ ID NO: 547801 - RNA, 19 nt, Artificial Sequence
  Description of Artificial Sequence: Synthetic oligonucleotide
  Sense strand starting at position 2892 of SEQ ID NO: 318244
uguguuuccucaucaaaua

SEQ ID NO: 547802 - RNA, 19 nt, Artificial Sequence
  Description of Artificial Sequence: Synthetic oligonucleotide
  Antisense strand to SEQ ID NO: 547801
uauuugaugaggaaacaca

SEQ ID NO: 547803 - RNA, 19 nt, Artificial Sequence
  Description of Artificial Sequence: Synthetic oligonucleotide
  Sense strand starting at position 2893 of SEQ ID NO: 318244
guguuuccucaucaaauaa

SEQ ID NO: 547804 - RNA, 19 nt, Artificial Sequence
  Description of Artificial Sequence: Synthetic oligonucleotide
  Antisense strand to SEQ ID NO: 547803
uuauuugaugaggaaacac

SEQ ID NO: 547805 - RNA, 19 nt, Artificial Sequence
  Description of Artificial Sequence: Synthetic oligonucleotide
  Sense strand starting at position 2928 of SEQ ID NO: 318244
guggguagaguguacauua

SEQ ID NO: 547806 - RNA, 19 nt, Artificial Sequence
  Description of Artificial Sequence: Synthetic oligonucleotide
  Antisense strand to SEQ ID NO: 547805
uaauguacacucuacccac

SEQ ID NO: 547807 - RNA, 19 nt, Artificial Sequence
  Description of Artificial Sequence: Synthetic oligonucleotide
  Sense strand starting at position 2975 of SEQ ID NO: 318244
agaggaagaugcuugguau

SEQ ID NO: 547808 - RNA, 19 nt, Artificial Sequence
  Description of Artificial Sequence: Synthetic oligonucleotide
  Antisense strand to SEQ ID NO: 547807
auaccaagcaucuuccucu

SEQ ID NO: 547809 - RNA, 19 nt, Artificial Sequence
  Description of Artificial Sequence: Synthetic oligonucleotide
  Sense strand starting at position 2976 of SEQ ID NO: 318244
gaggaagaugcuugguaua

SEQ ID NO: 547810 - RNA, 19 nt, Artificial Sequence
  Description of Artificial Sequence: Synthetic oligonucleotide
  Antisense strand to SEQ ID NO: 547809
uauaccaagcaucuuccuc

SEQ ID NO: 547811 - RNA, 19 nt, Artificial Sequence
  Description of Artificial Sequence: Synthetic oligonucleotide
  Sense strand starting at position 2978 of SEQ ID NO: 318244
ggaagaugcuugguauaca

SEQ ID NO: 547812 - RNA, 19 nt, Artificial Sequence
  Description of Artificial Sequence: Synthetic oligonucleotide
  Antisense strand to SEQ ID NO: 547811
uguauaccaagcaucuucc

SEQ ID NO: 547813 - RNA, 19 nt, Artificial Sequence
  Description of Artificial Sequence: Synthetic oligonucleotide
  Sense strand starting at position 2981 of SEQ ID NO: 318244
agaugcuugguauacauca

SEQ ID NO: 547814 - RNA, 19 nt, Artificial Sequence
  Description of Artificial Sequence: Synthetic oligonucleotide
  Antisense strand to SEQ ID NO: 547813
ugauguauaccaagcaucu

SEQ ID NO: 547815 - RNA, 19 nt, Artificial Sequence
  Description of Artificial Sequence: Synthetic oligonucleotide
  Sense strand starting at position 3067 of SEQ ID NO: 318244
ugagauaugcagugacagu

SEQ ID NO: 547816 - RNA, 19 nt, Artificial Sequence
  Description of Artificial Sequence: Synthetic oligonucleotide
  Antisense strand to SEQ ID NO: 547815
acugucacugcauaucuca

SEQ ID NO: 547817 - RNA, 19 nt, Artificial Sequence
  Description of Artificial Sequence: Synthetic oligonucleotide
  Sense strand starting at position 3068 of SEQ ID NO: 318244
gagauaugcagugacaguc

SEQ ID NO: 547818 - RNA, 19 nt, Artificial Sequence
  Description of Artificial Sequence: Synthetic oligonucleotide
  Antisense strand to SEQ ID NO: 547817
gacugucacugcauaucuc

SEQ ID NO: 547819 - RNA, 19 nt, Artificial Sequence
  Description of Artificial Sequence: Synthetic oligonucleotide
  Sense strand starting at position 3078 of SEQ ID NO: 318244
gugacagucuaagcuuaug

SEQ ID NO: 547820 - RNA, 19 nt, Artificial Sequence
  Description of Artificial Sequence: Synthetic oligonucleotide
  Antisense strand to SEQ ID NO: 547819
cauaagcuuagacugucac

SEQ ID NO: 547821 - RNA, 19 nt, Artificial Sequence
  Description of Artificial Sequence: Synthetic oligonucleotide
  Sense strand starting at position 3146 of SEQ ID NO: 318244
cguauaccacuggguauua

SEQ ID NO: 547822 - RNA, 19 nt, Artificial Sequence
  Description of Artificial Sequence: Synthetic oligonucleotide
  Antisense strand to SEQ ID NO: 547821
uaauacccagugguauacg

SEQ ID NO: 547823 - RNA, 19 nt, Artificial Sequence
  Description of Artificial Sequence: Synthetic oligonucleotide
  Sense strand starting at position 3147 of SEQ ID NO: 318244
guauaccacuggguauuaa

SEQ ID NO: 547824 - RNA, 19 nt, Artificial Sequence
  Description of Artificial Sequence: Synthetic oligonucleotide
  Antisense strand to SEQ ID NO: 547823
uuaauacccagugguauac

SEQ ID NO: 547825 - RNA, 19 nt, Artificial Sequence
  Description of Artificial Sequence: Synthetic oligonucleotide
  Sense strand starting at position 3307 of SEQ ID NO: 318244
ugacuuuccugacugauuc

SEQ ID NO: 547826 - RNA, 19 nt, Artificial Sequence
  Description of Artificial Sequence: Synthetic oligonucleotide
  Antisense strand to SEQ ID NO: 547825
gaaucagucaggaaaguca

SEQ ID NO: 547827 - RNA, 19 nt, Artificial Sequence
  Description of Artificial Sequence: Synthetic oligonucleotide
  Sense strand starting at position 3425 of SEQ ID NO: 318244
ucguuucuuacgggaacaa

SEQ ID NO: 547828 - RNA, 19 nt, Artificial Sequence
  Description of Artificial Sequence: Synthetic oligonucleotide
  Antisense strand to SEQ ID NO: 547827
uuguucccguaagaaacga

SEQ ID NO: 547829 - RNA, 19 nt, Artificial Sequence
  Description of Artificial Sequence: Synthetic oligonucleotide
  Sense strand starting at position 3426 of SEQ ID NO: 318244
cguuucuuacgggaacaaa

SEQ ID NO: 547830 - RNA, 19 nt, Artificial Sequence
  Description of Artificial Sequence: Synthetic oligonucleotide
  Antisense strand to SEQ ID NO: 547829
uuuguucccguaagaaacg

SEQ ID NO: 547831 - RNA, 19 nt, Artificial Sequence
  Description of Artificial Sequence: Synthetic oligonucleotide
  Sense strand starting at position 3454 of SEQ ID NO: 318244
acacuuacaccucggauga

SEQ ID NO: 547832 - RNA, 19 nt, Artificial Sequence
  Description of Artificial Sequence: Synthetic oligonucleotide
  Antisense strand to SEQ ID NO: 547831
ucauccgagguguaagugu

SEQ ID NO: 547833 - RNA, 19 nt, Artificial Sequence
  Description of Artificial Sequence: Synthetic oligonucleotide
  Sense strand starting at position 3554 of SEQ ID NO: 318244
gcccaacuugaugaucuau

SEQ ID NO: 547834 - RNA, 19 nt, Artificial Sequence
  Description of Artificial Sequence: Synthetic oligonucleotide
  Antisense strand to SEQ ID NO: 547833
auagaucaucaaguugggc

SEQ ID NO: 547835 - RNA, 19 nt, Artificial Sequence
  Description of Artificial Sequence: Synthetic oligonucleotide
  Sense strand starting at position 3606 of SEQ ID NO: 318244
agaggagaggccugacuau

SEQ ID NO: 547836 - RNA, 19 nt, Artificial Sequence
  Description of Artificial Sequence: Synthetic oligonucleotide
  Antisense strand to SEQ ID NO: 547835
auagucaggccucuccucu

SEQ ID NO: 547837 - RNA, 19 nt, Artificial Sequence
  Description of Artificial Sequence: Synthetic oligonucleotide
  Sense strand starting at position 3612 of SEQ ID NO: 318244
gaggccugacuauaagguu

SEQ ID NO: 547838 - RNA, 19 nt, Artificial Sequence
  Description of Artificial Sequence: Synthetic oligonucleotide
  Antisense strand to SEQ ID NO: 547837
aaccuuauagucaggccuc

SEQ ID NO: 547839 - RNA, 19 nt, Artificial Sequence
  Description of Artificial Sequence: Synthetic oligonucleotide
  Sense strand starting at position 3618 of SEQ ID NO: 318244
ugacuauaagguuaucgua

SEQ ID NO: 547840 - RNA, 19 nt, Artificial Sequence
  Description of Artificial Sequence: Synthetic oligonucleotide
  Antisense strand to SEQ ID NO: 547839
uacgauaaccuuauaguca

SEQ ID NO: 547841 - RNA, 19 nt, Artificial Sequence
  Description of Artificial Sequence: Synthetic oligonucleotide
  Sense strand starting at position 3620 of SEQ ID NO: 318244
acuauaagguuaucguauu

SEQ ID NO: 547842 - RNA, 19 nt, Artificial Sequence
  Description of Artificial Sequence: Synthetic oligonucleotide
  Antisense strand to SEQ ID NO: 547841
aauacgauaaccuuauagu

SEQ ID NO: 547843 - RNA, 19 nt, Artificial Sequence
  Description of Artificial Sequence: Synthetic oligonucleotide
  Sense strand starting at position 3626 of SEQ ID NO: 318244
agguuaucguauuuccauu

SEQ ID NO: 547844 - RNA, 19 nt, Artificial Sequence
  Description of Artificial Sequence: Synthetic oligonucleotide
  Antisense strand to SEQ ID NO: 547843
aauggaaauacgauaaccu

SEQ ID NO: 547845 - RNA, 19 nt, Artificial Sequence
  Description of Artificial Sequence: Synthetic oligonucleotide
  Sense strand starting at position 208 of SEQ ID NO: 318245
gcaauaugacacuguauaa

SEQ ID NO: 547846 - RNA, 19 nt, Artificial Sequence
  Description of Artificial Sequence: Synthetic oligonucleotide
  Antisense strand to SEQ ID NO: 547845
uuauacagugucauauugc

SEQ ID NO: 547847 - RNA, 19 nt, Artificial Sequence
  Description of Artificial Sequence: Synthetic oligonucleotide
  Sense strand starting at position 660 of SEQ ID NO: 318245
cuagaaugacaauguuuac

SEQ ID NO: 547848 - RNA, 19 nt, Artificial Sequence
  Description of Artificial Sequence: Synthetic oligonucleotide
  Antisense strand to SEQ ID NO: 547847
guaaacauugucauucuag

SEQ ID NO: 547849 - RNA, 19 nt, Artificial Sequence
  Description of Artificial Sequence: Synthetic oligonucleotide
  Sense strand starting at position 666 of SEQ ID NO: 318245
ugacaauguuuacuaauug

SEQ ID NO: 547850 - RNA, 19 nt, Artificial Sequence
  Description of Artificial Sequence: Synthetic oligonucleotide
  Antisense strand to SEQ ID NO: 547849
caauuaguaaacauuguca

SEQ ID NO: 547851 - RNA, 19 nt, Artificial Sequence
  Description of Artificial Sequence: Synthetic oligonucleotide
  Sense strand starting at position 796 of SEQ ID NO: 318245
agggaaauauuacacagaa

SEQ ID NO: 547852 - RNA, 19 nt, Artificial Sequence
  Description of Artificial Sequence: Synthetic oligonucleotide
  Antisense strand to SEQ ID NO: 547851
uucuguguaauauuucccu

SEQ ID NO: 547853 - RNA, 19 nt, Artificial Sequence
  Description of Artificial Sequence: Synthetic oligonucleotide
  Sense strand starting at position 1197 of SEQ ID NO: 318245
cccagaaguuaccugaaca

SEQ ID NO: 547854 - RNA, 19 nt, Artificial Sequence
  Description of Artificial Sequence: Synthetic oligonucleotide
  Antisense strand to SEQ ID NO: 547853
uguucagguaacuucuggg

SEQ ID NO: 547855 - RNA, 19 nt, Artificial Sequence
  Description of Artificial Sequence: Synthetic oligonucleotide
  Sense strand starting at position 1275 of SEQ ID NO: 318245
ugguuugauaauggccaga

SEQ ID NO: 547856 - RNA, 19 nt, Artificial Sequence
  Description of Artificial Sequence: Synthetic oligonucleotide
  Antisense strand to SEQ ID NO: 547855
ucuggccauuaucaaacca

SEQ ID NO: 547857 - RNA, 19 nt, Artificial Sequence
  Description of Artificial Sequence: Synthetic oligonucleotide
  Sense strand starting at position 1277 of SEQ ID NO: 318245
guuugauaauggccagagu

SEQ ID NO: 547858 - RNA, 19 nt, Artificial Sequence
  Description of Artificial Sequence: Synthetic oligonucleotide
  Antisense strand to SEQ ID NO: 547857
acucuggccauuaucaaac

SEQ ID NO: 547859 - RNA, 19 nt, Artificial Sequence
  Description of Artificial Sequence: Synthetic oligonucleotide
  Sense strand starting at position 1278 of SEQ ID NO: 318245
uuugauaauggccagaguu

SEQ ID NO: 547860 - RNA, 19 nt, Artificial Sequence
  Description of Artificial Sequence: Synthetic oligonucleotide
  Antisense strand to SEQ ID NO: 547859
aacucuggccauuaucaaa

SEQ ID NO: 547861 - RNA, 19 nt, Artificial Sequence
  Description of Artificial Sequence: Synthetic oligonucleotide
  Sense strand starting at position 1315 of SEQ ID NO: 318245
gguggaggcauugauaucu

SEQ ID NO: 547862 - RNA, 19 nt, Artificial Sequence
  Description of Artificial Sequence: Synthetic oligonucleotide
  Antisense strand to SEQ ID NO: 547861
agauaucaaugccuccacc

SEQ ID NO: 547863 - RNA, 19 nt, Artificial Sequence
  Description of Artificial Sequence: Synthetic oligonucleotide
  Sense strand starting at position 1320 of SEQ ID NO: 318245
aggcauugauaucuccauu

SEQ ID NO: 547864 - RNA, 19 nt, Artificial Sequence
  Description of Artificial Sequence: Synthetic oligonucleotide
  Antisense strand to SEQ ID NO: 547863
aauggagauaucaaugccu

SEQ ID NO: 547865 - RNA, 19 nt, Artificial Sequence
  Description of Artificial Sequence: Synthetic oligonucleotide
  Sense strand starting at position 1326 of SEQ ID NO: 318245
ugauaucuccauuauggcu

SEQ ID NO: 547866 - RNA, 19 nt, Artificial Sequence
  Description of Artificial Sequence: Synthetic oligonucleotide
  Antisense strand to SEQ ID NO: 547865
agccauaauggagauauca

SEQ ID NO: 547867 - RNA, 19 nt, Artificial Sequence
  Description of Artificial Sequence: Synthetic oligonucleotide
  Sense strand starting at position 1814 of SEQ ID NO: 318245
agggaccucucugugcaua

SEQ ID NO: 547868 - RNA, 19 nt, Artificial Sequence
  Description of Artificial Sequence: Synthetic oligonucleotide
  Antisense strand to SEQ ID NO: 547867
uaugcacagagaggucccu

SEQ ID NO: 547869 - RNA, 19 nt, Artificial Sequence
  Description of Artificial Sequence: Synthetic oligonucleotide
  Sense strand starting at position 2092 of SEQ ID NO: 318245
aucuuagagcacuagaugu

SEQ ID NO: 547870 - RNA, 19 nt, Artificial Sequence
  Description of Artificial Sequence: Synthetic oligonucleotide
  Antisense strand to SEQ ID NO: 547869
acaucuagugcucuaagau

SEQ ID NO: 547871 - RNA, 19 nt, Artificial Sequence
  Description of Artificial Sequence: Synthetic oligonucleotide
  Sense strand starting at position 2094 of SEQ ID NO: 318245
cuuagagcacuagauguuu

SEQ ID NO: 547872 - RNA, 19 nt, Artificial Sequence
  Description of Artificial Sequence: Synthetic oligonucleotide
  Antisense strand to SEQ ID NO: 547871
aaacaucuagugcucuaag

SEQ ID NO: 547873 - RNA, 19 nt, Artificial Sequence
  Description of Artificial Sequence: Synthetic oligonucleotide
  Sense strand starting at position 2148 of SEQ ID NO: 318245
cuucuucccguuugaagga

SEQ ID NO: 547874 - RNA, 19 nt, Artificial Sequence
  Description of Artificial Sequence: Synthetic oligonucleotide
  Antisense strand to SEQ ID NO: 547873
uccuucaaacgggaagaag

SEQ ID NO: 547875 - RNA, 19 nt, Artificial Sequence
  Description of Artificial Sequence: Synthetic oligonucleotide
  Sense strand starting at position 2377 of SEQ ID NO: 318245
auggaauugucuuuaaauc

SEQ ID NO: 547876 - RNA, 19 nt, Artificial Sequence
  Description of Artificial Sequence: Synthetic oligonucleotide
  Antisense strand to SEQ ID NO: 547875
gauuuaaagacaauuccau

SEQ ID NO: 547877 - RNA, 19 nt, Artificial Sequence
  Description of Artificial Sequence: Synthetic oligonucleotide
  Sense strand starting at position 2465 of SEQ ID NO: 318245
uuuauauuauguccacaug

SEQ ID NO: 547878 - RNA, 19 nt, Artificial Sequence
  Description of Artificial Sequence: Synthetic oligonucleotide
  Antisense strand to SEQ ID NO: 547877
cauguggacauaauauaaa

SEQ ID NO: 547879 - RNA, 19 nt, Artificial Sequence
  Description of Artificial Sequence: Synthetic oligonucleotide
  Sense strand starting at position 2468 of SEQ ID NO: 318245
auauuauguccacaugcau

SEQ ID NO: 547880 - RNA, 19 nt, Artificial Sequence
  Description of Artificial Sequence: Synthetic oligonucleotide
  Antisense strand to SEQ ID NO: 547879
augcauguggacauaauau

SEQ ID NO: 547881 - RNA, 19 nt, Artificial Sequence
  Description of Artificial Sequence: Synthetic oligonucleotide
  Sense strand starting at position 2497 of SEQ ID NO: 318245
uugguugugaguuaaggua

SEQ ID NO: 547882 - RNA, 19 nt, Artificial Sequence
  Description of Artificial Sequence: Synthetic oligonucleotide
  Antisense strand to SEQ ID NO: 547881
uaccuuaacucacaaccaa

SEQ ID NO: 547883 - RNA, 19 nt, Artificial Sequence
  Description of Artificial Sequence: Synthetic oligonucleotide
  Sense strand starting at position 2513 of SEQ ID NO: 318245
guauuauucuuguuggaaa

SEQ ID NO: 547884 - RNA, 19 nt, Artificial Sequence
  Description of Artificial Sequence: Synthetic oligonucleotide
  Antisense strand to SEQ ID NO: 547883
uuuccaacaagaauaauac

SEQ ID NO: 547885 - RNA, 19 nt, Artificial Sequence
  Description of Artificial Sequence: Synthetic oligonucleotide
  Sense strand starting at position 2562 of SEQ ID NO: 318245
ggauccucucuaggucaga

SEQ ID NO: 547886 - RNA, 19 nt, Artificial Sequence
  Description of Artificial Sequence: Synthetic oligonucleotide
  Antisense strand to SEQ ID NO: 547885
ucugaccuagagaggaucc

SEQ ID NO: 547887 - RNA, 19 nt, Artificial Sequence
  Description of Artificial Sequence: Synthetic oligonucleotide
  Sense strand starting at position 2575 of SEQ ID NO: 318245
gucagaguuccgggagaga

SEQ ID NO: 547888 - RNA, 19 nt, Artificial Sequence
  Description of Artificial Sequence: Synthetic oligonucleotide
  Antisense strand to SEQ ID NO: 547887
ucucucccggaacucugac

SEQ ID NO: 547889 - RNA, 19 nt, Artificial Sequence
  Description of Artificial Sequence: Synthetic oligonucleotide
  Sense strand starting at position 2646 of SEQ ID NO: 318245
uccaucauccacuggguua

SEQ ID NO: 547890 - RNA, 19 nt, Artificial Sequence
  Description of Artificial Sequence: Synthetic oligonucleotide
  Antisense strand to SEQ ID NO: 547889
uaacccaguggaugaugga

SEQ ID NO: 547891 - RNA, 19 nt, Artificial Sequence
  Description of Artificial Sequence: Synthetic oligonucleotide
  Sense strand starting at position 2830 of SEQ ID NO: 318245
guaugaugcuacccagaaa

SEQ ID NO: 547892 - RNA, 19 nt, Artificial Sequence
  Description of Artificial Sequence: Synthetic oligonucleotide
  Antisense strand to SEQ ID NO: 547891
uuucuggguagcaucauac

SEQ ID NO: 547893 - RNA, 19 nt, Artificial Sequence
  Description of Artificial Sequence: Synthetic oligonucleotide
  Sense strand starting at position 3002 of SEQ ID NO: 318245
gggaauucccauuacuugu

SEQ ID NO: 547894 - RNA, 19 nt, Artificial Sequence
  Description of Artificial Sequence: Synthetic oligonucleotide
  Antisense strand to SEQ ID NO: 547893
acaaguaaugggaauuccc

SEQ ID NO: 547895 - RNA, 19 nt, Artificial Sequence
  Description of Artificial Sequence: Synthetic oligonucleotide
  Sense strand starting at position 3023 of SEQ ID NO: 318245
auccucagcucucuugaga

SEQ ID NO: 547896 - RNA, 19 nt, Artificial Sequence
  Description of Artificial Sequence: Synthetic oligonucleotide
  Antisense strand to SEQ ID NO: 547895
ucucaagagagcugaggau

SEQ ID NO: 547897 - RNA, 19 nt, Artificial Sequence
  Description of Artificial Sequence: Synthetic oligonucleotide
  Sense strand starting at position 3077 of SEQ ID NO: 318245
acuaucagagcuggacuua

SEQ ID NO: 547898 - RNA, 19 nt, Artificial Sequence
  Description of Artificial Sequence: Synthetic oligonucleotide
  Antisense strand to SEQ ID NO: 547897
uaaguccagcucugauagu

SEQ ID NO: 547899 - RNA, 19 nt, Artificial Sequence
  Description of Artificial Sequence: Synthetic oligonucleotide
  Sense strand starting at position 3144 of SEQ ID NO: 318245
gggccuuaaucaccuuuaa

SEQ ID NO: 547900 - RNA, 19 nt, Artificial Sequence
  Description of Artificial Sequence: Synthetic oligonucleotide
  Antisense strand to SEQ ID NO: 547899
uuaaaggugauuaaggccc

SEQ ID NO: 547901 - RNA, 19 nt, Artificial Sequence
  Description of Artificial Sequence: Synthetic oligonucleotide
  Sense strand starting at position 3213 of SEQ ID NO: 318245
gcguucugaaaucaagauu

SEQ ID NO: 547902 - RNA, 19 nt, Artificial Sequence
  Description of Artificial Sequence: Synthetic oligonucleotide
  Antisense strand to SEQ ID NO: 547901
aaucuugauuucagaacgc

SEQ ID NO: 547903 - RNA, 19 nt, Artificial Sequence
  Description of Artificial Sequence: Synthetic oligonucleotide
  Sense strand starting at position 3242 of SEQ ID NO: 318245
cagguaucugcauacagua

SEQ ID NO: 547904 - RNA, 19 nt, Artificial Sequence
  Description of Artificial Sequence: Synthetic oligonucleotide
  Antisense strand to SEQ ID NO: 547903
uacuguaugcagauaccug

SEQ ID NO: 547905 - RNA, 19 nt, Artificial Sequence
  Description of Artificial Sequence: Synthetic oligonucleotide
  Sense strand starting at position 3298 of SEQ ID NO: 318245
agccauaugguauacauga

SEQ ID NO: 547906 - RNA, 19 nt, Artificial Sequence
  Description of Artificial Sequence: Synthetic oligonucleotide
  Antisense strand to SEQ ID NO: 547905
ucauguauaccauauggcu

SEQ ID NO: 547907 - RNA, 19 nt, Artificial Sequence
  Description of Artificial Sequence: Synthetic oligonucleotide
  Sense strand starting at position 3308 of SEQ ID NO: 318245
uauacaugaugaucagagu

SEQ ID NO: 547908 - RNA, 19 nt, Artificial Sequence
  Description of Artificial Sequence: Synthetic oligonucleotide
  Antisense strand to SEQ ID NO: 547907
acucugaucaucauguaua

SEQ ID NO: 547909 - RNA, 19 nt, Artificial Sequence
  Description of Artificial Sequence: Synthetic oligonucleotide
  Sense strand starting at position 3317 of SEQ ID NO: 318245
ugaucagagucauuguaca

SEQ ID NO: 547910 - RNA, 19 nt, Artificial Sequence
  Description of Artificial Sequence: Synthetic oligonucleotide
  Antisense strand to SEQ ID NO: 547909
uguacaaugacucugauca

SEQ ID NO: 547911 - RNA, 19 nt, Artificial Sequence
  Description of Artificial Sequence: Synthetic oligonucleotide
  Sense strand starting at position 3322 of SEQ ID NO: 318245
agagucauuguacauuaca

SEQ ID NO: 547912 - RNA, 19 nt, Artificial Sequence
  Description of Artificial Sequence: Synthetic oligonucleotide
  Antisense strand to SEQ ID NO: 547911
uguaauguacaaugacucu

SEQ ID NO: 547913 - RNA, 19 nt, Artificial Sequence
  Description of Artificial Sequence: Synthetic oligonucleotide
  Sense strand starting at position 3498 of SEQ ID NO: 318245
ccuaacacguucucuugaa

SEQ ID NO: 547914 - RNA, 19 nt, Artificial Sequence
  Description of Artificial Sequence: Synthetic oligonucleotide
  Antisense strand to SEQ ID NO: 547913
uucaagagaacguguuagg

SEQ ID NO: 547915 - RNA, 19 nt, Artificial Sequence
  Description of Artificial Sequence: Synthetic oligonucleotide
  Sense strand starting at position 3502 of SEQ ID NO: 318245
acacguucucuugaagaac

SEQ ID NO: 547916 - RNA, 19 nt, Artificial Sequence
  Description of Artificial Sequence: Synthetic oligonucleotide
  Antisense strand to SEQ ID NO: 547915
guucuucaagagaacgugu

SEQ ID NO: 547917 - RNA, 19 nt, Artificial Sequence
  Description of Artificial Sequence: Synthetic oligonucleotide
  Sense strand starting at position 3505 of SEQ ID NO: 318245
cguucucuugaagaacuaa

SEQ ID NO: 547918 - RNA, 19 nt, Artificial Sequence
  Description of Artificial Sequence: Synthetic oligonucleotide
  Antisense strand to SEQ ID NO: 547917
uuaguucuucaagagaacg

SEQ ID NO: 547919 - RNA, 19 nt, Artificial Sequence
  Description of Artificial Sequence: Synthetic oligonucleotide
  Sense strand starting at position 3588 of SEQ ID NO: 318245
aguuaauauuugccuguuu

SEQ ID NO: 547920 - RNA, 19 nt, Artificial Sequence
  Description of Artificial Sequence: Synthetic oligonucleotide
  Antisense strand to SEQ ID NO: 547919
aaacaggcaaauauuaacu

SEQ ID NO: 547921 - RNA, 19 nt, Artificial Sequence
  Description of Artificial Sequence: Synthetic oligonucleotide
  Sense strand starting at position 3589 of SEQ ID NO: 318245
guuaauauuugccuguuua

SEQ ID NO: 547922 - RNA, 19 nt, Artificial Sequence
  Description of Artificial Sequence: Synthetic oligonucleotide
  Antisense strand to SEQ ID NO: 547921
uaaacaggcaaauauuaac

SEQ ID NO: 547923 - RNA, 19 nt, Artificial Sequence
  Description of Artificial Sequence: Synthetic oligonucleotide
  Sense strand starting at position 3660 of SEQ ID NO: 318245
accuguaagguagguauca

SEQ ID NO: 547924 - RNA, 19 nt, Artificial Sequence
  Description of Artificial Sequence: Synthetic oligonucleotide
  Antisense strand to SEQ ID NO: 547923
ugauaccuaccuuacaggu

SEQ ID NO: 547925 - RNA, 19 nt, Artificial Sequence
  Description of Artificial Sequence: Synthetic oligonucleotide
  Sense strand starting at position 32 of SEQ ID NO: 318246
cucguaacuguuuacuaca

SEQ ID NO: 547926 - RNA, 19 nt, Artificial Sequence
  Description of Artificial Sequence: Synthetic oligonucleotide
  Antisense strand to SEQ ID NO: 547925
uguaguaaacaguuacgag

SEQ ID NO: 547927 - RNA, 19 nt, Artificial Sequence
  Description of Artificial Sequence: Synthetic oligonucleotide
  Sense strand starting at position 65 of SEQ ID NO: 318246
ucccuuaaguggguguaaa

SEQ ID NO: 547928 - RNA, 19 nt, Artificial Sequence
  Description of Artificial Sequence: Synthetic oligonucleotide
  Antisense strand to SEQ ID NO: 547927
uuuacacccacuuaaggga

SEQ ID NO: 547929 - RNA, 19 nt, Artificial Sequence
  Description of Artificial Sequence: Synthetic oligonucleotide
  Sense strand starting at position 86 of SEQ ID NO: 318246
ugucauugugaagaacuuu

SEQ ID NO: 547930 - RNA, 19 nt, Artificial Sequence
  Description of Artificial Sequence: Synthetic oligonucleotide
  Antisense strand to SEQ ID NO: 547929
aaaguucuucacaaugaca

SEQ ID NO: 547931 - RNA, 19 nt, Artificial Sequence
  Description of Artificial Sequence: Synthetic oligonucleotide
  Sense strand starting at position 398 of SEQ ID NO: 318246
ucagucaugucauuaauau

SEQ ID NO: 547932 - RNA, 19 nt, Artificial Sequence
  Description of Artificial Sequence: Synthetic oligonucleotide
  Antisense strand to SEQ ID NO: 547931
auauuaaugacaugacuga

SEQ ID NO: 547933 - RNA, 19 nt, Artificial Sequence
  Description of Artificial Sequence: Synthetic oligonucleotide
  Sense strand starting at position 797 of SEQ ID NO: 318246
gggugagguaugcauauug

SEQ ID NO: 547934 - RNA, 19 nt, Artificial Sequence
  Description of Artificial Sequence: Synthetic oligonucleotide
  Antisense strand to SEQ ID NO: 547933
caauaugcauaccucaccc

SEQ ID NO: 547935 - RNA, 19 nt, Artificial Sequence
  Description of Artificial Sequence: Synthetic oligonucleotide
  Sense strand starting at position 832 of SEQ ID NO: 318246
ucugcaugauucuuaggaa

SEQ ID NO: 547936 - RNA, 19 nt, Artificial Sequence
  Description of Artificial Sequence: Synthetic oligonucleotide
  Antisense strand to SEQ ID NO: 547935
uuccuaagaaucaugcaga

SEQ ID NO: 547937 - RNA, 19 nt, Artificial Sequence
  Description of Artificial Sequence: Synthetic oligonucleotide
  Sense strand starting at position 911 of SEQ ID NO: 318246
augauaaauaguugugguu

SEQ ID NO: 547938 - RNA, 19 nt, Artificial Sequence
  Description of Artificial Sequence: Synthetic oligonucleotide
  Antisense strand to SEQ ID NO: 547937
aaccacaacuauuuaucau

SEQ ID NO: 547939 - RNA, 19 nt, Artificial Sequence
  Description of Artificial Sequence: Synthetic oligonucleotide
  Sense strand starting at position 917 of SEQ ID NO: 318246
aauaguugugguuaccauu

SEQ ID NO: 547940 - RNA, 19 nt, Artificial Sequence
  Description of Artificial Sequence: Synthetic oligonucleotide
  Antisense strand to SEQ ID NO: 547939
aaugguaaccacaacuauu

SEQ ID NO: 547941 - RNA, 19 nt, Artificial Sequence
  Description of Artificial Sequence: Synthetic oligonucleotide
  Sense strand starting at position 1592 of SEQ ID NO: 318246
guuggugggcgucuucaua

SEQ ID NO: 547942 - RNA, 19 nt, Artificial Sequence
  Description of Artificial Sequence: Synthetic oligonucleotide
  Antisense strand to SEQ ID NO: 547941
uaugaagacgcccaccaac

SEQ ID NO: 547943 - RNA, 19 nt, Artificial Sequence
  Description of Artificial Sequence: Synthetic oligonucleotide
  Sense strand starting at position 1760 of SEQ ID NO: 318246
guguuucuggaauggaucu

SEQ ID NO: 547944 - RNA, 19 nt, Artificial Sequence
  Description of Artificial Sequence: Synthetic oligonucleotide
  Antisense strand to SEQ ID NO: 547943
agauccauuccagaaacac

SEQ ID NO: 547945 - RNA, 19 nt, Artificial Sequence
  Description of Artificial Sequence: Synthetic oligonucleotide
  Sense strand starting at position 1767 of SEQ ID NO: 318246
uggaauggaucuucuaguu

SEQ ID NO: 547946 - RNA, 19 nt, Artificial Sequence
  Description of Artificial Sequence: Synthetic oligonucleotide
  Antisense strand to SEQ ID NO: 547945
aacuagaagauccauucca

SEQ ID NO: 547947 - RNA, 19 nt, Artificial Sequence
  Description of Artificial Sequence: Synthetic oligonucleotide
  Sense strand starting at position 2145 of SEQ ID NO: 318246
agagaccucucccugaaug

SEQ ID NO: 547948 - RNA, 19 nt, Artificial Sequence
  Description of Artificial Sequence: Synthetic oligonucleotide
  Antisense strand to SEQ ID NO: 547947
cauucagggagaggucucu

SEQ ID NO: 547949 - RNA, 19 nt, Artificial Sequence
  Description of Artificial Sequence: Synthetic oligonucleotide
  Sense strand starting at position 2251 of SEQ ID NO: 318246
gugggaaucuggguagaca

SEQ ID NO: 547950 - RNA, 19 nt, Artificial Sequence
  Description of Artificial Sequence: Synthetic oligonucleotide
  Antisense strand to SEQ ID NO: 547949
ugucuacccagauucccac

SEQ ID NO: 547951 - RNA, 19 nt, Artificial Sequence
  Description of Artificial Sequence: Synthetic oligonucleotide
  Sense strand starting at position 2330 of SEQ ID NO: 318246
gccguacagcaugaugaaa

SEQ ID NO: 547952 - RNA, 19 nt, Artificial Sequence
  Description of Artificial Sequence: Synthetic oligonucleotide
  Antisense strand to SEQ ID NO: 547951
uuucaucaugcuguacggc

SEQ ID NO: 547953 - RNA, 19 nt, Artificial Sequence
  Description of Artificial Sequence: Synthetic oligonucleotide
  Sense strand starting at position 2417 of SEQ ID NO: 318246
gugauaacaugauuaaugu

SEQ ID NO: 547954 - RNA, 19 nt, Artificial Sequence
  Description of Artificial Sequence: Synthetic oligonucleotide
  Antisense strand to SEQ ID NO: 547953
acauuaaucauguuaucac

SEQ ID NO: 547955 - RNA, 19 nt, Artificial Sequence
  Description of Artificial Sequence: Synthetic oligonucleotide
  Sense strand starting at position 2452 of SEQ ID NO: 318246
cugcaucaacgauagaauc

SEQ ID NO: 547956 - RNA, 19 nt, Artificial Sequence
  Description of Artificial Sequence: Synthetic oligonucleotide
  Antisense strand to SEQ ID NO: 547955
gauucuaucguugaugcag

SEQ ID NO: 547957 - RNA, 19 nt, Artificial Sequence
  Description of Artificial Sequence: Synthetic oligonucleotide
  Sense strand starting at position 2586 of SEQ ID NO: 318246
cauagaaauuuaggaaagu

SEQ ID NO: 547958 - RNA, 19 nt, Artificial Sequence
  Description of Artificial Sequence: Synthetic oligonucleotide
  Antisense strand to SEQ ID NO: 547957
acuuuccuaaauuucuaug

SEQ ID NO: 547959 - RNA, 19 nt, Artificial Sequence
  Description of Artificial Sequence: Synthetic oligonucleotide
  Sense strand starting at position 2660 of SEQ ID NO: 318246
gauugcguuccacaauaac

SEQ ID NO: 547960 - RNA, 19 nt, Artificial Sequence
  Description of Artificial Sequence: Synthetic oligonucleotide
  Antisense strand to SEQ ID NO: 547959
guuauuguggaacgcaauc

SEQ ID NO: 547961 - RNA, 19 nt, Artificial Sequence
  Description of Artificial Sequence: Synthetic oligonucleotide
  Sense strand starting at position 2901 of SEQ ID NO: 318246
uuagcugaggucugaauga

SEQ ID NO: 547962 - RNA, 19 nt, Artificial Sequence
  Description of Artificial Sequence: Synthetic oligonucleotide
  Antisense strand to SEQ ID NO: 547961
ucauucagaccucagcuaa

SEQ ID NO: 547963 - RNA, 19 nt, Artificial Sequence
  Description of Artificial Sequence: Synthetic oligonucleotide
  Sense strand starting at position 2938 of SEQ ID NO: 318246
agcuaagggaaguguauua

SEQ ID NO: 547964 - RNA, 19 nt, Artificial Sequence
  Description of Artificial Sequence: Synthetic oligonucleotide
  Antisense strand to SEQ ID NO: 547963
uaauacacuucccuuagcu

SEQ ID NO: 547965 - RNA, 19 nt, Artificial Sequence
  Description of Artificial Sequence: Synthetic oligonucleotide
  Sense strand starting at position 2945 of SEQ ID NO: 318246
ggaaguguauuacucagca

SEQ ID NO: 547966 - RNA, 19 nt, Artificial Sequence
  Description of Artificial Sequence: Synthetic oligonucleotide
  Antisense strand to SEQ ID NO: 547965
ugcugaguaauacacuucc

SEQ ID NO: 547967 - RNA, 19 nt, Artificial Sequence
  Description of Artificial Sequence: Synthetic oligonucleotide
  Sense strand starting at position 3048 of SEQ ID NO: 318246
uuuaauaaguggucagcaa

SEQ ID NO: 547968 - RNA, 19 nt, Artificial Sequence
  Description of Artificial Sequence: Synthetic oligonucleotide
  Antisense strand to SEQ ID NO: 547967
uugcugaccacuuauuaaa

SEQ ID NO: 547969 - RNA, 19 nt, Artificial Sequence
  Description of Artificial Sequence: Synthetic oligonucleotide
  Sense strand starting at position 3049 of SEQ ID NO: 318246
uuaauaaguggucagcaaa

SEQ ID NO: 547970 - RNA, 19 nt, Artificial Sequence
  Description of Artificial Sequence: Synthetic oligonucleotide
  Antisense strand to SEQ ID NO: 547969
uuugcugaccacuuauuaa

SEQ ID NO: 547971 - RNA, 19 nt, Artificial Sequence
  Description of Artificial Sequence: Synthetic oligonucleotide
  Sense strand starting at position 3052 of SEQ ID NO: 318246
auaaguggucagcaaagua

SEQ ID NO: 547972 - RNA, 19 nt, Artificial Sequence
  Description of Artificial Sequence: Synthetic oligonucleotide
  Antisense strand to SEQ ID NO: 547971
uacuuugcugaccacuuau

SEQ ID NO: 547973 - RNA, 19 nt, Artificial Sequence
  Description of Artificial Sequence: Synthetic oligonucleotide
  Sense strand starting at position 3057 of SEQ ID NO: 318246
uggucagcaaaguaugaau

SEQ ID NO: 547974 - RNA, 19 nt, Artificial Sequence
  Description of Artificial Sequence: Synthetic oligonucleotide
  Antisense strand to SEQ ID NO: 547973
auucauacuuugcugacca

SEQ ID NO: 547975 - RNA, 19 nt, Artificial Sequence
  Description of Artificial Sequence: Synthetic oligonucleotide
  Sense strand starting at position 3066 of SEQ ID NO: 318246
aaguaugaaugcuuagauu

SEQ ID NO: 547976 - RNA, 19 nt, Artificial Sequence
  Description of Artificial Sequence: Synthetic oligonucleotide
  Antisense strand to SEQ ID NO: 547975
aaucuaagcauucauacuu

SEQ ID NO: 547977 - RNA, 19 nt, Artificial Sequence
  Description of Artificial Sequence: Synthetic oligonucleotide
  Sense strand starting at position 3117 of SEQ ID NO: 318246
ucuuauaggccauggaaga

SEQ ID NO: 547978 - RNA, 19 nt, Artificial Sequence
  Description of Artificial Sequence: Synthetic oligonucleotide
  Antisense strand to SEQ ID NO: 547977
ucuuccauggccuauaaga

SEQ ID NO: 547979 - RNA, 19 nt, Artificial Sequence
  Description of Artificial Sequence: Synthetic oligonucleotide
  Sense strand starting at position 3231 of SEQ ID NO: 318246
aggcuaguaagacauagua

SEQ ID NO: 547980 - RNA, 19 nt, Artificial Sequence
  Description of Artificial Sequence: Synthetic oligonucleotide
  Antisense strand to SEQ ID NO: 547979
uacuaugucuuacuagccu

SEQ ID NO: 547981 - RNA, 19 nt, Artificial Sequence
  Description of Artificial Sequence: Synthetic oligonucleotide
  Sense strand starting at position 3233 of SEQ ID NO: 318246
gcuaguaagacauaguagu

SEQ ID NO: 547982 - RNA, 19 nt, Artificial Sequence
  Description of Artificial Sequence: Synthetic oligonucleotide
  Antisense strand to SEQ ID NO: 547981
acuacuaugucuuacuagc

SEQ ID NO: 547983 - RNA, 19 nt, Artificial Sequence
  Description of Artificial Sequence: Synthetic oligonucleotide
  Sense strand starting at position 3257 of SEQ ID NO: 318246
ggauucuaugagcagugga

SEQ ID NO: 547984 - RNA, 19 nt, Artificial Sequence
  Description of Artificial Sequence: Synthetic oligonucleotide
  Antisense strand to SEQ ID NO: 547983
uccacugcucauagaaucc

SEQ ID NO: 547985 - RNA, 19 nt, Artificial Sequence
  Description of Artificial Sequence: Synthetic oligonucleotide
  Sense strand starting at position 3383 of SEQ ID NO: 318246
agagaugcucacuaaaugu

SEQ ID NO: 547986 - RNA, 19 nt, Artificial Sequence
  Description of Artificial Sequence: Synthetic oligonucleotide
  Antisense strand to SEQ ID NO: 547985
acauuuagugagcaucucu

SEQ ID NO: 547987 - RNA, 19 nt, Artificial Sequence
  Description of Artificial Sequence: Synthetic oligonucleotide
  Sense strand starting at position 3497 of SEQ ID NO: 318246
auaguuuacgcugcuguaa

SEQ ID NO: 547988 - RNA, 19 nt, Artificial Sequence
  Description of Artificial Sequence: Synthetic oligonucleotide
  Antisense strand to SEQ ID NO: 547987
uuacagcagcguaaacuau

SEQ ID NO: 547989 - RNA, 19 nt, Artificial Sequence
  Description of Artificial Sequence: Synthetic oligonucleotide
  Sense strand starting at position 3524 of SEQ ID NO: 318246
ugacauaucuuggugguuu

SEQ ID NO: 547990 - RNA, 19 nt, Artificial Sequence
  Description of Artificial Sequence: Synthetic oligonucleotide
  Antisense strand to SEQ ID NO: 547989
aaaccaccaagauauguca

SEQ ID NO: 547991 - RNA, 19 nt, Artificial Sequence
  Description of Artificial Sequence: Synthetic oligonucleotide
  Sense strand starting at position 3580 of SEQ ID NO: 318246
uauugagggucugucucau

SEQ ID NO: 547992 - RNA, 19 nt, Artificial Sequence
  Description of Artificial Sequence: Synthetic oligonucleotide
  Antisense strand to SEQ ID NO: 547991
augagacagacccucaaua

SEQ ID NO: 547993 - RNA, 19 nt, Artificial Sequence
  Description of Artificial Sequence: Synthetic oligonucleotide
  Sense strand starting at position 3630 of SEQ ID NO: 318246
aguggucacucucuggaau

SEQ ID NO: 547994 - RNA, 19 nt, Artificial Sequence
  Description of Artificial Sequence: Synthetic oligonucleotide
  Antisense strand to SEQ ID NO: 547993
auuccagagagugaccacu

SEQ ID NO: 547995 - RNA, 19 nt, Artificial Sequence
  Description of Artificial Sequence: Synthetic oligonucleotide
  Sense strand starting at position 3686 of SEQ ID NO: 318246
gauggucuuaaguagguaa

SEQ ID NO: 547996 - RNA, 19 nt, Artificial Sequence
  Description of Artificial Sequence: Synthetic oligonucleotide
  Antisense strand to SEQ ID NO: 547995
uuaccuacuuaagaccauc

SEQ ID NO: 547997 - RNA, 19 nt, Artificial Sequence
  Description of Artificial Sequence: Synthetic oligonucleotide
  Sense strand starting at position 3689 of SEQ ID NO: 318246
ggucuuaaguagguaauua

SEQ ID NO: 547998 - RNA, 19 nt, Artificial Sequence
  Description of Artificial Sequence: Synthetic oligonucleotide
  Antisense strand to SEQ ID NO: 547997
uaauuaccuacuuaagacc

SEQ ID NO: 547999 - RNA, 19 nt, Artificial Sequence
  Description of Artificial Sequence: Synthetic oligonucleotide
  Sense strand starting at position 3756 of SEQ ID NO: 318246
cucauugaccaagguuaau

SEQ ID NO: 548000 - RNA, 19 nt, Artificial Sequence
  Description of Artificial Sequence: Synthetic oligonucleotide
  Antisense strand to SEQ ID NO: 547999
auuaaccuuggucaaugag

SEQ ID NO: 548001 - RNA, 19 nt, Artificial Sequence
  Description of Artificial Sequence: Synthetic oligonucleotide
  Sense strand starting at position 3762 of SEQ ID NO: 318246
gaccaagguuaaucauaug

SEQ ID NO: 548002 - RNA, 19 nt, Artificial Sequence
  Description of Artificial Sequence: Synthetic oligonucleotide
  Antisense strand to SEQ ID NO: 548001
cauaugauuaaccuugguc

SEQ ID NO: 548003 - RNA, 19 nt, Artificial Sequence
  Description of Artificial Sequence: Synthetic oligonucleotide
  Sense strand starting at position 3768 of SEQ ID NO: 318246
gguuaaucauauguaccca

SEQ ID NO: 548004 - RNA, 19 nt, Artificial Sequence
  Description of Artificial Sequence: Synthetic oligonucleotide
  Antisense strand to SEQ ID NO: 548003
uggguacauaugauuaacc

SEQ ID NO: 548005 - RNA, 19 nt, Artificial Sequence
  Description of Artificial Sequence: Synthetic oligonucleotide
  Sense strand starting at position 42 of SEQ ID NO: 318247
ugagaauauccuuaucagc

SEQ ID NO: 548006 - RNA, 19 nt, Artificial Sequence
  Description of Artificial Sequence: Synthetic oligonucleotide
  Antisense strand to SEQ ID NO: 548005
gcugauaaggauauucuca

SEQ ID NO: 548007 - RNA, 19 nt, Artificial Sequence
  Description of Artificial Sequence: Synthetic oligonucleotide
  Sense strand starting at position 44 of SEQ ID NO: 318247
agaauauccuuaucagcug

SEQ ID NO: 548008 - RNA, 19 nt, Artificial Sequence
  Description of Artificial Sequence: Synthetic oligonucleotide
  Antisense strand to SEQ ID NO: 548007
cagcugauaaggauauucu

SEQ ID NO: 548009 - RNA, 19 nt, Artificial Sequence
  Description of Artificial Sequence: Synthetic oligonucleotide
  Sense strand starting at position 47 of SEQ ID NO: 318247
auauccuuaucagcuguua

SEQ ID NO: 548010 - RNA, 19 nt, Artificial Sequence
  Description of Artificial Sequence: Synthetic oligonucleotide
  Antisense strand to SEQ ID NO: 548009
uaacagcugauaaggauau

SEQ ID NO: 548011 - RNA, 19 nt, Artificial Sequence
  Description of Artificial Sequence: Synthetic oligonucleotide
  Sense strand starting at position 212 of SEQ ID NO: 318247
aaaggaaauguuuguguag

SEQ ID NO: 548012 - RNA, 19 nt, Artificial Sequence
  Description of Artificial Sequence: Synthetic oligonucleotide
  Antisense strand to SEQ ID NO: 548011
cuacacaaacauuuccuuu

SEQ ID NO: 548013 - RNA, 19 nt, Artificial Sequence
  Description of Artificial Sequence: Synthetic oligonucleotide
  Sense strand starting at position 221 of SEQ ID NO: 318247
guuuguguagccuugugga

SEQ ID NO: 548014 - RNA, 19 nt, Artificial Sequence
  Description of Artificial Sequence: Synthetic oligonucleotide
  Antisense strand to SEQ ID NO: 548013
uccacaaggcuacacaaac

SEQ ID NO: 548015 - RNA, 19 nt, Artificial Sequence
  Description of Artificial Sequence: Synthetic oligonucleotide
  Sense strand starting at position 296 of SEQ ID NO: 318247
auccuaaacugucuguuaa

SEQ ID NO: 548016 - RNA, 19 nt, Artificial Sequence
  Description of Artificial Sequence: Synthetic oligonucleotide
  Antisense strand to SEQ ID NO: 548015
uuaacagacaguuuaggau

SEQ ID NO: 548017 - RNA, 19 nt, Artificial Sequence
  Description of Artificial Sequence: Synthetic oligonucleotide
  Sense strand starting at position 297 of SEQ ID NO: 318247
uccuaaacugucuguuaau

SEQ ID NO: 548018 - RNA, 19 nt, Artificial Sequence
  Description of Artificial Sequence: Synthetic oligonucleotide
  Antisense strand to SEQ ID NO: 548017
auuaacagacaguuuagga

SEQ ID NO: 548019 - RNA, 19 nt, Artificial Sequence
  Description of Artificial Sequence: Synthetic oligonucleotide
  Sense strand starting at position 298 of SEQ ID NO: 318247
ccuaaacugucuguuaaua

SEQ ID NO: 548020 - RNA, 19 nt, Artificial Sequence
  Description of Artificial Sequence: Synthetic oligonucleotide
  Antisense strand to SEQ ID NO: 548019
uauuaacagacaguuuagg

SEQ ID NO: 548021 - RNA, 19 nt, Artificial Sequence
  Description of Artificial Sequence: Synthetic oligonucleotide
  Sense strand starting at position 671 of SEQ ID NO: 318247
gcacgagaccgcuauuuau

SEQ ID NO: 548022 - RNA, 19 nt, Artificial Sequence
  Description of Artificial Sequence: Synthetic oligonucleotide
  Antisense strand to SEQ ID NO: 548021
auaaauagcggucucgugc

SEQ ID NO: 548023 - RNA, 19 nt, Artificial Sequence
  Description of Artificial Sequence: Synthetic oligonucleotide
  Sense strand starting at position 853 of SEQ ID NO: 318247
cacaauuugugcucgcaau

SEQ ID NO: 548024 - RNA, 19 nt, Artificial Sequence
  Description of Artificial Sequence: Synthetic oligonucleotide
  Antisense strand to SEQ ID NO: 548023
auugcgagcacaaauugug

SEQ ID NO: 548025 - RNA, 19 nt, Artificial Sequence
  Description of Artificial Sequence: Synthetic oligonucleotide
  Sense strand starting at position 854 of SEQ ID NO: 318247
acaauuugugcucgcaauc

SEQ ID NO: 548026 - RNA, 19 nt, Artificial Sequence
  Description of Artificial Sequence: Synthetic oligonucleotide
  Antisense strand to SEQ ID NO: 548025
gauugcgagcacaaauugu

SEQ ID NO: 548027 - RNA, 19 nt, Artificial Sequence
  Description of Artificial Sequence: Synthetic oligonucleotide
  Sense strand starting at position 967 of SEQ ID NO: 318247
caucgaaaguccucuauga

SEQ ID NO: 548028 - RNA, 19 nt, Artificial Sequence
  Description of Artificial Sequence: Synthetic oligonucleotide
  Antisense strand to SEQ ID NO: 548027
ucauagaggacuuucgaug

SEQ ID NO: 548029 - RNA, 19 nt, Artificial Sequence
  Description of Artificial Sequence: Synthetic oligonucleotide
  Sense strand starting at position 1301 of SEQ ID NO: 318247
ggccguggucuucaggaaa

SEQ ID NO: 548030 - RNA, 19 nt, Artificial Sequence
  Description of Artificial Sequence: Synthetic oligonucleotide
  Antisense strand to SEQ ID NO: 548029
uuuccugaagaccacggcc

SEQ ID NO: 548031 - RNA, 19 nt, Artificial Sequence
  Description of Artificial Sequence: Synthetic oligonucleotide
  Sense strand starting at position 2072 of SEQ ID NO: 318247
ggaguuaaauuccucagaa

SEQ ID NO: 548032 - RNA, 19 nt, Artificial Sequence
  Description of Artificial Sequence: Synthetic oligonucleotide
  Antisense strand to SEQ ID NO: 548031
uucugaggaauuuaacucc

SEQ ID NO: 548033 - RNA, 19 nt, Artificial Sequence
  Description of Artificial Sequence: Synthetic oligonucleotide
  Sense strand starting at position 2089 of SEQ ID NO: 318247
aaacgauguccaggcuuga

SEQ ID NO: 548034 - RNA, 19 nt, Artificial Sequence
  Description of Artificial Sequence: Synthetic oligonucleotide
  Antisense strand to SEQ ID NO: 548033
ucaagccuggacaucguuu

SEQ ID NO: 548035 - RNA, 19 nt, Artificial Sequence
  Description of Artificial Sequence: Synthetic oligonucleotide
  Sense strand starting at position 2167 of SEQ ID NO: 318247
gcuagugucacugcuagua

SEQ ID NO: 548036 - RNA, 19 nt, Artificial Sequence
  Description of Artificial Sequence: Synthetic oligonucleotide
  Antisense strand to SEQ ID NO: 548035
uacuagcagugacacuagc

SEQ ID NO: 548037 - RNA, 19 nt, Artificial Sequence
  Description of Artificial Sequence: Synthetic oligonucleotide
  Sense strand starting at position 2294 of SEQ ID NO: 318247
ucacacaguucuguuacuu

SEQ ID NO: 548038 - RNA, 19 nt, Artificial Sequence
  Description of Artificial Sequence: Synthetic oligonucleotide
  Antisense strand to SEQ ID NO: 548037
aaguaacagaacuguguga

SEQ ID NO: 548039 - RNA, 19 nt, Artificial Sequence
  Description of Artificial Sequence: Synthetic oligonucleotide
  Sense strand starting at position 2307 of SEQ ID NO: 318247
uuacuuauucugcaggugu

SEQ ID NO: 548040 - RNA, 19 nt, Artificial Sequence
  Description of Artificial Sequence: Synthetic oligonucleotide
  Antisense strand to SEQ ID NO: 548039
acaccugcagaauaaguaa

SEQ ID NO: 548041 - RNA, 19 nt, Artificial Sequence
  Description of Artificial Sequence: Synthetic oligonucleotide
  Sense strand starting at position 2386 of SEQ ID NO: 318247
cuuaaucaucaugaagugu

SEQ ID NO: 548042 - RNA, 19 nt, Artificial Sequence
  Description of Artificial Sequence: Synthetic oligonucleotide
  Antisense strand to SEQ ID NO: 548041
acacuucaugaugauuaag

SEQ ID NO: 548043 - RNA, 19 nt, Artificial Sequence
  Description of Artificial Sequence: Synthetic oligonucleotide
  Sense strand starting at position 2520 of SEQ ID NO: 318247
ggaaacccuuaguuugaga

SEQ ID NO: 548044 - RNA, 19 nt, Artificial Sequence
  Description of Artificial Sequence: Synthetic oligonucleotide
  Antisense strand to SEQ ID NO: 548043
ucucaaacuaaggguuucc

SEQ ID NO: 548045 - RNA, 19 nt, Artificial Sequence
  Description of Artificial Sequence: Synthetic oligonucleotide
  Sense strand starting at position 2533 of SEQ ID NO: 318247
uugagaacuugucuuguga

SEQ ID NO: 548046 - RNA, 19 nt, Artificial Sequence
  Description of Artificial Sequence: Synthetic oligonucleotide
  Antisense strand to SEQ ID NO: 548045
ucacaagacaaguucucaa

SEQ ID NO: 548047 - RNA, 19 nt, Artificial Sequence
  Description of Artificial Sequence: Synthetic oligonucleotide
  Sense strand starting at position 2541 of SEQ ID NO: 318247
uugucuugugauuaaccua

SEQ ID NO: 548048 - RNA, 19 nt, Artificial Sequence
  Description of Artificial Sequence: Synthetic oligonucleotide
  Antisense strand to SEQ ID NO: 548047
uagguuaaucacaagacaa

SEQ ID NO: 548049 - RNA, 19 nt, Artificial Sequence
  Description of Artificial Sequence: Synthetic oligonucleotide
  Sense strand starting at position 2640 of SEQ ID NO: 318247
auaauaaugagccguggua

SEQ ID NO: 548050 - RNA, 19 nt, Artificial Sequence
  Description of Artificial Sequence: Synthetic oligonucleotide
  Antisense strand to SEQ ID NO: 548049
uaccacggcucauuauuau

SEQ ID NO: 548051 - RNA, 19 nt, Artificial Sequence
  Description of Artificial Sequence: Synthetic oligonucleotide
  Sense strand starting at position 2642 of SEQ ID NO: 318247
aauaaugagccgugguaag

SEQ ID NO: 548052 - RNA, 19 nt, Artificial Sequence
  Description of Artificial Sequence: Synthetic oligonucleotide
  Antisense strand to SEQ ID NO: 548051
cuuaccacggcucauuauu

SEQ ID NO: 548053 - RNA, 19 nt, Artificial Sequence
  Description of Artificial Sequence: Synthetic oligonucleotide
  Sense strand starting at position 2669 of SEQ ID NO: 318247
uagggacgguuuccagaua

SEQ ID NO: 548054 - RNA, 19 nt, Artificial Sequence
  Description of Artificial Sequence: Synthetic oligonucleotide
  Antisense strand to SEQ ID NO: 548053
uaucuggaaaccgucccua

SEQ ID NO: 548055 - RNA, 19 nt, Artificial Sequence
  Description of Artificial Sequence: Synthetic oligonucleotide
  Sense strand starting at position 2674 of SEQ ID NO: 318247
acgguuuccagauacugaa

SEQ ID NO: 548056 - RNA, 19 nt, Artificial Sequence
  Description of Artificial Sequence: Synthetic oligonucleotide
  Antisense strand to SEQ ID NO: 548055
uucaguaucuggaaaccgu

SEQ ID NO: 548057 - RNA, 19 nt, Artificial Sequence
  Description of Artificial Sequence: Synthetic oligonucleotide
  Sense strand starting at position 2693 of SEQ ID NO: 318247
gguacaaugaagugagauu

SEQ ID NO: 548058 - RNA, 19 nt, Artificial Sequence
  Description of Artificial Sequence: Synthetic oligonucleotide
  Antisense strand to SEQ ID NO: 548057
aaucucacuucauuguacc

SEQ ID NO: 548059 - RNA, 19 nt, Artificial Sequence
  Description of Artificial Sequence: Synthetic oligonucleotide
  Sense strand starting at position 2801 of SEQ ID NO: 318247
ggauuaauaauucgugguu

SEQ ID NO: 548060 - RNA, 19 nt, Artificial Sequence
  Description of Artificial Sequence: Synthetic oligonucleotide
  Antisense strand to SEQ ID NO: 548059
aaccacgaauuauuaaucc

SEQ ID NO: 548061 - RNA, 19 nt, Artificial Sequence
  Description of Artificial Sequence: Synthetic oligonucleotide
  Sense strand starting at position 2802 of SEQ ID NO: 318247
gauuaauaauucgugguuc

SEQ ID NO: 548062 - RNA, 19 nt, Artificial Sequence
  Description of Artificial Sequence: Synthetic oligonucleotide
  Antisense strand to SEQ ID NO: 548061
gaaccacgaauuauuaauc

SEQ ID NO: 548063 - RNA, 19 nt, Artificial Sequence
  Description of Artificial Sequence: Synthetic oligonucleotide
  Sense strand starting at position 2806 of SEQ ID NO: 318247
aauaauucgugguucccaa

SEQ ID NO: 548064 - RNA, 19 nt, Artificial Sequence
  Description of Artificial Sequence: Synthetic oligonucleotide
  Antisense strand to SEQ ID NO: 548063
uugggaaccacgaauuauu

SEQ ID NO: 548065 - RNA, 19 nt, Artificial Sequence
  Description of Artificial Sequence: Synthetic oligonucleotide
  Sense strand starting at position 2832 of SEQ ID NO: 318247
caauuuaguuccgagggau

SEQ ID NO: 548066 - RNA, 19 nt, Artificial Sequence
  Description of Artificial Sequence: Synthetic oligonucleotide
  Antisense strand to SEQ ID NO: 548065
aucccucggaacuaaauug

SEQ ID NO: 548067 - RNA, 19 nt, Artificial Sequence
  Description of Artificial Sequence: Synthetic oligonucleotide
  Sense strand starting at position 2835 of SEQ ID NO: 318247
uuuaguuccgagggauauu

SEQ ID NO: 548068 - RNA, 19 nt, Artificial Sequence
  Description of Artificial Sequence: Synthetic oligonucleotide
  Antisense strand to SEQ ID NO: 548067
aauaucccucggaacuaaa

SEQ ID NO: 548069 - RNA, 19 nt, Artificial Sequence
  Description of Artificial Sequence: Synthetic oligonucleotide
  Sense strand starting at position 3119 of SEQ ID NO: 318247
caugaauguuaggcauaug

SEQ ID NO: 548070 - RNA, 19 nt, Artificial Sequence
  Description of Artificial Sequence: Synthetic oligonucleotide
  Antisense strand to SEQ ID NO: 548069
cauaugccuaacauucaug

SEQ ID NO: 548071 - RNA, 19 nt, Artificial Sequence
  Description of Artificial Sequence: Synthetic oligonucleotide
  Sense strand starting at position 3173 of SEQ ID NO: 318247
cgcuuacuuguacaacaua

SEQ ID NO: 548072 - RNA, 19 nt, Artificial Sequence
  Description of Artificial Sequence: Synthetic oligonucleotide
  Antisense strand to SEQ ID NO: 548071
uauguuguacaaguaagcg

SEQ ID NO: 548073 - RNA, 19 nt, Artificial Sequence
  Description of Artificial Sequence: Synthetic oligonucleotide
  Sense strand starting at position 3356 of SEQ ID NO: 318247
cuuagacacugucuugaau

SEQ ID NO: 548074 - RNA, 19 nt, Artificial Sequence
  Description of Artificial Sequence: Synthetic oligonucleotide
  Antisense strand to SEQ ID NO: 548073
auucaagacagugucuaag

SEQ ID NO: 548075 - RNA, 19 nt, Artificial Sequence
  Description of Artificial Sequence: Synthetic oligonucleotide
  Sense strand starting at position 3493 of SEQ ID NO: 318247
ucucacauauguguaaguu

SEQ ID NO: 548076 - RNA, 19 nt, Artificial Sequence
  Description of Artificial Sequence: Synthetic oligonucleotide
  Antisense strand to SEQ ID NO: 548075
aacuuacacauaugugaga

SEQ ID NO: 548077 - RNA, 19 nt, Artificial Sequence
  Description of Artificial Sequence: Synthetic oligonucleotide
  Sense strand starting at position 3494 of SEQ ID NO: 318247
cucacauauguguaaguuu

SEQ ID NO: 548078 - RNA, 19 nt, Artificial Sequence
  Description of Artificial Sequence: Synthetic oligonucleotide
  Antisense strand to SEQ ID NO: 548077
aaacuuacacauaugugag

SEQ ID NO: 548079 - RNA, 19 nt, Artificial Sequence
  Description of Artificial Sequence: Synthetic oligonucleotide
  Sense strand starting at position 3805 of SEQ ID NO: 318247
agugauggcuuguuaccaa

SEQ ID NO: 548080 - RNA, 19 nt, Artificial Sequence
  Description of Artificial Sequence: Synthetic oligonucleotide
  Antisense strand to SEQ ID NO: 548079
uugguaacaagccaucacu

SEQ ID NO: 548081 - RNA, 19 nt, Artificial Sequence
  Description of Artificial Sequence: Synthetic oligonucleotide
  Sense strand starting at position 3893 of SEQ ID NO: 318247
guuacaugguuauuggcaa

SEQ ID NO: 548082 - RNA, 19 nt, Artificial Sequence
  Description of Artificial Sequence: Synthetic oligonucleotide
  Antisense strand to SEQ ID NO: 548081
uugccaauaaccauguaac

SEQ ID NO: 548083 - RNA, 19 nt, Artificial Sequence
  Description of Artificial Sequence: Synthetic oligonucleotide
  Sense strand starting at position 3908 of SEQ ID NO: 318247
gcaauuuauugucucagcu

SEQ ID NO: 548084 - RNA, 19 nt, Artificial Sequence
  Description of Artificial Sequence: Synthetic oligonucleotide
  Antisense strand to SEQ ID NO: 548083
agcugagacaauaaauugc

SEQ ID NO: 548085 - RNA, 19 nt, Artificial Sequence
  Description of Artificial Sequence: Synthetic oligonucleotide
  Sense strand starting at position 30 of SEQ ID NO: 318248
gagagucagcucuggaucu

SEQ ID NO: 548086 - RNA, 19 nt, Artificial Sequence
  Description of Artificial Sequence: Synthetic oligonucleotide
  Antisense strand to SEQ ID NO: 548085
agauccagagcugacucuc

SEQ ID NO: 548087 - RNA, 19 nt, Artificial Sequence
  Description of Artificial Sequence: Synthetic oligonucleotide
  Sense strand starting at position 480 of SEQ ID NO: 318248
ugagaauauccuuaucagc

SEQ ID NO: 548088 - RNA, 19 nt, Artificial Sequence
  Description of Artificial Sequence: Synthetic oligonucleotide
  Antisense strand to SEQ ID NO: 548087
gcugauaaggauauucuca

SEQ ID NO: 548089 - RNA, 19 nt, Artificial Sequence
  Description of Artificial Sequence: Synthetic oligonucleotide
  Sense strand starting at position 482 of SEQ ID NO: 318248
agaauauccuuaucagcug

SEQ ID NO: 548090 - RNA, 19 nt, Artificial Sequence
  Description of Artificial Sequence: Synthetic oligonucleotide
  Antisense strand to SEQ ID NO: 548089
cagcugauaaggauauucu

SEQ ID NO: 548091 - RNA, 19 nt, Artificial Sequence
  Description of Artificial Sequence: Synthetic oligonucleotide
  Sense strand starting at position 485 of SEQ ID NO: 318248
auauccuuaucagcuguua

SEQ ID NO: 548092 - RNA, 19 nt, Artificial Sequence
  Description of Artificial Sequence: Synthetic oligonucleotide
  Antisense strand to SEQ ID NO: 548091
uaacagcugauaaggauau

SEQ ID NO: 548093 - RNA, 19 nt, Artificial Sequence
  Description of Artificial Sequence: Synthetic oligonucleotide
  Sense strand starting at position 650 of SEQ ID NO: 318248
aaaggaaauguuuguguag

SEQ ID NO: 548094 - RNA, 19 nt, Artificial Sequence
  Description of Artificial Sequence: Synthetic oligonucleotide
  Antisense strand to SEQ ID NO: 548093
cuacacaaacauuuccuuu

SEQ ID NO: 548095 - RNA, 19 nt, Artificial Sequence
  Description of Artificial Sequence: Synthetic oligonucleotide
  Sense strand starting at position 659 of SEQ ID NO: 318248
guuuguguagccuugugga

SEQ ID NO: 548096 - RNA, 19 nt, Artificial Sequence
  Description of Artificial Sequence: Synthetic oligonucleotide
  Antisense strand to SEQ ID NO: 548095
uccacaaggcuacacaaac

SEQ ID NO: 548097 - RNA, 19 nt, Artificial Sequence
  Description of Artificial Sequence: Synthetic oligonucleotide
  Sense strand starting at position 734 of SEQ ID NO: 318248
auccuaaacugucuguuaa

SEQ ID NO: 548098 - RNA, 19 nt, Artificial Sequence
  Description of Artificial Sequence: Synthetic oligonucleotide
  Antisense strand to SEQ ID NO: 548097
uuaacagacaguuuaggau

SEQ ID NO: 548099 - RNA, 19 nt, Artificial Sequence
  Description of Artificial Sequence: Synthetic oligonucleotide
  Sense strand starting at position 735 of SEQ ID NO: 318248
uccuaaacugucuguuaau

SEQ ID NO: 548100 - RNA, 19 nt, Artificial Sequence
  Description of Artificial Sequence: Synthetic oligonucleotide
  Antisense strand to SEQ ID NO: 548099
auuaacagacaguuuagga

SEQ ID NO: 548101 - RNA, 19 nt, Artificial Sequence
  Description of Artificial Sequence: Synthetic oligonucleotide
  Sense strand starting at position 736 of SEQ ID NO: 318248
ccuaaacugucuguuaaua

SEQ ID NO: 548102 - RNA, 19 nt, Artificial Sequence
  Description of Artificial Sequence: Synthetic oligonucleotide
  Antisense strand to SEQ ID NO: 548101
uauuaacagacaguuuagg

SEQ ID NO: 548103 - RNA, 19 nt, Artificial Sequence
  Description of Artificial Sequence: Synthetic oligonucleotide
  Sense strand starting at position 1109 of SEQ ID NO: 318248
gcacgagaccgcuauuuau

SEQ ID NO: 548104 - RNA, 19 nt, Artificial Sequence
  Description of Artificial Sequence: Synthetic oligonucleotide
  Antisense strand to SEQ ID NO: 548103
auaaauagcggucucgugc

SEQ ID NO: 548105 - RNA, 19 nt, Artificial Sequence
  Description of Artificial Sequence: Synthetic oligonucleotide
  Sense strand starting at position 1174 of SEQ ID NO: 318248
ggcuguugaguuugaacua

SEQ ID NO: 548106 - RNA, 19 nt, Artificial Sequence
  Description of Artificial Sequence: Synthetic oligonucleotide
  Antisense strand to SEQ ID NO: 548105
uaguucaaacucaacagcc

SEQ ID NO: 548107 - RNA, 19 nt, Artificial Sequence
  Description of Artificial Sequence: Synthetic oligonucleotide
  Sense strand starting at position 1291 of SEQ ID NO: 318248
cacaauuugugcucgcaau

SEQ ID NO: 548108 - RNA, 19 nt, Artificial Sequence
  Description of Artificial Sequence: Synthetic oligonucleotide
  Antisense strand to SEQ ID NO: 548107
auugcgagcacaaauugug

SEQ ID NO: 548109 - RNA, 19 nt, Artificial Sequence
  Description of Artificial Sequence: Synthetic oligonucleotide
  Sense strand starting at position 1292 of SEQ ID NO: 318248
acaauuugugcucgcaauc

SEQ ID NO: 548110 - RNA, 19 nt, Artificial Sequence
  Description of Artificial Sequence: Synthetic oligonucleotide
  Antisense strand to SEQ ID NO: 548109
gauugcgagcacaaauugu

SEQ ID NO: 548111 - RNA, 19 nt, Artificial Sequence
  Description of Artificial Sequence: Synthetic oligonucleotide
  Sense strand starting at position 1405 of SEQ ID NO: 318248
caucgaaaguccucuauga

SEQ ID NO: 548112 - RNA, 19 nt, Artificial Sequence
  Description of Artificial Sequence: Synthetic oligonucleotide
  Antisense strand to SEQ ID NO: 548111
ucauagaggacuuucgaug

SEQ ID NO: 548113 - RNA, 19 nt, Artificial Sequence
  Description of Artificial Sequence: Synthetic oligonucleotide
  Sense strand starting at position 1739 of SEQ ID NO: 318248
ggccguggucuucaggaaa

SEQ ID NO: 548114 - RNA, 19 nt, Artificial Sequence
  Description of Artificial Sequence: Synthetic oligonucleotide
  Antisense strand to SEQ ID NO: 548113
uuuccugaagaccacggcc

SEQ ID NO: 548115 - RNA, 19 nt, Artificial Sequence
  Description of Artificial Sequence: Synthetic oligonucleotide
  Sense strand starting at position 2510 of SEQ ID NO: 318248
ggaguuaaauuccucagaa

SEQ ID NO: 548116 - RNA, 19 nt, Artificial Sequence
  Description of Artificial Sequence: Synthetic oligonucleotide
  Antisense strand to SEQ ID NO: 548115
uucugaggaauuuaacucc

SEQ ID NO: 548117 - RNA, 19 nt, Artificial Sequence
  Description of Artificial Sequence: Synthetic oligonucleotide
  Sense strand starting at position 2527 of SEQ ID NO: 318248
aaacgauguccaggcuuga

SEQ ID NO: 548118 - RNA, 19 nt, Artificial Sequence
  Description of Artificial Sequence: Synthetic oligonucleotide
  Antisense strand to SEQ ID NO: 548117
ucaagccuggacaucguuu

SEQ ID NO: 548119 - RNA, 19 nt, Artificial Sequence
  Description of Artificial Sequence: Synthetic oligonucleotide
  Sense strand starting at position 2605 of SEQ ID NO: 318248
gcuagugucacugcuagua

SEQ ID NO: 548120 - RNA, 19 nt, Artificial Sequence
  Description of Artificial Sequence: Synthetic oligonucleotide
  Antisense strand to SEQ ID NO: 548119
uacuagcagugacacuagc

SEQ ID NO: 548121 - RNA, 19 nt, Artificial Sequence
  Description of Artificial Sequence: Synthetic oligonucleotide
  Sense strand starting at position 2732 of SEQ ID NO: 318248
ucacacaguucuguuacuu

SEQ ID NO: 548122 - RNA, 19 nt, Artificial Sequence
  Description of Artificial Sequence: Synthetic oligonucleotide
  Antisense strand to SEQ ID NO: 548121
aaguaacagaacuguguga

SEQ ID NO: 548123 - RNA, 19 nt, Artificial Sequence
  Description of Artificial Sequence: Synthetic oligonucleotide
  Sense strand starting at position 2745 of SEQ ID NO: 318248
uuacuuauucugcaggugu

SEQ ID NO: 548124 - RNA, 19 nt, Artificial Sequence
  Description of Artificial Sequence: Synthetic oligonucleotide
  Antisense strand to SEQ ID NO: 548123
acaccugcagaauaaguaa

SEQ ID NO: 548125 - RNA, 19 nt, Artificial Sequence
  Description of Artificial Sequence: Synthetic oligonucleotide
  Sense strand starting at position 2824 of SEQ ID NO: 318248
cuuaaucaucaugaagugu

SEQ ID NO: 548126 - RNA, 19 nt, Artificial Sequence
  Description of Artificial Sequence: Synthetic oligonucleotide
  Antisense strand to SEQ ID NO: 548125
acacuucaugaugauuaag

SEQ ID NO: 548127 - RNA, 19 nt, Artificial Sequence
  Description of Artificial Sequence: Synthetic oligonucleotide
  Sense strand starting at position 2958 of SEQ ID NO: 318248
ggaaacccuuaguuugaga

SEQ ID NO: 548128 - RNA, 19 nt, Artificial Sequence
  Description of Artificial Sequence: Synthetic oligonucleotide
  Antisense strand to SEQ ID NO: 548127
ucucaaacuaaggguuucc

SEQ ID NO: 548129 - RNA, 19 nt, Artificial Sequence
  Description of Artificial Sequence: Synthetic oligonucleotide
  Sense strand starting at position 2971 of SEQ ID NO: 318248
uugagaacuugucuuguga

SEQ ID NO: 548130 - RNA, 19 nt, Artificial Sequence
  Description of Artificial Sequence: Synthetic oligonucleotide
  Antisense strand to SEQ ID NO: 548129
ucacaagacaaguucucaa

SEQ ID NO: 548131 - RNA, 19 nt, Artificial Sequence
  Description of Artificial Sequence: Synthetic oligonucleotide
  Sense strand starting at position 2978 of SEQ ID NO: 318248
cuugucuugugauuaaccu

SEQ ID NO: 548132 - RNA, 19 nt, Artificial Sequence
  Description of Artificial Sequence: Synthetic oligonucleotide
  Antisense strand to SEQ ID NO: 548131
agguuaaucacaagacaag

SEQ ID NO: 548133 - RNA, 19 nt, Artificial Sequence
  Description of Artificial Sequence: Synthetic oligonucleotide
  Sense strand starting at position 2979 of SEQ ID NO: 318248
uugucuugugauuaaccua

SEQ ID NO: 548134 - RNA, 19 nt, Artificial Sequence
  Description of Artificial Sequence: Synthetic oligonucleotide
  Antisense strand to SEQ ID NO: 548133
uagguuaaucacaagacaa

SEQ ID NO: 548135 - RNA, 19 nt, Artificial Sequence
  Description of Artificial Sequence: Synthetic oligonucleotide
  Sense strand starting at position 3078 of SEQ ID NO: 318248
auaauaaugagccguggua

SEQ ID NO: 548136 - RNA, 19 nt, Artificial Sequence
  Description of Artificial Sequence: Synthetic oligonucleotide
  Antisense strand to SEQ ID NO: 548135
uaccacggcucauuauuau

SEQ ID NO: 548137 - RNA, 19 nt, Artificial Sequence
  Description of Artificial Sequence: Synthetic oligonucleotide
  Sense strand starting at position 3080 of SEQ ID NO: 318248
aauaaugagccgugguaag

SEQ ID NO: 548138 - RNA, 19 nt, Artificial Sequence
  Description of Artificial Sequence: Synthetic oligonucleotide
  Antisense strand to SEQ ID NO: 548137
cuuaccacggcucauuauu

SEQ ID NO: 548139 - RNA, 19 nt, Artificial Sequence
  Description of Artificial Sequence: Synthetic oligonucleotide
  Sense strand starting at position 3107 of SEQ ID NO: 318248
uagggacgguuuccagaua

SEQ ID NO: 548140 - RNA, 19 nt, Artificial Sequence
  Description of Artificial Sequence: Synthetic oligonucleotide
  Antisense strand to SEQ ID NO: 548139
uaucuggaaaccgucccua

SEQ ID NO: 548141 - RNA, 19 nt, Artificial Sequence
  Description of Artificial Sequence: Synthetic oligonucleotide
  Sense strand starting at position 3112 of SEQ ID NO: 318248
acgguuuccagauacugaa

SEQ ID NO: 548142 - RNA, 19 nt, Artificial Sequence
  Description of Artificial Sequence: Synthetic oligonucleotide
  Antisense strand to SEQ ID NO: 548141
uucaguaucuggaaaccgu

SEQ ID NO: 548143 - RNA, 19 nt, Artificial Sequence
  Description of Artificial Sequence: Synthetic oligonucleotide
  Sense strand starting at position 3131 of SEQ ID NO: 318248
gguacaaugaagugagauu

SEQ ID NO: 548144 - RNA, 19 nt, Artificial Sequence
  Description of Artificial Sequence: Synthetic oligonucleotide
  Antisense strand to SEQ ID NO: 548143
aaucucacuucauuguacc

SEQ ID NO: 548145 - RNA, 19 nt, Artificial Sequence
  Description of Artificial Sequence: Synthetic oligonucleotide
  Sense strand starting at position 3239 of SEQ ID NO: 318248
ggauuaauaauucgugguu

SEQ ID NO: 548146 - RNA, 19 nt, Artificial Sequence
  Description of Artificial Sequence: Synthetic oligonucleotide
  Antisense strand to SEQ ID NO: 548145
aaccacgaauuauuaaucc

SEQ ID NO: 548147 - RNA, 19 nt, Artificial Sequence
  Description of Artificial Sequence: Synthetic oligonucleotide
  Sense strand starting at position 3240 of SEQ ID NO: 318248
gauuaauaauucgugguuc

SEQ ID NO: 548148 - RNA, 19 nt, Artificial Sequence
  Description of Artificial Sequence: Synthetic oligonucleotide
  Antisense strand to SEQ ID NO: 548147
gaaccacgaauuauuaauc

SEQ ID NO: 548149 - RNA, 19 nt, Artificial Sequence
  Description of Artificial Sequence: Synthetic oligonucleotide
  Sense strand starting at position 3244 of SEQ ID NO: 318248
aauaauucgugguucccaa

SEQ ID NO: 548150 - RNA, 19 nt, Artificial Sequence
  Description of Artificial Sequence: Synthetic oligonucleotide
  Antisense strand to SEQ ID NO: 548149
uugggaaccacgaauuauu

SEQ ID NO: 548151 - RNA, 19 nt, Artificial Sequence
  Description of Artificial Sequence: Synthetic oligonucleotide
  Sense strand starting at position 3270 of SEQ ID NO: 318248
caauuuaguuccgagggau

SEQ ID NO: 548152 - RNA, 19 nt, Artificial Sequence
  Description of Artificial Sequence: Synthetic oligonucleotide
  Antisense strand to SEQ ID NO: 548151
aucccucggaacuaaauug

SEQ ID NO: 548153 - RNA, 19 nt, Artificial Sequence
  Description of Artificial Sequence: Synthetic oligonucleotide
  Sense strand starting at position 3273 of SEQ ID NO: 318248
uuuaguuccgagggauauu

SEQ ID NO: 548154 - RNA, 19 nt, Artificial Sequence
  Description of Artificial Sequence: Synthetic oligonucleotide
  Antisense strand to SEQ ID NO: 548153
aauaucccucggaacuaaa

SEQ ID NO: 548155 - RNA, 19 nt, Artificial Sequence
  Description of Artificial Sequence: Synthetic oligonucleotide
  Sense strand starting at position 3557 of SEQ ID NO: 318248
caugaauguuaggcauaug

SEQ ID NO: 548156 - RNA, 19 nt, Artificial Sequence
  Description of Artificial Sequence: Synthetic oligonucleotide
  Antisense strand to SEQ ID NO: 548155
cauaugccuaacauucaug

SEQ ID NO: 548157 - RNA, 19 nt, Artificial Sequence
  Description of Artificial Sequence: Synthetic oligonucleotide
  Sense strand starting at position 3611 of SEQ ID NO: 318248
cgcuuacuuguacaacaua

SEQ ID NO: 548158 - RNA, 19 nt, Artificial Sequence
  Description of Artificial Sequence: Synthetic oligonucleotide
  Antisense strand to SEQ ID NO: 548157
uauguuguacaaguaagcg

SEQ ID NO: 548159 - RNA, 19 nt, Artificial Sequence
  Description of Artificial Sequence: Synthetic oligonucleotide
  Sense strand starting at position 3794 of SEQ ID NO: 318248
cuuagacacugucuugaau

SEQ ID NO: 548160 - RNA, 19 nt, Artificial Sequence
  Description of Artificial Sequence: Synthetic oligonucleotide
  Antisense strand to SEQ ID NO: 548159
auucaagacagugucuaag

SEQ ID NO: 548161 - RNA, 19 nt, Artificial Sequence
  Description of Artificial Sequence: Synthetic oligonucleotide
  Sense strand starting at position 3931 of SEQ ID NO: 318248
ucucacauauguguaaguu

SEQ ID NO: 548162 - RNA, 19 nt, Artificial Sequence
  Description of Artificial Sequence: Synthetic oligonucleotide
  Antisense strand to SEQ ID NO: 548161
aacuuacacauaugugaga

SEQ ID NO: 548163 - RNA, 19 nt, Artificial Sequence
  Description of Artificial Sequence: Synthetic oligonucleotide
  Sense strand starting at position 3932 of SEQ ID NO: 318248
cucacauauguguaaguuu

SEQ ID NO: 548164 - RNA, 19 nt, Artificial Sequence
  Description of Artificial Sequence: Synthetic oligonucleotide
  Antisense strand to SEQ ID NO: 548163
aaacuuacacauaugugag

SEQ ID NO: 548165 - RNA, 19 nt, Artificial Sequence
  Description of Artificial Sequence: Synthetic oligonucleotide
  Sense strand starting at position 176 of SEQ ID NO: 318249
aaggaucuuugaugaggga

SEQ ID NO: 548166 - RNA, 19 nt, Artificial Sequence
  Description of Artificial Sequence: Synthetic oligonucleotide
  Antisense strand to SEQ ID NO: 548165
ucccucaucaaagauccuu

SEQ ID NO: 548167 - RNA, 19 nt, Artificial Sequence
  Description of Artificial Sequence: Synthetic oligonucleotide
  Sense strand starting at position 179 of SEQ ID NO: 318249
gaucuuugaugagggaaag

SEQ ID NO: 548168 - RNA, 19 nt, Artificial Sequence
  Description of Artificial Sequence: Synthetic oligonucleotide
  Antisense strand to SEQ ID NO: 548167
cuuucccucaucaaagauc

SEQ ID NO: 548169 - RNA, 19 nt, Artificial Sequence
  Description of Artificial Sequence: Synthetic oligonucleotide
  Sense strand starting at position 268 of SEQ ID NO: 318249
agguaacaaugagaacuaa

SEQ ID NO: 548170 - RNA, 19 nt, Artificial Sequence
  Description of Artificial Sequence: Synthetic oligonucleotide
  Antisense strand to SEQ ID NO: 548169
uuaguucucauuguuaccu

SEQ ID NO: 548171 - RNA, 19 nt, Artificial Sequence
  Description of Artificial Sequence: Synthetic oligonucleotide
  Sense strand starting at position 593 of SEQ ID NO: 318249
ugacaaggacuuuguguuu

SEQ ID NO: 548172 - RNA, 19 nt, Artificial Sequence
  Description of Artificial Sequence: Synthetic oligonucleotide
  Antisense strand to SEQ ID NO: 548171
aaacacaaaguccuuguca

SEQ ID NO: 548173 - RNA, 19 nt, Artificial Sequence
  Description of Artificial Sequence: Synthetic oligonucleotide
  Sense strand starting at position 632 of SEQ ID NO: 318249
gggugcuuaggaugugaca

SEQ ID NO: 548174 - RNA, 19 nt, Artificial Sequence
  Description of Artificial Sequence: Synthetic oligonucleotide
  Antisense strand to SEQ ID NO: 548173
ugucacauccuaagcaccc

SEQ ID NO: 548175 - RNA, 19 nt, Artificial Sequence
  Description of Artificial Sequence: Synthetic oligonucleotide
  Sense strand starting at position 634 of SEQ ID NO: 318249
gugcuuaggaugugacaug

SEQ ID NO: 548176 - RNA, 19 nt, Artificial Sequence
  Description of Artificial Sequence: Synthetic oligonucleotide
  Antisense strand to SEQ ID NO: 548175
caugucacauccuaagcac

SEQ ID NO: 548177 - RNA, 19 nt, Artificial Sequence
  Description of Artificial Sequence: Synthetic oligonucleotide
  Sense strand starting at position 644 of SEQ ID NO: 318249
ugugacauguucucaauaa

SEQ ID NO: 548178 - RNA, 19 nt, Artificial Sequence
  Description of Artificial Sequence: Synthetic oligonucleotide
  Antisense strand to SEQ ID NO: 548177
uuauugagaacaugucaca

SEQ ID NO: 548179 - RNA, 19 nt, Artificial Sequence
  Description of Artificial Sequence: Synthetic oligonucleotide
  Sense strand starting at position 648 of SEQ ID NO: 318249
acauguucucaauaaguag

SEQ ID NO: 548180 - RNA, 19 nt, Artificial Sequence
  Description of Artificial Sequence: Synthetic oligonucleotide
  Antisense strand to SEQ ID NO: 548179
cuacuuauugagaacaugu

SEQ ID NO: 548181 - RNA, 19 nt, Artificial Sequence
  Description of Artificial Sequence: Synthetic oligonucleotide
  Sense strand starting at position 651 of SEQ ID NO: 318249
uguucucaauaaguaguua

SEQ ID NO: 548182 - RNA, 19 nt, Artificial Sequence
  Description of Artificial Sequence: Synthetic oligonucleotide
  Antisense strand to SEQ ID NO: 548181
uaacuacuuauugagaaca

SEQ ID NO: 548183 - RNA, 19 nt, Artificial Sequence
  Description of Artificial Sequence: Synthetic oligonucleotide
  Sense strand starting at position 675 of SEQ ID NO: 318249
augaaugggcuucgcgaau

SEQ ID NO: 548184 - RNA, 19 nt, Artificial Sequence
  Description of Artificial Sequence: Synthetic oligonucleotide
  Antisense strand to SEQ ID NO: 548183
auucgcgaagcccauucau

SEQ ID NO: 548185 - RNA, 19 nt, Artificial Sequence
  Description of Artificial Sequence: Synthetic oligonucleotide
  Sense strand starting at position 681 of SEQ ID NO: 318249
gggcuucgcgaaugaauuu

SEQ ID NO: 548186 - RNA, 19 nt, Artificial Sequence
  Description of Artificial Sequence: Synthetic oligonucleotide
  Antisense strand to SEQ ID NO: 548185
aaauucauucgcgaagccc

SEQ ID NO: 548187 - RNA, 19 nt, Artificial Sequence
  Description of Artificial Sequence: Synthetic oligonucleotide
  Sense strand starting at position 687 of SEQ ID NO: 318249
cgcgaaugaauuuguucca

SEQ ID NO: 548188 - RNA, 19 nt, Artificial Sequence
  Description of Artificial Sequence: Synthetic oligonucleotide
  Antisense strand to SEQ ID NO: 548187
uggaacaaauucauucgcg

SEQ ID NO: 548189 - RNA, 19 nt, Artificial Sequence
  Description of Artificial Sequence: Synthetic oligonucleotide
  Sense strand starting at position 688 of SEQ ID NO: 318249
gcgaaugaauuuguuccau

SEQ ID NO: 548190 - RNA, 19 nt, Artificial Sequence
  Description of Artificial Sequence: Synthetic oligonucleotide
  Antisense strand to SEQ ID NO: 548189
auggaacaaauucauucgc

SEQ ID NO: 548191 - RNA, 19 nt, Artificial Sequence
  Description of Artificial Sequence: Synthetic oligonucleotide
  Sense strand starting at position 700 of SEQ ID NO: 318249
guuccauugccuuaggcaa

SEQ ID NO: 548192 - RNA, 19 nt, Artificial Sequence
  Description of Artificial Sequence: Synthetic oligonucleotide
  Antisense strand to SEQ ID NO: 548191
uugccuaaggcaauggaac

SEQ ID NO: 548193 - RNA, 19 nt, Artificial Sequence
  Description of Artificial Sequence: Synthetic oligonucleotide
  Sense strand starting at position 792 of SEQ ID NO: 318249
acaguuagauagucccuaa

SEQ ID NO: 548194 - RNA, 19 nt, Artificial Sequence
  Description of Artificial Sequence: Synthetic oligonucleotide
  Antisense strand to SEQ ID NO: 548193
uuagggacuaucuaacugu

SEQ ID NO: 548195 - RNA, 19 nt, Artificial Sequence
  Description of Artificial Sequence: Synthetic oligonucleotide
  Sense strand starting at position 796 of SEQ ID NO: 318249
uuagauagucccuaaggca

SEQ ID NO: 548196 - RNA, 19 nt, Artificial Sequence
  Description of Artificial Sequence: Synthetic oligonucleotide
  Antisense strand to SEQ ID NO: 548195
ugccuuagggacuaucuaa

SEQ ID NO: 548197 - RNA, 19 nt, Artificial Sequence
  Description of Artificial Sequence: Synthetic oligonucleotide
  Sense strand starting at position 808 of SEQ ID NO: 318249
uaaggcaaggaguguuaua

SEQ ID NO: 548198 - RNA, 19 nt, Artificial Sequence
  Description of Artificial Sequence: Synthetic oligonucleotide
  Antisense strand to SEQ ID NO: 548197
uauaacacuccuugccuua

SEQ ID NO: 548199 - RNA, 19 nt, Artificial Sequence
  Description of Artificial Sequence: Synthetic oligonucleotide
  Sense strand starting at position 1035 of SEQ ID NO: 318249
gacgcugaggugggauaua

SEQ ID NO: 548200 - RNA, 19 nt, Artificial Sequence
  Description of Artificial Sequence: Synthetic oligonucleotide
  Antisense strand to SEQ ID NO: 548199
uauaucccaccucagcguc

SEQ ID NO: 548201 - RNA, 19 nt, Artificial Sequence
  Description of Artificial Sequence: Synthetic oligonucleotide
  Sense strand starting at position 1098 of SEQ ID NO: 318249
gccucagaccaaggaugau

SEQ ID NO: 548202 - RNA, 19 nt, Artificial Sequence
  Description of Artificial Sequence: Synthetic oligonucleotide
  Antisense strand to SEQ ID NO: 548201
aucauccuuggucugaggc

SEQ ID NO: 548203 - RNA, 19 nt, Artificial Sequence
  Description of Artificial Sequence: Synthetic oligonucleotide
  Sense strand starting at position 1217 of SEQ ID NO: 318249
ugagaugcuaauggguuaa

SEQ ID NO: 548204 - RNA, 19 nt, Artificial Sequence
  Description of Artificial Sequence: Synthetic oligonucleotide
  Antisense strand to SEQ ID NO: 548203
uuaacccauuagcaucuca

SEQ ID NO: 548205 - RNA, 19 nt, Artificial Sequence
  Description of Artificial Sequence: Synthetic oligonucleotide
  Sense strand starting at position 1219 of SEQ ID NO: 318249
agaugcuaauggguuaauu

SEQ ID NO: 548206 - RNA, 19 nt, Artificial Sequence
  Description of Artificial Sequence: Synthetic oligonucleotide
  Antisense strand to SEQ ID NO: 548205
aauuaacccauuagcaucu

SEQ ID NO: 548207 - RNA, 19 nt, Artificial Sequence
  Description of Artificial Sequence: Synthetic oligonucleotide
  Sense strand starting at position 1544 of SEQ ID NO: 318249
ccgauuuagcgugguccca

SEQ ID NO: 548208 - RNA, 19 nt, Artificial Sequence
  Description of Artificial Sequence: Synthetic oligonucleotide
  Antisense strand to SEQ ID NO: 548207
ugggaccacgcuaaaucgg

SEQ ID NO: 548209 - RNA, 19 nt, Artificial Sequence
  Description of Artificial Sequence: Synthetic oligonucleotide
  Sense strand starting at position 1708 of SEQ ID NO: 318249
gguucagacgcuuucgguu

SEQ ID NO: 548210 - RNA, 19 nt, Artificial Sequence
  Description of Artificial Sequence: Synthetic oligonucleotide
  Antisense strand to SEQ ID NO: 548209
aaccgaaagcgucugaacc

SEQ ID NO: 548211 - RNA, 19 nt, Artificial Sequence
  Description of Artificial Sequence: Synthetic oligonucleotide
  Sense strand starting at position 1820 of SEQ ID NO: 318249
ucucucagaccucguguaa

SEQ ID NO: 548212 - RNA, 19 nt, Artificial Sequence
  Description of Artificial Sequence: Synthetic oligonucleotide
  Antisense strand to SEQ ID NO: 548211
uuacacgaggucugagaga

SEQ ID NO: 548213 - RNA, 19 nt, Artificial Sequence
  Description of Artificial Sequence: Synthetic oligonucleotide
  Sense strand starting at position 1824 of SEQ ID NO: 318249
ucagaccucguguaacaaa

SEQ ID NO: 548214 - RNA, 19 nt, Artificial Sequence
  Description of Artificial Sequence: Synthetic oligonucleotide
  Antisense strand to SEQ ID NO: 548213
uuuguuacacgaggucuga

SEQ ID NO: 548215 - RNA, 19 nt, Artificial Sequence
  Description of Artificial Sequence: Synthetic oligonucleotide
  Sense strand starting at position 2199 of SEQ ID NO: 318249
gugguacccauagguaagu

SEQ ID NO: 548216 - RNA, 19 nt, Artificial Sequence
  Description of Artificial Sequence: Synthetic oligonucleotide
  Antisense strand to SEQ ID NO: 548215
acuuaccuauggguaccac

SEQ ID NO: 548217 - RNA, 19 nt, Artificial Sequence
  Description of Artificial Sequence: Synthetic oligonucleotide
  Sense strand starting at position 2246 of SEQ ID NO: 318249
gacagugaugucggaggga

SEQ ID NO: 548218 - RNA, 19 nt, Artificial Sequence
  Description of Artificial Sequence: Synthetic oligonucleotide
  Antisense strand to SEQ ID NO: 548217
ucccuccgacaucacuguc

SEQ ID NO: 548219 - RNA, 19 nt, Artificial Sequence
  Description of Artificial Sequence: Synthetic oligonucleotide
  Sense strand starting at position 2406 of SEQ ID NO: 318249
uugggaggacucuguaacu

SEQ ID NO: 548220 - RNA, 19 nt, Artificial Sequence
  Description of Artificial Sequence: Synthetic oligonucleotide
  Antisense strand to SEQ ID NO: 548219
aguuacagaguccucccaa

SEQ ID NO: 548221 - RNA, 19 nt, Artificial Sequence
  Description of Artificial Sequence: Synthetic oligonucleotide
  Sense strand starting at position 2463 of SEQ ID NO: 318249
uccgcugugauccagagau

SEQ ID NO: 548222 - RNA, 19 nt, Artificial Sequence
  Description of Artificial Sequence: Synthetic oligonucleotide
  Antisense strand to SEQ ID NO: 548221
aucucuggaucacagcgga

SEQ ID NO: 548223 - RNA, 19 nt, Artificial Sequence
  Description of Artificial Sequence: Synthetic oligonucleotide
  Sense strand starting at position 2465 of SEQ ID NO: 318249
cgcugugauccagagaucu

SEQ ID NO: 548224 - RNA, 19 nt, Artificial Sequence
  Description of Artificial Sequence: Synthetic oligonucleotide
  Antisense strand to SEQ ID NO: 548223
agaucucuggaucacagcg

SEQ ID NO: 548225 - RNA, 19 nt, Artificial Sequence
  Description of Artificial Sequence: Synthetic oligonucleotide
  Sense strand starting at position 3052 of SEQ ID NO: 318249
uggaguggugcuuagaaau

SEQ ID NO: 548226 - RNA, 19 nt, Artificial Sequence
  Description of Artificial Sequence: Synthetic oligonucleotide
  Antisense strand to SEQ ID NO: 548225
auuucuaagcaccacucca

SEQ ID NO: 548227 - RNA, 19 nt, Artificial Sequence
  Description of Artificial Sequence: Synthetic oligonucleotide
  Sense strand starting at position 3059 of SEQ ID NO: 318249
gugcuuagaaaucguguag

SEQ ID NO: 548228 - RNA, 19 nt, Artificial Sequence
  Description of Artificial Sequence: Synthetic oligonucleotide
  Antisense strand to SEQ ID NO: 548227
cuacacgauuucuaagcac

SEQ ID NO: 548229 - RNA, 19 nt, Artificial Sequence
  Description of Artificial Sequence: Synthetic oligonucleotide
  Sense strand starting at position 3063 of SEQ ID NO: 318249
uuagaaaucguguagucua

SEQ ID NO: 548230 - RNA, 19 nt, Artificial Sequence
  Description of Artificial Sequence: Synthetic oligonucleotide
  Antisense strand to SEQ ID NO: 548229
uagacuacacgauuucuaa

SEQ ID NO: 548231 - RNA, 19 nt, Artificial Sequence
  Description of Artificial Sequence: Synthetic oligonucleotide
  Sense strand starting at position 3068 of SEQ ID NO: 318249
aaucguguagucuagugau

SEQ ID NO: 548232 - RNA, 19 nt, Artificial Sequence
  Description of Artificial Sequence: Synthetic oligonucleotide
  Antisense strand to SEQ ID NO: 548231
aucacuagacuacacgauu

SEQ ID NO: 548233 - RNA, 19 nt, Artificial Sequence
  Description of Artificial Sequence: Synthetic oligonucleotide
  Sense strand starting at position 3074 of SEQ ID NO: 318249
guagucuagugauucccga

SEQ ID NO: 548234 - RNA, 19 nt, Artificial Sequence
  Description of Artificial Sequence: Synthetic oligonucleotide
  Antisense strand to SEQ ID NO: 548233
ucgggaaucacuagacuac

SEQ ID NO: 548235 - RNA, 19 nt, Artificial Sequence
  Description of Artificial Sequence: Synthetic oligonucleotide
  Sense strand starting at position 3087 of SEQ ID NO: 318249
ucccgaacuuuccuaguaa

SEQ ID NO: 548236 - RNA, 19 nt, Artificial Sequence
  Description of Artificial Sequence: Synthetic oligonucleotide
  Antisense strand to SEQ ID NO: 548235
uuacuaggaaaguucggga

SEQ ID NO: 548237 - RNA, 19 nt, Artificial Sequence
  Description of Artificial Sequence: Synthetic oligonucleotide
  Sense strand starting at position 3118 of SEQ ID NO: 318249
gcacuuugaaagcagagau

SEQ ID NO: 548238 - RNA, 19 nt, Artificial Sequence
  Description of Artificial Sequence: Synthetic oligonucleotide
  Antisense strand to SEQ ID NO: 548237
aucucugcuuucaaagugc

SEQ ID NO: 548239 - RNA, 19 nt, Artificial Sequence
  Description of Artificial Sequence: Synthetic oligonucleotide
  Sense strand starting at position 3448 of SEQ ID NO: 318249
caaggucacuccuugagau

SEQ ID NO: 548240 - RNA, 19 nt, Artificial Sequence
  Description of Artificial Sequence: Synthetic oligonucleotide
  Antisense strand to SEQ ID NO: 548239
aucucaaggagugaccuug

SEQ ID NO: 548241 - RNA, 19 nt, Artificial Sequence
  Description of Artificial Sequence: Synthetic oligonucleotide
  Sense strand starting at position 3449 of SEQ ID NO: 318249
aaggucacuccuugagauu

SEQ ID NO: 548242 - RNA, 19 nt, Artificial Sequence
  Description of Artificial Sequence: Synthetic oligonucleotide
  Antisense strand to SEQ ID NO: 548241
aaucucaaggagugaccuu

SEQ ID NO: 548243 - RNA, 19 nt, Artificial Sequence
  Description of Artificial Sequence: Synthetic oligonucleotide
  Sense strand starting at position 3450 of SEQ ID NO: 318249
aggucacuccuugagauuc

SEQ ID NO: 548244 - RNA, 19 nt, Artificial Sequence
  Description of Artificial Sequence: Synthetic oligonucleotide
  Antisense strand to SEQ ID NO: 548243
gaaucucaaggagugaccu

SEQ ID NO: 548245 - RNA, 19 nt, Artificial Sequence
  Description of Artificial Sequence: Synthetic oligonucleotide
  Sense strand starting at position 30 of SEQ ID NO: 318250
aauggcaauuucgaaauga

SEQ ID NO: 548246 - RNA, 19 nt, Artificial Sequence
  Description of Artificial Sequence: Synthetic oligonucleotide
  Antisense strand to SEQ ID NO: 548245
ucauuucgaaauugccauu

SEQ ID NO: 548247 - RNA, 19 nt, Artificial Sequence
  Description of Artificial Sequence: Synthetic oligonucleotide
  Sense strand starting at position 41 of SEQ ID NO: 318250
cgaaaugagaacgguuaca

SEQ ID NO: 548248 - RNA, 19 nt, Artificial Sequence
  Description of Artificial Sequence: Synthetic oligonucleotide
  Antisense strand to SEQ ID NO: 548247
uguaaccguucucauuucg

SEQ ID NO: 548249 - RNA, 19 nt, Artificial Sequence
  Description of Artificial Sequence: Synthetic oligonucleotide
  Sense strand starting at position 52 of SEQ ID NO: 318250
cgguuacaaacaugaauag

SEQ ID NO: 548250 - RNA, 19 nt, Artificial Sequence
  Description of Artificial Sequence: Synthetic oligonucleotide
  Antisense strand to SEQ ID NO: 548249
cuauucauguuuguaaccg

SEQ ID NO: 548251 - RNA, 19 nt, Artificial Sequence
  Description of Artificial Sequence: Synthetic oligonucleotide
  Sense strand starting at position 110 of SEQ ID NO: 318250
cgaaguuugcuacagggau

SEQ ID NO: 548252 - RNA, 19 nt, Artificial Sequence
  Description of Artificial Sequence: Synthetic oligonucleotide
  Antisense strand to SEQ ID NO: 548251
aucccuguagcaaacuucg

SEQ ID NO: 548253 - RNA, 19 nt, Artificial Sequence
  Description of Artificial Sequence: Synthetic oligonucleotide
  Sense strand starting at position 159 of SEQ ID NO: 318250
ugacauacgccucaaacua

SEQ ID NO: 548254 - RNA, 19 nt, Artificial Sequence
  Description of Artificial Sequence: Synthetic oligonucleotide
  Antisense strand to SEQ ID NO: 548253
uaguuugaggcguauguca

SEQ ID NO: 548255 - RNA, 19 nt, Artificial Sequence
  Description of Artificial Sequence: Synthetic oligonucleotide
  Sense strand starting at position 207 of SEQ ID NO: 318250
gguucuuuccgauaguuau

SEQ ID NO: 548256 - RNA, 19 nt, Artificial Sequence
  Description of Artificial Sequence: Synthetic oligonucleotide
  Antisense strand to SEQ ID NO: 548255
auaacuaucggaaagaacc

SEQ ID NO: 548257 - RNA, 19 nt, Artificial Sequence
  Description of Artificial Sequence: Synthetic oligonucleotide
  Sense strand starting at position 210 of SEQ ID NO: 318250
ucuuuccgauaguuaucaa

SEQ ID NO: 548258 - RNA, 19 nt, Artificial Sequence
  Description of Artificial Sequence: Synthetic oligonucleotide
  Antisense strand to SEQ ID NO: 548257
uugauaacuaucggaaaga

SEQ ID NO: 548259 - RNA, 19 nt, Artificial Sequence
  Description of Artificial Sequence: Synthetic oligonucleotide
  Sense strand starting at position 430 of SEQ ID NO: 318250
acagacguuuaauuaacaa

SEQ ID NO: 548260 - RNA, 19 nt, Artificial Sequence
  Description of Artificial Sequence: Synthetic oligonucleotide
  Antisense strand to SEQ ID NO: 548259
uuguuaauuaaacgucugu

SEQ ID NO: 548261 - RNA, 19 nt, Artificial Sequence
  Description of Artificial Sequence: Synthetic oligonucleotide
  Sense strand starting at position 624 of SEQ ID NO: 318250
aaauucugcgaauagucuu

SEQ ID NO: 548262 - RNA, 19 nt, Artificial Sequence
  Description of Artificial Sequence: Synthetic oligonucleotide
  Antisense strand to SEQ ID NO: 548261
aagacuauucgcagaauuu

SEQ ID NO: 548263 - RNA, 19 nt, Artificial Sequence
  Description of Artificial Sequence: Synthetic oligonucleotide
  Sense strand starting at position 638 of SEQ ID NO: 318250
gucuuaggucuugaucuga

SEQ ID NO: 548264 - RNA, 19 nt, Artificial Sequence
  Description of Artificial Sequence: Synthetic oligonucleotide
  Antisense strand to SEQ ID NO: 548263
ucagaucaagaccuaagac

SEQ ID NO: 548265 - RNA, 19 nt, Artificial Sequence
  Description of Artificial Sequence: Synthetic oligonucleotide
  Sense strand starting at position 703 of SEQ ID NO: 318250
uggucaaugccgcacaaau

SEQ ID NO: 548266 - RNA, 19 nt, Artificial Sequence
  Description of Artificial Sequence: Synthetic oligonucleotide
  Antisense strand to SEQ ID NO: 548265
auuugugcggcauugacca

SEQ ID NO: 548267 - RNA, 19 nt, Artificial Sequence
  Description of Artificial Sequence: Synthetic oligonucleotide
  Sense strand starting at position 792 of SEQ ID NO: 318250
agcgucuugguuuagauuu

SEQ ID NO: 548268 - RNA, 19 nt, Artificial Sequence
  Description of Artificial Sequence: Synthetic oligonucleotide
  Antisense strand to SEQ ID NO: 548267
aaaucuaaaccaagacgcu

SEQ ID NO: 548269 - RNA, 19 nt, Artificial Sequence
  Description of Artificial Sequence: Synthetic oligonucleotide
  Sense strand starting at position 834 of SEQ ID NO: 318250
uacaaccuucguuaaguga

SEQ ID NO: 548270 - RNA, 19 nt, Artificial Sequence
  Description of Artificial Sequence: Synthetic oligonucleotide
  Antisense strand to SEQ ID NO: 548269
ucacuuaacgaagguugua

SEQ ID NO: 548271 - RNA, 19 nt, Artificial Sequence
  Description of Artificial Sequence: Synthetic oligonucleotide
  Sense strand starting at position 849 of SEQ ID NO: 318250
gugaguuuaucucugggca

SEQ ID NO: 548272 - RNA, 19 nt, Artificial Sequence
  Description of Artificial Sequence: Synthetic oligonucleotide
  Antisense strand to SEQ ID NO: 548271
ugcccagagauaaacucac

SEQ ID NO: 548273 - RNA, 19 nt, Artificial Sequence
  Description of Artificial Sequence: Synthetic oligonucleotide
  Sense strand starting at position 871 of SEQ ID NO: 318250
guauccucaucugcaaagu

SEQ ID NO: 548274 - RNA, 19 nt, Artificial Sequence
  Description of Artificial Sequence: Synthetic oligonucleotide
  Antisense strand to SEQ ID NO: 548273
acuuugcagaugaggauac

SEQ ID NO: 548275 - RNA, 19 nt, Artificial Sequence
  Description of Artificial Sequence: Synthetic oligonucleotide
  Sense strand starting at position 940 of SEQ ID NO: 318250
gagagcugccaucacagua

SEQ ID NO: 548276 - RNA, 19 nt, Artificial Sequence
  Description of Artificial Sequence: Synthetic oligonucleotide
  Antisense strand to SEQ ID NO: 548275
uacugugauggcagcucuc

SEQ ID NO: 548277 - RNA, 19 nt, Artificial Sequence
  Description of Artificial Sequence: Synthetic oligonucleotide
  Sense strand starting at position 961 of SEQ ID NO: 318250
ugcuguaagcacugaacaa

SEQ ID NO: 548278 - RNA, 19 nt, Artificial Sequence
  Description of Artificial Sequence: Synthetic oligonucleotide
  Antisense strand to SEQ ID NO: 548277
uuguucagugcuuacagca

SEQ ID NO: 548279 - RNA, 19 nt, Artificial Sequence
  Description of Artificial Sequence: Synthetic oligonucleotide
  Sense strand starting at position 1069 of SEQ ID NO: 318250
cggugagucccggauguag

SEQ ID NO: 548280 - RNA, 19 nt, Artificial Sequence
  Description of Artificial Sequence: Synthetic oligonucleotide
  Antisense strand to SEQ ID NO: 548279
cuacauccgggacucaccg

SEQ ID NO: 548281 - RNA, 19 nt, Artificial Sequence
  Description of Artificial Sequence: Synthetic oligonucleotide
  Sense strand starting at position 1333 of SEQ ID NO: 318250
gcaucagaagccuaugaac

SEQ ID NO: 548282 - RNA, 19 nt, Artificial Sequence
  Description of Artificial Sequence: Synthetic oligonucleotide
  Antisense strand to SEQ ID NO: 548281
guucauaggcuucugaugc

SEQ ID NO: 548283 - RNA, 19 nt, Artificial Sequence
  Description of Artificial Sequence: Synthetic oligonucleotide
  Sense strand starting at position 2101 of SEQ ID NO: 318250
gcgugcuuuccagucguaa

SEQ ID NO: 548284 - RNA, 19 nt, Artificial Sequence
  Description of Artificial Sequence: Synthetic oligonucleotide
  Antisense strand to SEQ ID NO: 548283
uuacgacuggaaagcacgc

SEQ ID NO: 548285 - RNA, 19 nt, Artificial Sequence
  Description of Artificial Sequence: Synthetic oligonucleotide
  Sense strand starting at position 2102 of SEQ ID NO: 318250
cgugcuuuccagucguaac

SEQ ID NO: 548286 - RNA, 19 nt, Artificial Sequence
  Description of Artificial Sequence: Synthetic oligonucleotide
  Antisense strand to SEQ ID NO: 548285
guuacgacuggaaagcacg

SEQ ID NO: 548287 - RNA, 19 nt, Artificial Sequence
  Description of Artificial Sequence: Synthetic oligonucleotide
  Sense strand starting at position 2223 of SEQ ID NO: 318250
cccuuagcuguguaagaua

SEQ ID NO: 548288 - RNA, 19 nt, Artificial Sequence
  Description of Artificial Sequence: Synthetic oligonucleotide
  Antisense strand to SEQ ID NO: 548287
uaucuuacacagcuaaggg

SEQ ID NO: 548289 - RNA, 19 nt, Artificial Sequence
  Description of Artificial Sequence: Synthetic oligonucleotide
  Sense strand starting at position 2234 of SEQ ID NO: 318250
guaagauauggcggguuag

SEQ ID NO: 548290 - RNA, 19 nt, Artificial Sequence
  Description of Artificial Sequence: Synthetic oligonucleotide
  Antisense strand to SEQ ID NO: 548289
cuaacccgccauaucuuac

SEQ ID NO: 548291 - RNA, 19 nt, Artificial Sequence
  Description of Artificial Sequence: Synthetic oligonucleotide
  Sense strand starting at position 2414 of SEQ ID NO: 318250
ugaauugcggcuuauucuu

SEQ ID NO: 548292 - RNA, 19 nt, Artificial Sequence
  Description of Artificial Sequence: Synthetic oligonucleotide
  Antisense strand to SEQ ID NO: 548291
aagaauaagccgcaauuca

SEQ ID NO: 548293 - RNA, 19 nt, Artificial Sequence
  Description of Artificial Sequence: Synthetic oligonucleotide
  Sense strand starting at position 2422 of SEQ ID NO: 318250
ggcuuauucuuuguuagga

SEQ ID NO: 548294 - RNA, 19 nt, Artificial Sequence
  Description of Artificial Sequence: Synthetic oligonucleotide
  Antisense strand to SEQ ID NO: 548293
uccuaacaaagaauaagcc

SEQ ID NO: 548295 - RNA, 19 nt, Artificial Sequence
  Description of Artificial Sequence: Synthetic oligonucleotide
  Sense strand starting at position 2423 of SEQ ID NO: 318250
gcuuauucuuuguuaggaa

SEQ ID NO: 548296 - RNA, 19 nt, Artificial Sequence
  Description of Artificial Sequence: Synthetic oligonucleotide
  Antisense strand to SEQ ID NO: 548295
uuccuaacaaagaauaagc

SEQ ID NO: 548297 - RNA, 19 nt, Artificial Sequence
  Description of Artificial Sequence: Synthetic oligonucleotide
  Sense strand starting at position 2450 of SEQ ID NO: 318250
guaguuaccggccagacuu

SEQ ID NO: 548298 - RNA, 19 nt, Artificial Sequence
  Description of Artificial Sequence: Synthetic oligonucleotide
  Antisense strand to SEQ ID NO: 548297
aagucuggccgguaacuac

SEQ ID NO: 548299 - RNA, 19 nt, Artificial Sequence
  Description of Artificial Sequence: Synthetic oligonucleotide
  Sense strand starting at position 2460 of SEQ ID NO: 318250
gccagacuuacggaacuuu

SEQ ID NO: 548300 - RNA, 19 nt, Artificial Sequence
  Description of Artificial Sequence: Synthetic oligonucleotide
  Antisense strand to SEQ ID NO: 548299
aaaguuccguaagucuggc

SEQ ID NO: 548301 - RNA, 19 nt, Artificial Sequence
  Description of Artificial Sequence: Synthetic oligonucleotide
  Sense strand starting at position 2517 of SEQ ID NO: 318250
aguccuuaucuuuacguaa

SEQ ID NO: 548302 - RNA, 19 nt, Artificial Sequence
  Description of Artificial Sequence: Synthetic oligonucleotide
  Antisense strand to SEQ ID NO: 548301
uuacguaaagauaaggacu

SEQ ID NO: 548303 - RNA, 19 nt, Artificial Sequence
  Description of Artificial Sequence: Synthetic oligonucleotide
  Sense strand starting at position 2713 of SEQ ID NO: 318250
gagcaugggaauuaacguu

SEQ ID NO: 548304 - RNA, 19 nt, Artificial Sequence
  Description of Artificial Sequence: Synthetic oligonucleotide
  Antisense strand to SEQ ID NO: 548303
aacguuaauucccaugcuc

SEQ ID NO: 548305 - RNA, 19 nt, Artificial Sequence
  Description of Artificial Sequence: Synthetic oligonucleotide
  Sense strand starting at position 2790 of SEQ ID NO: 318250
ucugaagacccguaaucuu

SEQ ID NO: 548306 - RNA, 19 nt, Artificial Sequence
  Description of Artificial Sequence: Synthetic oligonucleotide
  Antisense strand to SEQ ID NO: 548305
aagauuacgggucuucaga

SEQ ID NO: 548307 - RNA, 19 nt, Artificial Sequence
  Description of Artificial Sequence: Synthetic oligonucleotide
  Sense strand starting at position 2896 of SEQ ID NO: 318250
ggcauuauuucuuacagga

SEQ ID NO: 548308 - RNA, 19 nt, Artificial Sequence
  Description of Artificial Sequence: Synthetic oligonucleotide
  Antisense strand to SEQ ID NO: 548307
uccuguaagaaauaaugcc

SEQ ID NO: 548309 - RNA, 19 nt, Artificial Sequence
  Description of Artificial Sequence: Synthetic oligonucleotide
  Sense strand starting at position 2976 of SEQ ID NO: 318250
uccauauuauggguuaguu

SEQ ID NO: 548310 - RNA, 19 nt, Artificial Sequence
  Description of Artificial Sequence: Synthetic oligonucleotide
  Antisense strand to SEQ ID NO: 548309
aacuaacccauaauaugga

SEQ ID NO: 548311 - RNA, 19 nt, Artificial Sequence
  Description of Artificial Sequence: Synthetic oligonucleotide
  Sense strand starting at position 2986 of SEQ ID NO: 318250
ggguuaguuguggacacau

SEQ ID NO: 548312 - RNA, 19 nt, Artificial Sequence
  Description of Artificial Sequence: Synthetic oligonucleotide
  Antisense strand to SEQ ID NO: 548311
auguguccacaacuaaccc

SEQ ID NO: 548313 - RNA, 19 nt, Artificial Sequence
  Description of Artificial Sequence: Synthetic oligonucleotide
  Sense strand starting at position 3036 of SEQ ID NO: 318250
aacuguuccuuucugagag

SEQ ID NO: 548314 - RNA, 19 nt, Artificial Sequence
  Description of Artificial Sequence: Synthetic oligonucleotide
  Antisense strand to SEQ ID NO: 548313
cucucagaaaggaacaguu

SEQ ID NO: 548315 - RNA, 19 nt, Artificial Sequence
  Description of Artificial Sequence: Synthetic oligonucleotide
  Sense strand starting at position 3050 of SEQ ID NO: 318250
gagagcuccugugucacau

SEQ ID NO: 548316 - RNA, 19 nt, Artificial Sequence
  Description of Artificial Sequence: Synthetic oligonucleotide
  Antisense strand to SEQ ID NO: 548315
augugacacaggagcucuc

SEQ ID NO: 548317 - RNA, 19 nt, Artificial Sequence
  Description of Artificial Sequence: Synthetic oligonucleotide
  Sense strand starting at position 3071 of SEQ ID NO: 318250
agcuuugagucacuuaaau

SEQ ID NO: 548318 - RNA, 19 nt, Artificial Sequence
  Description of Artificial Sequence: Synthetic oligonucleotide
  Antisense strand to SEQ ID NO: 548317
auuuaagugacucaaagcu

SEQ ID NO: 548319 - RNA, 19 nt, Artificial Sequence
  Description of Artificial Sequence: Synthetic oligonucleotide
  Sense strand starting at position 3159 of SEQ ID NO: 318250
gcgugaucuccgcuggaug

SEQ ID NO: 548320 - RNA, 19 nt, Artificial Sequence
  Description of Artificial Sequence: Synthetic oligonucleotide
  Antisense strand to SEQ ID NO: 548319
cauccagcggagaucacgc

SEQ ID NO: 548321 - RNA, 19 nt, Artificial Sequence
  Description of Artificial Sequence: Synthetic oligonucleotide
  Sense strand starting at position 3431 of SEQ ID NO: 318250
uggcaagaucucugacuca

SEQ ID NO: 548322 - RNA, 19 nt, Artificial Sequence
  Description of Artificial Sequence: Synthetic oligonucleotide
  Antisense strand to SEQ ID NO: 548321
ugagucagagaucuugcca

SEQ ID NO: 548323 - RNA, 19 nt, Artificial Sequence
  Description of Artificial Sequence: Synthetic oligonucleotide
  Sense strand starting at position 3530 of SEQ ID NO: 318250
uccagcuaauuguuguaua

SEQ ID NO: 548324 - RNA, 19 nt, Artificial Sequence
  Description of Artificial Sequence: Synthetic oligonucleotide
  Antisense strand to SEQ ID NO: 548323
uauacaacaauuagcugga

SEQ ID NO: 548325 - RNA, 19 nt, Artificial Sequence
  Description of Artificial Sequence: Synthetic oligonucleotide
  Sense strand starting at position 93 of SEQ ID NO: 318251
uagcucugggcgcauuaga

SEQ ID NO: 548326 - RNA, 19 nt, Artificial Sequence
  Description of Artificial Sequence: Synthetic oligonucleotide
  Antisense strand to SEQ ID NO: 548325
ucuaaugcgcccagagcua

SEQ ID NO: 548327 - RNA, 19 nt, Artificial Sequence
  Description of Artificial Sequence: Synthetic oligonucleotide
  Sense strand starting at position 108 of SEQ ID NO: 318251
uagaaacugcguugcagaa

SEQ ID NO: 548328 - RNA, 19 nt, Artificial Sequence
  Description of Artificial Sequence: Synthetic oligonucleotide
  Antisense strand to SEQ ID NO: 548327
uucugcaacgcaguuucua

SEQ ID NO: 548329 - RNA, 19 nt, Artificial Sequence
  Description of Artificial Sequence: Synthetic oligonucleotide
  Sense strand starting at position 120 of SEQ ID NO: 318251
ugcagaacacucugggaga

SEQ ID NO: 548330 - RNA, 19 nt, Artificial Sequence
  Description of Artificial Sequence: Synthetic oligonucleotide
  Antisense strand to SEQ ID NO: 548329
ucucccagaguguucugca

SEQ ID NO: 548331 - RNA, 19 nt, Artificial Sequence
  Description of Artificial Sequence: Synthetic oligonucleotide
  Sense strand starting at position 123 of SEQ ID NO: 318251
agaacacucugggagaagu

SEQ ID NO: 548332 - RNA, 19 nt, Artificial Sequence
  Description of Artificial Sequence: Synthetic oligonucleotide
  Antisense strand to SEQ ID NO: 548331
acuucucccagaguguucu

SEQ ID NO: 548333 - RNA, 19 nt, Artificial Sequence
  Description of Artificial Sequence: Synthetic oligonucleotide
  Sense strand starting at position 186 of SEQ ID NO: 318251
accacagaagcucguuuau

SEQ ID NO: 548334 - RNA, 19 nt, Artificial Sequence
  Description of Artificial Sequence: Synthetic oligonucleotide
  Antisense strand to SEQ ID NO: 548333
auaaacgagcuucuguggu

SEQ ID NO: 548335 - RNA, 19 nt, Artificial Sequence
  Description of Artificial Sequence: Synthetic oligonucleotide
  Sense strand starting at position 188 of SEQ ID NO: 318251
cacagaagcucguuuauaa

SEQ ID NO: 548336 - RNA, 19 nt, Artificial Sequence
  Description of Artificial Sequence: Synthetic oligonucleotide
  Antisense strand to SEQ ID NO: 548335
uuauaaacgagcuucugug

SEQ ID NO: 548337 - RNA, 19 nt, Artificial Sequence
  Description of Artificial Sequence: Synthetic oligonucleotide
  Sense strand starting at position 1984 of SEQ ID NO: 318251
ccucgcauuugaucucauu

SEQ ID NO: 548338 - RNA, 19 nt, Artificial Sequence
  Description of Artificial Sequence: Synthetic oligonucleotide
  Antisense strand to SEQ ID NO: 548337
aaugagaucaaaugcgagg

SEQ ID NO: 548339 - RNA, 19 nt, Artificial Sequence
  Description of Artificial Sequence: Synthetic oligonucleotide
  Sense strand starting at position 2021 of SEQ ID NO: 318251
gauccauagcccgcguuua

SEQ ID NO: 548340 - RNA, 19 nt, Artificial Sequence
  Description of Artificial Sequence: Synthetic oligonucleotide
  Antisense strand to SEQ ID NO: 548339
uaaacgcgggcuauggauc

SEQ ID NO: 548341 - RNA, 19 nt, Artificial Sequence
  Description of Artificial Sequence: Synthetic oligonucleotide
  Sense strand starting at position 2023 of SEQ ID NO: 318251
uccauagcccgcguuuaaa

SEQ ID NO: 548342 - RNA, 19 nt, Artificial Sequence
  Description of Artificial Sequence: Synthetic oligonucleotide
  Antisense strand to SEQ ID NO: 548341
uuuaaacgcgggcuaugga

SEQ ID NO: 548343 - RNA, 19 nt, Artificial Sequence
  Description of Artificial Sequence: Synthetic oligonucleotide
  Sense strand starting at position 2150 of SEQ ID NO: 318251
gggagucucucauuaacau

SEQ ID NO: 548344 - RNA, 19 nt, Artificial Sequence
  Description of Artificial Sequence: Synthetic oligonucleotide
  Antisense strand to SEQ ID NO: 548343
auguuaaugagagacuccc

SEQ ID NO: 548345 - RNA, 19 nt, Artificial Sequence
  Description of Artificial Sequence: Synthetic oligonucleotide
  Sense strand starting at position 2151 of SEQ ID NO: 318251
ggagucucucauuaacauu

SEQ ID NO: 548346 - RNA, 19 nt, Artificial Sequence
  Description of Artificial Sequence: Synthetic oligonucleotide
  Antisense strand to SEQ ID NO: 548345
aauguuaaugagagacucc

SEQ ID NO: 548347 - RNA, 19 nt, Artificial Sequence
  Description of Artificial Sequence: Synthetic oligonucleotide
  Sense strand starting at position 2368 of SEQ ID NO: 318251
aaggaaacgugcuuuaaag

SEQ ID NO: 548348 - RNA, 19 nt, Artificial Sequence
  Description of Artificial Sequence: Synthetic oligonucleotide
  Antisense strand to SEQ ID NO: 548347
cuuuaaagcacguuuccuu

SEQ ID NO: 548349 - RNA, 19 nt, Artificial Sequence
  Description of Artificial Sequence: Synthetic oligonucleotide
  Sense strand starting at position 2370 of SEQ ID NO: 318251
ggaaacgugcuuuaaagua

SEQ ID NO: 548350 - RNA, 19 nt, Artificial Sequence
  Description of Artificial Sequence: Synthetic oligonucleotide
  Antisense strand to SEQ ID NO: 548349
uacuuuaaagcacguuucc

SEQ ID NO: 548351 - RNA, 19 nt, Artificial Sequence
  Description of Artificial Sequence: Synthetic oligonucleotide
  Sense strand starting at position 2375 of SEQ ID NO: 318251
cgugcuuuaaaguagagaa

SEQ ID NO: 548352 - RNA, 19 nt, Artificial Sequence
  Description of Artificial Sequence: Synthetic oligonucleotide
  Antisense strand to SEQ ID NO: 548351
uucucuacuuuaaagcacg

SEQ ID NO: 548353 - RNA, 19 nt, Artificial Sequence
  Description of Artificial Sequence: Synthetic oligonucleotide
  Sense strand starting at position 2495 of SEQ ID NO: 318251
gguucuagaaauugugguu

SEQ ID NO: 548354 - RNA, 19 nt, Artificial Sequence
  Description of Artificial Sequence: Synthetic oligonucleotide
  Antisense strand to SEQ ID NO: 548353
aaccacaauuucuagaacc

SEQ ID NO: 548355 - RNA, 19 nt, Artificial Sequence
  Description of Artificial Sequence: Synthetic oligonucleotide
  Sense strand starting at position 2500 of SEQ ID NO: 318251
uagaaauugugguuucggu

SEQ ID NO: 548356 - RNA, 19 nt, Artificial Sequence
  Description of Artificial Sequence: Synthetic oligonucleotide
  Antisense strand to SEQ ID NO: 548355
accgaaaccacaauuucua

SEQ ID NO: 548357 - RNA, 19 nt, Artificial Sequence
  Description of Artificial Sequence: Synthetic oligonucleotide
  Sense strand starting at position 2843 of SEQ ID NO: 318251
ugaaacuuguugcucccaa

SEQ ID NO: 548358 - RNA, 19 nt, Artificial Sequence
  Description of Artificial Sequence: Synthetic oligonucleotide
  Antisense strand to SEQ ID NO: 548357
uugggagcaacaaguuuca

SEQ ID NO: 548359 - RNA, 19 nt, Artificial Sequence
  Description of Artificial Sequence: Synthetic oligonucleotide
  Sense strand starting at position 2877 of SEQ ID NO: 318251
ucaacuucuggagguguca

SEQ ID NO: 548360 - RNA, 19 nt, Artificial Sequence
  Description of Artificial Sequence: Synthetic oligonucleotide
  Antisense strand to SEQ ID NO: 548359
ugacaccuccagaaguuga

SEQ ID NO: 548361 - RNA, 19 nt, Artificial Sequence
  Description of Artificial Sequence: Synthetic oligonucleotide
  Sense strand starting at position 2956 of SEQ ID NO: 318251
aaauaaagggacugucuuu

SEQ ID NO: 548362 - RNA, 19 nt, Artificial Sequence
  Description of Artificial Sequence: Synthetic oligonucleotide
  Antisense strand to SEQ ID NO: 548361
aaagacagucccuuuauuu

SEQ ID NO: 548363 - RNA, 19 nt, Artificial Sequence
  Description of Artificial Sequence: Synthetic oligonucleotide
  Sense strand starting at position 2961 of SEQ ID NO: 318251
aagggacugucuuucccaa

SEQ ID NO: 548364 - RNA, 19 nt, Artificial Sequence
  Description of Artificial Sequence: Synthetic oligonucleotide
  Antisense strand to SEQ ID NO: 548363
uugggaaagacagucccuu

SEQ ID NO: 548365 - RNA, 19 nt, Artificial Sequence
  Description of Artificial Sequence: Synthetic oligonucleotide
  Sense strand starting at position 3023 of SEQ ID NO: 318251
caaccugagugcucaaaga

SEQ ID NO: 548366 - RNA, 19 nt, Artificial Sequence
  Description of Artificial Sequence: Synthetic oligonucleotide
  Antisense strand to SEQ ID NO: 548365
ucuuugagcacucagguug

SEQ ID NO: 548367 - RNA, 19 nt, Artificial Sequence
  Description of Artificial Sequence: Synthetic oligonucleotide
  Sense strand starting at position 3178 of SEQ ID NO: 318251
uggagaaguccgugaccag

SEQ ID NO: 548368 - RNA, 19 nt, Artificial Sequence
  Description of Artificial Sequence: Synthetic oligonucleotide
  Antisense strand to SEQ ID NO: 548367
cuggucacggacuucucca

SEQ ID NO: 548369 - RNA, 19 nt, Artificial Sequence
  Description of Artificial Sequence: Synthetic oligonucleotide
  Sense strand starting at position 3179 of SEQ ID NO: 318251
ggagaaguccgugaccaga

SEQ ID NO: 548370 - RNA, 19 nt, Artificial Sequence
  Description of Artificial Sequence: Synthetic oligonucleotide
  Antisense strand to SEQ ID NO: 548369
ucuggucacggacuucucc

SEQ ID NO: 548371 - RNA, 19 nt, Artificial Sequence
  Description of Artificial Sequence: Synthetic oligonucleotide
  Sense strand starting at position 3265 of SEQ ID NO: 318251
gcagccaagucauuugcaa

SEQ ID NO: 548372 - RNA, 19 nt, Artificial Sequence
  Description of Artificial Sequence: Synthetic oligonucleotide
  Antisense strand to SEQ ID NO: 548371
uugcaaaugacuuggcugc

SEQ ID NO: 548373 - RNA, 19 nt, Artificial Sequence
  Description of Artificial Sequence: Synthetic oligonucleotide
  Sense strand starting at position 3306 of SEQ ID NO: 318251
ggagaauucugacaauuaa

SEQ ID NO: 548374 - RNA, 19 nt, Artificial Sequence
  Description of Artificial Sequence: Synthetic oligonucleotide
  Antisense strand to SEQ ID NO: 548373
uuaauugucagaauucucc

SEQ ID NO: 548375 - RNA, 19 nt, Artificial Sequence
  Description of Artificial Sequence: Synthetic oligonucleotide
  Sense strand starting at position 3420 of SEQ ID NO: 318251
gcccucuuucggcagaaac

SEQ ID NO: 548376 - RNA, 19 nt, Artificial Sequence
  Description of Artificial Sequence: Synthetic oligonucleotide
  Antisense strand to SEQ ID NO: 548375
guuucugccgaaagagggc

SEQ ID NO: 548377 - RNA, 19 nt, Artificial Sequence
  Description of Artificial Sequence: Synthetic oligonucleotide
  Sense strand starting at position 3422 of SEQ ID NO: 318251
ccucuuucggcagaaacuu

SEQ ID NO: 548378 - RNA, 19 nt, Artificial Sequence
  Description of Artificial Sequence: Synthetic oligonucleotide
  Antisense strand to SEQ ID NO: 548377
aaguuucugccgaaagagg

SEQ ID NO: 548379 - RNA, 19 nt, Artificial Sequence
  Description of Artificial Sequence: Synthetic oligonucleotide
  Sense strand starting at position 3619 of SEQ ID NO: 318251
uggaaccgucaaugugauu

SEQ ID NO: 548380 - RNA, 19 nt, Artificial Sequence
  Description of Artificial Sequence: Synthetic oligonucleotide
  Antisense strand to SEQ ID NO: 548379
aaucacauugacgguucca

SEQ ID NO: 548381 - RNA, 19 nt, Artificial Sequence
  Description of Artificial Sequence: Synthetic oligonucleotide
  Sense strand starting at position 3625 of SEQ ID NO: 318251
cgucaaugugauuaugggu

SEQ ID NO: 548382 - RNA, 19 nt, Artificial Sequence
  Description of Artificial Sequence: Synthetic oligonucleotide
  Antisense strand to SEQ ID NO: 548381
acccauaaucacauugacg

SEQ ID NO: 548383 - RNA, 19 nt, Artificial Sequence
  Description of Artificial Sequence: Synthetic oligonucleotide
  Sense strand starting at position 3630 of SEQ ID NO: 318251
augugauuauggguaaugu

SEQ ID NO: 548384 - RNA, 19 nt, Artificial Sequence
  Description of Artificial Sequence: Synthetic oligonucleotide
  Antisense strand to SEQ ID NO: 548383
acauuacccauaaucacau

SEQ ID NO: 548385 - RNA, 19 nt, Artificial Sequence
  Description of Artificial Sequence: Synthetic oligonucleotide
  Sense strand starting at position 3631 of SEQ ID NO: 318251
ugugauuauggguaauguu

SEQ ID NO: 548386 - RNA, 19 nt, Artificial Sequence
  Description of Artificial Sequence: Synthetic oligonucleotide
  Antisense strand to SEQ ID NO: 548385
aacauuacccauaaucaca

SEQ ID NO: 548387 - RNA, 19 nt, Artificial Sequence
  Description of Artificial Sequence: Synthetic oligonucleotide
  Sense strand starting at position 3653 of SEQ ID NO: 318251
gcuucugggucauuuauau

SEQ ID NO: 548388 - RNA, 19 nt, Artificial Sequence
  Description of Artificial Sequence: Synthetic oligonucleotide
  Antisense strand to SEQ ID NO: 548387
auauaaaugacccagaagc

SEQ ID NO: 548389 - RNA, 19 nt, Artificial Sequence
  Description of Artificial Sequence: Synthetic oligonucleotide
  Sense strand starting at position 3673 of SEQ ID NO: 318251
cagauuaugcacugugauc

SEQ ID NO: 548390 - RNA, 19 nt, Artificial Sequence
  Description of Artificial Sequence: Synthetic oligonucleotide
  Antisense strand to SEQ ID NO: 548389
gaucacagugcauaaucug

SEQ ID NO: 548391 - RNA, 19 nt, Artificial Sequence
  Description of Artificial Sequence: Synthetic oligonucleotide
  Sense strand starting at position 3682 of SEQ ID NO: 318251
cacugugaucccgaaaucu

SEQ ID NO: 548392 - RNA, 19 nt, Artificial Sequence
  Description of Artificial Sequence: Synthetic oligonucleotide
  Antisense strand to SEQ ID NO: 548391
agauuucgggaucacagug

SEQ ID NO: 548393 - RNA, 19 nt, Artificial Sequence
  Description of Artificial Sequence: Synthetic oligonucleotide
  Sense strand starting at position 3719 of SEQ ID NO: 318251
uucuaauuccugcgagaau

SEQ ID NO: 548394 - RNA, 19 nt, Artificial Sequence
  Description of Artificial Sequence: Synthetic oligonucleotide
  Antisense strand to SEQ ID NO: 548393
auucucgcaggaauuagaa

SEQ ID NO: 548395 - RNA, 19 nt, Artificial Sequence
  Description of Artificial Sequence: Synthetic oligonucleotide
  Sense strand starting at position 3839 of SEQ ID NO: 318251
uuuagugcuccacagcaau

SEQ ID NO: 548396 - RNA, 19 nt, Artificial Sequence
  Description of Artificial Sequence: Synthetic oligonucleotide
  Antisense strand to SEQ ID NO: 548395
auugcuguggagcacuaaa

SEQ ID NO: 548397 - RNA, 19 nt, Artificial Sequence
  Description of Artificial Sequence: Synthetic oligonucleotide
  Sense strand starting at position 3842 of SEQ ID NO: 318251
agugcuccacagcaauuaa

SEQ ID NO: 548398 - RNA, 19 nt, Artificial Sequence
  Description of Artificial Sequence: Synthetic oligonucleotide
  Antisense strand to SEQ ID NO: 548397
uuaauugcuguggagcacu

SEQ ID NO: 548399 - RNA, 19 nt, Artificial Sequence
  Description of Artificial Sequence: Synthetic oligonucleotide
  Sense strand starting at position 3889 of SEQ ID NO: 318251
cguuuauggcagcacagau

SEQ ID NO: 548400 - RNA, 19 nt, Artificial Sequence
  Description of Artificial Sequence: Synthetic oligonucleotide
  Antisense strand to SEQ ID NO: 548399
aucugugcugccauaaacg

SEQ ID NO: 548401 - RNA, 19 nt, Artificial Sequence
  Description of Artificial Sequence: Synthetic oligonucleotide
  Sense strand starting at position 3956 of SEQ ID NO: 318251
caugaauuccaagggucuu

SEQ ID NO: 548402 - RNA, 19 nt, Artificial Sequence
  Description of Artificial Sequence: Synthetic oligonucleotide
  Antisense strand to SEQ ID NO: 548401
aagacccuuggaauucaug

SEQ ID NO: 548403 - RNA, 19 nt, Artificial Sequence
  Description of Artificial Sequence: Synthetic oligonucleotide
  Sense strand starting at position 3972 of SEQ ID NO: 318251
cuuaauggauuucgaaacu

SEQ ID NO: 548404 - RNA, 19 nt, Artificial Sequence
  Description of Artificial Sequence: Synthetic oligonucleotide
  Antisense strand to SEQ ID NO: 548403
aguuucgaaauccauuaag

SEQ ID NO: 548405 - RNA, 19 nt, Artificial Sequence
  Description of Artificial Sequence: Synthetic oligonucleotide
  Sense strand starting at position 1289 of SEQ ID NO: 318252
ccucgcauuugaucucauu

SEQ ID NO: 548406 - RNA, 19 nt, Artificial Sequence
  Description of Artificial Sequence: Synthetic oligonucleotide
  Antisense strand to SEQ ID NO: 548405
aaugagaucaaaugcgagg

SEQ ID NO: 548407 - RNA, 19 nt, Artificial Sequence
  Description of Artificial Sequence: Synthetic oligonucleotide
  Sense strand starting at position 1326 of SEQ ID NO: 318252
gauccauagcccgcguuua

SEQ ID NO: 548408 - RNA, 19 nt, Artificial Sequence
  Description of Artificial Sequence: Synthetic oligonucleotide
  Antisense strand to SEQ ID NO: 548407
uaaacgcgggcuauggauc

SEQ ID NO: 548409 - RNA, 19 nt, Artificial Sequence
  Description of Artificial Sequence: Synthetic oligonucleotide
  Sense strand starting at position 1328 of SEQ ID NO: 318252
uccauagcccgcguuuaaa

SEQ ID NO: 548410 - RNA, 19 nt, Artificial Sequence
  Description of Artificial Sequence: Synthetic oligonucleotide
  Antisense strand to SEQ ID NO: 548409
uuuaaacgcgggcuaugga

SEQ ID NO: 548411 - RNA, 19 nt, Artificial Sequence
  Description of Artificial Sequence: Synthetic oligonucleotide
  Sense strand starting at position 1455 of SEQ ID NO: 318252
gggagucucucauuaacau

SEQ ID NO: 548412 - RNA, 19 nt, Artificial Sequence
  Description of Artificial Sequence: Synthetic oligonucleotide
  Antisense strand to SEQ ID NO: 548411
auguuaaugagagacuccc

SEQ ID NO: 548413 - RNA, 19 nt, Artificial Sequence
  Description of Artificial Sequence: Synthetic oligonucleotide
  Sense strand starting at position 1456 of SEQ ID NO: 318252
ggagucucucauuaacauu

SEQ ID NO: 548414 - RNA, 19 nt, Artificial Sequence
  Description of Artificial Sequence: Synthetic oligonucleotide
  Antisense strand to SEQ ID NO: 548413
aauguuaaugagagacucc

SEQ ID NO: 548415 - RNA, 19 nt, Artificial Sequence
  Description of Artificial Sequence: Synthetic oligonucleotide
  Sense strand starting at position 1673 of SEQ ID NO: 318252
aaggaaacgugcuuuaaag

SEQ ID NO: 548416 - RNA, 19 nt, Artificial Sequence
  Description of Artificial Sequence: Synthetic oligonucleotide
  Antisense strand to SEQ ID NO: 548415
cuuuaaagcacguuuccuu

SEQ ID NO: 548417 - RNA, 19 nt, Artificial Sequence
  Description of Artificial Sequence: Synthetic oligonucleotide
  Sense strand starting at position 1675 of SEQ ID NO: 318252
ggaaacgugcuuuaaagua

SEQ ID NO: 548418 - RNA, 19 nt, Artificial Sequence
  Description of Artificial Sequence: Synthetic oligonucleotide
  Antisense strand to SEQ ID NO: 548417
uacuuuaaagcacguuucc

SEQ ID NO: 548419 - RNA, 19 nt, Artificial Sequence
  Description of Artificial Sequence: Synthetic oligonucleotide
  Sense strand starting at position 1680 of SEQ ID NO: 318252
cgugcuuuaaaguagagaa

SEQ ID NO: 548420 - RNA, 19 nt, Artificial Sequence
  Description of Artificial Sequence: Synthetic oligonucleotide
  Antisense strand to SEQ ID NO: 548419
uucucuacuuuaaagcacg

SEQ ID NO: 548421 - RNA, 19 nt, Artificial Sequence
  Description of Artificial Sequence: Synthetic oligonucleotide
  Sense strand starting at position 1800 of SEQ ID NO: 318252
gguucuagaaauugugguu

SEQ ID NO: 548422 - RNA, 19 nt, Artificial Sequence
  Description of Artificial Sequence: Synthetic oligonucleotide
  Antisense strand to SEQ ID NO: 548421
aaccacaauuucuagaacc

SEQ ID NO: 548423 - RNA, 19 nt, Artificial Sequence
  Description of Artificial Sequence: Synthetic oligonucleotide
  Sense strand starting at position 2148 of SEQ ID NO: 318252
ugaaacuuguugcucccaa

SEQ ID NO: 548424 - RNA, 19 nt, Artificial Sequence
  Description of Artificial Sequence: Synthetic oligonucleotide
  Antisense strand to SEQ ID NO: 548423
uugggagcaacaaguuuca

SEQ ID NO: 548425 - RNA, 19 nt, Artificial Sequence
  Description of Artificial Sequence: Synthetic oligonucleotide
  Sense strand starting at position 2182 of SEQ ID NO: 318252
ucaacuucuggagguguca

SEQ ID NO: 548426 - RNA, 19 nt, Artificial Sequence
  Description of Artificial Sequence: Synthetic oligonucleotide
  Antisense strand to SEQ ID NO: 548425
ugacaccuccagaaguuga

SEQ ID NO: 548427 - RNA, 19 nt, Artificial Sequence
  Description of Artificial Sequence: Synthetic oligonucleotide
  Sense strand starting at position 2261 of SEQ ID NO: 318252
aaauaaagggacugucuuu

SEQ ID NO: 548428 - RNA, 19 nt, Artificial Sequence
  Description of Artificial Sequence: Synthetic oligonucleotide
  Antisense strand to SEQ ID NO: 548427
aaagacagucccuuuauuu

SEQ ID NO: 548429 - RNA, 19 nt, Artificial Sequence
  Description of Artificial Sequence: Synthetic oligonucleotide
  Sense strand starting at position 2266 of SEQ ID NO: 318252
aagggacugucuuucccaa

SEQ ID NO: 548430 - RNA, 19 nt, Artificial Sequence
  Description of Artificial Sequence: Synthetic oligonucleotide
  Antisense strand to SEQ ID NO: 548429
uugggaaagacagucccuu

SEQ ID NO: 548431 - RNA, 19 nt, Artificial Sequence
  Description of Artificial Sequence: Synthetic oligonucleotide
  Sense strand starting at position 2328 of SEQ ID NO: 318252
caaccugagugcucaaaga

SEQ ID NO: 548432 - RNA, 19 nt, Artificial Sequence
  Description of Artificial Sequence: Synthetic oligonucleotide
  Antisense strand to SEQ ID NO: 548431
ucuuugagcacucagguug

SEQ ID NO: 548433 - RNA, 19 nt, Artificial Sequence
  Description of Artificial Sequence: Synthetic oligonucleotide
  Sense strand starting at position 2483 of SEQ ID NO: 318252
uggagaaguccgugaccag

SEQ ID NO: 548434 - RNA, 19 nt, Artificial Sequence
  Description of Artificial Sequence: Synthetic oligonucleotide
  Antisense strand to SEQ ID NO: 548433
cuggucacggacuucucca

SEQ ID NO: 548435 - RNA, 19 nt, Artificial Sequence
  Description of Artificial Sequence: Synthetic oligonucleotide
  Sense strand starting at position 2484 of SEQ ID NO: 318252
ggagaaguccgugaccaga

SEQ ID NO: 548436 - RNA, 19 nt, Artificial Sequence
  Description of Artificial Sequence: Synthetic oligonucleotide
  Antisense strand to SEQ ID NO: 548435
ucuggucacggacuucucc

SEQ ID NO: 548437 - RNA, 19 nt, Artificial Sequence
  Description of Artificial Sequence: Synthetic oligonucleotide
  Sense strand starting at position 2570 of SEQ ID NO: 318252
gcagccaagucauuugcaa

SEQ ID NO: 548438 - RNA, 19 nt, Artificial Sequence
  Description of Artificial Sequence: Synthetic oligonucleotide
  Antisense strand to SEQ ID NO: 548437
uugcaaaugacuuggcugc

SEQ ID NO: 548439 - RNA, 19 nt, Artificial Sequence
  Description of Artificial Sequence: Synthetic oligonucleotide
  Sense strand starting at position 2611 of SEQ ID NO: 318252
ggagaauucugacaauuaa

SEQ ID NO: 548440 - RNA, 19 nt, Artificial Sequence
  Description of Artificial Sequence: Synthetic oligonucleotide
  Antisense strand to SEQ ID NO: 548439
uuaauugucagaauucucc

SEQ ID NO: 548441 - RNA, 19 nt, Artificial Sequence
  Description of Artificial Sequence: Synthetic oligonucleotide
  Sense strand starting at position 2725 of SEQ ID NO: 318252
gcccucuuucggcagaaac

SEQ ID NO: 548442 - RNA, 19 nt, Artificial Sequence
  Description of Artificial Sequence: Synthetic oligonucleotide
  Antisense strand to SEQ ID NO: 548441
guuucugccgaaagagggc

SEQ ID NO: 548443 - RNA, 19 nt, Artificial Sequence
  Description of Artificial Sequence: Synthetic oligonucleotide
  Sense strand starting at position 2727 of SEQ ID NO: 318252
ccucuuucggcagaaacuu

SEQ ID NO: 548444 - RNA, 19 nt, Artificial Sequence
  Description of Artificial Sequence: Synthetic oligonucleotide
  Antisense strand to SEQ ID NO: 548443
aaguuucugccgaaagagg

SEQ ID NO: 548445 - RNA, 19 nt, Artificial Sequence
  Description of Artificial Sequence: Synthetic oligonucleotide
  Sense strand starting at position 2924 of SEQ ID NO: 318252
uggaaccgucaaugugauu

SEQ ID NO: 548446 - RNA, 19 nt, Artificial Sequence
  Description of Artificial Sequence: Synthetic oligonucleotide
  Antisense strand to SEQ ID NO: 548445
aaucacauugacgguucca

SEQ ID NO: 548447 - RNA, 19 nt, Artificial Sequence
  Description of Artificial Sequence: Synthetic oligonucleotide
  Sense strand starting at position 2930 of SEQ ID NO: 318252
cgucaaugugauuaugggu

SEQ ID NO: 548448 - RNA, 19 nt, Artificial Sequence
  Description of Artificial Sequence: Synthetic oligonucleotide
  Antisense strand to SEQ ID NO: 548447
acccauaaucacauugacg

SEQ ID NO: 548449 - RNA, 19 nt, Artificial Sequence
  Description of Artificial Sequence: Synthetic oligonucleotide
  Sense strand starting at position 2935 of SEQ ID NO: 318252
augugauuauggguaaugu

SEQ ID NO: 548450 - RNA, 19 nt, Artificial Sequence
  Description of Artificial Sequence: Synthetic oligonucleotide
  Antisense strand to SEQ ID NO: 548449
acauuacccauaaucacau

SEQ ID NO: 548451 - RNA, 19 nt, Artificial Sequence
  Description of Artificial Sequence: Synthetic oligonucleotide
  Sense strand starting at position 2936 of SEQ ID NO: 318252
ugugauuauggguaauguu

SEQ ID NO: 548452 - RNA, 19 nt, Artificial Sequence
  Description of Artificial Sequence: Synthetic oligonucleotide
  Antisense strand to SEQ ID NO: 548451
aacauuacccauaaucaca

SEQ ID NO: 548453 - RNA, 19 nt, Artificial Sequence
  Description of Artificial Sequence: Synthetic oligonucleotide
  Sense strand starting at position 2958 of SEQ ID NO: 318252
gcuucugggucauuuauau

SEQ ID NO: 548454 - RNA, 19 nt, Artificial Sequence
  Description of Artificial Sequence: Synthetic oligonucleotide
  Antisense strand to SEQ ID NO: 548453
auauaaaugacccagaagc

SEQ ID NO: 548455 - RNA, 19 nt, Artificial Sequence
  Description of Artificial Sequence: Synthetic oligonucleotide
  Sense strand starting at position 2978 of SEQ ID NO: 318252
cagauuaugcacugugauc

SEQ ID NO: 548456 - RNA, 19 nt, Artificial Sequence
  Description of Artificial Sequence: Synthetic oligonucleotide
  Antisense strand to SEQ ID NO: 548455
gaucacagugcauaaucug

SEQ ID NO: 548457 - RNA, 19 nt, Artificial Sequence
  Description of Artificial Sequence: Synthetic oligonucleotide
  Sense strand starting at position 2987 of SEQ ID NO: 318252
cacugugaucccgaaaucu

SEQ ID NO: 548458 - RNA, 19 nt, Artificial Sequence
  Description of Artificial Sequence: Synthetic oligonucleotide
  Antisense strand to SEQ ID NO: 548457
agauuucgggaucacagug

SEQ ID NO: 548459 - RNA, 19 nt, Artificial Sequence
  Description of Artificial Sequence: Synthetic oligonucleotide
  Sense strand starting at position 3024 of SEQ ID NO: 318252
uucuaauuccugcgagaau

SEQ ID NO: 548460 - RNA, 19 nt, Artificial Sequence
  Description of Artificial Sequence: Synthetic oligonucleotide
  Antisense strand to SEQ ID NO: 548459
auucucgcaggaauuagaa

SEQ ID NO: 548461 - RNA, 19 nt, Artificial Sequence
  Description of Artificial Sequence: Synthetic oligonucleotide
  Sense strand starting at position 3144 of SEQ ID NO: 318252
uuuagugcuccacagcaau

SEQ ID NO: 548462 - RNA, 19 nt, Artificial Sequence
  Description of Artificial Sequence: Synthetic oligonucleotide
  Antisense strand to SEQ ID NO: 548461
auugcuguggagcacuaaa

SEQ ID NO: 548463 - RNA, 19 nt, Artificial Sequence
  Description of Artificial Sequence: Synthetic oligonucleotide
  Sense strand starting at position 3147 of SEQ ID NO: 318252
agugcuccacagcaauuaa

SEQ ID NO: 548464 - RNA, 19 nt, Artificial Sequence
  Description of Artificial Sequence: Synthetic oligonucleotide
  Antisense strand to SEQ ID NO: 548463
uuaauugcuguggagcacu

SEQ ID NO: 548465 - RNA, 19 nt, Artificial Sequence
  Description of Artificial Sequence: Synthetic oligonucleotide
  Sense strand starting at position 3194 of SEQ ID NO: 318252
cguuuauggcagcacagau

SEQ ID NO: 548466 - RNA, 19 nt, Artificial Sequence
  Description of Artificial Sequence: Synthetic oligonucleotide
  Antisense strand to SEQ ID NO: 548465
aucugugcugccauaaacg

SEQ ID NO: 548467 - RNA, 19 nt, Artificial Sequence
  Description of Artificial Sequence: Synthetic oligonucleotide
  Sense strand starting at position 3261 of SEQ ID NO: 318252
caugaauuccaagggucuu

SEQ ID NO: 548468 - RNA, 19 nt, Artificial Sequence
  Description of Artificial Sequence: Synthetic oligonucleotide
  Antisense strand to SEQ ID NO: 548467
aagacccuuggaauucaug

SEQ ID NO: 548469 - RNA, 19 nt, Artificial Sequence
  Description of Artificial Sequence: Synthetic oligonucleotide
  Sense strand starting at position 3277 of SEQ ID NO: 318252
cuuaauggauuucgaaacu

SEQ ID NO: 548470 - RNA, 19 nt, Artificial Sequence
  Description of Artificial Sequence: Synthetic oligonucleotide
  Antisense strand to SEQ ID NO: 548469
aguuucgaaauccauuaag

SEQ ID NO: 548471 - RNA, 19 nt, Artificial Sequence
  Description of Artificial Sequence: Synthetic oligonucleotide
  Sense strand starting at position 3433 of SEQ ID NO: 318252
agccaauggcgauaugauu

SEQ ID NO: 548472 - RNA, 19 nt, Artificial Sequence
  Description of Artificial Sequence: Synthetic oligonucleotide
  Antisense strand to SEQ ID NO: 548471
aaucauaucgccauuggcu

SEQ ID NO: 548473 - RNA, 19 nt, Artificial Sequence
  Description of Artificial Sequence: Synthetic oligonucleotide
  Sense strand starting at position 3468 of SEQ ID NO: 318252
ggguuuaugcggagagucu

SEQ ID NO: 548474 - RNA, 19 nt, Artificial Sequence
  Description of Artificial Sequence: Synthetic oligonucleotide
  Antisense strand to SEQ ID NO: 548473
agacucuccgcauaaaccc

SEQ ID NO: 548475 - RNA, 19 nt, Artificial Sequence
  Description of Artificial Sequence: Synthetic oligonucleotide
  Sense strand starting at position 3505 of SEQ ID NO: 318252
gugugaacgccugucccau

SEQ ID NO: 548476 - RNA, 19 nt, Artificial Sequence
  Description of Artificial Sequence: Synthetic oligonucleotide
  Antisense strand to SEQ ID NO: 548475
augggacaggcguucacac

SEQ ID NO: 548477 - RNA, 19 nt, Artificial Sequence
  Description of Artificial Sequence: Synthetic oligonucleotide
  Sense strand starting at position 3561 of SEQ ID NO: 318252
agggcagugcgcuuaagua

SEQ ID NO: 548478 - RNA, 19 nt, Artificial Sequence
  Description of Artificial Sequence: Synthetic oligonucleotide
  Antisense strand to SEQ ID NO: 548477
uacuuaagcgcacugcccu

SEQ ID NO: 548479 - RNA, 19 nt, Artificial Sequence
  Description of Artificial Sequence: Synthetic oligonucleotide
  Sense strand starting at position 3880 of SEQ ID NO: 318252
ggguuuguuuacuuuccau

SEQ ID NO: 548480 - RNA, 19 nt, Artificial Sequence
  Description of Artificial Sequence: Synthetic oligonucleotide
  Antisense strand to SEQ ID NO: 548479
auggaaaguaaacaaaccc

SEQ ID NO: 548481 - RNA, 19 nt, Artificial Sequence
  Description of Artificial Sequence: Synthetic oligonucleotide
  Sense strand starting at position 3920 of SEQ ID NO: 318252
aacugaaaguuuguguaaa

SEQ ID NO: 548482 - RNA, 19 nt, Artificial Sequence
  Description of Artificial Sequence: Synthetic oligonucleotide
  Antisense strand to SEQ ID NO: 548481
uuuacacaaacuuucaguu

SEQ ID NO: 548483 - RNA, 19 nt, Artificial Sequence
  Description of Artificial Sequence: Synthetic oligonucleotide
  Sense strand starting at position 3922 of SEQ ID NO: 318252
cugaaaguuuguguaaaua

SEQ ID NO: 548484 - RNA, 19 nt, Artificial Sequence
  Description of Artificial Sequence: Synthetic oligonucleotide
  Antisense strand to SEQ ID NO: 548483
uauuuacacaaacuuucag

SEQ ID NO: 548485 - RNA, 19 nt, Artificial Sequence
  Description of Artificial Sequence: Synthetic oligonucleotide
  Sense strand starting at position 2081 of SEQ ID NO: 318253
gcguuuaaacgggaggacu

SEQ ID NO: 548486 - RNA, 19 nt, Artificial Sequence
  Description of Artificial Sequence: Synthetic oligonucleotide
  Antisense strand to SEQ ID NO: 548485
aguccucccguuuaaacgc

SEQ ID NO: 548487 - RNA, 19 nt, Artificial Sequence
  Description of Artificial Sequence: Synthetic oligonucleotide
  Sense strand starting at position 2092 of SEQ ID NO: 318253
ggaggacucgcagagcaau

SEQ ID NO: 548488 - RNA, 19 nt, Artificial Sequence
  Description of Artificial Sequence: Synthetic oligonucleotide
  Antisense strand to SEQ ID NO: 548487
auugcucugcgaguccucc

SEQ ID NO: 548489 - RNA, 19 nt, Artificial Sequence
  Description of Artificial Sequence: Synthetic oligonucleotide
  Sense strand starting at position 2103 of SEQ ID NO: 318253
agagcaauguuuccgaaag

SEQ ID NO: 548490 - RNA, 19 nt, Artificial Sequence
  Description of Artificial Sequence: Synthetic oligonucleotide
  Antisense strand to SEQ ID NO: 548489
cuuucggaaacauugcucu

SEQ ID NO: 548491 - RNA, 19 nt, Artificial Sequence
  Description of Artificial Sequence: Synthetic oligonucleotide
  Sense strand starting at position 2104 of SEQ ID NO: 318253
gagcaauguuuccgaaagg

SEQ ID NO: 548492 - RNA, 19 nt, Artificial Sequence
  Description of Artificial Sequence: Synthetic oligonucleotide
  Antisense strand to SEQ ID NO: 548491
ccuuucggaaacauugcuc

SEQ ID NO: 548493 - RNA, 19 nt, Artificial Sequence
  Description of Artificial Sequence: Synthetic oligonucleotide
  Sense strand starting at position 2123 of SEQ ID NO: 318253
gggaucugcgcgaaugucu

SEQ ID NO: 548494 - RNA, 19 nt, Artificial Sequence
  Description of Artificial Sequence: Synthetic oligonucleotide
  Antisense strand to SEQ ID NO: 548493
agacauucgcgcagauccc

SEQ ID NO: 548495 - RNA, 19 nt, Artificial Sequence
  Description of Artificial Sequence: Synthetic oligonucleotide
  Sense strand starting at position 2128 of SEQ ID NO: 318253
cugcgcgaaugucuguaua

SEQ ID NO: 548496 - RNA, 19 nt, Artificial Sequence
  Description of Artificial Sequence: Synthetic oligonucleotide
  Antisense strand to SEQ ID NO: 548495
uauacagacauucgcgcag

SEQ ID NO: 548497 - RNA, 19 nt, Artificial Sequence
  Description of Artificial Sequence: Synthetic oligonucleotide
  Sense strand starting at position 2130 of SEQ ID NO: 318253
gcgcgaaugucuguauaua

SEQ ID NO: 548498 - RNA, 19 nt, Artificial Sequence
  Description of Artificial Sequence: Synthetic oligonucleotide
  Antisense strand to SEQ ID NO: 548497
uauauacagacauucgcgc

SEQ ID NO: 548499 - RNA, 19 nt, Artificial Sequence
  Description of Artificial Sequence: Synthetic oligonucleotide
  Sense strand starting at position 2131 of SEQ ID NO: 318253
cgcgaaugucuguauauag

SEQ ID NO: 548500 - RNA, 19 nt, Artificial Sequence
  Description of Artificial Sequence: Synthetic oligonucleotide
  Antisense strand to SEQ ID NO: 548499
cuauauacagacauucgcg

SEQ ID NO: 548501 - RNA, 19 nt, Artificial Sequence
  Description of Artificial Sequence: Synthetic oligonucleotide
  Sense strand starting at position 2148 of SEQ ID NO: 318253
agugaacuuugacacuacu

SEQ ID NO: 548502 - RNA, 19 nt, Artificial Sequence
  Description of Artificial Sequence: Synthetic oligonucleotide
  Antisense strand to SEQ ID NO: 548501
aguagugucaaaguucacu

SEQ ID NO: 548503 - RNA, 19 nt, Artificial Sequence
  Description of Artificial Sequence: Synthetic oligonucleotide
  Sense strand starting at position 2166 of SEQ ID NO: 318253
uauugaaacugacacguuu

SEQ ID NO: 548504 - RNA, 19 nt, Artificial Sequence
  Description of Artificial Sequence: Synthetic oligonucleotide
  Antisense strand to SEQ ID NO: 548503
aaacgugucaguuucaaua

SEQ ID NO: 548505 - RNA, 19 nt, Artificial Sequence
  Description of Artificial Sequence: Synthetic oligonucleotide
  Sense strand starting at position 2177 of SEQ ID NO: 318253
acacguuucuauggagauc

SEQ ID NO: 548506 - RNA, 19 nt, Artificial Sequence
  Description of Artificial Sequence: Synthetic oligonucleotide
  Antisense strand to SEQ ID NO: 548505
gaucuccauagaaacgugu

SEQ ID NO: 548507 - RNA, 19 nt, Artificial Sequence
  Description of Artificial Sequence: Synthetic oligonucleotide
  Sense strand starting at position 2186 of SEQ ID NO: 318253
uauggagaucgcugccuua

SEQ ID NO: 548508 - RNA, 19 nt, Artificial Sequence
  Description of Artificial Sequence: Synthetic oligonucleotide
  Antisense strand to SEQ ID NO: 548507
uaaggcagcgaucuccaua

SEQ ID NO: 548509 - RNA, 19 nt, Artificial Sequence
  Description of Artificial Sequence: Synthetic oligonucleotide
  Sense strand starting at position 2189 of SEQ ID NO: 318253
ggagaucgcugccuuauau

SEQ ID NO: 548510 - RNA, 19 nt, Artificial Sequence
  Description of Artificial Sequence: Synthetic oligonucleotide
  Antisense strand to SEQ ID NO: 548509
auauaaggcagcgaucucc

SEQ ID NO: 548511 - RNA, 19 nt, Artificial Sequence
  Description of Artificial Sequence: Synthetic oligonucleotide
  Sense strand starting at position 2240 of SEQ ID NO: 318253
gcuggcaacugauaaucaa

SEQ ID NO: 548512 - RNA, 19 nt, Artificial Sequence
  Description of Artificial Sequence: Synthetic oligonucleotide
  Antisense strand to SEQ ID NO: 548511
uugauuaucaguugccagc

SEQ ID NO: 548513 - RNA, 19 nt, Artificial Sequence
  Description of Artificial Sequence: Synthetic oligonucleotide
  Sense strand starting at position 2453 of SEQ ID NO: 318253
guuucugacaagcgcaauu

SEQ ID NO: 548514 - RNA, 19 nt, Artificial Sequence
  Description of Artificial Sequence: Synthetic oligonucleotide
  Antisense strand to SEQ ID NO: 548513
aauugcgcuugucagaaac

SEQ ID NO: 548515 - RNA, 19 nt, Artificial Sequence
  Description of Artificial Sequence: Synthetic oligonucleotide
  Sense strand starting at position 2491 of SEQ ID NO: 318253
gcugcuauuuacucugaga

SEQ ID NO: 548516 - RNA, 19 nt, Artificial Sequence
  Description of Artificial Sequence: Synthetic oligonucleotide
  Antisense strand to SEQ ID NO: 548515
ucucagaguaaauagcagc

SEQ ID NO: 548517 - RNA, 19 nt, Artificial Sequence
  Description of Artificial Sequence: Synthetic oligonucleotide
  Sense strand starting at position 2494 of SEQ ID NO: 318253
gcuauuuacucugagaccu

SEQ ID NO: 548518 - RNA, 19 nt, Artificial Sequence
  Description of Artificial Sequence: Synthetic oligonucleotide
  Antisense strand to SEQ ID NO: 548517
aggucucagaguaaauagc

SEQ ID NO: 548519 - RNA, 19 nt, Artificial Sequence
  Description of Artificial Sequence: Synthetic oligonucleotide
  Sense strand starting at position 2514 of SEQ ID NO: 318253
auuaguaugggucgucuau

SEQ ID NO: 548520 - RNA, 19 nt, Artificial Sequence
  Description of Artificial Sequence: Synthetic oligonucleotide
  Antisense strand to SEQ ID NO: 548519
auagacgacccauacuaau

SEQ ID NO: 548521 - RNA, 19 nt, Artificial Sequence
  Description of Artificial Sequence: Synthetic oligonucleotide
  Sense strand starting at position 2523 of SEQ ID NO: 318253
ggucgucuauggucacaca

SEQ ID NO: 548522 - RNA, 19 nt, Artificial Sequence
  Description of Artificial Sequence: Synthetic oligonucleotide
  Antisense strand to SEQ ID NO: 548521
ugugugaccauagacgacc

SEQ ID NO: 548523 - RNA, 19 nt, Artificial Sequence
  Description of Artificial Sequence: Synthetic oligonucleotide
  Sense strand starting at position 2692 of SEQ ID NO: 318253
gcgugaagagagugucauu

SEQ ID NO: 548524 - RNA, 19 nt, Artificial Sequence
  Description of Artificial Sequence: Synthetic oligonucleotide
  Antisense strand to SEQ ID NO: 548523
aaugacacucucuucacgc

SEQ ID NO: 548525 - RNA, 19 nt, Artificial Sequence
  Description of Artificial Sequence: Synthetic oligonucleotide
  Sense strand starting at position 2695 of SEQ ID NO: 318253
ugaagagagugucauugaa

SEQ ID NO: 548526 - RNA, 19 nt, Artificial Sequence
  Description of Artificial Sequence: Synthetic oligonucleotide
  Antisense strand to SEQ ID NO: 548525
uucaaugacacucucuuca

SEQ ID NO: 548527 - RNA, 19 nt, Artificial Sequence
  Description of Artificial Sequence: Synthetic oligonucleotide
  Sense strand starting at position 2766 of SEQ ID NO: 318253
ugugaaauauacuggauuu

SEQ ID NO: 548528 - RNA, 19 nt, Artificial Sequence
  Description of Artificial Sequence: Synthetic oligonucleotide
  Antisense strand to SEQ ID NO: 548527
aaauccaguauauuucaca

SEQ ID NO: 548529 - RNA, 19 nt, Artificial Sequence
  Description of Artificial Sequence: Synthetic oligonucleotide
  Sense strand starting at position 2869 of SEQ ID NO: 318253
aggguaggaucucccuauu

SEQ ID NO: 548530 - RNA, 19 nt, Artificial Sequence
  Description of Artificial Sequence: Synthetic oligonucleotide
  Antisense strand to SEQ ID NO: 548529
aauagggagauccuacccu

SEQ ID NO: 548531 - RNA, 19 nt, Artificial Sequence
  Description of Artificial Sequence: Synthetic oligonucleotide
  Sense strand starting at position 2919 of SEQ ID NO: 318253
guuuaaugaugacaaagca

SEQ ID NO: 548532 - RNA, 19 nt, Artificial Sequence
  Description of Artificial Sequence: Synthetic oligonucleotide
  Antisense strand to SEQ ID NO: 548531
ugcuuugucaucauuaaac

SEQ ID NO: 548533 - RNA, 19 nt, Artificial Sequence
  Description of Artificial Sequence: Synthetic oligonucleotide
  Sense strand starting at position 2951 of SEQ ID NO: 318253
ugcagcuauugccacaaau

SEQ ID NO: 548534 - RNA, 19 nt, Artificial Sequence
  Description of Artificial Sequence: Synthetic oligonucleotide
  Antisense strand to SEQ ID NO: 548533
auuuguggcaauagcugca

SEQ ID NO: 548535 - RNA, 19 nt, Artificial Sequence
  Description of Artificial Sequence: Synthetic oligonucleotide
  Sense strand starting at position 2963 of SEQ ID NO: 318253
cacaaauucgaucggaauc

SEQ ID NO: 548536 - RNA, 19 nt, Artificial Sequence
  Description of Artificial Sequence: Synthetic oligonucleotide
  Antisense strand to SEQ ID NO: 548535
gauuccgaucgaauuugug

SEQ ID NO: 548537 - RNA, 19 nt, Artificial Sequence
  Description of Artificial Sequence: Synthetic oligonucleotide
  Sense strand starting at position 2965 of SEQ ID NO: 318253
caaauucgaucggaaucaa

SEQ ID NO: 548538 - RNA, 19 nt, Artificial Sequence
  Description of Artificial Sequence: Synthetic oligonucleotide
  Antisense strand to SEQ ID NO: 548537
uugauuccgaucgaauuug

SEQ ID NO: 548539 - RNA, 19 nt, Artificial Sequence
  Description of Artificial Sequence: Synthetic oligonucleotide
  Sense strand starting at position 3151 of SEQ ID NO: 318253
gggagauuaguguggccaa

SEQ ID NO: 548540 - RNA, 19 nt, Artificial Sequence
  Description of Artificial Sequence: Synthetic oligonucleotide
  Antisense strand to SEQ ID NO: 548539
uuggccacacuaaucuccc

SEQ ID NO: 548541 - RNA, 19 nt, Artificial Sequence
  Description of Artificial Sequence: Synthetic oligonucleotide
  Sense strand starting at position 3152 of SEQ ID NO: 318253
ggagauuaguguggccaag

SEQ ID NO: 548542 - RNA, 19 nt, Artificial Sequence
  Description of Artificial Sequence: Synthetic oligonucleotide
  Antisense strand to SEQ ID NO: 548541
cuuggccacacuaaucucc

SEQ ID NO: 548543 - RNA, 19 nt, Artificial Sequence
  Description of Artificial Sequence: Synthetic oligonucleotide
  Sense strand starting at position 3166 of SEQ ID NO: 318253
ccaagucagucccgggaaa

SEQ ID NO: 548544 - RNA, 19 nt, Artificial Sequence
  Description of Artificial Sequence: Synthetic oligonucleotide
  Antisense strand to SEQ ID NO: 548543
uuucccgggacugacuugg

SEQ ID NO: 548545 - RNA, 19 nt, Artificial Sequence
  Description of Artificial Sequence: Synthetic oligonucleotide
  Sense strand starting at position 3297 of SEQ ID NO: 318253
aggagagcgcgcgagauau

SEQ ID NO: 548546 - RNA, 19 nt, Artificial Sequence
  Description of Artificial Sequence: Synthetic oligonucleotide
  Antisense strand to SEQ ID NO: 548545
auaucucgcgcgcucuccu

SEQ ID NO: 548547 - RNA, 19 nt, Artificial Sequence
  Description of Artificial Sequence: Synthetic oligonucleotide
  Sense strand starting at position 3304 of SEQ ID NO: 318253
cgcgcgagauauugagaga

SEQ ID NO: 548548 - RNA, 19 nt, Artificial Sequence
  Description of Artificial Sequence: Synthetic oligonucleotide
  Antisense strand to SEQ ID NO: 548547
ucucucaauaucucgcgcg

SEQ ID NO: 548549 - RNA, 19 nt, Artificial Sequence
  Description of Artificial Sequence: Synthetic oligonucleotide
  Sense strand starting at position 3681 of SEQ ID NO: 318253
auuccugaauccugaaggu

SEQ ID NO: 548550 - RNA, 19 nt, Artificial Sequence
  Description of Artificial Sequence: Synthetic oligonucleotide
  Antisense strand to SEQ ID NO: 548549
accuucaggauucaggaau

SEQ ID NO: 548551 - RNA, 19 nt, Artificial Sequence
  Description of Artificial Sequence: Synthetic oligonucleotide
  Sense strand starting at position 3685 of SEQ ID NO: 318253
cugaauccugaaggugauu

SEQ ID NO: 548552 - RNA, 19 nt, Artificial Sequence
  Description of Artificial Sequence: Synthetic oligonucleotide
  Antisense strand to SEQ ID NO: 548551
aaucaccuucaggauucag

SEQ ID NO: 548553 - RNA, 19 nt, Artificial Sequence
  Description of Artificial Sequence: Synthetic oligonucleotide
  Sense strand starting at position 3698 of SEQ ID NO: 318253
gugauuggucgcgggagga

SEQ ID NO: 548554 - RNA, 19 nt, Artificial Sequence
  Description of Artificial Sequence: Synthetic oligonucleotide
  Antisense strand to SEQ ID NO: 548553
uccucccgcgaccaaucac

SEQ ID NO: 548555 - RNA, 19 nt, Artificial Sequence
  Description of Artificial Sequence: Synthetic oligonucleotide
  Sense strand starting at position 3933 of SEQ ID NO: 318253
ugauacuucuauuaguuac

SEQ ID NO: 548556 - RNA, 19 nt, Artificial Sequence
  Description of Artificial Sequence: Synthetic oligonucleotide
  Antisense strand to SEQ ID NO: 548555
guaacuaauagaaguauca

SEQ ID NO: 548557 - RNA, 19 nt, Artificial Sequence
  Description of Artificial Sequence: Synthetic oligonucleotide
  Sense strand starting at position 130 of SEQ ID NO: 318254
guacaacuguauccaguaa

SEQ ID NO: 548558 - RNA, 19 nt, Artificial Sequence
  Description of Artificial Sequence: Synthetic oligonucleotide
  Antisense strand to SEQ ID NO: 548557
uuacuggauacaguuguac

SEQ ID NO: 548559 - RNA, 19 nt, Artificial Sequence
  Description of Artificial Sequence: Synthetic oligonucleotide
  Sense strand starting at position 210 of SEQ ID NO: 318254
gccuauucucaagagagua

SEQ ID NO: 548560 - RNA, 19 nt, Artificial Sequence
  Description of Artificial Sequence: Synthetic oligonucleotide
  Antisense strand to SEQ ID NO: 548559
uacucucuugagaauaggc

SEQ ID NO: 548561 - RNA, 19 nt, Artificial Sequence
  Description of Artificial Sequence: Synthetic oligonucleotide
  Sense strand starting at position 226 of SEQ ID NO: 318254
guaagacuguuaguauauc

SEQ ID NO: 548562 - RNA, 19 nt, Artificial Sequence
  Description of Artificial Sequence: Synthetic oligonucleotide
  Antisense strand to SEQ ID NO: 548561
gauauacuaacagucuuac

SEQ ID NO: 548563 - RNA, 19 nt, Artificial Sequence
  Description of Artificial Sequence: Synthetic oligonucleotide
  Sense strand starting at position 234 of SEQ ID NO: 318254
guuaguauaucguuaauca

SEQ ID NO: 548564 - RNA, 19 nt, Artificial Sequence
  Description of Artificial Sequence: Synthetic oligonucleotide
  Antisense strand to SEQ ID NO: 548563
ugauuaacgauauacuaac

SEQ ID NO: 548565 - RNA, 19 nt, Artificial Sequence
  Description of Artificial Sequence: Synthetic oligonucleotide
  Sense strand starting at position 235 of SEQ ID NO: 318254
uuaguauaucguuaaucag

SEQ ID NO: 548566 - RNA, 19 nt, Artificial Sequence
  Description of Artificial Sequence: Synthetic oligonucleotide
  Antisense strand to SEQ ID NO: 548565
cugauuaacgauauacuaa

SEQ ID NO: 548567 - RNA, 19 nt, Artificial Sequence
  Description of Artificial Sequence: Synthetic oligonucleotide
  Sense strand starting at position 242 of SEQ ID NO: 318254
aucguuaaucaggguguuu

SEQ ID NO: 548568 - RNA, 19 nt, Artificial Sequence
  Description of Artificial Sequence: Synthetic oligonucleotide
  Antisense strand to SEQ ID NO: 548567
aaacacccugauuaacgau

SEQ ID NO: 548569 - RNA, 19 nt, Artificial Sequence
  Description of Artificial Sequence: Synthetic oligonucleotide
  Sense strand starting at position 293 of SEQ ID NO: 318254
gggacacuauagucaaauc

SEQ ID NO: 548570 - RNA, 19 nt, Artificial Sequence
  Description of Artificial Sequence: Synthetic oligonucleotide
  Antisense strand to SEQ ID NO: 548569
gauuugacuauaguguccc

SEQ ID NO: 548571 - RNA, 19 nt, Artificial Sequence
  Description of Artificial Sequence: Synthetic oligonucleotide
  Sense strand starting at position 333 of SEQ ID NO: 318254
uuccuaugcgaugacguua

SEQ ID NO: 548572 - RNA, 19 nt, Artificial Sequence
  Description of Artificial Sequence: Synthetic oligonucleotide
  Antisense strand to SEQ ID NO: 548571
uaacgucaucgcauaggaa

SEQ ID NO: 548573 - RNA, 19 nt, Artificial Sequence
  Description of Artificial Sequence: Synthetic oligonucleotide
  Sense strand starting at position 345 of SEQ ID NO: 318254
gacguuaggcagcauaaau

SEQ ID NO: 548574 - RNA, 19 nt, Artificial Sequence
  Description of Artificial Sequence: Synthetic oligonucleotide
  Antisense strand to SEQ ID NO: 548573
auuuaugcugccuaacguc

SEQ ID NO: 548575 - RNA, 19 nt, Artificial Sequence
  Description of Artificial Sequence: Synthetic oligonucleotide
  Sense strand starting at position 412 of SEQ ID NO: 318254
uggacuugccacuacaaau

SEQ ID NO: 548576 - RNA, 19 nt, Artificial Sequence
  Description of Artificial Sequence: Synthetic oligonucleotide
  Antisense strand to SEQ ID NO: 548575
auuuguaguggcaagucca

SEQ ID NO: 548577 - RNA, 19 nt, Artificial Sequence
  Description of Artificial Sequence: Synthetic oligonucleotide
  Sense strand starting at position 470 of SEQ ID NO: 318254
guuuaucugaggcgauaac

SEQ ID NO: 548578 - RNA, 19 nt, Artificial Sequence
  Description of Artificial Sequence: Synthetic oligonucleotide
  Antisense strand to SEQ ID NO: 548577
guuaucgccucagauaaac

SEQ ID NO: 548579 - RNA, 19 nt, Artificial Sequence
  Description of Artificial Sequence: Synthetic oligonucleotide
  Sense strand starting at position 482 of SEQ ID NO: 318254
cgauaacgaucucuaaaca

SEQ ID NO: 548580 - RNA, 19 nt, Artificial Sequence
  Description of Artificial Sequence: Synthetic oligonucleotide
  Antisense strand to SEQ ID NO: 548579
uguuuagagaucguuaucg

SEQ ID NO: 548581 - RNA, 19 nt, Artificial Sequence
  Description of Artificial Sequence: Synthetic oligonucleotide
  Sense strand starting at position 498 of SEQ ID NO: 318254
acacgagguaucgaaugga

SEQ ID NO: 548582 - RNA, 19 nt, Artificial Sequence
  Description of Artificial Sequence: Synthetic oligonucleotide
  Antisense strand to SEQ ID NO: 548581
uccauucgauaccucgugu

SEQ ID NO: 548583 - RNA, 19 nt, Artificial Sequence
  Description of Artificial Sequence: Synthetic oligonucleotide
  Sense strand starting at position 658 of SEQ ID NO: 318254
ccuaaugaaccaugccaga

SEQ ID NO: 548584 - RNA, 19 nt, Artificial Sequence
  Description of Artificial Sequence: Synthetic oligonucleotide
  Antisense strand to SEQ ID NO: 548583
ucuggcaugguucauuagg

SEQ ID NO: 548585 - RNA, 19 nt, Artificial Sequence
  Description of Artificial Sequence: Synthetic oligonucleotide
  Sense strand starting at position 675 of SEQ ID NO: 318254
gagggucuuaagugguauu

SEQ ID NO: 548586 - RNA, 19 nt, Artificial Sequence
  Description of Artificial Sequence: Synthetic oligonucleotide
  Antisense strand to SEQ ID NO: 548585
aauaccacuuaagacccuc

SEQ ID NO: 548587 - RNA, 19 nt, Artificial Sequence
  Description of Artificial Sequence: Synthetic oligonucleotide
  Sense strand starting at position 676 of SEQ ID NO: 318254
agggucuuaagugguauua

SEQ ID NO: 548588 - RNA, 19 nt, Artificial Sequence
  Description of Artificial Sequence: Synthetic oligonucleotide
  Antisense strand to SEQ ID NO: 548587
uaauaccacuuaagacccu

SEQ ID NO: 548589 - RNA, 19 nt, Artificial Sequence
  Description of Artificial Sequence: Synthetic oligonucleotide
  Sense strand starting at position 686 of SEQ ID NO: 318254
gugguauuacaagguugca

SEQ ID NO: 548590 - RNA, 19 nt, Artificial Sequence
  Description of Artificial Sequence: Synthetic oligonucleotide
  Antisense strand to SEQ ID NO: 548589
ugcaaccuuguaauaccac

SEQ ID NO: 548591 - RNA, 19 nt, Artificial Sequence
  Description of Artificial Sequence: Synthetic oligonucleotide
  Sense strand starting at position 689 of SEQ ID NO: 318254
guauuacaagguugcaauu

SEQ ID NO: 548592 - RNA, 19 nt, Artificial Sequence
  Description of Artificial Sequence: Synthetic oligonucleotide
  Antisense strand to SEQ ID NO: 548591
aauugcaaccuuguaauac

SEQ ID NO: 548593 - RNA, 19 nt, Artificial Sequence
  Description of Artificial Sequence: Synthetic oligonucleotide
  Sense strand starting at position 808 of SEQ ID NO: 318254
aaaccucaggcgcgaauua

SEQ ID NO: 548594 - RNA, 19 nt, Artificial Sequence
  Description of Artificial Sequence: Synthetic oligonucleotide
  Antisense strand to SEQ ID NO: 548593
uaauucgcgccugagguuu

SEQ ID NO: 548595 - RNA, 19 nt, Artificial Sequence
  Description of Artificial Sequence: Synthetic oligonucleotide
  Sense strand starting at position 1102 of SEQ ID NO: 318254
caaauauucgggcgaguaa

SEQ ID NO: 548596 - RNA, 19 nt, Artificial Sequence
  Description of Artificial Sequence: Synthetic oligonucleotide
  Antisense strand to SEQ ID NO: 548595
uuacucgcccgaauauuug

SEQ ID NO: 548597 - RNA, 19 nt, Artificial Sequence
  Description of Artificial Sequence: Synthetic oligonucleotide
  Sense strand starting at position 1103 of SEQ ID NO: 318254
aaauauucgggcgaguaaa

SEQ ID NO: 548598 - RNA, 19 nt, Artificial Sequence
  Description of Artificial Sequence: Synthetic oligonucleotide
  Antisense strand to SEQ ID NO: 548597
uuuacucgcccgaauauuu

SEQ ID NO: 548599 - RNA, 19 nt, Artificial Sequence
  Description of Artificial Sequence: Synthetic oligonucleotide
  Sense strand starting at position 1209 of SEQ ID NO: 318254
ccaggauucccgcgaggaa

SEQ ID NO: 548600 - RNA, 19 nt, Artificial Sequence
  Description of Artificial Sequence: Synthetic oligonucleotide
  Antisense strand to SEQ ID NO: 548599
uuccucgcgggaauccugg

SEQ ID NO: 548601 - RNA, 19 nt, Artificial Sequence
  Description of Artificial Sequence: Synthetic oligonucleotide
  Sense strand starting at position 1210 of SEQ ID NO: 318254
caggauucccgcgaggaau

SEQ ID NO: 548602 - RNA, 19 nt, Artificial Sequence
  Description of Artificial Sequence: Synthetic oligonucleotide
  Antisense strand to SEQ ID NO: 548601
auuccucgcgggaauccug

SEQ ID NO: 548603 - RNA, 19 nt, Artificial Sequence
  Description of Artificial Sequence: Synthetic oligonucleotide
  Sense strand starting at position 1212 of SEQ ID NO: 318254
ggauucccgcgaggaauga

SEQ ID NO: 548604 - RNA, 19 nt, Artificial Sequence
  Description of Artificial Sequence: Synthetic oligonucleotide
  Antisense strand to SEQ ID NO: 548603
ucauuccucgcgggaaucc

SEQ ID NO: 548605 - RNA, 19 nt, Artificial Sequence
  Description of Artificial Sequence: Synthetic oligonucleotide
  Sense strand starting at position 1513 of SEQ ID NO: 318254
gcuucuuaccucuggcaga

SEQ ID NO: 548606 - RNA, 19 nt, Artificial Sequence
  Description of Artificial Sequence: Synthetic oligonucleotide
  Antisense strand to SEQ ID NO: 548605
ucugccagagguaagaagc

SEQ ID NO: 548607 - RNA, 19 nt, Artificial Sequence
  Description of Artificial Sequence: Synthetic oligonucleotide
  Sense strand starting at position 1586 of SEQ ID NO: 318254
uuagcuugugaacgcagaa

SEQ ID NO: 548608 - RNA, 19 nt, Artificial Sequence
  Description of Artificial Sequence: Synthetic oligonucleotide
  Antisense strand to SEQ ID NO: 548607
uucugcguucacaagcuaa

SEQ ID NO: 548609 - RNA, 19 nt, Artificial Sequence
  Description of Artificial Sequence: Synthetic oligonucleotide
  Sense strand starting at position 1692 of SEQ ID NO: 318254
uuaagaaagucucccauug

SEQ ID NO: 548610 - RNA, 19 nt, Artificial Sequence
  Description of Artificial Sequence: Synthetic oligonucleotide
  Antisense strand to SEQ ID NO: 548609
caaugggagacuuucuuaa

SEQ ID NO: 548611 - RNA, 19 nt, Artificial Sequence
  Description of Artificial Sequence: Synthetic oligonucleotide
  Sense strand starting at position 2327 of SEQ ID NO: 318254
caccgaguuucuccaguuu

SEQ ID NO: 548612 - RNA, 19 nt, Artificial Sequence
  Description of Artificial Sequence: Synthetic oligonucleotide
  Antisense strand to SEQ ID NO: 548611
aaacuggagaaacucggug

SEQ ID NO: 548613 - RNA, 19 nt, Artificial Sequence
  Description of Artificial Sequence: Synthetic oligonucleotide
  Sense strand starting at position 2537 of SEQ ID NO: 318254
gcgugaagugugucacuuc

SEQ ID NO: 548614 - RNA, 19 nt, Artificial Sequence
  Description of Artificial Sequence: Synthetic oligonucleotide
  Antisense strand to SEQ ID NO: 548613
gaagugacacacuucacgc

SEQ ID NO: 548615 - RNA, 19 nt, Artificial Sequence
  Description of Artificial Sequence: Synthetic oligonucleotide
  Sense strand starting at position 2540 of SEQ ID NO: 318254
ugaagugugucacuucgaa

SEQ ID NO: 548616 - RNA, 19 nt, Artificial Sequence
  Description of Artificial Sequence: Synthetic oligonucleotide
  Antisense strand to SEQ ID NO: 548615
uucgaagugacacacuuca

SEQ ID NO: 548617 - RNA, 19 nt, Artificial Sequence
  Description of Artificial Sequence: Synthetic oligonucleotide
  Sense strand starting at position 2971 of SEQ ID NO: 318254
gcuggauuucuuugcacuu

SEQ ID NO: 548618 - RNA, 19 nt, Artificial Sequence
  Description of Artificial Sequence: Synthetic oligonucleotide
  Antisense strand to SEQ ID NO: 548617
aagugcaaagaaauccagc

SEQ ID NO: 548619 - RNA, 19 nt, Artificial Sequence
  Description of Artificial Sequence: Synthetic oligonucleotide
  Sense strand starting at position 2972 of SEQ ID NO: 318254
cuggauuucuuugcacuuu

SEQ ID NO: 548620 - RNA, 19 nt, Artificial Sequence
  Description of Artificial Sequence: Synthetic oligonucleotide
  Antisense strand to SEQ ID NO: 548619
aaagugcaaagaaauccag

SEQ ID NO: 548621 - RNA, 19 nt, Artificial Sequence
  Description of Artificial Sequence: Synthetic oligonucleotide
  Sense strand starting at position 3038 of SEQ ID NO: 318254
gcaaguugcaggcgaaaua

SEQ ID NO: 548622 - RNA, 19 nt, Artificial Sequence
  Description of Artificial Sequence: Synthetic oligonucleotide
  Antisense strand to SEQ ID NO: 548621
uauuucgccugcaacuugc

SEQ ID NO: 548623 - RNA, 19 nt, Artificial Sequence
  Description of Artificial Sequence: Synthetic oligonucleotide
  Sense strand starting at position 3058 of SEQ ID NO: 318254
uaaguugcuggcgaaauau

SEQ ID NO: 548624 - RNA, 19 nt, Artificial Sequence
  Description of Artificial Sequence: Synthetic oligonucleotide
  Antisense strand to SEQ ID NO: 548623
auauuucgccagcaacuua

SEQ ID NO: 548625 - RNA, 19 nt, Artificial Sequence
  Description of Artificial Sequence: Synthetic oligonucleotide
  Sense strand starting at position 3332 of SEQ ID NO: 318254
gugguccguccugagaaag

SEQ ID NO: 548626 - RNA, 19 nt, Artificial Sequence
  Description of Artificial Sequence: Synthetic oligonucleotide
  Antisense strand to SEQ ID NO: 548625
cuuucucaggacggaccac

SEQ ID NO: 548627 - RNA, 19 nt, Artificial Sequence
  Description of Artificial Sequence: Synthetic oligonucleotide
  Sense strand starting at position 3458 of SEQ ID NO: 318254
uaccuugugcggcacagau

SEQ ID NO: 548628 - RNA, 19 nt, Artificial Sequence
  Description of Artificial Sequence: Synthetic oligonucleotide
  Antisense strand to SEQ ID NO: 548627
aucugugccgcacaaggua

SEQ ID NO: 548629 - RNA, 19 nt, Artificial Sequence
  Description of Artificial Sequence: Synthetic oligonucleotide
  Sense strand starting at position 3460 of SEQ ID NO: 318254
ccuugugcggcacagauua

SEQ ID NO: 548630 - RNA, 19 nt, Artificial Sequence
  Description of Artificial Sequence: Synthetic oligonucleotide
  Antisense strand to SEQ ID NO: 548629
uaaucugugccgcacaagg

SEQ ID NO: 548631 - RNA, 19 nt, Artificial Sequence
  Description of Artificial Sequence: Synthetic oligonucleotide
  Sense strand starting at position 3824 of SEQ ID NO: 318254
cuugguucucaaggguaaa

SEQ ID NO: 548632 - RNA, 19 nt, Artificial Sequence
  Description of Artificial Sequence: Synthetic oligonucleotide
  Antisense strand to SEQ ID NO: 548631
uuuacccuugagaaccaag

SEQ ID NO: 548633 - RNA, 19 nt, Artificial Sequence
  Description of Artificial Sequence: Synthetic oligonucleotide
  Sense strand starting at position 3825 of SEQ ID NO: 318254
uugguucucaaggguaaac

SEQ ID NO: 548634 - RNA, 19 nt, Artificial Sequence
  Description of Artificial Sequence: Synthetic oligonucleotide
  Antisense strand to SEQ ID NO: 548633
guuuacccuugagaaccaa

SEQ ID NO: 548635 - RNA, 19 nt, Artificial Sequence
  Description of Artificial Sequence: Synthetic oligonucleotide
  Sense strand starting at position 3895 of SEQ ID NO: 318254
gccucuuguccggagacga

SEQ ID NO: 548636 - RNA, 19 nt, Artificial Sequence
  Description of Artificial Sequence: Synthetic oligonucleotide
  Antisense strand to SEQ ID NO: 548635
ucgucuccggacaagaggc

SEQ ID NO: 548637 - RNA, 19 nt, Artificial Sequence
  Description of Artificial Sequence: Synthetic oligonucleotide
  Sense strand starting at position 60 of SEQ ID NO: 318255
ggcuuaagaucagcuaaau

SEQ ID NO: 548638 - RNA, 19 nt, Artificial Sequence
  Description of Artificial Sequence: Synthetic oligonucleotide
  Antisense strand to SEQ ID NO: 548637
auuuagcugaucuuaagcc

SEQ ID NO: 548639 - RNA, 19 nt, Artificial Sequence
  Description of Artificial Sequence: Synthetic oligonucleotide
  Sense strand starting at position 72 of SEQ ID NO: 318255
gcuaaauuaccugaucugu

SEQ ID NO: 548640 - RNA, 19 nt, Artificial Sequence
  Description of Artificial Sequence: Synthetic oligonucleotide
  Antisense strand to SEQ ID NO: 548639
acagaucagguaauuuagc

SEQ ID NO: 548641 - RNA, 19 nt, Artificial Sequence
  Description of Artificial Sequence: Synthetic oligonucleotide
  Sense strand starting at position 529 of SEQ ID NO: 318255
uugagucuuccagauauuc

SEQ ID NO: 548642 - RNA, 19 nt, Artificial Sequence
  Description of Artificial Sequence: Synthetic oligonucleotide
  Antisense strand to SEQ ID NO: 548641
gaauaucuggaagacucaa

SEQ ID NO: 548643 - RNA, 19 nt, Artificial Sequence
  Description of Artificial Sequence: Synthetic oligonucleotide
  Sense strand starting at position 939 of SEQ ID NO: 318255
accucugagugaccuuuaa

SEQ ID NO: 548644 - RNA, 19 nt, Artificial Sequence
  Description of Artificial Sequence: Synthetic oligonucleotide
  Antisense strand to SEQ ID NO: 548643
uuaaaggucacucagaggu

SEQ ID NO: 548645 - RNA, 19 nt, Artificial Sequence
  Description of Artificial Sequence: Synthetic oligonucleotide
  Sense strand starting at position 957 of SEQ ID NO: 318255
acaaguaacuuuguuagaa

SEQ ID NO: 548646 - RNA, 19 nt, Artificial Sequence
  Description of Artificial Sequence: Synthetic oligonucleotide
  Antisense strand to SEQ ID NO: 548645
uucuaacaaaguuacuugu

SEQ ID NO: 548647 - RNA, 19 nt, Artificial Sequence
  Description of Artificial Sequence: Synthetic oligonucleotide
  Sense strand starting at position 1151 of SEQ ID NO: 318255
cccauucucgcacagagaa

SEQ ID NO: 548648 - RNA, 19 nt, Artificial Sequence
  Description of Artificial Sequence: Synthetic oligonucleotide
  Antisense strand to SEQ ID NO: 548647
uucucugugcgagaauggg

SEQ ID NO: 548649 - RNA, 19 nt, Artificial Sequence
  Description of Artificial Sequence: Synthetic oligonucleotide
  Sense strand starting at position 1296 of SEQ ID NO: 318255
cugacuuagauaugacgca

SEQ ID NO: 548650 - RNA, 19 nt, Artificial Sequence
  Description of Artificial Sequence: Synthetic oligonucleotide
  Antisense strand to SEQ ID NO: 548649
ugcgucauaucuaagucag

SEQ ID NO: 548651 - RNA, 19 nt, Artificial Sequence
  Description of Artificial Sequence: Synthetic oligonucleotide
  Sense strand starting at position 1301 of SEQ ID NO: 318255
uuagauaugacgcagauuc

SEQ ID NO: 548652 - RNA, 19 nt, Artificial Sequence
  Description of Artificial Sequence: Synthetic oligonucleotide
  Antisense strand to SEQ ID NO: 548651
gaaucugcgucauaucuaa

SEQ ID NO: 548653 - RNA, 19 nt, Artificial Sequence
  Description of Artificial Sequence: Synthetic oligonucleotide
  Sense strand starting at position 1763 of SEQ ID NO: 318255
ccugcagggcuugaaagau

SEQ ID NO: 548654 - RNA, 19 nt, Artificial Sequence
  Description of Artificial Sequence: Synthetic oligonucleotide
  Antisense strand to SEQ ID NO: 548653
aucuuucaagcccugcagg

SEQ ID NO: 548655 - RNA, 19 nt, Artificial Sequence
  Description of Artificial Sequence: Synthetic oligonucleotide
  Sense strand starting at position 1788 of SEQ ID NO: 318255
ccuucuaagguccagugau

SEQ ID NO: 548656 - RNA, 19 nt, Artificial Sequence
  Description of Artificial Sequence: Synthetic oligonucleotide
  Antisense strand to SEQ ID NO: 548655
aucacuggaccuuagaagg

SEQ ID NO: 548657 - RNA, 19 nt, Artificial Sequence
  Description of Artificial Sequence: Synthetic oligonucleotide
  Sense strand starting at position 1796 of SEQ ID NO: 318255
gguccagugauuugguauc

SEQ ID NO: 548658 - RNA, 19 nt, Artificial Sequence
  Description of Artificial Sequence: Synthetic oligonucleotide
  Antisense strand to SEQ ID NO: 548657
gauaccaaaucacuggacc

SEQ ID NO: 548659 - RNA, 19 nt, Artificial Sequence
  Description of Artificial Sequence: Synthetic oligonucleotide
  Sense strand starting at position 1802 of SEQ ID NO: 318255
gugauuugguaucagaaga

SEQ ID NO: 548660 - RNA, 19 nt, Artificial Sequence
  Description of Artificial Sequence: Synthetic oligonucleotide
  Antisense strand to SEQ ID NO: 548659
ucuucugauaccaaaucac

SEQ ID NO: 548661 - RNA, 19 nt, Artificial Sequence
  Description of Artificial Sequence: Synthetic oligonucleotide
  Sense strand starting at position 1909 of SEQ ID NO: 318255
ucugcauaggcacaagaau

SEQ ID NO: 548662 - RNA, 19 nt, Artificial Sequence
  Description of Artificial Sequence: Synthetic oligonucleotide
  Antisense strand to SEQ ID NO: 548661
auucuugugccuaugcaga

SEQ ID NO: 548663 - RNA, 19 nt, Artificial Sequence
  Description of Artificial Sequence: Synthetic oligonucleotide
  Sense strand starting at position 2145 of SEQ ID NO: 318255
ucucauucccaaggaggau

SEQ ID NO: 548664 - RNA, 19 nt, Artificial Sequence
  Description of Artificial Sequence: Synthetic oligonucleotide
  Antisense strand to SEQ ID NO: 548663
auccuccuugggaaugaga

SEQ ID NO: 548665 - RNA, 19 nt, Artificial Sequence
  Description of Artificial Sequence: Synthetic oligonucleotide
  Sense strand starting at position 2160 of SEQ ID NO: 318255
ggaucuaugcaagaaugca

SEQ ID NO: 548666 - RNA, 19 nt, Artificial Sequence
  Description of Artificial Sequence: Synthetic oligonucleotide
  Antisense strand to SEQ ID NO: 548665
ugcauucuugcauagaucc

SEQ ID NO: 548667 - RNA, 19 nt, Artificial Sequence
  Description of Artificial Sequence: Synthetic oligonucleotide
  Sense strand starting at position 2185 of SEQ ID NO: 318255
auaguuaauuuggagauga

SEQ ID NO: 548668 - RNA, 19 nt, Artificial Sequence
  Description of Artificial Sequence: Synthetic oligonucleotide
  Antisense strand to SEQ ID NO: 548667
ucaucuccaaauuaacuau

SEQ ID NO: 548669 - RNA, 19 nt, Artificial Sequence
  Description of Artificial Sequence: Synthetic oligonucleotide
  Sense strand starting at position 2268 of SEQ ID NO: 318255
guuaccauccuacauaugu

SEQ ID NO: 548670 - RNA, 19 nt, Artificial Sequence
  Description of Artificial Sequence: Synthetic oligonucleotide
  Antisense strand to SEQ ID NO: 548669
acauauguaggaugguaac

SEQ ID NO: 548671 - RNA, 19 nt, Artificial Sequence
  Description of Artificial Sequence: Synthetic oligonucleotide
  Sense strand starting at position 2347 of SEQ ID NO: 318255
uguauuacauggccaaauu

SEQ ID NO: 548672 - RNA, 19 nt, Artificial Sequence
  Description of Artificial Sequence: Synthetic oligonucleotide
  Antisense strand to SEQ ID NO: 548671
aauuuggccauguaauaca

SEQ ID NO: 548673 - RNA, 19 nt, Artificial Sequence
  Description of Artificial Sequence: Synthetic oligonucleotide
  Sense strand starting at position 2407 of SEQ ID NO: 318255
gacaucugaucugcagaca

SEQ ID NO: 548674 - RNA, 19 nt, Artificial Sequence
  Description of Artificial Sequence: Synthetic oligonucleotide
  Antisense strand to SEQ ID NO: 548673
ugucugcagaucagauguc

SEQ ID NO: 548675 - RNA, 19 nt, Artificial Sequence
  Description of Artificial Sequence: Synthetic oligonucleotide
  Sense strand starting at position 2410 of SEQ ID NO: 318255
aucugaucugcagacaguu

SEQ ID NO: 548676 - RNA, 19 nt, Artificial Sequence
  Description of Artificial Sequence: Synthetic oligonucleotide
  Antisense strand to SEQ ID NO: 548675
aacugucugcagaucagau

SEQ ID NO: 548677 - RNA, 19 nt, Artificial Sequence
  Description of Artificial Sequence: Synthetic oligonucleotide
  Sense strand starting at position 2538 of SEQ ID NO: 318255
uagauuuguuuccagagag

SEQ ID NO: 548678 - RNA, 19 nt, Artificial Sequence
  Description of Artificial Sequence: Synthetic oligonucleotide
  Antisense strand to SEQ ID NO: 548677
cucucuggaaacaaaucua

SEQ ID NO: 548679 - RNA, 19 nt, Artificial Sequence
  Description of Artificial Sequence: Synthetic oligonucleotide
  Sense strand starting at position 2550 of SEQ ID NO: 318255
cagagagcuugcuugagau

SEQ ID NO: 548680 - RNA, 19 nt, Artificial Sequence
  Description of Artificial Sequence: Synthetic oligonucleotide
  Antisense strand to SEQ ID NO: 548679
aucucaagcaagcucucug

SEQ ID NO: 548681 - RNA, 19 nt, Artificial Sequence
  Description of Artificial Sequence: Synthetic oligonucleotide
  Sense strand starting at position 2552 of SEQ ID NO: 318255
gagagcuugcuugagauag

SEQ ID NO: 548682 - RNA, 19 nt, Artificial Sequence
  Description of Artificial Sequence: Synthetic oligonucleotide
  Antisense strand to SEQ ID NO: 548681
cuaucucaagcaagcucuc

SEQ ID NO: 548683 - RNA, 19 nt, Artificial Sequence
  Description of Artificial Sequence: Synthetic oligonucleotide
  Sense strand starting at position 2556 of SEQ ID NO: 318255
gcuugcuugagauagauua

SEQ ID NO: 548684 - RNA, 19 nt, Artificial Sequence
  Description of Artificial Sequence: Synthetic oligonucleotide
  Antisense strand to SEQ ID NO: 548683
uaaucuaucucaagcaagc

SEQ ID NO: 548685 - RNA, 19 nt, Artificial Sequence
  Description of Artificial Sequence: Synthetic oligonucleotide
  Sense strand starting at position 2678 of SEQ ID NO: 318255
aauaacagucagggucaaa

SEQ ID NO: 548686 - RNA, 19 nt, Artificial Sequence
  Description of Artificial Sequence: Synthetic oligonucleotide
  Antisense strand to SEQ ID NO: 548685
uuugacccugacuguuauu

SEQ ID NO: 548687 - RNA, 19 nt, Artificial Sequence
  Description of Artificial Sequence: Synthetic oligonucleotide
  Sense strand starting at position 2727 of SEQ ID NO: 318255
guacguuugcaauuguucu

SEQ ID NO: 548688 - RNA, 19 nt, Artificial Sequence
  Description of Artificial Sequence: Synthetic oligonucleotide
  Antisense strand to SEQ ID NO: 548687
agaacaauugcaaacguac

SEQ ID NO: 548689 - RNA, 19 nt, Artificial Sequence
  Description of Artificial Sequence: Synthetic oligonucleotide
  Sense strand starting at position 2768 of SEQ ID NO: 318255
accagaauuaaguggugau

SEQ ID NO: 548690 - RNA, 19 nt, Artificial Sequence
  Description of Artificial Sequence: Synthetic oligonucleotide
  Antisense strand to SEQ ID NO: 548689
aucaccacuuaauucuggu

SEQ ID NO: 548691 - RNA, 19 nt, Artificial Sequence
  Description of Artificial Sequence: Synthetic oligonucleotide
  Sense strand starting at position 2769 of SEQ ID NO: 318255
ccagaauuaaguggugaug

SEQ ID NO: 548692 - RNA, 19 nt, Artificial Sequence
  Description of Artificial Sequence: Synthetic oligonucleotide
  Antisense strand to SEQ ID NO: 548691
caucaccacuuaauucugg

SEQ ID NO: 548693 - RNA, 19 nt, Artificial Sequence
  Description of Artificial Sequence: Synthetic oligonucleotide
  Sense strand starting at position 2772 of SEQ ID NO: 318255
gaauuaaguggugauguuu

SEQ ID NO: 548694 - RNA, 19 nt, Artificial Sequence
  Description of Artificial Sequence: Synthetic oligonucleotide
  Antisense strand to SEQ ID NO: 548693
aaacaucaccacuuaauuc

SEQ ID NO: 548695 - RNA, 19 nt, Artificial Sequence
  Description of Artificial Sequence: Synthetic oligonucleotide
  Sense strand starting at position 2847 of SEQ ID NO: 318255
cuaagaaacuuguuacugu

SEQ ID NO: 548696 - RNA, 19 nt, Artificial Sequence
  Description of Artificial Sequence: Synthetic oligonucleotide
  Antisense strand to SEQ ID NO: 548695
acaguaacaaguuucuuag

SEQ ID NO: 548697 - RNA, 19 nt, Artificial Sequence
  Description of Artificial Sequence: Synthetic oligonucleotide
  Sense strand starting at position 2861 of SEQ ID NO: 318255
acuguaguuguugaaagaa

SEQ ID NO: 548698 - RNA, 19 nt, Artificial Sequence
  Description of Artificial Sequence: Synthetic oligonucleotide
  Antisense strand to SEQ ID NO: 548697
uucuuucaacaacuacagu

SEQ ID NO: 548699 - RNA, 19 nt, Artificial Sequence
  Description of Artificial Sequence: Synthetic oligonucleotide
  Sense strand starting at position 2883 of SEQ ID NO: 318255
ugucaaaguguuuauccau

SEQ ID NO: 548700 - RNA, 19 nt, Artificial Sequence
  Description of Artificial Sequence: Synthetic oligonucleotide
  Antisense strand to SEQ ID NO: 548699
auggauaaacacuuugaca

SEQ ID NO: 548701 - RNA, 19 nt, Artificial Sequence
  Description of Artificial Sequence: Synthetic oligonucleotide
  Sense strand starting at position 2889 of SEQ ID NO: 318255
aguguuuauccauauuaag

SEQ ID NO: 548702 - RNA, 19 nt, Artificial Sequence
  Description of Artificial Sequence: Synthetic oligonucleotide
  Antisense strand to SEQ ID NO: 548701
cuuaauauggauaaacacu

SEQ ID NO: 548703 - RNA, 19 nt, Artificial Sequence
  Description of Artificial Sequence: Synthetic oligonucleotide
  Sense strand starting at position 2980 of SEQ ID NO: 318255
uuggaaaccauagguguuu

SEQ ID NO: 548704 - RNA, 19 nt, Artificial Sequence
  Description of Artificial Sequence: Synthetic oligonucleotide
  Antisense strand to SEQ ID NO: 548703
aaacaccuaugguuuccaa

SEQ ID NO: 548705 - RNA, 19 nt, Artificial Sequence
  Description of Artificial Sequence: Synthetic oligonucleotide
  Sense strand starting at position 3259 of SEQ ID NO: 318255
gagcauaucuggucucaaa

SEQ ID NO: 548706 - RNA, 19 nt, Artificial Sequence
  Description of Artificial Sequence: Synthetic oligonucleotide
  Antisense strand to SEQ ID NO: 548705
uuugagaccagauaugcuc

SEQ ID NO: 548707 - RNA, 19 nt, Artificial Sequence
  Description of Artificial Sequence: Synthetic oligonucleotide
  Sense strand starting at position 3407 of SEQ ID NO: 318255
ucugaauuaguguacacua

SEQ ID NO: 548708 - RNA, 19 nt, Artificial Sequence
  Description of Artificial Sequence: Synthetic oligonucleotide
  Antisense strand to SEQ ID NO: 548707
uaguguacacuaauucaga

SEQ ID NO: 548709 - RNA, 19 nt, Artificial Sequence
  Description of Artificial Sequence: Synthetic oligonucleotide
  Sense strand starting at position 3501 of SEQ ID NO: 318255
cuuaguuuccauuagucau

SEQ ID NO: 548710 - RNA, 19 nt, Artificial Sequence
  Description of Artificial Sequence: Synthetic oligonucleotide
  Antisense strand to SEQ ID NO: 548709
augacuaauggaaacuaag

SEQ ID NO: 548711 - RNA, 19 nt, Artificial Sequence
  Description of Artificial Sequence: Synthetic oligonucleotide
  Sense strand starting at position 3504 of SEQ ID NO: 318255
aguuuccauuagucaucaa

SEQ ID NO: 548712 - RNA, 19 nt, Artificial Sequence
  Description of Artificial Sequence: Synthetic oligonucleotide
  Antisense strand to SEQ ID NO: 548711
uugaugacuaauggaaacu

SEQ ID NO: 548713 - RNA, 19 nt, Artificial Sequence
  Description of Artificial Sequence: Synthetic oligonucleotide
  Sense strand starting at position 3635 of SEQ ID NO: 318255
ugacuauggccuugcauuu

SEQ ID NO: 548714 - RNA, 19 nt, Artificial Sequence
  Description of Artificial Sequence: Synthetic oligonucleotide
  Antisense strand to SEQ ID NO: 548713
aaaugcaaggccauaguca

SEQ ID NO: 548715 - RNA, 19 nt, Artificial Sequence
  Description of Artificial Sequence: Synthetic oligonucleotide
  Sense strand starting at position 3728 of SEQ ID NO: 318255
cugucucuugcacagaacu

SEQ ID NO: 548716 - RNA, 19 nt, Artificial Sequence
  Description of Artificial Sequence: Synthetic oligonucleotide
  Antisense strand to SEQ ID NO: 548715
aguucugugcaagagacag

SEQ ID NO: 548717 - RNA, 19 nt, Artificial Sequence
  Description of Artificial Sequence: Synthetic oligonucleotide
  Sense strand starting at position 17 of SEQ ID NO: 318256
aaaccucaggcgcgaauua

SEQ ID NO: 548718 - RNA, 19 nt, Artificial Sequence
  Description of Artificial Sequence: Synthetic oligonucleotide
  Antisense strand to SEQ ID NO: 548717
uaauucgcgccugagguuu

SEQ ID NO: 548719 - RNA, 19 nt, Artificial Sequence
  Description of Artificial Sequence: Synthetic oligonucleotide
  Sense strand starting at position 311 of SEQ ID NO: 318256
caaauauucgggcgaguaa

SEQ ID NO: 548720 - RNA, 19 nt, Artificial Sequence
  Description of Artificial Sequence: Synthetic oligonucleotide
  Antisense strand to SEQ ID NO: 548719
uuacucgcccgaauauuug

SEQ ID NO: 548721 - RNA, 19 nt, Artificial Sequence
  Description of Artificial Sequence: Synthetic oligonucleotide
  Sense strand starting at position 312 of SEQ ID NO: 318256
aaauauucgggcgaguaaa

SEQ ID NO: 548722 - RNA, 19 nt, Artificial Sequence
  Description of Artificial Sequence: Synthetic oligonucleotide
  Antisense strand to SEQ ID NO: 548721
uuuacucgcccgaauauuu

SEQ ID NO: 548723 - RNA, 19 nt, Artificial Sequence
  Description of Artificial Sequence: Synthetic oligonucleotide
  Sense strand starting at position 418 of SEQ ID NO: 318256
ccaggauucccgcgaggaa

SEQ ID NO: 548724 - RNA, 19 nt, Artificial Sequence
  Description of Artificial Sequence: Synthetic oligonucleotide
  Antisense strand to SEQ ID NO: 548723
uuccucgcgggaauccugg

SEQ ID NO: 548725 - RNA, 19 nt, Artificial Sequence
  Description of Artificial Sequence: Synthetic oligonucleotide
  Sense strand starting at position 419 of SEQ ID NO: 318256
caggauucccgcgaggaau

SEQ ID NO: 548726 - RNA, 19 nt, Artificial Sequence
  Description of Artificial Sequence: Synthetic oligonucleotide
  Antisense strand to SEQ ID NO: 548725
auuccucgcgggaauccug

SEQ ID NO: 548727 - RNA, 19 nt, Artificial Sequence
  Description of Artificial Sequence: Synthetic oligonucleotide
  Sense strand starting at position 421 of SEQ ID NO: 318256
ggauucccgcgaggaauga

SEQ ID NO: 548728 - RNA, 19 nt, Artificial Sequence
  Description of Artificial Sequence: Synthetic oligonucleotide
  Antisense strand to SEQ ID NO: 548727
ucauuccucgcgggaaucc

SEQ ID NO: 548729 - RNA, 19 nt, Artificial Sequence
  Description of Artificial Sequence: Synthetic oligonucleotide
  Sense strand starting at position 722 of SEQ ID NO: 318256
gcuucuuaccucuggcaga

SEQ ID NO: 548730 - RNA, 19 nt, Artificial Sequence
  Description of Artificial Sequence: Synthetic oligonucleotide
  Antisense strand to SEQ ID NO: 548729
ucugccagagguaagaagc

SEQ ID NO: 548731 - RNA, 19 nt, Artificial Sequence
  Description of Artificial Sequence: Synthetic oligonucleotide
  Sense strand starting at position 795 of SEQ ID NO: 318256
uuagcuugugaacgcagaa

SEQ ID NO: 548732 - RNA, 19 nt, Artificial Sequence
  Description of Artificial Sequence: Synthetic oligonucleotide
  Antisense strand to SEQ ID NO: 548731
uucugcguucacaagcuaa

SEQ ID NO: 548733 - RNA, 19 nt, Artificial Sequence
  Description of Artificial Sequence: Synthetic oligonucleotide
  Sense strand starting at position 901 of SEQ ID NO: 318256
uuaagaaagucucccauug

SEQ ID NO: 548734 - RNA, 19 nt, Artificial Sequence
  Description of Artificial Sequence: Synthetic oligonucleotide
  Antisense strand to SEQ ID NO: 548733
caaugggagacuuucuuaa

SEQ ID NO: 548735 - RNA, 19 nt, Artificial Sequence
  Description of Artificial Sequence: Synthetic oligonucleotide
  Sense strand starting at position 1536 of SEQ ID NO: 318256
caccgaguuucuccaguuu

SEQ ID NO: 548736 - RNA, 19 nt, Artificial Sequence
  Description of Artificial Sequence: Synthetic oligonucleotide
  Antisense strand to SEQ ID NO: 548735
aaacuggagaaacucggug

SEQ ID NO: 548737 - RNA, 19 nt, Artificial Sequence
  Description of Artificial Sequence: Synthetic oligonucleotide
  Sense strand starting at position 1737 of SEQ ID NO: 318256
ggccgaguugcgugaagug

SEQ ID NO: 548738 - RNA, 19 nt, Artificial Sequence
  Description of Artificial Sequence: Synthetic oligonucleotide
  Antisense strand to SEQ ID NO: 548737
cacuucacgcaacucggcc

SEQ ID NO: 548739 - RNA, 19 nt, Artificial Sequence
  Description of Artificial Sequence: Synthetic oligonucleotide
  Sense strand starting at position 1746 of SEQ ID NO: 318256
gcgugaagugugucacuuc

SEQ ID NO: 548740 - RNA, 19 nt, Artificial Sequence
  Description of Artificial Sequence: Synthetic oligonucleotide
  Antisense strand to SEQ ID NO: 548739
gaagugacacacuucacgc

SEQ ID NO: 548741 - RNA, 19 nt, Artificial Sequence
  Description of Artificial Sequence: Synthetic oligonucleotide
  Sense strand starting at position 1749 of SEQ ID NO: 318256
ugaagugugucacuucgaa

SEQ ID NO: 548742 - RNA, 19 nt, Artificial Sequence
  Description of Artificial Sequence: Synthetic oligonucleotide
  Antisense strand to SEQ ID NO: 548741
uucgaagugacacacuuca

SEQ ID NO: 548743 - RNA, 19 nt, Artificial Sequence
  Description of Artificial Sequence: Synthetic oligonucleotide
  Sense strand starting at position 2180 of SEQ ID NO: 318256
gcuggauuucuuugcacuu

SEQ ID NO: 548744 - RNA, 19 nt, Artificial Sequence
  Description of Artificial Sequence: Synthetic oligonucleotide
  Antisense strand to SEQ ID NO: 548743
aagugcaaagaaauccagc

SEQ ID NO: 548745 - RNA, 19 nt, Artificial Sequence
  Description of Artificial Sequence: Synthetic oligonucleotide
  Sense strand starting at position 2181 of SEQ ID NO: 318256
cuggauuucuuugcacuuu

SEQ ID NO: 548746 - RNA, 19 nt, Artificial Sequence
  Description of Artificial Sequence: Synthetic oligonucleotide
  Antisense strand to SEQ ID NO: 548745
aaagugcaaagaaauccag

SEQ ID NO: 548747 - RNA, 19 nt, Artificial Sequence
  Description of Artificial Sequence: Synthetic oligonucleotide
  Sense strand starting at position 2247 of SEQ ID NO: 318256
gcaaguugcaggcgaaaua

SEQ ID NO: 548748 - RNA, 19 nt, Artificial Sequence
  Description of Artificial Sequence: Synthetic oligonucleotide
  Antisense strand to SEQ ID NO: 548747
uauuucgccugcaacuugc

SEQ ID NO: 548749 - RNA, 19 nt, Artificial Sequence
  Description of Artificial Sequence: Synthetic oligonucleotide
  Sense strand starting at position 2264 of SEQ ID NO: 318256
uaguaaguugcuggcgaaa

SEQ ID NO: 548750 - RNA, 19 nt, Artificial Sequence
  Description of Artificial Sequence: Synthetic oligonucleotide
  Antisense strand to SEQ ID NO: 548749
uuucgccagcaacuuacua

SEQ ID NO: 548751 - RNA, 19 nt, Artificial Sequence
  Description of Artificial Sequence: Synthetic oligonucleotide
  Sense strand starting at position 2267 of SEQ ID NO: 318256
uaaguugcuggcgaaauau

SEQ ID NO: 548752 - RNA, 19 nt, Artificial Sequence
  Description of Artificial Sequence: Synthetic oligonucleotide
  Antisense strand to SEQ ID NO: 548751
auauuucgccagcaacuua

SEQ ID NO: 548753 - RNA, 19 nt, Artificial Sequence
  Description of Artificial Sequence: Synthetic oligonucleotide
  Sense strand starting at position 2541 of SEQ ID NO: 318256
gugguccguccugagaaag

SEQ ID NO: 548754 - RNA, 19 nt, Artificial Sequence
  Description of Artificial Sequence: Synthetic oligonucleotide
  Antisense strand to SEQ ID NO: 548753
cuuucucaggacggaccac

SEQ ID NO: 548755 - RNA, 19 nt, Artificial Sequence
  Description of Artificial Sequence: Synthetic oligonucleotide
  Sense strand starting at position 2667 of SEQ ID NO: 318256
uaccuugugcggcacagau

SEQ ID NO: 548756 - RNA, 19 nt, Artificial Sequence
  Description of Artificial Sequence: Synthetic oligonucleotide
  Antisense strand to SEQ ID NO: 548755
aucugugccgcacaaggua

SEQ ID NO: 548757 - RNA, 19 nt, Artificial Sequence
  Description of Artificial Sequence: Synthetic oligonucleotide
  Sense strand starting at position 2669 of SEQ ID NO: 318256
ccuugugcggcacagauua

SEQ ID NO: 548758 - RNA, 19 nt, Artificial Sequence
  Description of Artificial Sequence: Synthetic oligonucleotide
  Antisense strand to SEQ ID NO: 548757
uaaucugugccgcacaagg

SEQ ID NO: 548759 - RNA, 19 nt, Artificial Sequence
  Description of Artificial Sequence: Synthetic oligonucleotide
  Sense strand starting at position 2694 of SEQ ID NO: 318256
uugugacucugggaaaggu

SEQ ID NO: 548760 - RNA, 19 nt, Artificial Sequence
  Description of Artificial Sequence: Synthetic oligonucleotide
  Antisense strand to SEQ ID NO: 548759
accuuucccagagucacaa

SEQ ID NO: 548761 - RNA, 19 nt, Artificial Sequence
  Description of Artificial Sequence: Synthetic oligonucleotide
  Sense strand starting at position 3033 of SEQ ID NO: 318256
cuugguucucaaggguaaa

SEQ ID NO: 548762 - RNA, 19 nt, Artificial Sequence
  Description of Artificial Sequence: Synthetic oligonucleotide
  Antisense strand to SEQ ID NO: 548761
uuuacccuugagaaccaag

SEQ ID NO: 548763 - RNA, 19 nt, Artificial Sequence
  Description of Artificial Sequence: Synthetic oligonucleotide
  Sense strand starting at position 3034 of SEQ ID NO: 318256
uugguucucaaggguaaac

SEQ ID NO: 548764 - RNA, 19 nt, Artificial Sequence
  Description of Artificial Sequence: Synthetic oligonucleotide
  Antisense strand to SEQ ID NO: 548763
guuuacccuugagaaccaa

SEQ ID NO: 548765 - RNA, 19 nt, Artificial Sequence
  Description of Artificial Sequence: Synthetic oligonucleotide
  Sense strand starting at position 3104 of SEQ ID NO: 318256
gccucuuguccggagacga

SEQ ID NO: 548766 - RNA, 19 nt, Artificial Sequence
  Description of Artificial Sequence: Synthetic oligonucleotide
  Antisense strand to SEQ ID NO: 548765
ucgucuccggacaagaggc

SEQ ID NO: 548767 - RNA, 19 nt, Artificial Sequence
  Description of Artificial Sequence: Synthetic oligonucleotide
  Sense strand starting at position 3211 of SEQ ID NO: 318256
accguaugccaacguagaa

SEQ ID NO: 548768 - RNA, 19 nt, Artificial Sequence
  Description of Artificial Sequence: Synthetic oligonucleotide
  Antisense strand to SEQ ID NO: 548767
uucuacguuggcauacggu

SEQ ID NO: 548769 - RNA, 19 nt, Artificial Sequence
  Description of Artificial Sequence: Synthetic oligonucleotide
  Sense strand starting at position 3262 of SEQ ID NO: 318256
ugagcaacuccauguuaac

SEQ ID NO: 548770 - RNA, 19 nt, Artificial Sequence
  Description of Artificial Sequence: Synthetic oligonucleotide
  Antisense strand to SEQ ID NO: 548769
guuaacauggaguugcuca

SEQ ID NO: 548771 - RNA, 19 nt, Artificial Sequence
  Description of Artificial Sequence: Synthetic oligonucleotide
  Sense strand starting at position 3360 of SEQ ID NO: 318256
uuuggaugcucaucuguga

SEQ ID NO: 548772 - RNA, 19 nt, Artificial Sequence
  Description of Artificial Sequence: Synthetic oligonucleotide
  Antisense strand to SEQ ID NO: 548771
ucacagaugagcauccaaa

SEQ ID NO: 548773 - RNA, 19 nt, Artificial Sequence
  Description of Artificial Sequence: Synthetic oligonucleotide
  Sense strand starting at position 3381 of SEQ ID NO: 318256
cuaugagaacacugcuuga

SEQ ID NO: 548774 - RNA, 19 nt, Artificial Sequence
  Description of Artificial Sequence: Synthetic oligonucleotide
  Antisense strand to SEQ ID NO: 548773
ucaagcaguguucucauag

SEQ ID NO: 548775 - RNA, 19 nt, Artificial Sequence
  Description of Artificial Sequence: Synthetic oligonucleotide
  Sense strand starting at position 3435 of SEQ ID NO: 318256
gcacuagaaugagaugucu

SEQ ID NO: 548776 - RNA, 19 nt, Artificial Sequence
  Description of Artificial Sequence: Synthetic oligonucleotide
  Antisense strand to SEQ ID NO: 548775
agacaucucauucuagugc

SEQ ID NO: 548777 - RNA, 19 nt, Artificial Sequence
  Description of Artificial Sequence: Synthetic oligonucleotide
  Sense strand starting at position 3446 of SEQ ID NO: 318256
agaugucuuucguuaauuu

SEQ ID NO: 548778 - RNA, 19 nt, Artificial Sequence
  Description of Artificial Sequence: Synthetic oligonucleotide
  Antisense strand to SEQ ID NO: 548777
aaauuaacgaaagacaucu

SEQ ID NO: 548779 - RNA, 19 nt, Artificial Sequence
  Description of Artificial Sequence: Synthetic oligonucleotide
  Sense strand starting at position 3545 of SEQ ID NO: 318256
aguuaaauagcccaugcua

SEQ ID NO: 548780 - RNA, 19 nt, Artificial Sequence
  Description of Artificial Sequence: Synthetic oligonucleotide
  Antisense strand to SEQ ID NO: 548779
uagcaugggcuauuuaacu

SEQ ID NO: 548781 - RNA, 19 nt, Artificial Sequence
  Description of Artificial Sequence: Synthetic oligonucleotide
  Sense strand starting at position 3680 of SEQ ID NO: 318256
acaauacaguugucuaaua

SEQ ID NO: 548782 - RNA, 19 nt, Artificial Sequence
  Description of Artificial Sequence: Synthetic oligonucleotide
  Antisense strand to SEQ ID NO: 548781
uauuagacaacuguauugu

SEQ ID NO: 548783 - RNA, 19 nt, Artificial Sequence
  Description of Artificial Sequence: Synthetic oligonucleotide
  Sense strand starting at position 3685 of SEQ ID NO: 318256
acaguugucuaauagaaca

SEQ ID NO: 548784 - RNA, 19 nt, Artificial Sequence
  Description of Artificial Sequence: Synthetic oligonucleotide
  Antisense strand to SEQ ID NO: 548783
uguucuauuagacaacugu

SEQ ID NO: 548785 - RNA, 19 nt, Artificial Sequence
  Description of Artificial Sequence: Synthetic oligonucleotide
  Sense strand starting at position 3733 of SEQ ID NO: 318256
ugcugaaucucugcucuaa

SEQ ID NO: 548786 - RNA, 19 nt, Artificial Sequence
  Description of Artificial Sequence: Synthetic oligonucleotide
  Antisense strand to SEQ ID NO: 548785
uuagagcagagauucagca

SEQ ID NO: 548787 - RNA, 19 nt, Artificial Sequence
  Description of Artificial Sequence: Synthetic oligonucleotide
  Sense strand starting at position 3735 of SEQ ID NO: 318256
cugaaucucugcucuaaga

SEQ ID NO: 548788 - RNA, 19 nt, Artificial Sequence
  Description of Artificial Sequence: Synthetic oligonucleotide
  Antisense strand to SEQ ID NO: 548787
ucuuagagcagagauucag

SEQ ID NO: 548789 - RNA, 19 nt, Artificial Sequence
  Description of Artificial Sequence: Synthetic oligonucleotide
  Sense strand starting at position 3775 of SEQ ID NO: 318256
ugcucaaauccuuaguggu

SEQ ID NO: 548790 - RNA, 19 nt, Artificial Sequence
  Description of Artificial Sequence: Synthetic oligonucleotide
  Antisense strand to SEQ ID NO: 548789
accacuaaggauuugagca

SEQ ID NO: 548791 - RNA, 19 nt, Artificial Sequence
  Description of Artificial Sequence: Synthetic oligonucleotide
  Sense strand starting at position 3794 of SEQ ID NO: 318256
agguacucugcuuaaauaa

SEQ ID NO: 548792 - RNA, 19 nt, Artificial Sequence
  Description of Artificial Sequence: Synthetic oligonucleotide
  Antisense strand to SEQ ID NO: 548791
uuauuuaagcagaguaccu

SEQ ID NO: 548793 - RNA, 19 nt, Artificial Sequence
  Description of Artificial Sequence: Synthetic oligonucleotide
  Sense strand starting at position 3969 of SEQ ID NO: 318256
aucuaaaugugccuguuaa

SEQ ID NO: 548794 - RNA, 19 nt, Artificial Sequence
  Description of Artificial Sequence: Synthetic oligonucleotide
  Antisense strand to SEQ ID NO: 548793
uuaacaggcacauuuagau

SEQ ID NO: 548795 - RNA, 19 nt, Artificial Sequence
  Description of Artificial Sequence: Synthetic oligonucleotide
  Sense strand starting at position 3970 of SEQ ID NO: 318256
ucuaaaugugccuguuaau

SEQ ID NO: 548796 - RNA, 19 nt, Artificial Sequence
  Description of Artificial Sequence: Synthetic oligonucleotide
  Antisense strand to SEQ ID NO: 548795
auuaacaggcacauuuaga

SEQ ID NO: 548797 - RNA, 19 nt, Artificial Sequence
  Description of Artificial Sequence: Synthetic oligonucleotide
  Sense strand starting at position 53 of SEQ ID NO: 318257
gugguuggccagaggugua

SEQ ID NO: 548798 - RNA, 19 nt, Artificial Sequence
  Description of Artificial Sequence: Synthetic oligonucleotide
  Antisense strand to SEQ ID NO: 548797
uacaccucuggccaaccac

SEQ ID NO: 548799 - RNA, 19 nt, Artificial Sequence
  Description of Artificial Sequence: Synthetic oligonucleotide
  Sense strand starting at position 63 of SEQ ID NO: 318257
agagguguacaaugguaga

SEQ ID NO: 548800 - RNA, 19 nt, Artificial Sequence
  Description of Artificial Sequence: Synthetic oligonucleotide
  Antisense strand to SEQ ID NO: 548799
ucuaccauuguacaccucu

SEQ ID NO: 548801 - RNA, 19 nt, Artificial Sequence
  Description of Artificial Sequence: Synthetic oligonucleotide
  Sense strand starting at position 91 of SEQ ID NO: 318257
gauggaugcuaaguaagga

SEQ ID NO: 548802 - RNA, 19 nt, Artificial Sequence
  Description of Artificial Sequence: Synthetic oligonucleotide
  Antisense strand to SEQ ID NO: 548801
uccuuacuuagcauccauc

SEQ ID NO: 548803 - RNA, 19 nt, Artificial Sequence
  Description of Artificial Sequence: Synthetic oligonucleotide
  Sense strand starting at position 138 of SEQ ID NO: 318257
gcaguuacaaugcagagau

SEQ ID NO: 548804 - RNA, 19 nt, Artificial Sequence
  Description of Artificial Sequence: Synthetic oligonucleotide
  Antisense strand to SEQ ID NO: 548803
aucucugcauuguaacugc

SEQ ID NO: 548805 - RNA, 19 nt, Artificial Sequence
  Description of Artificial Sequence: Synthetic oligonucleotide
  Sense strand starting at position 356 of SEQ ID NO: 318257
gaaaucuggcagugaaccu

SEQ ID NO: 548806 - RNA, 19 nt, Artificial Sequence
  Description of Artificial Sequence: Synthetic oligonucleotide
  Antisense strand to SEQ ID NO: 548805
agguucacugccagauuuc

SEQ ID NO: 548807 - RNA, 19 nt, Artificial Sequence
  Description of Artificial Sequence: Synthetic oligonucleotide
  Sense strand starting at position 363 of SEQ ID NO: 318257
ggcagugaaccuggaaaca

SEQ ID NO: 548808 - RNA, 19 nt, Artificial Sequence
  Description of Artificial Sequence: Synthetic oligonucleotide
  Antisense strand to SEQ ID NO: 548807
uguuuccagguucacugcc

SEQ ID NO: 548809 - RNA, 19 nt, Artificial Sequence
  Description of Artificial Sequence: Synthetic oligonucleotide
  Sense strand starting at position 373 of SEQ ID NO: 318257
cuggaaacauuuggaacaa

SEQ ID NO: 548810 - RNA, 19 nt, Artificial Sequence
  Description of Artificial Sequence: Synthetic oligonucleotide
  Antisense strand to SEQ ID NO: 548809
uuguuccaaauguuuccag

SEQ ID NO: 548811 - RNA, 19 nt, Artificial Sequence
  Description of Artificial Sequence: Synthetic oligonucleotide
  Sense strand starting at position 584 of SEQ ID NO: 318257
gguauaggaucaguuuauu

SEQ ID NO: 548812 - RNA, 19 nt, Artificial Sequence
  Description of Artificial Sequence: Synthetic oligonucleotide
  Antisense strand to SEQ ID NO: 548811
aauaaacugauccuauacc

SEQ ID NO: 548813 - RNA, 19 nt, Artificial Sequence
  Description of Artificial Sequence: Synthetic oligonucleotide
  Sense strand starting at position 645 of SEQ ID NO: 318257
gauguaggguacuuuagaa

SEQ ID NO: 548814 - RNA, 19 nt, Artificial Sequence
  Description of Artificial Sequence: Synthetic oligonucleotide
  Antisense strand to SEQ ID NO: 548813
uucuaaaguacccuacauc

SEQ ID NO: 548815 - RNA, 19 nt, Artificial Sequence
  Description of Artificial Sequence: Synthetic oligonucleotide
  Sense strand starting at position 935 of SEQ ID NO: 318257
guagauuuaucuuaaggac

SEQ ID NO: 548816 - RNA, 19 nt, Artificial Sequence
  Description of Artificial Sequence: Synthetic oligonucleotide
  Antisense strand to SEQ ID NO: 548815
guccuuaagauaaaucuac

SEQ ID NO: 548817 - RNA, 19 nt, Artificial Sequence
  Description of Artificial Sequence: Synthetic oligonucleotide
  Sense strand starting at position 1310 of SEQ ID NO: 318257
uagguagaagcaugauaga

SEQ ID NO: 548818 - RNA, 19 nt, Artificial Sequence
  Description of Artificial Sequence: Synthetic oligonucleotide
  Antisense strand to SEQ ID NO: 548817
ucuaucaugcuucuaccua

SEQ ID NO: 548819 - RNA, 19 nt, Artificial Sequence
  Description of Artificial Sequence: Synthetic oligonucleotide
  Sense strand starting at position 1336 of SEQ ID NO: 318257
auauuuguucuauggcauc

SEQ ID NO: 548820 - RNA, 19 nt, Artificial Sequence
  Description of Artificial Sequence: Synthetic oligonucleotide
  Antisense strand to SEQ ID NO: 548819
gaugccauagaacaaauau

SEQ ID NO: 548821 - RNA, 19 nt, Artificial Sequence
  Description of Artificial Sequence: Synthetic oligonucleotide
  Sense strand starting at position 1364 of SEQ ID NO: 318257
uuaagagguauagguucua

SEQ ID NO: 548822 - RNA, 19 nt, Artificial Sequence
  Description of Artificial Sequence: Synthetic oligonucleotide
  Antisense strand to SEQ ID NO: 548821
uagaaccuauaccucuuaa

SEQ ID NO: 548823 - RNA, 19 nt, Artificial Sequence
  Description of Artificial Sequence: Synthetic oligonucleotide
  Sense strand starting at position 1414 of SEQ ID NO: 318257
guuuguuuccuggaacauu

SEQ ID NO: 548824 - RNA, 19 nt, Artificial Sequence
  Description of Artificial Sequence: Synthetic oligonucleotide
  Antisense strand to SEQ ID NO: 548823
aauguuccaggaaacaaac

SEQ ID NO: 548825 - RNA, 19 nt, Artificial Sequence
  Description of Artificial Sequence: Synthetic oligonucleotide
  Sense strand starting at position 1748 of SEQ ID NO: 318257
augcauacacaguaaguua

SEQ ID NO: 548826 - RNA, 19 nt, Artificial Sequence
  Description of Artificial Sequence: Synthetic oligonucleotide
  Antisense strand to SEQ ID NO: 548825
uaacuuacuguguaugcau

SEQ ID NO: 548827 - RNA, 19 nt, Artificial Sequence
  Description of Artificial Sequence: Synthetic oligonucleotide
  Sense strand starting at position 1816 of SEQ ID NO: 318257
cuguuacugcuugaggaua

SEQ ID NO: 548828 - RNA, 19 nt, Artificial Sequence
  Description of Artificial Sequence: Synthetic oligonucleotide
  Antisense strand to SEQ ID NO: 548827
uauccucaagcaguaacag

SEQ ID NO: 548829 - RNA, 19 nt, Artificial Sequence
  Description of Artificial Sequence: Synthetic oligonucleotide
  Sense strand starting at position 1821 of SEQ ID NO: 318257
acugcuugaggauaaaguu

SEQ ID NO: 548830 - RNA, 19 nt, Artificial Sequence
  Description of Artificial Sequence: Synthetic oligonucleotide
  Antisense strand to SEQ ID NO: 548829
aacuuuauccucaagcagu

SEQ ID NO: 548831 - RNA, 19 nt, Artificial Sequence
  Description of Artificial Sequence: Synthetic oligonucleotide
  Sense strand starting at position 2053 of SEQ ID NO: 318257
guaggaugagaucagcuuu

SEQ ID NO: 548832 - RNA, 19 nt, Artificial Sequence
  Description of Artificial Sequence: Synthetic oligonucleotide
  Antisense strand to SEQ ID NO: 548831
aaagcugaucucauccuac

SEQ ID NO: 548833 - RNA, 19 nt, Artificial Sequence
  Description of Artificial Sequence: Synthetic oligonucleotide
  Sense strand starting at position 2181 of SEQ ID NO: 318257
ccaagacauuggccuaauu

SEQ ID NO: 548834 - RNA, 19 nt, Artificial Sequence
  Description of Artificial Sequence: Synthetic oligonucleotide
  Antisense strand to SEQ ID NO: 548833
aauuaggccaaugucuugg

SEQ ID NO: 548835 - RNA, 19 nt, Artificial Sequence
  Description of Artificial Sequence: Synthetic oligonucleotide
  Sense strand starting at position 2192 of SEQ ID NO: 318257
gccuaauucgcagaaauga

SEQ ID NO: 548836 - RNA, 19 nt, Artificial Sequence
  Description of Artificial Sequence: Synthetic oligonucleotide
  Antisense strand to SEQ ID NO: 548835
ucauuucugcgaauuaggc

SEQ ID NO: 548837 - RNA, 19 nt, Artificial Sequence
  Description of Artificial Sequence: Synthetic oligonucleotide
  Sense strand starting at position 2200 of SEQ ID NO: 318257
cgcagaaaugaagagcaua

SEQ ID NO: 548838 - RNA, 19 nt, Artificial Sequence
  Description of Artificial Sequence: Synthetic oligonucleotide
  Antisense strand to SEQ ID NO: 548837
uaugcucuucauuucugcg

SEQ ID NO: 548839 - RNA, 19 nt, Artificial Sequence
  Description of Artificial Sequence: Synthetic oligonucleotide
  Sense strand starting at position 2243 of SEQ ID NO: 318257
acucuagaaguuugaggua

SEQ ID NO: 548840 - RNA, 19 nt, Artificial Sequence
  Description of Artificial Sequence: Synthetic oligonucleotide
  Antisense strand to SEQ ID NO: 548839
uaccucaaacuucuagagu

SEQ ID NO: 548841 - RNA, 19 nt, Artificial Sequence
  Description of Artificial Sequence: Synthetic oligonucleotide
  Sense strand starting at position 2248 of SEQ ID NO: 318257
agaaguuugagguauguau

SEQ ID NO: 548842 - RNA, 19 nt, Artificial Sequence
  Description of Artificial Sequence: Synthetic oligonucleotide
  Antisense strand to SEQ ID NO: 548841
auacauaccucaaacuucu

SEQ ID NO: 548843 - RNA, 19 nt, Artificial Sequence
  Description of Artificial Sequence: Synthetic oligonucleotide
  Sense strand starting at position 2283 of SEQ ID NO: 318257
agauaugcauuaguagaua

SEQ ID NO: 548844 - RNA, 19 nt, Artificial Sequence
  Description of Artificial Sequence: Synthetic oligonucleotide
  Antisense strand to SEQ ID NO: 548843
uaucuacuaaugcauaucu

SEQ ID NO: 548845 - RNA, 19 nt, Artificial Sequence
  Description of Artificial Sequence: Synthetic oligonucleotide
  Sense strand starting at position 2308 of SEQ ID NO: 318257
gcuagagaucagugaugac

SEQ ID NO: 548846 - RNA, 19 nt, Artificial Sequence
  Description of Artificial Sequence: Synthetic oligonucleotide
  Antisense strand to SEQ ID NO: 548845
gucaucacugaucucuagc

SEQ ID NO: 548847 - RNA, 19 nt, Artificial Sequence
  Description of Artificial Sequence: Synthetic oligonucleotide
  Sense strand starting at position 2373 of SEQ ID NO: 318257
aagagcuuagccuauguga

SEQ ID NO: 548848 - RNA, 19 nt, Artificial Sequence
  Description of Artificial Sequence: Synthetic oligonucleotide
  Antisense strand to SEQ ID NO: 548847
ucacauaggcuaagcucuu

SEQ ID NO: 548849 - RNA, 19 nt, Artificial Sequence
  Description of Artificial Sequence: Synthetic oligonucleotide
  Sense strand starting at position 2407 of SEQ ID NO: 318257
gcaacaauucuuugauaug

SEQ ID NO: 548850 - RNA, 19 nt, Artificial Sequence
  Description of Artificial Sequence: Synthetic oligonucleotide
  Antisense strand to SEQ ID NO: 548849
cauaucaaagaauuguugc

SEQ ID NO: 548851 - RNA, 19 nt, Artificial Sequence
  Description of Artificial Sequence: Synthetic oligonucleotide
  Sense strand starting at position 2732 of SEQ ID NO: 318257
gaguguaccaguuaggaug

SEQ ID NO: 548852 - RNA, 19 nt, Artificial Sequence
  Description of Artificial Sequence: Synthetic oligonucleotide
  Antisense strand to SEQ ID NO: 548851
cauccuaacugguacacuc

SEQ ID NO: 548853 - RNA, 19 nt, Artificial Sequence
  Description of Artificial Sequence: Synthetic oligonucleotide
  Sense strand starting at position 2740 of SEQ ID NO: 318257
caguuaggauguuuaggaa

SEQ ID NO: 548854 - RNA, 19 nt, Artificial Sequence
  Description of Artificial Sequence: Synthetic oligonucleotide
  Antisense strand to SEQ ID NO: 548853
uuccuaaacauccuaacug

SEQ ID NO: 548855 - RNA, 19 nt, Artificial Sequence
  Description of Artificial Sequence: Synthetic oligonucleotide
  Sense strand starting at position 2747 of SEQ ID NO: 318257
gauguuuaggaaugcaacu

SEQ ID NO: 548856 - RNA, 19 nt, Artificial Sequence
  Description of Artificial Sequence: Synthetic oligonucleotide
  Antisense strand to SEQ ID NO: 548855
aguugcauuccuaaacauc

SEQ ID NO: 548857 - RNA, 19 nt, Artificial Sequence
  Description of Artificial Sequence: Synthetic oligonucleotide
  Sense strand starting at position 2843 of SEQ ID NO: 318257
gcugaacaggccuaugagu

SEQ ID NO: 548858 - RNA, 19 nt, Artificial Sequence
  Description of Artificial Sequence: Synthetic oligonucleotide
  Antisense strand to SEQ ID NO: 548857
acucauaggccuguucagc

SEQ ID NO: 548859 - RNA, 19 nt, Artificial Sequence
  Description of Artificial Sequence: Synthetic oligonucleotide
  Sense strand starting at position 2873 of SEQ ID NO: 318257
ucaauaauguuaucgagga

SEQ ID NO: 548860 - RNA, 19 nt, Artificial Sequence
  Description of Artificial Sequence: Synthetic oligonucleotide
  Antisense strand to SEQ ID NO: 548859
uccucgauaacauuauuga

SEQ ID NO: 548861 - RNA, 19 nt, Artificial Sequence
  Description of Artificial Sequence: Synthetic oligonucleotide
  Sense strand starting at position 2877 of SEQ ID NO: 318257
uaauguuaucgaggaccca

SEQ ID NO: 548862 - RNA, 19 nt, Artificial Sequence
  Description of Artificial Sequence: Synthetic oligonucleotide
  Antisense strand to SEQ ID NO: 548861
uggguccucgauaacauua

SEQ ID NO: 548863 - RNA, 19 nt, Artificial Sequence
  Description of Artificial Sequence: Synthetic oligonucleotide
  Sense strand starting at position 2955 of SEQ ID NO: 318257
cagugauugcaagacagcu

SEQ ID NO: 548864 - RNA, 19 nt, Artificial Sequence
  Description of Artificial Sequence: Synthetic oligonucleotide
  Antisense strand to SEQ ID NO: 548863
agcugucuugcaaucacug

SEQ ID NO: 548865 - RNA, 19 nt, Artificial Sequence
  Description of Artificial Sequence: Synthetic oligonucleotide
  Sense strand starting at position 3240 of SEQ ID NO: 318257
uuguuuccucuugaguaag

SEQ ID NO: 548866 - RNA, 19 nt, Artificial Sequence
  Description of Artificial Sequence: Synthetic oligonucleotide
  Antisense strand to SEQ ID NO: 548865
cuuacucaagaggaaacaa

SEQ ID NO: 548867 - RNA, 19 nt, Artificial Sequence
  Description of Artificial Sequence: Synthetic oligonucleotide
  Sense strand starting at position 3243 of SEQ ID NO: 318257
uuuccucuugaguaagcaa

SEQ ID NO: 548868 - RNA, 19 nt, Artificial Sequence
  Description of Artificial Sequence: Synthetic oligonucleotide
  Antisense strand to SEQ ID NO: 548867
uugcuuacucaagaggaaa

SEQ ID NO: 548869 - RNA, 19 nt, Artificial Sequence
  Description of Artificial Sequence: Synthetic oligonucleotide
  Sense strand starting at position 3246 of SEQ ID NO: 318257
ccucuugaguaagcaaaga

SEQ ID NO: 548870 - RNA, 19 nt, Artificial Sequence
  Description of Artificial Sequence: Synthetic oligonucleotide
  Antisense strand to SEQ ID NO: 548869
ucuuugcuuacucaagagg

SEQ ID NO: 548871 - RNA, 19 nt, Artificial Sequence
  Description of Artificial Sequence: Synthetic oligonucleotide
  Sense strand starting at position 3307 of SEQ ID NO: 318257
gguagagauuucucguguu

SEQ ID NO: 548872 - RNA, 19 nt, Artificial Sequence
  Description of Artificial Sequence: Synthetic oligonucleotide
  Antisense strand to SEQ ID NO: 548871
aacacgagaaaucucuacc

SEQ ID NO: 548873 - RNA, 19 nt, Artificial Sequence
  Description of Artificial Sequence: Synthetic oligonucleotide
  Sense strand starting at position 3692 of SEQ ID NO: 318257
agaaauauccuauacguuc

SEQ ID NO: 548874 - RNA, 19 nt, Artificial Sequence
  Description of Artificial Sequence: Synthetic oligonucleotide
  Antisense strand to SEQ ID NO: 548873
gaacguauaggauauuucu

SEQ ID NO: 548875 - RNA, 19 nt, Artificial Sequence
  Description of Artificial Sequence: Synthetic oligonucleotide
  Sense strand starting at position 3819 of SEQ ID NO: 318257
agguuauaacaauggcaau

SEQ ID NO: 548876 - RNA, 19 nt, Artificial Sequence
  Description of Artificial Sequence: Synthetic oligonucleotide
  Antisense strand to SEQ ID NO: 548875
auugccauuguuauaaccu

SEQ ID NO: 548877 - RNA, 19 nt, Artificial Sequence
  Description of Artificial Sequence: Synthetic oligonucleotide
  Sense strand starting at position 16 of SEQ ID NO: 318258
aguguaaugccucagagug

SEQ ID NO: 548878 - RNA, 19 nt, Artificial Sequence
  Description of Artificial Sequence: Synthetic oligonucleotide
  Antisense strand to SEQ ID NO: 548877
cacucugaggcauuacacu

SEQ ID NO: 548879 - RNA, 19 nt, Artificial Sequence
  Description of Artificial Sequence: Synthetic oligonucleotide
  Sense strand starting at position 22 of SEQ ID NO: 318258
augccucagaguggauauu

SEQ ID NO: 548880 - RNA, 19 nt, Artificial Sequence
  Description of Artificial Sequence: Synthetic oligonucleotide
  Antisense strand to SEQ ID NO: 548879
aauauccacucugaggcau

SEQ ID NO: 548881 - RNA, 19 nt, Artificial Sequence
  Description of Artificial Sequence: Synthetic oligonucleotide
  Sense strand starting at position 43 of SEQ ID NO: 318258
uggaaauggcacugcauua

SEQ ID NO: 548882 - RNA, 19 nt, Artificial Sequence
  Description of Artificial Sequence: Synthetic oligonucleotide
  Antisense strand to SEQ ID NO: 548881
uaaugcagugccauuucca

SEQ ID NO: 548883 - RNA, 19 nt, Artificial Sequence
  Description of Artificial Sequence: Synthetic oligonucleotide
  Sense strand starting at position 485 of SEQ ID NO: 318258
gcagcauugaaagaguaau

SEQ ID NO: 548884 - RNA, 19 nt, Artificial Sequence
  Description of Artificial Sequence: Synthetic oligonucleotide
  Antisense strand to SEQ ID NO: 548883
auuacucuuucaaugcugc

SEQ ID NO: 548885 - RNA, 19 nt, Artificial Sequence
  Description of Artificial Sequence: Synthetic oligonucleotide
  Sense strand starting at position 491 of SEQ ID NO: 318258
uugaaagaguaaucaagug

SEQ ID NO: 548886 - RNA, 19 nt, Artificial Sequence
  Description of Artificial Sequence: Synthetic oligonucleotide
  Antisense strand to SEQ ID NO: 548885
cacuugauuacucuuucaa

SEQ ID NO: 548887 - RNA, 19 nt, Artificial Sequence
  Description of Artificial Sequence: Synthetic oligonucleotide
  Sense strand starting at position 496 of SEQ ID NO: 318258
agaguaaucaaguguaagg

SEQ ID NO: 548888 - RNA, 19 nt, Artificial Sequence
  Description of Artificial Sequence: Synthetic oligonucleotide
  Antisense strand to SEQ ID NO: 548887
ccuuacacuugauuacucu

SEQ ID NO: 548889 - RNA, 19 nt, Artificial Sequence
  Description of Artificial Sequence: Synthetic oligonucleotide
  Sense strand starting at position 811 of SEQ ID NO: 318258
gcaugaacucugcaggguu

SEQ ID NO: 548890 - RNA, 19 nt, Artificial Sequence
  Description of Artificial Sequence: Synthetic oligonucleotide
  Antisense strand to SEQ ID NO: 548889
aacccugcagaguucaugc

SEQ ID NO: 548891 - RNA, 19 nt, Artificial Sequence
  Description of Artificial Sequence: Synthetic oligonucleotide
  Sense strand starting at position 814 of SEQ ID NO: 318258
ugaacucugcaggguugaa

SEQ ID NO: 548892 - RNA, 19 nt, Artificial Sequence
  Description of Artificial Sequence: Synthetic oligonucleotide
  Antisense strand to SEQ ID NO: 548891
uucaacccugcagaguuca

SEQ ID NO: 548893 - RNA, 19 nt, Artificial Sequence
  Description of Artificial Sequence: Synthetic oligonucleotide
  Sense strand starting at position 826 of SEQ ID NO: 318258
gguugaaggguccagcuaa

SEQ ID NO: 548894 - RNA, 19 nt, Artificial Sequence
  Description of Artificial Sequence: Synthetic oligonucleotide
  Antisense strand to SEQ ID NO: 548893
uuagcuggacccuucaacc

SEQ ID NO: 548895 - RNA, 19 nt, Artificial Sequence
  Description of Artificial Sequence: Synthetic oligonucleotide
  Sense strand starting at position 1247 of SEQ ID NO: 318258
gcuagugaacaaugagcua

SEQ ID NO: 548896 - RNA, 19 nt, Artificial Sequence
  Description of Artificial Sequence: Synthetic oligonucleotide
  Antisense strand to SEQ ID NO: 548895
uagcucauuguucacuagc

SEQ ID NO: 548897 - RNA, 19 nt, Artificial Sequence
  Description of Artificial Sequence: Synthetic oligonucleotide
  Sense strand starting at position 1250 of SEQ ID NO: 318258
agugaacaaugagcuaauu

SEQ ID NO: 548898 - RNA, 19 nt, Artificial Sequence
  Description of Artificial Sequence: Synthetic oligonucleotide
  Antisense strand to SEQ ID NO: 548897
aauuagcucauuguucacu

SEQ ID NO: 548899 - RNA, 19 nt, Artificial Sequence
  Description of Artificial Sequence: Synthetic oligonucleotide
  Sense strand starting at position 1335 of SEQ ID NO: 318258
acugcuuacucggcaggaa

SEQ ID NO: 548900 - RNA, 19 nt, Artificial Sequence
  Description of Artificial Sequence: Synthetic oligonucleotide
  Antisense strand to SEQ ID NO: 548899
uuccugccgaguaagcagu

SEQ ID NO: 548901 - RNA, 19 nt, Artificial Sequence
  Description of Artificial Sequence: Synthetic oligonucleotide
  Sense strand starting at position 1336 of SEQ ID NO: 318258
cugcuuacucggcaggaau

SEQ ID NO: 548902 - RNA, 19 nt, Artificial Sequence
  Description of Artificial Sequence: Synthetic oligonucleotide
  Antisense strand to SEQ ID NO: 548901
auuccugccgaguaagcag

SEQ ID NO: 548903 - RNA, 19 nt, Artificial Sequence
  Description of Artificial Sequence: Synthetic oligonucleotide
  Sense strand starting at position 1852 of SEQ ID NO: 318258
caaagaguccgcgaaggau

SEQ ID NO: 548904 - RNA, 19 nt, Artificial Sequence
  Description of Artificial Sequence: Synthetic oligonucleotide
  Antisense strand to SEQ ID NO: 548903
auccuucgcggacucuuug

SEQ ID NO: 548905 - RNA, 19 nt, Artificial Sequence
  Description of Artificial Sequence: Synthetic oligonucleotide
  Sense strand starting at position 2119 of SEQ ID NO: 318258
cugccugcccgucugaaau

SEQ ID NO: 548906 - RNA, 19 nt, Artificial Sequence
  Description of Artificial Sequence: Synthetic oligonucleotide
  Antisense strand to SEQ ID NO: 548905
auuucagacgggcaggcag

SEQ ID NO: 548907 - RNA, 19 nt, Artificial Sequence
  Description of Artificial Sequence: Synthetic oligonucleotide
  Sense strand starting at position 2150 of SEQ ID NO: 318258
aaucgaggauugcuuuaaa

SEQ ID NO: 548908 - RNA, 19 nt, Artificial Sequence
  Description of Artificial Sequence: Synthetic oligonucleotide
  Antisense strand to SEQ ID NO: 548907
uuuaaagcaauccucgauu

SEQ ID NO: 548909 - RNA, 19 nt, Artificial Sequence
  Description of Artificial Sequence: Synthetic oligonucleotide
  Sense strand starting at position 2198 of SEQ ID NO: 318258
uguaaacucgucguucuua

SEQ ID NO: 548910 - RNA, 19 nt, Artificial Sequence
  Description of Artificial Sequence: Synthetic oligonucleotide
  Antisense strand to SEQ ID NO: 548909
uaagaacgacgaguuuaca

SEQ ID NO: 548911 - RNA, 19 nt, Artificial Sequence
  Description of Artificial Sequence: Synthetic oligonucleotide
  Sense strand starting at position 2283 of SEQ ID NO: 318258
uucuguugccaauaaagca

SEQ ID NO: 548912 - RNA, 19 nt, Artificial Sequence
  Description of Artificial Sequence: Synthetic oligonucleotide
  Antisense strand to SEQ ID NO: 548911
ugcuuuauuggcaacagaa

SEQ ID NO: 548913 - RNA, 19 nt, Artificial Sequence
  Description of Artificial Sequence: Synthetic oligonucleotide
  Sense strand starting at position 2388 of SEQ ID NO: 318258
ggaucauagugucuucuaa

SEQ ID NO: 548914 - RNA, 19 nt, Artificial Sequence
  Description of Artificial Sequence: Synthetic oligonucleotide
  Antisense strand to SEQ ID NO: 548913
uuagaagacacuaugaucc

SEQ ID NO: 548915 - RNA, 19 nt, Artificial Sequence
  Description of Artificial Sequence: Synthetic oligonucleotide
  Sense strand starting at position 2494 of SEQ ID NO: 318258
uuuaaacguguuuacagaa

SEQ ID NO: 548916 - RNA, 19 nt, Artificial Sequence
  Description of Artificial Sequence: Synthetic oligonucleotide
  Antisense strand to SEQ ID NO: 548915
uucuguaaacacguuuaaa

SEQ ID NO: 548917 - RNA, 19 nt, Artificial Sequence
  Description of Artificial Sequence: Synthetic oligonucleotide
  Sense strand starting at position 2501 of SEQ ID NO: 318258
guguuuacagaaugucuga

SEQ ID NO: 548918 - RNA, 19 nt, Artificial Sequence
  Description of Artificial Sequence: Synthetic oligonucleotide
  Antisense strand to SEQ ID NO: 548917
ucagacauucuguaaacac

SEQ ID NO: 548919 - RNA, 19 nt, Artificial Sequence
  Description of Artificial Sequence: Synthetic oligonucleotide
  Sense strand starting at position 2679 of SEQ ID NO: 318258
guuagacugcacuggguau

SEQ ID NO: 548920 - RNA, 19 nt, Artificial Sequence
  Description of Artificial Sequence: Synthetic oligonucleotide
  Antisense strand to SEQ ID NO: 548919
auacccagugcagucuaac

SEQ ID NO: 548921 - RNA, 19 nt, Artificial Sequence
  Description of Artificial Sequence: Synthetic oligonucleotide
  Sense strand starting at position 2691 of SEQ ID NO: 318258
uggguaugauguuuaagga

SEQ ID NO: 548922 - RNA, 19 nt, Artificial Sequence
  Description of Artificial Sequence: Synthetic oligonucleotide
  Antisense strand to SEQ ID NO: 548921
uccuuaaacaucauaccca

SEQ ID NO: 548923 - RNA, 19 nt, Artificial Sequence
  Description of Artificial Sequence: Synthetic oligonucleotide
  Sense strand starting at position 2714 of SEQ ID NO: 318258
acugaaagcuucucugaau

SEQ ID NO: 548924 - RNA, 19 nt, Artificial Sequence
  Description of Artificial Sequence: Synthetic oligonucleotide
  Antisense strand to SEQ ID NO: 548923
auucagagaagcuuucagu

SEQ ID NO: 548925 - RNA, 19 nt, Artificial Sequence
  Description of Artificial Sequence: Synthetic oligonucleotide
  Sense strand starting at position 2715 of SEQ ID NO: 318258
cugaaagcuucucugaauu

SEQ ID NO: 548926 - RNA, 19 nt, Artificial Sequence
  Description of Artificial Sequence: Synthetic oligonucleotide
  Antisense strand to SEQ ID NO: 548925
aauucagagaagcuuucag

SEQ ID NO: 548927 - RNA, 19 nt, Artificial Sequence
  Description of Artificial Sequence: Synthetic oligonucleotide
  Sense strand starting at position 2964 of SEQ ID NO: 318258
gcaccucaacauugagauc

SEQ ID NO: 548928 - RNA, 19 nt, Artificial Sequence
  Description of Artificial Sequence: Synthetic oligonucleotide
  Antisense strand to SEQ ID NO: 548927
gaucucaauguugaggugc

SEQ ID NO: 548929 - RNA, 19 nt, Artificial Sequence
  Description of Artificial Sequence: Synthetic oligonucleotide
  Sense strand starting at position 3081 of SEQ ID NO: 318258
cugcuucuacaaggaaaca

SEQ ID NO: 548930 - RNA, 19 nt, Artificial Sequence
  Description of Artificial Sequence: Synthetic oligonucleotide
  Antisense strand to SEQ ID NO: 548929
uguuuccuuguagaagcag

SEQ ID NO: 548931 - RNA, 19 nt, Artificial Sequence
  Description of Artificial Sequence: Synthetic oligonucleotide
  Sense strand starting at position 3126 of SEQ ID NO: 318258
gacuuuaacguuuauguaa

SEQ ID NO: 548932 - RNA, 19 nt, Artificial Sequence
  Description of Artificial Sequence: Synthetic oligonucleotide
  Antisense strand to SEQ ID NO: 548931
uuacauaaacguuaaaguc

SEQ ID NO: 548933 - RNA, 19 nt, Artificial Sequence
  Description of Artificial Sequence: Synthetic oligonucleotide
  Sense strand starting at position 3221 of SEQ ID NO: 318258
aauggagacuuaccauguu

SEQ ID NO: 548934 - RNA, 19 nt, Artificial Sequence
  Description of Artificial Sequence: Synthetic oligonucleotide
  Antisense strand to SEQ ID NO: 548933
aacaugguaagucuccauu

SEQ ID NO: 548935 - RNA, 19 nt, Artificial Sequence
  Description of Artificial Sequence: Synthetic oligonucleotide
  Sense strand starting at position 3411 of SEQ ID NO: 318258
gcuuauuuaucuguugugu

SEQ ID NO: 548936 - RNA, 19 nt, Artificial Sequence
  Description of Artificial Sequence: Synthetic oligonucleotide
  Antisense strand to SEQ ID NO: 548935
acacaacagauaaauaagc

SEQ ID NO: 548937 - RNA, 19 nt, Artificial Sequence
  Description of Artificial Sequence: Synthetic oligonucleotide
  Sense strand starting at position 3468 of SEQ ID NO: 318258
ucuugagucuccucuaggu

SEQ ID NO: 548938 - RNA, 19 nt, Artificial Sequence
  Description of Artificial Sequence: Synthetic oligonucleotide
  Antisense strand to SEQ ID NO: 548937
accuagaggagacucaaga

SEQ ID NO: 548939 - RNA, 19 nt, Artificial Sequence
  Description of Artificial Sequence: Synthetic oligonucleotide
  Sense strand starting at position 3470 of SEQ ID NO: 318258
uugagucuccucuagguga

SEQ ID NO: 548940 - RNA, 19 nt, Artificial Sequence
  Description of Artificial Sequence: Synthetic oligonucleotide
  Antisense strand to SEQ ID NO: 548939
ucaccuagaggagacucaa

SEQ ID NO: 548941 - RNA, 19 nt, Artificial Sequence
  Description of Artificial Sequence: Synthetic oligonucleotide
  Sense strand starting at position 3603 of SEQ ID NO: 318258
ccaucuauccuguaggugu

SEQ ID NO: 548942 - RNA, 19 nt, Artificial Sequence
  Description of Artificial Sequence: Synthetic oligonucleotide
  Antisense strand to SEQ ID NO: 548941
acaccuacaggauagaugg

SEQ ID NO: 548943 - RNA, 19 nt, Artificial Sequence
  Description of Artificial Sequence: Synthetic oligonucleotide
  Sense strand starting at position 3607 of SEQ ID NO: 318258
cuauccuguagguguuaca

SEQ ID NO: 548944 - RNA, 19 nt, Artificial Sequence
  Description of Artificial Sequence: Synthetic oligonucleotide
  Antisense strand to SEQ ID NO: 548943
uguaacaccuacaggauag

SEQ ID NO: 548945 - RNA, 19 nt, Artificial Sequence
  Description of Artificial Sequence: Synthetic oligonucleotide
  Sense strand starting at position 3670 of SEQ ID NO: 318258
ugcuccauuacgggauaaa

SEQ ID NO: 548946 - RNA, 19 nt, Artificial Sequence
  Description of Artificial Sequence: Synthetic oligonucleotide
  Antisense strand to SEQ ID NO: 548945
uuuaucccguaauggagca

SEQ ID NO: 548947 - RNA, 19 nt, Artificial Sequence
  Description of Artificial Sequence: Synthetic oligonucleotide
  Sense strand starting at position 3671 of SEQ ID NO: 318258
gcuccauuacgggauaaag

SEQ ID NO: 548948 - RNA, 19 nt, Artificial Sequence
  Description of Artificial Sequence: Synthetic oligonucleotide
  Antisense strand to SEQ ID NO: 548947
cuuuaucccguaauggagc

SEQ ID NO: 548949 - RNA, 19 nt, Artificial Sequence
  Description of Artificial Sequence: Synthetic oligonucleotide
  Sense strand starting at position 3706 of SEQ ID NO: 318258
gugugacuauagucugacu

SEQ ID NO: 548950 - RNA, 19 nt, Artificial Sequence
  Description of Artificial Sequence: Synthetic oligonucleotide
  Antisense strand to SEQ ID NO: 548949
agucagacuauagucacac

SEQ ID NO: 548951 - RNA, 19 nt, Artificial Sequence
  Description of Artificial Sequence: Synthetic oligonucleotide
  Sense strand starting at position 3708 of SEQ ID NO: 318258
gugacuauagucugacuuu

SEQ ID NO: 548952 - RNA, 19 nt, Artificial Sequence
  Description of Artificial Sequence: Synthetic oligonucleotide
  Antisense strand to SEQ ID NO: 548951
aaagucagacuauagucac

SEQ ID NO: 548953 - RNA, 19 nt, Artificial Sequence
  Description of Artificial Sequence: Synthetic oligonucleotide
  Sense strand starting at position 3711 of SEQ ID NO: 318258
acuauagucugacuuucua

SEQ ID NO: 548954 - RNA, 19 nt, Artificial Sequence
  Description of Artificial Sequence: Synthetic oligonucleotide
  Antisense strand to SEQ ID NO: 548953
uagaaagucagacuauagu

SEQ ID NO: 548955 - RNA, 19 nt, Artificial Sequence
  Description of Artificial Sequence: Synthetic oligonucleotide
  Sense strand starting at position 3831 of SEQ ID NO: 318258
agcaaagucacgcaaagau

SEQ ID NO: 548956 - RNA, 19 nt, Artificial Sequence
  Description of Artificial Sequence: Synthetic oligonucleotide
  Antisense strand to SEQ ID NO: 548955
aucuuugcgugacuuugcu

SEQ ID NO: 548957 - RNA, 19 nt, Artificial Sequence
  Description of Artificial Sequence: Synthetic oligonucleotide
  Sense strand starting at position 83 of SEQ ID NO: 318259
cuggcaguauauuugcaau

SEQ ID NO: 548958 - RNA, 19 nt, Artificial Sequence
  Description of Artificial Sequence: Synthetic oligonucleotide
  Antisense strand to SEQ ID NO: 548957
auugcaaauauacugccag

SEQ ID NO: 548959 - RNA, 19 nt, Artificial Sequence
  Description of Artificial Sequence: Synthetic oligonucleotide
  Sense strand starting at position 85 of SEQ ID NO: 318259
ggcaguauauuugcaauca

SEQ ID NO: 548960 - RNA, 19 nt, Artificial Sequence
  Description of Artificial Sequence: Synthetic oligonucleotide
  Antisense strand to SEQ ID NO: 548959
ugauugcaaauauacugcc

SEQ ID NO: 548961 - RNA, 19 nt, Artificial Sequence
  Description of Artificial Sequence: Synthetic oligonucleotide
  Sense strand starting at position 138 of SEQ ID NO: 318259
aguguaaugccucagagug

SEQ ID NO: 548962 - RNA, 19 nt, Artificial Sequence
  Description of Artificial Sequence: Synthetic oligonucleotide
  Antisense strand to SEQ ID NO: 548961
cacucugaggcauuacacu

SEQ ID NO: 548963 - RNA, 19 nt, Artificial Sequence
  Description of Artificial Sequence: Synthetic oligonucleotide
  Sense strand starting at position 144 of SEQ ID NO: 318259
augccucagaguggauauu

SEQ ID NO: 548964 - RNA, 19 nt, Artificial Sequence
  Description of Artificial Sequence: Synthetic oligonucleotide
  Antisense strand to SEQ ID NO: 548963
aauauccacucugaggcau

SEQ ID NO: 548965 - RNA, 19 nt, Artificial Sequence
  Description of Artificial Sequence: Synthetic oligonucleotide
  Sense strand starting at position 165 of SEQ ID NO: 318259
uggaaauggcacugcauua

SEQ ID NO: 548966 - RNA, 19 nt, Artificial Sequence
  Description of Artificial Sequence: Synthetic oligonucleotide
  Antisense strand to SEQ ID NO: 548965
uaaugcagugccauuucca

SEQ ID NO: 548967 - RNA, 19 nt, Artificial Sequence
  Description of Artificial Sequence: Synthetic oligonucleotide
  Sense strand starting at position 607 of SEQ ID NO: 318259
gcagcauugaaagaguaau

SEQ ID NO: 548968 - RNA, 19 nt, Artificial Sequence
  Description of Artificial Sequence: Synthetic oligonucleotide
  Antisense strand to SEQ ID NO: 548967
auuacucuuucaaugcugc

SEQ ID NO: 548969 - RNA, 19 nt, Artificial Sequence
  Description of Artificial Sequence: Synthetic oligonucleotide
  Sense strand starting at position 613 of SEQ ID NO: 318259
uugaaagaguaaucaagug

SEQ ID NO: 548970 - RNA, 19 nt, Artificial Sequence
  Description of Artificial Sequence: Synthetic oligonucleotide
  Antisense strand to SEQ ID NO: 548969
cacuugauuacucuuucaa

SEQ ID NO: 548971 - RNA, 19 nt, Artificial Sequence
  Description of Artificial Sequence: Synthetic oligonucleotide
  Sense strand starting at position 618 of SEQ ID NO: 318259
agaguaaucaaguguaagg

SEQ ID NO: 548972 - RNA, 19 nt, Artificial Sequence
  Description of Artificial Sequence: Synthetic oligonucleotide
  Antisense strand to SEQ ID NO: 548971
ccuuacacuugauuacucu

SEQ ID NO: 548973 - RNA, 19 nt, Artificial Sequence
  Description of Artificial Sequence: Synthetic oligonucleotide
  Sense strand starting at position 933 of SEQ ID NO: 318259
gcaugaacucugcaggguu

SEQ ID NO: 548974 - RNA, 19 nt, Artificial Sequence
  Description of Artificial Sequence: Synthetic oligonucleotide
  Antisense strand to SEQ ID NO: 548973
aacccugcagaguucaugc

SEQ ID NO: 548975 - RNA, 19 nt, Artificial Sequence
  Description of Artificial Sequence: Synthetic oligonucleotide
  Sense strand starting at position 936 of SEQ ID NO: 318259
ugaacucugcaggguugaa

SEQ ID NO: 548976 - RNA, 19 nt, Artificial Sequence
  Description of Artificial Sequence: Synthetic oligonucleotide
  Antisense strand to SEQ ID NO: 548975
uucaacccugcagaguuca

SEQ ID NO: 548977 - RNA, 19 nt, Artificial Sequence
  Description of Artificial Sequence: Synthetic oligonucleotide
  Sense strand starting at position 948 of SEQ ID NO: 318259
gguugaaggguccagcuaa

SEQ ID NO: 548978 - RNA, 19 nt, Artificial Sequence
  Description of Artificial Sequence: Synthetic oligonucleotide
  Antisense strand to SEQ ID NO: 548977
uuagcuggacccuucaacc

SEQ ID NO: 548979 - RNA, 19 nt, Artificial Sequence
  Description of Artificial Sequence: Synthetic oligonucleotide
  Sense strand starting at position 1369 of SEQ ID NO: 318259
gcuagugaacaaugagcua

SEQ ID NO: 548980 - RNA, 19 nt, Artificial Sequence
  Description of Artificial Sequence: Synthetic oligonucleotide
  Antisense strand to SEQ ID NO: 548979
uagcucauuguucacuagc

SEQ ID NO: 548981 - RNA, 19 nt, Artificial Sequence
  Description of Artificial Sequence: Synthetic oligonucleotide
  Sense strand starting at position 1372 of SEQ ID NO: 318259
agugaacaaugagcuaauu

SEQ ID NO: 548982 - RNA, 19 nt, Artificial Sequence
  Description of Artificial Sequence: Synthetic oligonucleotide
  Antisense strand to SEQ ID NO: 548981
aauuagcucauuguucacu

SEQ ID NO: 548983 - RNA, 19 nt, Artificial Sequence
  Description of Artificial Sequence: Synthetic oligonucleotide
  Sense strand starting at position 1457 of SEQ ID NO: 318259
acugcuuacucggcaggaa

SEQ ID NO: 548984 - RNA, 19 nt, Artificial Sequence
  Description of Artificial Sequence: Synthetic oligonucleotide
  Antisense strand to SEQ ID NO: 548983
uuccugccgaguaagcagu

SEQ ID NO: 548985 - RNA, 19 nt, Artificial Sequence
  Description of Artificial Sequence: Synthetic oligonucleotide
  Sense strand starting at position 1458 of SEQ ID NO: 318259
cugcuuacucggcaggaau

SEQ ID NO: 548986 - RNA, 19 nt, Artificial Sequence
  Description of Artificial Sequence: Synthetic oligonucleotide
  Antisense strand to SEQ ID NO: 548985
auuccugccgaguaagcag

SEQ ID NO: 548987 - RNA, 19 nt, Artificial Sequence
  Description of Artificial Sequence: Synthetic oligonucleotide
  Sense strand starting at position 1974 of SEQ ID NO: 318259
caaagaguccgcgaaggau

SEQ ID NO: 548988 - RNA, 19 nt, Artificial Sequence
  Description of Artificial Sequence: Synthetic oligonucleotide
  Antisense strand to SEQ ID NO: 548987
auccuucgcggacucuuug

SEQ ID NO: 548989 - RNA, 19 nt, Artificial Sequence
  Description of Artificial Sequence: Synthetic oligonucleotide
  Sense strand starting at position 2241 of SEQ ID NO: 318259
cugccugcccgucugaaau

SEQ ID NO: 548990 - RNA, 19 nt, Artificial Sequence
  Description of Artificial Sequence: Synthetic oligonucleotide
  Antisense strand to SEQ ID NO: 548989
auuucagacgggcaggcag

SEQ ID NO: 548991 - RNA, 19 nt, Artificial Sequence
  Description of Artificial Sequence: Synthetic oligonucleotide
  Sense strand starting at position 2272 of SEQ ID NO: 318259
aaucgaggauugcuuuaaa

SEQ ID NO: 548992 - RNA, 19 nt, Artificial Sequence
  Description of Artificial Sequence: Synthetic oligonucleotide
  Antisense strand to SEQ ID NO: 548991
uuuaaagcaauccucgauu

SEQ ID NO: 548993 - RNA, 19 nt, Artificial Sequence
  Description of Artificial Sequence: Synthetic oligonucleotide
  Sense strand starting at position 2320 of SEQ ID NO: 318259
uguaaacucgucguucuua

SEQ ID NO: 548994 - RNA, 19 nt, Artificial Sequence
  Description of Artificial Sequence: Synthetic oligonucleotide
  Antisense strand to SEQ ID NO: 548993
uaagaacgacgaguuuaca

SEQ ID NO: 548995 - RNA, 19 nt, Artificial Sequence
  Description of Artificial Sequence: Synthetic oligonucleotide
  Sense strand starting at position 2405 of SEQ ID NO: 318259
uucuguugccaauaaagca

SEQ ID NO: 548996 - RNA, 19 nt, Artificial Sequence
  Description of Artificial Sequence: Synthetic oligonucleotide
  Antisense strand to SEQ ID NO: 548995
ugcuuuauuggcaacagaa

SEQ ID NO: 548997 - RNA, 19 nt, Artificial Sequence
  Description of Artificial Sequence: Synthetic oligonucleotide
  Sense strand starting at position 2510 of SEQ ID NO: 318259
ggaucauagugucuucuaa

SEQ ID NO: 548998 - RNA, 19 nt, Artificial Sequence
  Description of Artificial Sequence: Synthetic oligonucleotide
  Antisense strand to SEQ ID NO: 548997
uuagaagacacuaugaucc

SEQ ID NO: 548999 - RNA, 19 nt, Artificial Sequence
  Description of Artificial Sequence: Synthetic oligonucleotide
  Sense strand starting at position 2616 of SEQ ID NO: 318259
uuuaaacguguuuacagaa

SEQ ID NO: 549000 - RNA, 19 nt, Artificial Sequence
  Description of Artificial Sequence: Synthetic oligonucleotide
  Antisense strand to SEQ ID NO: 548999
uucuguaaacacguuuaaa

SEQ ID NO: 549001 - RNA, 19 nt, Artificial Sequence
  Description of Artificial Sequence: Synthetic oligonucleotide
  Sense strand starting at position 2623 of SEQ ID NO: 318259
guguuuacagaaugucuga

SEQ ID NO: 549002 - RNA, 19 nt, Artificial Sequence
  Description of Artificial Sequence: Synthetic oligonucleotide
  Antisense strand to SEQ ID NO: 549001
ucagacauucuguaaacac

SEQ ID NO: 549003 - RNA, 19 nt, Artificial Sequence
  Description of Artificial Sequence: Synthetic oligonucleotide
  Sense strand starting at position 2801 of SEQ ID NO: 318259
guuagacugcacuggguau

SEQ ID NO: 549004 - RNA, 19 nt, Artificial Sequence
  Description of Artificial Sequence: Synthetic oligonucleotide
  Antisense strand to SEQ ID NO: 549003
auacccagugcagucuaac

SEQ ID NO: 549005 - RNA, 19 nt, Artificial Sequence
  Description of Artificial Sequence: Synthetic oligonucleotide
  Sense strand starting at position 2813 of SEQ ID NO: 318259
uggguaugauguuuaagga

SEQ ID NO: 549006 - RNA, 19 nt, Artificial Sequence
  Description of Artificial Sequence: Synthetic oligonucleotide
  Antisense strand to SEQ ID NO: 549005
uccuuaaacaucauaccca

SEQ ID NO: 549007 - RNA, 19 nt, Artificial Sequence
  Description of Artificial Sequence: Synthetic oligonucleotide
  Sense strand starting at position 2836 of SEQ ID NO: 318259
acugaaagcuucucugaau

SEQ ID NO: 549008 - RNA, 19 nt, Artificial Sequence
  Description of Artificial Sequence: Synthetic oligonucleotide
  Antisense strand to SEQ ID NO: 549007
auucagagaagcuuucagu

SEQ ID NO: 549009 - RNA, 19 nt, Artificial Sequence
  Description of Artificial Sequence: Synthetic oligonucleotide
  Sense strand starting at position 2837 of SEQ ID NO: 318259
cugaaagcuucucugaauu

SEQ ID NO: 549010 - RNA, 19 nt, Artificial Sequence
  Description of Artificial Sequence: Synthetic oligonucleotide
  Antisense strand to SEQ ID NO: 549009
aauucagagaagcuuucag

SEQ ID NO: 549011 - RNA, 19 nt, Artificial Sequence
  Description of Artificial Sequence: Synthetic oligonucleotide
  Sense strand starting at position 3086 of SEQ ID NO: 318259
gcaccucaacauugagauc

SEQ ID NO: 549012 - RNA, 19 nt, Artificial Sequence
  Description of Artificial Sequence: Synthetic oligonucleotide
  Antisense strand to SEQ ID NO: 549011
gaucucaauguugaggugc

SEQ ID NO: 549013 - RNA, 19 nt, Artificial Sequence
  Description of Artificial Sequence: Synthetic oligonucleotide
  Sense strand starting at position 3203 of SEQ ID NO: 318259
cugcuucuacaaggaaaca

SEQ ID NO: 549014 - RNA, 19 nt, Artificial Sequence
  Description of Artificial Sequence: Synthetic oligonucleotide
  Antisense strand to SEQ ID NO: 549013
uguuuccuuguagaagcag

SEQ ID NO: 549015 - RNA, 19 nt, Artificial Sequence
  Description of Artificial Sequence: Synthetic oligonucleotide
  Sense strand starting at position 3248 of SEQ ID NO: 318259
gacuuuaacguuuauguaa

SEQ ID NO: 549016 - RNA, 19 nt, Artificial Sequence
  Description of Artificial Sequence: Synthetic oligonucleotide
  Antisense strand to SEQ ID NO: 549015
uuacauaaacguuaaaguc

SEQ ID NO: 549017 - RNA, 19 nt, Artificial Sequence
  Description of Artificial Sequence: Synthetic oligonucleotide
  Sense strand starting at position 3343 of SEQ ID NO: 318259
aauggagacuuaccauguu

SEQ ID NO: 549018 - RNA, 19 nt, Artificial Sequence
  Description of Artificial Sequence: Synthetic oligonucleotide
  Antisense strand to SEQ ID NO: 549017
aacaugguaagucuccauu

SEQ ID NO: 549019 - RNA, 19 nt, Artificial Sequence
  Description of Artificial Sequence: Synthetic oligonucleotide
  Sense strand starting at position 3533 of SEQ ID NO: 318259
gcuuauuuaucuguugugu

SEQ ID NO: 549020 - RNA, 19 nt, Artificial Sequence
  Description of Artificial Sequence: Synthetic oligonucleotide
  Antisense strand to SEQ ID NO: 549019
acacaacagauaaauaagc

SEQ ID NO: 549021 - RNA, 19 nt, Artificial Sequence
  Description of Artificial Sequence: Synthetic oligonucleotide
  Sense strand starting at position 3592 of SEQ ID NO: 318259
uugagucuccucuagguga

SEQ ID NO: 549022 - RNA, 19 nt, Artificial Sequence
  Description of Artificial Sequence: Synthetic oligonucleotide
  Antisense strand to SEQ ID NO: 549021
ucaccuagaggagacucaa

SEQ ID NO: 549023 - RNA, 19 nt, Artificial Sequence
  Description of Artificial Sequence: Synthetic oligonucleotide
  Sense strand starting at position 3725 of SEQ ID NO: 318259
ccaucuauccuguaggugu

SEQ ID NO: 549024 - RNA, 19 nt, Artificial Sequence
  Description of Artificial Sequence: Synthetic oligonucleotide
  Antisense strand to SEQ ID NO: 549023
acaccuacaggauagaugg

SEQ ID NO: 549025 - RNA, 19 nt, Artificial Sequence
  Description of Artificial Sequence: Synthetic oligonucleotide
  Sense strand starting at position 3792 of SEQ ID NO: 318259
ugcuccauuacgggauaaa

SEQ ID NO: 549026 - RNA, 19 nt, Artificial Sequence
  Description of Artificial Sequence: Synthetic oligonucleotide
  Antisense strand to SEQ ID NO: 549025
uuuaucccguaauggagca

SEQ ID NO: 549027 - RNA, 19 nt, Artificial Sequence
  Description of Artificial Sequence: Synthetic oligonucleotide
  Sense strand starting at position 3793 of SEQ ID NO: 318259
gcuccauuacgggauaaag

SEQ ID NO: 549028 - RNA, 19 nt, Artificial Sequence
  Description of Artificial Sequence: Synthetic oligonucleotide
  Antisense strand to SEQ ID NO: 549027
cuuuaucccguaauggagc

SEQ ID NO: 549029 - RNA, 19 nt, Artificial Sequence
  Description of Artificial Sequence: Synthetic oligonucleotide
  Sense strand starting at position 3828 of SEQ ID NO: 318259
gugugacuauagucugacu

SEQ ID NO: 549030 - RNA, 19 nt, Artificial Sequence
  Description of Artificial Sequence: Synthetic oligonucleotide
  Antisense strand to SEQ ID NO: 549029
agucagacuauagucacac

SEQ ID NO: 549031 - RNA, 19 nt, Artificial Sequence
  Description of Artificial Sequence: Synthetic oligonucleotide
  Sense strand starting at position 3830 of SEQ ID NO: 318259
gugacuauagucugacuuu

SEQ ID NO: 549032 - RNA, 19 nt, Artificial Sequence
  Description of Artificial Sequence: Synthetic oligonucleotide
  Antisense strand to SEQ ID NO: 549031
aaagucagacuauagucac

SEQ ID NO: 549033 - RNA, 19 nt, Artificial Sequence
  Description of Artificial Sequence: Synthetic oligonucleotide
  Sense strand starting at position 3833 of SEQ ID NO: 318259
acuauagucugacuuucua

SEQ ID NO: 549034 - RNA, 19 nt, Artificial Sequence
  Description of Artificial Sequence: Synthetic oligonucleotide
  Antisense strand to SEQ ID NO: 549033
uagaaagucagacuauagu

SEQ ID NO: 549035 - RNA, 19 nt, Artificial Sequence
  Description of Artificial Sequence: Synthetic oligonucleotide
  Sense strand starting at position 3953 of SEQ ID NO: 318259
agcaaagucacgcaaagau

SEQ ID NO: 549036 - RNA, 19 nt, Artificial Sequence
  Description of Artificial Sequence: Synthetic oligonucleotide
  Antisense strand to SEQ ID NO: 549035
aucuuugcgugacuuugcu

SEQ ID NO: 549037 - RNA, 19 nt, Artificial Sequence
  Description of Artificial Sequence: Synthetic oligonucleotide
  Sense strand starting at position 14 of SEQ ID NO: 318260
auguaacagacugguaaga

SEQ ID NO: 549038 - RNA, 19 nt, Artificial Sequence
  Description of Artificial Sequence: Synthetic oligonucleotide
  Antisense strand to SEQ ID NO: 549037
ucuuaccagucuguuacau

SEQ ID NO: 549039 - RNA, 19 nt, Artificial Sequence
  Description of Artificial Sequence: Synthetic oligonucleotide
  Sense strand starting at position 37 of SEQ ID NO: 318260
cugagaaucuccucugaug

SEQ ID NO: 549040 - RNA, 19 nt, Artificial Sequence
  Description of Artificial Sequence: Synthetic oligonucleotide
  Antisense strand to SEQ ID NO: 549039
caucagaggagauucucag

SEQ ID NO: 549041 - RNA, 19 nt, Artificial Sequence
  Description of Artificial Sequence: Synthetic oligonucleotide
  Sense strand starting at position 228 of SEQ ID NO: 318260
ugguuaagauaaguuacau

SEQ ID NO: 549042 - RNA, 19 nt, Artificial Sequence
  Description of Artificial Sequence: Synthetic oligonucleotide
  Antisense strand to SEQ ID NO: 549041
auguaacuuaucuuaacca

SEQ ID NO: 549043 - RNA, 19 nt, Artificial Sequence
  Description of Artificial Sequence: Synthetic oligonucleotide
  Sense strand starting at position 293 of SEQ ID NO: 318260
ggccuauaggcuuaacuaa

SEQ ID NO: 549044 - RNA, 19 nt, Artificial Sequence
  Description of Artificial Sequence: Synthetic oligonucleotide
  Antisense strand to SEQ ID NO: 549043
uuaguuaagccuauaggcc

SEQ ID NO: 549045 - RNA, 19 nt, Artificial Sequence
  Description of Artificial Sequence: Synthetic oligonucleotide
  Sense strand starting at position 317 of SEQ ID NO: 318260
aaaggaaucccugguacuu

SEQ ID NO: 549046 - RNA, 19 nt, Artificial Sequence
  Description of Artificial Sequence: Synthetic oligonucleotide
  Antisense strand to SEQ ID NO: 549045
aaguaccagggauuccuuu

SEQ ID NO: 549047 - RNA, 19 nt, Artificial Sequence
  Description of Artificial Sequence: Synthetic oligonucleotide
  Sense strand starting at position 377 of SEQ ID NO: 318260
cuuuaaauugcaugaguuc

SEQ ID NO: 549048 - RNA, 19 nt, Artificial Sequence
  Description of Artificial Sequence: Synthetic oligonucleotide
  Antisense strand to SEQ ID NO: 549047
gaacucaugcaauuuaaag

SEQ ID NO: 549049 - RNA, 19 nt, Artificial Sequence
  Description of Artificial Sequence: Synthetic oligonucleotide
  Sense strand starting at position 477 of SEQ ID NO: 318260
cuggcaguauauuugcaau

SEQ ID NO: 549050 - RNA, 19 nt, Artificial Sequence
  Description of Artificial Sequence: Synthetic oligonucleotide
  Antisense strand to SEQ ID NO: 549049
auugcaaauauacugccag

SEQ ID NO: 549051 - RNA, 19 nt, Artificial Sequence
  Description of Artificial Sequence: Synthetic oligonucleotide
  Sense strand starting at position 479 of SEQ ID NO: 318260
ggcaguauauuugcaauca

SEQ ID NO: 549052 - RNA, 19 nt, Artificial Sequence
  Description of Artificial Sequence: Synthetic oligonucleotide
  Antisense strand to SEQ ID NO: 549051
ugauugcaaauauacugcc

SEQ ID NO: 549053 - RNA, 19 nt, Artificial Sequence
  Description of Artificial Sequence: Synthetic oligonucleotide
  Sense strand starting at position 532 of SEQ ID NO: 318260
aguguaaugccucagagug

SEQ ID NO: 549054 - RNA, 19 nt, Artificial Sequence
  Description of Artificial Sequence: Synthetic oligonucleotide
  Antisense strand to SEQ ID NO: 549053
cacucugaggcauuacacu

SEQ ID NO: 549055 - RNA, 19 nt, Artificial Sequence
  Description of Artificial Sequence: Synthetic oligonucleotide
  Sense strand starting at position 538 of SEQ ID NO: 318260
augccucagaguggauauu

SEQ ID NO: 549056 - RNA, 19 nt, Artificial Sequence
  Description of Artificial Sequence: Synthetic oligonucleotide
  Antisense strand to SEQ ID NO: 549055
aauauccacucugaggcau

SEQ ID NO: 549057 - RNA, 19 nt, Artificial Sequence
  Description of Artificial Sequence: Synthetic oligonucleotide
  Sense strand starting at position 559 of SEQ ID NO: 318260
uggaaauggcacugcauua

SEQ ID NO: 549058 - RNA, 19 nt, Artificial Sequence
  Description of Artificial Sequence: Synthetic oligonucleotide
  Antisense strand to SEQ ID NO: 549057
uaaugcagugccauuucca

SEQ ID NO: 549059 - RNA, 19 nt, Artificial Sequence
  Description of Artificial Sequence: Synthetic oligonucleotide
  Sense strand starting at position 577 of SEQ ID NO: 318260
acauaaccuuccguguuua

SEQ ID NO: 549060 - RNA, 19 nt, Artificial Sequence
  Description of Artificial Sequence: Synthetic oligonucleotide
  Antisense strand to SEQ ID NO: 549059
uaaacacggaagguuaugu

SEQ ID NO: 549061 - RNA, 19 nt, Artificial Sequence
  Description of Artificial Sequence: Synthetic oligonucleotide
  Sense strand starting at position 1001 of SEQ ID NO: 318260
gcagcauugaaagaguaau

SEQ ID NO: 549062 - RNA, 19 nt, Artificial Sequence
  Description of Artificial Sequence: Synthetic oligonucleotide
  Antisense strand to SEQ ID NO: 549061
auuacucuuucaaugcugc

SEQ ID NO: 549063 - RNA, 19 nt, Artificial Sequence
  Description of Artificial Sequence: Synthetic oligonucleotide
  Sense strand starting at position 1007 of SEQ ID NO: 318260
uugaaagaguaaucaagug

SEQ ID NO: 549064 - RNA, 19 nt, Artificial Sequence
  Description of Artificial Sequence: Synthetic oligonucleotide
  Antisense strand to SEQ ID NO: 549063
cacuugauuacucuuucaa

SEQ ID NO: 549065 - RNA, 19 nt, Artificial Sequence
  Description of Artificial Sequence: Synthetic oligonucleotide
  Sense strand starting at position 1012 of SEQ ID NO: 318260
agaguaaucaaguguaagg

SEQ ID NO: 549066 - RNA, 19 nt, Artificial Sequence
  Description of Artificial Sequence: Synthetic oligonucleotide
  Antisense strand to SEQ ID NO: 549065
ccuuacacuugauuacucu

SEQ ID NO: 549067 - RNA, 19 nt, Artificial Sequence
  Description of Artificial Sequence: Synthetic oligonucleotide
  Sense strand starting at position 1327 of SEQ ID NO: 318260
gcaugaacucugcaggguu

SEQ ID NO: 549068 - RNA, 19 nt, Artificial Sequence
  Description of Artificial Sequence: Synthetic oligonucleotide
  Antisense strand to SEQ ID NO: 549067
aacccugcagaguucaugc

SEQ ID NO: 549069 - RNA, 19 nt, Artificial Sequence
  Description of Artificial Sequence: Synthetic oligonucleotide
  Sense strand starting at position 1330 of SEQ ID NO: 318260
ugaacucugcaggguugaa

SEQ ID NO: 549070 - RNA, 19 nt, Artificial Sequence
  Description of Artificial Sequence: Synthetic oligonucleotide
  Antisense strand to SEQ ID NO: 549069
uucaacccugcagaguuca

SEQ ID NO: 549071 - RNA, 19 nt, Artificial Sequence
  Description of Artificial Sequence: Synthetic oligonucleotide
  Sense strand starting at position 1342 of SEQ ID NO: 318260
gguugaaggguccagcuaa

SEQ ID NO: 549072 - RNA, 19 nt, Artificial Sequence
  Description of Artificial Sequence: Synthetic oligonucleotide
  Antisense strand to SEQ ID NO: 549071
uuagcuggacccuucaacc

SEQ ID NO: 549073 - RNA, 19 nt, Artificial Sequence
  Description of Artificial Sequence: Synthetic oligonucleotide
  Sense strand starting at position 1763 of SEQ ID NO: 318260
gcuagugaacaaugagcua

SEQ ID NO: 549074 - RNA, 19 nt, Artificial Sequence
  Description of Artificial Sequence: Synthetic oligonucleotide
  Antisense strand to SEQ ID NO: 549073
uagcucauuguucacuagc

SEQ ID NO: 549075 - RNA, 19 nt, Artificial Sequence
  Description of Artificial Sequence: Synthetic oligonucleotide
  Sense strand starting at position 1766 of SEQ ID NO: 318260
agugaacaaugagcuaauu

SEQ ID NO: 549076 - RNA, 19 nt, Artificial Sequence
  Description of Artificial Sequence: Synthetic oligonucleotide
  Antisense strand to SEQ ID NO: 549075
aauuagcucauuguucacu

SEQ ID NO: 549077 - RNA, 19 nt, Artificial Sequence
  Description of Artificial Sequence: Synthetic oligonucleotide
  Sense strand starting at position 1851 of SEQ ID NO: 318260
acugcuuacucggcaggaa

SEQ ID NO: 549078 - RNA, 19 nt, Artificial Sequence
  Description of Artificial Sequence: Synthetic oligonucleotide
  Antisense strand to SEQ ID NO: 549077
uuccugccgaguaagcagu

SEQ ID NO: 549079 - RNA, 19 nt, Artificial Sequence
  Description of Artificial Sequence: Synthetic oligonucleotide
  Sense strand starting at position 1852 of SEQ ID NO: 318260
cugcuuacucggcaggaau

SEQ ID NO: 549080 - RNA, 19 nt, Artificial Sequence
  Description of Artificial Sequence: Synthetic oligonucleotide
  Antisense strand to SEQ ID NO: 549079
auuccugccgaguaagcag

SEQ ID NO: 549081 - RNA, 19 nt, Artificial Sequence
  Description of Artificial Sequence: Synthetic oligonucleotide
  Sense strand starting at position 2368 of SEQ ID NO: 318260
caaagaguccgcgaaggau

SEQ ID NO: 549082 - RNA, 19 nt, Artificial Sequence
  Description of Artificial Sequence: Synthetic oligonucleotide
  Antisense strand to SEQ ID NO: 549081
auccuucgcggacucuuug

SEQ ID NO: 549083 - RNA, 19 nt, Artificial Sequence
  Description of Artificial Sequence: Synthetic oligonucleotide
  Sense strand starting at position 2635 of SEQ ID NO: 318260
cugccugcccgucugaaau

SEQ ID NO: 549084 - RNA, 19 nt, Artificial Sequence
  Description of Artificial Sequence: Synthetic oligonucleotide
  Antisense strand to SEQ ID NO: 549083
auuucagacgggcaggcag

SEQ ID NO: 549085 - RNA, 19 nt, Artificial Sequence
  Description of Artificial Sequence: Synthetic oligonucleotide
  Sense strand starting at position 2666 of SEQ ID NO: 318260
aaucgaggauugcuuuaaa

SEQ ID NO: 549086 - RNA, 19 nt, Artificial Sequence
  Description of Artificial Sequence: Synthetic oligonucleotide
  Antisense strand to SEQ ID NO: 549085
uuuaaagcaauccucgauu

SEQ ID NO: 549087 - RNA, 19 nt, Artificial Sequence
  Description of Artificial Sequence: Synthetic oligonucleotide
  Sense strand starting at position 2714 of SEQ ID NO: 318260
uguaaacucgucguucuua

SEQ ID NO: 549088 - RNA, 19 nt, Artificial Sequence
  Description of Artificial Sequence: Synthetic oligonucleotide
  Antisense strand to SEQ ID NO: 549087
uaagaacgacgaguuuaca

SEQ ID NO: 549089 - RNA, 19 nt, Artificial Sequence
  Description of Artificial Sequence: Synthetic oligonucleotide
  Sense strand starting at position 2799 of SEQ ID NO: 318260
uucuguugccaauaaagca

SEQ ID NO: 549090 - RNA, 19 nt, Artificial Sequence
  Description of Artificial Sequence: Synthetic oligonucleotide
  Antisense strand to SEQ ID NO: 549089
ugcuuuauuggcaacagaa

SEQ ID NO: 549091 - RNA, 19 nt, Artificial Sequence
  Description of Artificial Sequence: Synthetic oligonucleotide
  Sense strand starting at position 2904 of SEQ ID NO: 318260
ggaucauagugucuucuaa

SEQ ID NO: 549092 - RNA, 19 nt, Artificial Sequence
  Description of Artificial Sequence: Synthetic oligonucleotide
  Antisense strand to SEQ ID NO: 549091
uuagaagacacuaugaucc

SEQ ID NO: 549093 - RNA, 19 nt, Artificial Sequence
  Description of Artificial Sequence: Synthetic oligonucleotide
  Sense strand starting at position 3010 of SEQ ID NO: 318260
uuuaaacguguuuacagaa

SEQ ID NO: 549094 - RNA, 19 nt, Artificial Sequence
  Description of Artificial Sequence: Synthetic oligonucleotide
  Antisense strand to SEQ ID NO: 549093
uucuguaaacacguuuaaa

SEQ ID NO: 549095 - RNA, 19 nt, Artificial Sequence
  Description of Artificial Sequence: Synthetic oligonucleotide
  Sense strand starting at position 3017 of SEQ ID NO: 318260
guguuuacagaaugucuga

SEQ ID NO: 549096 - RNA, 19 nt, Artificial Sequence
  Description of Artificial Sequence: Synthetic oligonucleotide
  Antisense strand to SEQ ID NO: 549095
ucagacauucuguaaacac

SEQ ID NO: 549097 - RNA, 19 nt, Artificial Sequence
  Description of Artificial Sequence: Synthetic oligonucleotide
  Sense strand starting at position 3118 of SEQ ID NO: 318260
cugaguucucuguaugcuu

SEQ ID NO: 549098 - RNA, 19 nt, Artificial Sequence
  Description of Artificial Sequence: Synthetic oligonucleotide
  Antisense strand to SEQ ID NO: 549097
aagcauacagagaacucag

SEQ ID NO: 549099 - RNA, 19 nt, Artificial Sequence
  Description of Artificial Sequence: Synthetic oligonucleotide
  Sense strand starting at position 3195 of SEQ ID NO: 318260
guuagacugcacuggguau

SEQ ID NO: 549100 - RNA, 19 nt, Artificial Sequence
  Description of Artificial Sequence: Synthetic oligonucleotide
  Antisense strand to SEQ ID NO: 549099
auacccagugcagucuaac

SEQ ID NO: 549101 - RNA, 19 nt, Artificial Sequence
  Description of Artificial Sequence: Synthetic oligonucleotide
  Sense strand starting at position 3207 of SEQ ID NO: 318260
uggguaugauguuuaagga

SEQ ID NO: 549102 - RNA, 19 nt, Artificial Sequence
  Description of Artificial Sequence: Synthetic oligonucleotide
  Antisense strand to SEQ ID NO: 549101
uccuuaaacaucauaccca

SEQ ID NO: 549103 - RNA, 19 nt, Artificial Sequence
  Description of Artificial Sequence: Synthetic oligonucleotide
  Sense strand starting at position 3230 of SEQ ID NO: 318260
acugaaagcuucucugaau

SEQ ID NO: 549104 - RNA, 19 nt, Artificial Sequence
  Description of Artificial Sequence: Synthetic oligonucleotide
  Antisense strand to SEQ ID NO: 549103
auucagagaagcuuucagu

SEQ ID NO: 549105 - RNA, 19 nt, Artificial Sequence
  Description of Artificial Sequence: Synthetic oligonucleotide
  Sense strand starting at position 3231 of SEQ ID NO: 318260
cugaaagcuucucugaauu

SEQ ID NO: 549106 - RNA, 19 nt, Artificial Sequence
  Description of Artificial Sequence: Synthetic oligonucleotide
  Antisense strand to SEQ ID NO: 549105
aauucagagaagcuuucag

SEQ ID NO: 549107 - RNA, 19 nt, Artificial Sequence
  Description of Artificial Sequence: Synthetic oligonucleotide
  Sense strand starting at position 3480 of SEQ ID NO: 318260
gcaccucaacauugagauc

SEQ ID NO: 549108 - RNA, 19 nt, Artificial Sequence
  Description of Artificial Sequence: Synthetic oligonucleotide
  Antisense strand to SEQ ID NO: 549107
gaucucaauguugaggugc

SEQ ID NO: 549109 - RNA, 19 nt, Artificial Sequence
  Description of Artificial Sequence: Synthetic oligonucleotide
  Sense strand starting at position 3597 of SEQ ID NO: 318260
cugcuucuacaaggaaaca

SEQ ID NO: 549110 - RNA, 19 nt, Artificial Sequence
  Description of Artificial Sequence: Synthetic oligonucleotide
  Antisense strand to SEQ ID NO: 549109
uguuuccuuguagaagcag

SEQ ID NO: 549111 - RNA, 19 nt, Artificial Sequence
  Description of Artificial Sequence: Synthetic oligonucleotide
  Sense strand starting at position 3642 of SEQ ID NO: 318260
gacuuuaacguuuauguaa

SEQ ID NO: 549112 - RNA, 19 nt, Artificial Sequence
  Description of Artificial Sequence: Synthetic oligonucleotide
  Antisense strand to SEQ ID NO: 549111
uuacauaaacguuaaaguc

SEQ ID NO: 549113 - RNA, 19 nt, Artificial Sequence
  Description of Artificial Sequence: Synthetic oligonucleotide
  Sense strand starting at position 3737 of SEQ ID NO: 318260
aauggagacuuaccauguu

SEQ ID NO: 549114 - RNA, 19 nt, Artificial Sequence
  Description of Artificial Sequence: Synthetic oligonucleotide
  Antisense strand to SEQ ID NO: 549113
aacaugguaagucuccauu

SEQ ID NO: 549115 - RNA, 19 nt, Artificial Sequence
  Description of Artificial Sequence: Synthetic oligonucleotide
  Sense strand starting at position 3927 of SEQ ID NO: 318260
gcuuauuuaucuguugugu

SEQ ID NO: 549116 - RNA, 19 nt, Artificial Sequence
  Description of Artificial Sequence: Synthetic oligonucleotide
  Antisense strand to SEQ ID NO: 549115
acacaacagauaaauaagc

SEQ ID NO: 549117 - RNA, 19 nt, Artificial Sequence
  Description of Artificial Sequence: Synthetic oligonucleotide
  Sense strand starting at position 125 of SEQ ID NO: 318261
gguugaggcggaugaagau

SEQ ID NO: 549118 - RNA, 19 nt, Artificial Sequence
  Description of Artificial Sequence: Synthetic oligonucleotide
  Antisense strand to SEQ ID NO: 549117
aucuucauccgccucaacc

SEQ ID NO: 549119 - RNA, 19 nt, Artificial Sequence
  Description of Artificial Sequence: Synthetic oligonucleotide
  Sense strand starting at position 138 of SEQ ID NO: 318261
gaagaugggugguugauau

SEQ ID NO: 549120 - RNA, 19 nt, Artificial Sequence
  Description of Artificial Sequence: Synthetic oligonucleotide
  Antisense strand to SEQ ID NO: 549119
auaucaaccacccaucuuc

SEQ ID NO: 549121 - RNA, 19 nt, Artificial Sequence
  Description of Artificial Sequence: Synthetic oligonucleotide
  Sense strand starting at position 142 of SEQ ID NO: 318261
augggugguugauauuuau

SEQ ID NO: 549122 - RNA, 19 nt, Artificial Sequence
  Description of Artificial Sequence: Synthetic oligonucleotide
  Antisense strand to SEQ ID NO: 549121
auaaauaucaaccacccau

SEQ ID NO: 549123 - RNA, 19 nt, Artificial Sequence
  Description of Artificial Sequence: Synthetic oligonucleotide
  Sense strand starting at position 161 of SEQ ID NO: 318261
auguaacagacugguaaga

SEQ ID NO: 549124 - RNA, 19 nt, Artificial Sequence
  Description of Artificial Sequence: Synthetic oligonucleotide
  Antisense strand to SEQ ID NO: 549123
ucuuaccagucuguuacau

SEQ ID NO: 549125 - RNA, 19 nt, Artificial Sequence
  Description of Artificial Sequence: Synthetic oligonucleotide
  Sense strand starting at position 184 of SEQ ID NO: 318261
cugagaaucuccucugaug

SEQ ID NO: 549126 - RNA, 19 nt, Artificial Sequence
  Description of Artificial Sequence: Synthetic oligonucleotide
  Antisense strand to SEQ ID NO: 549125
caucagaggagauucucag

SEQ ID NO: 549127 - RNA, 19 nt, Artificial Sequence
  Description of Artificial Sequence: Synthetic oligonucleotide
  Sense strand starting at position 375 of SEQ ID NO: 318261
ugguuaagauaaguuacau

SEQ ID NO: 549128 - RNA, 19 nt, Artificial Sequence
  Description of Artificial Sequence: Synthetic oligonucleotide
  Antisense strand to SEQ ID NO: 549127
auguaacuuaucuuaacca

SEQ ID NO: 549129 - RNA, 19 nt, Artificial Sequence
  Description of Artificial Sequence: Synthetic oligonucleotide
  Sense strand starting at position 440 of SEQ ID NO: 318261
ggccuauaggcuuaacuaa

SEQ ID NO: 549130 - RNA, 19 nt, Artificial Sequence
  Description of Artificial Sequence: Synthetic oligonucleotide
  Antisense strand to SEQ ID NO: 549129
uuaguuaagccuauaggcc

SEQ ID NO: 549131 - RNA, 19 nt, Artificial Sequence
  Description of Artificial Sequence: Synthetic oligonucleotide
  Sense strand starting at position 464 of SEQ ID NO: 318261
aaaggaaucccugguacuu

SEQ ID NO: 549132 - RNA, 19 nt, Artificial Sequence
  Description of Artificial Sequence: Synthetic oligonucleotide
  Antisense strand to SEQ ID NO: 549131
aaguaccagggauuccuuu

SEQ ID NO: 549133 - RNA, 19 nt, Artificial Sequence
  Description of Artificial Sequence: Synthetic oligonucleotide
  Sense strand starting at position 524 of SEQ ID NO: 318261
cuuuaaauugcaugaguuc

SEQ ID NO: 549134 - RNA, 19 nt, Artificial Sequence
  Description of Artificial Sequence: Synthetic oligonucleotide
  Antisense strand to SEQ ID NO: 549133
gaacucaugcaauuuaaag

SEQ ID NO: 549135 - RNA, 19 nt, Artificial Sequence
  Description of Artificial Sequence: Synthetic oligonucleotide
  Sense strand starting at position 624 of SEQ ID NO: 318261
cuggcaguauauuugcaau

SEQ ID NO: 549136 - RNA, 19 nt, Artificial Sequence
  Description of Artificial Sequence: Synthetic oligonucleotide
  Antisense strand to SEQ ID NO: 549135
auugcaaauauacugccag

SEQ ID NO: 549137 - RNA, 19 nt, Artificial Sequence
  Description of Artificial Sequence: Synthetic oligonucleotide
  Sense strand starting at position 626 of SEQ ID NO: 318261
ggcaguauauuugcaauca

SEQ ID NO: 549138 - RNA, 19 nt, Artificial Sequence
  Description of Artificial Sequence: Synthetic oligonucleotide
  Antisense strand to SEQ ID NO: 549137
ugauugcaaauauacugcc

SEQ ID NO: 549139 - RNA, 19 nt, Artificial Sequence
  Description of Artificial Sequence: Synthetic oligonucleotide
  Sense strand starting at position 679 of SEQ ID NO: 318261
aguguaaugccucagagug

SEQ ID NO: 549140 - RNA, 19 nt, Artificial Sequence
  Description of Artificial Sequence: Synthetic oligonucleotide
  Antisense strand to SEQ ID NO: 549139
cacucugaggcauuacacu

SEQ ID NO: 549141 - RNA, 19 nt, Artificial Sequence
  Description of Artificial Sequence: Synthetic oligonucleotide
  Sense strand starting at position 685 of SEQ ID NO: 318261
augccucagaguggauauu

SEQ ID NO: 549142 - RNA, 19 nt, Artificial Sequence
  Description of Artificial Sequence: Synthetic oligonucleotide
  Antisense strand to SEQ ID NO: 549141
aauauccacucugaggcau

SEQ ID NO: 549143 - RNA, 19 nt, Artificial Sequence
  Description of Artificial Sequence: Synthetic oligonucleotide
  Sense strand starting at position 706 of SEQ ID NO: 318261
uggaaauggcacugcauua

SEQ ID NO: 549144 - RNA, 19 nt, Artificial Sequence
  Description of Artificial Sequence: Synthetic oligonucleotide
  Antisense strand to SEQ ID NO: 549143
uaaugcagugccauuucca

SEQ ID NO: 549145 - RNA, 19 nt, Artificial Sequence
  Description of Artificial Sequence: Synthetic oligonucleotide
  Sense strand starting at position 1148 of SEQ ID NO: 318261
gcagcauugaaagaguaau

SEQ ID NO: 549146 - RNA, 19 nt, Artificial Sequence
  Description of Artificial Sequence: Synthetic oligonucleotide
  Antisense strand to SEQ ID NO: 549145
auuacucuuucaaugcugc

SEQ ID NO: 549147 - RNA, 19 nt, Artificial Sequence
  Description of Artificial Sequence: Synthetic oligonucleotide
  Sense strand starting at position 1154 of SEQ ID NO: 318261
uugaaagaguaaucaagug

SEQ ID NO: 549148 - RNA, 19 nt, Artificial Sequence
  Description of Artificial Sequence: Synthetic oligonucleotide
  Antisense strand to SEQ ID NO: 549147
cacuugauuacucuuucaa

SEQ ID NO: 549149 - RNA, 19 nt, Artificial Sequence
  Description of Artificial Sequence: Synthetic oligonucleotide
  Sense strand starting at position 1159 of SEQ ID NO: 318261
agaguaaucaaguguaagg

SEQ ID NO: 549150 - RNA, 19 nt, Artificial Sequence
  Description of Artificial Sequence: Synthetic oligonucleotide
  Antisense strand to SEQ ID NO: 549149
ccuuacacuugauuacucu

SEQ ID NO: 549151 - RNA, 19 nt, Artificial Sequence
  Description of Artificial Sequence: Synthetic oligonucleotide
  Sense strand starting at position 1474 of SEQ ID NO: 318261
gcaugaacucugcaggguu

SEQ ID NO: 549152 - RNA, 19 nt, Artificial Sequence
  Description of Artificial Sequence: Synthetic oligonucleotide
  Antisense strand to SEQ ID NO: 549151
aacccugcagaguucaugc

SEQ ID NO: 549153 - RNA, 19 nt, Artificial Sequence
  Description of Artificial Sequence: Synthetic oligonucleotide
  Sense strand starting at position 1477 of SEQ ID NO: 318261
ugaacucugcaggguugaa

SEQ ID NO: 549154 - RNA, 19 nt, Artificial Sequence
  Description of Artificial Sequence: Synthetic oligonucleotide
  Antisense strand to SEQ ID NO: 549153
uucaacccugcagaguuca

SEQ ID NO: 549155 - RNA, 19 nt, Artificial Sequence
  Description of Artificial Sequence: Synthetic oligonucleotide
  Sense strand starting at position 1489 of SEQ ID NO: 318261
gguugaaggguccagcuaa

SEQ ID NO: 549156 - RNA, 19 nt, Artificial Sequence
  Description of Artificial Sequence: Synthetic oligonucleotide
  Antisense strand to SEQ ID NO: 549155
uuagcuggacccuucaacc

SEQ ID NO: 549157 - RNA, 19 nt, Artificial Sequence
  Description of Artificial Sequence: Synthetic oligonucleotide
  Sense strand starting at position 1910 of SEQ ID NO: 318261
gcuagugaacaaugagcua

SEQ ID NO: 549158 - RNA, 19 nt, Artificial Sequence
  Description of Artificial Sequence: Synthetic oligonucleotide
  Antisense strand to SEQ ID NO: 549157
uagcucauuguucacuagc

SEQ ID NO: 549159 - RNA, 19 nt, Artificial Sequence
  Description of Artificial Sequence: Synthetic oligonucleotide
  Sense strand starting at position 1913 of SEQ ID NO: 318261
agugaacaaugagcuaauu

SEQ ID NO: 549160 - RNA, 19 nt, Artificial Sequence
  Description of Artificial Sequence: Synthetic oligonucleotide
  Antisense strand to SEQ ID NO: 549159
aauuagcucauuguucacu

SEQ ID NO: 549161 - RNA, 19 nt, Artificial Sequence
  Description of Artificial Sequence: Synthetic oligonucleotide
  Sense strand starting at position 1998 of SEQ ID NO: 318261
acugcuuacucggcaggaa

SEQ ID NO: 549162 - RNA, 19 nt, Artificial Sequence
  Description of Artificial Sequence: Synthetic oligonucleotide
  Antisense strand to SEQ ID NO: 549161
uuccugccgaguaagcagu

SEQ ID NO: 549163 - RNA, 19 nt, Artificial Sequence
  Description of Artificial Sequence: Synthetic oligonucleotide
  Sense strand starting at position 1999 of SEQ ID NO: 318261
cugcuuacucggcaggaau

SEQ ID NO: 549164 - RNA, 19 nt, Artificial Sequence
  Description of Artificial Sequence: Synthetic oligonucleotide
  Antisense strand to SEQ ID NO: 549163
auuccugccgaguaagcag

SEQ ID NO: 549165 - RNA, 19 nt, Artificial Sequence
  Description of Artificial Sequence: Synthetic oligonucleotide
  Sense strand starting at position 2515 of SEQ ID NO: 318261
caaagaguccgcgaaggau

SEQ ID NO: 549166 - RNA, 19 nt, Artificial Sequence
  Description of Artificial Sequence: Synthetic oligonucleotide
  Antisense strand to SEQ ID NO: 549165
auccuucgcggacucuuug

SEQ ID NO: 549167 - RNA, 19 nt, Artificial Sequence
  Description of Artificial Sequence: Synthetic oligonucleotide
  Sense strand starting at position 2782 of SEQ ID NO: 318261
cugccugcccgucugaaau

SEQ ID NO: 549168 - RNA, 19 nt, Artificial Sequence
  Description of Artificial Sequence: Synthetic oligonucleotide
  Antisense strand to SEQ ID NO: 549167
auuucagacgggcaggcag

SEQ ID NO: 549169 - RNA, 19 nt, Artificial Sequence
  Description of Artificial Sequence: Synthetic oligonucleotide
  Sense strand starting at position 2813 of SEQ ID NO: 318261
aaucgaggauugcuuuaaa

SEQ ID NO: 549170 - RNA, 19 nt, Artificial Sequence
  Description of Artificial Sequence: Synthetic oligonucleotide
  Antisense strand to SEQ ID NO: 549169
uuuaaagcaauccucgauu

SEQ ID NO: 549171 - RNA, 19 nt, Artificial Sequence
  Description of Artificial Sequence: Synthetic oligonucleotide
  Sense strand starting at position 2861 of SEQ ID NO: 318261
uguaaacucgucguucuua

SEQ ID NO: 549172 - RNA, 19 nt, Artificial Sequence
  Description of Artificial Sequence: Synthetic oligonucleotide
  Antisense strand to SEQ ID NO: 549171
uaagaacgacgaguuuaca

SEQ ID NO: 549173 - RNA, 19 nt, Artificial Sequence
  Description of Artificial Sequence: Synthetic oligonucleotide
  Sense strand starting at position 2946 of SEQ ID NO: 318261
uucuguugccaauaaagca

SEQ ID NO: 549174 - RNA, 19 nt, Artificial Sequence
  Description of Artificial Sequence: Synthetic oligonucleotide
  Antisense strand to SEQ ID NO: 549173
ugcuuuauuggcaacagaa

SEQ ID NO: 549175 - RNA, 19 nt, Artificial Sequence
  Description of Artificial Sequence: Synthetic oligonucleotide
  Sense strand starting at position 3051 of SEQ ID NO: 318261
ggaucauagugucuucuaa

SEQ ID NO: 549176 - RNA, 19 nt, Artificial Sequence
  Description of Artificial Sequence: Synthetic oligonucleotide
  Antisense strand to SEQ ID NO: 549175
uuagaagacacuaugaucc

SEQ ID NO: 549177 - RNA, 19 nt, Artificial Sequence
  Description of Artificial Sequence: Synthetic oligonucleotide
  Sense strand starting at position 3157 of SEQ ID NO: 318261
uuuaaacguguuuacagaa

SEQ ID NO: 549178 - RNA, 19 nt, Artificial Sequence
  Description of Artificial Sequence: Synthetic oligonucleotide
  Antisense strand to SEQ ID NO: 549177
uucuguaaacacguuuaaa

SEQ ID NO: 549179 - RNA, 19 nt, Artificial Sequence
  Description of Artificial Sequence: Synthetic oligonucleotide
  Sense strand starting at position 3164 of SEQ ID NO: 318261
guguuuacagaaugucuga

SEQ ID NO: 549180 - RNA, 19 nt, Artificial Sequence
  Description of Artificial Sequence: Synthetic oligonucleotide
  Antisense strand to SEQ ID NO: 549179
ucagacauucuguaaacac

SEQ ID NO: 549181 - RNA, 19 nt, Artificial Sequence
  Description of Artificial Sequence: Synthetic oligonucleotide
  Sense strand starting at position 3342 of SEQ ID NO: 318261
guuagacugcacuggguau

SEQ ID NO: 549182 - RNA, 19 nt, Artificial Sequence
  Description of Artificial Sequence: Synthetic oligonucleotide
  Antisense strand to SEQ ID NO: 549181
auacccagugcagucuaac

SEQ ID NO: 549183 - RNA, 19 nt, Artificial Sequence
  Description of Artificial Sequence: Synthetic oligonucleotide
  Sense strand starting at position 3354 of SEQ ID NO: 318261
uggguaugauguuuaagga

SEQ ID NO: 549184 - RNA, 19 nt, Artificial Sequence
  Description of Artificial Sequence: Synthetic oligonucleotide
  Antisense strand to SEQ ID NO: 549183
uccuuaaacaucauaccca

SEQ ID NO: 549185 - RNA, 19 nt, Artificial Sequence
  Description of Artificial Sequence: Synthetic oligonucleotide
  Sense strand starting at position 3377 of SEQ ID NO: 318261
acugaaagcuucucugaau

SEQ ID NO: 549186 - RNA, 19 nt, Artificial Sequence
  Description of Artificial Sequence: Synthetic oligonucleotide
  Antisense strand to SEQ ID NO: 549185
auucagagaagcuuucagu

SEQ ID NO: 549187 - RNA, 19 nt, Artificial Sequence
  Description of Artificial Sequence: Synthetic oligonucleotide
  Sense strand starting at position 3378 of SEQ ID NO: 318261
cugaaagcuucucugaauu

SEQ ID NO: 549188 - RNA, 19 nt, Artificial Sequence
  Description of Artificial Sequence: Synthetic oligonucleotide
  Antisense strand to SEQ ID NO: 549187
aauucagagaagcuuucag

SEQ ID NO: 549189 - RNA, 19 nt, Artificial Sequence
  Description of Artificial Sequence: Synthetic oligonucleotide
  Sense strand starting at position 3627 of SEQ ID NO: 318261
gcaccucaacauugagauc

SEQ ID NO: 549190 - RNA, 19 nt, Artificial Sequence
  Description of Artificial Sequence: Synthetic oligonucleotide
  Antisense strand to SEQ ID NO: 549189
gaucucaauguugaggugc

SEQ ID NO: 549191 - RNA, 19 nt, Artificial Sequence
  Description of Artificial Sequence: Synthetic oligonucleotide
  Sense strand starting at position 3744 of SEQ ID NO: 318261
cugcuucuacaaggaaaca

SEQ ID NO: 549192 - RNA, 19 nt, Artificial Sequence
  Description of Artificial Sequence: Synthetic oligonucleotide
  Antisense strand to SEQ ID NO: 549191
uguuuccuuguagaagcag

SEQ ID NO: 549193 - RNA, 19 nt, Artificial Sequence
  Description of Artificial Sequence: Synthetic oligonucleotide
  Sense strand starting at position 3789 of SEQ ID NO: 318261
gacuuuaacguuuauguaa

SEQ ID NO: 549194 - RNA, 19 nt, Artificial Sequence
  Description of Artificial Sequence: Synthetic oligonucleotide
  Antisense strand to SEQ ID NO: 549193
uuacauaaacguuaaaguc

SEQ ID NO: 549195 - RNA, 19 nt, Artificial Sequence
  Description of Artificial Sequence: Synthetic oligonucleotide
  Sense strand starting at position 3884 of SEQ ID NO: 318261
aauggagacuuaccauguu

SEQ ID NO: 549196 - RNA, 19 nt, Artificial Sequence
  Description of Artificial Sequence: Synthetic oligonucleotide
  Antisense strand to SEQ ID NO: 549195
aacaugguaagucuccauu

SEQ ID NO: 549197 - RNA, 19 nt, Artificial Sequence
  Description of Artificial Sequence: Synthetic oligonucleotide
  Sense strand starting at position 2 of SEQ ID NO: 318262
gacccaaggcuuuguuuga

SEQ ID NO: 549198 - RNA, 19 nt, Artificial Sequence
  Description of Artificial Sequence: Synthetic oligonucleotide
  Antisense strand to SEQ ID NO: 549197
ucaaacaaagccuuggguc

SEQ ID NO: 549199 - RNA, 19 nt, Artificial Sequence
  Description of Artificial Sequence: Synthetic oligonucleotide
  Sense strand starting at position 271 of SEQ ID NO: 318262
gguugaggcggaugaagau

SEQ ID NO: 549200 - RNA, 19 nt, Artificial Sequence
  Description of Artificial Sequence: Synthetic oligonucleotide
  Antisense strand to SEQ ID NO: 549199
aucuucauccgccucaacc

SEQ ID NO: 549201 - RNA, 19 nt, Artificial Sequence
  Description of Artificial Sequence: Synthetic oligonucleotide
  Sense strand starting at position 284 of SEQ ID NO: 318262
gaagaugggugguugauau

SEQ ID NO: 549202 - RNA, 19 nt, Artificial Sequence
  Description of Artificial Sequence: Synthetic oligonucleotide
  Antisense strand to SEQ ID NO: 549201
auaucaaccacccaucuuc

SEQ ID NO: 549203 - RNA, 19 nt, Artificial Sequence
  Description of Artificial Sequence: Synthetic oligonucleotide
  Sense strand starting at position 288 of SEQ ID NO: 318262
augggugguugauauuuau

SEQ ID NO: 549204 - RNA, 19 nt, Artificial Sequence
  Description of Artificial Sequence: Synthetic oligonucleotide
  Antisense strand to SEQ ID NO: 549203
auaaauaucaaccacccau

SEQ ID NO: 549205 - RNA, 19 nt, Artificial Sequence
  Description of Artificial Sequence: Synthetic oligonucleotide
  Sense strand starting at position 307 of SEQ ID NO: 318262
auguaacagacugguaaga

SEQ ID NO: 549206 - RNA, 19 nt, Artificial Sequence
  Description of Artificial Sequence: Synthetic oligonucleotide
  Antisense strand to SEQ ID NO: 549205
ucuuaccagucuguuacau

SEQ ID NO: 549207 - RNA, 19 nt, Artificial Sequence
  Description of Artificial Sequence: Synthetic oligonucleotide
  Sense strand starting at position 330 of SEQ ID NO: 318262
cugagaaucuccucugaug

SEQ ID NO: 549208 - RNA, 19 nt, Artificial Sequence
  Description of Artificial Sequence: Synthetic oligonucleotide
  Antisense strand to SEQ ID NO: 549207
caucagaggagauucucag

SEQ ID NO: 549209 - RNA, 19 nt, Artificial Sequence
  Description of Artificial Sequence: Synthetic oligonucleotide
  Sense strand starting at position 521 of SEQ ID NO: 318262
ugguuaagauaaguuacau

SEQ ID NO: 549210 - RNA, 19 nt, Artificial Sequence
  Description of Artificial Sequence: Synthetic oligonucleotide
  Antisense strand to SEQ ID NO: 549209
auguaacuuaucuuaacca

SEQ ID NO: 549211 - RNA, 19 nt, Artificial Sequence
  Description of Artificial Sequence: Synthetic oligonucleotide
  Sense strand starting at position 586 of SEQ ID NO: 318262
ggccuauaggcuuaacuaa

SEQ ID NO: 549212 - RNA, 19 nt, Artificial Sequence
  Description of Artificial Sequence: Synthetic oligonucleotide
  Antisense strand to SEQ ID NO: 549211
uuaguuaagccuauaggcc

SEQ ID NO: 549213 - RNA, 19 nt, Artificial Sequence
  Description of Artificial Sequence: Synthetic oligonucleotide
  Sense strand starting at position 610 of SEQ ID NO: 318262
aaaggaaucccugguacuu

SEQ ID NO: 549214 - RNA, 19 nt, Artificial Sequence
  Description of Artificial Sequence: Synthetic oligonucleotide
  Antisense strand to SEQ ID NO: 549213
aaguaccagggauuccuuu

SEQ ID NO: 549215 - RNA, 19 nt, Artificial Sequence
  Description of Artificial Sequence: Synthetic oligonucleotide
  Sense strand starting at position 670 of SEQ ID NO: 318262
cuuuaaauugcaugaguuc

SEQ ID NO: 549216 - RNA, 19 nt, Artificial Sequence
  Description of Artificial Sequence: Synthetic oligonucleotide
  Antisense strand to SEQ ID NO: 549215
gaacucaugcaauuuaaag

SEQ ID NO: 549217 - RNA, 19 nt, Artificial Sequence
  Description of Artificial Sequence: Synthetic oligonucleotide
  Sense strand starting at position 770 of SEQ ID NO: 318262
cuggcaguauauuugcaau

SEQ ID NO: 549218 - RNA, 19 nt, Artificial Sequence
  Description of Artificial Sequence: Synthetic oligonucleotide
  Antisense strand to SEQ ID NO: 549217
auugcaaauauacugccag

SEQ ID NO: 549219 - RNA, 19 nt, Artificial Sequence
  Description of Artificial Sequence: Synthetic oligonucleotide
  Sense strand starting at position 772 of SEQ ID NO: 318262
ggcaguauauuugcaauca

SEQ ID NO: 549220 - RNA, 19 nt, Artificial Sequence
  Description of Artificial Sequence: Synthetic oligonucleotide
  Antisense strand to SEQ ID NO: 549219
ugauugcaaauauacugcc

SEQ ID NO: 549221 - RNA, 19 nt, Artificial Sequence
  Description of Artificial Sequence: Synthetic oligonucleotide
  Sense strand starting at position 825 of SEQ ID NO: 318262
aguguaaugccucagagug

SEQ ID NO: 549222 - RNA, 19 nt, Artificial Sequence
  Description of Artificial Sequence: Synthetic oligonucleotide
  Antisense strand to SEQ ID NO: 549221
cacucugaggcauuacacu

SEQ ID NO: 549223 - RNA, 19 nt, Artificial Sequence
  Description of Artificial Sequence: Synthetic oligonucleotide
  Sense strand starting at position 831 of SEQ ID NO: 318262
augccucagaguggauauu

SEQ ID NO: 549224 - RNA, 19 nt, Artificial Sequence
  Description of Artificial Sequence: Synthetic oligonucleotide
  Antisense strand to SEQ ID NO: 549223
aauauccacucugaggcau

SEQ ID NO: 549225 - RNA, 19 nt, Artificial Sequence
  Description of Artificial Sequence: Synthetic oligonucleotide
  Sense strand starting at position 852 of SEQ ID NO: 318262
uggaaauggcacugcauua

SEQ ID NO: 549226 - RNA, 19 nt, Artificial Sequence
  Description of Artificial Sequence: Synthetic oligonucleotide
  Antisense strand to SEQ ID NO: 549225
uaaugcagugccauuucca

SEQ ID NO: 549227 - RNA, 19 nt, Artificial Sequence
  Description of Artificial Sequence: Synthetic oligonucleotide
  Sense strand starting at position 1294 of SEQ ID NO: 318262
gcagcauugaaagaguaau

SEQ ID NO: 549228 - RNA, 19 nt, Artificial Sequence
  Description of Artificial Sequence: Synthetic oligonucleotide
  Antisense strand to SEQ ID NO: 549227
auuacucuuucaaugcugc

SEQ ID NO: 549229 - RNA, 19 nt, Artificial Sequence
  Description of Artificial Sequence: Synthetic oligonucleotide
  Sense strand starting at position 1300 of SEQ ID NO: 318262
uugaaagaguaaucaagug

SEQ ID NO: 549230 - RNA, 19 nt, Artificial Sequence
  Description of Artificial Sequence: Synthetic oligonucleotide
  Antisense strand to SEQ ID NO: 549229
cacuugauuacucuuucaa

SEQ ID NO: 549231 - RNA, 19 nt, Artificial Sequence
  Description of Artificial Sequence: Synthetic oligonucleotide
  Sense strand starting at position 1305 of SEQ ID NO: 318262
agaguaaucaaguguaagg

SEQ ID NO: 549232 - RNA, 19 nt, Artificial Sequence
  Description of Artificial Sequence: Synthetic oligonucleotide
  Antisense strand to SEQ ID NO: 549231
ccuuacacuugauuacucu

SEQ ID NO: 549233 - RNA, 19 nt, Artificial Sequence
  Description of Artificial Sequence: Synthetic oligonucleotide
  Sense strand starting at position 1620 of SEQ ID NO: 318262
gcaugaacucugcaggguu

SEQ ID NO: 549234 - RNA, 19 nt, Artificial Sequence
  Description of Artificial Sequence: Synthetic oligonucleotide
  Antisense strand to SEQ ID NO: 549233
aacccugcagaguucaugc

SEQ ID NO: 549235 - RNA, 19 nt, Artificial Sequence
  Description of Artificial Sequence: Synthetic oligonucleotide
  Sense strand starting at position 1623 of SEQ ID NO: 318262
ugaacucugcaggguugaa

SEQ ID NO: 549236 - RNA, 19 nt, Artificial Sequence
  Description of Artificial Sequence: Synthetic oligonucleotide
  Antisense strand to SEQ ID NO: 549235
uucaacccugcagaguuca

SEQ ID NO: 549237 - RNA, 19 nt, Artificial Sequence
  Description of Artificial Sequence: Synthetic oligonucleotide
  Sense strand starting at position 1635 of SEQ ID NO: 318262
gguugaaggguccagcuaa

SEQ ID NO: 549238 - RNA, 19 nt, Artificial Sequence
  Description of Artificial Sequence: Synthetic oligonucleotide
  Antisense strand to SEQ ID NO: 549237
uuagcuggacccuucaacc

SEQ ID NO: 549239 - RNA, 19 nt, Artificial Sequence
  Description of Artificial Sequence: Synthetic oligonucleotide
  Sense strand starting at position 2056 of SEQ ID NO: 318262
gcuagugaacaaugagcua

SEQ ID NO: 549240 - RNA, 19 nt, Artificial Sequence
  Description of Artificial Sequence: Synthetic oligonucleotide
  Antisense strand to SEQ ID NO: 549239
uagcucauuguucacuagc

SEQ ID NO: 549241 - RNA, 19 nt, Artificial Sequence
  Description of Artificial Sequence: Synthetic oligonucleotide
  Sense strand starting at position 2059 of SEQ ID NO: 318262
agugaacaaugagcuaauu

SEQ ID NO: 549242 - RNA, 19 nt, Artificial Sequence
  Description of Artificial Sequence: Synthetic oligonucleotide
  Antisense strand to SEQ ID NO: 549241
aauuagcucauuguucacu

SEQ ID NO: 549243 - RNA, 19 nt, Artificial Sequence
  Description of Artificial Sequence: Synthetic oligonucleotide
  Sense strand starting at position 2144 of SEQ ID NO: 318262
acugcuuacucggcaggaa

SEQ ID NO: 549244 - RNA, 19 nt, Artificial Sequence
  Description of Artificial Sequence: Synthetic oligonucleotide
  Antisense strand to SEQ ID NO: 549243
uuccugccgaguaagcagu

SEQ ID NO: 549245 - RNA, 19 nt, Artificial Sequence
  Description of Artificial Sequence: Synthetic oligonucleotide
  Sense strand starting at position 2145 of SEQ ID NO: 318262
cugcuuacucggcaggaau

SEQ ID NO: 549246 - RNA, 19 nt, Artificial Sequence
  Description of Artificial Sequence: Synthetic oligonucleotide
  Antisense strand to SEQ ID NO: 549245
auuccugccgaguaagcag

SEQ ID NO: 549247 - RNA, 19 nt, Artificial Sequence
  Description of Artificial Sequence: Synthetic oligonucleotide
  Sense strand starting at position 2661 of SEQ ID NO: 318262
caaagaguccgcgaaggau

SEQ ID NO: 549248 - RNA, 19 nt, Artificial Sequence
  Description of Artificial Sequence: Synthetic oligonucleotide
  Antisense strand to SEQ ID NO: 549247
auccuucgcggacucuuug

SEQ ID NO: 549249 - RNA, 19 nt, Artificial Sequence
  Description of Artificial Sequence: Synthetic oligonucleotide
  Sense strand starting at position 2928 of SEQ ID NO: 318262
cugccugcccgucugaaau

SEQ ID NO: 549250 - RNA, 19 nt, Artificial Sequence
  Description of Artificial Sequence: Synthetic oligonucleotide
  Antisense strand to SEQ ID NO: 549249
auuucagacgggcaggcag

SEQ ID NO: 549251 - RNA, 19 nt, Artificial Sequence
  Description of Artificial Sequence: Synthetic oligonucleotide
  Sense strand starting at position 2959 of SEQ ID NO: 318262
aaucgaggauugcuuuaaa

SEQ ID NO: 549252 - RNA, 19 nt, Artificial Sequence
  Description of Artificial Sequence: Synthetic oligonucleotide
  Antisense strand to SEQ ID NO: 549251
uuuaaagcaauccucgauu

SEQ ID NO: 549253 - RNA, 19 nt, Artificial Sequence
  Description of Artificial Sequence: Synthetic oligonucleotide
  Sense strand starting at position 3007 of SEQ ID NO: 318262
uguaaacucgucguucuua

SEQ ID NO: 549254 - RNA, 19 nt, Artificial Sequence
  Description of Artificial Sequence: Synthetic oligonucleotide
  Antisense strand to SEQ ID NO: 549253
uaagaacgacgaguuuaca

SEQ ID NO: 549255 - RNA, 19 nt, Artificial Sequence
  Description of Artificial Sequence: Synthetic oligonucleotide
  Sense strand starting at position 3092 of SEQ ID NO: 318262
uucuguugccaauaaagca

SEQ ID NO: 549256 - RNA, 19 nt, Artificial Sequence
  Description of Artificial Sequence: Synthetic oligonucleotide
  Antisense strand to SEQ ID NO: 549255
ugcuuuauuggcaacagaa

SEQ ID NO: 549257 - RNA, 19 nt, Artificial Sequence
  Description of Artificial Sequence: Synthetic oligonucleotide
  Sense strand starting at position 3197 of SEQ ID NO: 318262
ggaucauagugucuucuaa

SEQ ID NO: 549258 - RNA, 19 nt, Artificial Sequence
  Description of Artificial Sequence: Synthetic oligonucleotide
  Antisense strand to SEQ ID NO: 549257
uuagaagacacuaugaucc

SEQ ID NO: 549259 - RNA, 19 nt, Artificial Sequence
  Description of Artificial Sequence: Synthetic oligonucleotide
  Sense strand starting at position 3303 of SEQ ID NO: 318262
uuuaaacguguuuacagaa

SEQ ID NO: 549260 - RNA, 19 nt, Artificial Sequence
  Description of Artificial Sequence: Synthetic oligonucleotide
  Antisense strand to SEQ ID NO: 549259
uucuguaaacacguuuaaa

SEQ ID NO: 549261 - RNA, 19 nt, Artificial Sequence
  Description of Artificial Sequence: Synthetic oligonucleotide
  Sense strand starting at position 3310 of SEQ ID NO: 318262
guguuuacagaaugucuga

SEQ ID NO: 549262 - RNA, 19 nt, Artificial Sequence
  Description of Artificial Sequence: Synthetic oligonucleotide
  Antisense strand to SEQ ID NO: 549261
ucagacauucuguaaacac

SEQ ID NO: 549263 - RNA, 19 nt, Artificial Sequence
  Description of Artificial Sequence: Synthetic oligonucleotide
  Sense strand starting at position 3488 of SEQ ID NO: 318262
guuagacugcacuggguau

SEQ ID NO: 549264 - RNA, 19 nt, Artificial Sequence
  Description of Artificial Sequence: Synthetic oligonucleotide
  Antisense strand to SEQ ID NO: 549263
auacccagugcagucuaac

SEQ ID NO: 549265 - RNA, 19 nt, Artificial Sequence
  Description of Artificial Sequence: Synthetic oligonucleotide
  Sense strand starting at position 3500 of SEQ ID NO: 318262
uggguaugauguuuaagga

SEQ ID NO: 549266 - RNA, 19 nt, Artificial Sequence
  Description of Artificial Sequence: Synthetic oligonucleotide
  Antisense strand to SEQ ID NO: 549265
uccuuaaacaucauaccca

SEQ ID NO: 549267 - RNA, 19 nt, Artificial Sequence
  Description of Artificial Sequence: Synthetic oligonucleotide
  Sense strand starting at position 3523 of SEQ ID NO: 318262
acugaaagcuucucugaau

SEQ ID NO: 549268 - RNA, 19 nt, Artificial Sequence
  Description of Artificial Sequence: Synthetic oligonucleotide
  Antisense strand to SEQ ID NO: 549267
auucagagaagcuuucagu

SEQ ID NO: 549269 - RNA, 19 nt, Artificial Sequence
  Description of Artificial Sequence: Synthetic oligonucleotide
  Sense strand starting at position 3524 of SEQ ID NO: 318262
cugaaagcuucucugaauu

SEQ ID NO: 549270 - RNA, 19 nt, Artificial Sequence
  Description of Artificial Sequence: Synthetic oligonucleotide
  Antisense strand to SEQ ID NO: 549269
aauucagagaagcuuucag

SEQ ID NO: 549271 - RNA, 19 nt, Artificial Sequence
  Description of Artificial Sequence: Synthetic oligonucleotide
  Sense strand starting at position 3773 of SEQ ID NO: 318262
gcaccucaacauugagauc

SEQ ID NO: 549272 - RNA, 19 nt, Artificial Sequence
  Description of Artificial Sequence: Synthetic oligonucleotide
  Antisense strand to SEQ ID NO: 549271
gaucucaauguugaggugc

SEQ ID NO: 549273 - RNA, 19 nt, Artificial Sequence
  Description of Artificial Sequence: Synthetic oligonucleotide
  Sense strand starting at position 3890 of SEQ ID NO: 318262
cugcuucuacaaggaaaca

SEQ ID NO: 549274 - RNA, 19 nt, Artificial Sequence
  Description of Artificial Sequence: Synthetic oligonucleotide
  Antisense strand to SEQ ID NO: 549273
uguuuccuuguagaagcag

SEQ ID NO: 549275 - RNA, 19 nt, Artificial Sequence
  Description of Artificial Sequence: Synthetic oligonucleotide
  Sense strand starting at position 3935 of SEQ ID NO: 318262
gacuuuaacguuuauguaa

SEQ ID NO: 549276 - RNA, 19 nt, Artificial Sequence
  Description of Artificial Sequence: Synthetic oligonucleotide
  Antisense strand to SEQ ID NO: 549275
uuacauaaacguuaaaguc

SEQ ID NO: 549277 - RNA, 19 nt, Artificial Sequence
  Description of Artificial Sequence: Synthetic oligonucleotide
  Sense strand starting at position 4 of SEQ ID NO: 318263
gacccaaggcuuuguuuga

SEQ ID NO: 549278 - RNA, 19 nt, Artificial Sequence
  Description of Artificial Sequence: Synthetic oligonucleotide
  Antisense strand to SEQ ID NO: 549277
ucaaacaaagccuuggguc

SEQ ID NO: 549279 - RNA, 19 nt, Artificial Sequence
  Description of Artificial Sequence: Synthetic oligonucleotide
  Sense strand starting at position 273 of SEQ ID NO: 318263
gguugaggcggaugaagau

SEQ ID NO: 549280 - RNA, 19 nt, Artificial Sequence
  Description of Artificial Sequence: Synthetic oligonucleotide
  Antisense strand to SEQ ID NO: 549279
aucuucauccgccucaacc

SEQ ID NO: 549281 - RNA, 19 nt, Artificial Sequence
  Description of Artificial Sequence: Synthetic oligonucleotide
  Sense strand starting at position 286 of SEQ ID NO: 318263
gaagaugggugguugauau

SEQ ID NO: 549282 - RNA, 19 nt, Artificial Sequence
  Description of Artificial Sequence: Synthetic oligonucleotide
  Antisense strand to SEQ ID NO: 549281
auaucaaccacccaucuuc

SEQ ID NO: 549283 - RNA, 19 nt, Artificial Sequence
  Description of Artificial Sequence: Synthetic oligonucleotide
  Sense strand starting at position 290 of SEQ ID NO: 318263
augggugguugauauuuau

SEQ ID NO: 549284 - RNA, 19 nt, Artificial Sequence
  Description of Artificial Sequence: Synthetic oligonucleotide
  Antisense strand to SEQ ID NO: 549283
auaaauaucaaccacccau

SEQ ID NO: 549285 - RNA, 19 nt, Artificial Sequence
  Description of Artificial Sequence: Synthetic oligonucleotide
  Sense strand starting at position 309 of SEQ ID NO: 318263
auguaacagacugguaaga

SEQ ID NO: 549286 - RNA, 19 nt, Artificial Sequence
  Description of Artificial Sequence: Synthetic oligonucleotide
  Antisense strand to SEQ ID NO: 549285
ucuuaccagucuguuacau

SEQ ID NO: 549287 - RNA, 19 nt, Artificial Sequence
  Description of Artificial Sequence: Synthetic oligonucleotide
  Sense strand starting at position 332 of SEQ ID NO: 318263
cugagaaucuccucugaug

SEQ ID NO: 549288 - RNA, 19 nt, Artificial Sequence
  Description of Artificial Sequence: Synthetic oligonucleotide
  Antisense strand to SEQ ID NO: 549287
caucagaggagauucucag

SEQ ID NO: 549289 - RNA, 19 nt, Artificial Sequence
  Description of Artificial Sequence: Synthetic oligonucleotide
  Sense strand starting at position 523 of SEQ ID NO: 318263
ugguuaagauaaguuacau

SEQ ID NO: 549290 - RNA, 19 nt, Artificial Sequence
  Description of Artificial Sequence: Synthetic oligonucleotide
  Antisense strand to SEQ ID NO: 549289
auguaacuuaucuuaacca

SEQ ID NO: 549291 - RNA, 19 nt, Artificial Sequence
  Description of Artificial Sequence: Synthetic oligonucleotide
  Sense strand starting at position 588 of SEQ ID NO: 318263
ggccuauaggcuuaacuaa

SEQ ID NO: 549292 - RNA, 19 nt, Artificial Sequence
  Description of Artificial Sequence: Synthetic oligonucleotide
  Antisense strand to SEQ ID NO: 549291
uuaguuaagccuauaggcc

SEQ ID NO: 549293 - RNA, 19 nt, Artificial Sequence
  Description of Artificial Sequence: Synthetic oligonucleotide
  Sense strand starting at position 612 of SEQ ID NO: 318263
aaaggaaucccugguacuu

SEQ ID NO: 549294 - RNA, 19 nt, Artificial Sequence
  Description of Artificial Sequence: Synthetic oligonucleotide
  Antisense strand to SEQ ID NO: 549293
aaguaccagggauuccuuu

SEQ ID NO: 549295 - RNA, 19 nt, Artificial Sequence
  Description of Artificial Sequence: Synthetic oligonucleotide
  Sense strand starting at position 672 of SEQ ID NO: 318263
cuuuaaauugcaugaguuc

SEQ ID NO: 549296 - RNA, 19 nt, Artificial Sequence
  Description of Artificial Sequence: Synthetic oligonucleotide
  Antisense strand to SEQ ID NO: 549295
gaacucaugcaauuuaaag

SEQ ID NO: 549297 - RNA, 19 nt, Artificial Sequence
  Description of Artificial Sequence: Synthetic oligonucleotide
  Sense strand starting at position 772 of SEQ ID NO: 318263
cuggcaguauauuugcaau

SEQ ID NO: 549298 - RNA, 19 nt, Artificial Sequence
  Description of Artificial Sequence: Synthetic oligonucleotide
  Antisense strand to SEQ ID NO: 549297
auugcaaauauacugccag

SEQ ID NO: 549299 - RNA, 19 nt, Artificial Sequence
  Description of Artificial Sequence: Synthetic oligonucleotide
  Sense strand starting at position 774 of SEQ ID NO: 318263
ggcaguauauuugcaauca

SEQ ID NO: 549300 - RNA, 19 nt, Artificial Sequence
  Description of Artificial Sequence: Synthetic oligonucleotide
  Antisense strand to SEQ ID NO: 549299
ugauugcaaauauacugcc

SEQ ID NO: 549301 - RNA, 19 nt, Artificial Sequence
  Description of Artificial Sequence: Synthetic oligonucleotide
  Sense strand starting at position 827 of SEQ ID NO: 318263
aguguaaugccucagagug

SEQ ID NO: 549302 - RNA, 19 nt, Artificial Sequence
  Description of Artificial Sequence: Synthetic oligonucleotide
  Antisense strand to SEQ ID NO: 549301
cacucugaggcauuacacu

SEQ ID NO: 549303 - RNA, 19 nt, Artificial Sequence
  Description of Artificial Sequence: Synthetic oligonucleotide
  Sense strand starting at position 833 of SEQ ID NO: 318263
augccucagaguggauauu

SEQ ID NO: 549304 - RNA, 19 nt, Artificial Sequence
  Description of Artificial Sequence: Synthetic oligonucleotide
  Antisense strand to SEQ ID NO: 549303
aauauccacucugaggcau

SEQ ID NO: 549305 - RNA, 19 nt, Artificial Sequence
  Description of Artificial Sequence: Synthetic oligonucleotide
  Sense strand starting at position 854 of SEQ ID NO: 318263
uggaaauggcacugcauua

SEQ ID NO: 549306 - RNA, 19 nt, Artificial Sequence
  Description of Artificial Sequence: Synthetic oligonucleotide
  Antisense strand to SEQ ID NO: 549305
uaaugcagugccauuucca

SEQ ID NO: 549307 - RNA, 19 nt, Artificial Sequence
  Description of Artificial Sequence: Synthetic oligonucleotide
  Sense strand starting at position 1296 of SEQ ID NO: 318263
gcagcauugaaagaguaau

SEQ ID NO: 549308 - RNA, 19 nt, Artificial Sequence
  Description of Artificial Sequence: Synthetic oligonucleotide
  Antisense strand to SEQ ID NO: 549307
auuacucuuucaaugcugc

SEQ ID NO: 549309 - RNA, 19 nt, Artificial Sequence
  Description of Artificial Sequence: Synthetic oligonucleotide
  Sense strand starting at position 1302 of SEQ ID NO: 318263
uugaaagaguaaucaagug

SEQ ID NO: 549310 - RNA, 19 nt, Artificial Sequence
  Description of Artificial Sequence: Synthetic oligonucleotide
  Antisense strand to SEQ ID NO: 549309
cacuugauuacucuuucaa

SEQ ID NO: 549311 - RNA, 19 nt, Artificial Sequence
  Description of Artificial Sequence: Synthetic oligonucleotide
  Sense strand starting at position 1307 of SEQ ID NO: 318263
agaguaaucaaguguaagg

SEQ ID NO: 549312 - RNA, 19 nt, Artificial Sequence
  Description of Artificial Sequence: Synthetic oligonucleotide
  Antisense strand to SEQ ID NO: 549311
ccuuacacuugauuacucu

SEQ ID NO: 549313 - RNA, 19 nt, Artificial Sequence
  Description of Artificial Sequence: Synthetic oligonucleotide
  Sense strand starting at position 1622 of SEQ ID NO: 318263
gcaugaacucugcaggguu

SEQ ID NO: 549314 - RNA, 19 nt, Artificial Sequence
  Description of Artificial Sequence: Synthetic oligonucleotide
  Antisense strand to SEQ ID NO: 549313
aacccugcagaguucaugc

SEQ ID NO: 549315 - RNA, 19 nt, Artificial Sequence
  Description of Artificial Sequence: Synthetic oligonucleotide
  Sense strand starting at position 1625 of SEQ ID NO: 318263
ugaacucugcaggguugaa

SEQ ID NO: 549316 - RNA, 19 nt, Artificial Sequence
  Description of Artificial Sequence: Synthetic oligonucleotide
  Antisense strand to SEQ ID NO: 549315
uucaacccugcagaguuca

SEQ ID NO: 549317 - RNA, 19 nt, Artificial Sequence
  Description of Artificial Sequence: Synthetic oligonucleotide
  Sense strand starting at position 1637 of SEQ ID NO: 318263
gguugaaggguccagcuaa

SEQ ID NO: 549318 - RNA, 19 nt, Artificial Sequence
  Description of Artificial Sequence: Synthetic oligonucleotide
  Antisense strand to SEQ ID NO: 549317
uuagcuggacccuucaacc

SEQ ID NO: 549319 - RNA, 19 nt, Artificial Sequence
  Description of Artificial Sequence: Synthetic oligonucleotide
  Sense strand starting at position 2058 of SEQ ID NO: 318263
gcuagugaacaaugagcua

SEQ ID NO: 549320 - RNA, 19 nt, Artificial Sequence
  Description of Artificial Sequence: Synthetic oligonucleotide
  Antisense strand to SEQ ID NO: 549319
uagcucauuguucacuagc

SEQ ID NO: 549321 - RNA, 19 nt, Artificial Sequence
  Description of Artificial Sequence: Synthetic oligonucleotide
  Sense strand starting at position 2061 of SEQ ID NO: 318263
agugaacaaugagcuaauu

SEQ ID NO: 549322 - RNA, 19 nt, Artificial Sequence
  Description of Artificial Sequence: Synthetic oligonucleotide
  Antisense strand to SEQ ID NO: 549321
aauuagcucauuguucacu

SEQ ID NO: 549323 - RNA, 19 nt, Artificial Sequence
  Description of Artificial Sequence: Synthetic oligonucleotide
  Sense strand starting at position 2146 of SEQ ID NO: 318263
acugcuuacucggcaggaa

SEQ ID NO: 549324 - RNA, 19 nt, Artificial Sequence
  Description of Artificial Sequence: Synthetic oligonucleotide
  Antisense strand to SEQ ID NO: 549323
uuccugccgaguaagcagu

SEQ ID NO: 549325 - RNA, 19 nt, Artificial Sequence
  Description of Artificial Sequence: Synthetic oligonucleotide
  Sense strand starting at position 2147 of SEQ ID NO: 318263
cugcuuacucggcaggaau

SEQ ID NO: 549326 - RNA, 19 nt, Artificial Sequence
  Description of Artificial Sequence: Synthetic oligonucleotide
  Antisense strand to SEQ ID NO: 549325
auuccugccgaguaagcag

SEQ ID NO: 549327 - RNA, 19 nt, Artificial Sequence
  Description of Artificial Sequence: Synthetic oligonucleotide
  Sense strand starting at position 2663 of SEQ ID NO: 318263
caaagaguccgcgaaggau

SEQ ID NO: 549328 - RNA, 19 nt, Artificial Sequence
  Description of Artificial Sequence: Synthetic oligonucleotide
  Antisense strand to SEQ ID NO: 549327
auccuucgcggacucuuug

SEQ ID NO: 549329 - RNA, 19 nt, Artificial Sequence
  Description of Artificial Sequence: Synthetic oligonucleotide
  Sense strand starting at position 2930 of SEQ ID NO: 318263
cugccugcccgucugaaau

SEQ ID NO: 549330 - RNA, 19 nt, Artificial Sequence
  Description of Artificial Sequence: Synthetic oligonucleotide
  Antisense strand to SEQ ID NO: 549329
auuucagacgggcaggcag

SEQ ID NO: 549331 - RNA, 19 nt, Artificial Sequence
  Description of Artificial Sequence: Synthetic oligonucleotide
  Sense strand starting at position 2961 of SEQ ID NO: 318263
aaucgaggauugcuuuaaa

SEQ ID NO: 549332 - RNA, 19 nt, Artificial Sequence
  Description of Artificial Sequence: Synthetic oligonucleotide
  Antisense strand to SEQ ID NO: 549331
uuuaaagcaauccucgauu

SEQ ID NO: 549333 - RNA, 19 nt, Artificial Sequence
  Description of Artificial Sequence: Synthetic oligonucleotide
  Sense strand starting at position 3009 of SEQ ID NO: 318263
uguaaacucgucguucuua

SEQ ID NO: 549334 - RNA, 19 nt, Artificial Sequence
  Description of Artificial Sequence: Synthetic oligonucleotide
  Antisense strand to SEQ ID NO: 549333
uaagaacgacgaguuuaca

SEQ ID NO: 549335 - RNA, 19 nt, Artificial Sequence
  Description of Artificial Sequence: Synthetic oligonucleotide
  Sense strand starting at position 3094 of SEQ ID NO: 318263
uucuguugccaauaaagca

SEQ ID NO: 549336 - RNA, 19 nt, Artificial Sequence
  Description of Artificial Sequence: Synthetic oligonucleotide
  Antisense strand to SEQ ID NO: 549335
ugcuuuauuggcaacagaa

SEQ ID NO: 549337 - RNA, 19 nt, Artificial Sequence
  Description of Artificial Sequence: Synthetic oligonucleotide
  Sense strand starting at position 3199 of SEQ ID NO: 318263
ggaucauagugucuucuaa

SEQ ID NO: 549338 - RNA, 19 nt, Artificial Sequence
  Description of Artificial Sequence: Synthetic oligonucleotide
  Antisense strand to SEQ ID NO: 549337
uuagaagacacuaugaucc

SEQ ID NO: 549339 - RNA, 19 nt, Artificial Sequence
  Description of Artificial Sequence: Synthetic oligonucleotide
  Sense strand starting at position 3305 of SEQ ID NO: 318263
uuuaaacguguuuacagaa

SEQ ID NO: 549340 - RNA, 19 nt, Artificial Sequence
  Description of Artificial Sequence: Synthetic oligonucleotide
  Antisense strand to SEQ ID NO: 549339
uucuguaaacacguuuaaa

SEQ ID NO: 549341 - RNA, 19 nt, Artificial Sequence
  Description of Artificial Sequence: Synthetic oligonucleotide
  Sense strand starting at position 3312 of SEQ ID NO: 318263
guguuuacagaaugucuga

SEQ ID NO: 549342 - RNA, 19 nt, Artificial Sequence
  Description of Artificial Sequence: Synthetic oligonucleotide
  Antisense strand to SEQ ID NO: 549341
ucagacauucuguaaacac

SEQ ID NO: 549343 - RNA, 19 nt, Artificial Sequence
  Description of Artificial Sequence: Synthetic oligonucleotide
  Sense strand starting at position 3490 of SEQ ID NO: 318263
guuagacugcacuggguau

SEQ ID NO: 549344 - RNA, 19 nt, Artificial Sequence
  Description of Artificial Sequence: Synthetic oligonucleotide
  Antisense strand to SEQ ID NO: 549343
auacccagugcagucuaac

SEQ ID NO: 549345 - RNA, 19 nt, Artificial Sequence
  Description of Artificial Sequence: Synthetic oligonucleotide
  Sense strand starting at position 3502 of SEQ ID NO: 318263
uggguaugauguuuaagga

SEQ ID NO: 549346 - RNA, 19 nt, Artificial Sequence
  Description of Artificial Sequence: Synthetic oligonucleotide
  Antisense strand to SEQ ID NO: 549345
uccuuaaacaucauaccca

SEQ ID NO: 549347 - RNA, 19 nt, Artificial Sequence
  Description of Artificial Sequence: Synthetic oligonucleotide
  Sense strand starting at position 3525 of SEQ ID NO: 318263
acugaaagcuucucugaau

SEQ ID NO: 549348 - RNA, 19 nt, Artificial Sequence
  Description of Artificial Sequence: Synthetic oligonucleotide
  Antisense strand to SEQ ID NO: 549347
auucagagaagcuuucagu

SEQ ID NO: 549349 - RNA, 19 nt, Artificial Sequence
  Description of Artificial Sequence: Synthetic oligonucleotide
  Sense strand starting at position 3526 of SEQ ID NO: 318263
cugaaagcuucucugaauu

SEQ ID NO: 549350 - RNA, 19 nt, Artificial Sequence
  Description of Artificial Sequence: Synthetic oligonucleotide
  Antisense strand to SEQ ID NO: 549349
aauucagagaagcuuucag

SEQ ID NO: 549351 - RNA, 19 nt, Artificial Sequence
  Description of Artificial Sequence: Synthetic oligonucleotide
  Sense strand starting at position 3775 of SEQ ID NO: 318263
gcaccucaacauugagauc

SEQ ID NO: 549352 - RNA, 19 nt, Artificial Sequence
  Description of Artificial Sequence: Synthetic oligonucleotide
  Antisense strand to SEQ ID NO: 549351
gaucucaauguugaggugc

SEQ ID NO: 549353 - RNA, 19 nt, Artificial Sequence
  Description of Artificial Sequence: Synthetic oligonucleotide
  Sense strand starting at position 3892 of SEQ ID NO: 318263
cugcuucuacaaggaaaca

SEQ ID NO: 549354 - RNA, 19 nt, Artificial Sequence
  Description of Artificial Sequence: Synthetic oligonucleotide
  Antisense strand to SEQ ID NO: 549353
uguuuccuuguagaagcag

SEQ ID NO: 549355 - RNA, 19 nt, Artificial Sequence
  Description of Artificial Sequence: Synthetic oligonucleotide
  Sense strand starting at position 3937 of SEQ ID NO: 318263
gacuuuaacguuuauguaa

SEQ ID NO: 549356 - RNA, 19 nt, Artificial Sequence
  Description of Artificial Sequence: Synthetic oligonucleotide
  Antisense strand to SEQ ID NO: 549355
uuacauaaacguuaaaguc

SEQ ID NO: 549357 - RNA, 19 nt, Artificial Sequence
  Description of Artificial Sequence: Synthetic oligonucleotide
  Sense strand starting at position 51 of SEQ ID NO: 318264
augguaucuuacucuuuga

SEQ ID NO: 549358 - RNA, 19 nt, Artificial Sequence
  Description of Artificial Sequence: Synthetic oligonucleotide
  Antisense strand to SEQ ID NO: 549357
ucaaagaguaagauaccau

SEQ ID NO: 549359 - RNA, 19 nt, Artificial Sequence
  Description of Artificial Sequence: Synthetic oligonucleotide
  Sense strand starting at position 61 of SEQ ID NO: 318264
acucuuugagcuugaucua

SEQ ID NO: 549360 - RNA, 19 nt, Artificial Sequence
  Description of Artificial Sequence: Synthetic oligonucleotide
  Antisense strand to SEQ ID NO: 549359
uagaucaagcucaaagagu

SEQ ID NO: 549361 - RNA, 19 nt, Artificial Sequence
  Description of Artificial Sequence: Synthetic oligonucleotide
  Sense strand starting at position 62 of SEQ ID NO: 318264
cucuuugagcuugaucuau

SEQ ID NO: 549362 - RNA, 19 nt, Artificial Sequence
  Description of Artificial Sequence: Synthetic oligonucleotide
  Antisense strand to SEQ ID NO: 549361
auagaucaagcucaaagag

SEQ ID NO: 549363 - RNA, 19 nt, Artificial Sequence
  Description of Artificial Sequence: Synthetic oligonucleotide
  Sense strand starting at position 64 of SEQ ID NO: 318264
cuuugagcuugaucuauag

SEQ ID NO: 549364 - RNA, 19 nt, Artificial Sequence
  Description of Artificial Sequence: Synthetic oligonucleotide
  Antisense strand to SEQ ID NO: 549363
cuauagaucaagcucaaag

SEQ ID NO: 549365 - RNA, 19 nt, Artificial Sequence
  Description of Artificial Sequence: Synthetic oligonucleotide
  Sense strand starting at position 68 of SEQ ID NO: 318264
gagcuugaucuauagaguu

SEQ ID NO: 549366 - RNA, 19 nt, Artificial Sequence
  Description of Artificial Sequence: Synthetic oligonucleotide
  Antisense strand to SEQ ID NO: 549365
aacucuauagaucaagcuc

SEQ ID NO: 549367 - RNA, 19 nt, Artificial Sequence
  Description of Artificial Sequence: Synthetic oligonucleotide
  Sense strand starting at position 70 of SEQ ID NO: 318264
gcuugaucuauagaguuag

SEQ ID NO: 549368 - RNA, 19 nt, Artificial Sequence
  Description of Artificial Sequence: Synthetic oligonucleotide
  Antisense strand to SEQ ID NO: 549367
cuaacucuauagaucaagc

SEQ ID NO: 549369 - RNA, 19 nt, Artificial Sequence
  Description of Artificial Sequence: Synthetic oligonucleotide
  Sense strand starting at position 95 of SEQ ID NO: 318264
uaggguccauagucauauu

SEQ ID NO: 549370 - RNA, 19 nt, Artificial Sequence
  Description of Artificial Sequence: Synthetic oligonucleotide
  Antisense strand to SEQ ID NO: 549369
aauaugacuauggacccua

SEQ ID NO: 549371 - RNA, 19 nt, Artificial Sequence
  Description of Artificial Sequence: Synthetic oligonucleotide
  Sense strand starting at position 117 of SEQ ID NO: 318264
guuuaaacuggucaccuga

SEQ ID NO: 549372 - RNA, 19 nt, Artificial Sequence
  Description of Artificial Sequence: Synthetic oligonucleotide
  Antisense strand to SEQ ID NO: 549371
ucaggugaccaguuuaaac

SEQ ID NO: 549373 - RNA, 19 nt, Artificial Sequence
  Description of Artificial Sequence: Synthetic oligonucleotide
  Sense strand starting at position 149 of SEQ ID NO: 318264
acaugaaaccucugugauc

SEQ ID NO: 549374 - RNA, 19 nt, Artificial Sequence
  Description of Artificial Sequence: Synthetic oligonucleotide
  Antisense strand to SEQ ID NO: 549373
gaucacagagguuucaugu

SEQ ID NO: 549375 - RNA, 19 nt, Artificial Sequence
  Description of Artificial Sequence: Synthetic oligonucleotide
  Sense strand starting at position 151 of SEQ ID NO: 318264
augaaaccucugugaucua

SEQ ID NO: 549376 - RNA, 19 nt, Artificial Sequence
  Description of Artificial Sequence: Synthetic oligonucleotide
  Antisense strand to SEQ ID NO: 549375
uagaucacagagguuucau

SEQ ID NO: 549377 - RNA, 19 nt, Artificial Sequence
  Description of Artificial Sequence: Synthetic oligonucleotide
  Sense strand starting at position 168 of SEQ ID NO: 318264
uauuuauggucacagaaag

SEQ ID NO: 549378 - RNA, 19 nt, Artificial Sequence
  Description of Artificial Sequence: Synthetic oligonucleotide
  Antisense strand to SEQ ID NO: 549377
cuuucugugaccauaaaua

SEQ ID NO: 549379 - RNA, 19 nt, Artificial Sequence
  Description of Artificial Sequence: Synthetic oligonucleotide
  Sense strand starting at position 471 of SEQ ID NO: 318264
ugacaagugacgcauacau

SEQ ID NO: 549380 - RNA, 19 nt, Artificial Sequence
  Description of Artificial Sequence: Synthetic oligonucleotide
  Antisense strand to SEQ ID NO: 549379
auguaugcgucacuuguca

SEQ ID NO: 549381 - RNA, 19 nt, Artificial Sequence
  Description of Artificial Sequence: Synthetic oligonucleotide
  Sense strand starting at position 473 of SEQ ID NO: 318264
acaagugacgcauacauaa

SEQ ID NO: 549382 - RNA, 19 nt, Artificial Sequence
  Description of Artificial Sequence: Synthetic oligonucleotide
  Antisense strand to SEQ ID NO: 549381
uuauguaugcgucacuugu

SEQ ID NO: 549383 - RNA, 19 nt, Artificial Sequence
  Description of Artificial Sequence: Synthetic oligonucleotide
  Sense strand starting at position 891 of SEQ ID NO: 318264
gcauucucuguggaucaua

SEQ ID NO: 549384 - RNA, 19 nt, Artificial Sequence
  Description of Artificial Sequence: Synthetic oligonucleotide
  Antisense strand to SEQ ID NO: 549383
uaugauccacagagaaugc

SEQ ID NO: 549385 - RNA, 19 nt, Artificial Sequence
  Description of Artificial Sequence: Synthetic oligonucleotide
  Sense strand starting at position 903 of SEQ ID NO: 318264
gaucauaagcuuugucaga

SEQ ID NO: 549386 - RNA, 19 nt, Artificial Sequence
  Description of Artificial Sequence: Synthetic oligonucleotide
  Antisense strand to SEQ ID NO: 549385
ucugacaaagcuuaugauc

SEQ ID NO: 549387 - RNA, 19 nt, Artificial Sequence
  Description of Artificial Sequence: Synthetic oligonucleotide
  Sense strand starting at position 904 of SEQ ID NO: 318264
aucauaagcuuugucagaa

SEQ ID NO: 549388 - RNA, 19 nt, Artificial Sequence
  Description of Artificial Sequence: Synthetic oligonucleotide
  Antisense strand to SEQ ID NO: 549387
uucugacaaagcuuaugau

SEQ ID NO: 549389 - RNA, 19 nt, Artificial Sequence
  Description of Artificial Sequence: Synthetic oligonucleotide
  Sense strand starting at position 905 of SEQ ID NO: 318264
ucauaagcuuugucagaaa

SEQ ID NO: 549390 - RNA, 19 nt, Artificial Sequence
  Description of Artificial Sequence: Synthetic oligonucleotide
  Antisense strand to SEQ ID NO: 549389
uuucugacaaagcuuauga

SEQ ID NO: 549391 - RNA, 19 nt, Artificial Sequence
  Description of Artificial Sequence: Synthetic oligonucleotide
  Sense strand starting at position 943 of SEQ ID NO: 318264
agguuaacaugcuugacuu

SEQ ID NO: 549392 - RNA, 19 nt, Artificial Sequence
  Description of Artificial Sequence: Synthetic oligonucleotide
  Antisense strand to SEQ ID NO: 549391
aagucaagcauguuaaccu

SEQ ID NO: 549393 - RNA, 19 nt, Artificial Sequence
  Description of Artificial Sequence: Synthetic oligonucleotide
  Sense strand starting at position 1070 of SEQ ID NO: 318264
ucuauauugcuuuaaagga

SEQ ID NO: 549394 - RNA, 19 nt, Artificial Sequence
  Description of Artificial Sequence: Synthetic oligonucleotide
  Antisense strand to SEQ ID NO: 549393
uccuuuaaagcaauauaga

SEQ ID NO: 549395 - RNA, 19 nt, Artificial Sequence
  Description of Artificial Sequence: Synthetic oligonucleotide
  Sense strand starting at position 1106 of SEQ ID NO: 318264
guuugaucagcuggacaga

SEQ ID NO: 549396 - RNA, 19 nt, Artificial Sequence
  Description of Artificial Sequence: Synthetic oligonucleotide
  Antisense strand to SEQ ID NO: 549395
ucuguccagcugaucaaac

SEQ ID NO: 549397 - RNA, 19 nt, Artificial Sequence
  Description of Artificial Sequence: Synthetic oligonucleotide
  Sense strand starting at position 1117 of SEQ ID NO: 318264
uggacagacuccucaguuu

SEQ ID NO: 549398 - RNA, 19 nt, Artificial Sequence
  Description of Artificial Sequence: Synthetic oligonucleotide
  Antisense strand to SEQ ID NO: 549397
aaacugaggagucugucca

SEQ ID NO: 549399 - RNA, 19 nt, Artificial Sequence
  Description of Artificial Sequence: Synthetic oligonucleotide
  Sense strand starting at position 1429 of SEQ ID NO: 318264
gguugaggcggaugaagau

SEQ ID NO: 549400 - RNA, 19 nt, Artificial Sequence
  Description of Artificial Sequence: Synthetic oligonucleotide
  Antisense strand to SEQ ID NO: 549399
aucuucauccgccucaacc

SEQ ID NO: 549401 - RNA, 19 nt, Artificial Sequence
  Description of Artificial Sequence: Synthetic oligonucleotide
  Sense strand starting at position 1442 of SEQ ID NO: 318264
gaagaugggugguugauau

SEQ ID NO: 549402 - RNA, 19 nt, Artificial Sequence
  Description of Artificial Sequence: Synthetic oligonucleotide
  Antisense strand to SEQ ID NO: 549401
auaucaaccacccaucuuc

SEQ ID NO: 549403 - RNA, 19 nt, Artificial Sequence
  Description of Artificial Sequence: Synthetic oligonucleotide
  Sense strand starting at position 1465 of SEQ ID NO: 318264
auguaacagacugguaaga

SEQ ID NO: 549404 - RNA, 19 nt, Artificial Sequence
  Description of Artificial Sequence: Synthetic oligonucleotide
  Antisense strand to SEQ ID NO: 549403
ucuuaccagucuguuacau

SEQ ID NO: 549405 - RNA, 19 nt, Artificial Sequence
  Description of Artificial Sequence: Synthetic oligonucleotide
  Sense strand starting at position 1488 of SEQ ID NO: 318264
cugagaaucuccucugaug

SEQ ID NO: 549406 - RNA, 19 nt, Artificial Sequence
  Description of Artificial Sequence: Synthetic oligonucleotide
  Antisense strand to SEQ ID NO: 549405
caucagaggagauucucag

SEQ ID NO: 549407 - RNA, 19 nt, Artificial Sequence
  Description of Artificial Sequence: Synthetic oligonucleotide
  Sense strand starting at position 1679 of SEQ ID NO: 318264
ugguuaagauaaguuacau

SEQ ID NO: 549408 - RNA, 19 nt, Artificial Sequence
  Description of Artificial Sequence: Synthetic oligonucleotide
  Antisense strand to SEQ ID NO: 549407
auguaacuuaucuuaacca

SEQ ID NO: 549409 - RNA, 19 nt, Artificial Sequence
  Description of Artificial Sequence: Synthetic oligonucleotide
  Sense strand starting at position 1744 of SEQ ID NO: 318264
ggccuauaggcuuaacuaa

SEQ ID NO: 549410 - RNA, 19 nt, Artificial Sequence
  Description of Artificial Sequence: Synthetic oligonucleotide
  Antisense strand to SEQ ID NO: 549409
uuaguuaagccuauaggcc

SEQ ID NO: 549411 - RNA, 19 nt, Artificial Sequence
  Description of Artificial Sequence: Synthetic oligonucleotide
  Sense strand starting at position 1768 of SEQ ID NO: 318264
aaaggaaucccugguacuu

SEQ ID NO: 549412 - RNA, 19 nt, Artificial Sequence
  Description of Artificial Sequence: Synthetic oligonucleotide
  Antisense strand to SEQ ID NO: 549411
aaguaccagggauuccuuu

SEQ ID NO: 549413 - RNA, 19 nt, Artificial Sequence
  Description of Artificial Sequence: Synthetic oligonucleotide
  Sense strand starting at position 1928 of SEQ ID NO: 318264
cuggcaguauauuugcaau

SEQ ID NO: 549414 - RNA, 19 nt, Artificial Sequence
  Description of Artificial Sequence: Synthetic oligonucleotide
  Antisense strand to SEQ ID NO: 549413
auugcaaauauacugccag

SEQ ID NO: 549415 - RNA, 19 nt, Artificial Sequence
  Description of Artificial Sequence: Synthetic oligonucleotide
  Sense strand starting at position 1930 of SEQ ID NO: 318264
ggcaguauauuugcaauca

SEQ ID NO: 549416 - RNA, 19 nt, Artificial Sequence
  Description of Artificial Sequence: Synthetic oligonucleotide
  Antisense strand to SEQ ID NO: 549415
ugauugcaaauauacugcc

SEQ ID NO: 549417 - RNA, 19 nt, Artificial Sequence
  Description of Artificial Sequence: Synthetic oligonucleotide
  Sense strand starting at position 1989 of SEQ ID NO: 318264
augccucagaguggauauu

SEQ ID NO: 549418 - RNA, 19 nt, Artificial Sequence
  Description of Artificial Sequence: Synthetic oligonucleotide
  Antisense strand to SEQ ID NO: 549417
aauauccacucugaggcau

SEQ ID NO: 549419 - RNA, 19 nt, Artificial Sequence
  Description of Artificial Sequence: Synthetic oligonucleotide
  Sense strand starting at position 2010 of SEQ ID NO: 318264
uggaaauggcacugcauua

SEQ ID NO: 549420 - RNA, 19 nt, Artificial Sequence
  Description of Artificial Sequence: Synthetic oligonucleotide
  Antisense strand to SEQ ID NO: 549419
uaaugcagugccauuucca

SEQ ID NO: 549421 - RNA, 19 nt, Artificial Sequence
  Description of Artificial Sequence: Synthetic oligonucleotide
  Sense strand starting at position 2452 of SEQ ID NO: 318264
gcagcauugaaagaguaau

SEQ ID NO: 549422 - RNA, 19 nt, Artificial Sequence
  Description of Artificial Sequence: Synthetic oligonucleotide
  Antisense strand to SEQ ID NO: 549421
auuacucuuucaaugcugc

SEQ ID NO: 549423 - RNA, 19 nt, Artificial Sequence
  Description of Artificial Sequence: Synthetic oligonucleotide
  Sense strand starting at position 2458 of SEQ ID NO: 318264
uugaaagaguaaucaagug

SEQ ID NO: 549424 - RNA, 19 nt, Artificial Sequence
  Description of Artificial Sequence: Synthetic oligonucleotide
  Antisense strand to SEQ ID NO: 549423
cacuugauuacucuuucaa

SEQ ID NO: 549425 - RNA, 19 nt, Artificial Sequence
  Description of Artificial Sequence: Synthetic oligonucleotide
  Sense strand starting at position 2463 of SEQ ID NO: 318264
agaguaaucaaguguaagg

SEQ ID NO: 549426 - RNA, 19 nt, Artificial Sequence
  Description of Artificial Sequence: Synthetic oligonucleotide
  Antisense strand to SEQ ID NO: 549425
ccuuacacuugauuacucu

SEQ ID NO: 549427 - RNA, 19 nt, Artificial Sequence
  Description of Artificial Sequence: Synthetic oligonucleotide
  Sense strand starting at position 2778 of SEQ ID NO: 318264
gcaugaacucugcaggguu

SEQ ID NO: 549428 - RNA, 19 nt, Artificial Sequence
  Description of Artificial Sequence: Synthetic oligonucleotide
  Antisense strand to SEQ ID NO: 549427
aacccugcagaguucaugc

SEQ ID NO: 549429 - RNA, 19 nt, Artificial Sequence
  Description of Artificial Sequence: Synthetic oligonucleotide
  Sense strand starting at position 2781 of SEQ ID NO: 318264
ugaacucugcaggguugaa

SEQ ID NO: 549430 - RNA, 19 nt, Artificial Sequence
  Description of Artificial Sequence: Synthetic oligonucleotide
  Antisense strand to SEQ ID NO: 549429
uucaacccugcagaguuca

SEQ ID NO: 549431 - RNA, 19 nt, Artificial Sequence
  Description of Artificial Sequence: Synthetic oligonucleotide
  Sense strand starting at position 2793 of SEQ ID NO: 318264
gguugaaggguccagcuaa

SEQ ID NO: 549432 - RNA, 19 nt, Artificial Sequence
  Description of Artificial Sequence: Synthetic oligonucleotide
  Antisense strand to SEQ ID NO: 549431
uuagcuggacccuucaacc

SEQ ID NO: 549433 - RNA, 19 nt, Artificial Sequence
  Description of Artificial Sequence: Synthetic oligonucleotide
  Sense strand starting at position 3217 of SEQ ID NO: 318264
agugaacaaugagcuaauu

SEQ ID NO: 549434 - RNA, 19 nt, Artificial Sequence
  Description of Artificial Sequence: Synthetic oligonucleotide
  Antisense strand to SEQ ID NO: 549433
aauuagcucauuguucacu

SEQ ID NO: 549435 - RNA, 19 nt, Artificial Sequence
  Description of Artificial Sequence: Synthetic oligonucleotide
  Sense strand starting at position 3819 of SEQ ID NO: 318264
caaagaguccgcgaaggau

SEQ ID NO: 549436 - RNA, 19 nt, Artificial Sequence
  Description of Artificial Sequence: Synthetic oligonucleotide
  Antisense strand to SEQ ID NO: 549435
auccuucgcggacucuuug

SEQ ID NO: 549437 - RNA, 19 nt, Artificial Sequence
  Description of Artificial Sequence: Synthetic oligonucleotide
  Sense strand starting at position 73 of SEQ ID NO: 318265
ucuauauugcuuuaaagga

SEQ ID NO: 549438 - RNA, 19 nt, Artificial Sequence
  Description of Artificial Sequence: Synthetic oligonucleotide
  Antisense strand to SEQ ID NO: 549437
uccuuuaaagcaauauaga

SEQ ID NO: 549439 - RNA, 19 nt, Artificial Sequence
  Description of Artificial Sequence: Synthetic oligonucleotide
  Sense strand starting at position 109 of SEQ ID NO: 318265
guuugaucagcuggacaga

SEQ ID NO: 549440 - RNA, 19 nt, Artificial Sequence
  Description of Artificial Sequence: Synthetic oligonucleotide
  Antisense strand to SEQ ID NO: 549439
ucuguccagcugaucaaac

SEQ ID NO: 549441 - RNA, 19 nt, Artificial Sequence
  Description of Artificial Sequence: Synthetic oligonucleotide
  Sense strand starting at position 120 of SEQ ID NO: 318265
uggacagacuccucaguuu

SEQ ID NO: 549442 - RNA, 19 nt, Artificial Sequence
  Description of Artificial Sequence: Synthetic oligonucleotide
  Antisense strand to SEQ ID NO: 549441
aaacugaggagucugucca

SEQ ID NO: 549443 - RNA, 19 nt, Artificial Sequence
  Description of Artificial Sequence: Synthetic oligonucleotide
  Sense strand starting at position 163 of SEQ ID NO: 318265
gacccaaggcuuuguuuga

SEQ ID NO: 549444 - RNA, 19 nt, Artificial Sequence
  Description of Artificial Sequence: Synthetic oligonucleotide
  Antisense strand to SEQ ID NO: 549443
ucaaacaaagccuuggguc

SEQ ID NO: 549445 - RNA, 19 nt, Artificial Sequence
  Description of Artificial Sequence: Synthetic oligonucleotide
  Sense strand starting at position 432 of SEQ ID NO: 318265
gguugaggcggaugaagau

SEQ ID NO: 549446 - RNA, 19 nt, Artificial Sequence
  Description of Artificial Sequence: Synthetic oligonucleotide
  Antisense strand to SEQ ID NO: 549445
aucuucauccgccucaacc

SEQ ID NO: 549447 - RNA, 19 nt, Artificial Sequence
  Description of Artificial Sequence: Synthetic oligonucleotide
  Sense strand starting at position 445 of SEQ ID NO: 318265
gaagaugggugguugauau

SEQ ID NO: 549448 - RNA, 19 nt, Artificial Sequence
  Description of Artificial Sequence: Synthetic oligonucleotide
  Antisense strand to SEQ ID NO: 549447
auaucaaccacccaucuuc

SEQ ID NO: 549449 - RNA, 19 nt, Artificial Sequence
  Description of Artificial Sequence: Synthetic oligonucleotide
  Sense strand starting at position 449 of SEQ ID NO: 318265
augggugguugauauuuau

SEQ ID NO: 549450 - RNA, 19 nt, Artificial Sequence
  Description of Artificial Sequence: Synthetic oligonucleotide
  Antisense strand to SEQ ID NO: 549449
auaaauaucaaccacccau

SEQ ID NO: 549451 - RNA, 19 nt, Artificial Sequence
  Description of Artificial Sequence: Synthetic oligonucleotide
  Sense strand starting at position 468 of SEQ ID NO: 318265
auguaacagacugguaaga

SEQ ID NO: 549452 - RNA, 19 nt, Artificial Sequence
  Description of Artificial Sequence: Synthetic oligonucleotide
  Antisense strand to SEQ ID NO: 549451
ucuuaccagucuguuacau

SEQ ID NO: 549453 - RNA, 19 nt, Artificial Sequence
  Description of Artificial Sequence: Synthetic oligonucleotide
  Sense strand starting at position 491 of SEQ ID NO: 318265
cugagaaucuccucugaug

SEQ ID NO: 549454 - RNA, 19 nt, Artificial Sequence
  Description of Artificial Sequence: Synthetic oligonucleotide
  Antisense strand to SEQ ID NO: 549453
caucagaggagauucucag

SEQ ID NO: 549455 - RNA, 19 nt, Artificial Sequence
  Description of Artificial Sequence: Synthetic oligonucleotide
  Sense strand starting at position 682 of SEQ ID NO: 318265
ugguuaagauaaguuacau

SEQ ID NO: 549456 - RNA, 19 nt, Artificial Sequence
  Description of Artificial Sequence: Synthetic oligonucleotide
  Antisense strand to SEQ ID NO: 549455
auguaacuuaucuuaacca

SEQ ID NO: 549457 - RNA, 19 nt, Artificial Sequence
  Description of Artificial Sequence: Synthetic oligonucleotide
  Sense strand starting at position 747 of SEQ ID NO: 318265
ggccuauaggcuuaacuaa

SEQ ID NO: 549458 - RNA, 19 nt, Artificial Sequence
  Description of Artificial Sequence: Synthetic oligonucleotide
  Antisense strand to SEQ ID NO: 549457
uuaguuaagccuauaggcc

SEQ ID NO: 549459 - RNA, 19 nt, Artificial Sequence
  Description of Artificial Sequence: Synthetic oligonucleotide
  Sense strand starting at position 771 of SEQ ID NO: 318265
aaaggaaucccugguacuu

SEQ ID NO: 549460 - RNA, 19 nt, Artificial Sequence
  Description of Artificial Sequence: Synthetic oligonucleotide
  Antisense strand to SEQ ID NO: 549459
aaguaccagggauuccuuu

SEQ ID NO: 549461 - RNA, 19 nt, Artificial Sequence
  Description of Artificial Sequence: Synthetic oligonucleotide
  Sense strand starting at position 831 of SEQ ID NO: 318265
cuuuaaauugcaugaguuc

SEQ ID NO: 549462 - RNA, 19 nt, Artificial Sequence
  Description of Artificial Sequence: Synthetic oligonucleotide
  Antisense strand to SEQ ID NO: 549461
gaacucaugcaauuuaaag

SEQ ID NO: 549463 - RNA, 19 nt, Artificial Sequence
  Description of Artificial Sequence: Synthetic oligonucleotide
  Sense strand starting at position 931 of SEQ ID NO: 318265
cuggcaguauauuugcaau

SEQ ID NO: 549464 - RNA, 19 nt, Artificial Sequence
  Description of Artificial Sequence: Synthetic oligonucleotide
  Antisense strand to SEQ ID NO: 549463
auugcaaauauacugccag

SEQ ID NO: 549465 - RNA, 19 nt, Artificial Sequence
  Description of Artificial Sequence: Synthetic oligonucleotide
  Sense strand starting at position 933 of SEQ ID NO: 318265
ggcaguauauuugcaauca

SEQ ID NO: 549466 - RNA, 19 nt, Artificial Sequence
  Description of Artificial Sequence: Synthetic oligonucleotide
  Antisense strand to SEQ ID NO: 549465
ugauugcaaauauacugcc

SEQ ID NO: 549467 - RNA, 19 nt, Artificial Sequence
  Description of Artificial Sequence: Synthetic oligonucleotide
  Sense strand starting at position 986 of SEQ ID NO: 318265
aguguaaugccucagagug

SEQ ID NO: 549468 - RNA, 19 nt, Artificial Sequence
  Description of Artificial Sequence: Synthetic oligonucleotide
  Antisense strand to SEQ ID NO: 549467
cacucugaggcauuacacu

SEQ ID NO: 549469 - RNA, 19 nt, Artificial Sequence
  Description of Artificial Sequence: Synthetic oligonucleotide
  Sense strand starting at position 992 of SEQ ID NO: 318265
augccucagaguggauauu

SEQ ID NO: 549470 - RNA, 19 nt, Artificial Sequence
  Description of Artificial Sequence: Synthetic oligonucleotide
  Antisense strand to SEQ ID NO: 549469
aauauccacucugaggcau

SEQ ID NO: 549471 - RNA, 19 nt, Artificial Sequence
  Description of Artificial Sequence: Synthetic oligonucleotide
  Sense strand starting at position 1013 of SEQ ID NO: 318265
uggaaauggcacugcauua

SEQ ID NO: 549472 - RNA, 19 nt, Artificial Sequence
  Description of Artificial Sequence: Synthetic oligonucleotide
  Antisense strand to SEQ ID NO: 549471
uaaugcagugccauuucca

SEQ ID NO: 549473 - RNA, 19 nt, Artificial Sequence
  Description of Artificial Sequence: Synthetic oligonucleotide
  Sense strand starting at position 1455 of SEQ ID NO: 318265
gcagcauugaaagaguaau

SEQ ID NO: 549474 - RNA, 19 nt, Artificial Sequence
  Description of Artificial Sequence: Synthetic oligonucleotide
  Antisense strand to SEQ ID NO: 549473
auuacucuuucaaugcugc

SEQ ID NO: 549475 - RNA, 19 nt, Artificial Sequence
  Description of Artificial Sequence: Synthetic oligonucleotide
  Sense strand starting at position 1461 of SEQ ID NO: 318265
uugaaagaguaaucaagug

SEQ ID NO: 549476 - RNA, 19 nt, Artificial Sequence
  Description of Artificial Sequence: Synthetic oligonucleotide
  Antisense strand to SEQ ID NO: 549475
cacuugauuacucuuucaa

SEQ ID NO: 549477 - RNA, 19 nt, Artificial Sequence
  Description of Artificial Sequence: Synthetic oligonucleotide
  Sense strand starting at position 1466 of SEQ ID NO: 318265
agaguaaucaaguguaagg

SEQ ID NO: 549478 - RNA, 19 nt, Artificial Sequence
  Description of Artificial Sequence: Synthetic oligonucleotide
  Antisense strand to SEQ ID NO: 549477
ccuuacacuugauuacucu

SEQ ID NO: 549479 - RNA, 19 nt, Artificial Sequence
  Description of Artificial Sequence: Synthetic oligonucleotide
  Sense strand starting at position 1781 of SEQ ID NO: 318265
gcaugaacucugcaggguu

SEQ ID NO: 549480 - RNA, 19 nt, Artificial Sequence
  Description of Artificial Sequence: Synthetic oligonucleotide
  Antisense strand to SEQ ID NO: 549479
aacccugcagaguucaugc

SEQ ID NO: 549481 - RNA, 19 nt, Artificial Sequence
  Description of Artificial Sequence: Synthetic oligonucleotide
  Sense strand starting at position 1784 of SEQ ID NO: 318265
ugaacucugcaggguugaa

SEQ ID NO: 549482 - RNA, 19 nt, Artificial Sequence
  Description of Artificial Sequence: Synthetic oligonucleotide
  Antisense strand to SEQ ID NO: 549481
uucaacccugcagaguuca

SEQ ID NO: 549483 - RNA, 19 nt, Artificial Sequence
  Description of Artificial Sequence: Synthetic oligonucleotide
  Sense strand starting at position 1796 of SEQ ID NO: 318265
gguugaaggguccagcuaa

SEQ ID NO: 549484 - RNA, 19 nt, Artificial Sequence
  Description of Artificial Sequence: Synthetic oligonucleotide
  Antisense strand to SEQ ID NO: 549483
uuagcuggacccuucaacc

SEQ ID NO: 549485 - RNA, 19 nt, Artificial Sequence
  Description of Artificial Sequence: Synthetic oligonucleotide
  Sense strand starting at position 2217 of SEQ ID NO: 318265
gcuagugaacaaugagcua

SEQ ID NO: 549486 - RNA, 19 nt, Artificial Sequence
  Description of Artificial Sequence: Synthetic oligonucleotide
  Antisense strand to SEQ ID NO: 549485
uagcucauuguucacuagc

SEQ ID NO: 549487 - RNA, 19 nt, Artificial Sequence
  Description of Artificial Sequence: Synthetic oligonucleotide
  Sense strand starting at position 2220 of SEQ ID NO: 318265
agugaacaaugagcuaauu

SEQ ID NO: 549488 - RNA, 19 nt, Artificial Sequence
  Description of Artificial Sequence: Synthetic oligonucleotide
  Antisense strand to SEQ ID NO: 549487
aauuagcucauuguucacu

SEQ ID NO: 549489 - RNA, 19 nt, Artificial Sequence
  Description of Artificial Sequence: Synthetic oligonucleotide
  Sense strand starting at position 2306 of SEQ ID NO: 318265
cugcuuacucggcaggaau

SEQ ID NO: 549490 - RNA, 19 nt, Artificial Sequence
  Description of Artificial Sequence: Synthetic oligonucleotide
  Antisense strand to SEQ ID NO: 549489
auuccugccgaguaagcag

SEQ ID NO: 549491 - RNA, 19 nt, Artificial Sequence
  Description of Artificial Sequence: Synthetic oligonucleotide
  Sense strand starting at position 2822 of SEQ ID NO: 318265
caaagaguccgcgaaggau

SEQ ID NO: 549492 - RNA, 19 nt, Artificial Sequence
  Description of Artificial Sequence: Synthetic oligonucleotide
  Antisense strand to SEQ ID NO: 549491
auccuucgcggacucuuug

SEQ ID NO: 549493 - RNA, 19 nt, Artificial Sequence
  Description of Artificial Sequence: Synthetic oligonucleotide
  Sense strand starting at position 3089 of SEQ ID NO: 318265
cugccugcccgucugaaau

SEQ ID NO: 549494 - RNA, 19 nt, Artificial Sequence
  Description of Artificial Sequence: Synthetic oligonucleotide
  Antisense strand to SEQ ID NO: 549493
auuucagacgggcaggcag

SEQ ID NO: 549495 - RNA, 19 nt, Artificial Sequence
  Description of Artificial Sequence: Synthetic oligonucleotide
  Sense strand starting at position 3120 of SEQ ID NO: 318265
aaucgaggauugcuuuaaa

SEQ ID NO: 549496 - RNA, 19 nt, Artificial Sequence
  Description of Artificial Sequence: Synthetic oligonucleotide
  Antisense strand to SEQ ID NO: 549495
uuuaaagcaauccucgauu

SEQ ID NO: 549497 - RNA, 19 nt, Artificial Sequence
  Description of Artificial Sequence: Synthetic oligonucleotide
  Sense strand starting at position 3168 of SEQ ID NO: 318265
uguaaacucgucguucuua

SEQ ID NO: 549498 - RNA, 19 nt, Artificial Sequence
  Description of Artificial Sequence: Synthetic oligonucleotide
  Antisense strand to SEQ ID NO: 549497
uaagaacgacgaguuuaca

SEQ ID NO: 549499 - RNA, 19 nt, Artificial Sequence
  Description of Artificial Sequence: Synthetic oligonucleotide
  Sense strand starting at position 3253 of SEQ ID NO: 318265
uucuguugccaauaaagca

SEQ ID NO: 549500 - RNA, 19 nt, Artificial Sequence
  Description of Artificial Sequence: Synthetic oligonucleotide
  Antisense strand to SEQ ID NO: 549499
ugcuuuauuggcaacagaa

SEQ ID NO: 549501 - RNA, 19 nt, Artificial Sequence
  Description of Artificial Sequence: Synthetic oligonucleotide
  Sense strand starting at position 3358 of SEQ ID NO: 318265
ggaucauagugucuucuaa

SEQ ID NO: 549502 - RNA, 19 nt, Artificial Sequence
  Description of Artificial Sequence: Synthetic oligonucleotide
  Antisense strand to SEQ ID NO: 549501
uuagaagacacuaugaucc

SEQ ID NO: 549503 - RNA, 19 nt, Artificial Sequence
  Description of Artificial Sequence: Synthetic oligonucleotide
  Sense strand starting at position 3464 of SEQ ID NO: 318265
uuuaaacguguuuacagaa

SEQ ID NO: 549504 - RNA, 19 nt, Artificial Sequence
  Description of Artificial Sequence: Synthetic oligonucleotide
  Antisense strand to SEQ ID NO: 549503
uucuguaaacacguuuaaa

SEQ ID NO: 549505 - RNA, 19 nt, Artificial Sequence
  Description of Artificial Sequence: Synthetic oligonucleotide
  Sense strand starting at position 3471 of SEQ ID NO: 318265
guguuuacagaaugucuga

SEQ ID NO: 549506 - RNA, 19 nt, Artificial Sequence
  Description of Artificial Sequence: Synthetic oligonucleotide
  Antisense strand to SEQ ID NO: 549505
ucagacauucuguaaacac

SEQ ID NO: 549507 - RNA, 19 nt, Artificial Sequence
  Description of Artificial Sequence: Synthetic oligonucleotide
  Sense strand starting at position 3649 of SEQ ID NO: 318265
guuagacugcacuggguau

SEQ ID NO: 549508 - RNA, 19 nt, Artificial Sequence
  Description of Artificial Sequence: Synthetic oligonucleotide
  Antisense strand to SEQ ID NO: 549507
auacccagugcagucuaac

SEQ ID NO: 549509 - RNA, 19 nt, Artificial Sequence
  Description of Artificial Sequence: Synthetic oligonucleotide
  Sense strand starting at position 3661 of SEQ ID NO: 318265
uggguaugauguuuaagga

SEQ ID NO: 549510 - RNA, 19 nt, Artificial Sequence
  Description of Artificial Sequence: Synthetic oligonucleotide
  Antisense strand to SEQ ID NO: 549509
uccuuaaacaucauaccca

SEQ ID NO: 549511 - RNA, 19 nt, Artificial Sequence
  Description of Artificial Sequence: Synthetic oligonucleotide
  Sense strand starting at position 3684 of SEQ ID NO: 318265
acugaaagcuucucugaau

SEQ ID NO: 549512 - RNA, 19 nt, Artificial Sequence
  Description of Artificial Sequence: Synthetic oligonucleotide
  Antisense strand to SEQ ID NO: 549511
auucagagaagcuuucagu

SEQ ID NO: 549513 - RNA, 19 nt, Artificial Sequence
  Description of Artificial Sequence: Synthetic oligonucleotide
  Sense strand starting at position 3685 of SEQ ID NO: 318265
cugaaagcuucucugaauu

SEQ ID NO: 549514 - RNA, 19 nt, Artificial Sequence
  Description of Artificial Sequence: Synthetic oligonucleotide
  Antisense strand to SEQ ID NO: 549513
aauucagagaagcuuucag

SEQ ID NO: 549515 - RNA, 19 nt, Artificial Sequence
  Description of Artificial Sequence: Synthetic oligonucleotide
  Sense strand starting at position 3934 of SEQ ID NO: 318265
gcaccucaacauugagauc

SEQ ID NO: 549516 - RNA, 19 nt, Artificial Sequence
  Description of Artificial Sequence: Synthetic oligonucleotide
  Antisense strand to SEQ ID NO: 549515
gaucucaauguugaggugc

SEQ ID NO: 549517 - RNA, 19 nt, Artificial Sequence
  Description of Artificial Sequence: Synthetic oligonucleotide
  Sense strand starting at position 6 of SEQ ID NO: 318266
uuugaauaagcacgagaca

SEQ ID NO: 549518 - RNA, 19 nt, Artificial Sequence
  Description of Artificial Sequence: Synthetic oligonucleotide
  Antisense strand to SEQ ID NO: 549517
ugucucgugcuuauucaaa

SEQ ID NO: 549519 - RNA, 19 nt, Artificial Sequence
  Description of Artificial Sequence: Synthetic oligonucleotide
  Sense strand starting at position 34 of SEQ ID NO: 318266
caaauacuccaguguggga

SEQ ID NO: 549520 - RNA, 19 nt, Artificial Sequence
  Description of Artificial Sequence: Synthetic oligonucleotide
  Antisense strand to SEQ ID NO: 549519
ucccacacuggaguauuug

SEQ ID NO: 549521 - RNA, 19 nt, Artificial Sequence
  Description of Artificial Sequence: Synthetic oligonucleotide
  Sense strand starting at position 166 of SEQ ID NO: 318266
gcugcagagaucuacagau

SEQ ID NO: 549522 - RNA, 19 nt, Artificial Sequence
  Description of Artificial Sequence: Synthetic oligonucleotide
  Antisense strand to SEQ ID NO: 549521
aucuguagaucucugcagc

SEQ ID NO: 549523 - RNA, 19 nt, Artificial Sequence
  Description of Artificial Sequence: Synthetic oligonucleotide
  Sense strand starting at position 256 of SEQ ID NO: 318266
aaauacauccggcgaguaa

SEQ ID NO: 549524 - RNA, 19 nt, Artificial Sequence
  Description of Artificial Sequence: Synthetic oligonucleotide
  Antisense strand to SEQ ID NO: 549523
uuacucgccggauguauuu

SEQ ID NO: 549525 - RNA, 19 nt, Artificial Sequence
  Description of Artificial Sequence: Synthetic oligonucleotide
  Sense strand starting at position 268 of SEQ ID NO: 318266
cgaguaagacguuagagcu

SEQ ID NO: 549526 - RNA, 19 nt, Artificial Sequence
  Description of Artificial Sequence: Synthetic oligonucleotide
  Antisense strand to SEQ ID NO: 549525
agcucuaacgucuuacucg

SEQ ID NO: 549527 - RNA, 19 nt, Artificial Sequence
  Description of Artificial Sequence: Synthetic oligonucleotide
  Sense strand starting at position 274 of SEQ ID NO: 318266
agacguuagagcugaacuu

SEQ ID NO: 549528 - RNA, 19 nt, Artificial Sequence
  Description of Artificial Sequence: Synthetic oligonucleotide
  Antisense strand to SEQ ID NO: 549527
aaguucagcucuaacgucu

SEQ ID NO: 549529 - RNA, 19 nt, Artificial Sequence
  Description of Artificial Sequence: Synthetic oligonucleotide
  Sense strand starting at position 275 of SEQ ID NO: 318266
gacguuagagcugaacuua

SEQ ID NO: 549530 - RNA, 19 nt, Artificial Sequence
  Description of Artificial Sequence: Synthetic oligonucleotide
  Antisense strand to SEQ ID NO: 549529
uaaguucagcucuaacguc

SEQ ID NO: 549531 - RNA, 19 nt, Artificial Sequence
  Description of Artificial Sequence: Synthetic oligonucleotide
  Sense strand starting at position 302 of SEQ ID NO: 318266
agcagaaguuacucucuuu

SEQ ID NO: 549532 - RNA, 19 nt, Artificial Sequence
  Description of Artificial Sequence: Synthetic oligonucleotide
  Antisense strand to SEQ ID NO: 549531
aaagagaguaacuucugcu

SEQ ID NO: 549533 - RNA, 19 nt, Artificial Sequence
  Description of Artificial Sequence: Synthetic oligonucleotide
  Sense strand starting at position 390 of SEQ ID NO: 318266
gucugcuugcuagucuuaa

SEQ ID NO: 549534 - RNA, 19 nt, Artificial Sequence
  Description of Artificial Sequence: Synthetic oligonucleotide
  Antisense strand to SEQ ID NO: 549533
uuaagacuagcaagcagac

SEQ ID NO: 549535 - RNA, 19 nt, Artificial Sequence
  Description of Artificial Sequence: Synthetic oligonucleotide
  Sense strand starting at position 405 of SEQ ID NO: 318266
uuaagagaaggaugugcua

SEQ ID NO: 549536 - RNA, 19 nt, Artificial Sequence
  Description of Artificial Sequence: Synthetic oligonucleotide
  Antisense strand to SEQ ID NO: 549535
uagcacauccuucucuuaa

SEQ ID NO: 549537 - RNA, 19 nt, Artificial Sequence
  Description of Artificial Sequence: Synthetic oligonucleotide
  Sense strand starting at position 418 of SEQ ID NO: 318266
gugcuaccugcuuagcaaa

SEQ ID NO: 549538 - RNA, 19 nt, Artificial Sequence
  Description of Artificial Sequence: Synthetic oligonucleotide
  Antisense strand to SEQ ID NO: 549537
uuugcuaagcagguagcac

SEQ ID NO: 549539 - RNA, 19 nt, Artificial Sequence
  Description of Artificial Sequence: Synthetic oligonucleotide
  Sense strand starting at position 420 of SEQ ID NO: 318266
gcuaccugcuuagcaaaga

SEQ ID NO: 549540 - RNA, 19 nt, Artificial Sequence
  Description of Artificial Sequence: Synthetic oligonucleotide
  Antisense strand to SEQ ID NO: 549539
ucuuugcuaagcagguagc

SEQ ID NO: 549541 - RNA, 19 nt, Artificial Sequence
  Description of Artificial Sequence: Synthetic oligonucleotide
  Sense strand starting at position 440 of SEQ ID NO: 318266
aggcaaucacgaugaagaa

SEQ ID NO: 549542 - RNA, 19 nt, Artificial Sequence
  Description of Artificial Sequence: Synthetic oligonucleotide
  Antisense strand to SEQ ID NO: 549541
uucuucaucgugauugccu

SEQ ID NO: 549543 - RNA, 19 nt, Artificial Sequence
  Description of Artificial Sequence: Synthetic oligonucleotide
  Sense strand starting at position 575 of SEQ ID NO: 318266
gcgaccauucccuaggaga

SEQ ID NO: 549544 - RNA, 19 nt, Artificial Sequence
  Description of Artificial Sequence: Synthetic oligonucleotide
  Antisense strand to SEQ ID NO: 549543
ucuccuagggaauggucgc

SEQ ID NO: 549545 - RNA, 19 nt, Artificial Sequence
  Description of Artificial Sequence: Synthetic oligonucleotide
  Sense strand starting at position 1165 of SEQ ID NO: 318266
uuccgugggcuccaggaaa

SEQ ID NO: 549546 - RNA, 19 nt, Artificial Sequence
  Description of Artificial Sequence: Synthetic oligonucleotide
  Antisense strand to SEQ ID NO: 549545
uuuccuggagcccacggaa

SEQ ID NO: 549547 - RNA, 19 nt, Artificial Sequence
  Description of Artificial Sequence: Synthetic oligonucleotide
  Sense strand starting at position 2150 of SEQ ID NO: 318266
cccuuugcucccgggauuu

SEQ ID NO: 549548 - RNA, 19 nt, Artificial Sequence
  Description of Artificial Sequence: Synthetic oligonucleotide
  Antisense strand to SEQ ID NO: 549547
aaaucccgggagcaaaggg

SEQ ID NO: 549549 - RNA, 19 nt, Artificial Sequence
  Description of Artificial Sequence: Synthetic oligonucleotide
  Sense strand starting at position 2160 of SEQ ID NO: 318266
ccgggauuuaucggcauga

SEQ ID NO: 549550 - RNA, 19 nt, Artificial Sequence
  Description of Artificial Sequence: Synthetic oligonucleotide
  Antisense strand to SEQ ID NO: 549549
ucaugccgauaaaucccgg

SEQ ID NO: 549551 - RNA, 19 nt, Artificial Sequence
  Description of Artificial Sequence: Synthetic oligonucleotide
  Sense strand starting at position 2235 of SEQ ID NO: 318266
auccuaugaacgugguaau

SEQ ID NO: 549552 - RNA, 19 nt, Artificial Sequence
  Description of Artificial Sequence: Synthetic oligonucleotide
  Antisense strand to SEQ ID NO: 549551
auuaccacguucauaggau

SEQ ID NO: 549553 - RNA, 19 nt, Artificial Sequence
  Description of Artificial Sequence: Synthetic oligonucleotide
  Sense strand starting at position 2420 of SEQ ID NO: 318266
ccuggugaacgcuggauau

SEQ ID NO: 549554 - RNA, 19 nt, Artificial Sequence
  Description of Artificial Sequence: Synthetic oligonucleotide
  Antisense strand to SEQ ID NO: 549553
auauccagcguucaccagg

SEQ ID NO: 549555 - RNA, 19 nt, Artificial Sequence
  Description of Artificial Sequence: Synthetic oligonucleotide
  Sense strand starting at position 2433 of SEQ ID NO: 318266
ggauauucgacuugaggug

SEQ ID NO: 549556 - RNA, 19 nt, Artificial Sequence
  Description of Artificial Sequence: Synthetic oligonucleotide
  Antisense strand to SEQ ID NO: 549555
caccucaagucgaauaucc

SEQ ID NO: 549557 - RNA, 19 nt, Artificial Sequence
  Description of Artificial Sequence: Synthetic oligonucleotide
  Sense strand starting at position 2503 of SEQ ID NO: 318266
uugucuuagcauugaggac

SEQ ID NO: 549558 - RNA, 19 nt, Artificial Sequence
  Description of Artificial Sequence: Synthetic oligonucleotide
  Antisense strand to SEQ ID NO: 549557
guccucaaugcuaagacaa

SEQ ID NO: 549559 - RNA, 19 nt, Artificial Sequence
  Description of Artificial Sequence: Synthetic oligonucleotide
  Sense strand starting at position 2504 of SEQ ID NO: 318266
ugucuuagcauugaggaca

SEQ ID NO: 549560 - RNA, 19 nt, Artificial Sequence
  Description of Artificial Sequence: Synthetic oligonucleotide
  Antisense strand to SEQ ID NO: 549559
uguccucaaugcuaagaca

SEQ ID NO: 549561 - RNA, 19 nt, Artificial Sequence
  Description of Artificial Sequence: Synthetic oligonucleotide
  Sense strand starting at position 2530 of SEQ ID NO: 318266
agaggugguagcugagaaa

SEQ ID NO: 549562 - RNA, 19 nt, Artificial Sequence
  Description of Artificial Sequence: Synthetic oligonucleotide
  Antisense strand to SEQ ID NO: 549561
uuucucagcuaccaccucu

SEQ ID NO: 549563 - RNA, 19 nt, Artificial Sequence
  Description of Artificial Sequence: Synthetic oligonucleotide
  Sense strand starting at position 2598 of SEQ ID NO: 318266
cuggcugagcacuguacaa

SEQ ID NO: 549564 - RNA, 19 nt, Artificial Sequence
  Description of Artificial Sequence: Synthetic oligonucleotide
  Antisense strand to SEQ ID NO: 549563
uuguacagugcucagccag

SEQ ID NO: 549565 - RNA, 19 nt, Artificial Sequence
  Description of Artificial Sequence: Synthetic oligonucleotide
  Sense strand starting at position 2695 of SEQ ID NO: 318266
gccagaggcugcuccauaa

SEQ ID NO: 549566 - RNA, 19 nt, Artificial Sequence
  Description of Artificial Sequence: Synthetic oligonucleotide
  Antisense strand to SEQ ID NO: 549565
uuauggagcagccucuggc

SEQ ID NO: 549567 - RNA, 19 nt, Artificial Sequence
  Description of Artificial Sequence: Synthetic oligonucleotide
  Sense strand starting at position 2749 of SEQ ID NO: 318266
aaggcugaugcuugcaaga

SEQ ID NO: 549568 - RNA, 19 nt, Artificial Sequence
  Description of Artificial Sequence: Synthetic oligonucleotide
  Antisense strand to SEQ ID NO: 549567
ucuugcaagcaucagccuu

SEQ ID NO: 549569 - RNA, 19 nt, Artificial Sequence
  Description of Artificial Sequence: Synthetic oligonucleotide
  Sense strand starting at position 2773 of SEQ ID NO: 318266
aagaguuugcugcacugga

SEQ ID NO: 549570 - RNA, 19 nt, Artificial Sequence
  Description of Artificial Sequence: Synthetic oligonucleotide
  Antisense strand to SEQ ID NO: 549569
uccagugcagcaaacucuu

SEQ ID NO: 549571 - RNA, 19 nt, Artificial Sequence
  Description of Artificial Sequence: Synthetic oligonucleotide
  Sense strand starting at position 2986 of SEQ ID NO: 318266
ggaugagugacuuaggcua

SEQ ID NO: 549572 - RNA, 19 nt, Artificial Sequence
  Description of Artificial Sequence: Synthetic oligonucleotide
  Antisense strand to SEQ ID NO: 549571
uagccuaagucacucaucc

SEQ ID NO: 549573 - RNA, 19 nt, Artificial Sequence
  Description of Artificial Sequence: Synthetic oligonucleotide
  Sense strand starting at position 3003 of SEQ ID NO: 318266
uaggacugcuauucuggaa

SEQ ID NO: 549574 - RNA, 19 nt, Artificial Sequence
  Description of Artificial Sequence: Synthetic oligonucleotide
  Antisense strand to SEQ ID NO: 549573
uuccagaauagcaguccua

SEQ ID NO: 549575 - RNA, 19 nt, Artificial Sequence
  Description of Artificial Sequence: Synthetic oligonucleotide
  Sense strand starting at position 3392 of SEQ ID NO: 318266
cuaccaaugccagagugau

SEQ ID NO: 549576 - RNA, 19 nt, Artificial Sequence
  Description of Artificial Sequence: Synthetic oligonucleotide
  Antisense strand to SEQ ID NO: 549575
aucacucuggcauugguag

SEQ ID NO: 549577 - RNA, 19 nt, Artificial Sequence
  Description of Artificial Sequence: Synthetic oligonucleotide
  Sense strand starting at position 3434 of SEQ ID NO: 318266
acaauuuggccaugcuacu

SEQ ID NO: 549578 - RNA, 19 nt, Artificial Sequence
  Description of Artificial Sequence: Synthetic oligonucleotide
  Antisense strand to SEQ ID NO: 549577
aguagcauggccaaauugu

SEQ ID NO: 549579 - RNA, 19 nt, Artificial Sequence
  Description of Artificial Sequence: Synthetic oligonucleotide
  Sense strand starting at position 3443 of SEQ ID NO: 318266
ccaugcuacugcucucaga

SEQ ID NO: 549580 - RNA, 19 nt, Artificial Sequence
  Description of Artificial Sequence: Synthetic oligonucleotide
  Antisense strand to SEQ ID NO: 549579
ucugagagcaguagcaugg

SEQ ID NO: 549581 - RNA, 19 nt, Artificial Sequence
  Description of Artificial Sequence: Synthetic oligonucleotide
  Sense strand starting at position 3595 of SEQ ID NO: 318266
gaugucucuuguguccaga

SEQ ID NO: 549582 - RNA, 19 nt, Artificial Sequence
  Description of Artificial Sequence: Synthetic oligonucleotide
  Antisense strand to SEQ ID NO: 549581
ucuggacacaagagacauc

SEQ ID NO: 549583 - RNA, 19 nt, Artificial Sequence
  Description of Artificial Sequence: Synthetic oligonucleotide
  Sense strand starting at position 3597 of SEQ ID NO: 318266
ugucucuuguguccagaaa

SEQ ID NO: 549584 - RNA, 19 nt, Artificial Sequence
  Description of Artificial Sequence: Synthetic oligonucleotide
  Antisense strand to SEQ ID NO: 549583
uuucuggacacaagagaca

SEQ ID NO: 549585 - RNA, 19 nt, Artificial Sequence
  Description of Artificial Sequence: Synthetic oligonucleotide
  Sense strand starting at position 3598 of SEQ ID NO: 318266
gucucuuguguccagaaag

SEQ ID NO: 549586 - RNA, 19 nt, Artificial Sequence
  Description of Artificial Sequence: Synthetic oligonucleotide
  Antisense strand to SEQ ID NO: 549585
cuuucuggacacaagagac

SEQ ID NO: 549587 - RNA, 19 nt, Artificial Sequence
  Description of Artificial Sequence: Synthetic oligonucleotide
  Sense strand starting at position 3659 of SEQ ID NO: 318266
ggcccagcucagcauuaua

SEQ ID NO: 549588 - RNA, 19 nt, Artificial Sequence
  Description of Artificial Sequence: Synthetic oligonucleotide
  Antisense strand to SEQ ID NO: 549587
uauaaugcugagcugggcc

SEQ ID NO: 549589 - RNA, 19 nt, Artificial Sequence
  Description of Artificial Sequence: Synthetic oligonucleotide
  Sense strand starting at position 3776 of SEQ ID NO: 318266
aguauuacuguugggauac

SEQ ID NO: 549590 - RNA, 19 nt, Artificial Sequence
  Description of Artificial Sequence: Synthetic oligonucleotide
  Antisense strand to SEQ ID NO: 549589
guaucccaacaguaauacu

SEQ ID NO: 549591 - RNA, 19 nt, Artificial Sequence
  Description of Artificial Sequence: Synthetic oligonucleotide
  Sense strand starting at position 3856 of SEQ ID NO: 318266
cguuaaugucagggacuau

SEQ ID NO: 549592 - RNA, 19 nt, Artificial Sequence
  Description of Artificial Sequence: Synthetic oligonucleotide
  Antisense strand to SEQ ID NO: 549591
auagucccugacauuaacg

SEQ ID NO: 549593 - RNA, 19 nt, Artificial Sequence
  Description of Artificial Sequence: Synthetic oligonucleotide
  Sense strand starting at position 3938 of SEQ ID NO: 318266
uuagcaaaucuccagugaa

SEQ ID NO: 549594 - RNA, 19 nt, Artificial Sequence
  Description of Artificial Sequence: Synthetic oligonucleotide
  Antisense strand to SEQ ID NO: 549593
uucacuggagauuugcuaa

SEQ ID NO: 549595 - RNA, 19 nt, Artificial Sequence
  Description of Artificial Sequence: Synthetic oligonucleotide
  Sense strand starting at position 3941 of SEQ ID NO: 318266
gcaaaucuccagugaaaga

SEQ ID NO: 549596 - RNA, 19 nt, Artificial Sequence
  Description of Artificial Sequence: Synthetic oligonucleotide
  Antisense strand to SEQ ID NO: 549595
ucuuucacuggagauuugc

SEQ ID NO: 549597 - RNA, 19 nt, Artificial Sequence
  Description of Artificial Sequence: Synthetic oligonucleotide
  Sense strand starting at position 178 of SEQ ID NO: 318267
ugauucuugcaccauuaag

SEQ ID NO: 549598 - RNA, 19 nt, Artificial Sequence
  Description of Artificial Sequence: Synthetic oligonucleotide
  Antisense strand to SEQ ID NO: 549597
cuuaauggugcaagaauca

SEQ ID NO: 549599 - RNA, 19 nt, Artificial Sequence
  Description of Artificial Sequence: Synthetic oligonucleotide
  Sense strand starting at position 222 of SEQ ID NO: 318267
uuuggucuugaaugauaug

SEQ ID NO: 549600 - RNA, 19 nt, Artificial Sequence
  Description of Artificial Sequence: Synthetic oligonucleotide
  Antisense strand to SEQ ID NO: 549599
cauaucauucaagaccaaa

SEQ ID NO: 549601 - RNA, 19 nt, Artificial Sequence
  Description of Artificial Sequence: Synthetic oligonucleotide
  Sense strand starting at position 227 of SEQ ID NO: 318267
ucuugaaugauaugaggca

SEQ ID NO: 549602 - RNA, 19 nt, Artificial Sequence
  Description of Artificial Sequence: Synthetic oligonucleotide
  Antisense strand to SEQ ID NO: 549601
ugccucauaucauucaaga

SEQ ID NO: 549603 - RNA, 19 nt, Artificial Sequence
  Description of Artificial Sequence: Synthetic oligonucleotide
  Sense strand starting at position 249 of SEQ ID NO: 318267
gggcuuacaucucuaauaa

SEQ ID NO: 549604 - RNA, 19 nt, Artificial Sequence
  Description of Artificial Sequence: Synthetic oligonucleotide
  Antisense strand to SEQ ID NO: 549603
uuauuagagauguaagccc

SEQ ID NO: 549605 - RNA, 19 nt, Artificial Sequence
  Description of Artificial Sequence: Synthetic oligonucleotide
  Sense strand starting at position 270 of SEQ ID NO: 318267
ucauuagggaaugguccaa

SEQ ID NO: 549606 - RNA, 19 nt, Artificial Sequence
  Description of Artificial Sequence: Synthetic oligonucleotide
  Antisense strand to SEQ ID NO: 549605
uuggaccauucccuaauga

SEQ ID NO: 549607 - RNA, 19 nt, Artificial Sequence
  Description of Artificial Sequence: Synthetic oligonucleotide
  Sense strand starting at position 593 of SEQ ID NO: 318267
uugccuuucccagaaugaa

SEQ ID NO: 549608 - RNA, 19 nt, Artificial Sequence
  Description of Artificial Sequence: Synthetic oligonucleotide
  Antisense strand to SEQ ID NO: 549607
uucauucugggaaaggcaa

SEQ ID NO: 549609 - RNA, 19 nt, Artificial Sequence
  Description of Artificial Sequence: Synthetic oligonucleotide
  Sense strand starting at position 749 of SEQ ID NO: 318267
acccgcugaccagaugaua

SEQ ID NO: 549610 - RNA, 19 nt, Artificial Sequence
  Description of Artificial Sequence: Synthetic oligonucleotide
  Antisense strand to SEQ ID NO: 549609
uaucaucuggucagcgggu

SEQ ID NO: 549611 - RNA, 19 nt, Artificial Sequence
  Description of Artificial Sequence: Synthetic oligonucleotide
  Sense strand starting at position 800 of SEQ ID NO: 318267
acgaauaaaucugcaauaa

SEQ ID NO: 549612 - RNA, 19 nt, Artificial Sequence
  Description of Artificial Sequence: Synthetic oligonucleotide
  Antisense strand to SEQ ID NO: 549611
uuauugcagauuuauucgu

SEQ ID NO: 549613 - RNA, 19 nt, Artificial Sequence
  Description of Artificial Sequence: Synthetic oligonucleotide
  Sense strand starting at position 951 of SEQ ID NO: 318267
aggcgugagucuauucgua

SEQ ID NO: 549614 - RNA, 19 nt, Artificial Sequence
  Description of Artificial Sequence: Synthetic oligonucleotide
  Antisense strand to SEQ ID NO: 549613
uacgaauagacucacgccu

SEQ ID NO: 549615 - RNA, 19 nt, Artificial Sequence
  Description of Artificial Sequence: Synthetic oligonucleotide
  Sense strand starting at position 1013 of SEQ ID NO: 318267
cacagagagcaauguuaag

SEQ ID NO: 549616 - RNA, 19 nt, Artificial Sequence
  Description of Artificial Sequence: Synthetic oligonucleotide
  Antisense strand to SEQ ID NO: 549615
cuuaacauugcucucugug

SEQ ID NO: 549617 - RNA, 19 nt, Artificial Sequence
  Description of Artificial Sequence: Synthetic oligonucleotide
  Sense strand starting at position 1019 of SEQ ID NO: 318267
gagcaauguuaaguaacaa

SEQ ID NO: 549618 - RNA, 19 nt, Artificial Sequence
  Description of Artificial Sequence: Synthetic oligonucleotide
  Antisense strand to SEQ ID NO: 549617
uuguuacuuaacauugcuc

SEQ ID NO: 549619 - RNA, 19 nt, Artificial Sequence
  Description of Artificial Sequence: Synthetic oligonucleotide
  Sense strand starting at position 1096 of SEQ ID NO: 318267
ggguguauggaaugccauu

SEQ ID NO: 549620 - RNA, 19 nt, Artificial Sequence
  Description of Artificial Sequence: Synthetic oligonucleotide
  Antisense strand to SEQ ID NO: 549619
aauggcauuccauacaccc

SEQ ID NO: 549621 - RNA, 19 nt, Artificial Sequence
  Description of Artificial Sequence: Synthetic oligonucleotide
  Sense strand starting at position 1127 of SEQ ID NO: 318267
gcagauuauagagacguaa

SEQ ID NO: 549622 - RNA, 19 nt, Artificial Sequence
  Description of Artificial Sequence: Synthetic oligonucleotide
  Antisense strand to SEQ ID NO: 549621
uuacgucucuauaaucugc

SEQ ID NO: 549623 - RNA, 19 nt, Artificial Sequence
  Description of Artificial Sequence: Synthetic oligonucleotide
  Sense strand starting at position 1129 of SEQ ID NO: 318267
agauuauagagacguaaca

SEQ ID NO: 549624 - RNA, 19 nt, Artificial Sequence
  Description of Artificial Sequence: Synthetic oligonucleotide
  Antisense strand to SEQ ID NO: 549623
uguuacgucucuauaaucu

SEQ ID NO: 549625 - RNA, 19 nt, Artificial Sequence
  Description of Artificial Sequence: Synthetic oligonucleotide
  Sense strand starting at position 1330 of SEQ ID NO: 318267
cacgcuuguggugaaauca

SEQ ID NO: 549626 - RNA, 19 nt, Artificial Sequence
  Description of Artificial Sequence: Synthetic oligonucleotide
  Antisense strand to SEQ ID NO: 549625
ugauuucaccacaagcgug

SEQ ID NO: 549627 - RNA, 19 nt, Artificial Sequence
  Description of Artificial Sequence: Synthetic oligonucleotide
  Sense strand starting at position 1358 of SEQ ID NO: 318267
aggacucuuagcgguggau

SEQ ID NO: 549628 - RNA, 19 nt, Artificial Sequence
  Description of Artificial Sequence: Synthetic oligonucleotide
  Antisense strand to SEQ ID NO: 549627
auccaccgcuaagaguccu

SEQ ID NO: 549629 - RNA, 19 nt, Artificial Sequence
  Description of Artificial Sequence: Synthetic oligonucleotide
  Sense strand starting at position 1362 of SEQ ID NO: 318267
cucuuagcgguggaucaaa

SEQ ID NO: 549630 - RNA, 19 nt, Artificial Sequence
  Description of Artificial Sequence: Synthetic oligonucleotide
  Antisense strand to SEQ ID NO: 549629
uuugauccaccgcuaagag

SEQ ID NO: 549631 - RNA, 19 nt, Artificial Sequence
  Description of Artificial Sequence: Synthetic oligonucleotide
  Sense strand starting at position 2055 of SEQ ID NO: 318267
gugaguacugcuccgagcu

SEQ ID NO: 549632 - RNA, 19 nt, Artificial Sequence
  Description of Artificial Sequence: Synthetic oligonucleotide
  Antisense strand to SEQ ID NO: 549631
agcucggagcaguacucac

SEQ ID NO: 549633 - RNA, 19 nt, Artificial Sequence
  Description of Artificial Sequence: Synthetic oligonucleotide
  Sense strand starting at position 2185 of SEQ ID NO: 318267
cucgguguucgcucaguau

SEQ ID NO: 549634 - RNA, 19 nt, Artificial Sequence
  Description of Artificial Sequence: Synthetic oligonucleotide
  Antisense strand to SEQ ID NO: 549633
auacugagcgaacaccgag

SEQ ID NO: 549635 - RNA, 19 nt, Artificial Sequence
  Description of Artificial Sequence: Synthetic oligonucleotide
  Sense strand starting at position 2271 of SEQ ID NO: 318267
caugauugugaaggauacu

SEQ ID NO: 549636 - RNA, 19 nt, Artificial Sequence
  Description of Artificial Sequence: Synthetic oligonucleotide
  Antisense strand to SEQ ID NO: 549635
aguauccuucacaaucaug

SEQ ID NO: 549637 - RNA, 19 nt, Artificial Sequence
  Description of Artificial Sequence: Synthetic oligonucleotide
  Sense strand starting at position 2541 of SEQ ID NO: 318267
ugcagaaguucccuuaauu

SEQ ID NO: 549638 - RNA, 19 nt, Artificial Sequence
  Description of Artificial Sequence: Synthetic oligonucleotide
  Antisense strand to SEQ ID NO: 549637
aauuaagggaacuucugca

SEQ ID NO: 549639 - RNA, 19 nt, Artificial Sequence
  Description of Artificial Sequence: Synthetic oligonucleotide
  Sense strand starting at position 2576 of SEQ ID NO: 318267
cgugauucaguugaugaac

SEQ ID NO: 549640 - RNA, 19 nt, Artificial Sequence
  Description of Artificial Sequence: Synthetic oligonucleotide
  Antisense strand to SEQ ID NO: 549639
guucaucaacugaaucacg

SEQ ID NO: 549641 - RNA, 19 nt, Artificial Sequence
  Description of Artificial Sequence: Synthetic oligonucleotide
  Sense strand starting at position 2628 of SEQ ID NO: 318267
auucuuagugcuuguauuu

SEQ ID NO: 549642 - RNA, 19 nt, Artificial Sequence
  Description of Artificial Sequence: Synthetic oligonucleotide
  Antisense strand to SEQ ID NO: 549641
aaauacaagcacuaagaau

SEQ ID NO: 549643 - RNA, 19 nt, Artificial Sequence
  Description of Artificial Sequence: Synthetic oligonucleotide
  Sense strand starting at position 2634 of SEQ ID NO: 318267
agugcuuguauuugaggca

SEQ ID NO: 549644 - RNA, 19 nt, Artificial Sequence
  Description of Artificial Sequence: Synthetic oligonucleotide
  Antisense strand to SEQ ID NO: 549643
ugccucaaauacaagcacu

SEQ ID NO: 549645 - RNA, 19 nt, Artificial Sequence
  Description of Artificial Sequence: Synthetic oligonucleotide
  Sense strand starting at position 3110 of SEQ ID NO: 318267
gaauuauaggcgcucgcca

SEQ ID NO: 549646 - RNA, 19 nt, Artificial Sequence
  Description of Artificial Sequence: Synthetic oligonucleotide
  Antisense strand to SEQ ID NO: 549645
uggcgagcgccuauaauuc

SEQ ID NO: 549647 - RNA, 19 nt, Artificial Sequence
  Description of Artificial Sequence: Synthetic oligonucleotide
  Sense strand starting at position 3310 of SEQ ID NO: 318267
aggugaucucaucauucuc

SEQ ID NO: 549648 - RNA, 19 nt, Artificial Sequence
  Description of Artificial Sequence: Synthetic oligonucleotide
  Antisense strand to SEQ ID NO: 549647
gagaaugaugagaucaccu

SEQ ID NO: 549649 - RNA, 19 nt, Artificial Sequence
  Description of Artificial Sequence: Synthetic oligonucleotide
  Sense strand starting at position 3312 of SEQ ID NO: 318267
gugaucucaucauucucuu

SEQ ID NO: 549650 - RNA, 19 nt, Artificial Sequence
  Description of Artificial Sequence: Synthetic oligonucleotide
  Antisense strand to SEQ ID NO: 549649
aagagaaugaugagaucac

SEQ ID NO: 549651 - RNA, 19 nt, Artificial Sequence
  Description of Artificial Sequence: Synthetic oligonucleotide
  Sense strand starting at position 3368 of SEQ ID NO: 318267
gguacaguacguuauauaa

SEQ ID NO: 549652 - RNA, 19 nt, Artificial Sequence
  Description of Artificial Sequence: Synthetic oligonucleotide
  Antisense strand to SEQ ID NO: 549651
uuauauaacguacuguacc

SEQ ID NO: 549653 - RNA, 19 nt, Artificial Sequence
  Description of Artificial Sequence: Synthetic oligonucleotide
  Sense strand starting at position 3468 of SEQ ID NO: 318267
aaaugucacuguuugaaug

SEQ ID NO: 549654 - RNA, 19 nt, Artificial Sequence
  Description of Artificial Sequence: Synthetic oligonucleotide
  Antisense strand to SEQ ID NO: 549653
cauucaaacagugacauuu

SEQ ID NO: 549655 - RNA, 19 nt, Artificial Sequence
  Description of Artificial Sequence: Synthetic oligonucleotide
  Sense strand starting at position 3469 of SEQ ID NO: 318267
aaugucacuguuugaauga

SEQ ID NO: 549656 - RNA, 19 nt, Artificial Sequence
  Description of Artificial Sequence: Synthetic oligonucleotide
  Antisense strand to SEQ ID NO: 549655
ucauucaaacagugacauu

SEQ ID NO: 549657 - RNA, 19 nt, Artificial Sequence
  Description of Artificial Sequence: Synthetic oligonucleotide
  Sense strand starting at position 3497 of SEQ ID NO: 318267
ugaucucuuuacuuacagu

SEQ ID NO: 549658 - RNA, 19 nt, Artificial Sequence
  Description of Artificial Sequence: Synthetic oligonucleotide
  Antisense strand to SEQ ID NO: 549657
acuguaaguaaagagauca

SEQ ID NO: 549659 - RNA, 19 nt, Artificial Sequence
  Description of Artificial Sequence: Synthetic oligonucleotide
  Sense strand starting at position 3513 of SEQ ID NO: 318267
aguucuaacugucccaauu

SEQ ID NO: 549660 - RNA, 19 nt, Artificial Sequence
  Description of Artificial Sequence: Synthetic oligonucleotide
  Antisense strand to SEQ ID NO: 549659
aauugggacaguuagaacu

SEQ ID NO: 549661 - RNA, 19 nt, Artificial Sequence
  Description of Artificial Sequence: Synthetic oligonucleotide
  Sense strand starting at position 3575 of SEQ ID NO: 318267
gggagagacuauguauugu

SEQ ID NO: 549662 - RNA, 19 nt, Artificial Sequence
  Description of Artificial Sequence: Synthetic oligonucleotide
  Antisense strand to SEQ ID NO: 549661
acaauacauagucucuccc

SEQ ID NO: 549663 - RNA, 19 nt, Artificial Sequence
  Description of Artificial Sequence: Synthetic oligonucleotide
  Sense strand starting at position 3640 of SEQ ID NO: 318267
gcaguaugagggcagagau

SEQ ID NO: 549664 - RNA, 19 nt, Artificial Sequence
  Description of Artificial Sequence: Synthetic oligonucleotide
  Antisense strand to SEQ ID NO: 549663
aucucugcccucauacugc

SEQ ID NO: 549665 - RNA, 19 nt, Artificial Sequence
  Description of Artificial Sequence: Synthetic oligonucleotide
  Sense strand starting at position 3676 of SEQ ID NO: 318267
ugcauuaacgcugauaucu

SEQ ID NO: 549666 - RNA, 19 nt, Artificial Sequence
  Description of Artificial Sequence: Synthetic oligonucleotide
  Antisense strand to SEQ ID NO: 549665
agauaucagcguuaaugca

SEQ ID NO: 549667 - RNA, 19 nt, Artificial Sequence
  Description of Artificial Sequence: Synthetic oligonucleotide
  Sense strand starting at position 3684 of SEQ ID NO: 318267
cgcugauaucuagaaagca

SEQ ID NO: 549668 - RNA, 19 nt, Artificial Sequence
  Description of Artificial Sequence: Synthetic oligonucleotide
  Antisense strand to SEQ ID NO: 549667
ugcuuucuagauaucagcg

SEQ ID NO: 549669 - RNA, 19 nt, Artificial Sequence
  Description of Artificial Sequence: Synthetic oligonucleotide
  Sense strand starting at position 3733 of SEQ ID NO: 318267
uugaauaaaugggaacgaa

SEQ ID NO: 549670 - RNA, 19 nt, Artificial Sequence
  Description of Artificial Sequence: Synthetic oligonucleotide
  Antisense strand to SEQ ID NO: 549669
uucguucccauuuauucaa

SEQ ID NO: 549671 - RNA, 19 nt, Artificial Sequence
  Description of Artificial Sequence: Synthetic oligonucleotide
  Sense strand starting at position 3796 of SEQ ID NO: 318267
auugacaaccacugaguua

SEQ ID NO: 549672 - RNA, 19 nt, Artificial Sequence
  Description of Artificial Sequence: Synthetic oligonucleotide
  Antisense strand to SEQ ID NO: 549671
uaacucagugguugucaau

SEQ ID NO: 549673 - RNA, 19 nt, Artificial Sequence
  Description of Artificial Sequence: Synthetic oligonucleotide
  Sense strand starting at position 3857 of SEQ ID NO: 318267
cuaugaggcccugaacuuu

SEQ ID NO: 549674 - RNA, 19 nt, Artificial Sequence
  Description of Artificial Sequence: Synthetic oligonucleotide
  Antisense strand to SEQ ID NO: 549673
aaaguucagggccucauag

SEQ ID NO: 549675 - RNA, 19 nt, Artificial Sequence
  Description of Artificial Sequence: Synthetic oligonucleotide
  Sense strand starting at position 3869 of SEQ ID NO: 318267
gaacuuuggcguuaccaau

SEQ ID NO: 549676 - RNA, 19 nt, Artificial Sequence
  Description of Artificial Sequence: Synthetic oligonucleotide
  Antisense strand to SEQ ID NO: 549675
auugguaacgccaaaguuc

SEQ ID NO: 549677 - RNA, 19 nt, Artificial Sequence
  Description of Artificial Sequence: Synthetic oligonucleotide
  Sense strand starting at position 764 of SEQ ID NO: 318268
agcaauuaaucugaguuaa

SEQ ID NO: 549678 - RNA, 19 nt, Artificial Sequence
  Description of Artificial Sequence: Synthetic oligonucleotide
  Antisense strand to SEQ ID NO: 549677
uuaacucagauuaauugcu

SEQ ID NO: 549679 - RNA, 19 nt, Artificial Sequence
  Description of Artificial Sequence: Synthetic oligonucleotide
  Sense strand starting at position 776 of SEQ ID NO: 318268
gaguuaauaggccaucuga

SEQ ID NO: 549680 - RNA, 19 nt, Artificial Sequence
  Description of Artificial Sequence: Synthetic oligonucleotide
  Antisense strand to SEQ ID NO: 549679
ucagauggccuauuaacuc

SEQ ID NO: 549681 - RNA, 19 nt, Artificial Sequence
  Description of Artificial Sequence: Synthetic oligonucleotide
  Sense strand starting at position 853 of SEQ ID NO: 318268
gcacuuccaugggcagaaa

SEQ ID NO: 549682 - RNA, 19 nt, Artificial Sequence
  Description of Artificial Sequence: Synthetic oligonucleotide
  Antisense strand to SEQ ID NO: 549681
uuucugcccauggaagugc

SEQ ID NO: 549683 - RNA, 19 nt, Artificial Sequence
  Description of Artificial Sequence: Synthetic oligonucleotide
  Sense strand starting at position 994 of SEQ ID NO: 318268
gguggacacuugggaugaa

SEQ ID NO: 549684 - RNA, 19 nt, Artificial Sequence
  Description of Artificial Sequence: Synthetic oligonucleotide
  Antisense strand to SEQ ID NO: 549683
uucaucccaaguguccacc

SEQ ID NO: 549685 - RNA, 19 nt, Artificial Sequence
  Description of Artificial Sequence: Synthetic oligonucleotide
  Sense strand starting at position 1506 of SEQ ID NO: 318268
gccgaucgcucucaucaau

SEQ ID NO: 549686 - RNA, 19 nt, Artificial Sequence
  Description of Artificial Sequence: Synthetic oligonucleotide
  Antisense strand to SEQ ID NO: 549685
auugaugagagcgaucggc

SEQ ID NO: 549687 - RNA, 19 nt, Artificial Sequence
  Description of Artificial Sequence: Synthetic oligonucleotide
  Sense strand starting at position 2219 of SEQ ID NO: 318268
ugaagucgggcuugugaga

SEQ ID NO: 549688 - RNA, 19 nt, Artificial Sequence
  Description of Artificial Sequence: Synthetic oligonucleotide
  Antisense strand to SEQ ID NO: 549687
ucucacaagcccgacuuca

SEQ ID NO: 549689 - RNA, 19 nt, Artificial Sequence
  Description of Artificial Sequence: Synthetic oligonucleotide
  Sense strand starting at position 2570 of SEQ ID NO: 318268
gccuccaucuuagguuaca

SEQ ID NO: 549690 - RNA, 19 nt, Artificial Sequence
  Description of Artificial Sequence: Synthetic oligonucleotide
  Antisense strand to SEQ ID NO: 549689
uguaaccuaagauggaggc

SEQ ID NO: 549691 - RNA, 19 nt, Artificial Sequence
  Description of Artificial Sequence: Synthetic oligonucleotide
  Sense strand starting at position 3891 of SEQ ID NO: 318268
aagcucaccucaggaguua

SEQ ID NO: 549692 - RNA, 19 nt, Artificial Sequence
  Description of Artificial Sequence: Synthetic oligonucleotide
  Antisense strand to SEQ ID NO: 549691
uaacuccugaggugagcuu

SEQ ID NO: 549693 - RNA, 19 nt, Artificial Sequence
  Description of Artificial Sequence: Synthetic oligonucleotide
  Sense strand starting at position 3903 of SEQ ID NO: 318268
ggaguuaccuggucccuag

SEQ ID NO: 549694 - RNA, 19 nt, Artificial Sequence
  Description of Artificial Sequence: Synthetic oligonucleotide
  Antisense strand to SEQ ID NO: 549693
cuagggaccagguaacucc

SEQ ID NO: 549695 - RNA, 19 nt, Artificial Sequence
  Description of Artificial Sequence: Synthetic oligonucleotide
  Sense strand starting at position 3931 of SEQ ID NO: 318268
cgccuucucgcuguucaga

SEQ ID NO: 549696 - RNA, 19 nt, Artificial Sequence
  Description of Artificial Sequence: Synthetic oligonucleotide
  Antisense strand to SEQ ID NO: 549695
ucugaacagcgagaaggcg

SEQ ID NO: 549697 - RNA, 19 nt, Artificial Sequence
  Description of Artificial Sequence: Synthetic oligonucleotide
  Sense strand starting at position 11 of SEQ ID NO: 318269
agcaauuaaucugaguuaa

SEQ ID NO: 549698 - RNA, 19 nt, Artificial Sequence
  Description of Artificial Sequence: Synthetic oligonucleotide
  Antisense strand to SEQ ID NO: 549697
uuaacucagauuaauugcu

SEQ ID NO: 549699 - RNA, 19 nt, Artificial Sequence
  Description of Artificial Sequence: Synthetic oligonucleotide
  Sense strand starting at position 23 of SEQ ID NO: 318269
gaguuaauaggccaucuga

SEQ ID NO: 549700 - RNA, 19 nt, Artificial Sequence
  Description of Artificial Sequence: Synthetic oligonucleotide
  Antisense strand to SEQ ID NO: 549699
ucagauggccuauuaacuc

SEQ ID NO: 549701 - RNA, 19 nt, Artificial Sequence
  Description of Artificial Sequence: Synthetic oligonucleotide
  Sense strand starting at position 100 of SEQ ID NO: 318269
gcacuuccaugggcagaaa

SEQ ID NO: 549702 - RNA, 19 nt, Artificial Sequence
  Description of Artificial Sequence: Synthetic oligonucleotide
  Antisense strand to SEQ ID NO: 549701
uuucugcccauggaagugc

SEQ ID NO: 549703 - RNA, 19 nt, Artificial Sequence
  Description of Artificial Sequence: Synthetic oligonucleotide
  Sense strand starting at position 241 of SEQ ID NO: 318269
gguggacacuugggaugaa

SEQ ID NO: 549704 - RNA, 19 nt, Artificial Sequence
  Description of Artificial Sequence: Synthetic oligonucleotide
  Antisense strand to SEQ ID NO: 549703
uucaucccaaguguccacc

SEQ ID NO: 549705 - RNA, 19 nt, Artificial Sequence
  Description of Artificial Sequence: Synthetic oligonucleotide
  Sense strand starting at position 1466 of SEQ ID NO: 318269
ugaagucgggcuugugaga

SEQ ID NO: 549706 - RNA, 19 nt, Artificial Sequence
  Description of Artificial Sequence: Synthetic oligonucleotide
  Antisense strand to SEQ ID NO: 549705
ucucacaagcccgacuuca

SEQ ID NO: 549707 - RNA, 19 nt, Artificial Sequence
  Description of Artificial Sequence: Synthetic oligonucleotide
  Sense strand starting at position 3138 of SEQ ID NO: 318269
aagcucaccucaggaguua

SEQ ID NO: 549708 - RNA, 19 nt, Artificial Sequence
  Description of Artificial Sequence: Synthetic oligonucleotide
  Antisense strand to SEQ ID NO: 549707
uaacuccugaggugagcuu

SEQ ID NO: 549709 - RNA, 19 nt, Artificial Sequence
  Description of Artificial Sequence: Synthetic oligonucleotide
  Sense strand starting at position 3150 of SEQ ID NO: 318269
ggaguuaccuggucccuag

SEQ ID NO: 549710 - RNA, 19 nt, Artificial Sequence
  Description of Artificial Sequence: Synthetic oligonucleotide
  Antisense strand to SEQ ID NO: 549709
cuagggaccagguaacucc

SEQ ID NO: 549711 - RNA, 19 nt, Artificial Sequence
  Description of Artificial Sequence: Synthetic oligonucleotide
  Sense strand starting at position 3178 of SEQ ID NO: 318269
cgccuucucgcuguucaga

SEQ ID NO: 549712 - RNA, 19 nt, Artificial Sequence
  Description of Artificial Sequence: Synthetic oligonucleotide
  Antisense strand to SEQ ID NO: 549711
ucugaacagcgagaaggcg

SEQ ID NO: 549713 - RNA, 19 nt, Artificial Sequence
  Description of Artificial Sequence: Synthetic oligonucleotide
  Sense strand starting at position 3236 of SEQ ID NO: 318269
cagaaagccuucugugauu

SEQ ID NO: 549714 - RNA, 19 nt, Artificial Sequence
  Description of Artificial Sequence: Synthetic oligonucleotide
  Antisense strand to SEQ ID NO: 549713
aaucacagaaggcuuucug

SEQ ID NO: 549715 - RNA, 19 nt, Artificial Sequence
  Description of Artificial Sequence: Synthetic oligonucleotide
  Sense strand starting at position 3238 of SEQ ID NO: 318269
gaaagccuucugugauuag

SEQ ID NO: 549716 - RNA, 19 nt, Artificial Sequence
  Description of Artificial Sequence: Synthetic oligonucleotide
  Antisense strand to SEQ ID NO: 549715
cuaaucacagaaggcuuuc

SEQ ID NO: 549717 - RNA, 19 nt, Artificial Sequence
  Description of Artificial Sequence: Synthetic oligonucleotide
  Sense strand starting at position 3239 of SEQ ID NO: 318269
aaagccuucugugauuaga

SEQ ID NO: 549718 - RNA, 19 nt, Artificial Sequence
  Description of Artificial Sequence: Synthetic oligonucleotide
  Antisense strand to SEQ ID NO: 549717
ucuaaucacagaaggcuuu

SEQ ID NO: 549719 - RNA, 19 nt, Artificial Sequence
  Description of Artificial Sequence: Synthetic oligonucleotide
  Sense strand starting at position 3241 of SEQ ID NO: 318269
agccuucugugauuagauu

SEQ ID NO: 549720 - RNA, 19 nt, Artificial Sequence
  Description of Artificial Sequence: Synthetic oligonucleotide
  Antisense strand to SEQ ID NO: 549719
aaucuaaucacagaaggcu

SEQ ID NO: 549721 - RNA, 19 nt, Artificial Sequence
  Description of Artificial Sequence: Synthetic oligonucleotide
  Sense strand starting at position 3249 of SEQ ID NO: 318269
gugauuagauuuggaguua

SEQ ID NO: 549722 - RNA, 19 nt, Artificial Sequence
  Description of Artificial Sequence: Synthetic oligonucleotide
  Antisense strand to SEQ ID NO: 549721
uaacuccaaaucuaaucac

SEQ ID NO: 549723 - RNA, 19 nt, Artificial Sequence
  Description of Artificial Sequence: Synthetic oligonucleotide
  Sense strand starting at position 3250 of SEQ ID NO: 318269
ugauuagauuuggaguuaa

SEQ ID NO: 549724 - RNA, 19 nt, Artificial Sequence
  Description of Artificial Sequence: Synthetic oligonucleotide
  Antisense strand to SEQ ID NO: 549723
uuaacuccaaaucuaauca

SEQ ID NO: 549725 - RNA, 19 nt, Artificial Sequence
  Description of Artificial Sequence: Synthetic oligonucleotide
  Sense strand starting at position 3300 of SEQ ID NO: 318269
gggccacgugacuacuauu

SEQ ID NO: 549726 - RNA, 19 nt, Artificial Sequence
  Description of Artificial Sequence: Synthetic oligonucleotide
  Antisense strand to SEQ ID NO: 549725
aauaguagucacguggccc

SEQ ID NO: 549727 - RNA, 19 nt, Artificial Sequence
  Description of Artificial Sequence: Synthetic oligonucleotide
  Sense strand starting at position 3303 of SEQ ID NO: 318269
ccacgugacuacuauucuu

SEQ ID NO: 549728 - RNA, 19 nt, Artificial Sequence
  Description of Artificial Sequence: Synthetic oligonucleotide
  Antisense strand to SEQ ID NO: 549727
aagaauaguagucacgugg

SEQ ID NO: 549729 - RNA, 19 nt, Artificial Sequence
  Description of Artificial Sequence: Synthetic oligonucleotide
  Sense strand starting at position 3319 of SEQ ID NO: 318269
cuucccauggcuuaguaaa

SEQ ID NO: 549730 - RNA, 19 nt, Artificial Sequence
  Description of Artificial Sequence: Synthetic oligonucleotide
  Antisense strand to SEQ ID NO: 549729
uuuacuaagccaugggaag

SEQ ID NO: 549731 - RNA, 19 nt, Artificial Sequence
  Description of Artificial Sequence: Synthetic oligonucleotide
  Sense strand starting at position 3326 of SEQ ID NO: 318269
uggcuuaguaaaugugcau

SEQ ID NO: 549732 - RNA, 19 nt, Artificial Sequence
  Description of Artificial Sequence: Synthetic oligonucleotide
  Antisense strand to SEQ ID NO: 549731
augcacauuuacuaagcca

SEQ ID NO: 549733 - RNA, 19 nt, Artificial Sequence
  Description of Artificial Sequence: Synthetic oligonucleotide
  Sense strand starting at position 3329 of SEQ ID NO: 318269
cuuaguaaaugugcauagu

SEQ ID NO: 549734 - RNA, 19 nt, Artificial Sequence
  Description of Artificial Sequence: Synthetic oligonucleotide
  Antisense strand to SEQ ID NO: 549733
acuaugcacauuuacuaag

SEQ ID NO: 549735 - RNA, 19 nt, Artificial Sequence
  Description of Artificial Sequence: Synthetic oligonucleotide
  Sense strand starting at position 3330 of SEQ ID NO: 318269
uuaguaaaugugcauaguu

SEQ ID NO: 549736 - RNA, 19 nt, Artificial Sequence
  Description of Artificial Sequence: Synthetic oligonucleotide
  Antisense strand to SEQ ID NO: 549735
aacuaugcacauuuacuaa

SEQ ID NO: 549737 - RNA, 19 nt, Artificial Sequence
  Description of Artificial Sequence: Synthetic oligonucleotide
  Sense strand starting at position 3332 of SEQ ID NO: 318269
aguaaaugugcauaguuau

SEQ ID NO: 549738 - RNA, 19 nt, Artificial Sequence
  Description of Artificial Sequence: Synthetic oligonucleotide
  Antisense strand to SEQ ID NO: 549737
auaacuaugcacauuuacu

SEQ ID NO: 549739 - RNA, 19 nt, Artificial Sequence
  Description of Artificial Sequence: Synthetic oligonucleotide
  Sense strand starting at position 3420 of SEQ ID NO: 318269
ggcguugcccugugugaca

SEQ ID NO: 549740 - RNA, 19 nt, Artificial Sequence
  Description of Artificial Sequence: Synthetic oligonucleotide
  Antisense strand to SEQ ID NO: 549739
ugucacacagggcaacgcc

SEQ ID NO: 549741 - RNA, 19 nt, Artificial Sequence
  Description of Artificial Sequence: Synthetic oligonucleotide
  Sense strand starting at position 3422 of SEQ ID NO: 318269
cguugcccugugugacauu

SEQ ID NO: 549742 - RNA, 19 nt, Artificial Sequence
  Description of Artificial Sequence: Synthetic oligonucleotide
  Antisense strand to SEQ ID NO: 549741
aaugucacacagggcaacg

SEQ ID NO: 549743 - RNA, 19 nt, Artificial Sequence
  Description of Artificial Sequence: Synthetic oligonucleotide
  Sense strand starting at position 3509 of SEQ ID NO: 318269
ucgagaugcucuuacccuu

SEQ ID NO: 549744 - RNA, 19 nt, Artificial Sequence
  Description of Artificial Sequence: Synthetic oligonucleotide
  Antisense strand to SEQ ID NO: 549743
aaggguaagagcaucucga

SEQ ID NO: 549745 - RNA, 19 nt, Artificial Sequence
  Description of Artificial Sequence: Synthetic oligonucleotide
  Sense strand starting at position 3541 of SEQ ID NO: 318269
cccacaguccagugaugga

SEQ ID NO: 549746 - RNA, 19 nt, Artificial Sequence
  Description of Artificial Sequence: Synthetic oligonucleotide
  Antisense strand to SEQ ID NO: 549745
uccaucacuggacuguggg

SEQ ID NO: 549747 - RNA, 19 nt, Artificial Sequence
  Description of Artificial Sequence: Synthetic oligonucleotide
  Sense strand starting at position 3625 of SEQ ID NO: 318269
gcaagugggcuuuguuaga

SEQ ID NO: 549748 - RNA, 19 nt, Artificial Sequence
  Description of Artificial Sequence: Synthetic oligonucleotide
  Antisense strand to SEQ ID NO: 549747
ucuaacaaagcccacuugc

SEQ ID NO: 549749 - RNA, 19 nt, Artificial Sequence
  Description of Artificial Sequence: Synthetic oligonucleotide
  Sense strand starting at position 3630 of SEQ ID NO: 318269
ugggcuuuguuagagggaa

SEQ ID NO: 549750 - RNA, 19 nt, Artificial Sequence
  Description of Artificial Sequence: Synthetic oligonucleotide
  Antisense strand to SEQ ID NO: 549749
uucccucuaacaaagccca

SEQ ID NO: 549751 - RNA, 19 nt, Artificial Sequence
  Description of Artificial Sequence: Synthetic oligonucleotide
  Sense strand starting at position 3631 of SEQ ID NO: 318269
gggcuuuguuagagggaaa

SEQ ID NO: 549752 - RNA, 19 nt, Artificial Sequence
  Description of Artificial Sequence: Synthetic oligonucleotide
  Antisense strand to SEQ ID NO: 549751
uuucccucuaacaaagccc

SEQ ID NO: 549753 - RNA, 19 nt, Artificial Sequence
  Description of Artificial Sequence: Synthetic oligonucleotide
  Sense strand starting at position 3632 of SEQ ID NO: 318269
ggcuuuguuagagggaaag

SEQ ID NO: 549754 - RNA, 19 nt, Artificial Sequence
  Description of Artificial Sequence: Synthetic oligonucleotide
  Antisense strand to SEQ ID NO: 549753
cuuucccucuaacaaagcc

SEQ ID NO: 549755 - RNA, 19 nt, Artificial Sequence
  Description of Artificial Sequence: Synthetic oligonucleotide
  Sense strand starting at position 3692 of SEQ ID NO: 318269
ggaggcuccuucuguugaa

SEQ ID NO: 549756 - RNA, 19 nt, Artificial Sequence
  Description of Artificial Sequence: Synthetic oligonucleotide
  Antisense strand to SEQ ID NO: 549755
uucaacagaaggagccucc

SEQ ID NO: 549757 - RNA, 19 nt, Artificial Sequence
  Description of Artificial Sequence: Synthetic oligonucleotide
  Sense strand starting at position 3695 of SEQ ID NO: 318269
ggcuccuucuguugaagag

SEQ ID NO: 549758 - RNA, 19 nt, Artificial Sequence
  Description of Artificial Sequence: Synthetic oligonucleotide
  Antisense strand to SEQ ID NO: 549757
cucuucaacagaaggagcc

SEQ ID NO: 549759 - RNA, 19 nt, Artificial Sequence
  Description of Artificial Sequence: Synthetic oligonucleotide
  Sense strand starting at position 3696 of SEQ ID NO: 318269
gcuccuucuguugaagagu

SEQ ID NO: 549760 - RNA, 19 nt, Artificial Sequence
  Description of Artificial Sequence: Synthetic oligonucleotide
  Antisense strand to SEQ ID NO: 549759
acucuucaacagaaggagc

SEQ ID NO: 549761 - RNA, 19 nt, Artificial Sequence
  Description of Artificial Sequence: Synthetic oligonucleotide
  Sense strand starting at position 3704 of SEQ ID NO: 318269
uguugaagagucugaggua

SEQ ID NO: 549762 - RNA, 19 nt, Artificial Sequence
  Description of Artificial Sequence: Synthetic oligonucleotide
  Antisense strand to SEQ ID NO: 549761
uaccucagacucuucaaca

SEQ ID NO: 549763 - RNA, 19 nt, Artificial Sequence
  Description of Artificial Sequence: Synthetic oligonucleotide
  Sense strand starting at position 3705 of SEQ ID NO: 318269
guugaagagucugagguac

SEQ ID NO: 549764 - RNA, 19 nt, Artificial Sequence
  Description of Artificial Sequence: Synthetic oligonucleotide
  Antisense strand to SEQ ID NO: 549763
guaccucagacucuucaac

SEQ ID NO: 549765 - RNA, 19 nt, Artificial Sequence
  Description of Artificial Sequence: Synthetic oligonucleotide
  Sense strand starting at position 3726 of SEQ ID NO: 318269
ugaagauucucaggugcaa

SEQ ID NO: 549766 - RNA, 19 nt, Artificial Sequence
  Description of Artificial Sequence: Synthetic oligonucleotide
  Antisense strand to SEQ ID NO: 549765
uugcaccugagaaucuuca

SEQ ID NO: 549767 - RNA, 19 nt, Artificial Sequence
  Description of Artificial Sequence: Synthetic oligonucleotide
  Sense strand starting at position 3747 of SEQ ID NO: 318269
ucagguugguaguugucua

SEQ ID NO: 549768 - RNA, 19 nt, Artificial Sequence
  Description of Artificial Sequence: Synthetic oligonucleotide
  Antisense strand to SEQ ID NO: 549767
uagacaacuaccaaccuga

SEQ ID NO: 549769 - RNA, 19 nt, Artificial Sequence
  Description of Artificial Sequence: Synthetic oligonucleotide
  Sense strand starting at position 3748 of SEQ ID NO: 318269
cagguugguaguugucuau

SEQ ID NO: 549770 - RNA, 19 nt, Artificial Sequence
  Description of Artificial Sequence: Synthetic oligonucleotide
  Antisense strand to SEQ ID NO: 549769
auagacaacuaccaaccug

SEQ ID NO: 549771 - RNA, 19 nt, Artificial Sequence
  Description of Artificial Sequence: Synthetic oligonucleotide
  Sense strand starting at position 3752 of SEQ ID NO: 318269
uugguaguugucuaugugu

SEQ ID NO: 549772 - RNA, 19 nt, Artificial Sequence
  Description of Artificial Sequence: Synthetic oligonucleotide
  Antisense strand to SEQ ID NO: 549771
acacauagacaacuaccaa

SEQ ID NO: 549773 - RNA, 19 nt, Artificial Sequence
  Description of Artificial Sequence: Synthetic oligonucleotide
  Sense strand starting at position 3754 of SEQ ID NO: 318269
gguaguugucuauguguug

SEQ ID NO: 549774 - RNA, 19 nt, Artificial Sequence
  Description of Artificial Sequence: Synthetic oligonucleotide
  Antisense strand to SEQ ID NO: 549773
caacacauagacaacuacc

SEQ ID NO: 549775 - RNA, 19 nt, Artificial Sequence
  Description of Artificial Sequence: Synthetic oligonucleotide
  Sense strand starting at position 3832 of SEQ ID NO: 318269
ggucacucacccugcuaau

SEQ ID NO: 549776 - RNA, 19 nt, Artificial Sequence
  Description of Artificial Sequence: Synthetic oligonucleotide
  Antisense strand to SEQ ID NO: 549775
auuagcagggugagugacc

SEQ ID NO: 549777 - RNA, 19 nt, Artificial Sequence
  Description of Artificial Sequence: Synthetic oligonucleotide
  Sense strand starting at position 23 of SEQ ID NO: 318270
ggugcugagacucggaaau

SEQ ID NO: 549778 - RNA, 19 nt, Artificial Sequence
  Description of Artificial Sequence: Synthetic oligonucleotide
  Antisense strand to SEQ ID NO: 549777
auuuccgagucucagcacc

SEQ ID NO: 549779 - RNA, 19 nt, Artificial Sequence
  Description of Artificial Sequence: Synthetic oligonucleotide
  Sense strand starting at position 102 of SEQ ID NO: 318270
gugguaaccugucuguaau

SEQ ID NO: 549780 - RNA, 19 nt, Artificial Sequence
  Description of Artificial Sequence: Synthetic oligonucleotide
  Antisense strand to SEQ ID NO: 549779
auuacagacagguuaccac

SEQ ID NO: 549781 - RNA, 19 nt, Artificial Sequence
  Description of Artificial Sequence: Synthetic oligonucleotide
  Sense strand starting at position 103 of SEQ ID NO: 318270
ugguaaccugucuguaaug

SEQ ID NO: 549782 - RNA, 19 nt, Artificial Sequence
  Description of Artificial Sequence: Synthetic oligonucleotide
  Antisense strand to SEQ ID NO: 549781
cauuacagacagguuacca

SEQ ID NO: 549783 - RNA, 19 nt, Artificial Sequence
  Description of Artificial Sequence: Synthetic oligonucleotide
  Sense strand starting at position 105 of SEQ ID NO: 318270
guaaccugucuguaaugga

SEQ ID NO: 549784 - RNA, 19 nt, Artificial Sequence
  Description of Artificial Sequence: Synthetic oligonucleotide
  Antisense strand to SEQ ID NO: 549783
uccauuacagacagguuac

SEQ ID NO: 549785 - RNA, 19 nt, Artificial Sequence
  Description of Artificial Sequence: Synthetic oligonucleotide
  Sense strand starting at position 146 of SEQ ID NO: 318270
aggagacuguugucaagcu

SEQ ID NO: 549786 - RNA, 19 nt, Artificial Sequence
  Description of Artificial Sequence: Synthetic oligonucleotide
  Antisense strand to SEQ ID NO: 549785
agcuugacaacagucuccu

SEQ ID NO: 549787 - RNA, 19 nt, Artificial Sequence
  Description of Artificial Sequence: Synthetic oligonucleotide
  Sense strand starting at position 246 of SEQ ID NO: 318270
ggcggaaguggugacauaa

SEQ ID NO: 549788 - RNA, 19 nt, Artificial Sequence
  Description of Artificial Sequence: Synthetic oligonucleotide
  Antisense strand to SEQ ID NO: 549787
uuaugucaccacuuccgcc

SEQ ID NO: 549789 - RNA, 19 nt, Artificial Sequence
  Description of Artificial Sequence: Synthetic oligonucleotide
  Sense strand starting at position 286 of SEQ ID NO: 318270
ggaagagcuggcugaaauc

SEQ ID NO: 549790 - RNA, 19 nt, Artificial Sequence
  Description of Artificial Sequence: Synthetic oligonucleotide
  Antisense strand to SEQ ID NO: 549789
gauuucagccagcucuucc

SEQ ID NO: 549791 - RNA, 19 nt, Artificial Sequence
  Description of Artificial Sequence: Synthetic oligonucleotide
  Sense strand starting at position 295 of SEQ ID NO: 318270
ggcugaaaucagugacuca

SEQ ID NO: 549792 - RNA, 19 nt, Artificial Sequence
  Description of Artificial Sequence: Synthetic oligonucleotide
  Antisense strand to SEQ ID NO: 549791
ugagucacugauuucagcc

SEQ ID NO: 549793 - RNA, 19 nt, Artificial Sequence
  Description of Artificial Sequence: Synthetic oligonucleotide
  Sense strand starting at position 387 of SEQ ID NO: 318270
acauuaggauguuugcaaa

SEQ ID NO: 549794 - RNA, 19 nt, Artificial Sequence
  Description of Artificial Sequence: Synthetic oligonucleotide
  Antisense strand to SEQ ID NO: 549793
uuugcaaacauccuaaugu

SEQ ID NO: 549795 - RNA, 19 nt, Artificial Sequence
  Description of Artificial Sequence: Synthetic oligonucleotide
  Sense strand starting at position 481 of SEQ ID NO: 318270
aaauauucggcaugaagca

SEQ ID NO: 549796 - RNA, 19 nt, Artificial Sequence
  Description of Artificial Sequence: Synthetic oligonucleotide
  Antisense strand to SEQ ID NO: 549795
ugcuucaugccgaauauuu

SEQ ID NO: 549797 - RNA, 19 nt, Artificial Sequence
  Description of Artificial Sequence: Synthetic oligonucleotide
  Sense strand starting at position 585 of SEQ ID NO: 318270
uucuuuaagcaauggagaa

SEQ ID NO: 549798 - RNA, 19 nt, Artificial Sequence
  Description of Artificial Sequence: Synthetic oligonucleotide
  Antisense strand to SEQ ID NO: 549797
uucuccauugcuuaaagaa

SEQ ID NO: 549799 - RNA, 19 nt, Artificial Sequence
  Description of Artificial Sequence: Synthetic oligonucleotide
  Sense strand starting at position 838 of SEQ ID NO: 318270
auauccuaccguuaaguuu

SEQ ID NO: 549800 - RNA, 19 nt, Artificial Sequence
  Description of Artificial Sequence: Synthetic oligonucleotide
  Antisense strand to SEQ ID NO: 549799
aaacuuaacgguaggauau

SEQ ID NO: 549801 - RNA, 19 nt, Artificial Sequence
  Description of Artificial Sequence: Synthetic oligonucleotide
  Sense strand starting at position 862 of SEQ ID NO: 318270
gcgacucauuuagaaagau

SEQ ID NO: 549802 - RNA, 19 nt, Artificial Sequence
  Description of Artificial Sequence: Synthetic oligonucleotide
  Antisense strand to SEQ ID NO: 549801
aucuuucuaaaugagucgc

SEQ ID NO: 549803 - RNA, 19 nt, Artificial Sequence
  Description of Artificial Sequence: Synthetic oligonucleotide
  Sense strand starting at position 980 of SEQ ID NO: 318270
agcuucccuccuggaagau

SEQ ID NO: 549804 - RNA, 19 nt, Artificial Sequence
  Description of Artificial Sequence: Synthetic oligonucleotide
  Antisense strand to SEQ ID NO: 549803
aucuuccaggagggaagcu

SEQ ID NO: 549805 - RNA, 19 nt, Artificial Sequence
  Description of Artificial Sequence: Synthetic oligonucleotide
  Sense strand starting at position 981 of SEQ ID NO: 318270
gcuucccuccuggaagauu

SEQ ID NO: 549806 - RNA, 19 nt, Artificial Sequence
  Description of Artificial Sequence: Synthetic oligonucleotide
  Antisense strand to SEQ ID NO: 549805
aaucuuccaggagggaagc

SEQ ID NO: 549807 - RNA, 19 nt, Artificial Sequence
  Description of Artificial Sequence: Synthetic oligonucleotide
  Sense strand starting at position 1007 of SEQ ID NO: 318270
agccgaaucuuccucagau

SEQ ID NO: 549808 - RNA, 19 nt, Artificial Sequence
  Description of Artificial Sequence: Synthetic oligonucleotide
  Antisense strand to SEQ ID NO: 549807
aucugaggaagauucggcu

SEQ ID NO: 549809 - RNA, 19 nt, Artificial Sequence
  Description of Artificial Sequence: Synthetic oligonucleotide
  Sense strand starting at position 1008 of SEQ ID NO: 318270
gccgaaucuuccucagauc

SEQ ID NO: 549810 - RNA, 19 nt, Artificial Sequence
  Description of Artificial Sequence: Synthetic oligonucleotide
  Antisense strand to SEQ ID NO: 549809
gaucugaggaagauucggc

SEQ ID NO: 549811 - RNA, 19 nt, Artificial Sequence
  Description of Artificial Sequence: Synthetic oligonucleotide
  Sense strand starting at position 1009 of SEQ ID NO: 318270
ccgaaucuuccucagaucu

SEQ ID NO: 549812 - RNA, 19 nt, Artificial Sequence
  Description of Artificial Sequence: Synthetic oligonucleotide
  Antisense strand to SEQ ID NO: 549811
agaucugaggaagauucgg

SEQ ID NO: 549813 - RNA, 19 nt, Artificial Sequence
  Description of Artificial Sequence: Synthetic oligonucleotide
  Sense strand starting at position 1059 of SEQ ID NO: 318270
gcaauaccuccgugaccau

SEQ ID NO: 549814 - RNA, 19 nt, Artificial Sequence
  Description of Artificial Sequence: Synthetic oligonucleotide
  Antisense strand to SEQ ID NO: 549813
auggucacggagguauugc

SEQ ID NO: 549815 - RNA, 19 nt, Artificial Sequence
  Description of Artificial Sequence: Synthetic oligonucleotide
  Sense strand starting at position 1140 of SEQ ID NO: 318270
guucucuggcacuguaaca

SEQ ID NO: 549816 - RNA, 19 nt, Artificial Sequence
  Description of Artificial Sequence: Synthetic oligonucleotide
  Antisense strand to SEQ ID NO: 549815
uguuacagugccagagaac

SEQ ID NO: 549817 - RNA, 19 nt, Artificial Sequence
  Description of Artificial Sequence: Synthetic oligonucleotide
  Sense strand starting at position 1151 of SEQ ID NO: 318270
cuguaacacuugucgaaga

SEQ ID NO: 549818 - RNA, 19 nt, Artificial Sequence
  Description of Artificial Sequence: Synthetic oligonucleotide
  Antisense strand to SEQ ID NO: 549817
ucuucgacaaguguuacag

SEQ ID NO: 549819 - RNA, 19 nt, Artificial Sequence
  Description of Artificial Sequence: Synthetic oligonucleotide
  Sense strand starting at position 1153 of SEQ ID NO: 318270
guaacacuugucgaagaaa

SEQ ID NO: 549820 - RNA, 19 nt, Artificial Sequence
  Description of Artificial Sequence: Synthetic oligonucleotide
  Antisense strand to SEQ ID NO: 549819
uuucuucgacaaguguuac

SEQ ID NO: 549821 - RNA, 19 nt, Artificial Sequence
  Description of Artificial Sequence: Synthetic oligonucleotide
  Sense strand starting at position 1324 of SEQ ID NO: 318270
ucuugagcuccugguagua

SEQ ID NO: 549822 - RNA, 19 nt, Artificial Sequence
  Description of Artificial Sequence: Synthetic oligonucleotide
  Antisense strand to SEQ ID NO: 549821
uacuaccaggagcucaaga

SEQ ID NO: 549823 - RNA, 19 nt, Artificial Sequence
  Description of Artificial Sequence: Synthetic oligonucleotide
  Sense strand starting at position 2706 of SEQ ID NO: 318270
aagggauucgucuggaaag

SEQ ID NO: 549824 - RNA, 19 nt, Artificial Sequence
  Description of Artificial Sequence: Synthetic oligonucleotide
  Antisense strand to SEQ ID NO: 549823
cuuuccagacgaaucccuu

SEQ ID NO: 549825 - RNA, 19 nt, Artificial Sequence
  Description of Artificial Sequence: Synthetic oligonucleotide
  Sense strand starting at position 2770 of SEQ ID NO: 318270
ugaaacugaucuggaaaga

SEQ ID NO: 549826 - RNA, 19 nt, Artificial Sequence
  Description of Artificial Sequence: Synthetic oligonucleotide
  Antisense strand to SEQ ID NO: 549825
ucuuuccagaucaguuuca

SEQ ID NO: 549827 - RNA, 19 nt, Artificial Sequence
  Description of Artificial Sequence: Synthetic oligonucleotide
  Sense strand starting at position 3230 of SEQ ID NO: 318270
cuagcaguuucuccuuaua

SEQ ID NO: 549828 - RNA, 19 nt, Artificial Sequence
  Description of Artificial Sequence: Synthetic oligonucleotide
  Antisense strand to SEQ ID NO: 549827
uauaaggagaaacugcuag

SEQ ID NO: 549829 - RNA, 19 nt, Artificial Sequence
  Description of Artificial Sequence: Synthetic oligonucleotide
  Sense strand starting at position 3241 of SEQ ID NO: 318270
uccuuauaggcuugaucac

SEQ ID NO: 549830 - RNA, 19 nt, Artificial Sequence
  Description of Artificial Sequence: Synthetic oligonucleotide
  Antisense strand to SEQ ID NO: 549829
gugaucaagccuauaagga

SEQ ID NO: 549831 - RNA, 19 nt, Artificial Sequence
  Description of Artificial Sequence: Synthetic oligonucleotide
  Sense strand starting at position 3242 of SEQ ID NO: 318270
ccuuauaggcuugaucacu

SEQ ID NO: 549832 - RNA, 19 nt, Artificial Sequence
  Description of Artificial Sequence: Synthetic oligonucleotide
  Antisense strand to SEQ ID NO: 549831
agugaucaagccuauaagg

SEQ ID NO: 549833 - RNA, 19 nt, Artificial Sequence
  Description of Artificial Sequence: Synthetic oligonucleotide
  Sense strand starting at position 3404 of SEQ ID NO: 318270
acuggcugugucugaaauc

SEQ ID NO: 549834 - RNA, 19 nt, Artificial Sequence
  Description of Artificial Sequence: Synthetic oligonucleotide
  Antisense strand to SEQ ID NO: 549833
gauuucagacacagccagu

SEQ ID NO: 549835 - RNA, 19 nt, Artificial Sequence
  Description of Artificial Sequence: Synthetic oligonucleotide
  Sense strand starting at position 3489 of SEQ ID NO: 318270
aaacgacaggucgaaaguu

SEQ ID NO: 549836 - RNA, 19 nt, Artificial Sequence
  Description of Artificial Sequence: Synthetic oligonucleotide
  Antisense strand to SEQ ID NO: 549835
aacuuucgaccugucguuu

SEQ ID NO: 549837 - RNA, 19 nt, Artificial Sequence
  Description of Artificial Sequence: Synthetic oligonucleotide
  Sense strand starting at position 3721 of SEQ ID NO: 318270
gugucaugcauuccagcga

SEQ ID NO: 549838 - RNA, 19 nt, Artificial Sequence
  Description of Artificial Sequence: Synthetic oligonucleotide
  Antisense strand to SEQ ID NO: 549837
ucgcuggaaugcaugacac

SEQ ID NO: 549839 - RNA, 19 nt, Artificial Sequence
  Description of Artificial Sequence: Synthetic oligonucleotide
  Sense strand starting at position 3725 of SEQ ID NO: 318270
caugcauuccagcgaagag

SEQ ID NO: 549840 - RNA, 19 nt, Artificial Sequence
  Description of Artificial Sequence: Synthetic oligonucleotide
  Antisense strand to SEQ ID NO: 549839
cucuucgcuggaaugcaug

SEQ ID NO: 549841 - RNA, 19 nt, Artificial Sequence
  Description of Artificial Sequence: Synthetic oligonucleotide
  Sense strand starting at position 3726 of SEQ ID NO: 318270
augcauuccagcgaagaga

SEQ ID NO: 549842 - RNA, 19 nt, Artificial Sequence
  Description of Artificial Sequence: Synthetic oligonucleotide
  Antisense strand to SEQ ID NO: 549841
ucucuucgcuggaaugcau

SEQ ID NO: 549843 - RNA, 19 nt, Artificial Sequence
  Description of Artificial Sequence: Synthetic oligonucleotide
  Sense strand starting at position 3797 of SEQ ID NO: 318270
guaccugaguucccugaaa

SEQ ID NO: 549844 - RNA, 19 nt, Artificial Sequence
  Description of Artificial Sequence: Synthetic oligonucleotide
  Antisense strand to SEQ ID NO: 549843
uuucagggaacucagguac

SEQ ID NO: 549845 - RNA, 19 nt, Artificial Sequence
  Description of Artificial Sequence: Synthetic oligonucleotide
  Sense strand starting at position 3853 of SEQ ID NO: 318270
cucagugugcuuugaugac

SEQ ID NO: 549846 - RNA, 19 nt, Artificial Sequence
  Description of Artificial Sequence: Synthetic oligonucleotide
  Antisense strand to SEQ ID NO: 549845
gucaucaaagcacacugag

SEQ ID NO: 549847 - RNA, 19 nt, Artificial Sequence
  Description of Artificial Sequence: Synthetic oligonucleotide
  Sense strand starting at position 3903 of SEQ ID NO: 318270
aucagaggcuuagugagua

SEQ ID NO: 549848 - RNA, 19 nt, Artificial Sequence
  Description of Artificial Sequence: Synthetic oligonucleotide
  Antisense strand to SEQ ID NO: 549847
uacucacuaagccucugau

SEQ ID NO: 549849 - RNA, 19 nt, Artificial Sequence
  Description of Artificial Sequence: Synthetic oligonucleotide
  Sense strand starting at position 3907 of SEQ ID NO: 318270
gaggcuuagugaguacugu

SEQ ID NO: 549850 - RNA, 19 nt, Artificial Sequence
  Description of Artificial Sequence: Synthetic oligonucleotide
  Antisense strand to SEQ ID NO: 549849
acaguacucacuaagccuc

SEQ ID NO: 549851 - RNA, 19 nt, Artificial Sequence
  Description of Artificial Sequence: Synthetic oligonucleotide
  Sense strand starting at position 3916 of SEQ ID NO: 318270
ugaguacugugugccugaa

SEQ ID NO: 549852 - RNA, 19 nt, Artificial Sequence
  Description of Artificial Sequence: Synthetic oligonucleotide
  Antisense strand to SEQ ID NO: 549851
uucaggcacacaguacuca

SEQ ID NO: 549853 - RNA, 19 nt, Artificial Sequence
  Description of Artificial Sequence: Synthetic oligonucleotide
  Sense strand starting at position 3918 of SEQ ID NO: 318270
aguacugugugccugaaac

SEQ ID NO: 549854 - RNA, 19 nt, Artificial Sequence
  Description of Artificial Sequence: Synthetic oligonucleotide
  Antisense strand to SEQ ID NO: 549853
guuucaggcacacaguacu

SEQ ID NO: 549855 - RNA, 19 nt, Artificial Sequence
  Description of Artificial Sequence: Synthetic oligonucleotide
  Sense strand starting at position 3969 of SEQ ID NO: 318270
gggaucaaccauugcuaca

SEQ ID NO: 549856 - RNA, 19 nt, Artificial Sequence
  Description of Artificial Sequence: Synthetic oligonucleotide
  Antisense strand to SEQ ID NO: 549855
uguagcaaugguugauccc

SEQ ID NO: 549857 - RNA, 19 nt, Artificial Sequence
  Description of Artificial Sequence: Synthetic oligonucleotide
  Sense strand starting at position 191 of SEQ ID NO: 318271
uugggcaaucggcauuaaa

SEQ ID NO: 549858 - RNA, 19 nt, Artificial Sequence
  Description of Artificial Sequence: Synthetic oligonucleotide
  Antisense strand to SEQ ID NO: 549857
uuuaaugccgauugcccaa

SEQ ID NO: 549859 - RNA, 19 nt, Artificial Sequence
  Description of Artificial Sequence: Synthetic oligonucleotide
  Sense strand starting at position 230 of SEQ ID NO: 318271
uuugauagauuaguuguga

SEQ ID NO: 549860 - RNA, 19 nt, Artificial Sequence
  Description of Artificial Sequence: Synthetic oligonucleotide
  Antisense strand to SEQ ID NO: 549859
ucacaacuaaucuaucaaa

SEQ ID NO: 549861 - RNA, 19 nt, Artificial Sequence
  Description of Artificial Sequence: Synthetic oligonucleotide
  Sense strand starting at position 238 of SEQ ID NO: 318271
auuaguugugacuaacugu

SEQ ID NO: 549862 - RNA, 19 nt, Artificial Sequence
  Description of Artificial Sequence: Synthetic oligonucleotide
  Antisense strand to SEQ ID NO: 549861
acaguuagucacaacuaau

SEQ ID NO: 549863 - RNA, 19 nt, Artificial Sequence
  Description of Artificial Sequence: Synthetic oligonucleotide
  Sense strand starting at position 435 of SEQ ID NO: 318271
cagggacccugucucaaua

SEQ ID NO: 549864 - RNA, 19 nt, Artificial Sequence
  Description of Artificial Sequence: Synthetic oligonucleotide
  Antisense strand to SEQ ID NO: 549863
uauugagacagggucccug

SEQ ID NO: 549865 - RNA, 19 nt, Artificial Sequence
  Description of Artificial Sequence: Synthetic oligonucleotide
  Sense strand starting at position 604 of SEQ ID NO: 318271
ggucuauacguacaucaga

SEQ ID NO: 549866 - RNA, 19 nt, Artificial Sequence
  Description of Artificial Sequence: Synthetic oligonucleotide
  Antisense strand to SEQ ID NO: 549865
ucugauguacguauagacc

SEQ ID NO: 549867 - RNA, 19 nt, Artificial Sequence
  Description of Artificial Sequence: Synthetic oligonucleotide
  Sense strand starting at position 651 of SEQ ID NO: 318271
uuccgaaaguuacuggauu

SEQ ID NO: 549868 - RNA, 19 nt, Artificial Sequence
  Description of Artificial Sequence: Synthetic oligonucleotide
  Antisense strand to SEQ ID NO: 549867
aauccaguaacuuucggaa

SEQ ID NO: 549869 - RNA, 19 nt, Artificial Sequence
  Description of Artificial Sequence: Synthetic oligonucleotide
  Sense strand starting at position 884 of SEQ ID NO: 318271
acgugaauaccauguuaag

SEQ ID NO: 549870 - RNA, 19 nt, Artificial Sequence
  Description of Artificial Sequence: Synthetic oligonucleotide
  Antisense strand to SEQ ID NO: 549869
cuuaacaugguauucacgu

SEQ ID NO: 549871 - RNA, 19 nt, Artificial Sequence
  Description of Artificial Sequence: Synthetic oligonucleotide
  Sense strand starting at position 913 of SEQ ID NO: 318271
ucccaugagaaggguacua

SEQ ID NO: 549872 - RNA, 19 nt, Artificial Sequence
  Description of Artificial Sequence: Synthetic oligonucleotide
  Antisense strand to SEQ ID NO: 549871
uaguacccuucucauggga

SEQ ID NO: 549873 - RNA, 19 nt, Artificial Sequence
  Description of Artificial Sequence: Synthetic oligonucleotide
  Sense strand starting at position 1083 of SEQ ID NO: 318271
ucaaccuguuaguuuaauu

SEQ ID NO: 549874 - RNA, 19 nt, Artificial Sequence
  Description of Artificial Sequence: Synthetic oligonucleotide
  Antisense strand to SEQ ID NO: 549873
aauuaaacuaacagguuga

SEQ ID NO: 549875 - RNA, 19 nt, Artificial Sequence
  Description of Artificial Sequence: Synthetic oligonucleotide
  Sense strand starting at position 1133 of SEQ ID NO: 318271
uccaaagagcauuggugaa

SEQ ID NO: 549876 - RNA, 19 nt, Artificial Sequence
  Description of Artificial Sequence: Synthetic oligonucleotide
  Antisense strand to SEQ ID NO: 549875
uucaccaaugcucuuugga

SEQ ID NO: 549877 - RNA, 19 nt, Artificial Sequence
  Description of Artificial Sequence: Synthetic oligonucleotide
  Sense strand starting at position 1382 of SEQ ID NO: 318271
guacguuaucuguugucuu

SEQ ID NO: 549878 - RNA, 19 nt, Artificial Sequence
  Description of Artificial Sequence: Synthetic oligonucleotide
  Antisense strand to SEQ ID NO: 549877
aagacaacagauaacguac

SEQ ID NO: 549879 - RNA, 19 nt, Artificial Sequence
  Description of Artificial Sequence: Synthetic oligonucleotide
  Sense strand starting at position 1447 of SEQ ID NO: 318271
ccuaguuaaucuguuccca

SEQ ID NO: 549880 - RNA, 19 nt, Artificial Sequence
  Description of Artificial Sequence: Synthetic oligonucleotide
  Antisense strand to SEQ ID NO: 549879
ugggaacagauuaacuagg

SEQ ID NO: 549881 - RNA, 19 nt, Artificial Sequence
  Description of Artificial Sequence: Synthetic oligonucleotide
  Sense strand starting at position 1466 of SEQ ID NO: 318271
gcugaagcccgucagagaa

SEQ ID NO: 549882 - RNA, 19 nt, Artificial Sequence
  Description of Artificial Sequence: Synthetic oligonucleotide
  Antisense strand to SEQ ID NO: 549881
uucucugacgggcuucagc

SEQ ID NO: 549883 - RNA, 19 nt, Artificial Sequence
  Description of Artificial Sequence: Synthetic oligonucleotide
  Sense strand starting at position 1588 of SEQ ID NO: 318271
caaaccuggucaguguuau

SEQ ID NO: 549884 - RNA, 19 nt, Artificial Sequence
  Description of Artificial Sequence: Synthetic oligonucleotide
  Antisense strand to SEQ ID NO: 549883
auaacacugaccagguuug

SEQ ID NO: 549885 - RNA, 19 nt, Artificial Sequence
  Description of Artificial Sequence: Synthetic oligonucleotide
  Sense strand starting at position 1589 of SEQ ID NO: 318271
aaaccuggucaguguuauc

SEQ ID NO: 549886 - RNA, 19 nt, Artificial Sequence
  Description of Artificial Sequence: Synthetic oligonucleotide
  Antisense strand to SEQ ID NO: 549885
gauaacacugaccagguuu

SEQ ID NO: 549887 - RNA, 19 nt, Artificial Sequence
  Description of Artificial Sequence: Synthetic oligonucleotide
  Sense strand starting at position 1648 of SEQ ID NO: 318271
ccaacagucguucagggaa

SEQ ID NO: 549888 - RNA, 19 nt, Artificial Sequence
  Description of Artificial Sequence: Synthetic oligonucleotide
  Antisense strand to SEQ ID NO: 549887
uucccugaacgacuguugg

SEQ ID NO: 549889 - RNA, 19 nt, Artificial Sequence
  Description of Artificial Sequence: Synthetic oligonucleotide
  Sense strand starting at position 2263 of SEQ ID NO: 318271
ugaguaacuccgggaauga

SEQ ID NO: 549890 - RNA, 19 nt, Artificial Sequence
  Description of Artificial Sequence: Synthetic oligonucleotide
  Antisense strand to SEQ ID NO: 549889
ucauucccggaguuacuca

SEQ ID NO: 549891 - RNA, 19 nt, Artificial Sequence
  Description of Artificial Sequence: Synthetic oligonucleotide
  Sense strand starting at position 2767 of SEQ ID NO: 318271
agcacuaaucaggaugcua

SEQ ID NO: 549892 - RNA, 19 nt, Artificial Sequence
  Description of Artificial Sequence: Synthetic oligonucleotide
  Antisense strand to SEQ ID NO: 549891
uagcauccugauuagugcu

SEQ ID NO: 549893 - RNA, 19 nt, Artificial Sequence
  Description of Artificial Sequence: Synthetic oligonucleotide
  Sense strand starting at position 2845 of SEQ ID NO: 318271
gucaauaaacagcgguaau

SEQ ID NO: 549894 - RNA, 19 nt, Artificial Sequence
  Description of Artificial Sequence: Synthetic oligonucleotide
  Antisense strand to SEQ ID NO: 549893
auuaccgcuguuuauugac

SEQ ID NO: 549895 - RNA, 19 nt, Artificial Sequence
  Description of Artificial Sequence: Synthetic oligonucleotide
  Sense strand starting at position 2903 of SEQ ID NO: 318271
guugguagcuacuugauuu

SEQ ID NO: 549896 - RNA, 19 nt, Artificial Sequence
  Description of Artificial Sequence: Synthetic oligonucleotide
  Antisense strand to SEQ ID NO: 549895
aaaucaaguagcuaccaac

SEQ ID NO: 549897 - RNA, 19 nt, Artificial Sequence
  Description of Artificial Sequence: Synthetic oligonucleotide
  Sense strand starting at position 2928 of SEQ ID NO: 318271
ccgagagggccucacugau

SEQ ID NO: 549898 - RNA, 19 nt, Artificial Sequence
  Description of Artificial Sequence: Synthetic oligonucleotide
  Antisense strand to SEQ ID NO: 549897
aucagugaggcccucucgg

SEQ ID NO: 549899 - RNA, 19 nt, Artificial Sequence
  Description of Artificial Sequence: Synthetic oligonucleotide
  Sense strand starting at position 2955 of SEQ ID NO: 318271
uggaguauuacuuguaguc

SEQ ID NO: 549900 - RNA, 19 nt, Artificial Sequence
  Description of Artificial Sequence: Synthetic oligonucleotide
  Antisense strand to SEQ ID NO: 549899
gacuacaaguaauacucca

SEQ ID NO: 549901 - RNA, 19 nt, Artificial Sequence
  Description of Artificial Sequence: Synthetic oligonucleotide
  Sense strand starting at position 2962 of SEQ ID NO: 318271
uuacuuguagucugaacuu

SEQ ID NO: 549902 - RNA, 19 nt, Artificial Sequence
  Description of Artificial Sequence: Synthetic oligonucleotide
  Antisense strand to SEQ ID NO: 549901
aaguucagacuacaaguaa

SEQ ID NO: 549903 - RNA, 19 nt, Artificial Sequence
  Description of Artificial Sequence: Synthetic oligonucleotide
  Sense strand starting at position 2994 of SEQ ID NO: 318271
guguauuccauuugggcau

SEQ ID NO: 549904 - RNA, 19 nt, Artificial Sequence
  Description of Artificial Sequence: Synthetic oligonucleotide
  Antisense strand to SEQ ID NO: 549903
augcccaaauggaauacac

SEQ ID NO: 549905 - RNA, 19 nt, Artificial Sequence
  Description of Artificial Sequence: Synthetic oligonucleotide
  Sense strand starting at position 3034 of SEQ ID NO: 318271
ggcaguuuauggguguaaa

SEQ ID NO: 549906 - RNA, 19 nt, Artificial Sequence
  Description of Artificial Sequence: Synthetic oligonucleotide
  Antisense strand to SEQ ID NO: 549905
uuuacacccauaaacugcc

SEQ ID NO: 549907 - RNA, 19 nt, Artificial Sequence
  Description of Artificial Sequence: Synthetic oligonucleotide
  Sense strand starting at position 3088 of SEQ ID NO: 318271
ugaaguuauggcugauauu

SEQ ID NO: 549908 - RNA, 19 nt, Artificial Sequence
  Description of Artificial Sequence: Synthetic oligonucleotide
  Antisense strand to SEQ ID NO: 549907
aauaucagccauaacuuca

SEQ ID NO: 549909 - RNA, 19 nt, Artificial Sequence
  Description of Artificial Sequence: Synthetic oligonucleotide
  Sense strand starting at position 3089 of SEQ ID NO: 318271
gaaguuauggcugauauug

SEQ ID NO: 549910 - RNA, 19 nt, Artificial Sequence
  Description of Artificial Sequence: Synthetic oligonucleotide
  Antisense strand to SEQ ID NO: 549909
caauaucagccauaacuuc

SEQ ID NO: 549911 - RNA, 19 nt, Artificial Sequence
  Description of Artificial Sequence: Synthetic oligonucleotide
  Sense strand starting at position 3097 of SEQ ID NO: 318271
ggcugauauugaccacuua

SEQ ID NO: 549912 - RNA, 19 nt, Artificial Sequence
  Description of Artificial Sequence: Synthetic oligonucleotide
  Antisense strand to SEQ ID NO: 549911
uaaguggucaauaucagcc

SEQ ID NO: 549913 - RNA, 19 nt, Artificial Sequence
  Description of Artificial Sequence: Synthetic oligonucleotide
  Sense strand starting at position 3098 of SEQ ID NO: 318271
gcugauauugaccacuuau

SEQ ID NO: 549914 - RNA, 19 nt, Artificial Sequence
  Description of Artificial Sequence: Synthetic oligonucleotide
  Antisense strand to SEQ ID NO: 549913
auaaguggucaauaucagc

SEQ ID NO: 549915 - RNA, 19 nt, Artificial Sequence
  Description of Artificial Sequence: Synthetic oligonucleotide
  Sense strand starting at position 3138 of SEQ ID NO: 318271
cuuuacaucgauuauuagu

SEQ ID NO: 549916 - RNA, 19 nt, Artificial Sequence
  Description of Artificial Sequence: Synthetic oligonucleotide
  Antisense strand to SEQ ID NO: 549915
acuaauaaucgauguaaag

SEQ ID NO: 549917 - RNA, 19 nt, Artificial Sequence
  Description of Artificial Sequence: Synthetic oligonucleotide
  Sense strand starting at position 3143 of SEQ ID NO: 318271
caucgauuauuaguuaugu

SEQ ID NO: 549918 - RNA, 19 nt, Artificial Sequence
  Description of Artificial Sequence: Synthetic oligonucleotide
  Antisense strand to SEQ ID NO: 549917
acauaacuaauaaucgaug

SEQ ID NO: 549919 - RNA, 19 nt, Artificial Sequence
  Description of Artificial Sequence: Synthetic oligonucleotide
  Sense strand starting at position 3223 of SEQ ID NO: 318271
cuuaaauuugcucagugcu

SEQ ID NO: 549920 - RNA, 19 nt, Artificial Sequence
  Description of Artificial Sequence: Synthetic oligonucleotide
  Antisense strand to SEQ ID NO: 549919
agcacugagcaaauuuaag

SEQ ID NO: 549921 - RNA, 19 nt, Artificial Sequence
  Description of Artificial Sequence: Synthetic oligonucleotide
  Sense strand starting at position 3329 of SEQ ID NO: 318271
gccuuagcuguguuuggua

SEQ ID NO: 549922 - RNA, 19 nt, Artificial Sequence
  Description of Artificial Sequence: Synthetic oligonucleotide
  Antisense strand to SEQ ID NO: 549921
uaccaaacacagcuaaggc

SEQ ID NO: 549923 - RNA, 19 nt, Artificial Sequence
  Description of Artificial Sequence: Synthetic oligonucleotide
  Sense strand starting at position 3784 of SEQ ID NO: 318271
caguaagugguagagcuaa

SEQ ID NO: 549924 - RNA, 19 nt, Artificial Sequence
  Description of Artificial Sequence: Synthetic oligonucleotide
  Antisense strand to SEQ ID NO: 549923
uuagcucuaccacuuacug

SEQ ID NO: 549925 - RNA, 19 nt, Artificial Sequence
  Description of Artificial Sequence: Synthetic oligonucleotide
  Sense strand starting at position 3832 of SEQ ID NO: 318271
auacacuauuucgugguua

SEQ ID NO: 549926 - RNA, 19 nt, Artificial Sequence
  Description of Artificial Sequence: Synthetic oligonucleotide
  Antisense strand to SEQ ID NO: 549925
uaaccacgaaauaguguau

SEQ ID NO: 549927 - RNA, 19 nt, Artificial Sequence
  Description of Artificial Sequence: Synthetic oligonucleotide
  Sense strand starting at position 3834 of SEQ ID NO: 318271
acacuauuucgugguuacu

SEQ ID NO: 549928 - RNA, 19 nt, Artificial Sequence
  Description of Artificial Sequence: Synthetic oligonucleotide
  Antisense strand to SEQ ID NO: 549927
aguaaccacgaaauagugu

SEQ ID NO: 549929 - RNA, 19 nt, Artificial Sequence
  Description of Artificial Sequence: Synthetic oligonucleotide
  Sense strand starting at position 3836 of SEQ ID NO: 318271
acuauuucgugguuacuca

SEQ ID NO: 549930 - RNA, 19 nt, Artificial Sequence
  Description of Artificial Sequence: Synthetic oligonucleotide
  Antisense strand to SEQ ID NO: 549929
ugaguaaccacgaaauagu

SEQ ID NO: 549931 - RNA, 19 nt, Artificial Sequence
  Description of Artificial Sequence: Synthetic oligonucleotide
  Sense strand starting at position 3852 of SEQ ID NO: 318271
ucauuacgucucuaaguuu

SEQ ID NO: 549932 - RNA, 19 nt, Artificial Sequence
  Description of Artificial Sequence: Synthetic oligonucleotide
  Antisense strand to SEQ ID NO: 549931
aaacuuagagacguaauga

SEQ ID NO: 549933 - RNA, 19 nt, Artificial Sequence
  Description of Artificial Sequence: Synthetic oligonucleotide
  Sense strand starting at position 3925 of SEQ ID NO: 318271
gcaagugaaucagcacaaa

SEQ ID NO: 549934 - RNA, 19 nt, Artificial Sequence
  Description of Artificial Sequence: Synthetic oligonucleotide
  Antisense strand to SEQ ID NO: 549933
uuugugcugauucacuugc

SEQ ID NO: 549935 - RNA, 19 nt, Artificial Sequence
  Description of Artificial Sequence: Synthetic oligonucleotide
  Sense strand starting at position 3928 of SEQ ID NO: 318271
agugaaucagcacaaacuu

SEQ ID NO: 549936 - RNA, 19 nt, Artificial Sequence
  Description of Artificial Sequence: Synthetic oligonucleotide
  Antisense strand to SEQ ID NO: 549935
aaguuugugcugauucacu

SEQ ID NO: 549937 - RNA, 19 nt, Artificial Sequence
  Description of Artificial Sequence: Synthetic oligonucleotide
  Sense strand starting at position 11 of SEQ ID NO: 318272
guccuacuacacugagaca

SEQ ID NO: 549938 - RNA, 19 nt, Artificial Sequence
  Description of Artificial Sequence: Synthetic oligonucleotide
  Antisense strand to SEQ ID NO: 549937
ugucucaguguaguaggac

SEQ ID NO: 549939 - RNA, 19 nt, Artificial Sequence
  Description of Artificial Sequence: Synthetic oligonucleotide
  Sense strand starting at position 62 of SEQ ID NO: 318272
uugguucuauuauuggaca

SEQ ID NO: 549940 - RNA, 19 nt, Artificial Sequence
  Description of Artificial Sequence: Synthetic oligonucleotide
  Antisense strand to SEQ ID NO: 549939
uguccaauaauagaaccaa

SEQ ID NO: 549941 - RNA, 19 nt, Artificial Sequence
  Description of Artificial Sequence: Synthetic oligonucleotide
  Sense strand starting at position 64 of SEQ ID NO: 318272
gguucuauuauuggacagu

SEQ ID NO: 549942 - RNA, 19 nt, Artificial Sequence
  Description of Artificial Sequence: Synthetic oligonucleotide
  Antisense strand to SEQ ID NO: 549941
acuguccaauaauagaacc

SEQ ID NO: 549943 - RNA, 19 nt, Artificial Sequence
  Description of Artificial Sequence: Synthetic oligonucleotide
  Sense strand starting at position 212 of SEQ ID NO: 318272
cuaaucauggacugcagau

SEQ ID NO: 549944 - RNA, 19 nt, Artificial Sequence
  Description of Artificial Sequence: Synthetic oligonucleotide
  Antisense strand to SEQ ID NO: 549943
aucugcaguccaugauuag

SEQ ID NO: 549945 - RNA, 19 nt, Artificial Sequence
  Description of Artificial Sequence: Synthetic oligonucleotide
  Sense strand starting at position 446 of SEQ ID NO: 318272
aagguuauagcccauaguu

SEQ ID NO: 549946 - RNA, 19 nt, Artificial Sequence
  Description of Artificial Sequence: Synthetic oligonucleotide
  Antisense strand to SEQ ID NO: 549945
aacuaugggcuauaaccuu

SEQ ID NO: 549947 - RNA, 19 nt, Artificial Sequence
  Description of Artificial Sequence: Synthetic oligonucleotide
  Sense strand starting at position 497 of SEQ ID NO: 318272
ggcgaucuggcugaugaau

SEQ ID NO: 549948 - RNA, 19 nt, Artificial Sequence
  Description of Artificial Sequence: Synthetic oligonucleotide
  Antisense strand to SEQ ID NO: 549947
auucaucagccagaucgcc

SEQ ID NO: 549949 - RNA, 19 nt, Artificial Sequence
  Description of Artificial Sequence: Synthetic oligonucleotide
  Sense strand starting at position 514 of SEQ ID NO: 318272
auugcauagcaggaauagu

SEQ ID NO: 549950 - RNA, 19 nt, Artificial Sequence
  Description of Artificial Sequence: Synthetic oligonucleotide
  Antisense strand to SEQ ID NO: 549949
acuauuccugcuaugcaau

SEQ ID NO: 549951 - RNA, 19 nt, Artificial Sequence
  Description of Artificial Sequence: Synthetic oligonucleotide
  Sense strand starting at position 640 of SEQ ID NO: 318272
gcucacagucauggaaaca

SEQ ID NO: 549952 - RNA, 19 nt, Artificial Sequence
  Description of Artificial Sequence: Synthetic oligonucleotide
  Antisense strand to SEQ ID NO: 549951
uguuuccaugacugugagc

SEQ ID NO: 549953 - RNA, 19 nt, Artificial Sequence
  Description of Artificial Sequence: Synthetic oligonucleotide
  Sense strand starting at position 677 of SEQ ID NO: 318272
guggaaaucuguuuagaaa

SEQ ID NO: 549954 - RNA, 19 nt, Artificial Sequence
  Description of Artificial Sequence: Synthetic oligonucleotide
  Antisense strand to SEQ ID NO: 549953
uuucuaaacagauuuccac

SEQ ID NO: 549955 - RNA, 19 nt, Artificial Sequence
  Description of Artificial Sequence: Synthetic oligonucleotide
  Sense strand starting at position 747 of SEQ ID NO: 318272
uagaauuuacuucgcuguu

SEQ ID NO: 549956 - RNA, 19 nt, Artificial Sequence
  Description of Artificial Sequence: Synthetic oligonucleotide
  Antisense strand to SEQ ID NO: 549955
aacagcgaaguaaauucua

SEQ ID NO: 549957 - RNA, 19 nt, Artificial Sequence
  Description of Artificial Sequence: Synthetic oligonucleotide
  Sense strand starting at position 937 of SEQ ID NO: 318272
cuagguuuaguuugaauaa

SEQ ID NO: 549958 - RNA, 19 nt, Artificial Sequence
  Description of Artificial Sequence: Synthetic oligonucleotide
  Antisense strand to SEQ ID NO: 549957
uuauucaaacuaaaccuag

SEQ ID NO: 549959 - RNA, 19 nt, Artificial Sequence
  Description of Artificial Sequence: Synthetic oligonucleotide
  Sense strand starting at position 1066 of SEQ ID NO: 318272
cagggcaaugcuuaugcau

SEQ ID NO: 549960 - RNA, 19 nt, Artificial Sequence
  Description of Artificial Sequence: Synthetic oligonucleotide
  Antisense strand to SEQ ID NO: 549959
augcauaagcauugcccug

SEQ ID NO: 549961 - RNA, 19 nt, Artificial Sequence
  Description of Artificial Sequence: Synthetic oligonucleotide
  Sense strand starting at position 1083 of SEQ ID NO: 318272
auaugcuauucuguggaga

SEQ ID NO: 549962 - RNA, 19 nt, Artificial Sequence
  Description of Artificial Sequence: Synthetic oligonucleotide
  Antisense strand to SEQ ID NO: 549961
ucuccacagaauagcauau

SEQ ID NO: 549963 - RNA, 19 nt, Artificial Sequence
  Description of Artificial Sequence: Synthetic oligonucleotide
  Sense strand starting at position 1131 of SEQ ID NO: 318272
cuagcuuucucagcagaaa

SEQ ID NO: 549964 - RNA, 19 nt, Artificial Sequence
  Description of Artificial Sequence: Synthetic oligonucleotide
  Antisense strand to SEQ ID NO: 549963
uuucugcugagaaagcuag

SEQ ID NO: 549965 - RNA, 19 nt, Artificial Sequence
  Description of Artificial Sequence: Synthetic oligonucleotide
  Sense strand starting at position 1608 of SEQ ID NO: 318272
ugagauuccuucuuucgag

SEQ ID NO: 549966 - RNA, 19 nt, Artificial Sequence
  Description of Artificial Sequence: Synthetic oligonucleotide
  Antisense strand to SEQ ID NO: 549965
cucgaaagaaggaaucuca

SEQ ID NO: 549967 - RNA, 19 nt, Artificial Sequence
  Description of Artificial Sequence: Synthetic oligonucleotide
  Sense strand starting at position 1614 of SEQ ID NO: 318272
uccuucuuucgaggugaaa

SEQ ID NO: 549968 - RNA, 19 nt, Artificial Sequence
  Description of Artificial Sequence: Synthetic oligonucleotide
  Antisense strand to SEQ ID NO: 549967
uuucaccucgaaagaagga

SEQ ID NO: 549969 - RNA, 19 nt, Artificial Sequence
  Description of Artificial Sequence: Synthetic oligonucleotide
  Sense strand starting at position 1616 of SEQ ID NO: 318272
cuucuuucgaggugaaauc

SEQ ID NO: 549970 - RNA, 19 nt, Artificial Sequence
  Description of Artificial Sequence: Synthetic oligonucleotide
  Antisense strand to SEQ ID NO: 549969
gauuucaccucgaaagaag

SEQ ID NO: 549971 - RNA, 19 nt, Artificial Sequence
  Description of Artificial Sequence: Synthetic oligonucleotide
  Sense strand starting at position 1617 of SEQ ID NO: 318272
uucuuucgaggugaaauca

SEQ ID NO: 549972 - RNA, 19 nt, Artificial Sequence
  Description of Artificial Sequence: Synthetic oligonucleotide
  Antisense strand to SEQ ID NO: 549971
ugauuucaccucgaaagaa

SEQ ID NO: 549973 - RNA, 19 nt, Artificial Sequence
  Description of Artificial Sequence: Synthetic oligonucleotide
  Sense strand starting at position 1862 of SEQ ID NO: 318272
gaggcaaugagacgacuaa

SEQ ID NO: 549974 - RNA, 19 nt, Artificial Sequence
  Description of Artificial Sequence: Synthetic oligonucleotide
  Antisense strand to SEQ ID NO: 549973
uuagucgucucauugccuc

SEQ ID NO: 549975 - RNA, 19 nt, Artificial Sequence
  Description of Artificial Sequence: Synthetic oligonucleotide
  Sense strand starting at position 2147 of SEQ ID NO: 318272
ggucuaaaggauuggagcu

SEQ ID NO: 549976 - RNA, 19 nt, Artificial Sequence
  Description of Artificial Sequence: Synthetic oligonucleotide
  Antisense strand to SEQ ID NO: 549975
agcuccaauccuuuagacc

SEQ ID NO: 549977 - RNA, 19 nt, Artificial Sequence
  Description of Artificial Sequence: Synthetic oligonucleotide
  Sense strand starting at position 2193 of SEQ ID NO: 318272
gagacugugauguguagau

SEQ ID NO: 549978 - RNA, 19 nt, Artificial Sequence
  Description of Artificial Sequence: Synthetic oligonucleotide
  Antisense strand to SEQ ID NO: 549977
aucuacacaucacagucuc

SEQ ID NO: 549979 - RNA, 19 nt, Artificial Sequence
  Description of Artificial Sequence: Synthetic oligonucleotide
  Sense strand starting at position 2195 of SEQ ID NO: 318272
gacugugauguguagauag

SEQ ID NO: 549980 - RNA, 19 nt, Artificial Sequence
  Description of Artificial Sequence: Synthetic oligonucleotide
  Antisense strand to SEQ ID NO: 549979
cuaucuacacaucacaguc

SEQ ID NO: 549981 - RNA, 19 nt, Artificial Sequence
  Description of Artificial Sequence: Synthetic oligonucleotide
  Sense strand starting at position 2197 of SEQ ID NO: 318272
cugugauguguagauagaa

SEQ ID NO: 549982 - RNA, 19 nt, Artificial Sequence
  Description of Artificial Sequence: Synthetic oligonucleotide
  Antisense strand to SEQ ID NO: 549981
uucuaucuacacaucacag

SEQ ID NO: 549983 - RNA, 19 nt, Artificial Sequence
  Description of Artificial Sequence: Synthetic oligonucleotide
  Sense strand starting at position 2343 of SEQ ID NO: 318272
ccuguuaaauaauccugga

SEQ ID NO: 549984 - RNA, 19 nt, Artificial Sequence
  Description of Artificial Sequence: Synthetic oligonucleotide
  Antisense strand to SEQ ID NO: 549983
uccaggauuauuuaacagg

SEQ ID NO: 549985 - RNA, 19 nt, Artificial Sequence
  Description of Artificial Sequence: Synthetic oligonucleotide
  Sense strand starting at position 2517 of SEQ ID NO: 318272
gguugugagguguaaauag

SEQ ID NO: 549986 - RNA, 19 nt, Artificial Sequence
  Description of Artificial Sequence: Synthetic oligonucleotide
  Antisense strand to SEQ ID NO: 549985
cuauuuacaccucacaacc

SEQ ID NO: 549987 - RNA, 19 nt, Artificial Sequence
  Description of Artificial Sequence: Synthetic oligonucleotide
  Sense strand starting at position 2652 of SEQ ID NO: 318272
aaguuaugaguccgagauu

SEQ ID NO: 549988 - RNA, 19 nt, Artificial Sequence
  Description of Artificial Sequence: Synthetic oligonucleotide
  Antisense strand to SEQ ID NO: 549987
aaucucggacucauaacuu

SEQ ID NO: 549989 - RNA, 19 nt, Artificial Sequence
  Description of Artificial Sequence: Synthetic oligonucleotide
  Sense strand starting at position 2655 of SEQ ID NO: 318272
uuaugaguccgagauuaca

SEQ ID NO: 549990 - RNA, 19 nt, Artificial Sequence
  Description of Artificial Sequence: Synthetic oligonucleotide
  Antisense strand to SEQ ID NO: 549989
uguaaucucggacucauaa

SEQ ID NO: 549991 - RNA, 19 nt, Artificial Sequence
  Description of Artificial Sequence: Synthetic oligonucleotide
  Sense strand starting at position 2679 of SEQ ID NO: 318272
agguguuggcggucuucua

SEQ ID NO: 549992 - RNA, 19 nt, Artificial Sequence
  Description of Artificial Sequence: Synthetic oligonucleotide
  Antisense strand to SEQ ID NO: 549991
uagaagaccgccaacaccu

SEQ ID NO: 549993 - RNA, 19 nt, Artificial Sequence
  Description of Artificial Sequence: Synthetic oligonucleotide
  Sense strand starting at position 2680 of SEQ ID NO: 318272
gguguuggcggucuucuaa

SEQ ID NO: 549994 - RNA, 19 nt, Artificial Sequence
  Description of Artificial Sequence: Synthetic oligonucleotide
  Antisense strand to SEQ ID NO: 549993
uuagaagaccgccaacacc

SEQ ID NO: 549995 - RNA, 19 nt, Artificial Sequence
  Description of Artificial Sequence: Synthetic oligonucleotide
  Sense strand starting at position 2838 of SEQ ID NO: 318272
accaguugacauugaucau

SEQ ID NO: 549996 - RNA, 19 nt, Artificial Sequence
  Description of Artificial Sequence: Synthetic oligonucleotide
  Antisense strand to SEQ ID NO: 549995
augaucaaugucaacuggu

SEQ ID NO: 549997 - RNA, 19 nt, Artificial Sequence
  Description of Artificial Sequence: Synthetic oligonucleotide
  Sense strand starting at position 3190 of SEQ ID NO: 318272
ccgcccuaugcuucuuuau

SEQ ID NO: 549998 - RNA, 19 nt, Artificial Sequence
  Description of Artificial Sequence: Synthetic oligonucleotide
  Antisense strand to SEQ ID NO: 549997
auaaagaagcauagggcgg

SEQ ID NO: 549999 - RNA, 19 nt, Artificial Sequence
  Description of Artificial Sequence: Synthetic oligonucleotide
  Sense strand starting at position 3246 of SEQ ID NO: 318272
ccagacagguggucagaaa

SEQ ID NO: 550000 - RNA, 19 nt, Artificial Sequence
  Description of Artificial Sequence: Synthetic oligonucleotide
  Antisense strand to SEQ ID NO: 549999
uuucugaccaccugucugg

SEQ ID NO: 550001 - RNA, 19 nt, Artificial Sequence
  Description of Artificial Sequence: Synthetic oligonucleotide
  Sense strand starting at position 3259 of SEQ ID NO: 318272
cagaaaggauuaguuacuu

SEQ ID NO: 550002 - RNA, 19 nt, Artificial Sequence
  Description of Artificial Sequence: Synthetic oligonucleotide
  Antisense strand to SEQ ID NO: 550001
aaguaacuaauccuuucug

SEQ ID NO: 550003 - RNA, 19 nt, Artificial Sequence
  Description of Artificial Sequence: Synthetic oligonucleotide
  Sense strand starting at position 3313 of SEQ ID NO: 318272
guuagauuaguauagugaa

SEQ ID NO: 550004 - RNA, 19 nt, Artificial Sequence
  Description of Artificial Sequence: Synthetic oligonucleotide
  Antisense strand to SEQ ID NO: 550003
uucacuauacuaaucuaac

SEQ ID NO: 550005 - RNA, 19 nt, Artificial Sequence
  Description of Artificial Sequence: Synthetic oligonucleotide
  Sense strand starting at position 3328 of SEQ ID NO: 318272
ugaacccucguguauuaau

SEQ ID NO: 550006 - RNA, 19 nt, Artificial Sequence
  Description of Artificial Sequence: Synthetic oligonucleotide
  Antisense strand to SEQ ID NO: 550005
auuaauacacgaggguuca

SEQ ID NO: 550007 - RNA, 19 nt, Artificial Sequence
  Description of Artificial Sequence: Synthetic oligonucleotide
  Sense strand starting at position 3337 of SEQ ID NO: 318272
guguauuaaugauccagag

SEQ ID NO: 550008 - RNA, 19 nt, Artificial Sequence
  Description of Artificial Sequence: Synthetic oligonucleotide
  Antisense strand to SEQ ID NO: 550007
cucuggaucauuaauacac

SEQ ID NO: 550009 - RNA, 19 nt, Artificial Sequence
  Description of Artificial Sequence: Synthetic oligonucleotide
  Sense strand starting at position 3583 of SEQ ID NO: 318272
acucacuugccucagaagu

SEQ ID NO: 550010 - RNA, 19 nt, Artificial Sequence
  Description of Artificial Sequence: Synthetic oligonucleotide
  Antisense strand to SEQ ID NO: 550009
acuucugaggcaagugagu

SEQ ID NO: 550011 - RNA, 19 nt, Artificial Sequence
  Description of Artificial Sequence: Synthetic oligonucleotide
  Sense strand starting at position 3808 of SEQ ID NO: 318272
acugguaguuaacuuuaua

SEQ ID NO: 550012 - RNA, 19 nt, Artificial Sequence
  Description of Artificial Sequence: Synthetic oligonucleotide
  Antisense strand to SEQ ID NO: 550011
uauaaaguuaacuaccagu

SEQ ID NO: 550013 - RNA, 19 nt, Artificial Sequence
  Description of Artificial Sequence: Synthetic oligonucleotide
  Sense strand starting at position 3948 of SEQ ID NO: 318272
uauacuugaucauuggguu

SEQ ID NO: 550014 - RNA, 19 nt, Artificial Sequence
  Description of Artificial Sequence: Synthetic oligonucleotide
  Antisense strand to SEQ ID NO: 550013
aacccaaugaucaaguaua

SEQ ID NO: 550015 - RNA, 19 nt, Artificial Sequence
  Description of Artificial Sequence: Synthetic oligonucleotide
  Sense strand starting at position 3971 of SEQ ID NO: 318272
uguugucaaccugauaaca

SEQ ID NO: 550016 - RNA, 19 nt, Artificial Sequence
  Description of Artificial Sequence: Synthetic oligonucleotide
  Antisense strand to SEQ ID NO: 550015
uguuaucagguugacaaca

SEQ ID NO: 550017 - RNA, 19 nt, Artificial Sequence
  Description of Artificial Sequence: Synthetic oligonucleotide
  Sense strand starting at position 369 of SEQ ID NO: 318273
uguguaaaggcaugagaua

SEQ ID NO: 550018 - RNA, 19 nt, Artificial Sequence
  Description of Artificial Sequence: Synthetic oligonucleotide
  Antisense strand to SEQ ID NO: 550017
uaucucaugccuuuacaca

SEQ ID NO: 550019 - RNA, 19 nt, Artificial Sequence
  Description of Artificial Sequence: Synthetic oligonucleotide
  Sense strand starting at position 370 of SEQ ID NO: 318273
guguaaaggcaugagauau

SEQ ID NO: 550020 - RNA, 19 nt, Artificial Sequence
  Description of Artificial Sequence: Synthetic oligonucleotide
  Antisense strand to SEQ ID NO: 550019
auaucucaugccuuuacac

SEQ ID NO: 550021 - RNA, 19 nt, Artificial Sequence
  Description of Artificial Sequence: Synthetic oligonucleotide
  Sense strand starting at position 376 of SEQ ID NO: 318273
aggcaugagauauguaaga

SEQ ID NO: 550022 - RNA, 19 nt, Artificial Sequence
  Description of Artificial Sequence: Synthetic oligonucleotide
  Antisense strand to SEQ ID NO: 550021
ucuuacauaucucaugccu

SEQ ID NO: 550023 - RNA, 19 nt, Artificial Sequence
  Description of Artificial Sequence: Synthetic oligonucleotide
  Sense strand starting at position 468 of SEQ ID NO: 318273
ucaagaugauaauugcuaa

SEQ ID NO: 550024 - RNA, 19 nt, Artificial Sequence
  Description of Artificial Sequence: Synthetic oligonucleotide
  Antisense strand to SEQ ID NO: 550023
uuagcaauuaucaucuuga

SEQ ID NO: 550025 - RNA, 19 nt, Artificial Sequence
  Description of Artificial Sequence: Synthetic oligonucleotide
  Sense strand starting at position 506 of SEQ ID NO: 318273
aagacacgcucauugguaa

SEQ ID NO: 550026 - RNA, 19 nt, Artificial Sequence
  Description of Artificial Sequence: Synthetic oligonucleotide
  Antisense strand to SEQ ID NO: 550025
uuaccaaugagcgugucuu

SEQ ID NO: 550027 - RNA, 19 nt, Artificial Sequence
  Description of Artificial Sequence: Synthetic oligonucleotide
  Sense strand starting at position 616 of SEQ ID NO: 318273
cgguuuacacugcacaaau

SEQ ID NO: 550028 - RNA, 19 nt, Artificial Sequence
  Description of Artificial Sequence: Synthetic oligonucleotide
  Antisense strand to SEQ ID NO: 550027
auuugugcaguguaaaccg

SEQ ID NO: 550029 - RNA, 19 nt, Artificial Sequence
  Description of Artificial Sequence: Synthetic oligonucleotide
  Sense strand starting at position 642 of SEQ ID NO: 318273
uuuagauuacuuugguucu

SEQ ID NO: 550030 - RNA, 19 nt, Artificial Sequence
  Description of Artificial Sequence: Synthetic oligonucleotide
  Antisense strand to SEQ ID NO: 550029
agaaccaaaguaaucuaaa

SEQ ID NO: 550031 - RNA, 19 nt, Artificial Sequence
  Description of Artificial Sequence: Synthetic oligonucleotide
  Sense strand starting at position 655 of SEQ ID NO: 318273
gguucuugcucaccaacaa

SEQ ID NO: 550032 - RNA, 19 nt, Artificial Sequence
  Description of Artificial Sequence: Synthetic oligonucleotide
  Antisense strand to SEQ ID NO: 550031
uuguuggugagcaagaacc

SEQ ID NO: 550033 - RNA, 19 nt, Artificial Sequence
  Description of Artificial Sequence: Synthetic oligonucleotide
  Sense strand starting at position 852 of SEQ ID NO: 318273
guacauaagcacugugauu

SEQ ID NO: 550034 - RNA, 19 nt, Artificial Sequence
  Description of Artificial Sequence: Synthetic oligonucleotide
  Antisense strand to SEQ ID NO: 550033
aaucacagugcuuauguac

SEQ ID NO: 550035 - RNA, 19 nt, Artificial Sequence
  Description of Artificial Sequence: Synthetic oligonucleotide
  Sense strand starting at position 863 of SEQ ID NO: 318273
cugugauuucccuguucuc

SEQ ID NO: 550036 - RNA, 19 nt, Artificial Sequence
  Description of Artificial Sequence: Synthetic oligonucleotide
  Antisense strand to SEQ ID NO: 550035
gagaacagggaaaucacag

SEQ ID NO: 550037 - RNA, 19 nt, Artificial Sequence
  Description of Artificial Sequence: Synthetic oligonucleotide
  Sense strand starting at position 884 of SEQ ID NO: 318273
ucuuuauuccacugguagu

SEQ ID NO: 550038 - RNA, 19 nt, Artificial Sequence
  Description of Artificial Sequence: Synthetic oligonucleotide
  Antisense strand to SEQ ID NO: 550037
acuaccaguggaauaaaga

SEQ ID NO: 550039 - RNA, 19 nt, Artificial Sequence
  Description of Artificial Sequence: Synthetic oligonucleotide
  Sense strand starting at position 1272 of SEQ ID NO: 318273
caaagcguaucuuuaagau

SEQ ID NO: 550040 - RNA, 19 nt, Artificial Sequence
  Description of Artificial Sequence: Synthetic oligonucleotide
  Antisense strand to SEQ ID NO: 550039
aucuuaaagauacgcuuug

SEQ ID NO: 550041 - RNA, 19 nt, Artificial Sequence
  Description of Artificial Sequence: Synthetic oligonucleotide
  Sense strand starting at position 1314 of SEQ ID NO: 318273
cuucguuugcucuuacgau

SEQ ID NO: 550042 - RNA, 19 nt, Artificial Sequence
  Description of Artificial Sequence: Synthetic oligonucleotide
  Antisense strand to SEQ ID NO: 550041
aucguaagagcaaacgaag

SEQ ID NO: 550043 - RNA, 19 nt, Artificial Sequence
  Description of Artificial Sequence: Synthetic oligonucleotide
  Sense strand starting at position 1380 of SEQ ID NO: 318273
uggagaugcuucucauaug

SEQ ID NO: 550044 - RNA, 19 nt, Artificial Sequence
  Description of Artificial Sequence: Synthetic oligonucleotide
  Antisense strand to SEQ ID NO: 550043
cauaugagaagcaucucca

SEQ ID NO: 550045 - RNA, 19 nt, Artificial Sequence
  Description of Artificial Sequence: Synthetic oligonucleotide
  Sense strand starting at position 1391 of SEQ ID NO: 318273
cucauauggccuuagccau

SEQ ID NO: 550046 - RNA, 19 nt, Artificial Sequence
  Description of Artificial Sequence: Synthetic oligonucleotide
  Antisense strand to SEQ ID NO: 550045
auggcuaaggccauaugag

SEQ ID NO: 550047 - RNA, 19 nt, Artificial Sequence
  Description of Artificial Sequence: Synthetic oligonucleotide
  Sense strand starting at position 1423 of SEQ ID NO: 318273
cggcgagaagcucauuaag

SEQ ID NO: 550048 - RNA, 19 nt, Artificial Sequence
  Description of Artificial Sequence: Synthetic oligonucleotide
  Antisense strand to SEQ ID NO: 550047
cuuaaugagcuucucgccg

SEQ ID NO: 550049 - RNA, 19 nt, Artificial Sequence
  Description of Artificial Sequence: Synthetic oligonucleotide
  Sense strand starting at position 1425 of SEQ ID NO: 318273
gcgagaagcucauuaaggu

SEQ ID NO: 550050 - RNA, 19 nt, Artificial Sequence
  Description of Artificial Sequence: Synthetic oligonucleotide
  Antisense strand to SEQ ID NO: 550049
accuuaaugagcuucucgc

SEQ ID NO: 550051 - RNA, 19 nt, Artificial Sequence
  Description of Artificial Sequence: Synthetic oligonucleotide
  Sense strand starting at position 1426 of SEQ ID NO: 318273
cgagaagcucauuaagguu

SEQ ID NO: 550052 - RNA, 19 nt, Artificial Sequence
  Description of Artificial Sequence: Synthetic oligonucleotide
  Antisense strand to SEQ ID NO: 550051
aaccuuaaugagcuucucg

SEQ ID NO: 550053 - RNA, 19 nt, Artificial Sequence
  Description of Artificial Sequence: Synthetic oligonucleotide
  Sense strand starting at position 1651 of SEQ ID NO: 318273
gcgagaguccuuuagguug

SEQ ID NO: 550054 - RNA, 19 nt, Artificial Sequence
  Description of Artificial Sequence: Synthetic oligonucleotide
  Antisense strand to SEQ ID NO: 550053
caaccuaaaggacucucgc

SEQ ID NO: 550055 - RNA, 19 nt, Artificial Sequence
  Description of Artificial Sequence: Synthetic oligonucleotide
  Sense strand starting at position 1654 of SEQ ID NO: 318273
agaguccuuuagguugaga

SEQ ID NO: 550056 - RNA, 19 nt, Artificial Sequence
  Description of Artificial Sequence: Synthetic oligonucleotide
  Antisense strand to SEQ ID NO: 550055
ucucaaccuaaaggacucu

SEQ ID NO: 550057 - RNA, 19 nt, Artificial Sequence
  Description of Artificial Sequence: Synthetic oligonucleotide
  Sense strand starting at position 1656 of SEQ ID NO: 318273
aguccuuuagguugagaaa

SEQ ID NO: 550058 - RNA, 19 nt, Artificial Sequence
  Description of Artificial Sequence: Synthetic oligonucleotide
  Antisense strand to SEQ ID NO: 550057
uuucucaaccuaaaggacu

SEQ ID NO: 550059 - RNA, 19 nt, Artificial Sequence
  Description of Artificial Sequence: Synthetic oligonucleotide
  Sense strand starting at position 1657 of SEQ ID NO: 318273
guccuuuagguugagaaag

SEQ ID NO: 550060 - RNA, 19 nt, Artificial Sequence
  Description of Artificial Sequence: Synthetic oligonucleotide
  Antisense strand to SEQ ID NO: 550059
cuuucucaaccuaaaggac

SEQ ID NO: 550061 - RNA, 19 nt, Artificial Sequence
  Description of Artificial Sequence: Synthetic oligonucleotide
  Sense strand starting at position 1719 of SEQ ID NO: 318273
cggaaagguccggguacau

SEQ ID NO: 550062 - RNA, 19 nt, Artificial Sequence
  Description of Artificial Sequence: Synthetic oligonucleotide
  Antisense strand to SEQ ID NO: 550061
auguacccggaccuuuccg

SEQ ID NO: 550063 - RNA, 19 nt, Artificial Sequence
  Description of Artificial Sequence: Synthetic oligonucleotide
  Sense strand starting at position 1915 of SEQ ID NO: 318273
ccaagaaguuagcuuagau

SEQ ID NO: 550064 - RNA, 19 nt, Artificial Sequence
  Description of Artificial Sequence: Synthetic oligonucleotide
  Antisense strand to SEQ ID NO: 550063
aucuaagcuaacuucuugg

SEQ ID NO: 550065 - RNA, 19 nt, Artificial Sequence
  Description of Artificial Sequence: Synthetic oligonucleotide
  Sense strand starting at position 2022 of SEQ ID NO: 318273
ccguucuggccugggaaga

SEQ ID NO: 550066 - RNA, 19 nt, Artificial Sequence
  Description of Artificial Sequence: Synthetic oligonucleotide
  Antisense strand to SEQ ID NO: 550065
ucuucccaggccagaacgg

SEQ ID NO: 550067 - RNA, 19 nt, Artificial Sequence
  Description of Artificial Sequence: Synthetic oligonucleotide
  Sense strand starting at position 2377 of SEQ ID NO: 318273
agcuauaugaguucgcgca

SEQ ID NO: 550068 - RNA, 19 nt, Artificial Sequence
  Description of Artificial Sequence: Synthetic oligonucleotide
  Antisense strand to SEQ ID NO: 550067
ugcgcgaacucauauagcu

SEQ ID NO: 550069 - RNA, 19 nt, Artificial Sequence
  Description of Artificial Sequence: Synthetic oligonucleotide
  Sense strand starting at position 2404 of SEQ ID NO: 318273
caguuugguucuccaagua

SEQ ID NO: 550070 - RNA, 19 nt, Artificial Sequence
  Description of Artificial Sequence: Synthetic oligonucleotide
  Antisense strand to SEQ ID NO: 550069
uacuuggagaaccaaacug

SEQ ID NO: 550071 - RNA, 19 nt, Artificial Sequence
  Description of Artificial Sequence: Synthetic oligonucleotide
  Sense strand starting at position 2430 of SEQ ID NO: 318273
uugugagaguaguuaagaa

SEQ ID NO: 550072 - RNA, 19 nt, Artificial Sequence
  Description of Artificial Sequence: Synthetic oligonucleotide
  Antisense strand to SEQ ID NO: 550071
uucuuaacuacucucacaa

SEQ ID NO: 550073 - RNA, 19 nt, Artificial Sequence
  Description of Artificial Sequence: Synthetic oligonucleotide
  Sense strand starting at position 2505 of SEQ ID NO: 318273
cgggcuucaguguaaauua

SEQ ID NO: 550074 - RNA, 19 nt, Artificial Sequence
  Description of Artificial Sequence: Synthetic oligonucleotide
  Antisense strand to SEQ ID NO: 550073
uaauuuacacugaagcccg

SEQ ID NO: 550075 - RNA, 19 nt, Artificial Sequence
  Description of Artificial Sequence: Synthetic oligonucleotide
  Sense strand starting at position 2691 of SEQ ID NO: 318273
aguauaggaacucguauga

SEQ ID NO: 550076 - RNA, 19 nt, Artificial Sequence
  Description of Artificial Sequence: Synthetic oligonucleotide
  Antisense strand to SEQ ID NO: 550075
ucauacgaguuccuauacu

SEQ ID NO: 550077 - RNA, 19 nt, Artificial Sequence
  Description of Artificial Sequence: Synthetic oligonucleotide
  Sense strand starting at position 2695 of SEQ ID NO: 318273
uaggaacucguaugagaua

SEQ ID NO: 550078 - RNA, 19 nt, Artificial Sequence
  Description of Artificial Sequence: Synthetic oligonucleotide
  Antisense strand to SEQ ID NO: 550077
uaucucauacgaguuccua

SEQ ID NO: 550079 - RNA, 19 nt, Artificial Sequence
  Description of Artificial Sequence: Synthetic oligonucleotide
  Sense strand starting at position 2765 of SEQ ID NO: 318273
uggugcugggacuaucaaa

SEQ ID NO: 550080 - RNA, 19 nt, Artificial Sequence
  Description of Artificial Sequence: Synthetic oligonucleotide
  Antisense strand to SEQ ID NO: 550079
uuugauagucccagcacca

SEQ ID NO: 550081 - RNA, 19 nt, Artificial Sequence
  Description of Artificial Sequence: Synthetic oligonucleotide
  Sense strand starting at position 2924 of SEQ ID NO: 318273
gcaaccugaguggguaaau

SEQ ID NO: 550082 - RNA, 19 nt, Artificial Sequence
  Description of Artificial Sequence: Synthetic oligonucleotide
  Antisense strand to SEQ ID NO: 550081
auuuacccacucagguugc

SEQ ID NO: 550083 - RNA, 19 nt, Artificial Sequence
  Description of Artificial Sequence: Synthetic oligonucleotide
  Sense strand starting at position 2954 of SEQ ID NO: 318273
uuagaaagcugcucuuauu

SEQ ID NO: 550084 - RNA, 19 nt, Artificial Sequence
  Description of Artificial Sequence: Synthetic oligonucleotide
  Antisense strand to SEQ ID NO: 550083
aauaagagcagcuuucuaa

SEQ ID NO: 550085 - RNA, 19 nt, Artificial Sequence
  Description of Artificial Sequence: Synthetic oligonucleotide
  Sense strand starting at position 3109 of SEQ ID NO: 318273
uugaaaguucuuugauguu

SEQ ID NO: 550086 - RNA, 19 nt, Artificial Sequence
  Description of Artificial Sequence: Synthetic oligonucleotide
  Antisense strand to SEQ ID NO: 550085
aacaucaaagaacuuucaa

SEQ ID NO: 550087 - RNA, 19 nt, Artificial Sequence
  Description of Artificial Sequence: Synthetic oligonucleotide
  Sense strand starting at position 3191 of SEQ ID NO: 318273
gguauauagauaggcaguu

SEQ ID NO: 550088 - RNA, 19 nt, Artificial Sequence
  Description of Artificial Sequence: Synthetic oligonucleotide
  Antisense strand to SEQ ID NO: 550087
aacugccuaucuauauacc

SEQ ID NO: 550089 - RNA, 19 nt, Artificial Sequence
  Description of Artificial Sequence: Synthetic oligonucleotide
  Sense strand starting at position 3220 of SEQ ID NO: 318273
cugugaguuuacuuuauuu

SEQ ID NO: 550090 - RNA, 19 nt, Artificial Sequence
  Description of Artificial Sequence: Synthetic oligonucleotide
  Antisense strand to SEQ ID NO: 550089
aaauaaaguaaacucacag

SEQ ID NO: 550091 - RNA, 19 nt, Artificial Sequence
  Description of Artificial Sequence: Synthetic oligonucleotide
  Sense strand starting at position 3349 of SEQ ID NO: 318273
gugauauuccugcauagaa

SEQ ID NO: 550092 - RNA, 19 nt, Artificial Sequence
  Description of Artificial Sequence: Synthetic oligonucleotide
  Antisense strand to SEQ ID NO: 550091
uucuaugcaggaauaucac

SEQ ID NO: 550093 - RNA, 19 nt, Artificial Sequence
  Description of Artificial Sequence: Synthetic oligonucleotide
  Sense strand starting at position 3351 of SEQ ID NO: 318273
gauauuccugcauagaagu

SEQ ID NO: 550094 - RNA, 19 nt, Artificial Sequence
  Description of Artificial Sequence: Synthetic oligonucleotide
  Antisense strand to SEQ ID NO: 550093
acuucuaugcaggaauauc

SEQ ID NO: 550095 - RNA, 19 nt, Artificial Sequence
  Description of Artificial Sequence: Synthetic oligonucleotide
  Sense strand starting at position 3513 of SEQ ID NO: 318273
gcugaccucuucccuagaa

SEQ ID NO: 550096 - RNA, 19 nt, Artificial Sequence
  Description of Artificial Sequence: Synthetic oligonucleotide
  Antisense strand to SEQ ID NO: 550095
uucuagggaagaggucagc

SEQ ID NO: 550097 - RNA, 19 nt, Artificial Sequence
  Description of Artificial Sequence: Synthetic oligonucleotide
  Sense strand starting at position 65 of SEQ ID NO: 318274
ccgaaauggccuggaaacu

SEQ ID NO: 550098 - RNA, 19 nt, Artificial Sequence
  Description of Artificial Sequence: Synthetic oligonucleotide
  Antisense strand to SEQ ID NO: 550097
aguuuccaggccauuucgg

SEQ ID NO: 550099 - RNA, 19 nt, Artificial Sequence
  Description of Artificial Sequence: Synthetic oligonucleotide
  Sense strand starting at position 1148 of SEQ ID NO: 318274
uuuggucacggaugagaau

SEQ ID NO: 550100 - RNA, 19 nt, Artificial Sequence
  Description of Artificial Sequence: Synthetic oligonucleotide
  Antisense strand to SEQ ID NO: 550099
auucucauccgugaccaaa

SEQ ID NO: 550101 - RNA, 19 nt, Artificial Sequence
  Description of Artificial Sequence: Synthetic oligonucleotide
  Sense strand starting at position 1195 of SEQ ID NO: 318274
ccagccucacucgaaauua

SEQ ID NO: 550102 - RNA, 19 nt, Artificial Sequence
  Description of Artificial Sequence: Synthetic oligonucleotide
  Antisense strand to SEQ ID NO: 550101
uaauuucgagugaggcugg

SEQ ID NO: 550103 - RNA, 19 nt, Artificial Sequence
  Description of Artificial Sequence: Synthetic oligonucleotide
  Sense strand starting at position 1229 of SEQ ID NO: 318274
gcuuaaaucgacgcggguu

SEQ ID NO: 550104 - RNA, 19 nt, Artificial Sequence
  Description of Artificial Sequence: Synthetic oligonucleotide
  Antisense strand to SEQ ID NO: 550103
aacccgcgucgauuuaagc

SEQ ID NO: 550105 - RNA, 19 nt, Artificial Sequence
  Description of Artificial Sequence: Synthetic oligonucleotide
  Sense strand starting at position 1295 of SEQ ID NO: 318274
ccgugacuccuggaauauu

SEQ ID NO: 550106 - RNA, 19 nt, Artificial Sequence
  Description of Artificial Sequence: Synthetic oligonucleotide
  Antisense strand to SEQ ID NO: 550105
aauauuccaggagucacgg

SEQ ID NO: 550107 - RNA, 19 nt, Artificial Sequence
  Description of Artificial Sequence: Synthetic oligonucleotide
  Sense strand starting at position 1603 of SEQ ID NO: 318274
gcguuuccgcggaauaaag

SEQ ID NO: 550108 - RNA, 19 nt, Artificial Sequence
  Description of Artificial Sequence: Synthetic oligonucleotide
  Antisense strand to SEQ ID NO: 550107
cuuuauuccgcggaaacgc

SEQ ID NO: 550109 - RNA, 19 nt, Artificial Sequence
  Description of Artificial Sequence: Synthetic oligonucleotide
  Sense strand starting at position 2489 of SEQ ID NO: 318274
gggacuguuuccuccggaa

SEQ ID NO: 550110 - RNA, 19 nt, Artificial Sequence
  Description of Artificial Sequence: Synthetic oligonucleotide
  Antisense strand to SEQ ID NO: 550109
uuccggaggaaacaguccc

SEQ ID NO: 550111 - RNA, 19 nt, Artificial Sequence
  Description of Artificial Sequence: Synthetic oligonucleotide
  Sense strand starting at position 2491 of SEQ ID NO: 318274
gacuguuuccuccggaaag

SEQ ID NO: 550112 - RNA, 19 nt, Artificial Sequence
  Description of Artificial Sequence: Synthetic oligonucleotide
  Antisense strand to SEQ ID NO: 550111
cuuuccggaggaaacaguc

SEQ ID NO: 550113 - RNA, 19 nt, Artificial Sequence
  Description of Artificial Sequence: Synthetic oligonucleotide
  Sense strand starting at position 2493 of SEQ ID NO: 318274
cuguuuccuccggaaagag

SEQ ID NO: 550114 - RNA, 19 nt, Artificial Sequence
  Description of Artificial Sequence: Synthetic oligonucleotide
  Antisense strand to SEQ ID NO: 550113
cucuuuccggaggaaacag

SEQ ID NO: 550115 - RNA, 19 nt, Artificial Sequence
  Description of Artificial Sequence: Synthetic oligonucleotide
  Sense strand starting at position 2582 of SEQ ID NO: 318274
auuaaacuguugcuggaaa

SEQ ID NO: 550116 - RNA, 19 nt, Artificial Sequence
  Description of Artificial Sequence: Synthetic oligonucleotide
  Antisense strand to SEQ ID NO: 550115
uuuccagcaacaguuuaau

SEQ ID NO: 550117 - RNA, 19 nt, Artificial Sequence
  Description of Artificial Sequence: Synthetic oligonucleotide
  Sense strand starting at position 2611 of SEQ ID NO: 318274
gauguauugcuccaacgaa

SEQ ID NO: 550118 - RNA, 19 nt, Artificial Sequence
  Description of Artificial Sequence: Synthetic oligonucleotide
  Antisense strand to SEQ ID NO: 550117
uucguuggagcaauacauc

SEQ ID NO: 550119 - RNA, 19 nt, Artificial Sequence
  Description of Artificial Sequence: Synthetic oligonucleotide
  Sense strand starting at position 2675 of SEQ ID NO: 318274
guuucugaaucucuagauu

SEQ ID NO: 550120 - RNA, 19 nt, Artificial Sequence
  Description of Artificial Sequence: Synthetic oligonucleotide
  Antisense strand to SEQ ID NO: 550119
aaucuagagauucagaaac

SEQ ID NO: 550121 - RNA, 19 nt, Artificial Sequence
  Description of Artificial Sequence: Synthetic oligonucleotide
  Sense strand starting at position 2734 of SEQ ID NO: 318274
ugaacuacuguagguguua

SEQ ID NO: 550122 - RNA, 19 nt, Artificial Sequence
  Description of Artificial Sequence: Synthetic oligonucleotide
  Antisense strand to SEQ ID NO: 550121
uaacaccuacaguaguuca

SEQ ID NO: 550123 - RNA, 19 nt, Artificial Sequence
  Description of Artificial Sequence: Synthetic oligonucleotide
  Sense strand starting at position 2765 of SEQ ID NO: 318274
caggcuaaagugcauaaua

SEQ ID NO: 550124 - RNA, 19 nt, Artificial Sequence
  Description of Artificial Sequence: Synthetic oligonucleotide
  Antisense strand to SEQ ID NO: 550123
uauuaugcacuuuagccug

SEQ ID NO: 550125 - RNA, 19 nt, Artificial Sequence
  Description of Artificial Sequence: Synthetic oligonucleotide
  Sense strand starting at position 2767 of SEQ ID NO: 318274
ggcuaaagugcauaauaca

SEQ ID NO: 550126 - RNA, 19 nt, Artificial Sequence
  Description of Artificial Sequence: Synthetic oligonucleotide
  Antisense strand to SEQ ID NO: 550125
uguauuaugcacuuuagcc

SEQ ID NO: 550127 - RNA, 19 nt, Artificial Sequence
  Description of Artificial Sequence: Synthetic oligonucleotide
  Sense strand starting at position 2833 of SEQ ID NO: 318274
ucuugaggaccgggaaauu

SEQ ID NO: 550128 - RNA, 19 nt, Artificial Sequence
  Description of Artificial Sequence: Synthetic oligonucleotide
  Antisense strand to SEQ ID NO: 550127
aauuucccgguccucaaga

SEQ ID NO: 550129 - RNA, 19 nt, Artificial Sequence
  Description of Artificial Sequence: Synthetic oligonucleotide
  Sense strand starting at position 2863 of SEQ ID NO: 318274
ggcucuuuggccugagaaa

SEQ ID NO: 550130 - RNA, 19 nt, Artificial Sequence
  Description of Artificial Sequence: Synthetic oligonucleotide
  Antisense strand to SEQ ID NO: 550129
uuucucaggccaaagagcc

SEQ ID NO: 550131 - RNA, 19 nt, Artificial Sequence
  Description of Artificial Sequence: Synthetic oligonucleotide
  Sense strand starting at position 2907 of SEQ ID NO: 318274
ccuguagugcuuuaagaac

SEQ ID NO: 550132 - RNA, 19 nt, Artificial Sequence
  Description of Artificial Sequence: Synthetic oligonucleotide
  Antisense strand to SEQ ID NO: 550131
guucuuaaagcacuacagg

SEQ ID NO: 550133 - RNA, 19 nt, Artificial Sequence
  Description of Artificial Sequence: Synthetic oligonucleotide
  Sense strand starting at position 2913 of SEQ ID NO: 318274
gugcuuuaagaacaacacu

SEQ ID NO: 550134 - RNA, 19 nt, Artificial Sequence
  Description of Artificial Sequence: Synthetic oligonucleotide
  Antisense strand to SEQ ID NO: 550133
aguguuguucuuaaagcac

SEQ ID NO: 550135 - RNA, 19 nt, Artificial Sequence
  Description of Artificial Sequence: Synthetic oligonucleotide
  Sense strand starting at position 3007 of SEQ ID NO: 318274
gcuguauucuauuucuuga

SEQ ID NO: 550136 - RNA, 19 nt, Artificial Sequence
  Description of Artificial Sequence: Synthetic oligonucleotide
  Antisense strand to SEQ ID NO: 550135
ucaagaaauagaauacagc

SEQ ID NO: 550137 - RNA, 19 nt, Artificial Sequence
  Description of Artificial Sequence: Synthetic oligonucleotide
  Sense strand starting at position 3026 of SEQ ID NO: 318274
ucuggauucuguuuccaag

SEQ ID NO: 550138 - RNA, 19 nt, Artificial Sequence
  Description of Artificial Sequence: Synthetic oligonucleotide
  Antisense strand to SEQ ID NO: 550137
cuuggaaacagaauccaga

SEQ ID NO: 550139 - RNA, 19 nt, Artificial Sequence
  Description of Artificial Sequence: Synthetic oligonucleotide
  Sense strand starting at position 3063 of SEQ ID NO: 318274
acuuaacacuguguauauu

SEQ ID NO: 550140 - RNA, 19 nt, Artificial Sequence
  Description of Artificial Sequence: Synthetic oligonucleotide
  Antisense strand to SEQ ID NO: 550139
aauauacacaguguuaagu

SEQ ID NO: 550141 - RNA, 19 nt, Artificial Sequence
  Description of Artificial Sequence: Synthetic oligonucleotide
  Sense strand starting at position 3129 of SEQ ID NO: 318274
ggauguggcaauuauaguu

SEQ ID NO: 550142 - RNA, 19 nt, Artificial Sequence
  Description of Artificial Sequence: Synthetic oligonucleotide
  Antisense strand to SEQ ID NO: 550141
aacuauaauugccacaucc

SEQ ID NO: 550143 - RNA, 19 nt, Artificial Sequence
  Description of Artificial Sequence: Synthetic oligonucleotide
  Sense strand starting at position 3139 of SEQ ID NO: 318274
auuauaguucuuggcauuu

SEQ ID NO: 550144 - RNA, 19 nt, Artificial Sequence
  Description of Artificial Sequence: Synthetic oligonucleotide
  Antisense strand to SEQ ID NO: 550143
aaaugccaagaacuauaau

SEQ ID NO: 550145 - RNA, 19 nt, Artificial Sequence
  Description of Artificial Sequence: Synthetic oligonucleotide
  Sense strand starting at position 3221 of SEQ ID NO: 318274
cuggaaugucagcauugcu

SEQ ID NO: 550146 - RNA, 19 nt, Artificial Sequence
  Description of Artificial Sequence: Synthetic oligonucleotide
  Antisense strand to SEQ ID NO: 550145
agcaaugcugacauuccag

SEQ ID NO: 550147 - RNA, 19 nt, Artificial Sequence
  Description of Artificial Sequence: Synthetic oligonucleotide
  Sense strand starting at position 3226 of SEQ ID NO: 318274
augucagcauugcuaauaa

SEQ ID NO: 550148 - RNA, 19 nt, Artificial Sequence
  Description of Artificial Sequence: Synthetic oligonucleotide
  Antisense strand to SEQ ID NO: 550147
uuauuagcaaugcugacau

SEQ ID NO: 550149 - RNA, 19 nt, Artificial Sequence
  Description of Artificial Sequence: Synthetic oligonucleotide
  Sense strand starting at position 3284 of SEQ ID NO: 318274
aaugguuagagaugugacu

SEQ ID NO: 550150 - RNA, 19 nt, Artificial Sequence
  Description of Artificial Sequence: Synthetic oligonucleotide
  Antisense strand to SEQ ID NO: 550149
agucacaucucuaaccauu

SEQ ID NO: 550151 - RNA, 19 nt, Artificial Sequence
  Description of Artificial Sequence: Synthetic oligonucleotide
  Sense strand starting at position 3286 of SEQ ID NO: 318274
ugguuagagaugugacucu

SEQ ID NO: 550152 - RNA, 19 nt, Artificial Sequence
  Description of Artificial Sequence: Synthetic oligonucleotide
  Antisense strand to SEQ ID NO: 550151
agagucacaucucuaacca

SEQ ID NO: 550153 - RNA, 19 nt, Artificial Sequence
  Description of Artificial Sequence: Synthetic oligonucleotide
  Sense strand starting at position 3293 of SEQ ID NO: 318274
agaugugacucucccauac

SEQ ID NO: 550154 - RNA, 19 nt, Artificial Sequence
  Description of Artificial Sequence: Synthetic oligonucleotide
  Antisense strand to SEQ ID NO: 550153
guaugggagagucacaucu

SEQ ID NO: 550155 - RNA, 19 nt, Artificial Sequence
  Description of Artificial Sequence: Synthetic oligonucleotide
  Sense strand starting at position 3297 of SEQ ID NO: 318274
gugacucucccauacauua

SEQ ID NO: 550156 - RNA, 19 nt, Artificial Sequence
  Description of Artificial Sequence: Synthetic oligonucleotide
  Antisense strand to SEQ ID NO: 550155
uaauguaugggagagucac

SEQ ID NO: 550157 - RNA, 19 nt, Artificial Sequence
  Description of Artificial Sequence: Synthetic oligonucleotide
  Sense strand starting at position 3366 of SEQ ID NO: 318274
ugagguauuucagaugaug

SEQ ID NO: 550158 - RNA, 19 nt, Artificial Sequence
  Description of Artificial Sequence: Synthetic oligonucleotide
  Antisense strand to SEQ ID NO: 550157
caucaucugaaauaccuca

SEQ ID NO: 550159 - RNA, 19 nt, Artificial Sequence
  Description of Artificial Sequence: Synthetic oligonucleotide
  Sense strand starting at position 3386 of SEQ ID NO: 318274
cagcuuuaauggguaauua

SEQ ID NO: 550160 - RNA, 19 nt, Artificial Sequence
  Description of Artificial Sequence: Synthetic oligonucleotide
  Antisense strand to SEQ ID NO: 550159
uaauuacccauuaaagcug

SEQ ID NO: 550161 - RNA, 19 nt, Artificial Sequence
  Description of Artificial Sequence: Synthetic oligonucleotide
  Sense strand starting at position 3387 of SEQ ID NO: 318274
agcuuuaauggguaauuaa

SEQ ID NO: 550162 - RNA, 19 nt, Artificial Sequence
  Description of Artificial Sequence: Synthetic oligonucleotide
  Antisense strand to SEQ ID NO: 550161
uuaauuacccauuaaagcu

SEQ ID NO: 550163 - RNA, 19 nt, Artificial Sequence
  Description of Artificial Sequence: Synthetic oligonucleotide
  Sense strand starting at position 3446 of SEQ ID NO: 318274
gcuuuaauaugacuaugua

SEQ ID NO: 550164 - RNA, 19 nt, Artificial Sequence
  Description of Artificial Sequence: Synthetic oligonucleotide
  Antisense strand to SEQ ID NO: 550163
uacauagucauauuaaagc

SEQ ID NO: 550165 - RNA, 19 nt, Artificial Sequence
  Description of Artificial Sequence: Synthetic oligonucleotide
  Sense strand starting at position 3525 of SEQ ID NO: 318274
cuuaauguucccugucaga

SEQ ID NO: 550166 - RNA, 19 nt, Artificial Sequence
  Description of Artificial Sequence: Synthetic oligonucleotide
  Antisense strand to SEQ ID NO: 550165
ucugacagggaacauuaag

SEQ ID NO: 550167 - RNA, 19 nt, Artificial Sequence
  Description of Artificial Sequence: Synthetic oligonucleotide
  Sense strand starting at position 3535 of SEQ ID NO: 318274
ccugucagauuacugaaau

SEQ ID NO: 550168 - RNA, 19 nt, Artificial Sequence
  Description of Artificial Sequence: Synthetic oligonucleotide
  Antisense strand to SEQ ID NO: 550167
auuucaguaaucugacagg

SEQ ID NO: 550169 - RNA, 19 nt, Artificial Sequence
  Description of Artificial Sequence: Synthetic oligonucleotide
  Sense strand starting at position 3588 of SEQ ID NO: 318274
gggaacauuuccuaauacu

SEQ ID NO: 550170 - RNA, 19 nt, Artificial Sequence
  Description of Artificial Sequence: Synthetic oligonucleotide
  Antisense strand to SEQ ID NO: 550169
aguauuaggaaauguuccc

SEQ ID NO: 550171 - RNA, 19 nt, Artificial Sequence
  Description of Artificial Sequence: Synthetic oligonucleotide
  Sense strand starting at position 3616 of SEQ ID NO: 318274
guaaacacaugucuauuau

SEQ ID NO: 550172 - RNA, 19 nt, Artificial Sequence
  Description of Artificial Sequence: Synthetic oligonucleotide
  Antisense strand to SEQ ID NO: 550171
auaauagacauguguuuac

SEQ ID NO: 550173 - RNA, 19 nt, Artificial Sequence
  Description of Artificial Sequence: Synthetic oligonucleotide
  Sense strand starting at position 3754 of SEQ ID NO: 318274
uuaguauacucaccagauu

SEQ ID NO: 550174 - RNA, 19 nt, Artificial Sequence
  Description of Artificial Sequence: Synthetic oligonucleotide
  Antisense strand to SEQ ID NO: 550173
aaucuggugaguauacuaa

SEQ ID NO: 550175 - RNA, 19 nt, Artificial Sequence
  Description of Artificial Sequence: Synthetic oligonucleotide
  Sense strand starting at position 3757 of SEQ ID NO: 318274
guauacucaccagauugua

SEQ ID NO: 550176 - RNA, 19 nt, Artificial Sequence
  Description of Artificial Sequence: Synthetic oligonucleotide
  Antisense strand to SEQ ID NO: 550175
uacaaucuggugaguauac

SEQ ID NO: 550177 - RNA, 19 nt, Artificial Sequence
  Description of Artificial Sequence: Synthetic oligonucleotide
  Sense strand starting at position 202 of SEQ ID NO: 318275
gggaaugagcccugaaccu

SEQ ID NO: 550178 - RNA, 19 nt, Artificial Sequence
  Description of Artificial Sequence: Synthetic oligonucleotide
  Antisense strand to SEQ ID NO: 550177
agguucagggcucauuccc

SEQ ID NO: 550179 - RNA, 19 nt, Artificial Sequence
  Description of Artificial Sequence: Synthetic oligonucleotide
  Sense strand starting at position 276 of SEQ ID NO: 318275
acagcuauuguccacugua

SEQ ID NO: 550180 - RNA, 19 nt, Artificial Sequence
  Description of Artificial Sequence: Synthetic oligonucleotide
  Antisense strand to SEQ ID NO: 550179
uacaguggacaauagcugu

SEQ ID NO: 550181 - RNA, 19 nt, Artificial Sequence
  Description of Artificial Sequence: Synthetic oligonucleotide
  Sense strand starting at position 428 of SEQ ID NO: 318275
ugguuaaagcugcaaacua

SEQ ID NO: 550182 - RNA, 19 nt, Artificial Sequence
  Description of Artificial Sequence: Synthetic oligonucleotide
  Antisense strand to SEQ ID NO: 550181
uaguuugcagcuuuaacca

SEQ ID NO: 550183 - RNA, 19 nt, Artificial Sequence
  Description of Artificial Sequence: Synthetic oligonucleotide
  Sense strand starting at position 462 of SEQ ID NO: 318275
cccuaucaauguuugauag

SEQ ID NO: 550184 - RNA, 19 nt, Artificial Sequence
  Description of Artificial Sequence: Synthetic oligonucleotide
  Antisense strand to SEQ ID NO: 550183
cuaucaaacauugauaggg

SEQ ID NO: 550185 - RNA, 19 nt, Artificial Sequence
  Description of Artificial Sequence: Synthetic oligonucleotide
  Sense strand starting at position 636 of SEQ ID NO: 318275
gccacauauuacgugauuu

SEQ ID NO: 550186 - RNA, 19 nt, Artificial Sequence
  Description of Artificial Sequence: Synthetic oligonucleotide
  Antisense strand to SEQ ID NO: 550185
aaaucacguaauauguggc

SEQ ID NO: 550187 - RNA, 19 nt, Artificial Sequence
  Description of Artificial Sequence: Synthetic oligonucleotide
  Sense strand starting at position 716 of SEQ ID NO: 318275
uugcuuagggcugauggaa

SEQ ID NO: 550188 - RNA, 19 nt, Artificial Sequence
  Description of Artificial Sequence: Synthetic oligonucleotide
  Antisense strand to SEQ ID NO: 550187
uuccaucagcccuaagcaa

SEQ ID NO: 550189 - RNA, 19 nt, Artificial Sequence
  Description of Artificial Sequence: Synthetic oligonucleotide
  Sense strand starting at position 752 of SEQ ID NO: 318275
auggauagguuucuuugga

SEQ ID NO: 550190 - RNA, 19 nt, Artificial Sequence
  Description of Artificial Sequence: Synthetic oligonucleotide
  Antisense strand to SEQ ID NO: 550189
uccaaagaaaccuauccau

SEQ ID NO: 550191 - RNA, 19 nt, Artificial Sequence
  Description of Artificial Sequence: Synthetic oligonucleotide
  Sense strand starting at position 753 of SEQ ID NO: 318275
uggauagguuucuuuggag

SEQ ID NO: 550192 - RNA, 19 nt, Artificial Sequence
  Description of Artificial Sequence: Synthetic oligonucleotide
  Antisense strand to SEQ ID NO: 550191
cuccaaagaaaccuaucca

SEQ ID NO: 550193 - RNA, 19 nt, Artificial Sequence
  Description of Artificial Sequence: Synthetic oligonucleotide
  Sense strand starting at position 759 of SEQ ID NO: 318275
gguuucuuuggagaguaau

SEQ ID NO: 550194 - RNA, 19 nt, Artificial Sequence
  Description of Artificial Sequence: Synthetic oligonucleotide
  Antisense strand to SEQ ID NO: 550193
auuacucuccaaagaaacc

SEQ ID NO: 550195 - RNA, 19 nt, Artificial Sequence
  Description of Artificial Sequence: Synthetic oligonucleotide
  Sense strand starting at position 807 of SEQ ID NO: 318275
guucuacaacucugugaau

SEQ ID NO: 550196 - RNA, 19 nt, Artificial Sequence
  Description of Artificial Sequence: Synthetic oligonucleotide
  Antisense strand to SEQ ID NO: 550195
auucacagaguuguagaac

SEQ ID NO: 550197 - RNA, 19 nt, Artificial Sequence
  Description of Artificial Sequence: Synthetic oligonucleotide
  Sense strand starting at position 2018 of SEQ ID NO: 318275
gaguuauggcauuacuacu

SEQ ID NO: 550198 - RNA, 19 nt, Artificial Sequence
  Description of Artificial Sequence: Synthetic oligonucleotide
  Antisense strand to SEQ ID NO: 550197
aguaguaaugccauaacuc

SEQ ID NO: 550199 - RNA, 19 nt, Artificial Sequence
  Description of Artificial Sequence: Synthetic oligonucleotide
  Sense strand starting at position 2363 of SEQ ID NO: 318275
accaucuaauggguuaaau

SEQ ID NO: 550200 - RNA, 19 nt, Artificial Sequence
  Description of Artificial Sequence: Synthetic oligonucleotide
  Antisense strand to SEQ ID NO: 550199
auuuaacccauuagauggu

SEQ ID NO: 550201 - RNA, 19 nt, Artificial Sequence
  Description of Artificial Sequence: Synthetic oligonucleotide
  Sense strand starting at position 2411 of SEQ ID NO: 318275
gcaucuauaaaugguggaa

SEQ ID NO: 550202 - RNA, 19 nt, Artificial Sequence
  Description of Artificial Sequence: Synthetic oligonucleotide
  Antisense strand to SEQ ID NO: 550201
uuccaccauuuauagaugc

SEQ ID NO: 550203 - RNA, 19 nt, Artificial Sequence
  Description of Artificial Sequence: Synthetic oligonucleotide
  Sense strand starting at position 2465 of SEQ ID NO: 318275
cuucgaaacugagcacaau

SEQ ID NO: 550204 - RNA, 19 nt, Artificial Sequence
  Description of Artificial Sequence: Synthetic oligonucleotide
  Antisense strand to SEQ ID NO: 550203
auugugcucaguuucgaag

SEQ ID NO: 550205 - RNA, 19 nt, Artificial Sequence
  Description of Artificial Sequence: Synthetic oligonucleotide
  Sense strand starting at position 2466 of SEQ ID NO: 318275
uucgaaacugagcacaauu

SEQ ID NO: 550206 - RNA, 19 nt, Artificial Sequence
  Description of Artificial Sequence: Synthetic oligonucleotide
  Antisense strand to SEQ ID NO: 550205
aauugugcucaguuucgaa

SEQ ID NO: 550207 - RNA, 19 nt, Artificial Sequence
  Description of Artificial Sequence: Synthetic oligonucleotide
  Sense strand starting at position 2640 of SEQ ID NO: 318275
gugggagugacguaugaca

SEQ ID NO: 550208 - RNA, 19 nt, Artificial Sequence
  Description of Artificial Sequence: Synthetic oligonucleotide
  Antisense strand to SEQ ID NO: 550207
ugucauacgucacucccac

SEQ ID NO: 550209 - RNA, 19 nt, Artificial Sequence
  Description of Artificial Sequence: Synthetic oligonucleotide
  Sense strand starting at position 2689 of SEQ ID NO: 318275
ugguguggugcugauaaca

SEQ ID NO: 550210 - RNA, 19 nt, Artificial Sequence
  Description of Artificial Sequence: Synthetic oligonucleotide
  Antisense strand to SEQ ID NO: 550209
uguuaucagcaccacacca

SEQ ID NO: 550211 - RNA, 19 nt, Artificial Sequence
  Description of Artificial Sequence: Synthetic oligonucleotide
  Sense strand starting at position 2813 of SEQ ID NO: 318275
aagggagggcuuugaaagu

SEQ ID NO: 550212 - RNA, 19 nt, Artificial Sequence
  Description of Artificial Sequence: Synthetic oligonucleotide
  Antisense strand to SEQ ID NO: 550211
acuuucaaagcccucccuu

SEQ ID NO: 550213 - RNA, 19 nt, Artificial Sequence
  Description of Artificial Sequence: Synthetic oligonucleotide
  Sense strand starting at position 2978 of SEQ ID NO: 318275
cuaggugugaggcaacaau

SEQ ID NO: 550214 - RNA, 19 nt, Artificial Sequence
  Description of Artificial Sequence: Synthetic oligonucleotide
  Antisense strand to SEQ ID NO: 550213
auuguugccucacaccuag

SEQ ID NO: 550215 - RNA, 19 nt, Artificial Sequence
  Description of Artificial Sequence: Synthetic oligonucleotide
  Sense strand starting at position 3102 of SEQ ID NO: 318275
gacccuccaugguugauua

SEQ ID NO: 550216 - RNA, 19 nt, Artificial Sequence
  Description of Artificial Sequence: Synthetic oligonucleotide
  Antisense strand to SEQ ID NO: 550215
uaaucaaccauggaggguc

SEQ ID NO: 550217 - RNA, 19 nt, Artificial Sequence
  Description of Artificial Sequence: Synthetic oligonucleotide
  Sense strand starting at position 3110 of SEQ ID NO: 318275
augguugauuagucacuuu

SEQ ID NO: 550218 - RNA, 19 nt, Artificial Sequence
  Description of Artificial Sequence: Synthetic oligonucleotide
  Antisense strand to SEQ ID NO: 550217
aaagugacuaaucaaccau

SEQ ID NO: 550219 - RNA, 19 nt, Artificial Sequence
  Description of Artificial Sequence: Synthetic oligonucleotide
  Sense strand starting at position 3113 of SEQ ID NO: 318275
guugauuagucacuuuaca

SEQ ID NO: 550220 - RNA, 19 nt, Artificial Sequence
  Description of Artificial Sequence: Synthetic oligonucleotide
  Antisense strand to SEQ ID NO: 550219
uguaaagugacuaaucaac

SEQ ID NO: 550221 - RNA, 19 nt, Artificial Sequence
  Description of Artificial Sequence: Synthetic oligonucleotide
  Sense strand starting at position 3159 of SEQ ID NO: 318275
gaaguaauaugcucaaggu

SEQ ID NO: 550222 - RNA, 19 nt, Artificial Sequence
  Description of Artificial Sequence: Synthetic oligonucleotide
  Antisense strand to SEQ ID NO: 550221
accuugagcauauuacuuc

SEQ ID NO: 550223 - RNA, 19 nt, Artificial Sequence
  Description of Artificial Sequence: Synthetic oligonucleotide
  Sense strand starting at position 3160 of SEQ ID NO: 318275
aaguaauaugcucaagguu

SEQ ID NO: 550224 - RNA, 19 nt, Artificial Sequence
  Description of Artificial Sequence: Synthetic oligonucleotide
  Antisense strand to SEQ ID NO: 550223
aaccuugagcauauuacuu

SEQ ID NO: 550225 - RNA, 19 nt, Artificial Sequence
  Description of Artificial Sequence: Synthetic oligonucleotide
  Sense strand starting at position 3174 of SEQ ID NO: 318275
agguuauauggaugucagu

SEQ ID NO: 550226 - RNA, 19 nt, Artificial Sequence
  Description of Artificial Sequence: Synthetic oligonucleotide
  Antisense strand to SEQ ID NO: 550225
acugacauccauauaaccu

SEQ ID NO: 550227 - RNA, 19 nt, Artificial Sequence
  Description of Artificial Sequence: Synthetic oligonucleotide
  Sense strand starting at position 3180 of SEQ ID NO: 318275
uauggaugucagugaguca

SEQ ID NO: 550228 - RNA, 19 nt, Artificial Sequence
  Description of Artificial Sequence: Synthetic oligonucleotide
  Antisense strand to SEQ ID NO: 550227
ugacucacugacauccaua

SEQ ID NO: 550229 - RNA, 19 nt, Artificial Sequence
  Description of Artificial Sequence: Synthetic oligonucleotide
  Sense strand starting at position 3238 of SEQ ID NO: 318275
ucacuaugcuaguuugaaa

SEQ ID NO: 550230 - RNA, 19 nt, Artificial Sequence
  Description of Artificial Sequence: Synthetic oligonucleotide
  Antisense strand to SEQ ID NO: 550229
uuucaaacuagcauaguga

SEQ ID NO: 550231 - RNA, 19 nt, Artificial Sequence
  Description of Artificial Sequence: Synthetic oligonucleotide
  Sense strand starting at position 3395 of SEQ ID NO: 318275
agacaagucucagcaagau

SEQ ID NO: 550232 - RNA, 19 nt, Artificial Sequence
  Description of Artificial Sequence: Synthetic oligonucleotide
  Antisense strand to SEQ ID NO: 550231
aucuugcugagacuugucu

SEQ ID NO: 550233 - RNA, 19 nt, Artificial Sequence
  Description of Artificial Sequence: Synthetic oligonucleotide
  Sense strand starting at position 3403 of SEQ ID NO: 318275
cucagcaagaugugguaaa

SEQ ID NO: 550234 - RNA, 19 nt, Artificial Sequence
  Description of Artificial Sequence: Synthetic oligonucleotide
  Antisense strand to SEQ ID NO: 550233
uuuaccacaucuugcugag

SEQ ID NO: 550235 - RNA, 19 nt, Artificial Sequence
  Description of Artificial Sequence: Synthetic oligonucleotide
  Sense strand starting at position 3436 of SEQ ID NO: 318275
accuauaaagcuugaggau

SEQ ID NO: 550236 - RNA, 19 nt, Artificial Sequence
  Description of Artificial Sequence: Synthetic oligonucleotide
  Antisense strand to SEQ ID NO: 550235
auccucaagcuuuauaggu

SEQ ID NO: 550237 - RNA, 19 nt, Artificial Sequence
  Description of Artificial Sequence: Synthetic oligonucleotide
  Sense strand starting at position 3445 of SEQ ID NO: 318275
gcuugaggauuauucuaga

SEQ ID NO: 550238 - RNA, 19 nt, Artificial Sequence
  Description of Artificial Sequence: Synthetic oligonucleotide
  Antisense strand to SEQ ID NO: 550237
ucuagaauaauccucaagc

SEQ ID NO: 550239 - RNA, 19 nt, Artificial Sequence
  Description of Artificial Sequence: Synthetic oligonucleotide
  Sense strand starting at position 3528 of SEQ ID NO: 318275
cuuagcuauguugaaccaa

SEQ ID NO: 550240 - RNA, 19 nt, Artificial Sequence
  Description of Artificial Sequence: Synthetic oligonucleotide
  Antisense strand to SEQ ID NO: 550239
uugguucaacauagcuaag

SEQ ID NO: 550241 - RNA, 19 nt, Artificial Sequence
  Description of Artificial Sequence: Synthetic oligonucleotide
  Sense strand starting at position 3562 of SEQ ID NO: 318275
agguuauaccagugauuag

SEQ ID NO: 550242 - RNA, 19 nt, Artificial Sequence
  Description of Artificial Sequence: Synthetic oligonucleotide
  Antisense strand to SEQ ID NO: 550241
cuaaucacugguauaaccu

SEQ ID NO: 550243 - RNA, 19 nt, Artificial Sequence
  Description of Artificial Sequence: Synthetic oligonucleotide
  Sense strand starting at position 3563 of SEQ ID NO: 318275
gguuauaccagugauuagu

SEQ ID NO: 550244 - RNA, 19 nt, Artificial Sequence
  Description of Artificial Sequence: Synthetic oligonucleotide
  Antisense strand to SEQ ID NO: 550243
acuaaucacugguauaacc

SEQ ID NO: 550245 - RNA, 19 nt, Artificial Sequence
  Description of Artificial Sequence: Synthetic oligonucleotide
  Sense strand starting at position 3616 of SEQ ID NO: 318275
auuccaugugagcaggaau

SEQ ID NO: 550246 - RNA, 19 nt, Artificial Sequence
  Description of Artificial Sequence: Synthetic oligonucleotide
  Antisense strand to SEQ ID NO: 550245
auuccugcucacauggaau

SEQ ID NO: 550247 - RNA, 19 nt, Artificial Sequence
  Description of Artificial Sequence: Synthetic oligonucleotide
  Sense strand starting at position 3676 of SEQ ID NO: 318275
auaguagacguccagauaa

SEQ ID NO: 550248 - RNA, 19 nt, Artificial Sequence
  Description of Artificial Sequence: Synthetic oligonucleotide
  Antisense strand to SEQ ID NO: 550247
uuaucuggacgucuacuau

SEQ ID NO: 550249 - RNA, 19 nt, Artificial Sequence
  Description of Artificial Sequence: Synthetic oligonucleotide
  Sense strand starting at position 3678 of SEQ ID NO: 318275
aguagacguccagauaauu

SEQ ID NO: 550250 - RNA, 19 nt, Artificial Sequence
  Description of Artificial Sequence: Synthetic oligonucleotide
  Antisense strand to SEQ ID NO: 550249
aauuaucuggacgucuacu

SEQ ID NO: 550251 - RNA, 19 nt, Artificial Sequence
  Description of Artificial Sequence: Synthetic oligonucleotide
  Sense strand starting at position 3784 of SEQ ID NO: 318275
guaucagaguaacuuuaaa

SEQ ID NO: 550252 - RNA, 19 nt, Artificial Sequence
  Description of Artificial Sequence: Synthetic oligonucleotide
  Antisense strand to SEQ ID NO: 550251
uuuaaaguuacucugauac

SEQ ID NO: 550253 - RNA, 19 nt, Artificial Sequence
  Description of Artificial Sequence: Synthetic oligonucleotide
  Sense strand starting at position 3802 of SEQ ID NO: 318275
aagguaugaucccugaaug

SEQ ID NO: 550254 - RNA, 19 nt, Artificial Sequence
  Description of Artificial Sequence: Synthetic oligonucleotide
  Antisense strand to SEQ ID NO: 550253
cauucagggaucauaccuu

SEQ ID NO: 550255 - RNA, 19 nt, Artificial Sequence
  Description of Artificial Sequence: Synthetic oligonucleotide
  Sense strand starting at position 3803 of SEQ ID NO: 318275
agguaugaucccugaauga

SEQ ID NO: 550256 - RNA, 19 nt, Artificial Sequence
  Description of Artificial Sequence: Synthetic oligonucleotide
  Antisense strand to SEQ ID NO: 550255
ucauucagggaucauaccu

SEQ ID NO: 550257 - RNA, 19 nt, Artificial Sequence
  Description of Artificial Sequence: Synthetic oligonucleotide
  Sense strand starting at position 677 of SEQ ID NO: 318276
uuuggucacggaugagaau

SEQ ID NO: 550258 - RNA, 19 nt, Artificial Sequence
  Description of Artificial Sequence: Synthetic oligonucleotide
  Antisense strand to SEQ ID NO: 550257
auucucauccgugaccaaa

SEQ ID NO: 550259 - RNA, 19 nt, Artificial Sequence
  Description of Artificial Sequence: Synthetic oligonucleotide
  Sense strand starting at position 724 of SEQ ID NO: 318276
ccagccucacucgaaauua

SEQ ID NO: 550260 - RNA, 19 nt, Artificial Sequence
  Description of Artificial Sequence: Synthetic oligonucleotide
  Antisense strand to SEQ ID NO: 550259
uaauuucgagugaggcugg

SEQ ID NO: 550261 - RNA, 19 nt, Artificial Sequence
  Description of Artificial Sequence: Synthetic oligonucleotide
  Sense strand starting at position 758 of SEQ ID NO: 318276
gcuuaaaucgacgcggguu

SEQ ID NO: 550262 - RNA, 19 nt, Artificial Sequence
  Description of Artificial Sequence: Synthetic oligonucleotide
  Antisense strand to SEQ ID NO: 550261
aacccgcgucgauuuaagc

SEQ ID NO: 550263 - RNA, 19 nt, Artificial Sequence
  Description of Artificial Sequence: Synthetic oligonucleotide
  Sense strand starting at position 824 of SEQ ID NO: 318276
ccgugacuccuggaauauu

SEQ ID NO: 550264 - RNA, 19 nt, Artificial Sequence
  Description of Artificial Sequence: Synthetic oligonucleotide
  Antisense strand to SEQ ID NO: 550263
aauauuccaggagucacgg

SEQ ID NO: 550265 - RNA, 19 nt, Artificial Sequence
  Description of Artificial Sequence: Synthetic oligonucleotide
  Sense strand starting at position 1132 of SEQ ID NO: 318276
gcguuuccgcggaauaaag

SEQ ID NO: 550266 - RNA, 19 nt, Artificial Sequence
  Description of Artificial Sequence: Synthetic oligonucleotide
  Antisense strand to SEQ ID NO: 550265
cuuuauuccgcggaaacgc

SEQ ID NO: 550267 - RNA, 19 nt, Artificial Sequence
  Description of Artificial Sequence: Synthetic oligonucleotide
  Sense strand starting at position 2018 of SEQ ID NO: 318276
gggacuguuuccuccggaa

SEQ ID NO: 550268 - RNA, 19 nt, Artificial Sequence
  Description of Artificial Sequence: Synthetic oligonucleotide
  Antisense strand to SEQ ID NO: 550267
uuccggaggaaacaguccc

SEQ ID NO: 550269 - RNA, 19 nt, Artificial Sequence
  Description of Artificial Sequence: Synthetic oligonucleotide
  Sense strand starting at position 2020 of SEQ ID NO: 318276
gacuguuuccuccggaaag

SEQ ID NO: 550270 - RNA, 19 nt, Artificial Sequence
  Description of Artificial Sequence: Synthetic oligonucleotide
  Antisense strand to SEQ ID NO: 550269
cuuuccggaggaaacaguc

SEQ ID NO: 550271 - RNA, 19 nt, Artificial Sequence
  Description of Artificial Sequence: Synthetic oligonucleotide
  Sense strand starting at position 2022 of SEQ ID NO: 318276
cuguuuccuccggaaagag

SEQ ID NO: 550272 - RNA, 19 nt, Artificial Sequence
  Description of Artificial Sequence: Synthetic oligonucleotide
  Antisense strand to SEQ ID NO: 550271
cucuuuccggaggaaacag

SEQ ID NO: 550273 - RNA, 19 nt, Artificial Sequence
  Description of Artificial Sequence: Synthetic oligonucleotide
  Sense strand starting at position 2111 of SEQ ID NO: 318276
auuaaacuguugcuggaaa

SEQ ID NO: 550274 - RNA, 19 nt, Artificial Sequence
  Description of Artificial Sequence: Synthetic oligonucleotide
  Antisense strand to SEQ ID NO: 550273
uuuccagcaacaguuuaau

SEQ ID NO: 550275 - RNA, 19 nt, Artificial Sequence
  Description of Artificial Sequence: Synthetic oligonucleotide
  Sense strand starting at position 2140 of SEQ ID NO: 318276
gauguauugcuccaacgaa

SEQ ID NO: 550276 - RNA, 19 nt, Artificial Sequence
  Description of Artificial Sequence: Synthetic oligonucleotide
  Antisense strand to SEQ ID NO: 550275
uucguuggagcaauacauc

SEQ ID NO: 550277 - RNA, 19 nt, Artificial Sequence
  Description of Artificial Sequence: Synthetic oligonucleotide
  Sense strand starting at position 2204 of SEQ ID NO: 318276
guuucugaaucucuagauu

SEQ ID NO: 550278 - RNA, 19 nt, Artificial Sequence
  Description of Artificial Sequence: Synthetic oligonucleotide
  Antisense strand to SEQ ID NO: 550277
aaucuagagauucagaaac

SEQ ID NO: 550279 - RNA, 19 nt, Artificial Sequence
  Description of Artificial Sequence: Synthetic oligonucleotide
  Sense strand starting at position 2263 of SEQ ID NO: 318276
ugaacuacuguagguguua

SEQ ID NO: 550280 - RNA, 19 nt, Artificial Sequence
  Description of Artificial Sequence: Synthetic oligonucleotide
  Antisense strand to SEQ ID NO: 550279
uaacaccuacaguaguuca

SEQ ID NO: 550281 - RNA, 19 nt, Artificial Sequence
  Description of Artificial Sequence: Synthetic oligonucleotide
  Sense strand starting at position 2294 of SEQ ID NO: 318276
caggcuaaagugcauaaua

SEQ ID NO: 550282 - RNA, 19 nt, Artificial Sequence
  Description of Artificial Sequence: Synthetic oligonucleotide
  Antisense strand to SEQ ID NO: 550281
uauuaugcacuuuagccug

SEQ ID NO: 550283 - RNA, 19 nt, Artificial Sequence
  Description of Artificial Sequence: Synthetic oligonucleotide
  Sense strand starting at position 2296 of SEQ ID NO: 318276
ggcuaaagugcauaauaca

SEQ ID NO: 550284 - RNA, 19 nt, Artificial Sequence
  Description of Artificial Sequence: Synthetic oligonucleotide
  Antisense strand to SEQ ID NO: 550283
uguauuaugcacuuuagcc

SEQ ID NO: 550285 - RNA, 19 nt, Artificial Sequence
  Description of Artificial Sequence: Synthetic oligonucleotide
  Sense strand starting at position 2362 of SEQ ID NO: 318276
ucuugaggaccgggaaauu

SEQ ID NO: 550286 - RNA, 19 nt, Artificial Sequence
  Description of Artificial Sequence: Synthetic oligonucleotide
  Antisense strand to SEQ ID NO: 550285
aauuucccgguccucaaga

SEQ ID NO: 550287 - RNA, 19 nt, Artificial Sequence
  Description of Artificial Sequence: Synthetic oligonucleotide
  Sense strand starting at position 2392 of SEQ ID NO: 318276
ggcucuuuggccugagaaa

SEQ ID NO: 550288 - RNA, 19 nt, Artificial Sequence
  Description of Artificial Sequence: Synthetic oligonucleotide
  Antisense strand to SEQ ID NO: 550287
uuucucaggccaaagagcc

SEQ ID NO: 550289 - RNA, 19 nt, Artificial Sequence
  Description of Artificial Sequence: Synthetic oligonucleotide
  Sense strand starting at position 2436 of SEQ ID NO: 318276
ccuguagugcuuuaagaac

SEQ ID NO: 550290 - RNA, 19 nt, Artificial Sequence
  Description of Artificial Sequence: Synthetic oligonucleotide
  Antisense strand to SEQ ID NO: 550289
guucuuaaagcacuacagg

SEQ ID NO: 550291 - RNA, 19 nt, Artificial Sequence
  Description of Artificial Sequence: Synthetic oligonucleotide
  Sense strand starting at position 2442 of SEQ ID NO: 318276
gugcuuuaagaacaacacu

SEQ ID NO: 550292 - RNA, 19 nt, Artificial Sequence
  Description of Artificial Sequence: Synthetic oligonucleotide
  Antisense strand to SEQ ID NO: 550291
aguguuguucuuaaagcac

SEQ ID NO: 550293 - RNA, 19 nt, Artificial Sequence
  Description of Artificial Sequence: Synthetic oligonucleotide
  Sense strand starting at position 2536 of SEQ ID NO: 318276
gcuguauucuauuucuuga

SEQ ID NO: 550294 - RNA, 19 nt, Artificial Sequence
  Description of Artificial Sequence: Synthetic oligonucleotide
  Antisense strand to SEQ ID NO: 550293
ucaagaaauagaauacagc

SEQ ID NO: 550295 - RNA, 19 nt, Artificial Sequence
  Description of Artificial Sequence: Synthetic oligonucleotide
  Sense strand starting at position 2555 of SEQ ID NO: 318276
ucuggauucuguuuccaag

SEQ ID NO: 550296 - RNA, 19 nt, Artificial Sequence
  Description of Artificial Sequence: Synthetic oligonucleotide
  Antisense strand to SEQ ID NO: 550295
cuuggaaacagaauccaga

SEQ ID NO: 550297 - RNA, 19 nt, Artificial Sequence
  Description of Artificial Sequence: Synthetic oligonucleotide
  Sense strand starting at position 2592 of SEQ ID NO: 318276
acuuaacacuguguauauu

SEQ ID NO: 550298 - RNA, 19 nt, Artificial Sequence
  Description of Artificial Sequence: Synthetic oligonucleotide
  Antisense strand to SEQ ID NO: 550297
aauauacacaguguuaagu

SEQ ID NO: 550299 - RNA, 19 nt, Artificial Sequence
  Description of Artificial Sequence: Synthetic oligonucleotide
  Sense strand starting at position 2658 of SEQ ID NO: 318276
ggauguggcaauuauaguu

SEQ ID NO: 550300 - RNA, 19 nt, Artificial Sequence
  Description of Artificial Sequence: Synthetic oligonucleotide
  Antisense strand to SEQ ID NO: 550299
aacuauaauugccacaucc

SEQ ID NO: 550301 - RNA, 19 nt, Artificial Sequence
  Description of Artificial Sequence: Synthetic oligonucleotide
  Sense strand starting at position 2668 of SEQ ID NO: 318276
auuauaguucuuggcauuu

SEQ ID NO: 550302 - RNA, 19 nt, Artificial Sequence
  Description of Artificial Sequence: Synthetic oligonucleotide
  Antisense strand to SEQ ID NO: 550301
aaaugccaagaacuauaau

SEQ ID NO: 550303 - RNA, 19 nt, Artificial Sequence
  Description of Artificial Sequence: Synthetic oligonucleotide
  Sense strand starting at position 2750 of SEQ ID NO: 318276
cuggaaugucagcauugcu

SEQ ID NO: 550304 - RNA, 19 nt, Artificial Sequence
  Description of Artificial Sequence: Synthetic oligonucleotide
  Antisense strand to SEQ ID NO: 550303
agcaaugcugacauuccag

SEQ ID NO: 550305 - RNA, 19 nt, Artificial Sequence
  Description of Artificial Sequence: Synthetic oligonucleotide
  Sense strand starting at position 2813 of SEQ ID NO: 318276
aaugguuagagaugugacu

SEQ ID NO: 550306 - RNA, 19 nt, Artificial Sequence
  Description of Artificial Sequence: Synthetic oligonucleotide
  Antisense strand to SEQ ID NO: 550305
agucacaucucuaaccauu

SEQ ID NO: 550307 - RNA, 19 nt, Artificial Sequence
  Description of Artificial Sequence: Synthetic oligonucleotide
  Sense strand starting at position 2815 of SEQ ID NO: 318276
ugguuagagaugugacucu

SEQ ID NO: 550308 - RNA, 19 nt, Artificial Sequence
  Description of Artificial Sequence: Synthetic oligonucleotide
  Antisense strand to SEQ ID NO: 550307
agagucacaucucuaacca

SEQ ID NO: 550309 - RNA, 19 nt, Artificial Sequence
  Description of Artificial Sequence: Synthetic oligonucleotide
  Sense strand starting at position 2822 of SEQ ID NO: 318276
agaugugacucucccauac

SEQ ID NO: 550310 - RNA, 19 nt, Artificial Sequence
  Description of Artificial Sequence: Synthetic oligonucleotide
  Antisense strand to SEQ ID NO: 550309
guaugggagagucacaucu

SEQ ID NO: 550311 - RNA, 19 nt, Artificial Sequence
  Description of Artificial Sequence: Synthetic oligonucleotide
  Sense strand starting at position 2826 of SEQ ID NO: 318276
gugacucucccauacauua

SEQ ID NO: 550312 - RNA, 19 nt, Artificial Sequence
  Description of Artificial Sequence: Synthetic oligonucleotide
  Antisense strand to SEQ ID NO: 550311
uaauguaugggagagucac

SEQ ID NO: 550313 - RNA, 19 nt, Artificial Sequence
  Description of Artificial Sequence: Synthetic oligonucleotide
  Sense strand starting at position 2895 of SEQ ID NO: 318276
ugagguauuucagaugaug

SEQ ID NO: 550314 - RNA, 19 nt, Artificial Sequence
  Description of Artificial Sequence: Synthetic oligonucleotide
  Antisense strand to SEQ ID NO: 550313
caucaucugaaauaccuca

SEQ ID NO: 550315 - RNA, 19 nt, Artificial Sequence
  Description of Artificial Sequence: Synthetic oligonucleotide
  Sense strand starting at position 2915 of SEQ ID NO: 318276
cagcuuuaauggguaauua

SEQ ID NO: 550316 - RNA, 19 nt, Artificial Sequence
  Description of Artificial Sequence: Synthetic oligonucleotide
  Antisense strand to SEQ ID NO: 550315
uaauuacccauuaaagcug

SEQ ID NO: 550317 - RNA, 19 nt, Artificial Sequence
  Description of Artificial Sequence: Synthetic oligonucleotide
  Sense strand starting at position 2916 of SEQ ID NO: 318276
agcuuuaauggguaauuaa

SEQ ID NO: 550318 - RNA, 19 nt, Artificial Sequence
  Description of Artificial Sequence: Synthetic oligonucleotide
  Antisense strand to SEQ ID NO: 550317
uuaauuacccauuaaagcu

SEQ ID NO: 550319 - RNA, 19 nt, Artificial Sequence
  Description of Artificial Sequence: Synthetic oligonucleotide
  Sense strand starting at position 2975 of SEQ ID NO: 318276
gcuuuaauaugacuaugua

SEQ ID NO: 550320 - RNA, 19 nt, Artificial Sequence
  Description of Artificial Sequence: Synthetic oligonucleotide
  Antisense strand to SEQ ID NO: 550319
uacauagucauauuaaagc

SEQ ID NO: 550321 - RNA, 19 nt, Artificial Sequence
  Description of Artificial Sequence: Synthetic oligonucleotide
  Sense strand starting at position 3054 of SEQ ID NO: 318276
cuuaauguucccugucaga

SEQ ID NO: 550322 - RNA, 19 nt, Artificial Sequence
  Description of Artificial Sequence: Synthetic oligonucleotide
  Antisense strand to SEQ ID NO: 550321
ucugacagggaacauuaag

SEQ ID NO: 550323 - RNA, 19 nt, Artificial Sequence
  Description of Artificial Sequence: Synthetic oligonucleotide
  Sense strand starting at position 3064 of SEQ ID NO: 318276
ccugucagauuacugaaau

SEQ ID NO: 550324 - RNA, 19 nt, Artificial Sequence
  Description of Artificial Sequence: Synthetic oligonucleotide
  Antisense strand to SEQ ID NO: 550323
auuucaguaaucugacagg

SEQ ID NO: 550325 - RNA, 19 nt, Artificial Sequence
  Description of Artificial Sequence: Synthetic oligonucleotide
  Sense strand starting at position 3117 of SEQ ID NO: 318276
gggaacauuuccuaauacu

SEQ ID NO: 550326 - RNA, 19 nt, Artificial Sequence
  Description of Artificial Sequence: Synthetic oligonucleotide
  Antisense strand to SEQ ID NO: 550325
aguauuaggaaauguuccc

SEQ ID NO: 550327 - RNA, 19 nt, Artificial Sequence
  Description of Artificial Sequence: Synthetic oligonucleotide
  Sense strand starting at position 3145 of SEQ ID NO: 318276
guaaacacaugucuauuau

SEQ ID NO: 550328 - RNA, 19 nt, Artificial Sequence
  Description of Artificial Sequence: Synthetic oligonucleotide
  Antisense strand to SEQ ID NO: 550327
auaauagacauguguuuac

SEQ ID NO: 550329 - RNA, 19 nt, Artificial Sequence
  Description of Artificial Sequence: Synthetic oligonucleotide
  Sense strand starting at position 3283 of SEQ ID NO: 318276
uuaguauacucaccagauu

SEQ ID NO: 550330 - RNA, 19 nt, Artificial Sequence
  Description of Artificial Sequence: Synthetic oligonucleotide
  Antisense strand to SEQ ID NO: 550329
aaucuggugaguauacuaa

SEQ ID NO: 550331 - RNA, 19 nt, Artificial Sequence
  Description of Artificial Sequence: Synthetic oligonucleotide
  Sense strand starting at position 3286 of SEQ ID NO: 318276
guauacucaccagauugua

SEQ ID NO: 550332 - RNA, 19 nt, Artificial Sequence
  Description of Artificial Sequence: Synthetic oligonucleotide
  Antisense strand to SEQ ID NO: 550331
uacaaucuggugaguauac

SEQ ID NO: 550333 - RNA, 19 nt, Artificial Sequence
  Description of Artificial Sequence: Synthetic oligonucleotide
  Sense strand starting at position 3597 of SEQ ID NO: 318276
guaucacauuucguuuaau

SEQ ID NO: 550334 - RNA, 19 nt, Artificial Sequence
  Description of Artificial Sequence: Synthetic oligonucleotide
  Antisense strand to SEQ ID NO: 550333
auuaaacgaaaugugauac

SEQ ID NO: 550335 - RNA, 19 nt, Artificial Sequence
  Description of Artificial Sequence: Synthetic oligonucleotide
  Sense strand starting at position 3945 of SEQ ID NO: 318276
ugugaaacuuacuuucuag

SEQ ID NO: 550336 - RNA, 19 nt, Artificial Sequence
  Description of Artificial Sequence: Synthetic oligonucleotide
  Antisense strand to SEQ ID NO: 550335
cuagaaaguaaguuucaca

SEQ ID NO: 550337 - RNA, 19 nt, Artificial Sequence
  Description of Artificial Sequence: Synthetic oligonucleotide
  Sense strand starting at position 211 of SEQ ID NO: 318277
uugaguuuccgaugagaca

SEQ ID NO: 550338 - RNA, 19 nt, Artificial Sequence
  Description of Artificial Sequence: Synthetic oligonucleotide
  Antisense strand to SEQ ID NO: 550337
ugucucaucggaaacucaa

SEQ ID NO: 550339 - RNA, 19 nt, Artificial Sequence
  Description of Artificial Sequence: Synthetic oligonucleotide
  Sense strand starting at position 212 of SEQ ID NO: 318277
ugaguuuccgaugagacau

SEQ ID NO: 550340 - RNA, 19 nt, Artificial Sequence
  Description of Artificial Sequence: Synthetic oligonucleotide
  Antisense strand to SEQ ID NO: 550339
augucucaucggaaacuca

SEQ ID NO: 550341 - RNA, 19 nt, Artificial Sequence
  Description of Artificial Sequence: Synthetic oligonucleotide
  Sense strand starting at position 273 of SEQ ID NO: 318277
gagggcugacuuugaaaga

SEQ ID NO: 550342 - RNA, 19 nt, Artificial Sequence
  Description of Artificial Sequence: Synthetic oligonucleotide
  Antisense strand to SEQ ID NO: 550341
ucuuucaaagucagcccuc

SEQ ID NO: 550343 - RNA, 19 nt, Artificial Sequence
  Description of Artificial Sequence: Synthetic oligonucleotide
  Sense strand starting at position 572 of SEQ ID NO: 318277
uuguuagucuaagucauca

SEQ ID NO: 550344 - RNA, 19 nt, Artificial Sequence
  Description of Artificial Sequence: Synthetic oligonucleotide
  Antisense strand to SEQ ID NO: 550343
ugaugacuuagacuaacaa

SEQ ID NO: 550345 - RNA, 19 nt, Artificial Sequence
  Description of Artificial Sequence: Synthetic oligonucleotide
  Sense strand starting at position 748 of SEQ ID NO: 318277
uuaguccaaggaugucaua

SEQ ID NO: 550346 - RNA, 19 nt, Artificial Sequence
  Description of Artificial Sequence: Synthetic oligonucleotide
  Antisense strand to SEQ ID NO: 550345
uaugacauccuuggacuaa

SEQ ID NO: 550347 - RNA, 19 nt, Artificial Sequence
  Description of Artificial Sequence: Synthetic oligonucleotide
  Sense strand starting at position 809 of SEQ ID NO: 318277
ggagcuuuagauugacaca

SEQ ID NO: 550348 - RNA, 19 nt, Artificial Sequence
  Description of Artificial Sequence: Synthetic oligonucleotide
  Antisense strand to SEQ ID NO: 550347
ugugucaaucuaaagcucc

SEQ ID NO: 550349 - RNA, 19 nt, Artificial Sequence
  Description of Artificial Sequence: Synthetic oligonucleotide
  Sense strand starting at position 858 of SEQ ID NO: 318277
gaguguccugauuaucuuu

SEQ ID NO: 550350 - RNA, 19 nt, Artificial Sequence
  Description of Artificial Sequence: Synthetic oligonucleotide
  Antisense strand to SEQ ID NO: 550349
aaagauaaucaggacacuc

SEQ ID NO: 550351 - RNA, 19 nt, Artificial Sequence
  Description of Artificial Sequence: Synthetic oligonucleotide
  Sense strand starting at position 991 of SEQ ID NO: 318277
uugagugacuucccaaugu

SEQ ID NO: 550352 - RNA, 19 nt, Artificial Sequence
  Description of Artificial Sequence: Synthetic oligonucleotide
  Antisense strand to SEQ ID NO: 550351
acauugggaagucacucaa

SEQ ID NO: 550353 - RNA, 19 nt, Artificial Sequence
  Description of Artificial Sequence: Synthetic oligonucleotide
  Sense strand starting at position 995 of SEQ ID NO: 318277
gugacuucccaaugugaca

SEQ ID NO: 550354 - RNA, 19 nt, Artificial Sequence
  Description of Artificial Sequence: Synthetic oligonucleotide
  Antisense strand to SEQ ID NO: 550353
ugucacauugggaagucac

SEQ ID NO: 550355 - RNA, 19 nt, Artificial Sequence
  Description of Artificial Sequence: Synthetic oligonucleotide
  Sense strand starting at position 1117 of SEQ ID NO: 318277
uuccucaagcuguaaauga

SEQ ID NO: 550356 - RNA, 19 nt, Artificial Sequence
  Description of Artificial Sequence: Synthetic oligonucleotide
  Antisense strand to SEQ ID NO: 550355
ucauuuacagcuugaggaa

SEQ ID NO: 550357 - RNA, 19 nt, Artificial Sequence
  Description of Artificial Sequence: Synthetic oligonucleotide
  Sense strand starting at position 1151 of SEQ ID NO: 318277
gaguaaggacuguguagaa

SEQ ID NO: 550358 - RNA, 19 nt, Artificial Sequence
  Description of Artificial Sequence: Synthetic oligonucleotide
  Antisense strand to SEQ ID NO: 550357
uucuacacaguccuuacuc

SEQ ID NO: 550359 - RNA, 19 nt, Artificial Sequence
  Description of Artificial Sequence: Synthetic oligonucleotide
  Sense strand starting at position 1603 of SEQ ID NO: 318277
uagugaaguggguggcuaa

SEQ ID NO: 550360 - RNA, 19 nt, Artificial Sequence
  Description of Artificial Sequence: Synthetic oligonucleotide
  Antisense strand to SEQ ID NO: 550359
uuagccacccacuucacua

SEQ ID NO: 550361 - RNA, 19 nt, Artificial Sequence
  Description of Artificial Sequence: Synthetic oligonucleotide
  Sense strand starting at position 1691 of SEQ ID NO: 318277
agccaauuuguaugccaca

SEQ ID NO: 550362 - RNA, 19 nt, Artificial Sequence
  Description of Artificial Sequence: Synthetic oligonucleotide
  Antisense strand to SEQ ID NO: 550361
uguggcauacaaauuggcu

SEQ ID NO: 550363 - RNA, 19 nt, Artificial Sequence
  Description of Artificial Sequence: Synthetic oligonucleotide
  Sense strand starting at position 1754 of SEQ ID NO: 318277
ccaucuuuggcacaauguu

SEQ ID NO: 550364 - RNA, 19 nt, Artificial Sequence
  Description of Artificial Sequence: Synthetic oligonucleotide
  Antisense strand to SEQ ID NO: 550363
aacauugugccaaagaugg

SEQ ID NO: 550365 - RNA, 19 nt, Artificial Sequence
  Description of Artificial Sequence: Synthetic oligonucleotide
  Sense strand starting at position 1927 of SEQ ID NO: 318277
ucagucuggcugugggaaa

SEQ ID NO: 550366 - RNA, 19 nt, Artificial Sequence
  Description of Artificial Sequence: Synthetic oligonucleotide
  Antisense strand to SEQ ID NO: 550365
uuucccacagccagacuga

SEQ ID NO: 550367 - RNA, 19 nt, Artificial Sequence
  Description of Artificial Sequence: Synthetic oligonucleotide
  Sense strand starting at position 1961 of SEQ ID NO: 318277
agaagccaucuguguagga

SEQ ID NO: 550368 - RNA, 19 nt, Artificial Sequence
  Description of Artificial Sequence: Synthetic oligonucleotide
  Antisense strand to SEQ ID NO: 550367
uccuacacagauggcuucu

SEQ ID NO: 550369 - RNA, 19 nt, Artificial Sequence
  Description of Artificial Sequence: Synthetic oligonucleotide
  Sense strand starting at position 1963 of SEQ ID NO: 318277
aagccaucuguguaggacu

SEQ ID NO: 550370 - RNA, 19 nt, Artificial Sequence
  Description of Artificial Sequence: Synthetic oligonucleotide
  Antisense strand to SEQ ID NO: 550369
aguccuacacagauggcuu

SEQ ID NO: 550371 - RNA, 19 nt, Artificial Sequence
  Description of Artificial Sequence: Synthetic oligonucleotide
  Sense strand starting at position 2022 of SEQ ID NO: 318277
cugagaacauaagagaaau

SEQ ID NO: 550372 - RNA, 19 nt, Artificial Sequence
  Description of Artificial Sequence: Synthetic oligonucleotide
  Antisense strand to SEQ ID NO: 550371
auuucucuuauguucucag

SEQ ID NO: 550373 - RNA, 19 nt, Artificial Sequence
  Description of Artificial Sequence: Synthetic oligonucleotide
  Sense strand starting at position 2052 of SEQ ID NO: 318277
gugacaugucucuauugug

SEQ ID NO: 550374 - RNA, 19 nt, Artificial Sequence
  Description of Artificial Sequence: Synthetic oligonucleotide
  Antisense strand to SEQ ID NO: 550373
cacaauagagacaugucac

SEQ ID NO: 550375 - RNA, 19 nt, Artificial Sequence
  Description of Artificial Sequence: Synthetic oligonucleotide
  Sense strand starting at position 2093 of SEQ ID NO: 318277
gcguaugcucugagagaug

SEQ ID NO: 550376 - RNA, 19 nt, Artificial Sequence
  Description of Artificial Sequence: Synthetic oligonucleotide
  Antisense strand to SEQ ID NO: 550375
caucucucagagcauacgc

SEQ ID NO: 550377 - RNA, 19 nt, Artificial Sequence
  Description of Artificial Sequence: Synthetic oligonucleotide
  Sense strand starting at position 2178 of SEQ ID NO: 318277
acaucuguauuugugcaua

SEQ ID NO: 550378 - RNA, 19 nt, Artificial Sequence
  Description of Artificial Sequence: Synthetic oligonucleotide
  Antisense strand to SEQ ID NO: 550377
uaugcacaaauacagaugu

SEQ ID NO: 550379 - RNA, 19 nt, Artificial Sequence
  Description of Artificial Sequence: Synthetic oligonucleotide
  Sense strand starting at position 2192 of SEQ ID NO: 318277
gcauauccauacccagaga

SEQ ID NO: 550380 - RNA, 19 nt, Artificial Sequence
  Description of Artificial Sequence: Synthetic oligonucleotide
  Antisense strand to SEQ ID NO: 550379
ucucuggguauggauaugc

SEQ ID NO: 550381 - RNA, 19 nt, Artificial Sequence
  Description of Artificial Sequence: Synthetic oligonucleotide
  Sense strand starting at position 2323 of SEQ ID NO: 318277
ggucaacugucucuaacau

SEQ ID NO: 550382 - RNA, 19 nt, Artificial Sequence
  Description of Artificial Sequence: Synthetic oligonucleotide
  Antisense strand to SEQ ID NO: 550381
auguuagagacaguugacc

SEQ ID NO: 550383 - RNA, 19 nt, Artificial Sequence
  Description of Artificial Sequence: Synthetic oligonucleotide
  Sense strand starting at position 2324 of SEQ ID NO: 318277
gucaacugucucuaacaug

SEQ ID NO: 550384 - RNA, 19 nt, Artificial Sequence
  Description of Artificial Sequence: Synthetic oligonucleotide
  Antisense strand to SEQ ID NO: 550383
cauguuagagacaguugac

SEQ ID NO: 550385 - RNA, 19 nt, Artificial Sequence
  Description of Artificial Sequence: Synthetic oligonucleotide
  Sense strand starting at position 2334 of SEQ ID NO: 318277
ucuaacaugccuuggucua

SEQ ID NO: 550386 - RNA, 19 nt, Artificial Sequence
  Description of Artificial Sequence: Synthetic oligonucleotide
  Antisense strand to SEQ ID NO: 550385
uagaccaaggcauguuaga

SEQ ID NO: 550387 - RNA, 19 nt, Artificial Sequence
  Description of Artificial Sequence: Synthetic oligonucleotide
  Sense strand starting at position 2335 of SEQ ID NO: 318277
cuaacaugccuuggucuau

SEQ ID NO: 550388 - RNA, 19 nt, Artificial Sequence
  Description of Artificial Sequence: Synthetic oligonucleotide
  Antisense strand to SEQ ID NO: 550387
auagaccaaggcauguuag

SEQ ID NO: 550389 - RNA, 19 nt, Artificial Sequence
  Description of Artificial Sequence: Synthetic oligonucleotide
  Sense strand starting at position 2368 of SEQ ID NO: 318277
aucauuacauguguuacaa

SEQ ID NO: 550390 - RNA, 19 nt, Artificial Sequence
  Description of Artificial Sequence: Synthetic oligonucleotide
  Antisense strand to SEQ ID NO: 550389
uuguaacacauguaaugau

SEQ ID NO: 550391 - RNA, 19 nt, Artificial Sequence
  Description of Artificial Sequence: Synthetic oligonucleotide
  Sense strand starting at position 2706 of SEQ ID NO: 318277
agaucauggcaacgugaga

SEQ ID NO: 550392 - RNA, 19 nt, Artificial Sequence
  Description of Artificial Sequence: Synthetic oligonucleotide
  Antisense strand to SEQ ID NO: 550391
ucucacguugccaugaucu

SEQ ID NO: 550393 - RNA, 19 nt, Artificial Sequence
  Description of Artificial Sequence: Synthetic oligonucleotide
  Sense strand starting at position 2720 of SEQ ID NO: 318277
ugagauguucuuuagucuu

SEQ ID NO: 550394 - RNA, 19 nt, Artificial Sequence
  Description of Artificial Sequence: Synthetic oligonucleotide
  Antisense strand to SEQ ID NO: 550393
aagacuaaagaacaucuca

SEQ ID NO: 550395 - RNA, 19 nt, Artificial Sequence
  Description of Artificial Sequence: Synthetic oligonucleotide
  Sense strand starting at position 2722 of SEQ ID NO: 318277
agauguucuuuagucuuua

SEQ ID NO: 550396 - RNA, 19 nt, Artificial Sequence
  Description of Artificial Sequence: Synthetic oligonucleotide
  Antisense strand to SEQ ID NO: 550395
uaaagacuaaagaacaucu

SEQ ID NO: 550397 - RNA, 19 nt, Artificial Sequence
  Description of Artificial Sequence: Synthetic oligonucleotide
  Sense strand starting at position 2827 of SEQ ID NO: 318277
ggcccauacccucaguguu

SEQ ID NO: 550398 - RNA, 19 nt, Artificial Sequence
  Description of Artificial Sequence: Synthetic oligonucleotide
  Antisense strand to SEQ ID NO: 550397
aacacugaggguaugggcc

SEQ ID NO: 550399 - RNA, 19 nt, Artificial Sequence
  Description of Artificial Sequence: Synthetic oligonucleotide
  Sense strand starting at position 2835 of SEQ ID NO: 318277
cccucaguguuucucagaa

SEQ ID NO: 550400 - RNA, 19 nt, Artificial Sequence
  Description of Artificial Sequence: Synthetic oligonucleotide
  Antisense strand to SEQ ID NO: 550399
uucugagaaacacugaggg

SEQ ID NO: 550401 - RNA, 19 nt, Artificial Sequence
  Description of Artificial Sequence: Synthetic oligonucleotide
  Sense strand starting at position 2847 of SEQ ID NO: 318277
cucagaaucuaauucgcuu

SEQ ID NO: 550402 - RNA, 19 nt, Artificial Sequence
  Description of Artificial Sequence: Synthetic oligonucleotide
  Antisense strand to SEQ ID NO: 550401
aagcgaauuagauucugag

SEQ ID NO: 550403 - RNA, 19 nt, Artificial Sequence
  Description of Artificial Sequence: Synthetic oligonucleotide
  Sense strand starting at position 2957 of SEQ ID NO: 318277
ccuugaacucuugagucua

SEQ ID NO: 550404 - RNA, 19 nt, Artificial Sequence
  Description of Artificial Sequence: Synthetic oligonucleotide
  Antisense strand to SEQ ID NO: 550403
uagacucaagaguucaagg

SEQ ID NO: 550405 - RNA, 19 nt, Artificial Sequence
  Description of Artificial Sequence: Synthetic oligonucleotide
  Sense strand starting at position 2959 of SEQ ID NO: 318277
uugaacucuugagucuauu

SEQ ID NO: 550406 - RNA, 19 nt, Artificial Sequence
  Description of Artificial Sequence: Synthetic oligonucleotide
  Antisense strand to SEQ ID NO: 550405
aauagacucaagaguucaa

SEQ ID NO: 550407 - RNA, 19 nt, Artificial Sequence
  Description of Artificial Sequence: Synthetic oligonucleotide
  Sense strand starting at position 2989 of SEQ ID NO: 318277
ugcagagagucugcuaaga

SEQ ID NO: 550408 - RNA, 19 nt, Artificial Sequence
  Description of Artificial Sequence: Synthetic oligonucleotide
  Antisense strand to SEQ ID NO: 550407
ucuuagcagacucucugca

SEQ ID NO: 550409 - RNA, 19 nt, Artificial Sequence
  Description of Artificial Sequence: Synthetic oligonucleotide
  Sense strand starting at position 3037 of SEQ ID NO: 318277
aaaguaggucaaugacauc

SEQ ID NO: 550410 - RNA, 19 nt, Artificial Sequence
  Description of Artificial Sequence: Synthetic oligonucleotide
  Antisense strand to SEQ ID NO: 550409
gaugucauugaccuacuuu

SEQ ID NO: 550411 - RNA, 19 nt, Artificial Sequence
  Description of Artificial Sequence: Synthetic oligonucleotide
  Sense strand starting at position 3841 of SEQ ID NO: 318277
gucugugagauccaccaga

SEQ ID NO: 550412 - RNA, 19 nt, Artificial Sequence
  Description of Artificial Sequence: Synthetic oligonucleotide
  Antisense strand to SEQ ID NO: 550411
ucugguggaucucacagac

SEQ ID NO: 550413 - RNA, 19 nt, Artificial Sequence
  Description of Artificial Sequence: Synthetic oligonucleotide
  Sense strand starting at position 3860 of SEQ ID NO: 318277
augaaagcauguuucuguu

SEQ ID NO: 550414 - RNA, 19 nt, Artificial Sequence
  Description of Artificial Sequence: Synthetic oligonucleotide
  Antisense strand to SEQ ID NO: 550413
aacagaaacaugcuuucau

SEQ ID NO: 550415 - RNA, 19 nt, Artificial Sequence
  Description of Artificial Sequence: Synthetic oligonucleotide
  Sense strand starting at position 3956 of SEQ ID NO: 318277
auaauaugugauggaguga

SEQ ID NO: 550416 - RNA, 19 nt, Artificial Sequence
  Description of Artificial Sequence: Synthetic oligonucleotide
  Antisense strand to SEQ ID NO: 550415
ucacuccaucacauauuau

SEQ ID NO: 550417 - RNA, 19 nt, Artificial Sequence
  Description of Artificial Sequence: Synthetic oligonucleotide
  Sense strand starting at position 102 of SEQ ID NO: 318278
uuaauacgucuuuaugaag

SEQ ID NO: 550418 - RNA, 19 nt, Artificial Sequence
  Description of Artificial Sequence: Synthetic oligonucleotide
  Antisense strand to SEQ ID NO: 550417
cuucauaaagacguauuaa

SEQ ID NO: 550419 - RNA, 19 nt, Artificial Sequence
  Description of Artificial Sequence: Synthetic oligonucleotide
  Sense strand starting at position 116 of SEQ ID NO: 318278
ugaaguuuccagugugagg

SEQ ID NO: 550420 - RNA, 19 nt, Artificial Sequence
  Description of Artificial Sequence: Synthetic oligonucleotide
  Antisense strand to SEQ ID NO: 550419
ccucacacuggaaacuuca

SEQ ID NO: 550421 - RNA, 19 nt, Artificial Sequence
  Description of Artificial Sequence: Synthetic oligonucleotide
  Sense strand starting at position 125 of SEQ ID NO: 318278
cagugugaggaguagacau

SEQ ID NO: 550422 - RNA, 19 nt, Artificial Sequence
  Description of Artificial Sequence: Synthetic oligonucleotide
  Antisense strand to SEQ ID NO: 550421
augucuacuccucacacug

SEQ ID NO: 550423 - RNA, 19 nt, Artificial Sequence
  Description of Artificial Sequence: Synthetic oligonucleotide
  Sense strand starting at position 285 of SEQ ID NO: 318278
cgaagucucccacagagua

SEQ ID NO: 550424 - RNA, 19 nt, Artificial Sequence
  Description of Artificial Sequence: Synthetic oligonucleotide
  Antisense strand to SEQ ID NO: 550423
uacucugugggagacuucg

SEQ ID NO: 550425 - RNA, 19 nt, Artificial Sequence
  Description of Artificial Sequence: Synthetic oligonucleotide
  Sense strand starting at position 315 of SEQ ID NO: 318278
aaacauuagcaaggagagu

SEQ ID NO: 550426 - RNA, 19 nt, Artificial Sequence
  Description of Artificial Sequence: Synthetic oligonucleotide
  Antisense strand to SEQ ID NO: 550425
acucuccuugcuaauguuu

SEQ ID NO: 550427 - RNA, 19 nt, Artificial Sequence
  Description of Artificial Sequence: Synthetic oligonucleotide
  Sense strand starting at position 354 of SEQ ID NO: 318278
cuucuucuaguagaaguaa

SEQ ID NO: 550428 - RNA, 19 nt, Artificial Sequence
  Description of Artificial Sequence: Synthetic oligonucleotide
  Antisense strand to SEQ ID NO: 550427
uuacuucuacuagaagaag

SEQ ID NO: 550429 - RNA, 19 nt, Artificial Sequence
  Description of Artificial Sequence: Synthetic oligonucleotide
  Sense strand starting at position 408 of SEQ ID NO: 318278
ugucuuauuucugcacagu

SEQ ID NO: 550430 - RNA, 19 nt, Artificial Sequence
  Description of Artificial Sequence: Synthetic oligonucleotide
  Antisense strand to SEQ ID NO: 550429
acugugcagaaauaagaca

SEQ ID NO: 550431 - RNA, 19 nt, Artificial Sequence
  Description of Artificial Sequence: Synthetic oligonucleotide
  Sense strand starting at position 942 of SEQ ID NO: 318278
gugucacaaucaucauaau

SEQ ID NO: 550432 - RNA, 19 nt, Artificial Sequence
  Description of Artificial Sequence: Synthetic oligonucleotide
  Antisense strand to SEQ ID NO: 550431
auuaugaugauugugacac

SEQ ID NO: 550433 - RNA, 19 nt, Artificial Sequence
  Description of Artificial Sequence: Synthetic oligonucleotide
  Sense strand starting at position 1001 of SEQ ID NO: 318278
ccgacaucccuggagcuaa

SEQ ID NO: 550434 - RNA, 19 nt, Artificial Sequence
  Description of Artificial Sequence: Synthetic oligonucleotide
  Antisense strand to SEQ ID NO: 550433
uuagcuccagggaugucgg

SEQ ID NO: 550435 - RNA, 19 nt, Artificial Sequence
  Description of Artificial Sequence: Synthetic oligonucleotide
  Sense strand starting at position 1012 of SEQ ID NO: 318278
ggagcuaagagauggcaga

SEQ ID NO: 550436 - RNA, 19 nt, Artificial Sequence
  Description of Artificial Sequence: Synthetic oligonucleotide
  Antisense strand to SEQ ID NO: 550435
ucugccaucucuuagcucc

SEQ ID NO: 550437 - RNA, 19 nt, Artificial Sequence
  Description of Artificial Sequence: Synthetic oligonucleotide
  Sense strand starting at position 2034 of SEQ ID NO: 318278
auggacaagauguguuaca

SEQ ID NO: 550438 - RNA, 19 nt, Artificial Sequence
  Description of Artificial Sequence: Synthetic oligonucleotide
  Antisense strand to SEQ ID NO: 550437
uguaacacaucuuguccau

SEQ ID NO: 550439 - RNA, 19 nt, Artificial Sequence
  Description of Artificial Sequence: Synthetic oligonucleotide
  Sense strand starting at position 2035 of SEQ ID NO: 318278
uggacaagauguguuacau

SEQ ID NO: 550440 - RNA, 19 nt, Artificial Sequence
  Description of Artificial Sequence: Synthetic oligonucleotide
  Antisense strand to SEQ ID NO: 550439
auguaacacaucuugucca

SEQ ID NO: 550441 - RNA, 19 nt, Artificial Sequence
  Description of Artificial Sequence: Synthetic oligonucleotide
  Sense strand starting at position 2045 of SEQ ID NO: 318278
guguuacauugacugacau

SEQ ID NO: 550442 - RNA, 19 nt, Artificial Sequence
  Description of Artificial Sequence: Synthetic oligonucleotide
  Antisense strand to SEQ ID NO: 550441
augucagucaauguaacac

SEQ ID NO: 550443 - RNA, 19 nt, Artificial Sequence
  Description of Artificial Sequence: Synthetic oligonucleotide
  Sense strand starting at position 2107 of SEQ ID NO: 318278
gugugcaacucauuagauc

SEQ ID NO: 550444 - RNA, 19 nt, Artificial Sequence
  Description of Artificial Sequence: Synthetic oligonucleotide
  Antisense strand to SEQ ID NO: 550443
gaucuaaugaguugcacac

SEQ ID NO: 550445 - RNA, 19 nt, Artificial Sequence
  Description of Artificial Sequence: Synthetic oligonucleotide
  Sense strand starting at position 2108 of SEQ ID NO: 318278
ugugcaacucauuagaucu

SEQ ID NO: 550446 - RNA, 19 nt, Artificial Sequence
  Description of Artificial Sequence: Synthetic oligonucleotide
  Antisense strand to SEQ ID NO: 550445
agaucuaaugaguugcaca

SEQ ID NO: 550447 - RNA, 19 nt, Artificial Sequence
  Description of Artificial Sequence: Synthetic oligonucleotide
  Sense strand starting at position 2203 of SEQ ID NO: 318278
cuagaauuggacuguguuu

SEQ ID NO: 550448 - RNA, 19 nt, Artificial Sequence
  Description of Artificial Sequence: Synthetic oligonucleotide
  Antisense strand to SEQ ID NO: 550447
aaacacaguccaauucuag

SEQ ID NO: 550449 - RNA, 19 nt, Artificial Sequence
  Description of Artificial Sequence: Synthetic oligonucleotide
  Sense strand starting at position 2273 of SEQ ID NO: 318278
gucagagaccuucggacaa

SEQ ID NO: 550450 - RNA, 19 nt, Artificial Sequence
  Description of Artificial Sequence: Synthetic oligonucleotide
  Antisense strand to SEQ ID NO: 550449
uuguccgaaggucucugac

SEQ ID NO: 550451 - RNA, 19 nt, Artificial Sequence
  Description of Artificial Sequence: Synthetic oligonucleotide
  Sense strand starting at position 2306 of SEQ ID NO: 318278
caaagucuuggcuguacca

SEQ ID NO: 550452 - RNA, 19 nt, Artificial Sequence
  Description of Artificial Sequence: Synthetic oligonucleotide
  Antisense strand to SEQ ID NO: 550451
ugguacagccaagacuuug

SEQ ID NO: 550453 - RNA, 19 nt, Artificial Sequence
  Description of Artificial Sequence: Synthetic oligonucleotide
  Sense strand starting at position 2308 of SEQ ID NO: 318278
aagucuuggcuguaccaua

SEQ ID NO: 550454 - RNA, 19 nt, Artificial Sequence
  Description of Artificial Sequence: Synthetic oligonucleotide
  Antisense strand to SEQ ID NO: 550453
uaugguacagccaagacuu

SEQ ID NO: 550455 - RNA, 19 nt, Artificial Sequence
  Description of Artificial Sequence: Synthetic oligonucleotide
  Sense strand starting at position 2313 of SEQ ID NO: 318278
uuggcuguaccauaugaua

SEQ ID NO: 550456 - RNA, 19 nt, Artificial Sequence
  Description of Artificial Sequence: Synthetic oligonucleotide
  Antisense strand to SEQ ID NO: 550455
uaucauaugguacagccaa

SEQ ID NO: 550457 - RNA, 19 nt, Artificial Sequence
  Description of Artificial Sequence: Synthetic oligonucleotide
  Sense strand starting at position 2722 of SEQ ID NO: 318278
ucaugugugcuguagaaag

SEQ ID NO: 550458 - RNA, 19 nt, Artificial Sequence
  Description of Artificial Sequence: Synthetic oligonucleotide
  Antisense strand to SEQ ID NO: 550457
cuuucuacagcacacauga

SEQ ID NO: 550459 - RNA, 19 nt, Artificial Sequence
  Description of Artificial Sequence: Synthetic oligonucleotide
  Sense strand starting at position 2724 of SEQ ID NO: 318278
augugugcuguagaaagga

SEQ ID NO: 550460 - RNA, 19 nt, Artificial Sequence
  Description of Artificial Sequence: Synthetic oligonucleotide
  Antisense strand to SEQ ID NO: 550459
uccuuucuacagcacacau

SEQ ID NO: 550461 - RNA, 19 nt, Artificial Sequence
  Description of Artificial Sequence: Synthetic oligonucleotide
  Sense strand starting at position 2953 of SEQ ID NO: 318278
ugacuuggugcccaagagu

SEQ ID NO: 550462 - RNA, 19 nt, Artificial Sequence
  Description of Artificial Sequence: Synthetic oligonucleotide
  Antisense strand to SEQ ID NO: 550461
acucuugggcaccaaguca

SEQ ID NO: 550463 - RNA, 19 nt, Artificial Sequence
  Description of Artificial Sequence: Synthetic oligonucleotide
  Sense strand starting at position 2971 of SEQ ID NO: 318278
ucuuaagaacagugagguu

SEQ ID NO: 550464 - RNA, 19 nt, Artificial Sequence
  Description of Artificial Sequence: Synthetic oligonucleotide
  Antisense strand to SEQ ID NO: 550463
aaccucacuguucuuaaga

SEQ ID NO: 550465 - RNA, 19 nt, Artificial Sequence
  Description of Artificial Sequence: Synthetic oligonucleotide
  Sense strand starting at position 3048 of SEQ ID NO: 318278
ggcacaucaguauagguaa

SEQ ID NO: 550466 - RNA, 19 nt, Artificial Sequence
  Description of Artificial Sequence: Synthetic oligonucleotide
  Antisense strand to SEQ ID NO: 550465
uuaccuauacugaugugcc

SEQ ID NO: 550467 - RNA, 19 nt, Artificial Sequence
  Description of Artificial Sequence: Synthetic oligonucleotide
  Sense strand starting at position 3062 of SEQ ID NO: 318278
gguaauaccugcuuccuaa

SEQ ID NO: 550468 - RNA, 19 nt, Artificial Sequence
  Description of Artificial Sequence: Synthetic oligonucleotide
  Antisense strand to SEQ ID NO: 550467
uuaggaagcagguauuacc

SEQ ID NO: 550469 - RNA, 19 nt, Artificial Sequence
  Description of Artificial Sequence: Synthetic oligonucleotide
  Sense strand starting at position 3074 of SEQ ID NO: 318278
uuccuaaguuaucuuuagu

SEQ ID NO: 550470 - RNA, 19 nt, Artificial Sequence
  Description of Artificial Sequence: Synthetic oligonucleotide
  Antisense strand to SEQ ID NO: 550469
acuaaagauaacuuaggaa

SEQ ID NO: 550471 - RNA, 19 nt, Artificial Sequence
  Description of Artificial Sequence: Synthetic oligonucleotide
  Sense strand starting at position 3077 of SEQ ID NO: 318278
cuaaguuaucuuuaguaga

SEQ ID NO: 550472 - RNA, 19 nt, Artificial Sequence
  Description of Artificial Sequence: Synthetic oligonucleotide
  Antisense strand to SEQ ID NO: 550471
ucuacuaaagauaacuuag

SEQ ID NO: 550473 - RNA, 19 nt, Artificial Sequence
  Description of Artificial Sequence: Synthetic oligonucleotide
  Sense strand starting at position 3101 of SEQ ID NO: 318278
aagugccuucuuuaugaga

SEQ ID NO: 550474 - RNA, 19 nt, Artificial Sequence
  Description of Artificial Sequence: Synthetic oligonucleotide
  Antisense strand to SEQ ID NO: 550473
ucucauaaagaaggcacuu

SEQ ID NO: 550475 - RNA, 19 nt, Artificial Sequence
  Description of Artificial Sequence: Synthetic oligonucleotide
  Sense strand starting at position 3112 of SEQ ID NO: 318278
uuaugagauccuuguaacu

SEQ ID NO: 550476 - RNA, 19 nt, Artificial Sequence
  Description of Artificial Sequence: Synthetic oligonucleotide
  Antisense strand to SEQ ID NO: 550475
aguuacaaggaucucauaa

SEQ ID NO: 550477 - RNA, 19 nt, Artificial Sequence
  Description of Artificial Sequence: Synthetic oligonucleotide
  Sense strand starting at position 3117 of SEQ ID NO: 318278
agauccuuguaacugauau

SEQ ID NO: 550478 - RNA, 19 nt, Artificial Sequence
  Description of Artificial Sequence: Synthetic oligonucleotide
  Antisense strand to SEQ ID NO: 550477
auaucaguuacaaggaucu

SEQ ID NO: 550479 - RNA, 19 nt, Artificial Sequence
  Description of Artificial Sequence: Synthetic oligonucleotide
  Sense strand starting at position 3192 of SEQ ID NO: 318278
uuauuuggagccugcuaau

SEQ ID NO: 550480 - RNA, 19 nt, Artificial Sequence
  Description of Artificial Sequence: Synthetic oligonucleotide
  Antisense strand to SEQ ID NO: 550479
auuagcaggcuccaaauaa

SEQ ID NO: 550481 - RNA, 19 nt, Artificial Sequence
  Description of Artificial Sequence: Synthetic oligonucleotide
  Sense strand starting at position 3574 of SEQ ID NO: 318278
gcaccagagacaugauaug

SEQ ID NO: 550482 - RNA, 19 nt, Artificial Sequence
  Description of Artificial Sequence: Synthetic oligonucleotide
  Antisense strand to SEQ ID NO: 550481
cauaucaugucucuggugc

SEQ ID NO: 550483 - RNA, 19 nt, Artificial Sequence
  Description of Artificial Sequence: Synthetic oligonucleotide
  Sense strand starting at position 3647 of SEQ ID NO: 318278
caaagcauccuugacggua

SEQ ID NO: 550484 - RNA, 19 nt, Artificial Sequence
  Description of Artificial Sequence: Synthetic oligonucleotide
  Antisense strand to SEQ ID NO: 550483
uaccgucaaggaugcuuug

SEQ ID NO: 550485 - RNA, 19 nt, Artificial Sequence
  Description of Artificial Sequence: Synthetic oligonucleotide
  Sense strand starting at position 3652 of SEQ ID NO: 318278
cauccuugacgguagaaua

SEQ ID NO: 550486 - RNA, 19 nt, Artificial Sequence
  Description of Artificial Sequence: Synthetic oligonucleotide
  Antisense strand to SEQ ID NO: 550485
uauucuaccgucaaggaug

SEQ ID NO: 550487 - RNA, 19 nt, Artificial Sequence
  Description of Artificial Sequence: Synthetic oligonucleotide
  Sense strand starting at position 3738 of SEQ ID NO: 318278
gacucugagucuguuauca

SEQ ID NO: 550488 - RNA, 19 nt, Artificial Sequence
  Description of Artificial Sequence: Synthetic oligonucleotide
  Antisense strand to SEQ ID NO: 550487
ugauaacagacucagaguc

SEQ ID NO: 550489 - RNA, 19 nt, Artificial Sequence
  Description of Artificial Sequence: Synthetic oligonucleotide
  Sense strand starting at position 3858 of SEQ ID NO: 318278
ccgauuuguuugucccuuu

SEQ ID NO: 550490 - RNA, 19 nt, Artificial Sequence
  Description of Artificial Sequence: Synthetic oligonucleotide
  Antisense strand to SEQ ID NO: 550489
aaagggacaaacaaaucgg

SEQ ID NO: 550491 - RNA, 19 nt, Artificial Sequence
  Description of Artificial Sequence: Synthetic oligonucleotide
  Sense strand starting at position 3859 of SEQ ID NO: 318278
cgauuuguuugucccuuua

SEQ ID NO: 550492 - RNA, 19 nt, Artificial Sequence
  Description of Artificial Sequence: Synthetic oligonucleotide
  Antisense strand to SEQ ID NO: 550491
uaaagggacaaacaaaucg

SEQ ID NO: 550493 - RNA, 19 nt, Artificial Sequence
  Description of Artificial Sequence: Synthetic oligonucleotide
  Sense strand starting at position 3901 of SEQ ID NO: 318278
gcaccaucacuguaaguag

SEQ ID NO: 550494 - RNA, 19 nt, Artificial Sequence
  Description of Artificial Sequence: Synthetic oligonucleotide
  Antisense strand to SEQ ID NO: 550493
cuacuuacagugauggugc

SEQ ID NO: 550495 - RNA, 19 nt, Artificial Sequence
  Description of Artificial Sequence: Synthetic oligonucleotide
  Sense strand starting at position 3953 of SEQ ID NO: 318278
cuuaacuuuguaugaguuu

SEQ ID NO: 550496 - RNA, 19 nt, Artificial Sequence
  Description of Artificial Sequence: Synthetic oligonucleotide
  Antisense strand to SEQ ID NO: 550495
aaacucauacaaaguuaag

SEQ ID NO: 550497 - RNA, 19 nt, Artificial Sequence
  Description of Artificial Sequence: Synthetic oligonucleotide
  Sense strand starting at position 199 of SEQ ID NO: 318279
ugaaguaccucuguuuaug

SEQ ID NO: 550498 - RNA, 19 nt, Artificial Sequence
  Description of Artificial Sequence: Synthetic oligonucleotide
  Antisense strand to SEQ ID NO: 550497
cauaaacagagguacuuca

SEQ ID NO: 550499 - RNA, 19 nt, Artificial Sequence
  Description of Artificial Sequence: Synthetic oligonucleotide
  Sense strand starting at position 210 of SEQ ID NO: 318279
uguuuaugaucuccuuauu

SEQ ID NO: 550500 - RNA, 19 nt, Artificial Sequence
  Description of Artificial Sequence: Synthetic oligonucleotide
  Antisense strand to SEQ ID NO: 550499
aauaaggagaucauaaaca

SEQ ID NO: 550501 - RNA, 19 nt, Artificial Sequence
  Description of Artificial Sequence: Synthetic oligonucleotide
  Sense strand starting at position 246 of SEQ ID NO: 318279
augaauaaccucuguuaga

SEQ ID NO: 550502 - RNA, 19 nt, Artificial Sequence
  Description of Artificial Sequence: Synthetic oligonucleotide
  Antisense strand to SEQ ID NO: 550501
ucuaacagagguuauucau

SEQ ID NO: 550503 - RNA, 19 nt, Artificial Sequence
  Description of Artificial Sequence: Synthetic oligonucleotide
  Sense strand starting at position 247 of SEQ ID NO: 318279
ugaauaaccucuguuagag

SEQ ID NO: 550504 - RNA, 19 nt, Artificial Sequence
  Description of Artificial Sequence: Synthetic oligonucleotide
  Antisense strand to SEQ ID NO: 550503
cucuaacagagguuauuca

SEQ ID NO: 550505 - RNA, 19 nt, Artificial Sequence
  Description of Artificial Sequence: Synthetic oligonucleotide
  Sense strand starting at position 384 of SEQ ID NO: 318279
agucauugaccuugggaag

SEQ ID NO: 550506 - RNA, 19 nt, Artificial Sequence
  Description of Artificial Sequence: Synthetic oligonucleotide
  Antisense strand to SEQ ID NO: 550505
cuucccaaggucaaugacu

SEQ ID NO: 550507 - RNA, 19 nt, Artificial Sequence
  Description of Artificial Sequence: Synthetic oligonucleotide
  Sense strand starting at position 405 of SEQ ID NO: 318279
guugucauucccuauuaaa

SEQ ID NO: 550508 - RNA, 19 nt, Artificial Sequence
  Description of Artificial Sequence: Synthetic oligonucleotide
  Antisense strand to SEQ ID NO: 550507
uuuaauagggaaugacaac

SEQ ID NO: 550509 - RNA, 19 nt, Artificial Sequence
  Description of Artificial Sequence: Synthetic oligonucleotide
  Sense strand starting at position 495 of SEQ ID NO: 318279
caagcugguuccuuuggaa

SEQ ID NO: 550510 - RNA, 19 nt, Artificial Sequence
  Description of Artificial Sequence: Synthetic oligonucleotide
  Antisense strand to SEQ ID NO: 550509
uuccaaaggaaccagcuug

SEQ ID NO: 550511 - RNA, 19 nt, Artificial Sequence
  Description of Artificial Sequence: Synthetic oligonucleotide
  Sense strand starting at position 544 of SEQ ID NO: 318279
gcugcacagugaucacaga

SEQ ID NO: 550512 - RNA, 19 nt, Artificial Sequence
  Description of Artificial Sequence: Synthetic oligonucleotide
  Antisense strand to SEQ ID NO: 550511
ucugugaucacugugcagc

SEQ ID NO: 550513 - RNA, 19 nt, Artificial Sequence
  Description of Artificial Sequence: Synthetic oligonucleotide
  Sense strand starting at position 585 of SEQ ID NO: 318279
agagaucccuacuuccagu

SEQ ID NO: 550514 - RNA, 19 nt, Artificial Sequence
  Description of Artificial Sequence: Synthetic oligonucleotide
  Antisense strand to SEQ ID NO: 550513
acuggaaguagggaucucu

SEQ ID NO: 550515 - RNA, 19 nt, Artificial Sequence
  Description of Artificial Sequence: Synthetic oligonucleotide
  Sense strand starting at position 1190 of SEQ ID NO: 318279
uucccucacgcucagaaua

SEQ ID NO: 550516 - RNA, 19 nt, Artificial Sequence
  Description of Artificial Sequence: Synthetic oligonucleotide
  Antisense strand to SEQ ID NO: 550515
uauucugagcgugagggaa

SEQ ID NO: 550517 - RNA, 19 nt, Artificial Sequence
  Description of Artificial Sequence: Synthetic oligonucleotide
  Sense strand starting at position 1220 of SEQ ID NO: 318279
auuggagauauguguagau

SEQ ID NO: 550518 - RNA, 19 nt, Artificial Sequence
  Description of Artificial Sequence: Synthetic oligonucleotide
  Antisense strand to SEQ ID NO: 550517
aucuacacauaucuccaau

SEQ ID NO: 550519 - RNA, 19 nt, Artificial Sequence
  Description of Artificial Sequence: Synthetic oligonucleotide
  Sense strand starting at position 1224 of SEQ ID NO: 318279
gagauauguguagauggcu

SEQ ID NO: 550520 - RNA, 19 nt, Artificial Sequence
  Description of Artificial Sequence: Synthetic oligonucleotide
  Antisense strand to SEQ ID NO: 550519
agccaucuacacauaucuc

SEQ ID NO: 550521 - RNA, 19 nt, Artificial Sequence
  Description of Artificial Sequence: Synthetic oligonucleotide
  Sense strand starting at position 1233 of SEQ ID NO: 318279
guagauggcugagccauaa

SEQ ID NO: 550522 - RNA, 19 nt, Artificial Sequence
  Description of Artificial Sequence: Synthetic oligonucleotide
  Antisense strand to SEQ ID NO: 550521
uuauggcucagccaucuac

SEQ ID NO: 550523 - RNA, 19 nt, Artificial Sequence
  Description of Artificial Sequence: Synthetic oligonucleotide
  Sense strand starting at position 1337 of SEQ ID NO: 318279
gagcaaugugcacauagga

SEQ ID NO: 550524 - RNA, 19 nt, Artificial Sequence
  Description of Artificial Sequence: Synthetic oligonucleotide
  Antisense strand to SEQ ID NO: 550523
uccuaugugcacauugcuc

SEQ ID NO: 550525 - RNA, 19 nt, Artificial Sequence
  Description of Artificial Sequence: Synthetic oligonucleotide
  Sense strand starting at position 1472 of SEQ ID NO: 318279
agaagugauucagucgaug

SEQ ID NO: 550526 - RNA, 19 nt, Artificial Sequence
  Description of Artificial Sequence: Synthetic oligonucleotide
  Antisense strand to SEQ ID NO: 550525
caucgacugaaucacuucu

SEQ ID NO: 550527 - RNA, 19 nt, Artificial Sequence
  Description of Artificial Sequence: Synthetic oligonucleotide
  Sense strand starting at position 1842 of SEQ ID NO: 318279
aaggucuagccaggagaga

SEQ ID NO: 550528 - RNA, 19 nt, Artificial Sequence
  Description of Artificial Sequence: Synthetic oligonucleotide
  Antisense strand to SEQ ID NO: 550527
ucucuccuggcuagaccuu

SEQ ID NO: 550529 - RNA, 19 nt, Artificial Sequence
  Description of Artificial Sequence: Synthetic oligonucleotide
  Sense strand starting at position 1853 of SEQ ID NO: 318279
aggagagagcgaugaugau

SEQ ID NO: 550530 - RNA, 19 nt, Artificial Sequence
  Description of Artificial Sequence: Synthetic oligonucleotide
  Antisense strand to SEQ ID NO: 550529
aucaucaucgcucucuccu

SEQ ID NO: 550531 - RNA, 19 nt, Artificial Sequence
  Description of Artificial Sequence: Synthetic oligonucleotide
  Sense strand starting at position 1872 of SEQ ID NO: 318279
gguguugccaaagagaguu

SEQ ID NO: 550532 - RNA, 19 nt, Artificial Sequence
  Description of Artificial Sequence: Synthetic oligonucleotide
  Antisense strand to SEQ ID NO: 550531
aacucucuuuggcaacacc

SEQ ID NO: 550533 - RNA, 19 nt, Artificial Sequence
  Description of Artificial Sequence: Synthetic oligonucleotide
  Sense strand starting at position 1988 of SEQ ID NO: 318279
ugaaacuucccauggccuu

SEQ ID NO: 550534 - RNA, 19 nt, Artificial Sequence
  Description of Artificial Sequence: Synthetic oligonucleotide
  Antisense strand to SEQ ID NO: 550533
aaggccaugggaaguuuca

SEQ ID NO: 550535 - RNA, 19 nt, Artificial Sequence
  Description of Artificial Sequence: Synthetic oligonucleotide
  Sense strand starting at position 2072 of SEQ ID NO: 318279
uucgcaggauucccugaau

SEQ ID NO: 550536 - RNA, 19 nt, Artificial Sequence
  Description of Artificial Sequence: Synthetic oligonucleotide
  Antisense strand to SEQ ID NO: 550535
auucagggaauccugcgaa

SEQ ID NO: 550537 - RNA, 19 nt, Artificial Sequence
  Description of Artificial Sequence: Synthetic oligonucleotide
  Sense strand starting at position 2075 of SEQ ID NO: 318279
gcaggauucccugaauacu

SEQ ID NO: 550538 - RNA, 19 nt, Artificial Sequence
  Description of Artificial Sequence: Synthetic oligonucleotide
  Antisense strand to SEQ ID NO: 550537
aguauucagggaauccugc

SEQ ID NO: 550539 - RNA, 19 nt, Artificial Sequence
  Description of Artificial Sequence: Synthetic oligonucleotide
  Sense strand starting at position 2170 of SEQ ID NO: 318279
ggaaaucacuggcuuggga

SEQ ID NO: 550540 - RNA, 19 nt, Artificial Sequence
  Description of Artificial Sequence: Synthetic oligonucleotide
  Antisense strand to SEQ ID NO: 550539
ucccaagccagugauuucc

SEQ ID NO: 550541 - RNA, 19 nt, Artificial Sequence
  Description of Artificial Sequence: Synthetic oligonucleotide
  Sense strand starting at position 2183 of SEQ ID NO: 318279
uugggaaucauauggccuu

SEQ ID NO: 550542 - RNA, 19 nt, Artificial Sequence
  Description of Artificial Sequence: Synthetic oligonucleotide
  Antisense strand to SEQ ID NO: 550541
aaggccauaugauucccaa

SEQ ID NO: 550543 - RNA, 19 nt, Artificial Sequence
  Description of Artificial Sequence: Synthetic oligonucleotide
  Sense strand starting at position 2301 of SEQ ID NO: 318279
guaucacagcaaugagauu

SEQ ID NO: 550544 - RNA, 19 nt, Artificial Sequence
  Description of Artificial Sequence: Synthetic oligonucleotide
  Antisense strand to SEQ ID NO: 550543
aaucucauugcugugauac

SEQ ID NO: 550545 - RNA, 19 nt, Artificial Sequence
  Description of Artificial Sequence: Synthetic oligonucleotide
  Sense strand starting at position 2362 of SEQ ID NO: 318279
agauguaacagguagcauu

SEQ ID NO: 550546 - RNA, 19 nt, Artificial Sequence
  Description of Artificial Sequence: Synthetic oligonucleotide
  Antisense strand to SEQ ID NO: 550545
aaugcuaccuguuacaucu

SEQ ID NO: 550547 - RNA, 19 nt, Artificial Sequence
  Description of Artificial Sequence: Synthetic oligonucleotide
  Sense strand starting at position 2560 of SEQ ID NO: 318279
gacugagaagaguguagau

SEQ ID NO: 550548 - RNA, 19 nt, Artificial Sequence
  Description of Artificial Sequence: Synthetic oligonucleotide
  Antisense strand to SEQ ID NO: 550547
aucuacacucuucucaguc

SEQ ID NO: 550549 - RNA, 19 nt, Artificial Sequence
  Description of Artificial Sequence: Synthetic oligonucleotide
  Sense strand starting at position 2637 of SEQ ID NO: 318279
gucaucaugccugaaauac

SEQ ID NO: 550550 - RNA, 19 nt, Artificial Sequence
  Description of Artificial Sequence: Synthetic oligonucleotide
  Antisense strand to SEQ ID NO: 550549
guauuucaggcaugaugac

SEQ ID NO: 550551 - RNA, 19 nt, Artificial Sequence
  Description of Artificial Sequence: Synthetic oligonucleotide
  Sense strand starting at position 3257 of SEQ ID NO: 318279
uugagugaaacaugagguu

SEQ ID NO: 550552 - RNA, 19 nt, Artificial Sequence
  Description of Artificial Sequence: Synthetic oligonucleotide
  Antisense strand to SEQ ID NO: 550551
aaccucauguuucacucaa

SEQ ID NO: 550553 - RNA, 19 nt, Artificial Sequence
  Description of Artificial Sequence: Synthetic oligonucleotide
  Sense strand starting at position 3335 of SEQ ID NO: 318279
uuugauaaacugugaaagu

SEQ ID NO: 550554 - RNA, 19 nt, Artificial Sequence
  Description of Artificial Sequence: Synthetic oligonucleotide
  Antisense strand to SEQ ID NO: 550553
acuuucacaguuuaucaaa

SEQ ID NO: 550555 - RNA, 19 nt, Artificial Sequence
  Description of Artificial Sequence: Synthetic oligonucleotide
  Sense strand starting at position 3346 of SEQ ID NO: 318279
gugaaagugagauaugcau

SEQ ID NO: 550556 - RNA, 19 nt, Artificial Sequence
  Description of Artificial Sequence: Synthetic oligonucleotide
  Antisense strand to SEQ ID NO: 550555
augcauaucucacuuucac

SEQ ID NO: 550557 - RNA, 19 nt, Artificial Sequence
  Description of Artificial Sequence: Synthetic oligonucleotide
  Sense strand starting at position 3521 of SEQ ID NO: 318279
aguuuacuggacugaagau

SEQ ID NO: 550558 - RNA, 19 nt, Artificial Sequence
  Description of Artificial Sequence: Synthetic oligonucleotide
  Antisense strand to SEQ ID NO: 550557
aucuucaguccaguaaacu

SEQ ID NO: 550559 - RNA, 19 nt, Artificial Sequence
  Description of Artificial Sequence: Synthetic oligonucleotide
  Sense strand starting at position 3556 of SEQ ID NO: 318279
augcuagaucaaugcuaga

SEQ ID NO: 550560 - RNA, 19 nt, Artificial Sequence
  Description of Artificial Sequence: Synthetic oligonucleotide
  Antisense strand to SEQ ID NO: 550559
ucuagcauugaucuagcau

SEQ ID NO: 550561 - RNA, 19 nt, Artificial Sequence
  Description of Artificial Sequence: Synthetic oligonucleotide
  Sense strand starting at position 3567 of SEQ ID NO: 318279
augcuagaucaaugacuca

SEQ ID NO: 550562 - RNA, 19 nt, Artificial Sequence
  Description of Artificial Sequence: Synthetic oligonucleotide
  Antisense strand to SEQ ID NO: 550561
ugagucauugaucuagcau

SEQ ID NO: 550563 - RNA, 19 nt, Artificial Sequence
  Description of Artificial Sequence: Synthetic oligonucleotide
  Sense strand starting at position 3742 of SEQ ID NO: 318279
ucauaucggucccuacaga

SEQ ID NO: 550564 - RNA, 19 nt, Artificial Sequence
  Description of Artificial Sequence: Synthetic oligonucleotide
  Antisense strand to SEQ ID NO: 550563
ucuguagggaccgauauga

SEQ ID NO: 550565 - RNA, 19 nt, Artificial Sequence
  Description of Artificial Sequence: Synthetic oligonucleotide
  Sense strand starting at position 3743 of SEQ ID NO: 318279
cauaucggucccuacagau

SEQ ID NO: 550566 - RNA, 19 nt, Artificial Sequence
  Description of Artificial Sequence: Synthetic oligonucleotide
  Antisense strand to SEQ ID NO: 550565
aucuguagggaccgauaug

SEQ ID NO: 550567 - RNA, 19 nt, Artificial Sequence
  Description of Artificial Sequence: Synthetic oligonucleotide
  Sense strand starting at position 3786 of SEQ ID NO: 318279
acaucuauucugggaaauu

SEQ ID NO: 550568 - RNA, 19 nt, Artificial Sequence
  Description of Artificial Sequence: Synthetic oligonucleotide
  Antisense strand to SEQ ID NO: 550567
aauuucccagaauagaugu

SEQ ID NO: 550569 - RNA, 19 nt, Artificial Sequence
  Description of Artificial Sequence: Synthetic oligonucleotide
  Sense strand starting at position 3864 of SEQ ID NO: 318279
ggauuuggauugggauuaa

SEQ ID NO: 550570 - RNA, 19 nt, Artificial Sequence
  Description of Artificial Sequence: Synthetic oligonucleotide
  Antisense strand to SEQ ID NO: 550569
uuaaucccaauccaaaucc

SEQ ID NO: 550571 - RNA, 19 nt, Artificial Sequence
  Description of Artificial Sequence: Synthetic oligonucleotide
  Sense strand starting at position 3875 of SEQ ID NO: 318279
gggauuaaaggaugcgaua

SEQ ID NO: 550572 - RNA, 19 nt, Artificial Sequence
  Description of Artificial Sequence: Synthetic oligonucleotide
  Antisense strand to SEQ ID NO: 550571
uaucgcauccuuuaauccc

SEQ ID NO: 550573 - RNA, 19 nt, Artificial Sequence
  Description of Artificial Sequence: Synthetic oligonucleotide
  Sense strand starting at position 3889 of SEQ ID NO: 318279
cgauacauuccguaagcua

SEQ ID NO: 550574 - RNA, 19 nt, Artificial Sequence
  Description of Artificial Sequence: Synthetic oligonucleotide
  Antisense strand to SEQ ID NO: 550573
uagcuuacggaauguaucg

SEQ ID NO: 550575 - RNA, 19 nt, Artificial Sequence
  Description of Artificial Sequence: Synthetic oligonucleotide
  Sense strand starting at position 3896 of SEQ ID NO: 318279
uuccguaagcuacaaagaa

SEQ ID NO: 550576 - RNA, 19 nt, Artificial Sequence
  Description of Artificial Sequence: Synthetic oligonucleotide
  Antisense strand to SEQ ID NO: 550575
uucuuuguagcuuacggaa

SEQ ID NO: 550577 - RNA, 19 nt, Artificial Sequence
  Description of Artificial Sequence: Synthetic oligonucleotide
  Sense strand starting at position 51 of SEQ ID NO: 318280
uagcauugacgucauucca

SEQ ID NO: 550578 - RNA, 19 nt, Artificial Sequence
  Description of Artificial Sequence: Synthetic oligonucleotide
  Antisense strand to SEQ ID NO: 550577
uggaaugacgucaaugcua

SEQ ID NO: 550579 - RNA, 19 nt, Artificial Sequence
  Description of Artificial Sequence: Synthetic oligonucleotide
  Sense strand starting at position 59 of SEQ ID NO: 318280
acgucauuccaccagauuc

SEQ ID NO: 550580 - RNA, 19 nt, Artificial Sequence
  Description of Artificial Sequence: Synthetic oligonucleotide
  Antisense strand to SEQ ID NO: 550579
gaaucugguggaaugacgu

SEQ ID NO: 550581 - RNA, 19 nt, Artificial Sequence
  Description of Artificial Sequence: Synthetic oligonucleotide
  Sense strand starting at position 61 of SEQ ID NO: 318280
gucauuccaccagauucua

SEQ ID NO: 550582 - RNA, 19 nt, Artificial Sequence
  Description of Artificial Sequence: Synthetic oligonucleotide
  Antisense strand to SEQ ID NO: 550581
uagaaucugguggaaugac

SEQ ID NO: 550583 - RNA, 19 nt, Artificial Sequence
  Description of Artificial Sequence: Synthetic oligonucleotide
  Sense strand starting at position 492 of SEQ ID NO: 318280
agucaaagaugucuacucu

SEQ ID NO: 550584 - RNA, 19 nt, Artificial Sequence
  Description of Artificial Sequence: Synthetic oligonucleotide
  Antisense strand to SEQ ID NO: 550583
agaguagacaucuuugacu

SEQ ID NO: 550585 - RNA, 19 nt, Artificial Sequence
  Description of Artificial Sequence: Synthetic oligonucleotide
  Sense strand starting at position 493 of SEQ ID NO: 318280
gucaaagaugucuacucua

SEQ ID NO: 550586 - RNA, 19 nt, Artificial Sequence
  Description of Artificial Sequence: Synthetic oligonucleotide
  Antisense strand to SEQ ID NO: 550585
uagaguagacaucuuugac

SEQ ID NO: 550587 - RNA, 19 nt, Artificial Sequence
  Description of Artificial Sequence: Synthetic oligonucleotide
  Sense strand starting at position 2564 of SEQ ID NO: 318280
acuagaguaaguggacuuu

SEQ ID NO: 550588 - RNA, 19 nt, Artificial Sequence
  Description of Artificial Sequence: Synthetic oligonucleotide
  Antisense strand to SEQ ID NO: 550587
aaaguccacuuacucuagu

SEQ ID NO: 550589 - RNA, 19 nt, Artificial Sequence
  Description of Artificial Sequence: Synthetic oligonucleotide
  Sense strand starting at position 3042 of SEQ ID NO: 318280
cugaauccauucggauauu

SEQ ID NO: 550590 - RNA, 19 nt, Artificial Sequence
  Description of Artificial Sequence: Synthetic oligonucleotide
  Antisense strand to SEQ ID NO: 550589
aauauccgaauggauucag

SEQ ID NO: 550591 - RNA, 19 nt, Artificial Sequence
  Description of Artificial Sequence: Synthetic oligonucleotide
  Sense strand starting at position 3043 of SEQ ID NO: 318280
ugaauccauucggauauuu

SEQ ID NO: 550592 - RNA, 19 nt, Artificial Sequence
  Description of Artificial Sequence: Synthetic oligonucleotide
  Antisense strand to SEQ ID NO: 550591
aaauauccgaauggauuca

SEQ ID NO: 550593 - RNA, 19 nt, Artificial Sequence
  Description of Artificial Sequence: Synthetic oligonucleotide
  Sense strand starting at position 3800 of SEQ ID NO: 318280
gggaaaugccuauggaauu

SEQ ID NO: 550594 - RNA, 19 nt, Artificial Sequence
  Description of Artificial Sequence: Synthetic oligonucleotide
  Antisense strand to SEQ ID NO: 550593
aauuccauaggcauuuccc

SEQ ID NO: 550595 - RNA, 19 nt, Artificial Sequence
  Description of Artificial Sequence: Synthetic oligonucleotide
  Sense strand starting at position 3801 of SEQ ID NO: 318280
ggaaaugccuauggaauua

SEQ ID NO: 550596 - RNA, 19 nt, Artificial Sequence
  Description of Artificial Sequence: Synthetic oligonucleotide
  Antisense strand to SEQ ID NO: 550595
uaauuccauaggcauuucc

SEQ ID NO: 550597 - RNA, 19 nt, Artificial Sequence
  Description of Artificial Sequence: Synthetic oligonucleotide
  Sense strand starting at position 51 of SEQ ID NO: 318281
uagcauugacgucauucca

SEQ ID NO: 550598 - RNA, 19 nt, Artificial Sequence
  Description of Artificial Sequence: Synthetic oligonucleotide
  Antisense strand to SEQ ID NO: 550597
uggaaugacgucaaugcua

SEQ ID NO: 550599 - RNA, 19 nt, Artificial Sequence
  Description of Artificial Sequence: Synthetic oligonucleotide
  Sense strand starting at position 59 of SEQ ID NO: 318281
acgucauuccaccagauuc

SEQ ID NO: 550600 - RNA, 19 nt, Artificial Sequence
  Description of Artificial Sequence: Synthetic oligonucleotide
  Antisense strand to SEQ ID NO: 550599
gaaucugguggaaugacgu

SEQ ID NO: 550601 - RNA, 19 nt, Artificial Sequence
  Description of Artificial Sequence: Synthetic oligonucleotide
  Sense strand starting at position 61 of SEQ ID NO: 318281
gucauuccaccagauucua

SEQ ID NO: 550602 - RNA, 19 nt, Artificial Sequence
  Description of Artificial Sequence: Synthetic oligonucleotide
  Antisense strand to SEQ ID NO: 550601
uagaaucugguggaaugac

SEQ ID NO: 550603 - RNA, 19 nt, Artificial Sequence
  Description of Artificial Sequence: Synthetic oligonucleotide
  Sense strand starting at position 492 of SEQ ID NO: 318281
agucaaagaugucuacucu

SEQ ID NO: 550604 - RNA, 19 nt, Artificial Sequence
  Description of Artificial Sequence: Synthetic oligonucleotide
  Antisense strand to SEQ ID NO: 550603
agaguagacaucuuugacu

SEQ ID NO: 550605 - RNA, 19 nt, Artificial Sequence
  Description of Artificial Sequence: Synthetic oligonucleotide
  Sense strand starting at position 493 of SEQ ID NO: 318281
gucaaagaugucuacucua

SEQ ID NO: 550606 - RNA, 19 nt, Artificial Sequence
  Description of Artificial Sequence: Synthetic oligonucleotide
  Antisense strand to SEQ ID NO: 550605
uagaguagacaucuuugac

SEQ ID NO: 550607 - RNA, 19 nt, Artificial Sequence
  Description of Artificial Sequence: Synthetic oligonucleotide
  Sense strand starting at position 2564 of SEQ ID NO: 318281
acuagaguaaguggacuuu

SEQ ID NO: 550608 - RNA, 19 nt, Artificial Sequence
  Description of Artificial Sequence: Synthetic oligonucleotide
  Antisense strand to SEQ ID NO: 550607
aaaguccacuuacucuagu

SEQ ID NO: 550609 - RNA, 19 nt, Artificial Sequence
  Description of Artificial Sequence: Synthetic oligonucleotide
  Sense strand starting at position 3042 of SEQ ID NO: 318281
cugaauccauucggauauu

SEQ ID NO: 550610 - RNA, 19 nt, Artificial Sequence
  Description of Artificial Sequence: Synthetic oligonucleotide
  Antisense strand to SEQ ID NO: 550609
aauauccgaauggauucag

SEQ ID NO: 550611 - RNA, 19 nt, Artificial Sequence
  Description of Artificial Sequence: Synthetic oligonucleotide
  Sense strand starting at position 3043 of SEQ ID NO: 318281
ugaauccauucggauauuu

SEQ ID NO: 550612 - RNA, 19 nt, Artificial Sequence
  Description of Artificial Sequence: Synthetic oligonucleotide
  Antisense strand to SEQ ID NO: 550611
aaauauccgaauggauuca

SEQ ID NO: 550613 - RNA, 19 nt, Artificial Sequence
  Description of Artificial Sequence: Synthetic oligonucleotide
  Sense strand starting at position 3800 of SEQ ID NO: 318281
gggaaaugccuauggaauu

SEQ ID NO: 550614 - RNA, 19 nt, Artificial Sequence
  Description of Artificial Sequence: Synthetic oligonucleotide
  Antisense strand to SEQ ID NO: 550613
aauuccauaggcauuuccc

SEQ ID NO: 550615 - RNA, 19 nt, Artificial Sequence
  Description of Artificial Sequence: Synthetic oligonucleotide
  Sense strand starting at position 3801 of SEQ ID NO: 318281
ggaaaugccuauggaauua

SEQ ID NO: 550616 - RNA, 19 nt, Artificial Sequence
  Description of Artificial Sequence: Synthetic oligonucleotide
  Antisense strand to SEQ ID NO: 550615
uaauuccauaggcauuucc

SEQ ID NO: 550617 - RNA, 19 nt, Artificial Sequence
  Description of Artificial Sequence: Synthetic oligonucleotide
  Sense strand starting at position 51 of SEQ ID NO: 318282
uagcauugacgucauucca

SEQ ID NO: 550618 - RNA, 19 nt, Artificial Sequence
  Description of Artificial Sequence: Synthetic oligonucleotide
  Antisense strand to SEQ ID NO: 550617
uggaaugacgucaaugcua

SEQ ID NO: 550619 - RNA, 19 nt, Artificial Sequence
  Description of Artificial Sequence: Synthetic oligonucleotide
  Sense strand starting at position 59 of SEQ ID NO: 318282
acgucauuccaccagauuc

SEQ ID NO: 550620 - RNA, 19 nt, Artificial Sequence
  Description of Artificial Sequence: Synthetic oligonucleotide
  Antisense strand to SEQ ID NO: 550619
gaaucugguggaaugacgu

SEQ ID NO: 550621 - RNA, 19 nt, Artificial Sequence
  Description of Artificial Sequence: Synthetic oligonucleotide
  Sense strand starting at position 61 of SEQ ID NO: 318282
gucauuccaccagauucua

SEQ ID NO: 550622 - RNA, 19 nt, Artificial Sequence
  Description of Artificial Sequence: Synthetic oligonucleotide
  Antisense strand to SEQ ID NO: 550621
uagaaucugguggaaugac

SEQ ID NO: 550623 - RNA, 19 nt, Artificial Sequence
  Description of Artificial Sequence: Synthetic oligonucleotide
  Sense strand starting at position 492 of SEQ ID NO: 318282
agucaaagaugucuacucu

SEQ ID NO: 550624 - RNA, 19 nt, Artificial Sequence
  Description of Artificial Sequence: Synthetic oligonucleotide
  Antisense strand to SEQ ID NO: 550623
agaguagacaucuuugacu

SEQ ID NO: 550625 - RNA, 19 nt, Artificial Sequence
  Description of Artificial Sequence: Synthetic oligonucleotide
  Sense strand starting at position 493 of SEQ ID NO: 318282
gucaaagaugucuacucua

SEQ ID NO: 550626 - RNA, 19 nt, Artificial Sequence
  Description of Artificial Sequence: Synthetic oligonucleotide
  Antisense strand to SEQ ID NO: 550625
uagaguagacaucuuugac

SEQ ID NO: 550627 - RNA, 19 nt, Artificial Sequence
  Description of Artificial Sequence: Synthetic oligonucleotide
  Sense strand starting at position 2564 of SEQ ID NO: 318282
acuagaguaaguggacuuu

SEQ ID NO: 550628 - RNA, 19 nt, Artificial Sequence
  Description of Artificial Sequence: Synthetic oligonucleotide
  Antisense strand to SEQ ID NO: 550627
aaaguccacuuacucuagu

SEQ ID NO: 550629 - RNA, 19 nt, Artificial Sequence
  Description of Artificial Sequence: Synthetic oligonucleotide
  Sense strand starting at position 3042 of SEQ ID NO: 318282
cugaauccauucggauauu

SEQ ID NO: 550630 - RNA, 19 nt, Artificial Sequence
  Description of Artificial Sequence: Synthetic oligonucleotide
  Antisense strand to SEQ ID NO: 550629
aauauccgaauggauucag

SEQ ID NO: 550631 - RNA, 19 nt, Artificial Sequence
  Description of Artificial Sequence: Synthetic oligonucleotide
  Sense strand starting at position 3043 of SEQ ID NO: 318282
ugaauccauucggauauuu

SEQ ID NO: 550632 - RNA, 19 nt, Artificial Sequence
  Description of Artificial Sequence: Synthetic oligonucleotide
  Antisense strand to SEQ ID NO: 550631
aaauauccgaauggauuca

SEQ ID NO: 550633 - RNA, 19 nt, Artificial Sequence
  Description of Artificial Sequence: Synthetic oligonucleotide
  Sense strand starting at position 3800 of SEQ ID NO: 318282
gggaaaugccuauggaauu

SEQ ID NO: 550634 - RNA, 19 nt, Artificial Sequence
  Description of Artificial Sequence: Synthetic oligonucleotide
  Antisense strand to SEQ ID NO: 550633
aauuccauaggcauuuccc

SEQ ID NO: 550635 - RNA, 19 nt, Artificial Sequence
  Description of Artificial Sequence: Synthetic oligonucleotide
  Sense strand starting at position 3801 of SEQ ID NO: 318282
ggaaaugccuauggaauua

SEQ ID NO: 550636 - RNA, 19 nt, Artificial Sequence
  Description of Artificial Sequence: Synthetic oligonucleotide
  Antisense strand to SEQ ID NO: 550635
uaauuccauaggcauuucc

SEQ ID NO: 550637 - RNA, 19 nt, Artificial Sequence
  Description of Artificial Sequence: Synthetic oligonucleotide
  Sense strand starting at position 185 of SEQ ID NO: 318283
cugaguauuuccugaagau

SEQ ID NO: 550638 - RNA, 19 nt, Artificial Sequence
  Description of Artificial Sequence: Synthetic oligonucleotide
  Antisense strand to SEQ ID NO: 550637
aucuucaggaaauacucag

SEQ ID NO: 550639 - RNA, 19 nt, Artificial Sequence
  Description of Artificial Sequence: Synthetic oligonucleotide
  Sense strand starting at position 195 of SEQ ID NO: 318283
ccugaagauucugaauaga

SEQ ID NO: 550640 - RNA, 19 nt, Artificial Sequence
  Description of Artificial Sequence: Synthetic oligonucleotide
  Antisense strand to SEQ ID NO: 550639
ucuauucagaaucuucagg

SEQ ID NO: 550641 - RNA, 19 nt, Artificial Sequence
  Description of Artificial Sequence: Synthetic oligonucleotide
  Sense strand starting at position 206 of SEQ ID NO: 318283
ugaauagaaggcuguguuu

SEQ ID NO: 550642 - RNA, 19 nt, Artificial Sequence
  Description of Artificial Sequence: Synthetic oligonucleotide
  Antisense strand to SEQ ID NO: 550641
aaacacagccuucuauuca

SEQ ID NO: 550643 - RNA, 19 nt, Artificial Sequence
  Description of Artificial Sequence: Synthetic oligonucleotide
  Sense strand starting at position 212 of SEQ ID NO: 318283
gaaggcuguguuuggaguu

SEQ ID NO: 550644 - RNA, 19 nt, Artificial Sequence
  Description of Artificial Sequence: Synthetic oligonucleotide
  Antisense strand to SEQ ID NO: 550643
aacuccaaacacagccuuc

SEQ ID NO: 550645 - RNA, 19 nt, Artificial Sequence
  Description of Artificial Sequence: Synthetic oligonucleotide
  Sense strand starting at position 225 of SEQ ID NO: 318283
ggaguuugaugcuuugaaa

SEQ ID NO: 550646 - RNA, 19 nt, Artificial Sequence
  Description of Artificial Sequence: Synthetic oligonucleotide
  Antisense strand to SEQ ID NO: 550645
uuucaaagcaucaaacucc

SEQ ID NO: 550647 - RNA, 19 nt, Artificial Sequence
  Description of Artificial Sequence: Synthetic oligonucleotide
  Sense strand starting at position 249 of SEQ ID NO: 318283
agaaaugauucucagacac

SEQ ID NO: 550648 - RNA, 19 nt, Artificial Sequence
  Description of Artificial Sequence: Synthetic oligonucleotide
  Antisense strand to SEQ ID NO: 550647
gugucugagaaucauuucu

SEQ ID NO: 550649 - RNA, 19 nt, Artificial Sequence
  Description of Artificial Sequence: Synthetic oligonucleotide
  Sense strand starting at position 358 of SEQ ID NO: 318283
agucuuagaguuugagcua

SEQ ID NO: 550650 - RNA, 19 nt, Artificial Sequence
  Description of Artificial Sequence: Synthetic oligonucleotide
  Antisense strand to SEQ ID NO: 550649
uagcucaaacucuaagacu

SEQ ID NO: 550651 - RNA, 19 nt, Artificial Sequence
  Description of Artificial Sequence: Synthetic oligonucleotide
  Sense strand starting at position 380 of SEQ ID NO: 318283
cacggugaucaugagcaga

SEQ ID NO: 550652 - RNA, 19 nt, Artificial Sequence
  Description of Artificial Sequence: Synthetic oligonucleotide
  Antisense strand to SEQ ID NO: 550651
ucugcucaugaucaccgug

SEQ ID NO: 550653 - RNA, 19 nt, Artificial Sequence
  Description of Artificial Sequence: Synthetic oligonucleotide
  Sense strand starting at position 382 of SEQ ID NO: 318283
cggugaucaugagcagacu

SEQ ID NO: 550654 - RNA, 19 nt, Artificial Sequence
  Description of Artificial Sequence: Synthetic oligonucleotide
  Antisense strand to SEQ ID NO: 550653
agucugcucaugaucaccg

SEQ ID NO: 550655 - RNA, 19 nt, Artificial Sequence
  Description of Artificial Sequence: Synthetic oligonucleotide
  Sense strand starting at position 414 of SEQ ID NO: 318283
cugauacugucaccugcua

SEQ ID NO: 550656 - RNA, 19 nt, Artificial Sequence
  Description of Artificial Sequence: Synthetic oligonucleotide
  Antisense strand to SEQ ID NO: 550655
uagcaggugacaguaucag

SEQ ID NO: 550657 - RNA, 19 nt, Artificial Sequence
  Description of Artificial Sequence: Synthetic oligonucleotide
  Sense strand starting at position 469 of SEQ ID NO: 318283
ggccucaguuuccucaaua

SEQ ID NO: 550658 - RNA, 19 nt, Artificial Sequence
  Description of Artificial Sequence: Synthetic oligonucleotide
  Antisense strand to SEQ ID NO: 550657
uauugaggaaacugaggcc

SEQ ID NO: 550659 - RNA, 19 nt, Artificial Sequence
  Description of Artificial Sequence: Synthetic oligonucleotide
  Sense strand starting at position 517 of SEQ ID NO: 318283
acccgugaagcuuaaauga

SEQ ID NO: 550660 - RNA, 19 nt, Artificial Sequence
  Description of Artificial Sequence: Synthetic oligonucleotide
  Antisense strand to SEQ ID NO: 550659
ucauuuaagcuucacgggu

SEQ ID NO: 550661 - RNA, 19 nt, Artificial Sequence
  Description of Artificial Sequence: Synthetic oligonucleotide
  Sense strand starting at position 534 of SEQ ID NO: 318283
gagcuagcauaugucaagu

SEQ ID NO: 550662 - RNA, 19 nt, Artificial Sequence
  Description of Artificial Sequence: Synthetic oligonucleotide
  Antisense strand to SEQ ID NO: 550661
acuugacauaugcuagcuc

SEQ ID NO: 550663 - RNA, 19 nt, Artificial Sequence
  Description of Artificial Sequence: Synthetic oligonucleotide
  Sense strand starting at position 543 of SEQ ID NO: 318283
uaugucaagugcuuagaau

SEQ ID NO: 550664 - RNA, 19 nt, Artificial Sequence
  Description of Artificial Sequence: Synthetic oligonucleotide
  Antisense strand to SEQ ID NO: 550663
auucuaagcacuugacaua

SEQ ID NO: 550665 - RNA, 19 nt, Artificial Sequence
  Description of Artificial Sequence: Synthetic oligonucleotide
  Sense strand starting at position 621 of SEQ ID NO: 318283
ugauaaguaguuugaccca

SEQ ID NO: 550666 - RNA, 19 nt, Artificial Sequence
  Description of Artificial Sequence: Synthetic oligonucleotide
  Antisense strand to SEQ ID NO: 550665
ugggucaaacuacuuauca

SEQ ID NO: 550667 - RNA, 19 nt, Artificial Sequence
  Description of Artificial Sequence: Synthetic oligonucleotide
  Sense strand starting at position 1052 of SEQ ID NO: 318283
gugccuagguuuccagaau

SEQ ID NO: 550668 - RNA, 19 nt, Artificial Sequence
  Description of Artificial Sequence: Synthetic oligonucleotide
  Antisense strand to SEQ ID NO: 550667
auucuggaaaccuaggcac

SEQ ID NO: 550669 - RNA, 19 nt, Artificial Sequence
  Description of Artificial Sequence: Synthetic oligonucleotide
  Sense strand starting at position 1437 of SEQ ID NO: 318283
gccuguaaggaaugaauca

SEQ ID NO: 550670 - RNA, 19 nt, Artificial Sequence
  Description of Artificial Sequence: Synthetic oligonucleotide
  Antisense strand to SEQ ID NO: 550669
ugauucauuccuuacaggc

SEQ ID NO: 550671 - RNA, 19 nt, Artificial Sequence
  Description of Artificial Sequence: Synthetic oligonucleotide
  Sense strand starting at position 2259 of SEQ ID NO: 318283
aggccaaacccgugagauc

SEQ ID NO: 550672 - RNA, 19 nt, Artificial Sequence
  Description of Artificial Sequence: Synthetic oligonucleotide
  Antisense strand to SEQ ID NO: 550671
gaucucacggguuuggccu

SEQ ID NO: 550673 - RNA, 19 nt, Artificial Sequence
  Description of Artificial Sequence: Synthetic oligonucleotide
  Sense strand starting at position 2359 of SEQ ID NO: 318283
acguguuugaaccgaauca

SEQ ID NO: 550674 - RNA, 19 nt, Artificial Sequence
  Description of Artificial Sequence: Synthetic oligonucleotide
  Antisense strand to SEQ ID NO: 550673
ugauucgguucaaacacgu

SEQ ID NO: 550675 - RNA, 19 nt, Artificial Sequence
  Description of Artificial Sequence: Synthetic oligonucleotide
  Sense strand starting at position 2360 of SEQ ID NO: 318283
cguguuugaaccgaaucaa

SEQ ID NO: 550676 - RNA, 19 nt, Artificial Sequence
  Description of Artificial Sequence: Synthetic oligonucleotide
  Antisense strand to SEQ ID NO: 550675
uugauucgguucaaacacg

SEQ ID NO: 550677 - RNA, 19 nt, Artificial Sequence
  Description of Artificial Sequence: Synthetic oligonucleotide
  Sense strand starting at position 2401 of SEQ ID NO: 318283
ucgcguucuauccagaaac

SEQ ID NO: 550678 - RNA, 19 nt, Artificial Sequence
  Description of Artificial Sequence: Synthetic oligonucleotide
  Antisense strand to SEQ ID NO: 550677
guuucuggauagaacgcga

SEQ ID NO: 550679 - RNA, 19 nt, Artificial Sequence
  Description of Artificial Sequence: Synthetic oligonucleotide
  Sense strand starting at position 2429 of SEQ ID NO: 318283
gacaaaguuucuucggcua

SEQ ID NO: 550680 - RNA, 19 nt, Artificial Sequence
  Description of Artificial Sequence: Synthetic oligonucleotide
  Antisense strand to SEQ ID NO: 550679
uagccgaagaaacuuuguc

SEQ ID NO: 550681 - RNA, 19 nt, Artificial Sequence
  Description of Artificial Sequence: Synthetic oligonucleotide
  Sense strand starting at position 2432 of SEQ ID NO: 318283
aaaguuucuucggcuacaa

SEQ ID NO: 550682 - RNA, 19 nt, Artificial Sequence
  Description of Artificial Sequence: Synthetic oligonucleotide
  Antisense strand to SEQ ID NO: 550681
uuguagccgaagaaacuuu

SEQ ID NO: 550683 - RNA, 19 nt, Artificial Sequence
  Description of Artificial Sequence: Synthetic oligonucleotide
  Sense strand starting at position 2434 of SEQ ID NO: 318283
aguuucuucggcuacaaca

SEQ ID NO: 550684 - RNA, 19 nt, Artificial Sequence
  Description of Artificial Sequence: Synthetic oligonucleotide
  Antisense strand to SEQ ID NO: 550683
uguuguagccgaagaaacu

SEQ ID NO: 550685 - RNA, 19 nt, Artificial Sequence
  Description of Artificial Sequence: Synthetic oligonucleotide
  Sense strand starting at position 2867 of SEQ ID NO: 318283
gccuuugaaaggugcauuu

SEQ ID NO: 550686 - RNA, 19 nt, Artificial Sequence
  Description of Artificial Sequence: Synthetic oligonucleotide
  Antisense strand to SEQ ID NO: 550685
aaaugcaccuuucaaaggc

SEQ ID NO: 550687 - RNA, 19 nt, Artificial Sequence
  Description of Artificial Sequence: Synthetic oligonucleotide
  Sense strand starting at position 3009 of SEQ ID NO: 318283
ccuaguuugguuugaguuu

SEQ ID NO: 550688 - RNA, 19 nt, Artificial Sequence
  Description of Artificial Sequence: Synthetic oligonucleotide
  Antisense strand to SEQ ID NO: 550687
aaacucaaaccaaacuagg

SEQ ID NO: 550689 - RNA, 19 nt, Artificial Sequence
  Description of Artificial Sequence: Synthetic oligonucleotide
  Sense strand starting at position 3279 of SEQ ID NO: 318283
gccuaaaggcccuaauaca

SEQ ID NO: 550690 - RNA, 19 nt, Artificial Sequence
  Description of Artificial Sequence: Synthetic oligonucleotide
  Antisense strand to SEQ ID NO: 550689
uguauuagggccuuuaggc

SEQ ID NO: 550691 - RNA, 19 nt, Artificial Sequence
  Description of Artificial Sequence: Synthetic oligonucleotide
  Sense strand starting at position 3377 of SEQ ID NO: 318283
aauguaugguccuuugcca

SEQ ID NO: 550692 - RNA, 19 nt, Artificial Sequence
  Description of Artificial Sequence: Synthetic oligonucleotide
  Antisense strand to SEQ ID NO: 550691
uggcaaaggaccauacauu

SEQ ID NO: 550693 - RNA, 19 nt, Artificial Sequence
  Description of Artificial Sequence: Synthetic oligonucleotide
  Sense strand starting at position 3399 of SEQ ID NO: 318283
cucucauuacuugaagagu

SEQ ID NO: 550694 - RNA, 19 nt, Artificial Sequence
  Description of Artificial Sequence: Synthetic oligonucleotide
  Antisense strand to SEQ ID NO: 550693
acucuucaaguaaugagag

SEQ ID NO: 550695 - RNA, 19 nt, Artificial Sequence
  Description of Artificial Sequence: Synthetic oligonucleotide
  Sense strand starting at position 3425 of SEQ ID NO: 318283
aguccauuaguuuagccau

SEQ ID NO: 550696 - RNA, 19 nt, Artificial Sequence
  Description of Artificial Sequence: Synthetic oligonucleotide
  Antisense strand to SEQ ID NO: 550695
auggcuaaacuaauggacu

SEQ ID NO: 550697 - RNA, 19 nt, Artificial Sequence
  Description of Artificial Sequence: Synthetic oligonucleotide
  Sense strand starting at position 3476 of SEQ ID NO: 318283
guuggaaagucuuuaugau

SEQ ID NO: 550698 - RNA, 19 nt, Artificial Sequence
  Description of Artificial Sequence: Synthetic oligonucleotide
  Antisense strand to SEQ ID NO: 550697
aucauaaagacuuuccaac

SEQ ID NO: 550699 - RNA, 19 nt, Artificial Sequence
  Description of Artificial Sequence: Synthetic oligonucleotide
  Sense strand starting at position 3741 of SEQ ID NO: 318283
gcaguagcaccauauaaau

SEQ ID NO: 550700 - RNA, 19 nt, Artificial Sequence
  Description of Artificial Sequence: Synthetic oligonucleotide
  Antisense strand to SEQ ID NO: 550699
auuuauauggugcuacugc

SEQ ID NO: 550701 - RNA, 19 nt, Artificial Sequence
  Description of Artificial Sequence: Synthetic oligonucleotide
  Sense strand starting at position 3750 of SEQ ID NO: 318283
ccauauaaauucgcgauua

SEQ ID NO: 550702 - RNA, 19 nt, Artificial Sequence
  Description of Artificial Sequence: Synthetic oligonucleotide
  Antisense strand to SEQ ID NO: 550701
uaaucgcgaauuuauaugg

SEQ ID NO: 550703 - RNA, 19 nt, Artificial Sequence
  Description of Artificial Sequence: Synthetic oligonucleotide
  Sense strand starting at position 3760 of SEQ ID NO: 318283
ucgcgauuauacccuuaac

SEQ ID NO: 550704 - RNA, 19 nt, Artificial Sequence
  Description of Artificial Sequence: Synthetic oligonucleotide
  Antisense strand to SEQ ID NO: 550703
guuaaggguauaaucgcga

SEQ ID NO: 550705 - RNA, 19 nt, Artificial Sequence
  Description of Artificial Sequence: Synthetic oligonucleotide
  Sense strand starting at position 3763 of SEQ ID NO: 318283
cgauuauacccuuaacagu

SEQ ID NO: 550706 - RNA, 19 nt, Artificial Sequence
  Description of Artificial Sequence: Synthetic oligonucleotide
  Antisense strand to SEQ ID NO: 550705
acuguuaaggguauaaucg

SEQ ID NO: 550707 - RNA, 19 nt, Artificial Sequence
  Description of Artificial Sequence: Synthetic oligonucleotide
  Sense strand starting at position 3865 of SEQ ID NO: 318283
ucaaguuaaccugagguca

SEQ ID NO: 550708 - RNA, 19 nt, Artificial Sequence
  Description of Artificial Sequence: Synthetic oligonucleotide
  Antisense strand to SEQ ID NO: 550707
ugaccucagguuaacuuga

SEQ ID NO: 550709 - RNA, 19 nt, Artificial Sequence
  Description of Artificial Sequence: Synthetic oligonucleotide
  Sense strand starting at position 3877 of SEQ ID NO: 318283
gaggucauauaagauuaau

SEQ ID NO: 550710 - RNA, 19 nt, Artificial Sequence
  Description of Artificial Sequence: Synthetic oligonucleotide
  Antisense strand to SEQ ID NO: 550709
auuaaucuuauaugaccuc

SEQ ID NO: 550711 - RNA, 19 nt, Artificial Sequence
  Description of Artificial Sequence: Synthetic oligonucleotide
  Sense strand starting at position 3956 of SEQ ID NO: 318283
cugugugaccacugagaca

SEQ ID NO: 550712 - RNA, 19 nt, Artificial Sequence
  Description of Artificial Sequence: Synthetic oligonucleotide
  Antisense strand to SEQ ID NO: 550711
ugucucaguggucacacag

SEQ ID NO: 550713 - RNA, 19 nt, Artificial Sequence
  Description of Artificial Sequence: Synthetic oligonucleotide
  Sense strand starting at position 3971 of SEQ ID NO: 318283
gacagauccugcuuaugcu

SEQ ID NO: 550714 - RNA, 19 nt, Artificial Sequence
  Description of Artificial Sequence: Synthetic oligonucleotide
  Antisense strand to SEQ ID NO: 550713
agcauaagcaggaucuguc

SEQ ID NO: 550715 - RNA, 19 nt, Artificial Sequence
  Description of Artificial Sequence: Synthetic oligonucleotide
  Sense strand starting at position 3978 of SEQ ID NO: 318283
ccugcuuaugcugacucaa

SEQ ID NO: 550716 - RNA, 19 nt, Artificial Sequence
  Description of Artificial Sequence: Synthetic oligonucleotide
  Antisense strand to SEQ ID NO: 550715
uugagucagcauaagcagg

SEQ ID NO: 550717 - RNA, 19 nt, Artificial Sequence
  Description of Artificial Sequence: Synthetic oligonucleotide
  Sense strand starting at position 326 of SEQ ID NO: 318284
cugaguauuuccugaagau

SEQ ID NO: 550718 - RNA, 19 nt, Artificial Sequence
  Description of Artificial Sequence: Synthetic oligonucleotide
  Antisense strand to SEQ ID NO: 550717
aucuucaggaaauacucag

SEQ ID NO: 550719 - RNA, 19 nt, Artificial Sequence
  Description of Artificial Sequence: Synthetic oligonucleotide
  Sense strand starting at position 336 of SEQ ID NO: 318284
ccugaagauucugaauaga

SEQ ID NO: 550720 - RNA, 19 nt, Artificial Sequence
  Description of Artificial Sequence: Synthetic oligonucleotide
  Antisense strand to SEQ ID NO: 550719
ucuauucagaaucuucagg

SEQ ID NO: 550721 - RNA, 19 nt, Artificial Sequence
  Description of Artificial Sequence: Synthetic oligonucleotide
  Sense strand starting at position 347 of SEQ ID NO: 318284
ugaauagaaggcuguguuu

SEQ ID NO: 550722 - RNA, 19 nt, Artificial Sequence
  Description of Artificial Sequence: Synthetic oligonucleotide
  Antisense strand to SEQ ID NO: 550721
aaacacagccuucuauuca

SEQ ID NO: 550723 - RNA, 19 nt, Artificial Sequence
  Description of Artificial Sequence: Synthetic oligonucleotide
  Sense strand starting at position 353 of SEQ ID NO: 318284
gaaggcuguguuuggaguu

SEQ ID NO: 550724 - RNA, 19 nt, Artificial Sequence
  Description of Artificial Sequence: Synthetic oligonucleotide
  Antisense strand to SEQ ID NO: 550723
aacuccaaacacagccuuc

SEQ ID NO: 550725 - RNA, 19 nt, Artificial Sequence
  Description of Artificial Sequence: Synthetic oligonucleotide
  Sense strand starting at position 366 of SEQ ID NO: 318284
ggaguuugaugcuuugaaa

SEQ ID NO: 550726 - RNA, 19 nt, Artificial Sequence
  Description of Artificial Sequence: Synthetic oligonucleotide
  Antisense strand to SEQ ID NO: 550725
uuucaaagcaucaaacucc

SEQ ID NO: 550727 - RNA, 19 nt, Artificial Sequence
  Description of Artificial Sequence: Synthetic oligonucleotide
  Sense strand starting at position 390 of SEQ ID NO: 318284
agaaaugauucucagacac

SEQ ID NO: 550728 - RNA, 19 nt, Artificial Sequence
  Description of Artificial Sequence: Synthetic oligonucleotide
  Antisense strand to SEQ ID NO: 550727
gugucugagaaucauuucu

SEQ ID NO: 550729 - RNA, 19 nt, Artificial Sequence
  Description of Artificial Sequence: Synthetic oligonucleotide
  Sense strand starting at position 499 of SEQ ID NO: 318284
agucuuagaguuugagcua

SEQ ID NO: 550730 - RNA, 19 nt, Artificial Sequence
  Description of Artificial Sequence: Synthetic oligonucleotide
  Antisense strand to SEQ ID NO: 550729
uagcucaaacucuaagacu

SEQ ID NO: 550731 - RNA, 19 nt, Artificial Sequence
  Description of Artificial Sequence: Synthetic oligonucleotide
  Sense strand starting at position 521 of SEQ ID NO: 318284
cacggugaucaugagcaga

SEQ ID NO: 550732 - RNA, 19 nt, Artificial Sequence
  Description of Artificial Sequence: Synthetic oligonucleotide
  Antisense strand to SEQ ID NO: 550731
ucugcucaugaucaccgug

SEQ ID NO: 550733 - RNA, 19 nt, Artificial Sequence
  Description of Artificial Sequence: Synthetic oligonucleotide
  Sense strand starting at position 523 of SEQ ID NO: 318284
cggugaucaugagcagacu

SEQ ID NO: 550734 - RNA, 19 nt, Artificial Sequence
  Description of Artificial Sequence: Synthetic oligonucleotide
  Antisense strand to SEQ ID NO: 550733
agucugcucaugaucaccg

SEQ ID NO: 550735 - RNA, 19 nt, Artificial Sequence
  Description of Artificial Sequence: Synthetic oligonucleotide
  Sense strand starting at position 555 of SEQ ID NO: 318284
cugauacugucaccugcua

SEQ ID NO: 550736 - RNA, 19 nt, Artificial Sequence
  Description of Artificial Sequence: Synthetic oligonucleotide
  Antisense strand to SEQ ID NO: 550735
uagcaggugacaguaucag

SEQ ID NO: 550737 - RNA, 19 nt, Artificial Sequence
  Description of Artificial Sequence: Synthetic oligonucleotide
  Sense strand starting at position 610 of SEQ ID NO: 318284
ggccucaguuuccucaaua

SEQ ID NO: 550738 - RNA, 19 nt, Artificial Sequence
  Description of Artificial Sequence: Synthetic oligonucleotide
  Antisense strand to SEQ ID NO: 550737
uauugaggaaacugaggcc

SEQ ID NO: 550739 - RNA, 19 nt, Artificial Sequence
  Description of Artificial Sequence: Synthetic oligonucleotide
  Sense strand starting at position 658 of SEQ ID NO: 318284
acccgugaagcuuaaauga

SEQ ID NO: 550740 - RNA, 19 nt, Artificial Sequence
  Description of Artificial Sequence: Synthetic oligonucleotide
  Antisense strand to SEQ ID NO: 550739
ucauuuaagcuucacgggu

SEQ ID NO: 550741 - RNA, 19 nt, Artificial Sequence
  Description of Artificial Sequence: Synthetic oligonucleotide
  Sense strand starting at position 675 of SEQ ID NO: 318284
gagcuagcauaugucaagu

SEQ ID NO: 550742 - RNA, 19 nt, Artificial Sequence
  Description of Artificial Sequence: Synthetic oligonucleotide
  Antisense strand to SEQ ID NO: 550741
acuugacauaugcuagcuc

SEQ ID NO: 550743 - RNA, 19 nt, Artificial Sequence
  Description of Artificial Sequence: Synthetic oligonucleotide
  Sense strand starting at position 681 of SEQ ID NO: 318284
gcauaugucaagugcuuag

SEQ ID NO: 550744 - RNA, 19 nt, Artificial Sequence
  Description of Artificial Sequence: Synthetic oligonucleotide
  Antisense strand to SEQ ID NO: 550743
cuaagcacuugacauaugc

SEQ ID NO: 550745 - RNA, 19 nt, Artificial Sequence
  Description of Artificial Sequence: Synthetic oligonucleotide
  Sense strand starting at position 684 of SEQ ID NO: 318284
uaugucaagugcuuagaau

SEQ ID NO: 550746 - RNA, 19 nt, Artificial Sequence
  Description of Artificial Sequence: Synthetic oligonucleotide
  Antisense strand to SEQ ID NO: 550745
auucuaagcacuugacaua

SEQ ID NO: 550747 - RNA, 19 nt, Artificial Sequence
  Description of Artificial Sequence: Synthetic oligonucleotide
  Sense strand starting at position 762 of SEQ ID NO: 318284
ugauaaguaguuugaccca

SEQ ID NO: 550748 - RNA, 19 nt, Artificial Sequence
  Description of Artificial Sequence: Synthetic oligonucleotide
  Antisense strand to SEQ ID NO: 550747
ugggucaaacuacuuauca

SEQ ID NO: 550749 - RNA, 19 nt, Artificial Sequence
  Description of Artificial Sequence: Synthetic oligonucleotide
  Sense strand starting at position 1193 of SEQ ID NO: 318284
gugccuagguuuccagaau

SEQ ID NO: 550750 - RNA, 19 nt, Artificial Sequence
  Description of Artificial Sequence: Synthetic oligonucleotide
  Antisense strand to SEQ ID NO: 550749
auucuggaaaccuaggcac

SEQ ID NO: 550751 - RNA, 19 nt, Artificial Sequence
  Description of Artificial Sequence: Synthetic oligonucleotide
  Sense strand starting at position 1578 of SEQ ID NO: 318284
gccuguaaggaaugaauca

SEQ ID NO: 550752 - RNA, 19 nt, Artificial Sequence
  Description of Artificial Sequence: Synthetic oligonucleotide
  Antisense strand to SEQ ID NO: 550751
ugauucauuccuuacaggc

SEQ ID NO: 550753 - RNA, 19 nt, Artificial Sequence
  Description of Artificial Sequence: Synthetic oligonucleotide
  Sense strand starting at position 2400 of SEQ ID NO: 318284
aggccaaacccgugagauc

SEQ ID NO: 550754 - RNA, 19 nt, Artificial Sequence
  Description of Artificial Sequence: Synthetic oligonucleotide
  Antisense strand to SEQ ID NO: 550753
gaucucacggguuuggccu

SEQ ID NO: 550755 - RNA, 19 nt, Artificial Sequence
  Description of Artificial Sequence: Synthetic oligonucleotide
  Sense strand starting at position 2500 of SEQ ID NO: 318284
acguguuugaaccgaauca

SEQ ID NO: 550756 - RNA, 19 nt, Artificial Sequence
  Description of Artificial Sequence: Synthetic oligonucleotide
  Antisense strand to SEQ ID NO: 550755
ugauucgguucaaacacgu

SEQ ID NO: 550757 - RNA, 19 nt, Artificial Sequence
  Description of Artificial Sequence: Synthetic oligonucleotide
  Sense strand starting at position 2501 of SEQ ID NO: 318284
cguguuugaaccgaaucaa

SEQ ID NO: 550758 - RNA, 19 nt, Artificial Sequence
  Description of Artificial Sequence: Synthetic oligonucleotide
  Antisense strand to SEQ ID NO: 550757
uugauucgguucaaacacg

SEQ ID NO: 550759 - RNA, 19 nt, Artificial Sequence
  Description of Artificial Sequence: Synthetic oligonucleotide
  Sense strand starting at position 2542 of SEQ ID NO: 318284
ucgcguucuauccagaaac

SEQ ID NO: 550760 - RNA, 19 nt, Artificial Sequence
  Description of Artificial Sequence: Synthetic oligonucleotide
  Antisense strand to SEQ ID NO: 550759
guuucuggauagaacgcga

SEQ ID NO: 550761 - RNA, 19 nt, Artificial Sequence
  Description of Artificial Sequence: Synthetic oligonucleotide
  Sense strand starting at position 2560 of SEQ ID NO: 318284
cgcccuguccgacaaaguu

SEQ ID NO: 550762 - RNA, 19 nt, Artificial Sequence
  Description of Artificial Sequence: Synthetic oligonucleotide
  Antisense strand to SEQ ID NO: 550761
aacuuugucggacagggcg

SEQ ID NO: 550763 - RNA, 19 nt, Artificial Sequence
  Description of Artificial Sequence: Synthetic oligonucleotide
  Sense strand starting at position 2570 of SEQ ID NO: 318284
gacaaaguuucuucggcua

SEQ ID NO: 550764 - RNA, 19 nt, Artificial Sequence
  Description of Artificial Sequence: Synthetic oligonucleotide
  Antisense strand to SEQ ID NO: 550763
uagccgaagaaacuuuguc

SEQ ID NO: 550765 - RNA, 19 nt, Artificial Sequence
  Description of Artificial Sequence: Synthetic oligonucleotide
  Sense strand starting at position 2573 of SEQ ID NO: 318284
aaaguuucuucggcuacaa

SEQ ID NO: 550766 - RNA, 19 nt, Artificial Sequence
  Description of Artificial Sequence: Synthetic oligonucleotide
  Antisense strand to SEQ ID NO: 550765
uuguagccgaagaaacuuu

SEQ ID NO: 550767 - RNA, 19 nt, Artificial Sequence
  Description of Artificial Sequence: Synthetic oligonucleotide
  Sense strand starting at position 2575 of SEQ ID NO: 318284
aguuucuucggcuacaaca

SEQ ID NO: 550768 - RNA, 19 nt, Artificial Sequence
  Description of Artificial Sequence: Synthetic oligonucleotide
  Antisense strand to SEQ ID NO: 550767
uguuguagccgaagaaacu

SEQ ID NO: 550769 - RNA, 19 nt, Artificial Sequence
  Description of Artificial Sequence: Synthetic oligonucleotide
  Sense strand starting at position 3008 of SEQ ID NO: 318284
gccuuugaaaggugcauuu

SEQ ID NO: 550770 - RNA, 19 nt, Artificial Sequence
  Description of Artificial Sequence: Synthetic oligonucleotide
  Antisense strand to SEQ ID NO: 550769
aaaugcaccuuucaaaggc

SEQ ID NO: 550771 - RNA, 19 nt, Artificial Sequence
  Description of Artificial Sequence: Synthetic oligonucleotide
  Sense strand starting at position 3026 of SEQ ID NO: 318284
ucaccucucuuagaggaua

SEQ ID NO: 550772 - RNA, 19 nt, Artificial Sequence
  Description of Artificial Sequence: Synthetic oligonucleotide
  Antisense strand to SEQ ID NO: 550771
uauccucuaagagagguga

SEQ ID NO: 550773 - RNA, 19 nt, Artificial Sequence
  Description of Artificial Sequence: Synthetic oligonucleotide
  Sense strand starting at position 3148 of SEQ ID NO: 318284
agccuaguuugguuugagu

SEQ ID NO: 550774 - RNA, 19 nt, Artificial Sequence
  Description of Artificial Sequence: Synthetic oligonucleotide
  Antisense strand to SEQ ID NO: 550773
acucaaaccaaacuaggcu

SEQ ID NO: 550775 - RNA, 19 nt, Artificial Sequence
  Description of Artificial Sequence: Synthetic oligonucleotide
  Sense strand starting at position 3150 of SEQ ID NO: 318284
ccuaguuugguuugaguuu

SEQ ID NO: 550776 - RNA, 19 nt, Artificial Sequence
  Description of Artificial Sequence: Synthetic oligonucleotide
  Antisense strand to SEQ ID NO: 550775
aaacucaaaccaaacuagg

SEQ ID NO: 550777 - RNA, 19 nt, Artificial Sequence
  Description of Artificial Sequence: Synthetic oligonucleotide
  Sense strand starting at position 3420 of SEQ ID NO: 318284
gccuaaaggcccuaauaca

SEQ ID NO: 550778 - RNA, 19 nt, Artificial Sequence
  Description of Artificial Sequence: Synthetic oligonucleotide
  Antisense strand to SEQ ID NO: 550777
uguauuagggccuuuaggc

SEQ ID NO: 550779 - RNA, 19 nt, Artificial Sequence
  Description of Artificial Sequence: Synthetic oligonucleotide
  Sense strand starting at position 3518 of SEQ ID NO: 318284
aauguaugguccuuugcca

SEQ ID NO: 550780 - RNA, 19 nt, Artificial Sequence
  Description of Artificial Sequence: Synthetic oligonucleotide
  Antisense strand to SEQ ID NO: 550779
uggcaaaggaccauacauu

SEQ ID NO: 550781 - RNA, 19 nt, Artificial Sequence
  Description of Artificial Sequence: Synthetic oligonucleotide
  Sense strand starting at position 3540 of SEQ ID NO: 318284
cucucauuacuugaagagu

SEQ ID NO: 550782 - RNA, 19 nt, Artificial Sequence
  Description of Artificial Sequence: Synthetic oligonucleotide
  Antisense strand to SEQ ID NO: 550781
acucuucaaguaaugagag

SEQ ID NO: 550783 - RNA, 19 nt, Artificial Sequence
  Description of Artificial Sequence: Synthetic oligonucleotide
  Sense strand starting at position 3566 of SEQ ID NO: 318284
aguccauuaguuuagccau

SEQ ID NO: 550784 - RNA, 19 nt, Artificial Sequence
  Description of Artificial Sequence: Synthetic oligonucleotide
  Antisense strand to SEQ ID NO: 550783
auggcuaaacuaauggacu

SEQ ID NO: 550785 - RNA, 19 nt, Artificial Sequence
  Description of Artificial Sequence: Synthetic oligonucleotide
  Sense strand starting at position 3578 of SEQ ID NO: 318284
uagccaucugcaugguuau

SEQ ID NO: 550786 - RNA, 19 nt, Artificial Sequence
  Description of Artificial Sequence: Synthetic oligonucleotide
  Antisense strand to SEQ ID NO: 550785
auaaccaugcagauggcua

SEQ ID NO: 550787 - RNA, 19 nt, Artificial Sequence
  Description of Artificial Sequence: Synthetic oligonucleotide
  Sense strand starting at position 3617 of SEQ ID NO: 318284
guuggaaagucuuuaugau

SEQ ID NO: 550788 - RNA, 19 nt, Artificial Sequence
  Description of Artificial Sequence: Synthetic oligonucleotide
  Antisense strand to SEQ ID NO: 550787
aucauaaagacuuuccaac

SEQ ID NO: 550789 - RNA, 19 nt, Artificial Sequence
  Description of Artificial Sequence: Synthetic oligonucleotide
  Sense strand starting at position 3882 of SEQ ID NO: 318284
gcaguagcaccauauaaau

SEQ ID NO: 550790 - RNA, 19 nt, Artificial Sequence
  Description of Artificial Sequence: Synthetic oligonucleotide
  Antisense strand to SEQ ID NO: 550789
auuuauauggugcuacugc

SEQ ID NO: 550791 - RNA, 19 nt, Artificial Sequence
  Description of Artificial Sequence: Synthetic oligonucleotide
  Sense strand starting at position 3891 of SEQ ID NO: 318284
ccauauaaauucgcgauua

SEQ ID NO: 550792 - RNA, 19 nt, Artificial Sequence
  Description of Artificial Sequence: Synthetic oligonucleotide
  Antisense strand to SEQ ID NO: 550791
uaaucgcgaauuuauaugg

SEQ ID NO: 550793 - RNA, 19 nt, Artificial Sequence
  Description of Artificial Sequence: Synthetic oligonucleotide
  Sense strand starting at position 3901 of SEQ ID NO: 318284
ucgcgauuauacccuuaac

SEQ ID NO: 550794 - RNA, 19 nt, Artificial Sequence
  Description of Artificial Sequence: Synthetic oligonucleotide
  Antisense strand to SEQ ID NO: 550793
guuaaggguauaaucgcga

SEQ ID NO: 550795 - RNA, 19 nt, Artificial Sequence
  Description of Artificial Sequence: Synthetic oligonucleotide
  Sense strand starting at position 3904 of SEQ ID NO: 318284
cgauuauacccuuaacagu

SEQ ID NO: 550796 - RNA, 19 nt, Artificial Sequence
  Description of Artificial Sequence: Synthetic oligonucleotide
  Antisense strand to SEQ ID NO: 550795
acuguuaaggguauaaucg

SEQ ID NO: 550797 - RNA, 19 nt, Artificial Sequence
  Description of Artificial Sequence: Synthetic oligonucleotide
  Sense strand starting at position 162 of SEQ ID NO: 318285
gcuccucacgcauaaagau

SEQ ID NO: 550798 - RNA, 19 nt, Artificial Sequence
  Description of Artificial Sequence: Synthetic oligonucleotide
  Antisense strand to SEQ ID NO: 550797
aucuuuaugcgugaggagc

SEQ ID NO: 550799 - RNA, 19 nt, Artificial Sequence
  Description of Artificial Sequence: Synthetic oligonucleotide
  Sense strand starting at position 187 of SEQ ID NO: 318285
guagugagucuuggcgaag

SEQ ID NO: 550800 - RNA, 19 nt, Artificial Sequence
  Description of Artificial Sequence: Synthetic oligonucleotide
  Antisense strand to SEQ ID NO: 550799
cuucgccaagacucacuac

SEQ ID NO: 550801 - RNA, 19 nt, Artificial Sequence
  Description of Artificial Sequence: Synthetic oligonucleotide
  Sense strand starting at position 653 of SEQ ID NO: 318285
ggaagaaacucccagggua

SEQ ID NO: 550802 - RNA, 19 nt, Artificial Sequence
  Description of Artificial Sequence: Synthetic oligonucleotide
  Antisense strand to SEQ ID NO: 550801
uacccugggaguuucuucc

SEQ ID NO: 550803 - RNA, 19 nt, Artificial Sequence
  Description of Artificial Sequence: Synthetic oligonucleotide
  Sense strand starting at position 655 of SEQ ID NO: 318285
aagaaacucccaggguauu

SEQ ID NO: 550804 - RNA, 19 nt, Artificial Sequence
  Description of Artificial Sequence: Synthetic oligonucleotide
  Antisense strand to SEQ ID NO: 550803
aauacccugggaguuucuu

SEQ ID NO: 550805 - RNA, 19 nt, Artificial Sequence
  Description of Artificial Sequence: Synthetic oligonucleotide
  Sense strand starting at position 769 of SEQ ID NO: 318285
gcuuucgucucucccacaa

SEQ ID NO: 550806 - RNA, 19 nt, Artificial Sequence
  Description of Artificial Sequence: Synthetic oligonucleotide
  Antisense strand to SEQ ID NO: 550805
uugugggagagacgaaagc

SEQ ID NO: 550807 - RNA, 19 nt, Artificial Sequence
  Description of Artificial Sequence: Synthetic oligonucleotide
  Sense strand starting at position 867 of SEQ ID NO: 318285
gagagcaaaucuuuggaca

SEQ ID NO: 550808 - RNA, 19 nt, Artificial Sequence
  Description of Artificial Sequence: Synthetic oligonucleotide
  Antisense strand to SEQ ID NO: 550807
uguccaaagauuugcucuc

SEQ ID NO: 550809 - RNA, 19 nt, Artificial Sequence
  Description of Artificial Sequence: Synthetic oligonucleotide
  Sense strand starting at position 1007 of SEQ ID NO: 318285
ugaauaagccuccaagcuu

SEQ ID NO: 550810 - RNA, 19 nt, Artificial Sequence
  Description of Artificial Sequence: Synthetic oligonucleotide
  Antisense strand to SEQ ID NO: 550809
aagcuuggaggcuuauuca

SEQ ID NO: 550811 - RNA, 19 nt, Artificial Sequence
  Description of Artificial Sequence: Synthetic oligonucleotide
  Sense strand starting at position 1160 of SEQ ID NO: 318285
aggaaacucgagugaacuc

SEQ ID NO: 550812 - RNA, 19 nt, Artificial Sequence
  Description of Artificial Sequence: Synthetic oligonucleotide
  Antisense strand to SEQ ID NO: 550811
gaguucacucgaguuuccu

SEQ ID NO: 550813 - RNA, 19 nt, Artificial Sequence
  Description of Artificial Sequence: Synthetic oligonucleotide
  Sense strand starting at position 1167 of SEQ ID NO: 318285
ucgagugaacucuauggac

SEQ ID NO: 550814 - RNA, 19 nt, Artificial Sequence
  Description of Artificial Sequence: Synthetic oligonucleotide
  Antisense strand to SEQ ID NO: 550813
guccauagaguucacucga

SEQ ID NO: 550815 - RNA, 19 nt, Artificial Sequence
  Description of Artificial Sequence: Synthetic oligonucleotide
  Sense strand starting at position 1179 of SEQ ID NO: 318285
uauggacaaccgugaauca

SEQ ID NO: 550816 - RNA, 19 nt, Artificial Sequence
  Description of Artificial Sequence: Synthetic oligonucleotide
  Antisense strand to SEQ ID NO: 550815
ugauucacgguuguccaua

SEQ ID NO: 550817 - RNA, 19 nt, Artificial Sequence
  Description of Artificial Sequence: Synthetic oligonucleotide
  Sense strand starting at position 1264 of SEQ ID NO: 318285
cgcugagucccuugcagaa

SEQ ID NO: 550818 - RNA, 19 nt, Artificial Sequence
  Description of Artificial Sequence: Synthetic oligonucleotide
  Antisense strand to SEQ ID NO: 550817
uucugcaagggacucagcg

SEQ ID NO: 550819 - RNA, 19 nt, Artificial Sequence
  Description of Artificial Sequence: Synthetic oligonucleotide
  Sense strand starting at position 1302 of SEQ ID NO: 318285
gguugaauuuggcuucucu

SEQ ID NO: 550820 - RNA, 19 nt, Artificial Sequence
  Description of Artificial Sequence: Synthetic oligonucleotide
  Antisense strand to SEQ ID NO: 550819
agagaagccaaauucaacc

SEQ ID NO: 550821 - RNA, 19 nt, Artificial Sequence
  Description of Artificial Sequence: Synthetic oligonucleotide
  Sense strand starting at position 1721 of SEQ ID NO: 318285
guccauuuaggucgcauua

SEQ ID NO: 550822 - RNA, 19 nt, Artificial Sequence
  Description of Artificial Sequence: Synthetic oligonucleotide
  Antisense strand to SEQ ID NO: 550821
uaaugcgaccuaaauggac

SEQ ID NO: 550823 - RNA, 19 nt, Artificial Sequence
  Description of Artificial Sequence: Synthetic oligonucleotide
  Sense strand starting at position 1723 of SEQ ID NO: 318285
ccauuuaggucgcauuaag

SEQ ID NO: 550824 - RNA, 19 nt, Artificial Sequence
  Description of Artificial Sequence: Synthetic oligonucleotide
  Antisense strand to SEQ ID NO: 550823
cuuaaugcgaccuaaaugg

SEQ ID NO: 550825 - RNA, 19 nt, Artificial Sequence
  Description of Artificial Sequence: Synthetic oligonucleotide
  Sense strand starting at position 1896 of SEQ ID NO: 318285
gcggcuuuaaguuauuuaa

SEQ ID NO: 550826 - RNA, 19 nt, Artificial Sequence
  Description of Artificial Sequence: Synthetic oligonucleotide
  Antisense strand to SEQ ID NO: 550825
uuaaauaacuuaaagccgc

SEQ ID NO: 550827 - RNA, 19 nt, Artificial Sequence
  Description of Artificial Sequence: Synthetic oligonucleotide
  Sense strand starting at position 1925 of SEQ ID NO: 318285
agcuauaagcuauacgaua

SEQ ID NO: 550828 - RNA, 19 nt, Artificial Sequence
  Description of Artificial Sequence: Synthetic oligonucleotide
  Antisense strand to SEQ ID NO: 550827
uaucguauagcuuauagcu

SEQ ID NO: 550829 - RNA, 19 nt, Artificial Sequence
  Description of Artificial Sequence: Synthetic oligonucleotide
  Sense strand starting at position 1999 of SEQ ID NO: 318285
ggcuucuugcauuauaaug

SEQ ID NO: 550830 - RNA, 19 nt, Artificial Sequence
  Description of Artificial Sequence: Synthetic oligonucleotide
  Antisense strand to SEQ ID NO: 550829
cauuauaaugcaagaagcc

SEQ ID NO: 550831 - RNA, 19 nt, Artificial Sequence
  Description of Artificial Sequence: Synthetic oligonucleotide
  Sense strand starting at position 2007 of SEQ ID NO: 318285
gcauuauaauguccuuuag

SEQ ID NO: 550832 - RNA, 19 nt, Artificial Sequence
  Description of Artificial Sequence: Synthetic oligonucleotide
  Antisense strand to SEQ ID NO: 550831
cuaaaggacauuauaaugc

SEQ ID NO: 550833 - RNA, 19 nt, Artificial Sequence
  Description of Artificial Sequence: Synthetic oligonucleotide
  Sense strand starting at position 2009 of SEQ ID NO: 318285
auuauaauguccuuuagag

SEQ ID NO: 550834 - RNA, 19 nt, Artificial Sequence
  Description of Artificial Sequence: Synthetic oligonucleotide
  Antisense strand to SEQ ID NO: 550833
cucuaaaggacauuauaau

SEQ ID NO: 550835 - RNA, 19 nt, Artificial Sequence
  Description of Artificial Sequence: Synthetic oligonucleotide
  Sense strand starting at position 2038 of SEQ ID NO: 318285
gugcuuaacaguugaauga

SEQ ID NO: 550836 - RNA, 19 nt, Artificial Sequence
  Description of Artificial Sequence: Synthetic oligonucleotide
  Antisense strand to SEQ ID NO: 550835
ucauucaacuguuaagcac

SEQ ID NO: 550837 - RNA, 19 nt, Artificial Sequence
  Description of Artificial Sequence: Synthetic oligonucleotide
  Sense strand starting at position 2262 of SEQ ID NO: 318285
ucuaguucuucccugcgau

SEQ ID NO: 550838 - RNA, 19 nt, Artificial Sequence
  Description of Artificial Sequence: Synthetic oligonucleotide
  Antisense strand to SEQ ID NO: 550837
aucgcagggaagaacuaga

SEQ ID NO: 550839 - RNA, 19 nt, Artificial Sequence
  Description of Artificial Sequence: Synthetic oligonucleotide
  Sense strand starting at position 2263 of SEQ ID NO: 318285
cuaguucuucccugcgauu

SEQ ID NO: 550840 - RNA, 19 nt, Artificial Sequence
  Description of Artificial Sequence: Synthetic oligonucleotide
  Antisense strand to SEQ ID NO: 550839
aaucgcagggaagaacuag

SEQ ID NO: 550841 - RNA, 19 nt, Artificial Sequence
  Description of Artificial Sequence: Synthetic oligonucleotide
  Sense strand starting at position 2781 of SEQ ID NO: 318285
uggucaaaguuucuaaguu

SEQ ID NO: 550842 - RNA, 19 nt, Artificial Sequence
  Description of Artificial Sequence: Synthetic oligonucleotide
  Antisense strand to SEQ ID NO: 550841
aacuuagaaacuuugacca

SEQ ID NO: 550843 - RNA, 19 nt, Artificial Sequence
  Description of Artificial Sequence: Synthetic oligonucleotide
  Sense strand starting at position 2816 of SEQ ID NO: 318285
uccacuuaaggcuguaaau

SEQ ID NO: 550844 - RNA, 19 nt, Artificial Sequence
  Description of Artificial Sequence: Synthetic oligonucleotide
  Antisense strand to SEQ ID NO: 550843
auuuacagccuuaagugga

SEQ ID NO: 550845 - RNA, 19 nt, Artificial Sequence
  Description of Artificial Sequence: Synthetic oligonucleotide
  Sense strand starting at position 2887 of SEQ ID NO: 318285
uuuaaagugcuuugcacaa

SEQ ID NO: 550846 - RNA, 19 nt, Artificial Sequence
  Description of Artificial Sequence: Synthetic oligonucleotide
  Antisense strand to SEQ ID NO: 550845
uugugcaaagcacuuuaaa

SEQ ID NO: 550847 - RNA, 19 nt, Artificial Sequence
  Description of Artificial Sequence: Synthetic oligonucleotide
  Sense strand starting at position 2891 of SEQ ID NO: 318285
aagugcuuugcacaaguga

SEQ ID NO: 550848 - RNA, 19 nt, Artificial Sequence
  Description of Artificial Sequence: Synthetic oligonucleotide
  Antisense strand to SEQ ID NO: 550847
ucacuugugcaaagcacuu

SEQ ID NO: 550849 - RNA, 19 nt, Artificial Sequence
  Description of Artificial Sequence: Synthetic oligonucleotide
  Sense strand starting at position 2911 of SEQ ID NO: 318285
gcgaaccauuucuaauguu

SEQ ID NO: 550850 - RNA, 19 nt, Artificial Sequence
  Description of Artificial Sequence: Synthetic oligonucleotide
  Antisense strand to SEQ ID NO: 550849
aacauuagaaaugguucgc

SEQ ID NO: 550851 - RNA, 19 nt, Artificial Sequence
  Description of Artificial Sequence: Synthetic oligonucleotide
  Sense strand starting at position 2996 of SEQ ID NO: 318285
ucaagaucauuaggcauuu

SEQ ID NO: 550852 - RNA, 19 nt, Artificial Sequence
  Description of Artificial Sequence: Synthetic oligonucleotide
  Antisense strand to SEQ ID NO: 550851
aaaugccuaaugaucuuga

SEQ ID NO: 550853 - RNA, 19 nt, Artificial Sequence
  Description of Artificial Sequence: Synthetic oligonucleotide
  Sense strand starting at position 3024 of SEQ ID NO: 318285
gugccaaaucuauaagcuu

SEQ ID NO: 550854 - RNA, 19 nt, Artificial Sequence
  Description of Artificial Sequence: Synthetic oligonucleotide
  Antisense strand to SEQ ID NO: 550853
aagcuuauagauuuggcac

SEQ ID NO: 550855 - RNA, 19 nt, Artificial Sequence
  Description of Artificial Sequence: Synthetic oligonucleotide
  Sense strand starting at position 3079 of SEQ ID NO: 318285
guacuaauuuacuacuguu

SEQ ID NO: 550856 - RNA, 19 nt, Artificial Sequence
  Description of Artificial Sequence: Synthetic oligonucleotide
  Antisense strand to SEQ ID NO: 550855
aacaguaguaaauuaguac

SEQ ID NO: 550857 - RNA, 19 nt, Artificial Sequence
  Description of Artificial Sequence: Synthetic oligonucleotide
  Sense strand starting at position 3086 of SEQ ID NO: 318285
uuuacuacuguuuagacuu

SEQ ID NO: 550858 - RNA, 19 nt, Artificial Sequence
  Description of Artificial Sequence: Synthetic oligonucleotide
  Antisense strand to SEQ ID NO: 550857
aagucuaaacaguaguaaa

SEQ ID NO: 550859 - RNA, 19 nt, Artificial Sequence
  Description of Artificial Sequence: Synthetic oligonucleotide
  Sense strand starting at position 3094 of SEQ ID NO: 318285
uguuuagacuuggcuguca

SEQ ID NO: 550860 - RNA, 19 nt, Artificial Sequence
  Description of Artificial Sequence: Synthetic oligonucleotide
  Antisense strand to SEQ ID NO: 550859
ugacagccaagucuaaaca

SEQ ID NO: 550861 - RNA, 19 nt, Artificial Sequence
  Description of Artificial Sequence: Synthetic oligonucleotide
  Sense strand starting at position 3096 of SEQ ID NO: 318285
uuuagacuuggcugucaag

SEQ ID NO: 550862 - RNA, 19 nt, Artificial Sequence
  Description of Artificial Sequence: Synthetic oligonucleotide
  Antisense strand to SEQ ID NO: 550861
cuugacagccaagucuaaa

SEQ ID NO: 550863 - RNA, 19 nt, Artificial Sequence
  Description of Artificial Sequence: Synthetic oligonucleotide
  Sense strand starting at position 3143 of SEQ ID NO: 318285
ugaggaaauuaagugcaaa

SEQ ID NO: 550864 - RNA, 19 nt, Artificial Sequence
  Description of Artificial Sequence: Synthetic oligonucleotide
  Antisense strand to SEQ ID NO: 550863
uuugcacuuaauuuccuca

SEQ ID NO: 550865 - RNA, 19 nt, Artificial Sequence
  Description of Artificial Sequence: Synthetic oligonucleotide
  Sense strand starting at position 3205 of SEQ ID NO: 318285
uuguauuuguagcagaaca

SEQ ID NO: 550866 - RNA, 19 nt, Artificial Sequence
  Description of Artificial Sequence: Synthetic oligonucleotide
  Antisense strand to SEQ ID NO: 550865
uguucugcuacaaauacaa

SEQ ID NO: 550867 - RNA, 19 nt, Artificial Sequence
  Description of Artificial Sequence: Synthetic oligonucleotide
  Sense strand starting at position 3342 of SEQ ID NO: 318285
uuaauucgagagugaugca

SEQ ID NO: 550868 - RNA, 19 nt, Artificial Sequence
  Description of Artificial Sequence: Synthetic oligonucleotide
  Antisense strand to SEQ ID NO: 550867
ugcaucacucucgaauuaa

SEQ ID NO: 550869 - RNA, 19 nt, Artificial Sequence
  Description of Artificial Sequence: Synthetic oligonucleotide
  Sense strand starting at position 3347 of SEQ ID NO: 318285
ucgagagugaugcaauuaa

SEQ ID NO: 550870 - RNA, 19 nt, Artificial Sequence
  Description of Artificial Sequence: Synthetic oligonucleotide
  Antisense strand to SEQ ID NO: 550869
uuaauugcaucacucucga

SEQ ID NO: 550871 - RNA, 19 nt, Artificial Sequence
  Description of Artificial Sequence: Synthetic oligonucleotide
  Sense strand starting at position 3560 of SEQ ID NO: 318285
cucagcuguaugugugaca

SEQ ID NO: 550872 - RNA, 19 nt, Artificial Sequence
  Description of Artificial Sequence: Synthetic oligonucleotide
  Antisense strand to SEQ ID NO: 550871
ugucacacauacagcugag

SEQ ID NO: 550873 - RNA, 19 nt, Artificial Sequence
  Description of Artificial Sequence: Synthetic oligonucleotide
  Sense strand starting at position 3612 of SEQ ID NO: 318285
gcgaacucucgggcaguuu

SEQ ID NO: 550874 - RNA, 19 nt, Artificial Sequence
  Description of Artificial Sequence: Synthetic oligonucleotide
  Antisense strand to SEQ ID NO: 550873
aaacugcccgagaguucgc

SEQ ID NO: 550875 - RNA, 19 nt, Artificial Sequence
  Description of Artificial Sequence: Synthetic oligonucleotide
  Sense strand starting at position 3720 of SEQ ID NO: 318285
ggguauuggccacaccagu

SEQ ID NO: 550876 - RNA, 19 nt, Artificial Sequence
  Description of Artificial Sequence: Synthetic oligonucleotide
  Antisense strand to SEQ ID NO: 550875
acugguguggccaauaccc

SEQ ID NO: 550877 - RNA, 19 nt, Artificial Sequence
  Description of Artificial Sequence: Synthetic oligonucleotide
  Sense strand starting at position 48 of SEQ ID NO: 318286
ggacaucuacugggaagca

SEQ ID NO: 550878 - RNA, 19 nt, Artificial Sequence
  Description of Artificial Sequence: Synthetic oligonucleotide
  Antisense strand to SEQ ID NO: 550877
ugcuucccaguagaugucc

SEQ ID NO: 550879 - RNA, 19 nt, Artificial Sequence
  Description of Artificial Sequence: Synthetic oligonucleotide
  Sense strand starting at position 104 of SEQ ID NO: 318286
guuggcugucacuauaaau

SEQ ID NO: 550880 - RNA, 19 nt, Artificial Sequence
  Description of Artificial Sequence: Synthetic oligonucleotide
  Antisense strand to SEQ ID NO: 550879
auuuauagugacagccaac

SEQ ID NO: 550881 - RNA, 19 nt, Artificial Sequence
  Description of Artificial Sequence: Synthetic oligonucleotide
  Sense strand starting at position 170 of SEQ ID NO: 318286
ggagguucccauugaugca

SEQ ID NO: 550882 - RNA, 19 nt, Artificial Sequence
  Description of Artificial Sequence: Synthetic oligonucleotide
  Antisense strand to SEQ ID NO: 550881
ugcaucaaugggaaccucc

SEQ ID NO: 550883 - RNA, 19 nt, Artificial Sequence
  Description of Artificial Sequence: Synthetic oligonucleotide
  Sense strand starting at position 279 of SEQ ID NO: 318286
gcucuaagucuauauaguu

SEQ ID NO: 550884 - RNA, 19 nt, Artificial Sequence
  Description of Artificial Sequence: Synthetic oligonucleotide
  Antisense strand to SEQ ID NO: 550883
aacuauauagacuuagagc

SEQ ID NO: 550885 - RNA, 19 nt, Artificial Sequence
  Description of Artificial Sequence: Synthetic oligonucleotide
  Sense strand starting at position 381 of SEQ ID NO: 318286
agguguucugaaugagaau

SEQ ID NO: 550886 - RNA, 19 nt, Artificial Sequence
  Description of Artificial Sequence: Synthetic oligonucleotide
  Antisense strand to SEQ ID NO: 550885
auucucauucagaacaccu

SEQ ID NO: 550887 - RNA, 19 nt, Artificial Sequence
  Description of Artificial Sequence: Synthetic oligonucleotide
  Sense strand starting at position 382 of SEQ ID NO: 318286
gguguucugaaugagaauc

SEQ ID NO: 550888 - RNA, 19 nt, Artificial Sequence
  Description of Artificial Sequence: Synthetic oligonucleotide
  Antisense strand to SEQ ID NO: 550887
gauucucauucagaacacc

SEQ ID NO: 550889 - RNA, 19 nt, Artificial Sequence
  Description of Artificial Sequence: Synthetic oligonucleotide
  Sense strand starting at position 432 of SEQ ID NO: 318286
auauacuucugagaacaug

SEQ ID NO: 550890 - RNA, 19 nt, Artificial Sequence
  Description of Artificial Sequence: Synthetic oligonucleotide
  Antisense strand to SEQ ID NO: 550889
cauguucucagaaguauau

SEQ ID NO: 550891 - RNA, 19 nt, Artificial Sequence
  Description of Artificial Sequence: Synthetic oligonucleotide
  Sense strand starting at position 469 of SEQ ID NO: 318286
ugcauugcucaggaggcau

SEQ ID NO: 550892 - RNA, 19 nt, Artificial Sequence
  Description of Artificial Sequence: Synthetic oligonucleotide
  Antisense strand to SEQ ID NO: 550891
augccuccugagcaaugca

SEQ ID NO: 550893 - RNA, 19 nt, Artificial Sequence
  Description of Artificial Sequence: Synthetic oligonucleotide
  Sense strand starting at position 658 of SEQ ID NO: 318286
gagguuaagucucugauau

SEQ ID NO: 550894 - RNA, 19 nt, Artificial Sequence
  Description of Artificial Sequence: Synthetic oligonucleotide
  Antisense strand to SEQ ID NO: 550893
auaucagagacuuaaccuc

SEQ ID NO: 550895 - RNA, 19 nt, Artificial Sequence
  Description of Artificial Sequence: Synthetic oligonucleotide
  Sense strand starting at position 659 of SEQ ID NO: 318286
agguuaagucucugauaug

SEQ ID NO: 550896 - RNA, 19 nt, Artificial Sequence
  Description of Artificial Sequence: Synthetic oligonucleotide
  Antisense strand to SEQ ID NO: 550895
cauaucagagacuuaaccu

SEQ ID NO: 550897 - RNA, 19 nt, Artificial Sequence
  Description of Artificial Sequence: Synthetic oligonucleotide
  Sense strand starting at position 751 of SEQ ID NO: 318286
ccauuaacccauuaagugu

SEQ ID NO: 550898 - RNA, 19 nt, Artificial Sequence
  Description of Artificial Sequence: Synthetic oligonucleotide
  Antisense strand to SEQ ID NO: 550897
acacuuaauggguuaaugg

SEQ ID NO: 550899 - RNA, 19 nt, Artificial Sequence
  Description of Artificial Sequence: Synthetic oligonucleotide
  Sense strand starting at position 757 of SEQ ID NO: 318286
acccauuaagugugaauaa

SEQ ID NO: 550900 - RNA, 19 nt, Artificial Sequence
  Description of Artificial Sequence: Synthetic oligonucleotide
  Antisense strand to SEQ ID NO: 550899
uuauucacacuuaaugggu

SEQ ID NO: 550901 - RNA, 19 nt, Artificial Sequence
  Description of Artificial Sequence: Synthetic oligonucleotide
  Sense strand starting at position 804 of SEQ ID NO: 318286
gagaaugucuaaguacuau

SEQ ID NO: 550902 - RNA, 19 nt, Artificial Sequence
  Description of Artificial Sequence: Synthetic oligonucleotide
  Antisense strand to SEQ ID NO: 550901
auaguacuuagacauucuc

SEQ ID NO: 550903 - RNA, 19 nt, Artificial Sequence
  Description of Artificial Sequence: Synthetic oligonucleotide
  Sense strand starting at position 810 of SEQ ID NO: 318286
gucuaaguacuaugcaaau

SEQ ID NO: 550904 - RNA, 19 nt, Artificial Sequence
  Description of Artificial Sequence: Synthetic oligonucleotide
  Antisense strand to SEQ ID NO: 550903
auuugcauaguacuuagac

SEQ ID NO: 550905 - RNA, 19 nt, Artificial Sequence
  Description of Artificial Sequence: Synthetic oligonucleotide
  Sense strand starting at position 999 of SEQ ID NO: 318286
cuuaaauuccaagggcauu

SEQ ID NO: 550906 - RNA, 19 nt, Artificial Sequence
  Description of Artificial Sequence: Synthetic oligonucleotide
  Antisense strand to SEQ ID NO: 550905
aaugcccuuggaauuuaag

SEQ ID NO: 550907 - RNA, 19 nt, Artificial Sequence
  Description of Artificial Sequence: Synthetic oligonucleotide
  Sense strand starting at position 1011 of SEQ ID NO: 318286
gggcauuuauaggugccua

SEQ ID NO: 550908 - RNA, 19 nt, Artificial Sequence
  Description of Artificial Sequence: Synthetic oligonucleotide
  Antisense strand to SEQ ID NO: 550907
uaggcaccuauaaaugccc

SEQ ID NO: 550909 - RNA, 19 nt, Artificial Sequence
  Description of Artificial Sequence: Synthetic oligonucleotide
  Sense strand starting at position 1012 of SEQ ID NO: 318286
ggcauuuauaggugccuaa

SEQ ID NO: 550910 - RNA, 19 nt, Artificial Sequence
  Description of Artificial Sequence: Synthetic oligonucleotide
  Antisense strand to SEQ ID NO: 550909
uuaggcaccuauaaaugcc

SEQ ID NO: 550911 - RNA, 19 nt, Artificial Sequence
  Description of Artificial Sequence: Synthetic oligonucleotide
  Sense strand starting at position 1236 of SEQ ID NO: 318286
gucagauucucuuuggguc

SEQ ID NO: 550912 - RNA, 19 nt, Artificial Sequence
  Description of Artificial Sequence: Synthetic oligonucleotide
  Antisense strand to SEQ ID NO: 550911
gacccaaagagaaucugac

SEQ ID NO: 550913 - RNA, 19 nt, Artificial Sequence
  Description of Artificial Sequence: Synthetic oligonucleotide
  Sense strand starting at position 1240 of SEQ ID NO: 318286
gauucucuuuggguccaaa

SEQ ID NO: 550914 - RNA, 19 nt, Artificial Sequence
  Description of Artificial Sequence: Synthetic oligonucleotide
  Antisense strand to SEQ ID NO: 550913
uuuggacccaaagagaauc

SEQ ID NO: 550915 - RNA, 19 nt, Artificial Sequence
  Description of Artificial Sequence: Synthetic oligonucleotide
  Sense strand starting at position 2250 of SEQ ID NO: 318286
gaggaagucuggucuuagg

SEQ ID NO: 550916 - RNA, 19 nt, Artificial Sequence
  Description of Artificial Sequence: Synthetic oligonucleotide
  Antisense strand to SEQ ID NO: 550915
ccuaagaccagacuuccuc

SEQ ID NO: 550917 - RNA, 19 nt, Artificial Sequence
  Description of Artificial Sequence: Synthetic oligonucleotide
  Sense strand starting at position 2257 of SEQ ID NO: 318286
ucuggucuuaggugugaag

SEQ ID NO: 550918 - RNA, 19 nt, Artificial Sequence
  Description of Artificial Sequence: Synthetic oligonucleotide
  Antisense strand to SEQ ID NO: 550917
cuucacaccuaagaccaga

SEQ ID NO: 550919 - RNA, 19 nt, Artificial Sequence
  Description of Artificial Sequence: Synthetic oligonucleotide
  Sense strand starting at position 2259 of SEQ ID NO: 318286
uggucuuaggugugaagga

SEQ ID NO: 550920 - RNA, 19 nt, Artificial Sequence
  Description of Artificial Sequence: Synthetic oligonucleotide
  Antisense strand to SEQ ID NO: 550919
uccuucacaccuaagacca

SEQ ID NO: 550921 - RNA, 19 nt, Artificial Sequence
  Description of Artificial Sequence: Synthetic oligonucleotide
  Sense strand starting at position 2546 of SEQ ID NO: 318286
guguucuuggaucauagua

SEQ ID NO: 550922 - RNA, 19 nt, Artificial Sequence
  Description of Artificial Sequence: Synthetic oligonucleotide
  Antisense strand to SEQ ID NO: 550921
uacuaugauccaagaacac

SEQ ID NO: 550923 - RNA, 19 nt, Artificial Sequence
  Description of Artificial Sequence: Synthetic oligonucleotide
  Sense strand starting at position 2643 of SEQ ID NO: 318286
ucaucucugggauggagua

SEQ ID NO: 550924 - RNA, 19 nt, Artificial Sequence
  Description of Artificial Sequence: Synthetic oligonucleotide
  Antisense strand to SEQ ID NO: 550923
uacuccaucccagagauga

SEQ ID NO: 550925 - RNA, 19 nt, Artificial Sequence
  Description of Artificial Sequence: Synthetic oligonucleotide
  Sense strand starting at position 2865 of SEQ ID NO: 318286
gccauauuaggcuaacugu

SEQ ID NO: 550926 - RNA, 19 nt, Artificial Sequence
  Description of Artificial Sequence: Synthetic oligonucleotide
  Antisense strand to SEQ ID NO: 550925
acaguuagccuaauauggc

SEQ ID NO: 550927 - RNA, 19 nt, Artificial Sequence
  Description of Artificial Sequence: Synthetic oligonucleotide
  Sense strand starting at position 2893 of SEQ ID NO: 318286
gcuuaauccucauugacag

SEQ ID NO: 550928 - RNA, 19 nt, Artificial Sequence
  Description of Artificial Sequence: Synthetic oligonucleotide
  Antisense strand to SEQ ID NO: 550927
cugucaaugaggauuaagc

SEQ ID NO: 550929 - RNA, 19 nt, Artificial Sequence
  Description of Artificial Sequence: Synthetic oligonucleotide
  Sense strand starting at position 3044 of SEQ ID NO: 318286
auuuauauuuagugccaca

SEQ ID NO: 550930 - RNA, 19 nt, Artificial Sequence
  Description of Artificial Sequence: Synthetic oligonucleotide
  Antisense strand to SEQ ID NO: 550929
uguggcacuaaauauaaau

SEQ ID NO: 550931 - RNA, 19 nt, Artificial Sequence
  Description of Artificial Sequence: Synthetic oligonucleotide
  Sense strand starting at position 3157 of SEQ ID NO: 318286
agacuauuaagguguggga

SEQ ID NO: 550932 - RNA, 19 nt, Artificial Sequence
  Description of Artificial Sequence: Synthetic oligonucleotide
  Antisense strand to SEQ ID NO: 550931
ucccacaccuuaauagucu

SEQ ID NO: 550933 - RNA, 19 nt, Artificial Sequence
  Description of Artificial Sequence: Synthetic oligonucleotide
  Sense strand starting at position 3159 of SEQ ID NO: 318286
acuauuaaggugugggauu

SEQ ID NO: 550934 - RNA, 19 nt, Artificial Sequence
  Description of Artificial Sequence: Synthetic oligonucleotide
  Antisense strand to SEQ ID NO: 550933
aaucccacaccuuaauagu

SEQ ID NO: 550935 - RNA, 19 nt, Artificial Sequence
  Description of Artificial Sequence: Synthetic oligonucleotide
  Sense strand starting at position 3342 of SEQ ID NO: 318286
auagauaaaugugcacaga

SEQ ID NO: 550936 - RNA, 19 nt, Artificial Sequence
  Description of Artificial Sequence: Synthetic oligonucleotide
  Antisense strand to SEQ ID NO: 550935
ucugugcacauuuaucuau

SEQ ID NO: 550937 - RNA, 19 nt, Artificial Sequence
  Description of Artificial Sequence: Synthetic oligonucleotide
  Sense strand starting at position 3483 of SEQ ID NO: 318286
gugccuuccgaagaagguu

SEQ ID NO: 550938 - RNA, 19 nt, Artificial Sequence
  Description of Artificial Sequence: Synthetic oligonucleotide
  Antisense strand to SEQ ID NO: 550937
aaccuucuucggaaggcac

SEQ ID NO: 550939 - RNA, 19 nt, Artificial Sequence
  Description of Artificial Sequence: Synthetic oligonucleotide
  Sense strand starting at position 3495 of SEQ ID NO: 318286
gaagguuggcccugccaaa

SEQ ID NO: 550940 - RNA, 19 nt, Artificial Sequence
  Description of Artificial Sequence: Synthetic oligonucleotide
  Antisense strand to SEQ ID NO: 550939
uuuggcagggccaaccuuc

SEQ ID NO: 550941 - RNA, 19 nt, Artificial Sequence
  Description of Artificial Sequence: Synthetic oligonucleotide
  Sense strand starting at position 3624 of SEQ ID NO: 318286
ggaucaagguggaaagguu

SEQ ID NO: 550942 - RNA, 19 nt, Artificial Sequence
  Description of Artificial Sequence: Synthetic oligonucleotide
  Antisense strand to SEQ ID NO: 550941
aaccuuuccaccuugaucc

SEQ ID NO: 550943 - RNA, 19 nt, Artificial Sequence
  Description of Artificial Sequence: Synthetic oligonucleotide
  Sense strand starting at position 3738 of SEQ ID NO: 318286
uguuuaaucgcugaguaug

SEQ ID NO: 550944 - RNA, 19 nt, Artificial Sequence
  Description of Artificial Sequence: Synthetic oligonucleotide
  Antisense strand to SEQ ID NO: 550943
cauacucagcgauuaaaca

SEQ ID NO: 550945 - RNA, 19 nt, Artificial Sequence
  Description of Artificial Sequence: Synthetic oligonucleotide
  Sense strand starting at position 3828 of SEQ ID NO: 318286
gugagaaggaucugaguga

SEQ ID NO: 550946 - RNA, 19 nt, Artificial Sequence
  Description of Artificial Sequence: Synthetic oligonucleotide
  Antisense strand to SEQ ID NO: 550945
ucacucagauccuucucac

SEQ ID NO: 550947 - RNA, 19 nt, Artificial Sequence
  Description of Artificial Sequence: Synthetic oligonucleotide
  Sense strand starting at position 3829 of SEQ ID NO: 318286
ugagaaggaucugagugaa

SEQ ID NO: 550948 - RNA, 19 nt, Artificial Sequence
  Description of Artificial Sequence: Synthetic oligonucleotide
  Antisense strand to SEQ ID NO: 550947
uucacucagauccuucuca

SEQ ID NO: 550949 - RNA, 19 nt, Artificial Sequence
  Description of Artificial Sequence: Synthetic oligonucleotide
  Sense strand starting at position 3877 of SEQ ID NO: 318286
cccagaagggccuaugcua

SEQ ID NO: 550950 - RNA, 19 nt, Artificial Sequence
  Description of Artificial Sequence: Synthetic oligonucleotide
  Antisense strand to SEQ ID NO: 550949
uagcauaggcccuucuggg

SEQ ID NO: 550951 - RNA, 19 nt, Artificial Sequence
  Description of Artificial Sequence: Synthetic oligonucleotide
  Sense strand starting at position 3910 of SEQ ID NO: 318286
gacagaacugccuagguau

SEQ ID NO: 550952 - RNA, 19 nt, Artificial Sequence
  Description of Artificial Sequence: Synthetic oligonucleotide
  Antisense strand to SEQ ID NO: 550951
auaccuaggcaguucuguc

SEQ ID NO: 550953 - RNA, 19 nt, Artificial Sequence
  Description of Artificial Sequence: Synthetic oligonucleotide
  Sense strand starting at position 3917 of SEQ ID NO: 318286
cugccuagguaucuguaga

SEQ ID NO: 550954 - RNA, 19 nt, Artificial Sequence
  Description of Artificial Sequence: Synthetic oligonucleotide
  Antisense strand to SEQ ID NO: 550953
ucuacagauaccuaggcag

SEQ ID NO: 550955 - RNA, 19 nt, Artificial Sequence
  Description of Artificial Sequence: Synthetic oligonucleotide
  Sense strand starting at position 3924 of SEQ ID NO: 318286
gguaucuguagagaaaggu

SEQ ID NO: 550956 - RNA, 19 nt, Artificial Sequence
  Description of Artificial Sequence: Synthetic oligonucleotide
  Antisense strand to SEQ ID NO: 550955
accuuucucuacagauacc

SEQ ID NO: 550957 - RNA, 19 nt, Artificial Sequence
  Description of Artificial Sequence: Synthetic oligonucleotide
  Sense strand starting at position 94 of SEQ ID NO: 318287
gaguuagaccuaugauaau

SEQ ID NO: 550958 - RNA, 19 nt, Artificial Sequence
  Description of Artificial Sequence: Synthetic oligonucleotide
  Antisense strand to SEQ ID NO: 550957
auuaucauaggucuaacuc

SEQ ID NO: 550959 - RNA, 19 nt, Artificial Sequence
  Description of Artificial Sequence: Synthetic oligonucleotide
  Sense strand starting at position 116 of SEQ ID NO: 318287
gccugacagggcuaaguuu

SEQ ID NO: 550960 - RNA, 19 nt, Artificial Sequence
  Description of Artificial Sequence: Synthetic oligonucleotide
  Antisense strand to SEQ ID NO: 550959
aaacuuagcccugucaggc

SEQ ID NO: 550961 - RNA, 19 nt, Artificial Sequence
  Description of Artificial Sequence: Synthetic oligonucleotide
  Sense strand starting at position 129 of SEQ ID NO: 318287
aaguuugaacucuguauga

SEQ ID NO: 550962 - RNA, 19 nt, Artificial Sequence
  Description of Artificial Sequence: Synthetic oligonucleotide
  Antisense strand to SEQ ID NO: 550961
ucauacagaguucaaacuu

SEQ ID NO: 550963 - RNA, 19 nt, Artificial Sequence
  Description of Artificial Sequence: Synthetic oligonucleotide
  Sense strand starting at position 131 of SEQ ID NO: 318287
guuugaacucuguaugaac

SEQ ID NO: 550964 - RNA, 19 nt, Artificial Sequence
  Description of Artificial Sequence: Synthetic oligonucleotide
  Antisense strand to SEQ ID NO: 550963
guucauacagaguucaaac

SEQ ID NO: 550965 - RNA, 19 nt, Artificial Sequence
  Description of Artificial Sequence: Synthetic oligonucleotide
  Sense strand starting at position 133 of SEQ ID NO: 318287
uugaacucuguaugaacuu

SEQ ID NO: 550966 - RNA, 19 nt, Artificial Sequence
  Description of Artificial Sequence: Synthetic oligonucleotide
  Antisense strand to SEQ ID NO: 550965
aaguucauacagaguucaa

SEQ ID NO: 550967 - RNA, 19 nt, Artificial Sequence
  Description of Artificial Sequence: Synthetic oligonucleotide
  Sense strand starting at position 134 of SEQ ID NO: 318287
ugaacucuguaugaacuuu

SEQ ID NO: 550968 - RNA, 19 nt, Artificial Sequence
  Description of Artificial Sequence: Synthetic oligonucleotide
  Antisense strand to SEQ ID NO: 550967
aaaguucauacagaguuca

SEQ ID NO: 550969 - RNA, 19 nt, Artificial Sequence
  Description of Artificial Sequence: Synthetic oligonucleotide
  Sense strand starting at position 205 of SEQ ID NO: 318287
uuugcugagcuucggaaau

SEQ ID NO: 550970 - RNA, 19 nt, Artificial Sequence
  Description of Artificial Sequence: Synthetic oligonucleotide
  Antisense strand to SEQ ID NO: 550969
auuuccgaagcucagcaaa

SEQ ID NO: 550971 - RNA, 19 nt, Artificial Sequence
  Description of Artificial Sequence: Synthetic oligonucleotide
  Sense strand starting at position 211 of SEQ ID NO: 318287
gagcuucggaaaugguuua

SEQ ID NO: 550972 - RNA, 19 nt, Artificial Sequence
  Description of Artificial Sequence: Synthetic oligonucleotide
  Antisense strand to SEQ ID NO: 550971
uaaaccauuuccgaagcuc

SEQ ID NO: 550973 - RNA, 19 nt, Artificial Sequence
  Description of Artificial Sequence: Synthetic oligonucleotide
  Sense strand starting at position 264 of SEQ ID NO: 318287
guaaauuacaguugggcaa

SEQ ID NO: 550974 - RNA, 19 nt, Artificial Sequence
  Description of Artificial Sequence: Synthetic oligonucleotide
  Antisense strand to SEQ ID NO: 550973
uugcccaacuguaauuuac

SEQ ID NO: 550975 - RNA, 19 nt, Artificial Sequence
  Description of Artificial Sequence: Synthetic oligonucleotide
  Sense strand starting at position 266 of SEQ ID NO: 318287
aaauuacaguugggcaaau

SEQ ID NO: 550976 - RNA, 19 nt, Artificial Sequence
  Description of Artificial Sequence: Synthetic oligonucleotide
  Antisense strand to SEQ ID NO: 550975
auuugcccaacuguaauuu

SEQ ID NO: 550977 - RNA, 19 nt, Artificial Sequence
  Description of Artificial Sequence: Synthetic oligonucleotide
  Sense strand starting at position 276 of SEQ ID NO: 318287
ugggcaaaucaguaacugu

SEQ ID NO: 550978 - RNA, 19 nt, Artificial Sequence
  Description of Artificial Sequence: Synthetic oligonucleotide
  Antisense strand to SEQ ID NO: 550977
acaguuacugauuugccca

SEQ ID NO: 550979 - RNA, 19 nt, Artificial Sequence
  Description of Artificial Sequence: Synthetic oligonucleotide
  Sense strand starting at position 279 of SEQ ID NO: 318287
gcaaaucaguaacugucaa

SEQ ID NO: 550980 - RNA, 19 nt, Artificial Sequence
  Description of Artificial Sequence: Synthetic oligonucleotide
  Antisense strand to SEQ ID NO: 550979
uugacaguuacugauuugc

SEQ ID NO: 550981 - RNA, 19 nt, Artificial Sequence
  Description of Artificial Sequence: Synthetic oligonucleotide
  Sense strand starting at position 333 of SEQ ID NO: 318287
cgcugugcucugguuugua

SEQ ID NO: 550982 - RNA, 19 nt, Artificial Sequence
  Description of Artificial Sequence: Synthetic oligonucleotide
  Antisense strand to SEQ ID NO: 550981
uacaaaccagagcacagcg

SEQ ID NO: 550983 - RNA, 19 nt, Artificial Sequence
  Description of Artificial Sequence: Synthetic oligonucleotide
  Sense strand starting at position 367 of SEQ ID NO: 318287
cugcaaucucacugaaggu

SEQ ID NO: 550984 - RNA, 19 nt, Artificial Sequence
  Description of Artificial Sequence: Synthetic oligonucleotide
  Antisense strand to SEQ ID NO: 550983
accuucagugagauugcag

SEQ ID NO: 550985 - RNA, 19 nt, Artificial Sequence
  Description of Artificial Sequence: Synthetic oligonucleotide
  Sense strand starting at position 416 of SEQ ID NO: 318287
ccaagucuaucugcaguua

SEQ ID NO: 550986 - RNA, 19 nt, Artificial Sequence
  Description of Artificial Sequence: Synthetic oligonucleotide
  Antisense strand to SEQ ID NO: 550985
uaacugcagauagacuugg

SEQ ID NO: 550987 - RNA, 19 nt, Artificial Sequence
  Description of Artificial Sequence: Synthetic oligonucleotide
  Sense strand starting at position 450 of SEQ ID NO: 318287
agaggcauuuaagaguaaa

SEQ ID NO: 550988 - RNA, 19 nt, Artificial Sequence
  Description of Artificial Sequence: Synthetic oligonucleotide
  Antisense strand to SEQ ID NO: 550987
uuuacucuuaaaugccucu

SEQ ID NO: 550989 - RNA, 19 nt, Artificial Sequence
  Description of Artificial Sequence: Synthetic oligonucleotide
  Sense strand starting at position 470 of SEQ ID NO: 318287
ugguccaguucugaaccau

SEQ ID NO: 550990 - RNA, 19 nt, Artificial Sequence
  Description of Artificial Sequence: Synthetic oligonucleotide
  Antisense strand to SEQ ID NO: 550989
augguucagaacuggacca

SEQ ID NO: 550991 - RNA, 19 nt, Artificial Sequence
  Description of Artificial Sequence: Synthetic oligonucleotide
  Sense strand starting at position 590 of SEQ ID NO: 318287
gaguaagcaccgugugcau

SEQ ID NO: 550992 - RNA, 19 nt, Artificial Sequence
  Description of Artificial Sequence: Synthetic oligonucleotide
  Antisense strand to SEQ ID NO: 550991
augcacacggugcuuacuc

SEQ ID NO: 550993 - RNA, 19 nt, Artificial Sequence
  Description of Artificial Sequence: Synthetic oligonucleotide
  Sense strand starting at position 615 of SEQ ID NO: 318287
cugucaagcucagaccuau

SEQ ID NO: 550994 - RNA, 19 nt, Artificial Sequence
  Description of Artificial Sequence: Synthetic oligonucleotide
  Antisense strand to SEQ ID NO: 550993
auaggucugagcuugacag

SEQ ID NO: 550995 - RNA, 19 nt, Artificial Sequence
  Description of Artificial Sequence: Synthetic oligonucleotide
  Sense strand starting at position 700 of SEQ ID NO: 318287
ggcgcucugguccuguaau

SEQ ID NO: 550996 - RNA, 19 nt, Artificial Sequence
  Description of Artificial Sequence: Synthetic oligonucleotide
  Antisense strand to SEQ ID NO: 550995
auuacaggaccagagcgcc

SEQ ID NO: 550997 - RNA, 19 nt, Artificial Sequence
  Description of Artificial Sequence: Synthetic oligonucleotide
  Sense strand starting at position 905 of SEQ ID NO: 318287
gagagaaagguuuguccuc

SEQ ID NO: 550998 - RNA, 19 nt, Artificial Sequence
  Description of Artificial Sequence: Synthetic oligonucleotide
  Antisense strand to SEQ ID NO: 550997
gaggacaaaccuuucucuc

SEQ ID NO: 550999 - RNA, 19 nt, Artificial Sequence
  Description of Artificial Sequence: Synthetic oligonucleotide
  Sense strand starting at position 1094 of SEQ ID NO: 318287
cgagcagagccauggcuaa

SEQ ID NO: 551000 - RNA, 19 nt, Artificial Sequence
  Description of Artificial Sequence: Synthetic oligonucleotide
  Antisense strand to SEQ ID NO: 550999
uuagccauggcucugcucg

SEQ ID NO: 551001 - RNA, 19 nt, Artificial Sequence
  Description of Artificial Sequence: Synthetic oligonucleotide
  Sense strand starting at position 1137 of SEQ ID NO: 318287
agagguuccucugcccaga

SEQ ID NO: 551002 - RNA, 19 nt, Artificial Sequence
  Description of Artificial Sequence: Synthetic oligonucleotide
  Antisense strand to SEQ ID NO: 551001
ucugggcagaggaaccucu

SEQ ID NO: 551003 - RNA, 19 nt, Artificial Sequence
  Description of Artificial Sequence: Synthetic oligonucleotide
  Sense strand starting at position 1140 of SEQ ID NO: 318287
gguuccucugcccagagau

SEQ ID NO: 551004 - RNA, 19 nt, Artificial Sequence
  Description of Artificial Sequence: Synthetic oligonucleotide
  Antisense strand to SEQ ID NO: 551003
aucucugggcagaggaacc

SEQ ID NO: 551005 - RNA, 19 nt, Artificial Sequence
  Description of Artificial Sequence: Synthetic oligonucleotide
  Sense strand starting at position 1185 of SEQ ID NO: 318287
gcuguugccucacuccuaa

SEQ ID NO: 551006 - RNA, 19 nt, Artificial Sequence
  Description of Artificial Sequence: Synthetic oligonucleotide
  Antisense strand to SEQ ID NO: 551005
uuaggagugaggcaacagc

SEQ ID NO: 551007 - RNA, 19 nt, Artificial Sequence
  Description of Artificial Sequence: Synthetic oligonucleotide
  Sense strand starting at position 1538 of SEQ ID NO: 318287
ggguuugguccacguucuu

SEQ ID NO: 551008 - RNA, 19 nt, Artificial Sequence
  Description of Artificial Sequence: Synthetic oligonucleotide
  Antisense strand to SEQ ID NO: 551007
aagaacguggaccaaaccc

SEQ ID NO: 551009 - RNA, 19 nt, Artificial Sequence
  Description of Artificial Sequence: Synthetic oligonucleotide
  Sense strand starting at position 2036 of SEQ ID NO: 318287
ugagucuuggccuaggguu

SEQ ID NO: 551010 - RNA, 19 nt, Artificial Sequence
  Description of Artificial Sequence: Synthetic oligonucleotide
  Antisense strand to SEQ ID NO: 551009
aacccuaggccaagacuca

SEQ ID NO: 551011 - RNA, 19 nt, Artificial Sequence
  Description of Artificial Sequence: Synthetic oligonucleotide
  Sense strand starting at position 3551 of SEQ ID NO: 318287
aaguucuuaugugcugauu

SEQ ID NO: 551012 - RNA, 19 nt, Artificial Sequence
  Description of Artificial Sequence: Synthetic oligonucleotide
  Antisense strand to SEQ ID NO: 551011
aaucagcacauaagaacuu

SEQ ID NO: 551013 - RNA, 19 nt, Artificial Sequence
  Description of Artificial Sequence: Synthetic oligonucleotide
  Sense strand starting at position 3647 of SEQ ID NO: 318287
ccgaacuaguaaggauauu

SEQ ID NO: 551014 - RNA, 19 nt, Artificial Sequence
  Description of Artificial Sequence: Synthetic oligonucleotide
  Antisense strand to SEQ ID NO: 551013
aauauccuuacuaguucgg

SEQ ID NO: 551015 - RNA, 19 nt, Artificial Sequence
  Description of Artificial Sequence: Synthetic oligonucleotide
  Sense strand starting at position 3692 of SEQ ID NO: 318287
uggcaaauauguuauauuc

SEQ ID NO: 551016 - RNA, 19 nt, Artificial Sequence
  Description of Artificial Sequence: Synthetic oligonucleotide
  Antisense strand to SEQ ID NO: 551015
gaauauaacauauuugcca

SEQ ID NO: 551017 - RNA, 19 nt, Artificial Sequence
  Description of Artificial Sequence: Synthetic oligonucleotide
  Sense strand starting at position 3700 of SEQ ID NO: 318287
auguuauauucuggaaacc

SEQ ID NO: 551018 - RNA, 19 nt, Artificial Sequence
  Description of Artificial Sequence: Synthetic oligonucleotide
  Antisense strand to SEQ ID NO: 551017
gguuuccagaauauaacau

SEQ ID NO: 551019 - RNA, 19 nt, Artificial Sequence
  Description of Artificial Sequence: Synthetic oligonucleotide
  Sense strand starting at position 3701 of SEQ ID NO: 318287
uguuauauucuggaaaccu

SEQ ID NO: 551020 - RNA, 19 nt, Artificial Sequence
  Description of Artificial Sequence: Synthetic oligonucleotide
  Antisense strand to SEQ ID NO: 551019
agguuuccagaauauaaca

SEQ ID NO: 551021 - RNA, 19 nt, Artificial Sequence
  Description of Artificial Sequence: Synthetic oligonucleotide
  Sense strand starting at position 3712 of SEQ ID NO: 318287
ggaaaccuuucuuugugga

SEQ ID NO: 551022 - RNA, 19 nt, Artificial Sequence
  Description of Artificial Sequence: Synthetic oligonucleotide
  Antisense strand to SEQ ID NO: 551021
uccacaaagaaagguuucc

SEQ ID NO: 551023 - RNA, 19 nt, Artificial Sequence
  Description of Artificial Sequence: Synthetic oligonucleotide
  Sense strand starting at position 3713 of SEQ ID NO: 318287
gaaaccuuucuuuguggaa

SEQ ID NO: 551024 - RNA, 19 nt, Artificial Sequence
  Description of Artificial Sequence: Synthetic oligonucleotide
  Antisense strand to SEQ ID NO: 551023
uuccacaaagaaagguuuc

SEQ ID NO: 551025 - RNA, 19 nt, Artificial Sequence
  Description of Artificial Sequence: Synthetic oligonucleotide
  Sense strand starting at position 3717 of SEQ ID NO: 318287
ccuuucuuuguggaaucuu

SEQ ID NO: 551026 - RNA, 19 nt, Artificial Sequence
  Description of Artificial Sequence: Synthetic oligonucleotide
  Antisense strand to SEQ ID NO: 551025
aagauuccacaaagaaagg

SEQ ID NO: 551027 - RNA, 19 nt, Artificial Sequence
  Description of Artificial Sequence: Synthetic oligonucleotide
  Sense strand starting at position 3725 of SEQ ID NO: 318287
uguggaaucuuacaguuua

SEQ ID NO: 551028 - RNA, 19 nt, Artificial Sequence
  Description of Artificial Sequence: Synthetic oligonucleotide
  Antisense strand to SEQ ID NO: 551027
uaaacuguaagauuccaca

SEQ ID NO: 551029 - RNA, 19 nt, Artificial Sequence
  Description of Artificial Sequence: Synthetic oligonucleotide
  Sense strand starting at position 3795 of SEQ ID NO: 318287
aaggucugauuccagucau

SEQ ID NO: 551030 - RNA, 19 nt, Artificial Sequence
  Description of Artificial Sequence: Synthetic oligonucleotide
  Antisense strand to SEQ ID NO: 551029
augacuggaaucagaccuu

SEQ ID NO: 551031 - RNA, 19 nt, Artificial Sequence
  Description of Artificial Sequence: Synthetic oligonucleotide
  Sense strand starting at position 3806 of SEQ ID NO: 318287
ccagucaugcaaugaggaa

SEQ ID NO: 551032 - RNA, 19 nt, Artificial Sequence
  Description of Artificial Sequence: Synthetic oligonucleotide
  Antisense strand to SEQ ID NO: 551031
uuccucauugcaugacugg

SEQ ID NO: 551033 - RNA, 19 nt, Artificial Sequence
  Description of Artificial Sequence: Synthetic oligonucleotide
  Sense strand starting at position 3873 of SEQ ID NO: 318287
uguuaugauacguaugugu

SEQ ID NO: 551034 - RNA, 19 nt, Artificial Sequence
  Description of Artificial Sequence: Synthetic oligonucleotide
  Antisense strand to SEQ ID NO: 551033
acacauacguaucauaaca

SEQ ID NO: 551035 - RNA, 19 nt, Artificial Sequence
  Description of Artificial Sequence: Synthetic oligonucleotide
  Sense strand starting at position 3875 of SEQ ID NO: 318287
uuaugauacguauguguau

SEQ ID NO: 551036 - RNA, 19 nt, Artificial Sequence
  Description of Artificial Sequence: Synthetic oligonucleotide
  Antisense strand to SEQ ID NO: 551035
auacacauacguaucauaa

SEQ ID NO: 551037 - RNA, 19 nt, Artificial Sequence
  Description of Artificial Sequence: Synthetic oligonucleotide
  Sense strand starting at position 226 of SEQ ID NO: 318288
ccuagauucccucaaccga

SEQ ID NO: 551038 - RNA, 19 nt, Artificial Sequence
  Description of Artificial Sequence: Synthetic oligonucleotide
  Antisense strand to SEQ ID NO: 551037
ucgguugagggaaucuagg

SEQ ID NO: 551039 - RNA, 19 nt, Artificial Sequence
  Description of Artificial Sequence: Synthetic oligonucleotide
  Sense strand starting at position 242 of SEQ ID NO: 318288
cgacucauuccucagagcu

SEQ ID NO: 551040 - RNA, 19 nt, Artificial Sequence
  Description of Artificial Sequence: Synthetic oligonucleotide
  Antisense strand to SEQ ID NO: 551039
agcucugaggaaugagucg

SEQ ID NO: 551041 - RNA, 19 nt, Artificial Sequence
  Description of Artificial Sequence: Synthetic oligonucleotide
  Sense strand starting at position 269 of SEQ ID NO: 318288
guagucucuuccuuugaug

SEQ ID NO: 551042 - RNA, 19 nt, Artificial Sequence
  Description of Artificial Sequence: Synthetic oligonucleotide
  Antisense strand to SEQ ID NO: 551041
caucaaaggaagagacuac

SEQ ID NO: 551043 - RNA, 19 nt, Artificial Sequence
  Description of Artificial Sequence: Synthetic oligonucleotide
  Sense strand starting at position 271 of SEQ ID NO: 318288
agucucuuccuuugaugag

SEQ ID NO: 551044 - RNA, 19 nt, Artificial Sequence
  Description of Artificial Sequence: Synthetic oligonucleotide
  Antisense strand to SEQ ID NO: 551043
cucaucaaaggaagagacu

SEQ ID NO: 551045 - RNA, 19 nt, Artificial Sequence
  Description of Artificial Sequence: Synthetic oligonucleotide
  Sense strand starting at position 492 of SEQ ID NO: 318288
agucuaaaccggugacuaa

SEQ ID NO: 551046 - RNA, 19 nt, Artificial Sequence
  Description of Artificial Sequence: Synthetic oligonucleotide
  Antisense strand to SEQ ID NO: 551045
uuagucaccgguuuagacu

SEQ ID NO: 551047 - RNA, 19 nt, Artificial Sequence
  Description of Artificial Sequence: Synthetic oligonucleotide
  Sense strand starting at position 511 of SEQ ID NO: 318288
guaagcacugucuagagua

SEQ ID NO: 551048 - RNA, 19 nt, Artificial Sequence
  Description of Artificial Sequence: Synthetic oligonucleotide
  Antisense strand to SEQ ID NO: 551047
uacucuagacagugcuuac

SEQ ID NO: 551049 - RNA, 19 nt, Artificial Sequence
  Description of Artificial Sequence: Synthetic oligonucleotide
  Sense strand starting at position 538 of SEQ ID NO: 318288
cagagcuuucgacaggaua

SEQ ID NO: 551050 - RNA, 19 nt, Artificial Sequence
  Description of Artificial Sequence: Synthetic oligonucleotide
  Antisense strand to SEQ ID NO: 551049
uauccugucgaaagcucug

SEQ ID NO: 551051 - RNA, 19 nt, Artificial Sequence
  Description of Artificial Sequence: Synthetic oligonucleotide
  Sense strand starting at position 541 of SEQ ID NO: 318288
agcuuucgacaggauacaa

SEQ ID NO: 551052 - RNA, 19 nt, Artificial Sequence
  Description of Artificial Sequence: Synthetic oligonucleotide
  Antisense strand to SEQ ID NO: 551051
uuguauccugucgaaagcu

SEQ ID NO: 551053 - RNA, 19 nt, Artificial Sequence
  Description of Artificial Sequence: Synthetic oligonucleotide
  Sense strand starting at position 629 of SEQ ID NO: 318288
gaacuagggugauccagua

SEQ ID NO: 551054 - RNA, 19 nt, Artificial Sequence
  Description of Artificial Sequence: Synthetic oligonucleotide
  Antisense strand to SEQ ID NO: 551053
uacuggaucacccuaguuc

SEQ ID NO: 551055 - RNA, 19 nt, Artificial Sequence
  Description of Artificial Sequence: Synthetic oligonucleotide
  Sense strand starting at position 642 of SEQ ID NO: 318288
ccaguaugacagcaucuuu

SEQ ID NO: 551056 - RNA, 19 nt, Artificial Sequence
  Description of Artificial Sequence: Synthetic oligonucleotide
  Antisense strand to SEQ ID NO: 551055
aaagaugcugucauacugg

SEQ ID NO: 551057 - RNA, 19 nt, Artificial Sequence
  Description of Artificial Sequence: Synthetic oligonucleotide
  Sense strand starting at position 647 of SEQ ID NO: 318288
augacagcaucuuugggau

SEQ ID NO: 551058 - RNA, 19 nt, Artificial Sequence
  Description of Artificial Sequence: Synthetic oligonucleotide
  Antisense strand to SEQ ID NO: 551057
aucccaaagaugcugucau

SEQ ID NO: 551059 - RNA, 19 nt, Artificial Sequence
  Description of Artificial Sequence: Synthetic oligonucleotide
  Sense strand starting at position 726 of SEQ ID NO: 318288
uggacacucggcuguguaa

SEQ ID NO: 551060 - RNA, 19 nt, Artificial Sequence
  Description of Artificial Sequence: Synthetic oligonucleotide
  Antisense strand to SEQ ID NO: 551059
uuacacagccgagugucca

SEQ ID NO: 551061 - RNA, 19 nt, Artificial Sequence
  Description of Artificial Sequence: Synthetic oligonucleotide
  Sense strand starting at position 728 of SEQ ID NO: 318288
gacacucggcuguguaaga

SEQ ID NO: 551062 - RNA, 19 nt, Artificial Sequence
  Description of Artificial Sequence: Synthetic oligonucleotide
  Antisense strand to SEQ ID NO: 551061
ucuuacacagccgaguguc

SEQ ID NO: 551063 - RNA, 19 nt, Artificial Sequence
  Description of Artificial Sequence: Synthetic oligonucleotide
  Sense strand starting at position 729 of SEQ ID NO: 318288
acacucggcuguguaagaa

SEQ ID NO: 551064 - RNA, 19 nt, Artificial Sequence
  Description of Artificial Sequence: Synthetic oligonucleotide
  Antisense strand to SEQ ID NO: 551063
uucuuacacagccgagugu

SEQ ID NO: 551065 - RNA, 19 nt, Artificial Sequence
  Description of Artificial Sequence: Synthetic oligonucleotide
  Sense strand starting at position 929 of SEQ ID NO: 318288
ggaaccuaaugucagauga

SEQ ID NO: 551066 - RNA, 19 nt, Artificial Sequence
  Description of Artificial Sequence: Synthetic oligonucleotide
  Antisense strand to SEQ ID NO: 551065
ucaucugacauuagguucc

SEQ ID NO: 551067 - RNA, 19 nt, Artificial Sequence
  Description of Artificial Sequence: Synthetic oligonucleotide
  Sense strand starting at position 931 of SEQ ID NO: 318288
aaccuaaugucagaugaga

SEQ ID NO: 551068 - RNA, 19 nt, Artificial Sequence
  Description of Artificial Sequence: Synthetic oligonucleotide
  Antisense strand to SEQ ID NO: 551067
ucucaucugacauuagguu

SEQ ID NO: 551069 - RNA, 19 nt, Artificial Sequence
  Description of Artificial Sequence: Synthetic oligonucleotide
  Sense strand starting at position 989 of SEQ ID NO: 318288
auaaauucuuagguggaca

SEQ ID NO: 551070 - RNA, 19 nt, Artificial Sequence
  Description of Artificial Sequence: Synthetic oligonucleotide
  Antisense strand to SEQ ID NO: 551069
uguccaccuaagaauuuau

SEQ ID NO: 551071 - RNA, 19 nt, Artificial Sequence
  Description of Artificial Sequence: Synthetic oligonucleotide
  Sense strand starting at position 991 of SEQ ID NO: 318288
aaauucuuagguggacaau

SEQ ID NO: 551072 - RNA, 19 nt, Artificial Sequence
  Description of Artificial Sequence: Synthetic oligonucleotide
  Antisense strand to SEQ ID NO: 551071
auuguccaccuaagaauuu

SEQ ID NO: 551073 - RNA, 19 nt, Artificial Sequence
  Description of Artificial Sequence: Synthetic oligonucleotide
  Sense strand starting at position 1016 of SEQ ID NO: 318288
ccacaaagucugggacauu

SEQ ID NO: 551074 - RNA, 19 nt, Artificial Sequence
  Description of Artificial Sequence: Synthetic oligonucleotide
  Antisense strand to SEQ ID NO: 551073
aaugucccagacuuugugg

SEQ ID NO: 551075 - RNA, 19 nt, Artificial Sequence
  Description of Artificial Sequence: Synthetic oligonucleotide
  Sense strand starting at position 1017 of SEQ ID NO: 318288
cacaaagucugggacauuu

SEQ ID NO: 551076 - RNA, 19 nt, Artificial Sequence
  Description of Artificial Sequence: Synthetic oligonucleotide
  Antisense strand to SEQ ID NO: 551075
aaaugucccagacuuugug

SEQ ID NO: 551077 - RNA, 19 nt, Artificial Sequence
  Description of Artificial Sequence: Synthetic oligonucleotide
  Sense strand starting at position 1125 of SEQ ID NO: 318288
gguagucuauuaucaagaa

SEQ ID NO: 551078 - RNA, 19 nt, Artificial Sequence
  Description of Artificial Sequence: Synthetic oligonucleotide
  Antisense strand to SEQ ID NO: 551077
uucuugauaauagacuacc

SEQ ID NO: 551079 - RNA, 19 nt, Artificial Sequence
  Description of Artificial Sequence: Synthetic oligonucleotide
  Sense strand starting at position 1129 of SEQ ID NO: 318288
gucuauuaucaagaagcac

SEQ ID NO: 551080 - RNA, 19 nt, Artificial Sequence
  Description of Artificial Sequence: Synthetic oligonucleotide
  Antisense strand to SEQ ID NO: 551079
gugcuucuugauaauagac

SEQ ID NO: 551081 - RNA, 19 nt, Artificial Sequence
  Description of Artificial Sequence: Synthetic oligonucleotide
  Sense strand starting at position 1146 of SEQ ID NO: 318288
acaaaucucgggugucacu

SEQ ID NO: 551082 - RNA, 19 nt, Artificial Sequence
  Description of Artificial Sequence: Synthetic oligonucleotide
  Antisense strand to SEQ ID NO: 551081
agugacacccgagauuugu

SEQ ID NO: 551083 - RNA, 19 nt, Artificial Sequence
  Description of Artificial Sequence: Synthetic oligonucleotide
  Sense strand starting at position 1156 of SEQ ID NO: 318288
ggugucacucuacagcaaa

SEQ ID NO: 551084 - RNA, 19 nt, Artificial Sequence
  Description of Artificial Sequence: Synthetic oligonucleotide
  Antisense strand to SEQ ID NO: 551083
uuugcuguagagugacacc

SEQ ID NO: 551085 - RNA, 19 nt, Artificial Sequence
  Description of Artificial Sequence: Synthetic oligonucleotide
  Sense strand starting at position 1646 of SEQ ID NO: 318288
ggccauaaggaauggcauu

SEQ ID NO: 551086 - RNA, 19 nt, Artificial Sequence
  Description of Artificial Sequence: Synthetic oligonucleotide
  Antisense strand to SEQ ID NO: 551085
aaugccauuccuuauggcc

SEQ ID NO: 551087 - RNA, 19 nt, Artificial Sequence
  Description of Artificial Sequence: Synthetic oligonucleotide
  Sense strand starting at position 1787 of SEQ ID NO: 318288
cagucagugcucuaccaag

SEQ ID NO: 551088 - RNA, 19 nt, Artificial Sequence
  Description of Artificial Sequence: Synthetic oligonucleotide
  Antisense strand to SEQ ID NO: 551087
cuugguagagcacugacug

SEQ ID NO: 551089 - RNA, 19 nt, Artificial Sequence
  Description of Artificial Sequence: Synthetic oligonucleotide
  Sense strand starting at position 1913 of SEQ ID NO: 318288
cgguuucuggcacacagaa

SEQ ID NO: 551090 - RNA, 19 nt, Artificial Sequence
  Description of Artificial Sequence: Synthetic oligonucleotide
  Antisense strand to SEQ ID NO: 551089
uucugugugccagaaaccg

SEQ ID NO: 551091 - RNA, 19 nt, Artificial Sequence
  Description of Artificial Sequence: Synthetic oligonucleotide
  Sense strand starting at position 1930 of SEQ ID NO: 318288
aagggucccguuuguugaa

SEQ ID NO: 551092 - RNA, 19 nt, Artificial Sequence
  Description of Artificial Sequence: Synthetic oligonucleotide
  Antisense strand to SEQ ID NO: 551091
uucaacaaacgggacccuu

SEQ ID NO: 551093 - RNA, 19 nt, Artificial Sequence
  Description of Artificial Sequence: Synthetic oligonucleotide
  Sense strand starting at position 1942 of SEQ ID NO: 318288
uguugaauuaguuaacgaa

SEQ ID NO: 551094 - RNA, 19 nt, Artificial Sequence
  Description of Artificial Sequence: Synthetic oligonucleotide
  Antisense strand to SEQ ID NO: 551093
uucguuaacuaauucaaca

SEQ ID NO: 551095 - RNA, 19 nt, Artificial Sequence
  Description of Artificial Sequence: Synthetic oligonucleotide
  Sense strand starting at position 2123 of SEQ ID NO: 318288
gggcuuagccaauaugaag

SEQ ID NO: 551096 - RNA, 19 nt, Artificial Sequence
  Description of Artificial Sequence: Synthetic oligonucleotide
  Antisense strand to SEQ ID NO: 551095
cuucauauuggcuaagccc

SEQ ID NO: 551097 - RNA, 19 nt, Artificial Sequence
  Description of Artificial Sequence: Synthetic oligonucleotide
  Sense strand starting at position 3533 of SEQ ID NO: 318288
ugugaaccuuccucucaug

SEQ ID NO: 551098 - RNA, 19 nt, Artificial Sequence
  Description of Artificial Sequence: Synthetic oligonucleotide
  Antisense strand to SEQ ID NO: 551097
caugagaggaagguucaca

SEQ ID NO: 551099 - RNA, 19 nt, Artificial Sequence
  Description of Artificial Sequence: Synthetic oligonucleotide
  Sense strand starting at position 3559 of SEQ ID NO: 318288
ggaagcacggucugagaau

SEQ ID NO: 551100 - RNA, 19 nt, Artificial Sequence
  Description of Artificial Sequence: Synthetic oligonucleotide
  Antisense strand to SEQ ID NO: 551099
auucucagaccgugcuucc

SEQ ID NO: 551101 - RNA, 19 nt, Artificial Sequence
  Description of Artificial Sequence: Synthetic oligonucleotide
  Sense strand starting at position 3574 of SEQ ID NO: 318288
gaaucucaucagggagcaa

SEQ ID NO: 551102 - RNA, 19 nt, Artificial Sequence
  Description of Artificial Sequence: Synthetic oligonucleotide
  Antisense strand to SEQ ID NO: 551101
uugcucccugaugagauuc

SEQ ID NO: 551103 - RNA, 19 nt, Artificial Sequence
  Description of Artificial Sequence: Synthetic oligonucleotide
  Sense strand starting at position 3633 of SEQ ID NO: 318288
guggauauucccuacggca

SEQ ID NO: 551104 - RNA, 19 nt, Artificial Sequence
  Description of Artificial Sequence: Synthetic oligonucleotide
  Antisense strand to SEQ ID NO: 551103
ugccguagggaauauccac

SEQ ID NO: 551105 - RNA, 19 nt, Artificial Sequence
  Description of Artificial Sequence: Synthetic oligonucleotide
  Sense strand starting at position 3635 of SEQ ID NO: 318288
ggauauucccuacggcaca

SEQ ID NO: 551106 - RNA, 19 nt, Artificial Sequence
  Description of Artificial Sequence: Synthetic oligonucleotide
  Antisense strand to SEQ ID NO: 551105
ugugccguagggaauaucc

SEQ ID NO: 551107 - RNA, 19 nt, Artificial Sequence
  Description of Artificial Sequence: Synthetic oligonucleotide
  Sense strand starting at position 3906 of SEQ ID NO: 318288
uucccauuggccuguaaau

SEQ ID NO: 551108 - RNA, 19 nt, Artificial Sequence
  Description of Artificial Sequence: Synthetic oligonucleotide
  Antisense strand to SEQ ID NO: 551107
auuuacaggccaaugggaa

SEQ ID NO: 551109 - RNA, 19 nt, Artificial Sequence
  Description of Artificial Sequence: Synthetic oligonucleotide
  Sense strand starting at position 3908 of SEQ ID NO: 318288
cccauuggccuguaaaugu

SEQ ID NO: 551110 - RNA, 19 nt, Artificial Sequence
  Description of Artificial Sequence: Synthetic oligonucleotide
  Antisense strand to SEQ ID NO: 551109
acauuuacaggccaauggg

SEQ ID NO: 551111 - RNA, 19 nt, Artificial Sequence
  Description of Artificial Sequence: Synthetic oligonucleotide
  Sense strand starting at position 3934 of SEQ ID NO: 318288
ccucuacuaugggaacaaa

SEQ ID NO: 551112 - RNA, 19 nt, Artificial Sequence
  Description of Artificial Sequence: Synthetic oligonucleotide
  Antisense strand to SEQ ID NO: 551111
uuuguucccauaguagagg

SEQ ID NO: 551113 - RNA, 19 nt, Artificial Sequence
  Description of Artificial Sequence: Synthetic oligonucleotide
  Sense strand starting at position 3970 of SEQ ID NO: 318288
cugagugucucuguucuca

SEQ ID NO: 551114 - RNA, 19 nt, Artificial Sequence
  Description of Artificial Sequence: Synthetic oligonucleotide
  Antisense strand to SEQ ID NO: 551113
ugagaacagagacacucag

SEQ ID NO: 551115 - RNA, 19 nt, Artificial Sequence
  Description of Artificial Sequence: Synthetic oligonucleotide
  Sense strand starting at position 3972 of SEQ ID NO: 318288
gagugucucuguucucaac

SEQ ID NO: 551116 - RNA, 19 nt, Artificial Sequence
  Description of Artificial Sequence: Synthetic oligonucleotide
  Antisense strand to SEQ ID NO: 551115
guugagaacagagacacuc

SEQ ID NO: 551117 - RNA, 19 nt, Artificial Sequence
  Description of Artificial Sequence: Synthetic oligonucleotide
  Sense strand starting at position 8 of SEQ ID NO: 318289
gaacuagggugauccagua

SEQ ID NO: 551118 - RNA, 19 nt, Artificial Sequence
  Description of Artificial Sequence: Synthetic oligonucleotide
  Antisense strand to SEQ ID NO: 551117
uacuggaucacccuaguuc

SEQ ID NO: 551119 - RNA, 19 nt, Artificial Sequence
  Description of Artificial Sequence: Synthetic oligonucleotide
  Sense strand starting at position 21 of SEQ ID NO: 318289
ccaguaugacagcaucuuu

SEQ ID NO: 551120 - RNA, 19 nt, Artificial Sequence
  Description of Artificial Sequence: Synthetic oligonucleotide
  Antisense strand to SEQ ID NO: 551119
aaagaugcugucauacugg

SEQ ID NO: 551121 - RNA, 19 nt, Artificial Sequence
  Description of Artificial Sequence: Synthetic oligonucleotide
  Sense strand starting at position 26 of SEQ ID NO: 318289
augacagcaucuuugggau

SEQ ID NO: 551122 - RNA, 19 nt, Artificial Sequence
  Description of Artificial Sequence: Synthetic oligonucleotide
  Antisense strand to SEQ ID NO: 551121
aucccaaagaugcugucau

SEQ ID NO: 551123 - RNA, 19 nt, Artificial Sequence
  Description of Artificial Sequence: Synthetic oligonucleotide
  Sense strand starting at position 105 of SEQ ID NO: 318289
uggacacucggcuguguaa

SEQ ID NO: 551124 - RNA, 19 nt, Artificial Sequence
  Description of Artificial Sequence: Synthetic oligonucleotide
  Antisense strand to SEQ ID NO: 551123
uuacacagccgagugucca

SEQ ID NO: 551125 - RNA, 19 nt, Artificial Sequence
  Description of Artificial Sequence: Synthetic oligonucleotide
  Sense strand starting at position 107 of SEQ ID NO: 318289
gacacucggcuguguaaga

SEQ ID NO: 551126 - RNA, 19 nt, Artificial Sequence
  Description of Artificial Sequence: Synthetic oligonucleotide
  Antisense strand to SEQ ID NO: 551125
ucuuacacagccgaguguc

SEQ ID NO: 551127 - RNA, 19 nt, Artificial Sequence
  Description of Artificial Sequence: Synthetic oligonucleotide
  Sense strand starting at position 108 of SEQ ID NO: 318289
acacucggcuguguaagaa

SEQ ID NO: 551128 - RNA, 19 nt, Artificial Sequence
  Description of Artificial Sequence: Synthetic oligonucleotide
  Antisense strand to SEQ ID NO: 551127
uucuuacacagccgagugu

SEQ ID NO: 551129 - RNA, 19 nt, Artificial Sequence
  Description of Artificial Sequence: Synthetic oligonucleotide
  Sense strand starting at position 308 of SEQ ID NO: 318289
ggaaccuaaugucagauga

SEQ ID NO: 551130 - RNA, 19 nt, Artificial Sequence
  Description of Artificial Sequence: Synthetic oligonucleotide
  Antisense strand to SEQ ID NO: 551129
ucaucugacauuagguucc

SEQ ID NO: 551131 - RNA, 19 nt, Artificial Sequence
  Description of Artificial Sequence: Synthetic oligonucleotide
  Sense strand starting at position 310 of SEQ ID NO: 318289
aaccuaaugucagaugaga

SEQ ID NO: 551132 - RNA, 19 nt, Artificial Sequence
  Description of Artificial Sequence: Synthetic oligonucleotide
  Antisense strand to SEQ ID NO: 551131
ucucaucugacauuagguu

SEQ ID NO: 551133 - RNA, 19 nt, Artificial Sequence
  Description of Artificial Sequence: Synthetic oligonucleotide
  Sense strand starting at position 368 of SEQ ID NO: 318289
auaaauucuuagguggaca

SEQ ID NO: 551134 - RNA, 19 nt, Artificial Sequence
  Description of Artificial Sequence: Synthetic oligonucleotide
  Antisense strand to SEQ ID NO: 551133
uguccaccuaagaauuuau

SEQ ID NO: 551135 - RNA, 19 nt, Artificial Sequence
  Description of Artificial Sequence: Synthetic oligonucleotide
  Sense strand starting at position 370 of SEQ ID NO: 318289
aaauucuuagguggacaau

SEQ ID NO: 551136 - RNA, 19 nt, Artificial Sequence
  Description of Artificial Sequence: Synthetic oligonucleotide
  Antisense strand to SEQ ID NO: 551135
auuguccaccuaagaauuu

SEQ ID NO: 551137 - RNA, 19 nt, Artificial Sequence
  Description of Artificial Sequence: Synthetic oligonucleotide
  Sense strand starting at position 395 of SEQ ID NO: 318289
ccacaaagucugggacauu

SEQ ID NO: 551138 - RNA, 19 nt, Artificial Sequence
  Description of Artificial Sequence: Synthetic oligonucleotide
  Antisense strand to SEQ ID NO: 551137
aaugucccagacuuugugg

SEQ ID NO: 551139 - RNA, 19 nt, Artificial Sequence
  Description of Artificial Sequence: Synthetic oligonucleotide
  Sense strand starting at position 396 of SEQ ID NO: 318289
cacaaagucugggacauuu

SEQ ID NO: 551140 - RNA, 19 nt, Artificial Sequence
  Description of Artificial Sequence: Synthetic oligonucleotide
  Antisense strand to SEQ ID NO: 551139
aaaugucccagacuuugug

SEQ ID NO: 551141 - RNA, 19 nt, Artificial Sequence
  Description of Artificial Sequence: Synthetic oligonucleotide
  Sense strand starting at position 504 of SEQ ID NO: 318289
gguagucuauuaucaagaa

SEQ ID NO: 551142 - RNA, 19 nt, Artificial Sequence
  Description of Artificial Sequence: Synthetic oligonucleotide
  Antisense strand to SEQ ID NO: 551141
uucuugauaauagacuacc

SEQ ID NO: 551143 - RNA, 19 nt, Artificial Sequence
  Description of Artificial Sequence: Synthetic oligonucleotide
  Sense strand starting at position 505 of SEQ ID NO: 318289
guagucuauuaucaagaag

SEQ ID NO: 551144 - RNA, 19 nt, Artificial Sequence
  Description of Artificial Sequence: Synthetic oligonucleotide
  Antisense strand to SEQ ID NO: 551143
cuucuugauaauagacuac

SEQ ID NO: 551145 - RNA, 19 nt, Artificial Sequence
  Description of Artificial Sequence: Synthetic oligonucleotide
  Sense strand starting at position 508 of SEQ ID NO: 318289
gucuauuaucaagaagcac

SEQ ID NO: 551146 - RNA, 19 nt, Artificial Sequence
  Description of Artificial Sequence: Synthetic oligonucleotide
  Antisense strand to SEQ ID NO: 551145
gugcuucuugauaauagac

SEQ ID NO: 551147 - RNA, 19 nt, Artificial Sequence
  Description of Artificial Sequence: Synthetic oligonucleotide
  Sense strand starting at position 525 of SEQ ID NO: 318289
acaaaucucgggugucacu

SEQ ID NO: 551148 - RNA, 19 nt, Artificial Sequence
  Description of Artificial Sequence: Synthetic oligonucleotide
  Antisense strand to SEQ ID NO: 551147
agugacacccgagauuugu

SEQ ID NO: 551149 - RNA, 19 nt, Artificial Sequence
  Description of Artificial Sequence: Synthetic oligonucleotide
  Sense strand starting at position 535 of SEQ ID NO: 318289
ggugucacucuacagcaaa

SEQ ID NO: 551150 - RNA, 19 nt, Artificial Sequence
  Description of Artificial Sequence: Synthetic oligonucleotide
  Antisense strand to SEQ ID NO: 551149
uuugcuguagagugacacc

SEQ ID NO: 551151 - RNA, 19 nt, Artificial Sequence
  Description of Artificial Sequence: Synthetic oligonucleotide
  Sense strand starting at position 1025 of SEQ ID NO: 318289
ggccauaaggaauggcauu

SEQ ID NO: 551152 - RNA, 19 nt, Artificial Sequence
  Description of Artificial Sequence: Synthetic oligonucleotide
  Antisense strand to SEQ ID NO: 551151
aaugccauuccuuauggcc

SEQ ID NO: 551153 - RNA, 19 nt, Artificial Sequence
  Description of Artificial Sequence: Synthetic oligonucleotide
  Sense strand starting at position 1164 of SEQ ID NO: 318289
ggcagucagugcucuacca

SEQ ID NO: 551154 - RNA, 19 nt, Artificial Sequence
  Description of Artificial Sequence: Synthetic oligonucleotide
  Antisense strand to SEQ ID NO: 551153
ugguagagcacugacugcc

SEQ ID NO: 551155 - RNA, 19 nt, Artificial Sequence
  Description of Artificial Sequence: Synthetic oligonucleotide
  Sense strand starting at position 1166 of SEQ ID NO: 318289
cagucagugcucuaccaag

SEQ ID NO: 551156 - RNA, 19 nt, Artificial Sequence
  Description of Artificial Sequence: Synthetic oligonucleotide
  Antisense strand to SEQ ID NO: 551155
cuugguagagcacugacug

SEQ ID NO: 551157 - RNA, 19 nt, Artificial Sequence
  Description of Artificial Sequence: Synthetic oligonucleotide
  Sense strand starting at position 1292 of SEQ ID NO: 318289
cgguuucuggcacacagaa

SEQ ID NO: 551158 - RNA, 19 nt, Artificial Sequence
  Description of Artificial Sequence: Synthetic oligonucleotide
  Antisense strand to SEQ ID NO: 551157
uucugugugccagaaaccg

SEQ ID NO: 551159 - RNA, 19 nt, Artificial Sequence
  Description of Artificial Sequence: Synthetic oligonucleotide
  Sense strand starting at position 1309 of SEQ ID NO: 318289
aagggucccguuuguugaa

SEQ ID NO: 551160 - RNA, 19 nt, Artificial Sequence
  Description of Artificial Sequence: Synthetic oligonucleotide
  Antisense strand to SEQ ID NO: 551159
uucaacaaacgggacccuu

SEQ ID NO: 551161 - RNA, 19 nt, Artificial Sequence
  Description of Artificial Sequence: Synthetic oligonucleotide
  Sense strand starting at position 1311 of SEQ ID NO: 318289
gggucccguuuguugaauu

SEQ ID NO: 551162 - RNA, 19 nt, Artificial Sequence
  Description of Artificial Sequence: Synthetic oligonucleotide
  Antisense strand to SEQ ID NO: 551161
aauucaacaaacgggaccc

SEQ ID NO: 551163 - RNA, 19 nt, Artificial Sequence
  Description of Artificial Sequence: Synthetic oligonucleotide
  Sense strand starting at position 1321 of SEQ ID NO: 318289
uguugaauuaguuaacgaa

SEQ ID NO: 551164 - RNA, 19 nt, Artificial Sequence
  Description of Artificial Sequence: Synthetic oligonucleotide
  Antisense strand to SEQ ID NO: 551163
uucguuaacuaauucaaca

SEQ ID NO: 551165 - RNA, 19 nt, Artificial Sequence
  Description of Artificial Sequence: Synthetic oligonucleotide
  Sense strand starting at position 1502 of SEQ ID NO: 318289
gggcuuagccaauaugaag

SEQ ID NO: 551166 - RNA, 19 nt, Artificial Sequence
  Description of Artificial Sequence: Synthetic oligonucleotide
  Antisense strand to SEQ ID NO: 551165
cuucauauuggcuaagccc

SEQ ID NO: 551167 - RNA, 19 nt, Artificial Sequence
  Description of Artificial Sequence: Synthetic oligonucleotide
  Sense strand starting at position 2609 of SEQ ID NO: 318289
ccgagcucucaguggguuu

SEQ ID NO: 551168 - RNA, 19 nt, Artificial Sequence
  Description of Artificial Sequence: Synthetic oligonucleotide
  Antisense strand to SEQ ID NO: 551167
aaacccacugagagcucgg

SEQ ID NO: 551169 - RNA, 19 nt, Artificial Sequence
  Description of Artificial Sequence: Synthetic oligonucleotide
  Sense strand starting at position 2912 of SEQ ID NO: 318289
ugugaaccuuccucucaug

SEQ ID NO: 551170 - RNA, 19 nt, Artificial Sequence
  Description of Artificial Sequence: Synthetic oligonucleotide
  Antisense strand to SEQ ID NO: 551169
caugagaggaagguucaca

SEQ ID NO: 551171 - RNA, 19 nt, Artificial Sequence
  Description of Artificial Sequence: Synthetic oligonucleotide
  Sense strand starting at position 2938 of SEQ ID NO: 318289
ggaagcacggucugagaau

SEQ ID NO: 551172 - RNA, 19 nt, Artificial Sequence
  Description of Artificial Sequence: Synthetic oligonucleotide
  Antisense strand to SEQ ID NO: 551171
auucucagaccgugcuucc

SEQ ID NO: 551173 - RNA, 19 nt, Artificial Sequence
  Description of Artificial Sequence: Synthetic oligonucleotide
  Sense strand starting at position 2953 of SEQ ID NO: 318289
gaaucucaucagggagcaa

SEQ ID NO: 551174 - RNA, 19 nt, Artificial Sequence
  Description of Artificial Sequence: Synthetic oligonucleotide
  Antisense strand to SEQ ID NO: 551173
uugcucccugaugagauuc

SEQ ID NO: 551175 - RNA, 19 nt, Artificial Sequence
  Description of Artificial Sequence: Synthetic oligonucleotide
  Sense strand starting at position 3012 of SEQ ID NO: 318289
guggauauucccuacggca

SEQ ID NO: 551176 - RNA, 19 nt, Artificial Sequence
  Description of Artificial Sequence: Synthetic oligonucleotide
  Antisense strand to SEQ ID NO: 551175
ugccguagggaauauccac

SEQ ID NO: 551177 - RNA, 19 nt, Artificial Sequence
  Description of Artificial Sequence: Synthetic oligonucleotide
  Sense strand starting at position 3014 of SEQ ID NO: 318289
ggauauucccuacggcaca

SEQ ID NO: 551178 - RNA, 19 nt, Artificial Sequence
  Description of Artificial Sequence: Synthetic oligonucleotide
  Antisense strand to SEQ ID NO: 551177
ugugccguagggaauaucc

SEQ ID NO: 551179 - RNA, 19 nt, Artificial Sequence
  Description of Artificial Sequence: Synthetic oligonucleotide
  Sense strand starting at position 3285 of SEQ ID NO: 318289
uucccauuggccuguaaau

SEQ ID NO: 551180 - RNA, 19 nt, Artificial Sequence
  Description of Artificial Sequence: Synthetic oligonucleotide
  Antisense strand to SEQ ID NO: 551179
auuuacaggccaaugggaa

SEQ ID NO: 551181 - RNA, 19 nt, Artificial Sequence
  Description of Artificial Sequence: Synthetic oligonucleotide
  Sense strand starting at position 3287 of SEQ ID NO: 318289
cccauuggccuguaaaugu

SEQ ID NO: 551182 - RNA, 19 nt, Artificial Sequence
  Description of Artificial Sequence: Synthetic oligonucleotide
  Antisense strand to SEQ ID NO: 551181
acauuuacaggccaauggg

SEQ ID NO: 551183 - RNA, 19 nt, Artificial Sequence
  Description of Artificial Sequence: Synthetic oligonucleotide
  Sense strand starting at position 3313 of SEQ ID NO: 318289
ccucuacuaugggaacaaa

SEQ ID NO: 551184 - RNA, 19 nt, Artificial Sequence
  Description of Artificial Sequence: Synthetic oligonucleotide
  Antisense strand to SEQ ID NO: 551183
uuuguucccauaguagagg

SEQ ID NO: 551185 - RNA, 19 nt, Artificial Sequence
  Description of Artificial Sequence: Synthetic oligonucleotide
  Sense strand starting at position 3349 of SEQ ID NO: 318289
cugagugucucuguucuca

SEQ ID NO: 551186 - RNA, 19 nt, Artificial Sequence
  Description of Artificial Sequence: Synthetic oligonucleotide
  Antisense strand to SEQ ID NO: 551185
ugagaacagagacacucag

SEQ ID NO: 551187 - RNA, 19 nt, Artificial Sequence
  Description of Artificial Sequence: Synthetic oligonucleotide
  Sense strand starting at position 3351 of SEQ ID NO: 318289
gagugucucuguucucaac

SEQ ID NO: 551188 - RNA, 19 nt, Artificial Sequence
  Description of Artificial Sequence: Synthetic oligonucleotide
  Antisense strand to SEQ ID NO: 551187
guugagaacagagacacuc

SEQ ID NO: 551189 - RNA, 19 nt, Artificial Sequence
  Description of Artificial Sequence: Synthetic oligonucleotide
  Sense strand starting at position 3373 of SEQ ID NO: 318289
agcggaauuucuugaaaga

SEQ ID NO: 551190 - RNA, 19 nt, Artificial Sequence
  Description of Artificial Sequence: Synthetic oligonucleotide
  Antisense strand to SEQ ID NO: 551189
ucuuucaagaaauuccgcu

SEQ ID NO: 551191 - RNA, 19 nt, Artificial Sequence
  Description of Artificial Sequence: Synthetic oligonucleotide
  Sense strand starting at position 3677 of SEQ ID NO: 318289
gcauccucucccuauuagu

SEQ ID NO: 551192 - RNA, 19 nt, Artificial Sequence
  Description of Artificial Sequence: Synthetic oligonucleotide
  Antisense strand to SEQ ID NO: 551191
acuaauagggagaggaugc

SEQ ID NO: 551193 - RNA, 19 nt, Artificial Sequence
  Description of Artificial Sequence: Synthetic oligonucleotide
  Sense strand starting at position 3937 of SEQ ID NO: 318289
ugcuguacugaaggagaua

SEQ ID NO: 551194 - RNA, 19 nt, Artificial Sequence
  Description of Artificial Sequence: Synthetic oligonucleotide
  Antisense strand to SEQ ID NO: 551193
uaucuccuucaguacagca

SEQ ID NO: 551195 - RNA, 19 nt, Artificial Sequence
  Description of Artificial Sequence: Synthetic oligonucleotide
  Sense strand starting at position 3949 of SEQ ID NO: 318289
ggagauacuucccaucagu

SEQ ID NO: 551196 - RNA, 19 nt, Artificial Sequence
  Description of Artificial Sequence: Synthetic oligonucleotide
  Antisense strand to SEQ ID NO: 551195
acugaugggaaguaucucc

SEQ ID NO: 551197 - RNA, 19 nt, Artificial Sequence
  Description of Artificial Sequence: Synthetic oligonucleotide
  Sense strand starting at position 88 of SEQ ID NO: 318290
cugguuaguugaguguuca

SEQ ID NO: 551198 - RNA, 19 nt, Artificial Sequence
  Description of Artificial Sequence: Synthetic oligonucleotide
  Antisense strand to SEQ ID NO: 551197
ugaacacucaacuaaccag

SEQ ID NO: 551199 - RNA, 19 nt, Artificial Sequence
  Description of Artificial Sequence: Synthetic oligonucleotide
  Sense strand starting at position 89 of SEQ ID NO: 318290
ugguuaguugaguguucac

SEQ ID NO: 551200 - RNA, 19 nt, Artificial Sequence
  Description of Artificial Sequence: Synthetic oligonucleotide
  Antisense strand to SEQ ID NO: 551199
gugaacacucaacuaacca

SEQ ID NO: 551201 - RNA, 19 nt, Artificial Sequence
  Description of Artificial Sequence: Synthetic oligonucleotide
  Sense strand starting at position 106 of SEQ ID NO: 318290
acuuuaugagacugagcua

SEQ ID NO: 551202 - RNA, 19 nt, Artificial Sequence
  Description of Artificial Sequence: Synthetic oligonucleotide
  Antisense strand to SEQ ID NO: 551201
uagcucagucucauaaagu

SEQ ID NO: 551203 - RNA, 19 nt, Artificial Sequence
  Description of Artificial Sequence: Synthetic oligonucleotide
  Sense strand starting at position 109 of SEQ ID NO: 318290
uuaugagacugagcuaaca

SEQ ID NO: 551204 - RNA, 19 nt, Artificial Sequence
  Description of Artificial Sequence: Synthetic oligonucleotide
  Antisense strand to SEQ ID NO: 551203
uguuagcucagucucauaa

SEQ ID NO: 551205 - RNA, 19 nt, Artificial Sequence
  Description of Artificial Sequence: Synthetic oligonucleotide
  Sense strand starting at position 133 of SEQ ID NO: 318290
guacacuauucucugcuau

SEQ ID NO: 551206 - RNA, 19 nt, Artificial Sequence
  Description of Artificial Sequence: Synthetic oligonucleotide
  Antisense strand to SEQ ID NO: 551205
auagcagagaauaguguac

SEQ ID NO: 551207 - RNA, 19 nt, Artificial Sequence
  Description of Artificial Sequence: Synthetic oligonucleotide
  Sense strand starting at position 254 of SEQ ID NO: 318290
ugcauuuacucaucugggu

SEQ ID NO: 551208 - RNA, 19 nt, Artificial Sequence
  Description of Artificial Sequence: Synthetic oligonucleotide
  Antisense strand to SEQ ID NO: 551207
acccagaugaguaaaugca

SEQ ID NO: 551209 - RNA, 19 nt, Artificial Sequence
  Description of Artificial Sequence: Synthetic oligonucleotide
  Sense strand starting at position 258 of SEQ ID NO: 318290
uuuacucaucuggguuuau

SEQ ID NO: 551210 - RNA, 19 nt, Artificial Sequence
  Description of Artificial Sequence: Synthetic oligonucleotide
  Antisense strand to SEQ ID NO: 551209
auaaacccagaugaguaaa

SEQ ID NO: 551211 - RNA, 19 nt, Artificial Sequence
  Description of Artificial Sequence: Synthetic oligonucleotide
  Sense strand starting at position 269 of SEQ ID NO: 318290
ggguuuauccaguacaaca

SEQ ID NO: 551212 - RNA, 19 nt, Artificial Sequence
  Description of Artificial Sequence: Synthetic oligonucleotide
  Antisense strand to SEQ ID NO: 551211
uguuguacuggauaaaccc

SEQ ID NO: 551213 - RNA, 19 nt, Artificial Sequence
  Description of Artificial Sequence: Synthetic oligonucleotide
  Sense strand starting at position 354 of SEQ ID NO: 318290
guuguuauauaagugacaa

SEQ ID NO: 551214 - RNA, 19 nt, Artificial Sequence
  Description of Artificial Sequence: Synthetic oligonucleotide
  Antisense strand to SEQ ID NO: 551213
uugucacuuauauaacaac

SEQ ID NO: 551215 - RNA, 19 nt, Artificial Sequence
  Description of Artificial Sequence: Synthetic oligonucleotide
  Sense strand starting at position 636 of SEQ ID NO: 318290
acguguaguacagaaagca

SEQ ID NO: 551216 - RNA, 19 nt, Artificial Sequence
  Description of Artificial Sequence: Synthetic oligonucleotide
  Antisense strand to SEQ ID NO: 551215
ugcuuucuguacuacacgu

SEQ ID NO: 551217 - RNA, 19 nt, Artificial Sequence
  Description of Artificial Sequence: Synthetic oligonucleotide
  Sense strand starting at position 927 of SEQ ID NO: 318290
gggcgucagaugcauucuu

SEQ ID NO: 551218 - RNA, 19 nt, Artificial Sequence
  Description of Artificial Sequence: Synthetic oligonucleotide
  Antisense strand to SEQ ID NO: 551217
aagaaugcaucugacgccc

SEQ ID NO: 551219 - RNA, 19 nt, Artificial Sequence
  Description of Artificial Sequence: Synthetic oligonucleotide
  Sense strand starting at position 929 of SEQ ID NO: 318290
gcgucagaugcauucuuuc

SEQ ID NO: 551220 - RNA, 19 nt, Artificial Sequence
  Description of Artificial Sequence: Synthetic oligonucleotide
  Antisense strand to SEQ ID NO: 551219
gaaagaaugcaucugacgc

SEQ ID NO: 551221 - RNA, 19 nt, Artificial Sequence
  Description of Artificial Sequence: Synthetic oligonucleotide
  Sense strand starting at position 936 of SEQ ID NO: 318290
augcauucuuuccuuugua

SEQ ID NO: 551222 - RNA, 19 nt, Artificial Sequence
  Description of Artificial Sequence: Synthetic oligonucleotide
  Antisense strand to SEQ ID NO: 551221
uacaaaggaaagaaugcau

SEQ ID NO: 551223 - RNA, 19 nt, Artificial Sequence
  Description of Artificial Sequence: Synthetic oligonucleotide
  Sense strand starting at position 1032 of SEQ ID NO: 318290
uaugguuaucgccggaaug

SEQ ID NO: 551224 - RNA, 19 nt, Artificial Sequence
  Description of Artificial Sequence: Synthetic oligonucleotide
  Antisense strand to SEQ ID NO: 551223
cauuccggcgauaaccaua

SEQ ID NO: 551225 - RNA, 19 nt, Artificial Sequence
  Description of Artificial Sequence: Synthetic oligonucleotide
  Sense strand starting at position 1034 of SEQ ID NO: 318290
ugguuaucgccggaaugug

SEQ ID NO: 551226 - RNA, 19 nt, Artificial Sequence
  Description of Artificial Sequence: Synthetic oligonucleotide
  Antisense strand to SEQ ID NO: 551225
cacauuccggcgauaacca

SEQ ID NO: 551227 - RNA, 19 nt, Artificial Sequence
  Description of Artificial Sequence: Synthetic oligonucleotide
  Sense strand starting at position 1035 of SEQ ID NO: 318290
gguuaucgccggaaugugu

SEQ ID NO: 551228 - RNA, 19 nt, Artificial Sequence
  Description of Artificial Sequence: Synthetic oligonucleotide
  Antisense strand to SEQ ID NO: 551227
acacauuccggcgauaacc

SEQ ID NO: 551229 - RNA, 19 nt, Artificial Sequence
  Description of Artificial Sequence: Synthetic oligonucleotide
  Sense strand starting at position 1083 of SEQ ID NO: 318290
cuugcugugacuccguuau

SEQ ID NO: 551230 - RNA, 19 nt, Artificial Sequence
  Description of Artificial Sequence: Synthetic oligonucleotide
  Antisense strand to SEQ ID NO: 551229
auaacggagucacagcaag

SEQ ID NO: 551231 - RNA, 19 nt, Artificial Sequence
  Description of Artificial Sequence: Synthetic oligonucleotide
  Sense strand starting at position 1102 of SEQ ID NO: 318290
gggcauaccugccucucaa

SEQ ID NO: 551232 - RNA, 19 nt, Artificial Sequence
  Description of Artificial Sequence: Synthetic oligonucleotide
  Antisense strand to SEQ ID NO: 551231
uugagaggcagguaugccc

SEQ ID NO: 551233 - RNA, 19 nt, Artificial Sequence
  Description of Artificial Sequence: Synthetic oligonucleotide
  Sense strand starting at position 2301 of SEQ ID NO: 318290
aguugacgcccgggaaaua

SEQ ID NO: 551234 - RNA, 19 nt, Artificial Sequence
  Description of Artificial Sequence: Synthetic oligonucleotide
  Antisense strand to SEQ ID NO: 551233
uauuucccgggcgucaacu

SEQ ID NO: 551235 - RNA, 19 nt, Artificial Sequence
  Description of Artificial Sequence: Synthetic oligonucleotide
  Sense strand starting at position 2418 of SEQ ID NO: 318290
ggaguggucccugggagac

SEQ ID NO: 551236 - RNA, 19 nt, Artificial Sequence
  Description of Artificial Sequence: Synthetic oligonucleotide
  Antisense strand to SEQ ID NO: 551235
gucucccagggaccacucc

SEQ ID NO: 551237 - RNA, 19 nt, Artificial Sequence
  Description of Artificial Sequence: Synthetic oligonucleotide
  Sense strand starting at position 2439 of SEQ ID NO: 318290
ucaccugcuccguuagcau

SEQ ID NO: 551238 - RNA, 19 nt, Artificial Sequence
  Description of Artificial Sequence: Synthetic oligonucleotide
  Antisense strand to SEQ ID NO: 551237
augcuaacggagcagguga

SEQ ID NO: 551239 - RNA, 19 nt, Artificial Sequence
  Description of Artificial Sequence: Synthetic oligonucleotide
  Sense strand starting at position 2530 of SEQ ID NO: 318290
aggucacaccuacguuuaa

SEQ ID NO: 551240 - RNA, 19 nt, Artificial Sequence
  Description of Artificial Sequence: Synthetic oligonucleotide
  Antisense strand to SEQ ID NO: 551239
uuaaacguaggugugaccu

SEQ ID NO: 551241 - RNA, 19 nt, Artificial Sequence
  Description of Artificial Sequence: Synthetic oligonucleotide
  Sense strand starting at position 2553 of SEQ ID NO: 318290
cuucguucucuucccguua

SEQ ID NO: 551242 - RNA, 19 nt, Artificial Sequence
  Description of Artificial Sequence: Synthetic oligonucleotide
  Antisense strand to SEQ ID NO: 551241
uaacgggaagagaacgaag

SEQ ID NO: 551243 - RNA, 19 nt, Artificial Sequence
  Description of Artificial Sequence: Synthetic oligonucleotide
  Sense strand starting at position 3157 of SEQ ID NO: 318290
cuaguugaaauccagugua

SEQ ID NO: 551244 - RNA, 19 nt, Artificial Sequence
  Description of Artificial Sequence: Synthetic oligonucleotide
  Antisense strand to SEQ ID NO: 551243
uacacuggauuucaacuag

SEQ ID NO: 551245 - RNA, 19 nt, Artificial Sequence
  Description of Artificial Sequence: Synthetic oligonucleotide
  Sense strand starting at position 3190 of SEQ ID NO: 318290
ggcacaucuuagucgggau

SEQ ID NO: 551246 - RNA, 19 nt, Artificial Sequence
  Description of Artificial Sequence: Synthetic oligonucleotide
  Antisense strand to SEQ ID NO: 551245
aucccgacuaagaugugcc

SEQ ID NO: 551247 - RNA, 19 nt, Artificial Sequence
  Description of Artificial Sequence: Synthetic oligonucleotide
  Sense strand starting at position 3191 of SEQ ID NO: 318290
gcacaucuuagucgggauu

SEQ ID NO: 551248 - RNA, 19 nt, Artificial Sequence
  Description of Artificial Sequence: Synthetic oligonucleotide
  Antisense strand to SEQ ID NO: 551247
aaucccgacuaagaugugc

SEQ ID NO: 551249 - RNA, 19 nt, Artificial Sequence
  Description of Artificial Sequence: Synthetic oligonucleotide
  Sense strand starting at position 3308 of SEQ ID NO: 318290
caggccugacaguauuaau

SEQ ID NO: 551250 - RNA, 19 nt, Artificial Sequence
  Description of Artificial Sequence: Synthetic oligonucleotide
  Antisense strand to SEQ ID NO: 551249
auuaauacugucaggccug

SEQ ID NO: 551251 - RNA, 19 nt, Artificial Sequence
  Description of Artificial Sequence: Synthetic oligonucleotide
  Sense strand starting at position 3379 of SEQ ID NO: 318290
uucuuuacuguuggauuga

SEQ ID NO: 551252 - RNA, 19 nt, Artificial Sequence
  Description of Artificial Sequence: Synthetic oligonucleotide
  Antisense strand to SEQ ID NO: 551251
ucaauccaacaguaaagaa

SEQ ID NO: 551253 - RNA, 19 nt, Artificial Sequence
  Description of Artificial Sequence: Synthetic oligonucleotide
  Sense strand starting at position 3565 of SEQ ID NO: 318290
uggcuucaccgagggcaau

SEQ ID NO: 551254 - RNA, 19 nt, Artificial Sequence
  Description of Artificial Sequence: Synthetic oligonucleotide
  Antisense strand to SEQ ID NO: 551253
auugcccucggugaagcca

SEQ ID NO: 551255 - RNA, 19 nt, Artificial Sequence
  Description of Artificial Sequence: Synthetic oligonucleotide
  Sense strand starting at position 3658 of SEQ ID NO: 318290
gcucuucgguguacggaaa

SEQ ID NO: 551256 - RNA, 19 nt, Artificial Sequence
  Description of Artificial Sequence: Synthetic oligonucleotide
  Antisense strand to SEQ ID NO: 551255
uuuccguacaccgaagagc

SEQ ID NO: 551257 - RNA, 19 nt, Artificial Sequence
  Description of Artificial Sequence: Synthetic oligonucleotide
  Sense strand starting at position 3693 of SEQ ID NO: 318290
gccagagcuuaguugggau

SEQ ID NO: 551258 - RNA, 19 nt, Artificial Sequence
  Description of Artificial Sequence: Synthetic oligonucleotide
  Antisense strand to SEQ ID NO: 551257
aucccaacuaagcucuggc

SEQ ID NO: 551259 - RNA, 19 nt, Artificial Sequence
  Description of Artificial Sequence: Synthetic oligonucleotide
  Sense strand starting at position 3725 of SEQ ID NO: 318290
auugcugucugugugauuu

SEQ ID NO: 551260 - RNA, 19 nt, Artificial Sequence
  Description of Artificial Sequence: Synthetic oligonucleotide
  Antisense strand to SEQ ID NO: 551259
aaaucacacagacagcaau

SEQ ID NO: 551261 - RNA, 19 nt, Artificial Sequence
  Description of Artificial Sequence: Synthetic oligonucleotide
  Sense strand starting at position 3794 of SEQ ID NO: 318290
aaauaauaacuguguggua

SEQ ID NO: 551262 - RNA, 19 nt, Artificial Sequence
  Description of Artificial Sequence: Synthetic oligonucleotide
  Antisense strand to SEQ ID NO: 551261
uaccacacaguuauuauuu

SEQ ID NO: 551263 - RNA, 19 nt, Artificial Sequence
  Description of Artificial Sequence: Synthetic oligonucleotide
  Sense strand starting at position 3795 of SEQ ID NO: 318290
aauaauaacugugugguaa

SEQ ID NO: 551264 - RNA, 19 nt, Artificial Sequence
  Description of Artificial Sequence: Synthetic oligonucleotide
  Antisense strand to SEQ ID NO: 551263
uuaccacacaguuauuauu

SEQ ID NO: 551265 - RNA, 19 nt, Artificial Sequence
  Description of Artificial Sequence: Synthetic oligonucleotide
  Sense strand starting at position 3796 of SEQ ID NO: 318290
auaauaacugugugguaac

SEQ ID NO: 551266 - RNA, 19 nt, Artificial Sequence
  Description of Artificial Sequence: Synthetic oligonucleotide
  Antisense strand to SEQ ID NO: 551265
guuaccacacaguuauuau

SEQ ID NO: 551267 - RNA, 19 nt, Artificial Sequence
  Description of Artificial Sequence: Synthetic oligonucleotide
  Sense strand starting at position 3808 of SEQ ID NO: 318290
ugguaacacucagcauaua

SEQ ID NO: 551268 - RNA, 19 nt, Artificial Sequence
  Description of Artificial Sequence: Synthetic oligonucleotide
  Antisense strand to SEQ ID NO: 551267
uauaugcugaguguuacca

SEQ ID NO: 551269 - RNA, 19 nt, Artificial Sequence
  Description of Artificial Sequence: Synthetic oligonucleotide
  Sense strand starting at position 3809 of SEQ ID NO: 318290
gguaacacucagcauauau

SEQ ID NO: 551270 - RNA, 19 nt, Artificial Sequence
  Description of Artificial Sequence: Synthetic oligonucleotide
  Antisense strand to SEQ ID NO: 551269
auauaugcugaguguuacc

SEQ ID NO: 551271 - RNA, 19 nt, Artificial Sequence
  Description of Artificial Sequence: Synthetic oligonucleotide
  Sense strand starting at position 3820 of SEQ ID NO: 318290
gcauauauugcagagacaa

SEQ ID NO: 551272 - RNA, 19 nt, Artificial Sequence
  Description of Artificial Sequence: Synthetic oligonucleotide
  Antisense strand to SEQ ID NO: 551271
uugucucugcaauauaugc

SEQ ID NO: 551273 - RNA, 19 nt, Artificial Sequence
  Description of Artificial Sequence: Synthetic oligonucleotide
  Sense strand starting at position 3878 of SEQ ID NO: 318290
ucauuauuguaugugguca

SEQ ID NO: 551274 - RNA, 19 nt, Artificial Sequence
  Description of Artificial Sequence: Synthetic oligonucleotide
  Antisense strand to SEQ ID NO: 551273
ugaccacauacaauaauga

SEQ ID NO: 551275 - RNA, 19 nt, Artificial Sequence
  Description of Artificial Sequence: Synthetic oligonucleotide
  Sense strand starting at position 3883 of SEQ ID NO: 318290
auuguauguggucaccagu

SEQ ID NO: 551276 - RNA, 19 nt, Artificial Sequence
  Description of Artificial Sequence: Synthetic oligonucleotide
  Antisense strand to SEQ ID NO: 551275
acuggugaccacauacaau

SEQ ID NO: 551277 - RNA, 19 nt, Artificial Sequence
  Description of Artificial Sequence: Synthetic oligonucleotide
  Sense strand starting at position 28 of SEQ ID NO: 318291
guuguuauauaagugacaa

SEQ ID NO: 551278 - RNA, 19 nt, Artificial Sequence
  Description of Artificial Sequence: Synthetic oligonucleotide
  Antisense strand to SEQ ID NO: 551277
uugucacuuauauaacaac

SEQ ID NO: 551279 - RNA, 19 nt, Artificial Sequence
  Description of Artificial Sequence: Synthetic oligonucleotide
  Sense strand starting at position 105 of SEQ ID NO: 318291
guaggacauuucugcauac

SEQ ID NO: 551280 - RNA, 19 nt, Artificial Sequence
  Description of Artificial Sequence: Synthetic oligonucleotide
  Antisense strand to SEQ ID NO: 551279
guaugcagaaauguccuac

SEQ ID NO: 551281 - RNA, 19 nt, Artificial Sequence
  Description of Artificial Sequence: Synthetic oligonucleotide
  Sense strand starting at position 310 of SEQ ID NO: 318291
acguguaguacagaaagca

SEQ ID NO: 551282 - RNA, 19 nt, Artificial Sequence
  Description of Artificial Sequence: Synthetic oligonucleotide
  Antisense strand to SEQ ID NO: 551281
ugcuuucuguacuacacgu

SEQ ID NO: 551283 - RNA, 19 nt, Artificial Sequence
  Description of Artificial Sequence: Synthetic oligonucleotide
  Sense strand starting at position 401 of SEQ ID NO: 318291
guguacuuacuguguaacu

SEQ ID NO: 551284 - RNA, 19 nt, Artificial Sequence
  Description of Artificial Sequence: Synthetic oligonucleotide
  Antisense strand to SEQ ID NO: 551283
aguuacacaguaaguacac

SEQ ID NO: 551285 - RNA, 19 nt, Artificial Sequence
  Description of Artificial Sequence: Synthetic oligonucleotide
  Sense strand starting at position 457 of SEQ ID NO: 318291
acagacagcuuagacauua

SEQ ID NO: 551286 - RNA, 19 nt, Artificial Sequence
  Description of Artificial Sequence: Synthetic oligonucleotide
  Antisense strand to SEQ ID NO: 551285
uaaugucuaagcugucugu

SEQ ID NO: 551287 - RNA, 19 nt, Artificial Sequence
  Description of Artificial Sequence: Synthetic oligonucleotide
  Sense strand starting at position 519 of SEQ ID NO: 318291
cgaguucugcugugggauu

SEQ ID NO: 551288 - RNA, 19 nt, Artificial Sequence
  Description of Artificial Sequence: Synthetic oligonucleotide
  Antisense strand to SEQ ID NO: 551287
aaucccacagcagaacucg

SEQ ID NO: 551289 - RNA, 19 nt, Artificial Sequence
  Description of Artificial Sequence: Synthetic oligonucleotide
  Sense strand starting at position 601 of SEQ ID NO: 318291
gggcgucagaugcauucuu

SEQ ID NO: 551290 - RNA, 19 nt, Artificial Sequence
  Description of Artificial Sequence: Synthetic oligonucleotide
  Antisense strand to SEQ ID NO: 551289
aagaaugcaucugacgccc

SEQ ID NO: 551291 - RNA, 19 nt, Artificial Sequence
  Description of Artificial Sequence: Synthetic oligonucleotide
  Sense strand starting at position 603 of SEQ ID NO: 318291
gcgucagaugcauucuuuc

SEQ ID NO: 551292 - RNA, 19 nt, Artificial Sequence
  Description of Artificial Sequence: Synthetic oligonucleotide
  Antisense strand to SEQ ID NO: 551291
gaaagaaugcaucugacgc

SEQ ID NO: 551293 - RNA, 19 nt, Artificial Sequence
  Description of Artificial Sequence: Synthetic oligonucleotide
  Sense strand starting at position 610 of SEQ ID NO: 318291
augcauucuuuccuuugua

SEQ ID NO: 551294 - RNA, 19 nt, Artificial Sequence
  Description of Artificial Sequence: Synthetic oligonucleotide
  Antisense strand to SEQ ID NO: 551293
uacaaaggaaagaaugcau

SEQ ID NO: 551295 - RNA, 19 nt, Artificial Sequence
  Description of Artificial Sequence: Synthetic oligonucleotide
  Sense strand starting at position 706 of SEQ ID NO: 318291
uaugguuaucgccggaaug

SEQ ID NO: 551296 - RNA, 19 nt, Artificial Sequence
  Description of Artificial Sequence: Synthetic oligonucleotide
  Antisense strand to SEQ ID NO: 551295
cauuccggcgauaaccaua

SEQ ID NO: 551297 - RNA, 19 nt, Artificial Sequence
  Description of Artificial Sequence: Synthetic oligonucleotide
  Sense strand starting at position 708 of SEQ ID NO: 318291
ugguuaucgccggaaugug

SEQ ID NO: 551298 - RNA, 19 nt, Artificial Sequence
  Description of Artificial Sequence: Synthetic oligonucleotide
  Antisense strand to SEQ ID NO: 551297
cacauuccggcgauaacca

SEQ ID NO: 551299 - RNA, 19 nt, Artificial Sequence
  Description of Artificial Sequence: Synthetic oligonucleotide
  Sense strand starting at position 709 of SEQ ID NO: 318291
gguuaucgccggaaugugu

SEQ ID NO: 551300 - RNA, 19 nt, Artificial Sequence
  Description of Artificial Sequence: Synthetic oligonucleotide
  Antisense strand to SEQ ID NO: 551299
acacauuccggcgauaacc

SEQ ID NO: 551301 - RNA, 19 nt, Artificial Sequence
  Description of Artificial Sequence: Synthetic oligonucleotide
  Sense strand starting at position 757 of SEQ ID NO: 318291
cuugcugugacuccguuau

SEQ ID NO: 551302 - RNA, 19 nt, Artificial Sequence
  Description of Artificial Sequence: Synthetic oligonucleotide
  Antisense strand to SEQ ID NO: 551301
auaacggagucacagcaag

SEQ ID NO: 551303 - RNA, 19 nt, Artificial Sequence
  Description of Artificial Sequence: Synthetic oligonucleotide
  Sense strand starting at position 776 of SEQ ID NO: 318291
gggcauaccugccucucaa

SEQ ID NO: 551304 - RNA, 19 nt, Artificial Sequence
  Description of Artificial Sequence: Synthetic oligonucleotide
  Antisense strand to SEQ ID NO: 551303
uugagaggcagguaugccc

SEQ ID NO: 551305 - RNA, 19 nt, Artificial Sequence
  Description of Artificial Sequence: Synthetic oligonucleotide
  Sense strand starting at position 1975 of SEQ ID NO: 318291
aguugacgcccgggaaaua

SEQ ID NO: 551306 - RNA, 19 nt, Artificial Sequence
  Description of Artificial Sequence: Synthetic oligonucleotide
  Antisense strand to SEQ ID NO: 551305
uauuucccgggcgucaacu

SEQ ID NO: 551307 - RNA, 19 nt, Artificial Sequence
  Description of Artificial Sequence: Synthetic oligonucleotide
  Sense strand starting at position 2092 of SEQ ID NO: 318291
ggaguggucccugggagac

SEQ ID NO: 551308 - RNA, 19 nt, Artificial Sequence
  Description of Artificial Sequence: Synthetic oligonucleotide
  Antisense strand to SEQ ID NO: 551307
gucucccagggaccacucc

SEQ ID NO: 551309 - RNA, 19 nt, Artificial Sequence
  Description of Artificial Sequence: Synthetic oligonucleotide
  Sense strand starting at position 2113 of SEQ ID NO: 318291
ucaccugcuccguuagcau

SEQ ID NO: 551310 - RNA, 19 nt, Artificial Sequence
  Description of Artificial Sequence: Synthetic oligonucleotide
  Antisense strand to SEQ ID NO: 551309
augcuaacggagcagguga

SEQ ID NO: 551311 - RNA, 19 nt, Artificial Sequence
  Description of Artificial Sequence: Synthetic oligonucleotide
  Sense strand starting at position 2204 of SEQ ID NO: 318291
aggucacaccuacguuuaa

SEQ ID NO: 551312 - RNA, 19 nt, Artificial Sequence
  Description of Artificial Sequence: Synthetic oligonucleotide
  Antisense strand to SEQ ID NO: 551311
uuaaacguaggugugaccu

SEQ ID NO: 551313 - RNA, 19 nt, Artificial Sequence
  Description of Artificial Sequence: Synthetic oligonucleotide
  Sense strand starting at position 2227 of SEQ ID NO: 318291
cuucguucucuucccguua

SEQ ID NO: 551314 - RNA, 19 nt, Artificial Sequence
  Description of Artificial Sequence: Synthetic oligonucleotide
  Antisense strand to SEQ ID NO: 551313
uaacgggaagagaacgaag

SEQ ID NO: 551315 - RNA, 19 nt, Artificial Sequence
  Description of Artificial Sequence: Synthetic oligonucleotide
  Sense strand starting at position 2288 of SEQ ID NO: 318291
guguaacucugcccucuuu

SEQ ID NO: 551316 - RNA, 19 nt, Artificial Sequence
  Description of Artificial Sequence: Synthetic oligonucleotide
  Antisense strand to SEQ ID NO: 551315
aaagagggcagaguuacac

SEQ ID NO: 551317 - RNA, 19 nt, Artificial Sequence
  Description of Artificial Sequence: Synthetic oligonucleotide
  Sense strand starting at position 2831 of SEQ ID NO: 318291
cuaguugaaauccagugua

SEQ ID NO: 551318 - RNA, 19 nt, Artificial Sequence
  Description of Artificial Sequence: Synthetic oligonucleotide
  Antisense strand to SEQ ID NO: 551317
uacacuggauuucaacuag

SEQ ID NO: 551319 - RNA, 19 nt, Artificial Sequence
  Description of Artificial Sequence: Synthetic oligonucleotide
  Sense strand starting at position 2864 of SEQ ID NO: 318291
ggcacaucuuagucgggau

SEQ ID NO: 551320 - RNA, 19 nt, Artificial Sequence
  Description of Artificial Sequence: Synthetic oligonucleotide
  Antisense strand to SEQ ID NO: 551319
aucccgacuaagaugugcc

SEQ ID NO: 551321 - RNA, 19 nt, Artificial Sequence
  Description of Artificial Sequence: Synthetic oligonucleotide
  Sense strand starting at position 2865 of SEQ ID NO: 318291
gcacaucuuagucgggauu

SEQ ID NO: 551322 - RNA, 19 nt, Artificial Sequence
  Description of Artificial Sequence: Synthetic oligonucleotide
  Antisense strand to SEQ ID NO: 551321
aaucccgacuaagaugugc

SEQ ID NO: 551323 - RNA, 19 nt, Artificial Sequence
  Description of Artificial Sequence: Synthetic oligonucleotide
  Sense strand starting at position 2982 of SEQ ID NO: 318291
caggccugacaguauuaau

SEQ ID NO: 551324 - RNA, 19 nt, Artificial Sequence
  Description of Artificial Sequence: Synthetic oligonucleotide
  Antisense strand to SEQ ID NO: 551323
auuaauacugucaggccug

SEQ ID NO: 551325 - RNA, 19 nt, Artificial Sequence
  Description of Artificial Sequence: Synthetic oligonucleotide
  Sense strand starting at position 3053 of SEQ ID NO: 318291
uucuuuacuguuggauuga

SEQ ID NO: 551326 - RNA, 19 nt, Artificial Sequence
  Description of Artificial Sequence: Synthetic oligonucleotide
  Antisense strand to SEQ ID NO: 551325
ucaauccaacaguaaagaa

SEQ ID NO: 551327 - RNA, 19 nt, Artificial Sequence
  Description of Artificial Sequence: Synthetic oligonucleotide
  Sense strand starting at position 3239 of SEQ ID NO: 318291
uggcuucaccgagggcaau

SEQ ID NO: 551328 - RNA, 19 nt, Artificial Sequence
  Description of Artificial Sequence: Synthetic oligonucleotide
  Antisense strand to SEQ ID NO: 551327
auugcccucggugaagcca

SEQ ID NO: 551329 - RNA, 19 nt, Artificial Sequence
  Description of Artificial Sequence: Synthetic oligonucleotide
  Sense strand starting at position 3332 of SEQ ID NO: 318291
gcucuucgguguacggaaa

SEQ ID NO: 551330 - RNA, 19 nt, Artificial Sequence
  Description of Artificial Sequence: Synthetic oligonucleotide
  Antisense strand to SEQ ID NO: 551329
uuuccguacaccgaagagc

SEQ ID NO: 551331 - RNA, 19 nt, Artificial Sequence
  Description of Artificial Sequence: Synthetic oligonucleotide
  Sense strand starting at position 3367 of SEQ ID NO: 318291
gccagagcuuaguugggau

SEQ ID NO: 551332 - RNA, 19 nt, Artificial Sequence
  Description of Artificial Sequence: Synthetic oligonucleotide
  Antisense strand to SEQ ID NO: 551331
aucccaacuaagcucuggc

SEQ ID NO: 551333 - RNA, 19 nt, Artificial Sequence
  Description of Artificial Sequence: Synthetic oligonucleotide
  Sense strand starting at position 3399 of SEQ ID NO: 318291
auugcugucugugugauuu

SEQ ID NO: 551334 - RNA, 19 nt, Artificial Sequence
  Description of Artificial Sequence: Synthetic oligonucleotide
  Antisense strand to SEQ ID NO: 551333
aaaucacacagacagcaau

SEQ ID NO: 551335 - RNA, 19 nt, Artificial Sequence
  Description of Artificial Sequence: Synthetic oligonucleotide
  Sense strand starting at position 3468 of SEQ ID NO: 318291
aaauaauaacuguguggua

SEQ ID NO: 551336 - RNA, 19 nt, Artificial Sequence
  Description of Artificial Sequence: Synthetic oligonucleotide
  Antisense strand to SEQ ID NO: 551335
uaccacacaguuauuauuu

SEQ ID NO: 551337 - RNA, 19 nt, Artificial Sequence
  Description of Artificial Sequence: Synthetic oligonucleotide
  Sense strand starting at position 3469 of SEQ ID NO: 318291
aauaauaacugugugguaa

SEQ ID NO: 551338 - RNA, 19 nt, Artificial Sequence
  Description of Artificial Sequence: Synthetic oligonucleotide
  Antisense strand to SEQ ID NO: 551337
uuaccacacaguuauuauu

SEQ ID NO: 551339 - RNA, 19 nt, Artificial Sequence
  Description of Artificial Sequence: Synthetic oligonucleotide
  Sense strand starting at position 3470 of SEQ ID NO: 318291
auaauaacugugugguaac

SEQ ID NO: 551340 - RNA, 19 nt, Artificial Sequence
  Description of Artificial Sequence: Synthetic oligonucleotide
  Antisense strand to SEQ ID NO: 551339
guuaccacacaguuauuau

SEQ ID NO: 551341 - RNA, 19 nt, Artificial Sequence
  Description of Artificial Sequence: Synthetic oligonucleotide
  Sense strand starting at position 3482 of SEQ ID NO: 318291
ugguaacacucagcauaua

SEQ ID NO: 551342 - RNA, 19 nt, Artificial Sequence
  Description of Artificial Sequence: Synthetic oligonucleotide
  Antisense strand to SEQ ID NO: 551341
uauaugcugaguguuacca

SEQ ID NO: 551343 - RNA, 19 nt, Artificial Sequence
  Description of Artificial Sequence: Synthetic oligonucleotide
  Sense strand starting at position 3483 of SEQ ID NO: 318291
gguaacacucagcauauau

SEQ ID NO: 551344 - RNA, 19 nt, Artificial Sequence
  Description of Artificial Sequence: Synthetic oligonucleotide
  Antisense strand to SEQ ID NO: 551343
auauaugcugaguguuacc

SEQ ID NO: 551345 - RNA, 19 nt, Artificial Sequence
  Description of Artificial Sequence: Synthetic oligonucleotide
  Sense strand starting at position 3494 of SEQ ID NO: 318291
gcauauauugcagagacaa

SEQ ID NO: 551346 - RNA, 19 nt, Artificial Sequence
  Description of Artificial Sequence: Synthetic oligonucleotide
  Antisense strand to SEQ ID NO: 551345
uugucucugcaauauaugc

SEQ ID NO: 551347 - RNA, 19 nt, Artificial Sequence
  Description of Artificial Sequence: Synthetic oligonucleotide
  Sense strand starting at position 3552 of SEQ ID NO: 318291
ucauuauuguaugugguca

SEQ ID NO: 551348 - RNA, 19 nt, Artificial Sequence
  Description of Artificial Sequence: Synthetic oligonucleotide
  Antisense strand to SEQ ID NO: 551347
ugaccacauacaauaauga

SEQ ID NO: 551349 - RNA, 19 nt, Artificial Sequence
  Description of Artificial Sequence: Synthetic oligonucleotide
  Sense strand starting at position 3557 of SEQ ID NO: 318291
auuguauguggucaccagu

SEQ ID NO: 551350 - RNA, 19 nt, Artificial Sequence
  Description of Artificial Sequence: Synthetic oligonucleotide
  Antisense strand to SEQ ID NO: 551349
acuggugaccacauacaau

SEQ ID NO: 551351 - RNA, 19 nt, Artificial Sequence
  Description of Artificial Sequence: Synthetic oligonucleotide
  Sense strand starting at position 3758 of SEQ ID NO: 318291
gggacuuucccaugugaag

SEQ ID NO: 551352 - RNA, 19 nt, Artificial Sequence
  Description of Artificial Sequence: Synthetic oligonucleotide
  Antisense strand to SEQ ID NO: 551351
cuucacaugggaaaguccc

SEQ ID NO: 551353 - RNA, 19 nt, Artificial Sequence
  Description of Artificial Sequence: Synthetic oligonucleotide
  Sense strand starting at position 3797 of SEQ ID NO: 318291
uggugaugucacgacaucu

SEQ ID NO: 551354 - RNA, 19 nt, Artificial Sequence
  Description of Artificial Sequence: Synthetic oligonucleotide
  Antisense strand to SEQ ID NO: 551353
agaugucgugacaucacca

SEQ ID NO: 551355 - RNA, 19 nt, Artificial Sequence
  Description of Artificial Sequence: Synthetic oligonucleotide
  Sense strand starting at position 3863 of SEQ ID NO: 318291
cuguauuuguuacuguaua

SEQ ID NO: 551356 - RNA, 19 nt, Artificial Sequence
  Description of Artificial Sequence: Synthetic oligonucleotide
  Antisense strand to SEQ ID NO: 551355
uauacaguaacaaauacag

SEQ ID NO: 551357 - RNA, 19 nt, Artificial Sequence
  Description of Artificial Sequence: Synthetic oligonucleotide
  Sense strand starting at position 33 of SEQ ID NO: 318292
ugcaacagguggucuagau

SEQ ID NO: 551358 - RNA, 19 nt, Artificial Sequence
  Description of Artificial Sequence: Synthetic oligonucleotide
  Antisense strand to SEQ ID NO: 551357
aucuagaccaccuguugca

SEQ ID NO: 551359 - RNA, 19 nt, Artificial Sequence
  Description of Artificial Sequence: Synthetic oligonucleotide
  Sense strand starting at position 214 of SEQ ID NO: 318292
ggauuugaauuccgacuau

SEQ ID NO: 551360 - RNA, 19 nt, Artificial Sequence
  Description of Artificial Sequence: Synthetic oligonucleotide
  Antisense strand to SEQ ID NO: 551359
auagucggaauucaaaucc

SEQ ID NO: 551361 - RNA, 19 nt, Artificial Sequence
  Description of Artificial Sequence: Synthetic oligonucleotide
  Sense strand starting at position 229 of SEQ ID NO: 318292
cuaucauagcucugugaca

SEQ ID NO: 551362 - RNA, 19 nt, Artificial Sequence
  Description of Artificial Sequence: Synthetic oligonucleotide
  Antisense strand to SEQ ID NO: 551361
ugucacagagcuaugauag

SEQ ID NO: 551363 - RNA, 19 nt, Artificial Sequence
  Description of Artificial Sequence: Synthetic oligonucleotide
  Sense strand starting at position 231 of SEQ ID NO: 318292
aucauagcucugugacauu

SEQ ID NO: 551364 - RNA, 19 nt, Artificial Sequence
  Description of Artificial Sequence: Synthetic oligonucleotide
  Antisense strand to SEQ ID NO: 551363
aaugucacagagcuaugau

SEQ ID NO: 551365 - RNA, 19 nt, Artificial Sequence
  Description of Artificial Sequence: Synthetic oligonucleotide
  Sense strand starting at position 249 of SEQ ID NO: 318292
ugggaaaguuacuucacgu

SEQ ID NO: 551366 - RNA, 19 nt, Artificial Sequence
  Description of Artificial Sequence: Synthetic oligonucleotide
  Antisense strand to SEQ ID NO: 551365
acgugaaguaacuuuccca

SEQ ID NO: 551367 - RNA, 19 nt, Artificial Sequence
  Description of Artificial Sequence: Synthetic oligonucleotide
  Sense strand starting at position 264 of SEQ ID NO: 318292
acgucucauuuguuaucuu

SEQ ID NO: 551368 - RNA, 19 nt, Artificial Sequence
  Description of Artificial Sequence: Synthetic oligonucleotide
  Antisense strand to SEQ ID NO: 551367
aagauaacaaaugagacgu

SEQ ID NO: 551369 - RNA, 19 nt, Artificial Sequence
  Description of Artificial Sequence: Synthetic oligonucleotide
  Sense strand starting at position 308 of SEQ ID NO: 318292
agcuauguuguggaucaaa

SEQ ID NO: 551370 - RNA, 19 nt, Artificial Sequence
  Description of Artificial Sequence: Synthetic oligonucleotide
  Antisense strand to SEQ ID NO: 551369
uuugauccacaacauagcu

SEQ ID NO: 551371 - RNA, 19 nt, Artificial Sequence
  Description of Artificial Sequence: Synthetic oligonucleotide
  Sense strand starting at position 311 of SEQ ID NO: 318292
uauguuguggaucaaauua

SEQ ID NO: 551372 - RNA, 19 nt, Artificial Sequence
  Description of Artificial Sequence: Synthetic oligonucleotide
  Antisense strand to SEQ ID NO: 551371
uaauuugauccacaacaua

SEQ ID NO: 551373 - RNA, 19 nt, Artificial Sequence
  Description of Artificial Sequence: Synthetic oligonucleotide
  Sense strand starting at position 351 of SEQ ID NO: 318292
gagaacaaugccuggcauu

SEQ ID NO: 551374 - RNA, 19 nt, Artificial Sequence
  Description of Artificial Sequence: Synthetic oligonucleotide
  Antisense strand to SEQ ID NO: 551373
aaugccaggcauuguucuc

SEQ ID NO: 551375 - RNA, 19 nt, Artificial Sequence
  Description of Artificial Sequence: Synthetic oligonucleotide
  Sense strand starting at position 352 of SEQ ID NO: 318292
agaacaaugccuggcauua

SEQ ID NO: 551376 - RNA, 19 nt, Artificial Sequence
  Description of Artificial Sequence: Synthetic oligonucleotide
  Antisense strand to SEQ ID NO: 551375
uaaugccaggcauuguucu

SEQ ID NO: 551377 - RNA, 19 nt, Artificial Sequence
  Description of Artificial Sequence: Synthetic oligonucleotide
  Sense strand starting at position 362 of SEQ ID NO: 318292
cuggcauuauuguuauaua

SEQ ID NO: 551378 - RNA, 19 nt, Artificial Sequence
  Description of Artificial Sequence: Synthetic oligonucleotide
  Antisense strand to SEQ ID NO: 551377
uauauaacaauaaugccag

SEQ ID NO: 551379 - RNA, 19 nt, Artificial Sequence
  Description of Artificial Sequence: Synthetic oligonucleotide
  Sense strand starting at position 759 of SEQ ID NO: 318292
gaaugacaauaggauguaa

SEQ ID NO: 551380 - RNA, 19 nt, Artificial Sequence
  Description of Artificial Sequence: Synthetic oligonucleotide
  Antisense strand to SEQ ID NO: 551379
uuacauccuauugucauuc

SEQ ID NO: 551381 - RNA, 19 nt, Artificial Sequence
  Description of Artificial Sequence: Synthetic oligonucleotide
  Sense strand starting at position 770 of SEQ ID NO: 318292
ggauguaaauuacaagaaa

SEQ ID NO: 551382 - RNA, 19 nt, Artificial Sequence
  Description of Artificial Sequence: Synthetic oligonucleotide
  Antisense strand to SEQ ID NO: 551381
uuucuuguaauuuacaucc

SEQ ID NO: 551383 - RNA, 19 nt, Artificial Sequence
  Description of Artificial Sequence: Synthetic oligonucleotide
  Sense strand starting at position 872 of SEQ ID NO: 318292
accaaauugcugugcuaag

SEQ ID NO: 551384 - RNA, 19 nt, Artificial Sequence
  Description of Artificial Sequence: Synthetic oligonucleotide
  Antisense strand to SEQ ID NO: 551383
cuuagcacagcaauuuggu

SEQ ID NO: 551385 - RNA, 19 nt, Artificial Sequence
  Description of Artificial Sequence: Synthetic oligonucleotide
  Sense strand starting at position 883 of SEQ ID NO: 318292
gugcuaaguguucaaguuu

SEQ ID NO: 551386 - RNA, 19 nt, Artificial Sequence
  Description of Artificial Sequence: Synthetic oligonucleotide
  Antisense strand to SEQ ID NO: 551385
aaacuugaacacuuagcac

SEQ ID NO: 551387 - RNA, 19 nt, Artificial Sequence
  Description of Artificial Sequence: Synthetic oligonucleotide
  Sense strand starting at position 957 of SEQ ID NO: 318292
agugcagagugcuuauuua

SEQ ID NO: 551388 - RNA, 19 nt, Artificial Sequence
  Description of Artificial Sequence: Synthetic oligonucleotide
  Antisense strand to SEQ ID NO: 551387
uaaauaagcacucugcacu

SEQ ID NO: 551389 - RNA, 19 nt, Artificial Sequence
  Description of Artificial Sequence: Synthetic oligonucleotide
  Sense strand starting at position 1055 of SEQ ID NO: 318292
gugcacagccuugaaucau

SEQ ID NO: 551390 - RNA, 19 nt, Artificial Sequence
  Description of Artificial Sequence: Synthetic oligonucleotide
  Antisense strand to SEQ ID NO: 551389
augauucaaggcugugcac

SEQ ID NO: 551391 - RNA, 19 nt, Artificial Sequence
  Description of Artificial Sequence: Synthetic oligonucleotide
  Sense strand starting at position 1125 of SEQ ID NO: 318292
guucuauaguucuugucaa

SEQ ID NO: 551392 - RNA, 19 nt, Artificial Sequence
  Description of Artificial Sequence: Synthetic oligonucleotide
  Antisense strand to SEQ ID NO: 551391
uugacaagaacuauagaac

SEQ ID NO: 551393 - RNA, 19 nt, Artificial Sequence
  Description of Artificial Sequence: Synthetic oligonucleotide
  Sense strand starting at position 1385 of SEQ ID NO: 318292
cugaucuaacugugcuaau

SEQ ID NO: 551394 - RNA, 19 nt, Artificial Sequence
  Description of Artificial Sequence: Synthetic oligonucleotide
  Antisense strand to SEQ ID NO: 551393
auuagcacaguuagaucag

SEQ ID NO: 551395 - RNA, 19 nt, Artificial Sequence
  Description of Artificial Sequence: Synthetic oligonucleotide
  Sense strand starting at position 1386 of SEQ ID NO: 318292
ugaucuaacugugcuaaug

SEQ ID NO: 551396 - RNA, 19 nt, Artificial Sequence
  Description of Artificial Sequence: Synthetic oligonucleotide
  Antisense strand to SEQ ID NO: 551395
cauuagcacaguuagauca

SEQ ID NO: 551397 - RNA, 19 nt, Artificial Sequence
  Description of Artificial Sequence: Synthetic oligonucleotide
  Sense strand starting at position 1466 of SEQ ID NO: 318292
ucuacuuuccguugaaaua

SEQ ID NO: 551398 - RNA, 19 nt, Artificial Sequence
  Description of Artificial Sequence: Synthetic oligonucleotide
  Antisense strand to SEQ ID NO: 551397
uauuucaacggaaaguaga

SEQ ID NO: 551399 - RNA, 19 nt, Artificial Sequence
  Description of Artificial Sequence: Synthetic oligonucleotide
  Sense strand starting at position 1467 of SEQ ID NO: 318292
cuacuuuccguugaaauaa

SEQ ID NO: 551400 - RNA, 19 nt, Artificial Sequence
  Description of Artificial Sequence: Synthetic oligonucleotide
  Antisense strand to SEQ ID NO: 551399
uuauuucaacggaaaguag

SEQ ID NO: 551401 - RNA, 19 nt, Artificial Sequence
  Description of Artificial Sequence: Synthetic oligonucleotide
  Sense strand starting at position 1475 of SEQ ID NO: 318292
cguugaaauaaacgucaaa

SEQ ID NO: 551402 - RNA, 19 nt, Artificial Sequence
  Description of Artificial Sequence: Synthetic oligonucleotide
  Antisense strand to SEQ ID NO: 551401
uuugacguuuauuucaacg

SEQ ID NO: 551403 - RNA, 19 nt, Artificial Sequence
  Description of Artificial Sequence: Synthetic oligonucleotide
  Sense strand starting at position 1564 of SEQ ID NO: 318292
aguugauacgggugccaaa

SEQ ID NO: 551404 - RNA, 19 nt, Artificial Sequence
  Description of Artificial Sequence: Synthetic oligonucleotide
  Antisense strand to SEQ ID NO: 551403
uuuggcacccguaucaacu

SEQ ID NO: 551405 - RNA, 19 nt, Artificial Sequence
  Description of Artificial Sequence: Synthetic oligonucleotide
  Sense strand starting at position 1699 of SEQ ID NO: 318292
auuuauuucugguggcgau

SEQ ID NO: 551406 - RNA, 19 nt, Artificial Sequence
  Description of Artificial Sequence: Synthetic oligonucleotide
  Antisense strand to SEQ ID NO: 551405
aucgccaccagaaauaaau

SEQ ID NO: 551407 - RNA, 19 nt, Artificial Sequence
  Description of Artificial Sequence: Synthetic oligonucleotide
  Sense strand starting at position 2048 of SEQ ID NO: 318292
ggcguaaaguggguagaaa

SEQ ID NO: 551408 - RNA, 19 nt, Artificial Sequence
  Description of Artificial Sequence: Synthetic oligonucleotide
  Antisense strand to SEQ ID NO: 551407
uuucuacccacuuuacgcc

SEQ ID NO: 551409 - RNA, 19 nt, Artificial Sequence
  Description of Artificial Sequence: Synthetic oligonucleotide
  Sense strand starting at position 2251 of SEQ ID NO: 318292
cggccaugucucggagaag

SEQ ID NO: 551410 - RNA, 19 nt, Artificial Sequence
  Description of Artificial Sequence: Synthetic oligonucleotide
  Antisense strand to SEQ ID NO: 551409
cuucuccgagacauggccg

SEQ ID NO: 551411 - RNA, 19 nt, Artificial Sequence
  Description of Artificial Sequence: Synthetic oligonucleotide
  Sense strand starting at position 2297 of SEQ ID NO: 318292
cccucagacuugguggaaa

SEQ ID NO: 551412 - RNA, 19 nt, Artificial Sequence
  Description of Artificial Sequence: Synthetic oligonucleotide
  Antisense strand to SEQ ID NO: 551411
uuuccaccaagucugaggg

SEQ ID NO: 551413 - RNA, 19 nt, Artificial Sequence
  Description of Artificial Sequence: Synthetic oligonucleotide
  Sense strand starting at position 2839 of SEQ ID NO: 318292
cccaucuuccgagaaugau

SEQ ID NO: 551414 - RNA, 19 nt, Artificial Sequence
  Description of Artificial Sequence: Synthetic oligonucleotide
  Antisense strand to SEQ ID NO: 551413
aucauucucggaagauggg

SEQ ID NO: 551415 - RNA, 19 nt, Artificial Sequence
  Description of Artificial Sequence: Synthetic oligonucleotide
  Sense strand starting at position 2855 of SEQ ID NO: 318292
gaugauaugcaaugaguga

SEQ ID NO: 551416 - RNA, 19 nt, Artificial Sequence
  Description of Artificial Sequence: Synthetic oligonucleotide
  Antisense strand to SEQ ID NO: 551415
ucacucauugcauaucauc

SEQ ID NO: 551417 - RNA, 19 nt, Artificial Sequence
  Description of Artificial Sequence: Synthetic oligonucleotide
  Sense strand starting at position 3048 of SEQ ID NO: 318292
ucaagauccugacacagaa

SEQ ID NO: 551418 - RNA, 19 nt, Artificial Sequence
  Description of Artificial Sequence: Synthetic oligonucleotide
  Antisense strand to SEQ ID NO: 551417
uucugugucaggaucuuga

SEQ ID NO: 551419 - RNA, 19 nt, Artificial Sequence
  Description of Artificial Sequence: Synthetic oligonucleotide
  Sense strand starting at position 3086 of SEQ ID NO: 318292
aucacagaggcguacuaaa

SEQ ID NO: 551420 - RNA, 19 nt, Artificial Sequence
  Description of Artificial Sequence: Synthetic oligonucleotide
  Antisense strand to SEQ ID NO: 551419
uuuaguacgccucugugau

SEQ ID NO: 551421 - RNA, 19 nt, Artificial Sequence
  Description of Artificial Sequence: Synthetic oligonucleotide
  Sense strand starting at position 3197 of SEQ ID NO: 318292
cuucuuuguggcuaaagga

SEQ ID NO: 551422 - RNA, 19 nt, Artificial Sequence
  Description of Artificial Sequence: Synthetic oligonucleotide
  Antisense strand to SEQ ID NO: 551421
uccuuuagccacaaagaag

SEQ ID NO: 551423 - RNA, 19 nt, Artificial Sequence
  Description of Artificial Sequence: Synthetic oligonucleotide
  Sense strand starting at position 3214 of SEQ ID NO: 318292
gaggaaaugcccuguccac

SEQ ID NO: 551424 - RNA, 19 nt, Artificial Sequence
  Description of Artificial Sequence: Synthetic oligonucleotide
  Antisense strand to SEQ ID NO: 551423
guggacagggcauuuccuc

SEQ ID NO: 551425 - RNA, 19 nt, Artificial Sequence
  Description of Artificial Sequence: Synthetic oligonucleotide
  Sense strand starting at position 3246 of SEQ ID NO: 318292
gugugaccuccggguucaa

SEQ ID NO: 551426 - RNA, 19 nt, Artificial Sequence
  Description of Artificial Sequence: Synthetic oligonucleotide
  Antisense strand to SEQ ID NO: 551425
uugaacccggaggucacac

SEQ ID NO: 551427 - RNA, 19 nt, Artificial Sequence
  Description of Artificial Sequence: Synthetic oligonucleotide
  Sense strand starting at position 3327 of SEQ ID NO: 318292
uccugucaucguugacaag

SEQ ID NO: 551428 - RNA, 19 nt, Artificial Sequence
  Description of Artificial Sequence: Synthetic oligonucleotide
  Antisense strand to SEQ ID NO: 551427
cuugucaacgaugacagga

SEQ ID NO: 551429 - RNA, 19 nt, Artificial Sequence
  Description of Artificial Sequence: Synthetic oligonucleotide
  Sense strand starting at position 3353 of SEQ ID NO: 318292
auauauuucuagugacacu

SEQ ID NO: 551430 - RNA, 19 nt, Artificial Sequence
  Description of Artificial Sequence: Synthetic oligonucleotide
  Antisense strand to SEQ ID NO: 551429
agugucacuagaaauauau

SEQ ID NO: 551431 - RNA, 19 nt, Artificial Sequence
  Description of Artificial Sequence: Synthetic oligonucleotide
  Sense strand starting at position 3744 of SEQ ID NO: 318292
uguagauacuaucuuugaa

SEQ ID NO: 551432 - RNA, 19 nt, Artificial Sequence
  Description of Artificial Sequence: Synthetic oligonucleotide
  Antisense strand to SEQ ID NO: 551431
uucaaagauaguaucuaca

SEQ ID NO: 551433 - RNA, 19 nt, Artificial Sequence
  Description of Artificial Sequence: Synthetic oligonucleotide
  Sense strand starting at position 3811 of SEQ ID NO: 318292
cuaggaaaugggugcaaau

SEQ ID NO: 551434 - RNA, 19 nt, Artificial Sequence
  Description of Artificial Sequence: Synthetic oligonucleotide
  Antisense strand to SEQ ID NO: 551433
auuugcacccauuuccuag

SEQ ID NO: 551435 - RNA, 19 nt, Artificial Sequence
  Description of Artificial Sequence: Synthetic oligonucleotide
  Sense strand starting at position 3879 of SEQ ID NO: 318292
uguaguauuuacuaagaca

SEQ ID NO: 551436 - RNA, 19 nt, Artificial Sequence
  Description of Artificial Sequence: Synthetic oligonucleotide
  Antisense strand to SEQ ID NO: 551435
ugucuuaguaaauacuaca

SEQ ID NO: 551437 - RNA, 19 nt, Artificial Sequence
  Description of Artificial Sequence: Synthetic oligonucleotide
  Sense strand starting at position 157 of SEQ ID NO: 318293
gaaugacaauaggauguaa

SEQ ID NO: 551438 - RNA, 19 nt, Artificial Sequence
  Description of Artificial Sequence: Synthetic oligonucleotide
  Antisense strand to SEQ ID NO: 551437
uuacauccuauugucauuc

SEQ ID NO: 551439 - RNA, 19 nt, Artificial Sequence
  Description of Artificial Sequence: Synthetic oligonucleotide
  Sense strand starting at position 168 of SEQ ID NO: 318293
ggauguaaauuacaagaaa

SEQ ID NO: 551440 - RNA, 19 nt, Artificial Sequence
  Description of Artificial Sequence: Synthetic oligonucleotide
  Antisense strand to SEQ ID NO: 551439
uuucuuguaauuuacaucc

SEQ ID NO: 551441 - RNA, 19 nt, Artificial Sequence
  Description of Artificial Sequence: Synthetic oligonucleotide
  Sense strand starting at position 270 of SEQ ID NO: 318293
accaaauugcugugcuaag

SEQ ID NO: 551442 - RNA, 19 nt, Artificial Sequence
  Description of Artificial Sequence: Synthetic oligonucleotide
  Antisense strand to SEQ ID NO: 551441
cuuagcacagcaauuuggu

SEQ ID NO: 551443 - RNA, 19 nt, Artificial Sequence
  Description of Artificial Sequence: Synthetic oligonucleotide
  Sense strand starting at position 271 of SEQ ID NO: 318293
ccaaauugcugugcuaagu

SEQ ID NO: 551444 - RNA, 19 nt, Artificial Sequence
  Description of Artificial Sequence: Synthetic oligonucleotide
  Antisense strand to SEQ ID NO: 551443
acuuagcacagcaauuugg

SEQ ID NO: 551445 - RNA, 19 nt, Artificial Sequence
  Description of Artificial Sequence: Synthetic oligonucleotide
  Sense strand starting at position 280 of SEQ ID NO: 318293
ugugcuaaguguucaaguu

SEQ ID NO: 551446 - RNA, 19 nt, Artificial Sequence
  Description of Artificial Sequence: Synthetic oligonucleotide
  Antisense strand to SEQ ID NO: 551445
aacuugaacacuuagcaca

SEQ ID NO: 551447 - RNA, 19 nt, Artificial Sequence
  Description of Artificial Sequence: Synthetic oligonucleotide
  Sense strand starting at position 281 of SEQ ID NO: 318293
gugcuaaguguucaaguuu

SEQ ID NO: 551448 - RNA, 19 nt, Artificial Sequence
  Description of Artificial Sequence: Synthetic oligonucleotide
  Antisense strand to SEQ ID NO: 551447
aaacuugaacacuuagcac

SEQ ID NO: 551449 - RNA, 19 nt, Artificial Sequence
  Description of Artificial Sequence: Synthetic oligonucleotide
  Sense strand starting at position 322 of SEQ ID NO: 318293
acucuagagucauaaagug

SEQ ID NO: 551450 - RNA, 19 nt, Artificial Sequence
  Description of Artificial Sequence: Synthetic oligonucleotide
  Antisense strand to SEQ ID NO: 551449
cacuuuaugacucuagagu

SEQ ID NO: 551451 - RNA, 19 nt, Artificial Sequence
  Description of Artificial Sequence: Synthetic oligonucleotide
  Sense strand starting at position 330 of SEQ ID NO: 318293
gucauaaagugauaaaccu

SEQ ID NO: 551452 - RNA, 19 nt, Artificial Sequence
  Description of Artificial Sequence: Synthetic oligonucleotide
  Antisense strand to SEQ ID NO: 551451
agguuuaucacuuuaugac

SEQ ID NO: 551453 - RNA, 19 nt, Artificial Sequence
  Description of Artificial Sequence: Synthetic oligonucleotide
  Sense strand starting at position 355 of SEQ ID NO: 318293
agugcagagugcuuauuua

SEQ ID NO: 551454 - RNA, 19 nt, Artificial Sequence
  Description of Artificial Sequence: Synthetic oligonucleotide
  Antisense strand to SEQ ID NO: 551453
uaaauaagcacucugcacu

SEQ ID NO: 551455 - RNA, 19 nt, Artificial Sequence
  Description of Artificial Sequence: Synthetic oligonucleotide
  Sense strand starting at position 453 of SEQ ID NO: 318293
gugcacagccuugaaucau

SEQ ID NO: 551456 - RNA, 19 nt, Artificial Sequence
  Description of Artificial Sequence: Synthetic oligonucleotide
  Antisense strand to SEQ ID NO: 551455
augauucaaggcugugcac

SEQ ID NO: 551457 - RNA, 19 nt, Artificial Sequence
  Description of Artificial Sequence: Synthetic oligonucleotide
  Sense strand starting at position 523 of SEQ ID NO: 318293
guucuauaguucuugucaa

SEQ ID NO: 551458 - RNA, 19 nt, Artificial Sequence
  Description of Artificial Sequence: Synthetic oligonucleotide
  Antisense strand to SEQ ID NO: 551457
uugacaagaacuauagaac

SEQ ID NO: 551459 - RNA, 19 nt, Artificial Sequence
  Description of Artificial Sequence: Synthetic oligonucleotide
  Sense strand starting at position 783 of SEQ ID NO: 318293
cugaucuaacugugcuaau

SEQ ID NO: 551460 - RNA, 19 nt, Artificial Sequence
  Description of Artificial Sequence: Synthetic oligonucleotide
  Antisense strand to SEQ ID NO: 551459
auuagcacaguuagaucag

SEQ ID NO: 551461 - RNA, 19 nt, Artificial Sequence
  Description of Artificial Sequence: Synthetic oligonucleotide
  Sense strand starting at position 784 of SEQ ID NO: 318293
ugaucuaacugugcuaaug

SEQ ID NO: 551462 - RNA, 19 nt, Artificial Sequence
  Description of Artificial Sequence: Synthetic oligonucleotide
  Antisense strand to SEQ ID NO: 551461
cauuagcacaguuagauca

SEQ ID NO: 551463 - RNA, 19 nt, Artificial Sequence
  Description of Artificial Sequence: Synthetic oligonucleotide
  Sense strand starting at position 864 of SEQ ID NO: 318293
ucuacuuuccguugaaaua

SEQ ID NO: 551464 - RNA, 19 nt, Artificial Sequence
  Description of Artificial Sequence: Synthetic oligonucleotide
  Antisense strand to SEQ ID NO: 551463
uauuucaacggaaaguaga

SEQ ID NO: 551465 - RNA, 19 nt, Artificial Sequence
  Description of Artificial Sequence: Synthetic oligonucleotide
  Sense strand starting at position 865 of SEQ ID NO: 318293
cuacuuuccguugaaauaa

SEQ ID NO: 551466 - RNA, 19 nt, Artificial Sequence
  Description of Artificial Sequence: Synthetic oligonucleotide
  Antisense strand to SEQ ID NO: 551465
uuauuucaacggaaaguag

SEQ ID NO: 551467 - RNA, 19 nt, Artificial Sequence
  Description of Artificial Sequence: Synthetic oligonucleotide
  Sense strand starting at position 873 of SEQ ID NO: 318293
cguugaaauaaacgucaaa

SEQ ID NO: 551468 - RNA, 19 nt, Artificial Sequence
  Description of Artificial Sequence: Synthetic oligonucleotide
  Antisense strand to SEQ ID NO: 551467
uuugacguuuauuucaacg

SEQ ID NO: 551469 - RNA, 19 nt, Artificial Sequence
  Description of Artificial Sequence: Synthetic oligonucleotide
  Sense strand starting at position 962 of SEQ ID NO: 318293
aguugauacgggugccaaa

SEQ ID NO: 551470 - RNA, 19 nt, Artificial Sequence
  Description of Artificial Sequence: Synthetic oligonucleotide
  Antisense strand to SEQ ID NO: 551469
uuuggcacccguaucaacu

SEQ ID NO: 551471 - RNA, 19 nt, Artificial Sequence
  Description of Artificial Sequence: Synthetic oligonucleotide
  Sense strand starting at position 1097 of SEQ ID NO: 318293
auuuauuucugguggcgau

SEQ ID NO: 551472 - RNA, 19 nt, Artificial Sequence
  Description of Artificial Sequence: Synthetic oligonucleotide
  Antisense strand to SEQ ID NO: 551471
aucgccaccagaaauaaau

SEQ ID NO: 551473 - RNA, 19 nt, Artificial Sequence
  Description of Artificial Sequence: Synthetic oligonucleotide
  Sense strand starting at position 1446 of SEQ ID NO: 318293
ggcguaaaguggguagaaa

SEQ ID NO: 551474 - RNA, 19 nt, Artificial Sequence
  Description of Artificial Sequence: Synthetic oligonucleotide
  Antisense strand to SEQ ID NO: 551473
uuucuacccacuuuacgcc

SEQ ID NO: 551475 - RNA, 19 nt, Artificial Sequence
  Description of Artificial Sequence: Synthetic oligonucleotide
  Sense strand starting at position 1649 of SEQ ID NO: 318293
cggccaugucucggagaag

SEQ ID NO: 551476 - RNA, 19 nt, Artificial Sequence
  Description of Artificial Sequence: Synthetic oligonucleotide
  Antisense strand to SEQ ID NO: 551475
cuucuccgagacauggccg

SEQ ID NO: 551477 - RNA, 19 nt, Artificial Sequence
  Description of Artificial Sequence: Synthetic oligonucleotide
  Sense strand starting at position 1695 of SEQ ID NO: 318293
cccucagacuugguggaaa

SEQ ID NO: 551478 - RNA, 19 nt, Artificial Sequence
  Description of Artificial Sequence: Synthetic oligonucleotide
  Antisense strand to SEQ ID NO: 551477
uuuccaccaagucugaggg

SEQ ID NO: 551479 - RNA, 19 nt, Artificial Sequence
  Description of Artificial Sequence: Synthetic oligonucleotide
  Sense strand starting at position 2237 of SEQ ID NO: 318293
cccaucuuccgagaaugau

SEQ ID NO: 551480 - RNA, 19 nt, Artificial Sequence
  Description of Artificial Sequence: Synthetic oligonucleotide
  Antisense strand to SEQ ID NO: 551479
aucauucucggaagauggg

SEQ ID NO: 551481 - RNA, 19 nt, Artificial Sequence
  Description of Artificial Sequence: Synthetic oligonucleotide
  Sense strand starting at position 2246 of SEQ ID NO: 318293
cgagaaugaugauaugcaa

SEQ ID NO: 551482 - RNA, 19 nt, Artificial Sequence
  Description of Artificial Sequence: Synthetic oligonucleotide
  Antisense strand to SEQ ID NO: 551481
uugcauaucaucauucucg

SEQ ID NO: 551483 - RNA, 19 nt, Artificial Sequence
  Description of Artificial Sequence: Synthetic oligonucleotide
  Sense strand starting at position 2253 of SEQ ID NO: 318293
gaugauaugcaaugaguga

SEQ ID NO: 551484 - RNA, 19 nt, Artificial Sequence
  Description of Artificial Sequence: Synthetic oligonucleotide
  Antisense strand to SEQ ID NO: 551483
ucacucauugcauaucauc

SEQ ID NO: 551485 - RNA, 19 nt, Artificial Sequence
  Description of Artificial Sequence: Synthetic oligonucleotide
  Sense strand starting at position 2288 of SEQ ID NO: 318293
agagcacccugacaagaua

SEQ ID NO: 551486 - RNA, 19 nt, Artificial Sequence
  Description of Artificial Sequence: Synthetic oligonucleotide
  Antisense strand to SEQ ID NO: 551485
uaucuugucagggugcucu

SEQ ID NO: 551487 - RNA, 19 nt, Artificial Sequence
  Description of Artificial Sequence: Synthetic oligonucleotide
  Sense strand starting at position 2349 of SEQ ID NO: 318293
acguaauauuuagguaaug

SEQ ID NO: 551488 - RNA, 19 nt, Artificial Sequence
  Description of Artificial Sequence: Synthetic oligonucleotide
  Antisense strand to SEQ ID NO: 551487
cauuaccuaaauauuacgu

SEQ ID NO: 551489 - RNA, 19 nt, Artificial Sequence
  Description of Artificial Sequence: Synthetic oligonucleotide
  Sense strand starting at position 2446 of SEQ ID NO: 318293
ucaagauccugacacagaa

SEQ ID NO: 551490 - RNA, 19 nt, Artificial Sequence
  Description of Artificial Sequence: Synthetic oligonucleotide
  Antisense strand to SEQ ID NO: 551489
uucugugucaggaucuuga

SEQ ID NO: 551491 - RNA, 19 nt, Artificial Sequence
  Description of Artificial Sequence: Synthetic oligonucleotide
  Sense strand starting at position 2484 of SEQ ID NO: 318293
aucacagaggcguacuaaa

SEQ ID NO: 551492 - RNA, 19 nt, Artificial Sequence
  Description of Artificial Sequence: Synthetic oligonucleotide
  Antisense strand to SEQ ID NO: 551491
uuuaguacgccucugugau

SEQ ID NO: 551493 - RNA, 19 nt, Artificial Sequence
  Description of Artificial Sequence: Synthetic oligonucleotide
  Sense strand starting at position 2595 of SEQ ID NO: 318293
cuucuuuguggcuaaagga

SEQ ID NO: 551494 - RNA, 19 nt, Artificial Sequence
  Description of Artificial Sequence: Synthetic oligonucleotide
  Antisense strand to SEQ ID NO: 551493
uccuuuagccacaaagaag

SEQ ID NO: 551495 - RNA, 19 nt, Artificial Sequence
  Description of Artificial Sequence: Synthetic oligonucleotide
  Sense strand starting at position 2612 of SEQ ID NO: 318293
gaggaaaugcccuguccac

SEQ ID NO: 551496 - RNA, 19 nt, Artificial Sequence
  Description of Artificial Sequence: Synthetic oligonucleotide
  Antisense strand to SEQ ID NO: 551495
guggacagggcauuuccuc

SEQ ID NO: 551497 - RNA, 19 nt, Artificial Sequence
  Description of Artificial Sequence: Synthetic oligonucleotide
  Sense strand starting at position 2644 of SEQ ID NO: 318293
gugugaccuccggguucaa

SEQ ID NO: 551498 - RNA, 19 nt, Artificial Sequence
  Description of Artificial Sequence: Synthetic oligonucleotide
  Antisense strand to SEQ ID NO: 551497
uugaacccggaggucacac

SEQ ID NO: 551499 - RNA, 19 nt, Artificial Sequence
  Description of Artificial Sequence: Synthetic oligonucleotide
  Sense strand starting at position 2675 of SEQ ID NO: 318293
ccgugauccugggugcacu

SEQ ID NO: 551500 - RNA, 19 nt, Artificial Sequence
  Description of Artificial Sequence: Synthetic oligonucleotide
  Antisense strand to SEQ ID NO: 551499
agugcacccaggaucacgg

SEQ ID NO: 551501 - RNA, 19 nt, Artificial Sequence
  Description of Artificial Sequence: Synthetic oligonucleotide
  Sense strand starting at position 2725 of SEQ ID NO: 318293
uccugucaucguugacaag

SEQ ID NO: 551502 - RNA, 19 nt, Artificial Sequence
  Description of Artificial Sequence: Synthetic oligonucleotide
  Antisense strand to SEQ ID NO: 551501
cuugucaacgaugacagga

SEQ ID NO: 551503 - RNA, 19 nt, Artificial Sequence
  Description of Artificial Sequence: Synthetic oligonucleotide
  Sense strand starting at position 2751 of SEQ ID NO: 318293
auauauuucuagugacacu

SEQ ID NO: 551504 - RNA, 19 nt, Artificial Sequence
  Description of Artificial Sequence: Synthetic oligonucleotide
  Antisense strand to SEQ ID NO: 551503
agugucacuagaaauauau

SEQ ID NO: 551505 - RNA, 19 nt, Artificial Sequence
  Description of Artificial Sequence: Synthetic oligonucleotide
  Sense strand starting at position 3142 of SEQ ID NO: 318293
uguagauacuaucuuugaa

SEQ ID NO: 551506 - RNA, 19 nt, Artificial Sequence
  Description of Artificial Sequence: Synthetic oligonucleotide
  Antisense strand to SEQ ID NO: 551505
uucaaagauaguaucuaca

SEQ ID NO: 551507 - RNA, 19 nt, Artificial Sequence
  Description of Artificial Sequence: Synthetic oligonucleotide
  Sense strand starting at position 3209 of SEQ ID NO: 318293
cuaggaaaugggugcaaau

SEQ ID NO: 551508 - RNA, 19 nt, Artificial Sequence
  Description of Artificial Sequence: Synthetic oligonucleotide
  Antisense strand to SEQ ID NO: 551507
auuugcacccauuuccuag

SEQ ID NO: 551509 - RNA, 19 nt, Artificial Sequence
  Description of Artificial Sequence: Synthetic oligonucleotide
  Sense strand starting at position 3277 of SEQ ID NO: 318293
uguaguauuuacuaagaca

SEQ ID NO: 551510 - RNA, 19 nt, Artificial Sequence
  Description of Artificial Sequence: Synthetic oligonucleotide
  Antisense strand to SEQ ID NO: 551509
ugucuuaguaaauacuaca

SEQ ID NO: 551511 - RNA, 19 nt, Artificial Sequence
  Description of Artificial Sequence: Synthetic oligonucleotide
  Sense strand starting at position 3467 of SEQ ID NO: 318293
auucuaaacugugaagaua

SEQ ID NO: 551512 - RNA, 19 nt, Artificial Sequence
  Description of Artificial Sequence: Synthetic oligonucleotide
  Antisense strand to SEQ ID NO: 551511
uaucuucacaguuuagaau

SEQ ID NO: 551513 - RNA, 19 nt, Artificial Sequence
  Description of Artificial Sequence: Synthetic oligonucleotide
  Sense strand starting at position 3534 of SEQ ID NO: 318293
uuuauauagucugagauga

SEQ ID NO: 551514 - RNA, 19 nt, Artificial Sequence
  Description of Artificial Sequence: Synthetic oligonucleotide
  Antisense strand to SEQ ID NO: 551513
ucaucucagacuauauaaa

SEQ ID NO: 551515 - RNA, 19 nt, Artificial Sequence
  Description of Artificial Sequence: Synthetic oligonucleotide
  Sense strand starting at position 3536 of SEQ ID NO: 318293
uauauagucugagaugacu

SEQ ID NO: 551516 - RNA, 19 nt, Artificial Sequence
  Description of Artificial Sequence: Synthetic oligonucleotide
  Antisense strand to SEQ ID NO: 551515
agucaucucagacuauaua

SEQ ID NO: 551517 - RNA, 19 nt, Artificial Sequence
  Description of Artificial Sequence: Synthetic oligonucleotide
  Sense strand starting at position 22 of SEQ ID NO: 318294
cuugacuugugguugcaau

SEQ ID NO: 551518 - RNA, 19 nt, Artificial Sequence
  Description of Artificial Sequence: Synthetic oligonucleotide
  Antisense strand to SEQ ID NO: 551517
auugcaaccacaagucaag

SEQ ID NO: 551519 - RNA, 19 nt, Artificial Sequence
  Description of Artificial Sequence: Synthetic oligonucleotide
  Sense strand starting at position 23 of SEQ ID NO: 318294
uugacuugugguugcaaua

SEQ ID NO: 551520 - RNA, 19 nt, Artificial Sequence
  Description of Artificial Sequence: Synthetic oligonucleotide
  Antisense strand to SEQ ID NO: 551519
uauugcaaccacaagucaa

SEQ ID NO: 551521 - RNA, 19 nt, Artificial Sequence
  Description of Artificial Sequence: Synthetic oligonucleotide
  Sense strand starting at position 320 of SEQ ID NO: 318294
agcaaaugccuacguuuaa

SEQ ID NO: 551522 - RNA, 19 nt, Artificial Sequence
  Description of Artificial Sequence: Synthetic oligonucleotide
  Antisense strand to SEQ ID NO: 551521
uuaaacguaggcauuugcu

SEQ ID NO: 551523 - RNA, 19 nt, Artificial Sequence
  Description of Artificial Sequence: Synthetic oligonucleotide
  Sense strand starting at position 321 of SEQ ID NO: 318294
gcaaaugccuacguuuaaa

SEQ ID NO: 551524 - RNA, 19 nt, Artificial Sequence
  Description of Artificial Sequence: Synthetic oligonucleotide
  Antisense strand to SEQ ID NO: 551523
uuuaaacguaggcauuugc

SEQ ID NO: 551525 - RNA, 19 nt, Artificial Sequence
  Description of Artificial Sequence: Synthetic oligonucleotide
  Sense strand starting at position 670 of SEQ ID NO: 318294
cucuaaagaugugaugacu

SEQ ID NO: 551526 - RNA, 19 nt, Artificial Sequence
  Description of Artificial Sequence: Synthetic oligonucleotide
  Antisense strand to SEQ ID NO: 551525
agucaucacaucuuuagag

SEQ ID NO: 551527 - RNA, 19 nt, Artificial Sequence
  Description of Artificial Sequence: Synthetic oligonucleotide
  Sense strand starting at position 686 of SEQ ID NO: 318294
acuacacaauguucguaaa

SEQ ID NO: 551528 - RNA, 19 nt, Artificial Sequence
  Description of Artificial Sequence: Synthetic oligonucleotide
  Antisense strand to SEQ ID NO: 551527
uuuacgaacauuguguagu

SEQ ID NO: 551529 - RNA, 19 nt, Artificial Sequence
  Description of Artificial Sequence: Synthetic oligonucleotide
  Sense strand starting at position 698 of SEQ ID NO: 318294
ucguaaacauacucagauu

SEQ ID NO: 551530 - RNA, 19 nt, Artificial Sequence
  Description of Artificial Sequence: Synthetic oligonucleotide
  Antisense strand to SEQ ID NO: 551529
aaucugaguauguuuacga

SEQ ID NO: 551531 - RNA, 19 nt, Artificial Sequence
  Description of Artificial Sequence: Synthetic oligonucleotide
  Sense strand starting at position 1029 of SEQ ID NO: 318294
accauaaucuugcuaggag

SEQ ID NO: 551532 - RNA, 19 nt, Artificial Sequence
  Description of Artificial Sequence: Synthetic oligonucleotide
  Antisense strand to SEQ ID NO: 551531
cuccuagcaagauuauggu

SEQ ID NO: 551533 - RNA, 19 nt, Artificial Sequence
  Description of Artificial Sequence: Synthetic oligonucleotide
  Sense strand starting at position 1079 of SEQ ID NO: 318294
ugcgaugugaauuacaaau

SEQ ID NO: 551534 - RNA, 19 nt, Artificial Sequence
  Description of Artificial Sequence: Synthetic oligonucleotide
  Antisense strand to SEQ ID NO: 551533
auuuguaauucacaucgca

SEQ ID NO: 551535 - RNA, 19 nt, Artificial Sequence
  Description of Artificial Sequence: Synthetic oligonucleotide
  Sense strand starting at position 1124 of SEQ ID NO: 318294
guaauuaugaggcguuugu

SEQ ID NO: 551536 - RNA, 19 nt, Artificial Sequence
  Description of Artificial Sequence: Synthetic oligonucleotide
  Antisense strand to SEQ ID NO: 551535
acaaacgccucauaauuac

SEQ ID NO: 551537 - RNA, 19 nt, Artificial Sequence
  Description of Artificial Sequence: Synthetic oligonucleotide
  Sense strand starting at position 1128 of SEQ ID NO: 318294
uuaugaggcguuuguauac

SEQ ID NO: 551538 - RNA, 19 nt, Artificial Sequence
  Description of Artificial Sequence: Synthetic oligonucleotide
  Antisense strand to SEQ ID NO: 551537
guauacaaacgccucauaa

SEQ ID NO: 551539 - RNA, 19 nt, Artificial Sequence
  Description of Artificial Sequence: Synthetic oligonucleotide
  Sense strand starting at position 1155 of SEQ ID NO: 318294
guuuccuugugagcuauua

SEQ ID NO: 551540 - RNA, 19 nt, Artificial Sequence
  Description of Artificial Sequence: Synthetic oligonucleotide
  Antisense strand to SEQ ID NO: 551539
uaauagcucacaaggaaac

SEQ ID NO: 551541 - RNA, 19 nt, Artificial Sequence
  Description of Artificial Sequence: Synthetic oligonucleotide
  Sense strand starting at position 1167 of SEQ ID NO: 318294
gcuauuacagucuaugauc

SEQ ID NO: 551542 - RNA, 19 nt, Artificial Sequence
  Description of Artificial Sequence: Synthetic oligonucleotide
  Antisense strand to SEQ ID NO: 551541
gaucauagacuguaauagc

SEQ ID NO: 551543 - RNA, 19 nt, Artificial Sequence
  Description of Artificial Sequence: Synthetic oligonucleotide
  Sense strand starting at position 1187 of SEQ ID NO: 318294
gcuucuccucgacacugau

SEQ ID NO: 551544 - RNA, 19 nt, Artificial Sequence
  Description of Artificial Sequence: Synthetic oligonucleotide
  Antisense strand to SEQ ID NO: 551543
aucagugucgaggagaagc

SEQ ID NO: 551545 - RNA, 19 nt, Artificial Sequence
  Description of Artificial Sequence: Synthetic oligonucleotide
  Sense strand starting at position 1190 of SEQ ID NO: 318294
ucuccucgacacugaugua

SEQ ID NO: 551546 - RNA, 19 nt, Artificial Sequence
  Description of Artificial Sequence: Synthetic oligonucleotide
  Antisense strand to SEQ ID NO: 551545
uacaucagugucgaggaga

SEQ ID NO: 551547 - RNA, 19 nt, Artificial Sequence
  Description of Artificial Sequence: Synthetic oligonucleotide
  Sense strand starting at position 1200 of SEQ ID NO: 318294
acugauguauccuuauauu

SEQ ID NO: 551548 - RNA, 19 nt, Artificial Sequence
  Description of Artificial Sequence: Synthetic oligonucleotide
  Antisense strand to SEQ ID NO: 551547
aauauaaggauacaucagu

SEQ ID NO: 551549 - RNA, 19 nt, Artificial Sequence
  Description of Artificial Sequence: Synthetic oligonucleotide
  Sense strand starting at position 1270 of SEQ ID NO: 318294
auuguaguuccugaaauac

SEQ ID NO: 551550 - RNA, 19 nt, Artificial Sequence
  Description of Artificial Sequence: Synthetic oligonucleotide
  Antisense strand to SEQ ID NO: 551549
guauuucaggaacuacaau

SEQ ID NO: 551551 - RNA, 19 nt, Artificial Sequence
  Description of Artificial Sequence: Synthetic oligonucleotide
  Sense strand starting at position 1350 of SEQ ID NO: 318294
agaacugcuuggcuacaau

SEQ ID NO: 551552 - RNA, 19 nt, Artificial Sequence
  Description of Artificial Sequence: Synthetic oligonucleotide
  Antisense strand to SEQ ID NO: 551551
auuguagccaagcaguucu

SEQ ID NO: 551553 - RNA, 19 nt, Artificial Sequence
  Description of Artificial Sequence: Synthetic oligonucleotide
  Sense strand starting at position 2025 of SEQ ID NO: 318294
ggaugacuaacacguuaca

SEQ ID NO: 551554 - RNA, 19 nt, Artificial Sequence
  Description of Artificial Sequence: Synthetic oligonucleotide
  Antisense strand to SEQ ID NO: 551553
uguaacguguuagucaucc

SEQ ID NO: 551555 - RNA, 19 nt, Artificial Sequence
  Description of Artificial Sequence: Synthetic oligonucleotide
  Sense strand starting at position 2066 of SEQ ID NO: 318294
agcugagguucuuuaauac

SEQ ID NO: 551556 - RNA, 19 nt, Artificial Sequence
  Description of Artificial Sequence: Synthetic oligonucleotide
  Antisense strand to SEQ ID NO: 551555
guauuaaagaaccucagcu

SEQ ID NO: 551557 - RNA, 19 nt, Artificial Sequence
  Description of Artificial Sequence: Synthetic oligonucleotide
  Sense strand starting at position 2203 of SEQ ID NO: 318294
cgguguucugucuuugcuu

SEQ ID NO: 551558 - RNA, 19 nt, Artificial Sequence
  Description of Artificial Sequence: Synthetic oligonucleotide
  Antisense strand to SEQ ID NO: 551557
aagcaaagacagaacaccg

SEQ ID NO: 551559 - RNA, 19 nt, Artificial Sequence
  Description of Artificial Sequence: Synthetic oligonucleotide
  Sense strand starting at position 2485 of SEQ ID NO: 318294
agaacaaaggcaugcuuau

SEQ ID NO: 551560 - RNA, 19 nt, Artificial Sequence
  Description of Artificial Sequence: Synthetic oligonucleotide
  Antisense strand to SEQ ID NO: 551559
auaagcaugccuuuguucu

SEQ ID NO: 551561 - RNA, 19 nt, Artificial Sequence
  Description of Artificial Sequence: Synthetic oligonucleotide
  Sense strand starting at position 2579 of SEQ ID NO: 318294
uugcccaaguucucagaau

SEQ ID NO: 551562 - RNA, 19 nt, Artificial Sequence
  Description of Artificial Sequence: Synthetic oligonucleotide
  Antisense strand to SEQ ID NO: 551561
auucugagaacuugggcaa

SEQ ID NO: 551563 - RNA, 19 nt, Artificial Sequence
  Description of Artificial Sequence: Synthetic oligonucleotide
  Sense strand starting at position 2811 of SEQ ID NO: 318294
gguuaugaucaagaacguc

SEQ ID NO: 551564 - RNA, 19 nt, Artificial Sequence
  Description of Artificial Sequence: Synthetic oligonucleotide
  Antisense strand to SEQ ID NO: 551563
gacguucuugaucauaacc

SEQ ID NO: 551565 - RNA, 19 nt, Artificial Sequence
  Description of Artificial Sequence: Synthetic oligonucleotide
  Sense strand starting at position 2819 of SEQ ID NO: 318294
ucaagaacgucacauuaau

SEQ ID NO: 551566 - RNA, 19 nt, Artificial Sequence
  Description of Artificial Sequence: Synthetic oligonucleotide
  Antisense strand to SEQ ID NO: 551565
auuaaugugacguucuuga

SEQ ID NO: 551567 - RNA, 19 nt, Artificial Sequence
  Description of Artificial Sequence: Synthetic oligonucleotide
  Sense strand starting at position 2889 of SEQ ID NO: 318294
ggacucaacuagguuaaac

SEQ ID NO: 551568 - RNA, 19 nt, Artificial Sequence
  Description of Artificial Sequence: Synthetic oligonucleotide
  Antisense strand to SEQ ID NO: 551567
guuuaaccuaguugagucc

SEQ ID NO: 551569 - RNA, 19 nt, Artificial Sequence
  Description of Artificial Sequence: Synthetic oligonucleotide
  Sense strand starting at position 3062 of SEQ ID NO: 318294
cuauaaacaucguuccaag

SEQ ID NO: 551570 - RNA, 19 nt, Artificial Sequence
  Description of Artificial Sequence: Synthetic oligonucleotide
  Antisense strand to SEQ ID NO: 551569
cuuggaacgauguuuauag

SEQ ID NO: 551571 - RNA, 19 nt, Artificial Sequence
  Description of Artificial Sequence: Synthetic oligonucleotide
  Sense strand starting at position 3087 of SEQ ID NO: 318294
aaaugaauuugaugggaag

SEQ ID NO: 551572 - RNA, 19 nt, Artificial Sequence
  Description of Artificial Sequence: Synthetic oligonucleotide
  Antisense strand to SEQ ID NO: 551571
cuucccaucaaauucauuu

SEQ ID NO: 551573 - RNA, 19 nt, Artificial Sequence
  Description of Artificial Sequence: Synthetic oligonucleotide
  Sense strand starting at position 3099 of SEQ ID NO: 318294
ugggaagauguguaacagu

SEQ ID NO: 551574 - RNA, 19 nt, Artificial Sequence
  Description of Artificial Sequence: Synthetic oligonucleotide
  Antisense strand to SEQ ID NO: 551573
acuguuacacaucuuccca

SEQ ID NO: 551575 - RNA, 19 nt, Artificial Sequence
  Description of Artificial Sequence: Synthetic oligonucleotide
  Sense strand starting at position 3278 of SEQ ID NO: 318294
caugauaagugcuuucuag

SEQ ID NO: 551576 - RNA, 19 nt, Artificial Sequence
  Description of Artificial Sequence: Synthetic oligonucleotide
  Antisense strand to SEQ ID NO: 551575
cuagaaagcacuuaucaug

SEQ ID NO: 551577 - RNA, 19 nt, Artificial Sequence
  Description of Artificial Sequence: Synthetic oligonucleotide
  Sense strand starting at position 3370 of SEQ ID NO: 318294
agucaagggucagcuaauu

SEQ ID NO: 551578 - RNA, 19 nt, Artificial Sequence
  Description of Artificial Sequence: Synthetic oligonucleotide
  Antisense strand to SEQ ID NO: 551577
aauuagcugacccuugacu

SEQ ID NO: 551579 - RNA, 19 nt, Artificial Sequence
  Description of Artificial Sequence: Synthetic oligonucleotide
  Sense strand starting at position 3487 of SEQ ID NO: 318294
auccuuauccuguggguaa

SEQ ID NO: 551580 - RNA, 19 nt, Artificial Sequence
  Description of Artificial Sequence: Synthetic oligonucleotide
  Antisense strand to SEQ ID NO: 551579
uuacccacaggauaaggau

SEQ ID NO: 551581 - RNA, 19 nt, Artificial Sequence
  Description of Artificial Sequence: Synthetic oligonucleotide
  Sense strand starting at position 3491 of SEQ ID NO: 318294
uuauccuguggguaaagga

SEQ ID NO: 551582 - RNA, 19 nt, Artificial Sequence
  Description of Artificial Sequence: Synthetic oligonucleotide
  Antisense strand to SEQ ID NO: 551581
uccuuuacccacaggauaa

SEQ ID NO: 551583 - RNA, 19 nt, Artificial Sequence
  Description of Artificial Sequence: Synthetic oligonucleotide
  Sense strand starting at position 3511 of SEQ ID NO: 318294
agaacuccuucuggaggaa

SEQ ID NO: 551584 - RNA, 19 nt, Artificial Sequence
  Description of Artificial Sequence: Synthetic oligonucleotide
  Antisense strand to SEQ ID NO: 551583
uuccuccagaaggaguucu

SEQ ID NO: 551585 - RNA, 19 nt, Artificial Sequence
  Description of Artificial Sequence: Synthetic oligonucleotide
  Sense strand starting at position 3542 of SEQ ID NO: 318294
gcaggaaggcuaugcuauu

SEQ ID NO: 551586 - RNA, 19 nt, Artificial Sequence
  Description of Artificial Sequence: Synthetic oligonucleotide
  Antisense strand to SEQ ID NO: 551585
aauagcauagccuuccugc

SEQ ID NO: 551587 - RNA, 19 nt, Artificial Sequence
  Description of Artificial Sequence: Synthetic oligonucleotide
  Sense strand starting at position 3719 of SEQ ID NO: 318294
uccaguuggcaaggagauu

SEQ ID NO: 551588 - RNA, 19 nt, Artificial Sequence
  Description of Artificial Sequence: Synthetic oligonucleotide
  Antisense strand to SEQ ID NO: 551587
aaucuccuugccaacugga

SEQ ID NO: 551589 - RNA, 19 nt, Artificial Sequence
  Description of Artificial Sequence: Synthetic oligonucleotide
  Sense strand starting at position 3732 of SEQ ID NO: 318294
gagauuugguauuacacaa

SEQ ID NO: 551590 - RNA, 19 nt, Artificial Sequence
  Description of Artificial Sequence: Synthetic oligonucleotide
  Antisense strand to SEQ ID NO: 551589
uuguguaauaccaaaucuc

SEQ ID NO: 551591 - RNA, 19 nt, Artificial Sequence
  Description of Artificial Sequence: Synthetic oligonucleotide
  Sense strand starting at position 3887 of SEQ ID NO: 318294
gggaauuaaaguugugggu

SEQ ID NO: 551592 - RNA, 19 nt, Artificial Sequence
  Description of Artificial Sequence: Synthetic oligonucleotide
  Antisense strand to SEQ ID NO: 551591
acccacaacuuuaauuccc

SEQ ID NO: 551593 - RNA, 19 nt, Artificial Sequence
  Description of Artificial Sequence: Synthetic oligonucleotide
  Sense strand starting at position 3891 of SEQ ID NO: 318294
auuaaaguuguggguagaa

SEQ ID NO: 551594 - RNA, 19 nt, Artificial Sequence
  Description of Artificial Sequence: Synthetic oligonucleotide
  Antisense strand to SEQ ID NO: 551593
uucuacccacaacuuuaau

SEQ ID NO: 551595 - RNA, 19 nt, Artificial Sequence
  Description of Artificial Sequence: Synthetic oligonucleotide
  Sense strand starting at position 3980 of SEQ ID NO: 318294
guuucuggaugacuuguaa

SEQ ID NO: 551596 - RNA, 19 nt, Artificial Sequence
  Description of Artificial Sequence: Synthetic oligonucleotide
  Antisense strand to SEQ ID NO: 551595
uuacaagucauccagaaac

SEQ ID NO: 551597 - RNA, 19 nt, Artificial Sequence
  Description of Artificial Sequence: Synthetic oligonucleotide
  Sense strand starting at position 86 of SEQ ID NO: 318295
ggagguaguacucauaccu

SEQ ID NO: 551598 - RNA, 19 nt, Artificial Sequence
  Description of Artificial Sequence: Synthetic oligonucleotide
  Antisense strand to SEQ ID NO: 551597
agguaugaguacuaccucc

SEQ ID NO: 551599 - RNA, 19 nt, Artificial Sequence
  Description of Artificial Sequence: Synthetic oligonucleotide
  Sense strand starting at position 93 of SEQ ID NO: 318295
guacucauaccugauuauu

SEQ ID NO: 551600 - RNA, 19 nt, Artificial Sequence
  Description of Artificial Sequence: Synthetic oligonucleotide
  Antisense strand to SEQ ID NO: 551599
aauaaucagguaugaguac

SEQ ID NO: 551601 - RNA, 19 nt, Artificial Sequence
  Description of Artificial Sequence: Synthetic oligonucleotide
  Sense strand starting at position 96 of SEQ ID NO: 318295
cucauaccugauuauuagu

SEQ ID NO: 551602 - RNA, 19 nt, Artificial Sequence
  Description of Artificial Sequence: Synthetic oligonucleotide
  Antisense strand to SEQ ID NO: 551601
acuaauaaucagguaugag

SEQ ID NO: 551603 - RNA, 19 nt, Artificial Sequence
  Description of Artificial Sequence: Synthetic oligonucleotide
  Sense strand starting at position 101 of SEQ ID NO: 318295
accugauuauuaguuuguu

SEQ ID NO: 551604 - RNA, 19 nt, Artificial Sequence
  Description of Artificial Sequence: Synthetic oligonucleotide
  Antisense strand to SEQ ID NO: 551603
aacaaacuaauaaucaggu

SEQ ID NO: 551605 - RNA, 19 nt, Artificial Sequence
  Description of Artificial Sequence: Synthetic oligonucleotide
  Sense strand starting at position 169 of SEQ ID NO: 318295
ccacaagagucagaauuug

SEQ ID NO: 551606 - RNA, 19 nt, Artificial Sequence
  Description of Artificial Sequence: Synthetic oligonucleotide
  Antisense strand to SEQ ID NO: 551605
caaauucugacucuugugg

SEQ ID NO: 551607 - RNA, 19 nt, Artificial Sequence
  Description of Artificial Sequence: Synthetic oligonucleotide
  Sense strand starting at position 237 of SEQ ID NO: 318295
aaacguaugcgugagggaa

SEQ ID NO: 551608 - RNA, 19 nt, Artificial Sequence
  Description of Artificial Sequence: Synthetic oligonucleotide
  Antisense strand to SEQ ID NO: 551607
uucccucacgcauacguuu

SEQ ID NO: 551609 - RNA, 19 nt, Artificial Sequence
  Description of Artificial Sequence: Synthetic oligonucleotide
  Sense strand starting at position 441 of SEQ ID NO: 318295
agaugaaacuaccagauaa

SEQ ID NO: 551610 - RNA, 19 nt, Artificial Sequence
  Description of Artificial Sequence: Synthetic oligonucleotide
  Antisense strand to SEQ ID NO: 551609
uuaucugguaguuucaucu

SEQ ID NO: 551611 - RNA, 19 nt, Artificial Sequence
  Description of Artificial Sequence: Synthetic oligonucleotide
  Sense strand starting at position 461 of SEQ ID NO: 318295
guacuuagacaaugcucua

SEQ ID NO: 551612 - RNA, 19 nt, Artificial Sequence
  Description of Artificial Sequence: Synthetic oligonucleotide
  Antisense strand to SEQ ID NO: 551611
uagagcauugucuaaguac

SEQ ID NO: 551613 - RNA, 19 nt, Artificial Sequence
  Description of Artificial Sequence: Synthetic oligonucleotide
  Sense strand starting at position 466 of SEQ ID NO: 318295
uagacaaugcucuaugggu

SEQ ID NO: 551614 - RNA, 19 nt, Artificial Sequence
  Description of Artificial Sequence: Synthetic oligonucleotide
  Antisense strand to SEQ ID NO: 551613
acccauagagcauugucua

SEQ ID NO: 551615 - RNA, 19 nt, Artificial Sequence
  Description of Artificial Sequence: Synthetic oligonucleotide
  Sense strand starting at position 474 of SEQ ID NO: 318295
gcucuaugggugcaagaga

SEQ ID NO: 551616 - RNA, 19 nt, Artificial Sequence
  Description of Artificial Sequence: Synthetic oligonucleotide
  Antisense strand to SEQ ID NO: 551615
ucucuugcacccauagagc

SEQ ID NO: 551617 - RNA, 19 nt, Artificial Sequence
  Description of Artificial Sequence: Synthetic oligonucleotide
  Sense strand starting at position 548 of SEQ ID NO: 318295
guugguacaugcuuggaaa

SEQ ID NO: 551618 - RNA, 19 nt, Artificial Sequence
  Description of Artificial Sequence: Synthetic oligonucleotide
  Antisense strand to SEQ ID NO: 551617
uuuccaagcauguaccaac

SEQ ID NO: 551619 - RNA, 19 nt, Artificial Sequence
  Description of Artificial Sequence: Synthetic oligonucleotide
  Sense strand starting at position 742 of SEQ ID NO: 318295
uggauuucuuaacaguuaa

SEQ ID NO: 551620 - RNA, 19 nt, Artificial Sequence
  Description of Artificial Sequence: Synthetic oligonucleotide
  Antisense strand to SEQ ID NO: 551619
uuaacuguuaagaaaucca

SEQ ID NO: 551621 - RNA, 19 nt, Artificial Sequence
  Description of Artificial Sequence: Synthetic oligonucleotide
  Sense strand starting at position 875 of SEQ ID NO: 318295
ucacaauggcugggugauu

SEQ ID NO: 551622 - RNA, 19 nt, Artificial Sequence
  Description of Artificial Sequence: Synthetic oligonucleotide
  Antisense strand to SEQ ID NO: 551621
aaucacccagccauuguga

SEQ ID NO: 551623 - RNA, 19 nt, Artificial Sequence
  Description of Artificial Sequence: Synthetic oligonucleotide
  Sense strand starting at position 876 of SEQ ID NO: 318295
cacaauggcugggugauua

SEQ ID NO: 551624 - RNA, 19 nt, Artificial Sequence
  Description of Artificial Sequence: Synthetic oligonucleotide
  Antisense strand to SEQ ID NO: 551623
uaaucacccagccauugug

SEQ ID NO: 551625 - RNA, 19 nt, Artificial Sequence
  Description of Artificial Sequence: Synthetic oligonucleotide
  Sense strand starting at position 880 of SEQ ID NO: 318295
auggcugggugauuaaaua

SEQ ID NO: 551626 - RNA, 19 nt, Artificial Sequence
  Description of Artificial Sequence: Synthetic oligonucleotide
  Antisense strand to SEQ ID NO: 551625
uauuuaaucacccagccau

SEQ ID NO: 551627 - RNA, 19 nt, Artificial Sequence
  Description of Artificial Sequence: Synthetic oligonucleotide
  Sense strand starting at position 1065 of SEQ ID NO: 318295
gggugacuuuaucuuucuu

SEQ ID NO: 551628 - RNA, 19 nt, Artificial Sequence
  Description of Artificial Sequence: Synthetic oligonucleotide
  Antisense strand to SEQ ID NO: 551627
aagaaagauaaagucaccc

SEQ ID NO: 551629 - RNA, 19 nt, Artificial Sequence
  Description of Artificial Sequence: Synthetic oligonucleotide
  Sense strand starting at position 1147 of SEQ ID NO: 318295
gcaauuacacacuggcaga

SEQ ID NO: 551630 - RNA, 19 nt, Artificial Sequence
  Description of Artificial Sequence: Synthetic oligonucleotide
  Antisense strand to SEQ ID NO: 551629
ucugccaguguguaauugc

SEQ ID NO: 551631 - RNA, 19 nt, Artificial Sequence
  Description of Artificial Sequence: Synthetic oligonucleotide
  Sense strand starting at position 1180 of SEQ ID NO: 318295
guuugaaagcuccaacugu

SEQ ID NO: 551632 - RNA, 19 nt, Artificial Sequence
  Description of Artificial Sequence: Synthetic oligonucleotide
  Antisense strand to SEQ ID NO: 551631
acaguuggagcuuucaaac

SEQ ID NO: 551633 - RNA, 19 nt, Artificial Sequence
  Description of Artificial Sequence: Synthetic oligonucleotide
  Sense strand starting at position 1348 of SEQ ID NO: 318295
agaggagacuagucugguu

SEQ ID NO: 551634 - RNA, 19 nt, Artificial Sequence
  Description of Artificial Sequence: Synthetic oligonucleotide
  Antisense strand to SEQ ID NO: 551633
aaccagacuagucuccucu

SEQ ID NO: 551635 - RNA, 19 nt, Artificial Sequence
  Description of Artificial Sequence: Synthetic oligonucleotide
  Sense strand starting at position 1353 of SEQ ID NO: 318295
agacuagucugguuugaca

SEQ ID NO: 551636 - RNA, 19 nt, Artificial Sequence
  Description of Artificial Sequence: Synthetic oligonucleotide
  Antisense strand to SEQ ID NO: 551635
ugucaaaccagacuagucu

SEQ ID NO: 551637 - RNA, 19 nt, Artificial Sequence
  Description of Artificial Sequence: Synthetic oligonucleotide
  Sense strand starting at position 1355 of SEQ ID NO: 318295
acuagucugguuugacaaa

SEQ ID NO: 551638 - RNA, 19 nt, Artificial Sequence
  Description of Artificial Sequence: Synthetic oligonucleotide
  Antisense strand to SEQ ID NO: 551637
uuugucaaaccagacuagu

SEQ ID NO: 551639 - RNA, 19 nt, Artificial Sequence
  Description of Artificial Sequence: Synthetic oligonucleotide
  Sense strand starting at position 2074 of SEQ ID NO: 318295
guaguucuccgguucguga

SEQ ID NO: 551640 - RNA, 19 nt, Artificial Sequence
  Description of Artificial Sequence: Synthetic oligonucleotide
  Antisense strand to SEQ ID NO: 551639
ucacgaaccggagaacuac

SEQ ID NO: 551641 - RNA, 19 nt, Artificial Sequence
  Description of Artificial Sequence: Synthetic oligonucleotide
  Sense strand starting at position 2206 of SEQ ID NO: 318295
agaagagggcugggucuua

SEQ ID NO: 551642 - RNA, 19 nt, Artificial Sequence
  Description of Artificial Sequence: Synthetic oligonucleotide
  Antisense strand to SEQ ID NO: 551641
uaagacccagcccucuucu

SEQ ID NO: 551643 - RNA, 19 nt, Artificial Sequence
  Description of Artificial Sequence: Synthetic oligonucleotide
  Sense strand starting at position 2424 of SEQ ID NO: 318295
uagagcugugcuuaagaua

SEQ ID NO: 551644 - RNA, 19 nt, Artificial Sequence
  Description of Artificial Sequence: Synthetic oligonucleotide
  Antisense strand to SEQ ID NO: 551643
uaucuuaagcacagcucua

SEQ ID NO: 551645 - RNA, 19 nt, Artificial Sequence
  Description of Artificial Sequence: Synthetic oligonucleotide
  Sense strand starting at position 2437 of SEQ ID NO: 318295
aagauagacccuugaguac

SEQ ID NO: 551646 - RNA, 19 nt, Artificial Sequence
  Description of Artificial Sequence: Synthetic oligonucleotide
  Antisense strand to SEQ ID NO: 551645
guacucaagggucuaucuu

SEQ ID NO: 551647 - RNA, 19 nt, Artificial Sequence
  Description of Artificial Sequence: Synthetic oligonucleotide
  Sense strand starting at position 2450 of SEQ ID NO: 318295
gaguacauuggcggauuaa

SEQ ID NO: 551648 - RNA, 19 nt, Artificial Sequence
  Description of Artificial Sequence: Synthetic oligonucleotide
  Antisense strand to SEQ ID NO: 551647
uuaauccgccaauguacuc

SEQ ID NO: 551649 - RNA, 19 nt, Artificial Sequence
  Description of Artificial Sequence: Synthetic oligonucleotide
  Sense strand starting at position 2451 of SEQ ID NO: 318295
aguacauuggcggauuaaa

SEQ ID NO: 551650 - RNA, 19 nt, Artificial Sequence
  Description of Artificial Sequence: Synthetic oligonucleotide
  Antisense strand to SEQ ID NO: 551649
uuuaauccgccaauguacu

SEQ ID NO: 551651 - RNA, 19 nt, Artificial Sequence
  Description of Artificial Sequence: Synthetic oligonucleotide
  Sense strand starting at position 2511 of SEQ ID NO: 318295
gaauguuagggucggaaug

SEQ ID NO: 551652 - RNA, 19 nt, Artificial Sequence
  Description of Artificial Sequence: Synthetic oligonucleotide
  Antisense strand to SEQ ID NO: 551651
cauuccgacccuaacauuc

SEQ ID NO: 551653 - RNA, 19 nt, Artificial Sequence
  Description of Artificial Sequence: Synthetic oligonucleotide
  Sense strand starting at position 2512 of SEQ ID NO: 318295
aauguuagggucggaauga

SEQ ID NO: 551654 - RNA, 19 nt, Artificial Sequence
  Description of Artificial Sequence: Synthetic oligonucleotide
  Antisense strand to SEQ ID NO: 551653
ucauuccgacccuaacauu

SEQ ID NO: 551655 - RNA, 19 nt, Artificial Sequence
  Description of Artificial Sequence: Synthetic oligonucleotide
  Sense strand starting at position 2590 of SEQ ID NO: 318295
uaagcacuuugugugauuu

SEQ ID NO: 551656 - RNA, 19 nt, Artificial Sequence
  Description of Artificial Sequence: Synthetic oligonucleotide
  Antisense strand to SEQ ID NO: 551655
aaaucacacaaagugcuua

SEQ ID NO: 551657 - RNA, 19 nt, Artificial Sequence
  Description of Artificial Sequence: Synthetic oligonucleotide
  Sense strand starting at position 2883 of SEQ ID NO: 318295
agaagauggcauuggguau

SEQ ID NO: 551658 - RNA, 19 nt, Artificial Sequence
  Description of Artificial Sequence: Synthetic oligonucleotide
  Antisense strand to SEQ ID NO: 551657
auacccaaugccaucuucu

SEQ ID NO: 551659 - RNA, 19 nt, Artificial Sequence
  Description of Artificial Sequence: Synthetic oligonucleotide
  Sense strand starting at position 2931 of SEQ ID NO: 318295
guuagauggccaggaauuc

SEQ ID NO: 551660 - RNA, 19 nt, Artificial Sequence
  Description of Artificial Sequence: Synthetic oligonucleotide
  Antisense strand to SEQ ID NO: 551659
gaauuccuggccaucuaac

SEQ ID NO: 551661 - RNA, 19 nt, Artificial Sequence
  Description of Artificial Sequence: Synthetic oligonucleotide
  Sense strand starting at position 3284 of SEQ ID NO: 318295
ugaggcuguaugugauaga

SEQ ID NO: 551662 - RNA, 19 nt, Artificial Sequence
  Description of Artificial Sequence: Synthetic oligonucleotide
  Antisense strand to SEQ ID NO: 551661
ucuaucacauacagccuca

SEQ ID NO: 551663 - RNA, 19 nt, Artificial Sequence
  Description of Artificial Sequence: Synthetic oligonucleotide
  Sense strand starting at position 3295 of SEQ ID NO: 318295
gugauagaguuugugaaua

SEQ ID NO: 551664 - RNA, 19 nt, Artificial Sequence
  Description of Artificial Sequence: Synthetic oligonucleotide
  Antisense strand to SEQ ID NO: 551663
uauucacaaacucuaucac

SEQ ID NO: 551665 - RNA, 19 nt, Artificial Sequence
  Description of Artificial Sequence: Synthetic oligonucleotide
  Sense strand starting at position 3300 of SEQ ID NO: 318295
agaguuugugaauagcaac

SEQ ID NO: 551666 - RNA, 19 nt, Artificial Sequence
  Description of Artificial Sequence: Synthetic oligonucleotide
  Antisense strand to SEQ ID NO: 551665
guugcuauucacaaacucu

SEQ ID NO: 551667 - RNA, 19 nt, Artificial Sequence
  Description of Artificial Sequence: Synthetic oligonucleotide
  Sense strand starting at position 3420 of SEQ ID NO: 318295
uuaguugcagggugagaua

SEQ ID NO: 551668 - RNA, 19 nt, Artificial Sequence
  Description of Artificial Sequence: Synthetic oligonucleotide
  Antisense strand to SEQ ID NO: 551667
uaucucacccugcaacuaa

SEQ ID NO: 551669 - RNA, 19 nt, Artificial Sequence
  Description of Artificial Sequence: Synthetic oligonucleotide
  Sense strand starting at position 3658 of SEQ ID NO: 318295
uccuauauggucuguaaag

SEQ ID NO: 551670 - RNA, 19 nt, Artificial Sequence
  Description of Artificial Sequence: Synthetic oligonucleotide
  Antisense strand to SEQ ID NO: 551669
cuuuacagaccauauagga

SEQ ID NO: 551671 - RNA, 19 nt, Artificial Sequence
  Description of Artificial Sequence: Synthetic oligonucleotide
  Sense strand starting at position 3883 of SEQ ID NO: 318295
cccagauucuuucuuggaa

SEQ ID NO: 551672 - RNA, 19 nt, Artificial Sequence
  Description of Artificial Sequence: Synthetic oligonucleotide
  Antisense strand to SEQ ID NO: 551671
uuccaagaaagaaucuggg

SEQ ID NO: 551673 - RNA, 19 nt, Artificial Sequence
  Description of Artificial Sequence: Synthetic oligonucleotide
  Sense strand starting at position 3884 of SEQ ID NO: 318295
ccagauucuuucuuggaag

SEQ ID NO: 551674 - RNA, 19 nt, Artificial Sequence
  Description of Artificial Sequence: Synthetic oligonucleotide
  Antisense strand to SEQ ID NO: 551673
cuuccaagaaagaaucugg

SEQ ID NO: 551675 - RNA, 19 nt, Artificial Sequence
  Description of Artificial Sequence: Synthetic oligonucleotide
  Sense strand starting at position 3934 of SEQ ID NO: 318295
cgggaucccuuucugguaa

SEQ ID NO: 551676 - RNA, 19 nt, Artificial Sequence
  Description of Artificial Sequence: Synthetic oligonucleotide
  Antisense strand to SEQ ID NO: 551675
uuaccagaaagggaucccg

SEQ ID NO: 551677 - RNA, 19 nt, Artificial Sequence
  Description of Artificial Sequence: Synthetic oligonucleotide
  Sense strand starting at position 604 of SEQ ID NO: 318296
cugccaacccacugugaaa

SEQ ID NO: 551678 - RNA, 19 nt, Artificial Sequence
  Description of Artificial Sequence: Synthetic oligonucleotide
  Antisense strand to SEQ ID NO: 551677
uuucacaguggguuggcag

SEQ ID NO: 551679 - RNA, 19 nt, Artificial Sequence
  Description of Artificial Sequence: Synthetic oligonucleotide
  Sense strand starting at position 716 of SEQ ID NO: 318296
augggcauuucuuaaacaa

SEQ ID NO: 551680 - RNA, 19 nt, Artificial Sequence
  Description of Artificial Sequence: Synthetic oligonucleotide
  Antisense strand to SEQ ID NO: 551679
uuguuuaagaaaugcccau

SEQ ID NO: 551681 - RNA, 19 nt, Artificial Sequence
  Description of Artificial Sequence: Synthetic oligonucleotide
  Sense strand starting at position 768 of SEQ ID NO: 318296
acaggacauuuccagaaca

SEQ ID NO: 551682 - RNA, 19 nt, Artificial Sequence
  Description of Artificial Sequence: Synthetic oligonucleotide
  Antisense strand to SEQ ID NO: 551681
uguucuggaaauguccugu

SEQ ID NO: 551683 - RNA, 19 nt, Artificial Sequence
  Description of Artificial Sequence: Synthetic oligonucleotide
  Sense strand starting at position 831 of SEQ ID NO: 318296
acuggcuauuaaucaguau

SEQ ID NO: 551684 - RNA, 19 nt, Artificial Sequence
  Description of Artificial Sequence: Synthetic oligonucleotide
  Antisense strand to SEQ ID NO: 551683
auacugauuaauagccagu

SEQ ID NO: 551685 - RNA, 19 nt, Artificial Sequence
  Description of Artificial Sequence: Synthetic oligonucleotide
  Sense strand starting at position 834 of SEQ ID NO: 318296
ggcuauuaaucaguauaaa

SEQ ID NO: 551686 - RNA, 19 nt, Artificial Sequence
  Description of Artificial Sequence: Synthetic oligonucleotide
  Antisense strand to SEQ ID NO: 551685
uuuauacugauuaauagcc

SEQ ID NO: 551687 - RNA, 19 nt, Artificial Sequence
  Description of Artificial Sequence: Synthetic oligonucleotide
  Sense strand starting at position 935 of SEQ ID NO: 318296
uuacuauguuaccuguaau

SEQ ID NO: 551688 - RNA, 19 nt, Artificial Sequence
  Description of Artificial Sequence: Synthetic oligonucleotide
  Antisense strand to SEQ ID NO: 551687
auuacagguaacauaguaa

SEQ ID NO: 551689 - RNA, 19 nt, Artificial Sequence
  Description of Artificial Sequence: Synthetic oligonucleotide
  Sense strand starting at position 938 of SEQ ID NO: 318296
cuauguuaccuguaauaua

SEQ ID NO: 551690 - RNA, 19 nt, Artificial Sequence
  Description of Artificial Sequence: Synthetic oligonucleotide
  Antisense strand to SEQ ID NO: 551689
uauauuacagguaacauag

SEQ ID NO: 551691 - RNA, 19 nt, Artificial Sequence
  Description of Artificial Sequence: Synthetic oligonucleotide
  Sense strand starting at position 1011 of SEQ ID NO: 318296
gcacauguguuauuuagcu

SEQ ID NO: 551692 - RNA, 19 nt, Artificial Sequence
  Description of Artificial Sequence: Synthetic oligonucleotide
  Antisense strand to SEQ ID NO: 551691
agcuaaauaacacaugugc

SEQ ID NO: 551693 - RNA, 19 nt, Artificial Sequence
  Description of Artificial Sequence: Synthetic oligonucleotide
  Sense strand starting at position 1018 of SEQ ID NO: 318296
uguuauuuagcuuguguuu

SEQ ID NO: 551694 - RNA, 19 nt, Artificial Sequence
  Description of Artificial Sequence: Synthetic oligonucleotide
  Antisense strand to SEQ ID NO: 551693
aaacacaagcuaaauaaca

SEQ ID NO: 551695 - RNA, 19 nt, Artificial Sequence
  Description of Artificial Sequence: Synthetic oligonucleotide
  Sense strand starting at position 1117 of SEQ ID NO: 318296
acaaguaauuuagagaauc

SEQ ID NO: 551696 - RNA, 19 nt, Artificial Sequence
  Description of Artificial Sequence: Synthetic oligonucleotide
  Antisense strand to SEQ ID NO: 551695
gauucucuaaauuacuugu

SEQ ID NO: 551697 - RNA, 19 nt, Artificial Sequence
  Description of Artificial Sequence: Synthetic oligonucleotide
  Sense strand starting at position 1164 of SEQ ID NO: 318296
guguucucaccuugagaga

SEQ ID NO: 551698 - RNA, 19 nt, Artificial Sequence
  Description of Artificial Sequence: Synthetic oligonucleotide
  Antisense strand to SEQ ID NO: 551697
ucucucaaggugagaacac

SEQ ID NO: 551699 - RNA, 19 nt, Artificial Sequence
  Description of Artificial Sequence: Synthetic oligonucleotide
  Sense strand starting at position 1231 of SEQ ID NO: 318296
agucuuaaccugugcauuu

SEQ ID NO: 551700 - RNA, 19 nt, Artificial Sequence
  Description of Artificial Sequence: Synthetic oligonucleotide
  Antisense strand to SEQ ID NO: 551699
aaaugcacagguuaagacu

SEQ ID NO: 551701 - RNA, 19 nt, Artificial Sequence
  Description of Artificial Sequence: Synthetic oligonucleotide
  Sense strand starting at position 2083 of SEQ ID NO: 318296
gccuaugagcgcuuugcuu

SEQ ID NO: 551702 - RNA, 19 nt, Artificial Sequence
  Description of Artificial Sequence: Synthetic oligonucleotide
  Antisense strand to SEQ ID NO: 551701
aagcaaagcgcucauaggc

SEQ ID NO: 551703 - RNA, 19 nt, Artificial Sequence
  Description of Artificial Sequence: Synthetic oligonucleotide
  Sense strand starting at position 2253 of SEQ ID NO: 318296
ccguucuagcuguaacaga

SEQ ID NO: 551704 - RNA, 19 nt, Artificial Sequence
  Description of Artificial Sequence: Synthetic oligonucleotide
  Antisense strand to SEQ ID NO: 551703
ucuguuacagcuagaacgg

SEQ ID NO: 551705 - RNA, 19 nt, Artificial Sequence
  Description of Artificial Sequence: Synthetic oligonucleotide
  Sense strand starting at position 2291 of SEQ ID NO: 318296
guguguuggccgagugacu

SEQ ID NO: 551706 - RNA, 19 nt, Artificial Sequence
  Description of Artificial Sequence: Synthetic oligonucleotide
  Antisense strand to SEQ ID NO: 551705
agucacucggccaacacac

SEQ ID NO: 551707 - RNA, 19 nt, Artificial Sequence
  Description of Artificial Sequence: Synthetic oligonucleotide
  Sense strand starting at position 2292 of SEQ ID NO: 318296
uguguuggccgagugacuu

SEQ ID NO: 551708 - RNA, 19 nt, Artificial Sequence
  Description of Artificial Sequence: Synthetic oligonucleotide
  Antisense strand to SEQ ID NO: 551707
aagucacucggccaacaca

SEQ ID NO: 551709 - RNA, 19 nt, Artificial Sequence
  Description of Artificial Sequence: Synthetic oligonucleotide
  Sense strand starting at position 2317 of SEQ ID NO: 318296
agagaagccuuucuuuaac

SEQ ID NO: 551710 - RNA, 19 nt, Artificial Sequence
  Description of Artificial Sequence: Synthetic oligonucleotide
  Antisense strand to SEQ ID NO: 551709
guuaaagaaaggcuucucu

SEQ ID NO: 551711 - RNA, 19 nt, Artificial Sequence
  Description of Artificial Sequence: Synthetic oligonucleotide
  Sense strand starting at position 2405 of SEQ ID NO: 318296
cugagagcuucuuuggaag

SEQ ID NO: 551712 - RNA, 19 nt, Artificial Sequence
  Description of Artificial Sequence: Synthetic oligonucleotide
  Antisense strand to SEQ ID NO: 551711
cuuccaaagaagcucucag

SEQ ID NO: 551713 - RNA, 19 nt, Artificial Sequence
  Description of Artificial Sequence: Synthetic oligonucleotide
  Sense strand starting at position 2750 of SEQ ID NO: 318296
ucucuaaagccuggacuua

SEQ ID NO: 551714 - RNA, 19 nt, Artificial Sequence
  Description of Artificial Sequence: Synthetic oligonucleotide
  Antisense strand to SEQ ID NO: 551713
uaaguccaggcuuuagaga

SEQ ID NO: 551715 - RNA, 19 nt, Artificial Sequence
  Description of Artificial Sequence: Synthetic oligonucleotide
  Sense strand starting at position 2828 of SEQ ID NO: 318296
ccucuugagugagcuuuaa

SEQ ID NO: 551716 - RNA, 19 nt, Artificial Sequence
  Description of Artificial Sequence: Synthetic oligonucleotide
  Antisense strand to SEQ ID NO: 551715
uuaaagcucacucaagagg

SEQ ID NO: 551717 - RNA, 19 nt, Artificial Sequence
  Description of Artificial Sequence: Synthetic oligonucleotide
  Sense strand starting at position 2832 of SEQ ID NO: 318296
uugagugagcuuuaauaau

SEQ ID NO: 551718 - RNA, 19 nt, Artificial Sequence
  Description of Artificial Sequence: Synthetic oligonucleotide
  Antisense strand to SEQ ID NO: 551717
auuauuaaagcucacucaa

SEQ ID NO: 551719 - RNA, 19 nt, Artificial Sequence
  Description of Artificial Sequence: Synthetic oligonucleotide
  Sense strand starting at position 2940 of SEQ ID NO: 318296
agguucugaaauugguaau

SEQ ID NO: 551720 - RNA, 19 nt, Artificial Sequence
  Description of Artificial Sequence: Synthetic oligonucleotide
  Antisense strand to SEQ ID NO: 551719
auuaccaauuucagaaccu

SEQ ID NO: 551721 - RNA, 19 nt, Artificial Sequence
  Description of Artificial Sequence: Synthetic oligonucleotide
  Sense strand starting at position 2941 of SEQ ID NO: 318296
gguucugaaauugguaauu

SEQ ID NO: 551722 - RNA, 19 nt, Artificial Sequence
  Description of Artificial Sequence: Synthetic oligonucleotide
  Antisense strand to SEQ ID NO: 551721
aauuaccaauuucagaacc

SEQ ID NO: 551723 - RNA, 19 nt, Artificial Sequence
  Description of Artificial Sequence: Synthetic oligonucleotide
  Sense strand starting at position 2943 of SEQ ID NO: 318296
uucugaaauugguaauuug

SEQ ID NO: 551724 - RNA, 19 nt, Artificial Sequence
  Description of Artificial Sequence: Synthetic oligonucleotide
  Antisense strand to SEQ ID NO: 551723
caaauuaccaauuucagaa

SEQ ID NO: 551725 - RNA, 19 nt, Artificial Sequence
  Description of Artificial Sequence: Synthetic oligonucleotide
  Sense strand starting at position 2951 of SEQ ID NO: 318296
uugguaauuugugugucau

SEQ ID NO: 551726 - RNA, 19 nt, Artificial Sequence
  Description of Artificial Sequence: Synthetic oligonucleotide
  Antisense strand to SEQ ID NO: 551725
augacacacaaauuaccaa

SEQ ID NO: 551727 - RNA, 19 nt, Artificial Sequence
  Description of Artificial Sequence: Synthetic oligonucleotide
  Sense strand starting at position 2952 of SEQ ID NO: 318296
ugguaauuugugugucauc

SEQ ID NO: 551728 - RNA, 19 nt, Artificial Sequence
  Description of Artificial Sequence: Synthetic oligonucleotide
  Antisense strand to SEQ ID NO: 551727
gaugacacacaaauuacca

SEQ ID NO: 551729 - RNA, 19 nt, Artificial Sequence
  Description of Artificial Sequence: Synthetic oligonucleotide
  Sense strand starting at position 2953 of SEQ ID NO: 318296
gguaauuugugugucaucu

SEQ ID NO: 551730 - RNA, 19 nt, Artificial Sequence
  Description of Artificial Sequence: Synthetic oligonucleotide
  Antisense strand to SEQ ID NO: 551729
agaugacacacaaauuacc

SEQ ID NO: 551731 - RNA, 19 nt, Artificial Sequence
  Description of Artificial Sequence: Synthetic oligonucleotide
  Sense strand starting at position 3225 of SEQ ID NO: 318296
ugauaagugucccucuaua

SEQ ID NO: 551732 - RNA, 19 nt, Artificial Sequence
  Description of Artificial Sequence: Synthetic oligonucleotide
  Antisense strand to SEQ ID NO: 551731
uauagagggacacuuauca

SEQ ID NO: 551733 - RNA, 19 nt, Artificial Sequence
  Description of Artificial Sequence: Synthetic oligonucleotide
  Sense strand starting at position 3367 of SEQ ID NO: 318296
ugcaaauguggaggaguuu

SEQ ID NO: 551734 - RNA, 19 nt, Artificial Sequence
  Description of Artificial Sequence: Synthetic oligonucleotide
  Antisense strand to SEQ ID NO: 551733
aaacuccuccacauuugca

SEQ ID NO: 551735 - RNA, 19 nt, Artificial Sequence
  Description of Artificial Sequence: Synthetic oligonucleotide
  Sense strand starting at position 3397 of SEQ ID NO: 318296
gccuguuacugauuucuga

SEQ ID NO: 551736 - RNA, 19 nt, Artificial Sequence
  Description of Artificial Sequence: Synthetic oligonucleotide
  Antisense strand to SEQ ID NO: 551735
ucagaaaucaguaacaggc

SEQ ID NO: 551737 - RNA, 19 nt, Artificial Sequence
  Description of Artificial Sequence: Synthetic oligonucleotide
  Sense strand starting at position 3401 of SEQ ID NO: 318296
guuacugauuucugauuua

SEQ ID NO: 551738 - RNA, 19 nt, Artificial Sequence
  Description of Artificial Sequence: Synthetic oligonucleotide
  Antisense strand to SEQ ID NO: 551737
uaaaucagaaaucaguaac

SEQ ID NO: 551739 - RNA, 19 nt, Artificial Sequence
  Description of Artificial Sequence: Synthetic oligonucleotide
  Sense strand starting at position 3439 of SEQ ID NO: 318296
agguacuucguacacuauu

SEQ ID NO: 551740 - RNA, 19 nt, Artificial Sequence
  Description of Artificial Sequence: Synthetic oligonucleotide
  Antisense strand to SEQ ID NO: 551739
aauaguguacgaaguaccu

SEQ ID NO: 551741 - RNA, 19 nt, Artificial Sequence
  Description of Artificial Sequence: Synthetic oligonucleotide
  Sense strand starting at position 3484 of SEQ ID NO: 318296
uucuguggcccagaguaua

SEQ ID NO: 551742 - RNA, 19 nt, Artificial Sequence
  Description of Artificial Sequence: Synthetic oligonucleotide
  Antisense strand to SEQ ID NO: 551741
uauacucugggccacagaa

SEQ ID NO: 551743 - RNA, 19 nt, Artificial Sequence
  Description of Artificial Sequence: Synthetic oligonucleotide
  Sense strand starting at position 3502 of SEQ ID NO: 318296
auagucugucuugguaaau

SEQ ID NO: 551744 - RNA, 19 nt, Artificial Sequence
  Description of Artificial Sequence: Synthetic oligonucleotide
  Antisense strand to SEQ ID NO: 551743
auuuaccaagacagacuau

SEQ ID NO: 551745 - RNA, 19 nt, Artificial Sequence
  Description of Artificial Sequence: Synthetic oligonucleotide
  Sense strand starting at position 3503 of SEQ ID NO: 318296
uagucugucuugguaaaua

SEQ ID NO: 551746 - RNA, 19 nt, Artificial Sequence
  Description of Artificial Sequence: Synthetic oligonucleotide
  Antisense strand to SEQ ID NO: 551745
uauuuaccaagacagacua

SEQ ID NO: 551747 - RNA, 19 nt, Artificial Sequence
  Description of Artificial Sequence: Synthetic oligonucleotide
  Sense strand starting at position 3514 of SEQ ID NO: 318296
gguaaauacucacugugca

SEQ ID NO: 551748 - RNA, 19 nt, Artificial Sequence
  Description of Artificial Sequence: Synthetic oligonucleotide
  Antisense strand to SEQ ID NO: 551747
ugcacagugaguauuuacc

SEQ ID NO: 551749 - RNA, 19 nt, Artificial Sequence
  Description of Artificial Sequence: Synthetic oligonucleotide
  Sense strand starting at position 3524 of SEQ ID NO: 318296
cacugugcauuugaaauga

SEQ ID NO: 551750 - RNA, 19 nt, Artificial Sequence
  Description of Artificial Sequence: Synthetic oligonucleotide
  Antisense strand to SEQ ID NO: 551749
ucauuucaaaugcacagug

SEQ ID NO: 551751 - RNA, 19 nt, Artificial Sequence
  Description of Artificial Sequence: Synthetic oligonucleotide
  Sense strand starting at position 3589 of SEQ ID NO: 318296
caugucaaguugguugaua

SEQ ID NO: 551752 - RNA, 19 nt, Artificial Sequence
  Description of Artificial Sequence: Synthetic oligonucleotide
  Antisense strand to SEQ ID NO: 551751
uaucaaccaacuugacaug

SEQ ID NO: 551753 - RNA, 19 nt, Artificial Sequence
  Description of Artificial Sequence: Synthetic oligonucleotide
  Sense strand starting at position 3590 of SEQ ID NO: 318296
augucaaguugguugauau

SEQ ID NO: 551754 - RNA, 19 nt, Artificial Sequence
  Description of Artificial Sequence: Synthetic oligonucleotide
  Antisense strand to SEQ ID NO: 551753
auaucaaccaacuugacau

SEQ ID NO: 551755 - RNA, 19 nt, Artificial Sequence
  Description of Artificial Sequence: Synthetic oligonucleotide
  Sense strand starting at position 3924 of SEQ ID NO: 318296
ggguguuaacaugguauau

SEQ ID NO: 551756 - RNA, 19 nt, Artificial Sequence
  Description of Artificial Sequence: Synthetic oligonucleotide
  Antisense strand to SEQ ID NO: 551755
auauaccauguuaacaccc

SEQ ID NO: 551757 - RNA, 19 nt, Artificial Sequence
  Description of Artificial Sequence: Synthetic oligonucleotide
  Sense strand starting at position 20 of SEQ ID NO: 318297
ccugcuggcagagaagauu

SEQ ID NO: 551758 - RNA, 19 nt, Artificial Sequence
  Description of Artificial Sequence: Synthetic oligonucleotide
  Antisense strand to SEQ ID NO: 551757
aaucuucucugccagcagg

SEQ ID NO: 551759 - RNA, 19 nt, Artificial Sequence
  Description of Artificial Sequence: Synthetic oligonucleotide
  Sense strand starting at position 41 of SEQ ID NO: 318297
cccauuaccugugauggga

SEQ ID NO: 551760 - RNA, 19 nt, Artificial Sequence
  Description of Artificial Sequence: Synthetic oligonucleotide
  Antisense strand to SEQ ID NO: 551759
ucccaucacagguaauggg

SEQ ID NO: 551761 - RNA, 19 nt, Artificial Sequence
  Description of Artificial Sequence: Synthetic oligonucleotide
  Sense strand starting at position 43 of SEQ ID NO: 318297
cauuaccugugaugggaaa

SEQ ID NO: 551762 - RNA, 19 nt, Artificial Sequence
  Description of Artificial Sequence: Synthetic oligonucleotide
  Antisense strand to SEQ ID NO: 551761
uuucccaucacagguaaug

SEQ ID NO: 551763 - RNA, 19 nt, Artificial Sequence
  Description of Artificial Sequence: Synthetic oligonucleotide
  Sense strand starting at position 108 of SEQ ID NO: 318297
gagcaaucuccacagaagu

SEQ ID NO: 551764 - RNA, 19 nt, Artificial Sequence
  Description of Artificial Sequence: Synthetic oligonucleotide
  Antisense strand to SEQ ID NO: 551763
acuucuguggagauugcuc

SEQ ID NO: 551765 - RNA, 19 nt, Artificial Sequence
  Description of Artificial Sequence: Synthetic oligonucleotide
  Sense strand starting at position 182 of SEQ ID NO: 318297
aacagcaugugaugagaga

SEQ ID NO: 551766 - RNA, 19 nt, Artificial Sequence
  Description of Artificial Sequence: Synthetic oligonucleotide
  Antisense strand to SEQ ID NO: 551765
ucucucaucacaugcuguu

SEQ ID NO: 551767 - RNA, 19 nt, Artificial Sequence
  Description of Artificial Sequence: Synthetic oligonucleotide
  Sense strand starting at position 300 of SEQ ID NO: 318297
gggucaagaucaugagacu

SEQ ID NO: 551768 - RNA, 19 nt, Artificial Sequence
  Description of Artificial Sequence: Synthetic oligonucleotide
  Antisense strand to SEQ ID NO: 551767
agucucaugaucuugaccc

SEQ ID NO: 551769 - RNA, 19 nt, Artificial Sequence
  Description of Artificial Sequence: Synthetic oligonucleotide
  Sense strand starting at position 486 of SEQ ID NO: 318297
accacuuucuaagagcaga

SEQ ID NO: 551770 - RNA, 19 nt, Artificial Sequence
  Description of Artificial Sequence: Synthetic oligonucleotide
  Antisense strand to SEQ ID NO: 551769
ucugcucuuagaaaguggu

SEQ ID NO: 551771 - RNA, 19 nt, Artificial Sequence
  Description of Artificial Sequence: Synthetic oligonucleotide
  Sense strand starting at position 618 of SEQ ID NO: 318297
gcgagcccuuagguauaua

SEQ ID NO: 551772 - RNA, 19 nt, Artificial Sequence
  Description of Artificial Sequence: Synthetic oligonucleotide
  Antisense strand to SEQ ID NO: 551771
uauauaccuaagggcucgc

SEQ ID NO: 551773 - RNA, 19 nt, Artificial Sequence
  Description of Artificial Sequence: Synthetic oligonucleotide
  Sense strand starting at position 619 of SEQ ID NO: 318297
cgagcccuuagguauauau

SEQ ID NO: 551774 - RNA, 19 nt, Artificial Sequence
  Description of Artificial Sequence: Synthetic oligonucleotide
  Antisense strand to SEQ ID NO: 551773
auauauaccuaagggcucg

SEQ ID NO: 551775 - RNA, 19 nt, Artificial Sequence
  Description of Artificial Sequence: Synthetic oligonucleotide
  Sense strand starting at position 677 of SEQ ID NO: 318297
cucagaaaguucuacaggu

SEQ ID NO: 551776 - RNA, 19 nt, Artificial Sequence
  Description of Artificial Sequence: Synthetic oligonucleotide
  Antisense strand to SEQ ID NO: 551775
accuguagaacuuucugag

SEQ ID NO: 551777 - RNA, 19 nt, Artificial Sequence
  Description of Artificial Sequence: Synthetic oligonucleotide
  Sense strand starting at position 749 of SEQ ID NO: 318297
auguuuacacuucgggaaa

SEQ ID NO: 551778 - RNA, 19 nt, Artificial Sequence
  Description of Artificial Sequence: Synthetic oligonucleotide
  Antisense strand to SEQ ID NO: 551777
uuucccgaaguguaaacau

SEQ ID NO: 551779 - RNA, 19 nt, Artificial Sequence
  Description of Artificial Sequence: Synthetic oligonucleotide
  Sense strand starting at position 760 of SEQ ID NO: 318297
ucgggaaauuuagaaggua

SEQ ID NO: 551780 - RNA, 19 nt, Artificial Sequence
  Description of Artificial Sequence: Synthetic oligonucleotide
  Antisense strand to SEQ ID NO: 551779
uaccuucuaaauuucccga

SEQ ID NO: 551781 - RNA, 19 nt, Artificial Sequence
  Description of Artificial Sequence: Synthetic oligonucleotide
  Sense strand starting at position 788 of SEQ ID NO: 318297
gcccaagccaggugaaaua

SEQ ID NO: 551782 - RNA, 19 nt, Artificial Sequence
  Description of Artificial Sequence: Synthetic oligonucleotide
  Antisense strand to SEQ ID NO: 551781
uauuucaccuggcuugggc

SEQ ID NO: 551783 - RNA, 19 nt, Artificial Sequence
  Description of Artificial Sequence: Synthetic oligonucleotide
  Sense strand starting at position 800 of SEQ ID NO: 318297
ugaaauaaguuacagaaca

SEQ ID NO: 551784 - RNA, 19 nt, Artificial Sequence
  Description of Artificial Sequence: Synthetic oligonucleotide
  Antisense strand to SEQ ID NO: 551783
uguucuguaacuuauuuca

SEQ ID NO: 551785 - RNA, 19 nt, Artificial Sequence
  Description of Artificial Sequence: Synthetic oligonucleotide
  Sense strand starting at position 823 of SEQ ID NO: 318297
gcuauuacaguguaucaca

SEQ ID NO: 551786 - RNA, 19 nt, Artificial Sequence
  Description of Artificial Sequence: Synthetic oligonucleotide
  Antisense strand to SEQ ID NO: 551785
ugugauacacuguaauagc

SEQ ID NO: 551787 - RNA, 19 nt, Artificial Sequence
  Description of Artificial Sequence: Synthetic oligonucleotide
  Sense strand starting at position 863 of SEQ ID NO: 318297
cguguuucccaacauacuu

SEQ ID NO: 551788 - RNA, 19 nt, Artificial Sequence
  Description of Artificial Sequence: Synthetic oligonucleotide
  Antisense strand to SEQ ID NO: 551787
aaguauguugggaaacacg

SEQ ID NO: 551789 - RNA, 19 nt, Artificial Sequence
  Description of Artificial Sequence: Synthetic oligonucleotide
  Sense strand starting at position 935 of SEQ ID NO: 318297
uagcaauugugguuauuug

SEQ ID NO: 551790 - RNA, 19 nt, Artificial Sequence
  Description of Artificial Sequence: Synthetic oligonucleotide
  Antisense strand to SEQ ID NO: 551789
caaauaaccacaauugcua

SEQ ID NO: 551791 - RNA, 19 nt, Artificial Sequence
  Description of Artificial Sequence: Synthetic oligonucleotide
  Sense strand starting at position 942 of SEQ ID NO: 318297
ugugguuauuuguaggacu

SEQ ID NO: 551792 - RNA, 19 nt, Artificial Sequence
  Description of Artificial Sequence: Synthetic oligonucleotide
  Antisense strand to SEQ ID NO: 551791
aguccuacaaauaaccaca

SEQ ID NO: 551793 - RNA, 19 nt, Artificial Sequence
  Description of Artificial Sequence: Synthetic oligonucleotide
  Sense strand starting at position 945 of SEQ ID NO: 318297
gguuauuuguaggacucua

SEQ ID NO: 551794 - RNA, 19 nt, Artificial Sequence
  Description of Artificial Sequence: Synthetic oligonucleotide
  Antisense strand to SEQ ID NO: 551793
uagaguccuacaaauaacc

SEQ ID NO: 551795 - RNA, 19 nt, Artificial Sequence
  Description of Artificial Sequence: Synthetic oligonucleotide
  Sense strand starting at position 1351 of SEQ ID NO: 318297
guuuauaaaccauaggcga

SEQ ID NO: 551796 - RNA, 19 nt, Artificial Sequence
  Description of Artificial Sequence: Synthetic oligonucleotide
  Antisense strand to SEQ ID NO: 551795
ucgccuaugguuuauaaac

SEQ ID NO: 551797 - RNA, 19 nt, Artificial Sequence
  Description of Artificial Sequence: Synthetic oligonucleotide
  Sense strand starting at position 1429 of SEQ ID NO: 318297
ccucuaaguugacaguuaa

SEQ ID NO: 551798 - RNA, 19 nt, Artificial Sequence
  Description of Artificial Sequence: Synthetic oligonucleotide
  Antisense strand to SEQ ID NO: 551797
uuaacugucaacuuagagg

SEQ ID NO: 551799 - RNA, 19 nt, Artificial Sequence
  Description of Artificial Sequence: Synthetic oligonucleotide
  Sense strand starting at position 1479 of SEQ ID NO: 318297
auauuuaccuucgacguga

SEQ ID NO: 551800 - RNA, 19 nt, Artificial Sequence
  Description of Artificial Sequence: Synthetic oligonucleotide
  Antisense strand to SEQ ID NO: 551799
ucacgucgaagguaaauau

SEQ ID NO: 551801 - RNA, 19 nt, Artificial Sequence
  Description of Artificial Sequence: Synthetic oligonucleotide
  Sense strand starting at position 1481 of SEQ ID NO: 318297
auuuaccuucgacgugauu

SEQ ID NO: 551802 - RNA, 19 nt, Artificial Sequence
  Description of Artificial Sequence: Synthetic oligonucleotide
  Antisense strand to SEQ ID NO: 551801
aaucacgucgaagguaaau

SEQ ID NO: 551803 - RNA, 19 nt, Artificial Sequence
  Description of Artificial Sequence: Synthetic oligonucleotide
  Sense strand starting at position 1490 of SEQ ID NO: 318297
cgacgugauucgaguuccu

SEQ ID NO: 551804 - RNA, 19 nt, Artificial Sequence
  Description of Artificial Sequence: Synthetic oligonucleotide
  Antisense strand to SEQ ID NO: 551803
aggaacucgaaucacgucg

SEQ ID NO: 551805 - RNA, 19 nt, Artificial Sequence
  Description of Artificial Sequence: Synthetic oligonucleotide
  Sense strand starting at position 1497 of SEQ ID NO: 318297
auucgaguuccuggcaaug

SEQ ID NO: 551806 - RNA, 19 nt, Artificial Sequence
  Description of Artificial Sequence: Synthetic oligonucleotide
  Antisense strand to SEQ ID NO: 551805
cauugccaggaacucgaau

SEQ ID NO: 551807 - RNA, 19 nt, Artificial Sequence
  Description of Artificial Sequence: Synthetic oligonucleotide
  Sense strand starting at position 1502 of SEQ ID NO: 318297
aguuccuggcaaugcuaaa

SEQ ID NO: 551808 - RNA, 19 nt, Artificial Sequence
  Description of Artificial Sequence: Synthetic oligonucleotide
  Antisense strand to SEQ ID NO: 551807
uuuagcauugccaggaacu

SEQ ID NO: 551809 - RNA, 19 nt, Artificial Sequence
  Description of Artificial Sequence: Synthetic oligonucleotide
  Sense strand starting at position 1541 of SEQ ID NO: 318297
cgugaaacuccacacuuau

SEQ ID NO: 551810 - RNA, 19 nt, Artificial Sequence
  Description of Artificial Sequence: Synthetic oligonucleotide
  Antisense strand to SEQ ID NO: 551809
auaaguguggaguuucacg

SEQ ID NO: 551811 - RNA, 19 nt, Artificial Sequence
  Description of Artificial Sequence: Synthetic oligonucleotide
  Sense strand starting at position 1630 of SEQ ID NO: 318297
ccguuccaaucucaagagu

SEQ ID NO: 551812 - RNA, 19 nt, Artificial Sequence
  Description of Artificial Sequence: Synthetic oligonucleotide
  Antisense strand to SEQ ID NO: 551811
acucuugagauuggaacgg

SEQ ID NO: 551813 - RNA, 19 nt, Artificial Sequence
  Description of Artificial Sequence: Synthetic oligonucleotide
  Sense strand starting at position 1694 of SEQ ID NO: 318297
uggacuguuacuuguagga

SEQ ID NO: 551814 - RNA, 19 nt, Artificial Sequence
  Description of Artificial Sequence: Synthetic oligonucleotide
  Antisense strand to SEQ ID NO: 551813
uccuacaaguaacagucca

SEQ ID NO: 551815 - RNA, 19 nt, Artificial Sequence
  Description of Artificial Sequence: Synthetic oligonucleotide
  Sense strand starting at position 1696 of SEQ ID NO: 318297
gacuguuacuuguaggauc

SEQ ID NO: 551816 - RNA, 19 nt, Artificial Sequence
  Description of Artificial Sequence: Synthetic oligonucleotide
  Antisense strand to SEQ ID NO: 551815
gauccuacaaguaacaguc

SEQ ID NO: 551817 - RNA, 19 nt, Artificial Sequence
  Description of Artificial Sequence: Synthetic oligonucleotide
  Sense strand starting at position 1703 of SEQ ID NO: 318297
acuuguaggaucugggcaa

SEQ ID NO: 551818 - RNA, 19 nt, Artificial Sequence
  Description of Artificial Sequence: Synthetic oligonucleotide
  Antisense strand to SEQ ID NO: 551817
uugcccagauccuacaagu

SEQ ID NO: 551819 - RNA, 19 nt, Artificial Sequence
  Description of Artificial Sequence: Synthetic oligonucleotide
  Sense strand starting at position 1707 of SEQ ID NO: 318297
guaggaucugggcaaguca

SEQ ID NO: 551820 - RNA, 19 nt, Artificial Sequence
  Description of Artificial Sequence: Synthetic oligonucleotide
  Antisense strand to SEQ ID NO: 551819
ugacuugcccagauccuac

SEQ ID NO: 551821 - RNA, 19 nt, Artificial Sequence
  Description of Artificial Sequence: Synthetic oligonucleotide
  Sense strand starting at position 1722 of SEQ ID NO: 318297
gucacuccacgauaaauga

SEQ ID NO: 551822 - RNA, 19 nt, Artificial Sequence
  Description of Artificial Sequence: Synthetic oligonucleotide
  Antisense strand to SEQ ID NO: 551821
ucauuuaucguggagugac

SEQ ID NO: 551823 - RNA, 19 nt, Artificial Sequence
  Description of Artificial Sequence: Synthetic oligonucleotide
  Sense strand starting at position 1729 of SEQ ID NO: 318297
cacgauaaaugagucugau

SEQ ID NO: 551824 - RNA, 19 nt, Artificial Sequence
  Description of Artificial Sequence: Synthetic oligonucleotide
  Antisense strand to SEQ ID NO: 551823
aucagacucauuuaucgug

SEQ ID NO: 551825 - RNA, 19 nt, Artificial Sequence
  Description of Artificial Sequence: Synthetic oligonucleotide
  Sense strand starting at position 1732 of SEQ ID NO: 318297
gauaaaugagucugauguu

SEQ ID NO: 551826 - RNA, 19 nt, Artificial Sequence
  Description of Artificial Sequence: Synthetic oligonucleotide
  Antisense strand to SEQ ID NO: 551825
aacaucagacucauuuauc

SEQ ID NO: 551827 - RNA, 19 nt, Artificial Sequence
  Description of Artificial Sequence: Synthetic oligonucleotide
  Sense strand starting at position 1733 of SEQ ID NO: 318297
auaaaugagucugauguuu

SEQ ID NO: 551828 - RNA, 19 nt, Artificial Sequence
  Description of Artificial Sequence: Synthetic oligonucleotide
  Antisense strand to SEQ ID NO: 551827
aaacaucagacucauuuau

SEQ ID NO: 551829 - RNA, 19 nt, Artificial Sequence
  Description of Artificial Sequence: Synthetic oligonucleotide
  Sense strand starting at position 1735 of SEQ ID NO: 318297
aaaugagucugauguuuaa

SEQ ID NO: 551830 - RNA, 19 nt, Artificial Sequence
  Description of Artificial Sequence: Synthetic oligonucleotide
  Antisense strand to SEQ ID NO: 551829
uuaaacaucagacucauuu

SEQ ID NO: 551831 - RNA, 19 nt, Artificial Sequence
  Description of Artificial Sequence: Synthetic oligonucleotide
  Sense strand starting at position 2488 of SEQ ID NO: 318297
cgaguugaggcagaaauag

SEQ ID NO: 551832 - RNA, 19 nt, Artificial Sequence
  Description of Artificial Sequence: Synthetic oligonucleotide
  Antisense strand to SEQ ID NO: 551831
cuauuucugccucaacucg

SEQ ID NO: 551833 - RNA, 19 nt, Artificial Sequence
  Description of Artificial Sequence: Synthetic oligonucleotide
  Sense strand starting at position 3973 of SEQ ID NO: 318297
caaguuaauucccugggca

SEQ ID NO: 551834 - RNA, 19 nt, Artificial Sequence
  Description of Artificial Sequence: Synthetic oligonucleotide
  Antisense strand to SEQ ID NO: 551833
ugcccagggaauuaacuug

SEQ ID NO: 551835 - RNA, 19 nt, Artificial Sequence
  Description of Artificial Sequence: Synthetic oligonucleotide
  Sense strand starting at position 3975 of SEQ ID NO: 318297
aguuaauucccugggcaaa

SEQ ID NO: 551836 - RNA, 19 nt, Artificial Sequence
  Description of Artificial Sequence: Synthetic oligonucleotide
  Antisense strand to SEQ ID NO: 551835
uuugcccagggaauuaacu

SEQ ID NO: 551837 - RNA, 19 nt, Artificial Sequence
  Description of Artificial Sequence: Synthetic oligonucleotide
  Sense strand starting at position 191 of SEQ ID NO: 318298
ucacaaucagguuaagugu

SEQ ID NO: 551838 - RNA, 19 nt, Artificial Sequence
  Description of Artificial Sequence: Synthetic oligonucleotide
  Antisense strand to SEQ ID NO: 551837
acacuuaaccugauuguga

SEQ ID NO: 551839 - RNA, 19 nt, Artificial Sequence
  Description of Artificial Sequence: Synthetic oligonucleotide
  Sense strand starting at position 222 of SEQ ID NO: 318298
aaggauauauguucuaagu

SEQ ID NO: 551840 - RNA, 19 nt, Artificial Sequence
  Description of Artificial Sequence: Synthetic oligonucleotide
  Antisense strand to SEQ ID NO: 551839
acuuagaacauauauccuu

SEQ ID NO: 551841 - RNA, 19 nt, Artificial Sequence
  Description of Artificial Sequence: Synthetic oligonucleotide
  Sense strand starting at position 352 of SEQ ID NO: 318298
ugacucauccaacggacaa

SEQ ID NO: 551842 - RNA, 19 nt, Artificial Sequence
  Description of Artificial Sequence: Synthetic oligonucleotide
  Antisense strand to SEQ ID NO: 551841
uuguccguuggaugaguca

SEQ ID NO: 551843 - RNA, 19 nt, Artificial Sequence
  Description of Artificial Sequence: Synthetic oligonucleotide
  Sense strand starting at position 480 of SEQ ID NO: 318298
uugagacgaucuuuaggaa

SEQ ID NO: 551844 - RNA, 19 nt, Artificial Sequence
  Description of Artificial Sequence: Synthetic oligonucleotide
  Antisense strand to SEQ ID NO: 551843
uuccuaaagaucgucucaa

SEQ ID NO: 551845 - RNA, 19 nt, Artificial Sequence
  Description of Artificial Sequence: Synthetic oligonucleotide
  Sense strand starting at position 567 of SEQ ID NO: 318298
auguauaggagcugaauaa

SEQ ID NO: 551846 - RNA, 19 nt, Artificial Sequence
  Description of Artificial Sequence: Synthetic oligonucleotide
  Antisense strand to SEQ ID NO: 551845
uuauucagcuccuauacau

SEQ ID NO: 551847 - RNA, 19 nt, Artificial Sequence
  Description of Artificial Sequence: Synthetic oligonucleotide
  Sense strand starting at position 619 of SEQ ID NO: 318298
guaugacaugugugacaag

SEQ ID NO: 551848 - RNA, 19 nt, Artificial Sequence
  Description of Artificial Sequence: Synthetic oligonucleotide
  Antisense strand to SEQ ID NO: 551847
cuugucacacaugucauac

SEQ ID NO: 551849 - RNA, 19 nt, Artificial Sequence
  Description of Artificial Sequence: Synthetic oligonucleotide
  Sense strand starting at position 991 of SEQ ID NO: 318298
ugaauacgccaaugggaau

SEQ ID NO: 551850 - RNA, 19 nt, Artificial Sequence
  Description of Artificial Sequence: Synthetic oligonucleotide
  Antisense strand to SEQ ID NO: 551849
auucccauuggcguauuca

SEQ ID NO: 551851 - RNA, 19 nt, Artificial Sequence
  Description of Artificial Sequence: Synthetic oligonucleotide
  Sense strand starting at position 1125 of SEQ ID NO: 318298
gugacaaacguguuugcgu

SEQ ID NO: 551852 - RNA, 19 nt, Artificial Sequence
  Description of Artificial Sequence: Synthetic oligonucleotide
  Antisense strand to SEQ ID NO: 551851
acgcaaacacguuugucac

SEQ ID NO: 551853 - RNA, 19 nt, Artificial Sequence
  Description of Artificial Sequence: Synthetic oligonucleotide
  Sense strand starting at position 1145 of SEQ ID NO: 318298
gugggauguguucaacaag

SEQ ID NO: 551854 - RNA, 19 nt, Artificial Sequence
  Description of Artificial Sequence: Synthetic oligonucleotide
  Antisense strand to SEQ ID NO: 551853
cuuguugaacacaucccac

SEQ ID NO: 551855 - RNA, 19 nt, Artificial Sequence
  Description of Artificial Sequence: Synthetic oligonucleotide
  Sense strand starting at position 1278 of SEQ ID NO: 318298
aaugguuuaggguggauau

SEQ ID NO: 551856 - RNA, 19 nt, Artificial Sequence
  Description of Artificial Sequence: Synthetic oligonucleotide
  Antisense strand to SEQ ID NO: 551855
auauccacccuaaaccauu

SEQ ID NO: 551857 - RNA, 19 nt, Artificial Sequence
  Description of Artificial Sequence: Synthetic oligonucleotide
  Sense strand starting at position 1407 of SEQ ID NO: 318298
cucaaagugugauuauuaa

SEQ ID NO: 551858 - RNA, 19 nt, Artificial Sequence
  Description of Artificial Sequence: Synthetic oligonucleotide
  Antisense strand to SEQ ID NO: 551857
uuaauaaucacacuuugag

SEQ ID NO: 551859 - RNA, 19 nt, Artificial Sequence
  Description of Artificial Sequence: Synthetic oligonucleotide
  Sense strand starting at position 1415 of SEQ ID NO: 318298
gugauuauuaacugguuag

SEQ ID NO: 551860 - RNA, 19 nt, Artificial Sequence
  Description of Artificial Sequence: Synthetic oligonucleotide
  Antisense strand to SEQ ID NO: 551859
cuaaccaguuaauaaucac

SEQ ID NO: 551861 - RNA, 19 nt, Artificial Sequence
  Description of Artificial Sequence: Synthetic oligonucleotide
  Sense strand starting at position 2000 of SEQ ID NO: 318298
ugaaauugguaauccauac

SEQ ID NO: 551862 - RNA, 19 nt, Artificial Sequence
  Description of Artificial Sequence: Synthetic oligonucleotide
  Antisense strand to SEQ ID NO: 551861
guauggauuaccaauuuca

SEQ ID NO: 551863 - RNA, 19 nt, Artificial Sequence
  Description of Artificial Sequence: Synthetic oligonucleotide
  Sense strand starting at position 2004 of SEQ ID NO: 318298
auugguaauccauacagca

SEQ ID NO: 551864 - RNA, 19 nt, Artificial Sequence
  Description of Artificial Sequence: Synthetic oligonucleotide
  Antisense strand to SEQ ID NO: 551863
ugcuguauggauuaccaau

SEQ ID NO: 551865 - RNA, 19 nt, Artificial Sequence
  Description of Artificial Sequence: Synthetic oligonucleotide
  Sense strand starting at position 2061 of SEQ ID NO: 318298
gggcaaauaaguuggacua

SEQ ID NO: 551866 - RNA, 19 nt, Artificial Sequence
  Description of Artificial Sequence: Synthetic oligonucleotide
  Antisense strand to SEQ ID NO: 551865
uaguccaacuuauuugccc

SEQ ID NO: 551867 - RNA, 19 nt, Artificial Sequence
  Description of Artificial Sequence: Synthetic oligonucleotide
  Sense strand starting at position 2062 of SEQ ID NO: 318298
ggcaaauaaguuggacuau

SEQ ID NO: 551868 - RNA, 19 nt, Artificial Sequence
  Description of Artificial Sequence: Synthetic oligonucleotide
  Antisense strand to SEQ ID NO: 551867
auaguccaacuuauuugcc

SEQ ID NO: 551869 - RNA, 19 nt, Artificial Sequence
  Description of Artificial Sequence: Synthetic oligonucleotide
  Sense strand starting at position 2074 of SEQ ID NO: 318298
ggacuauauucugcauaac

SEQ ID NO: 551870 - RNA, 19 nt, Artificial Sequence
  Description of Artificial Sequence: Synthetic oligonucleotide
  Antisense strand to SEQ ID NO: 551869
guuaugcagaauauagucc

SEQ ID NO: 551871 - RNA, 19 nt, Artificial Sequence
  Description of Artificial Sequence: Synthetic oligonucleotide
  Sense strand starting at position 2088 of SEQ ID NO: 318298
auaacuuagucaccuggau

SEQ ID NO: 551872 - RNA, 19 nt, Artificial Sequence
  Description of Artificial Sequence: Synthetic oligonucleotide
  Antisense strand to SEQ ID NO: 551871
auccaggugacuaaguuau

SEQ ID NO: 551873 - RNA, 19 nt, Artificial Sequence
  Description of Artificial Sequence: Synthetic oligonucleotide
  Sense strand starting at position 2092 of SEQ ID NO: 318298
cuuagucaccuggauggua

SEQ ID NO: 551874 - RNA, 19 nt, Artificial Sequence
  Description of Artificial Sequence: Synthetic oligonucleotide
  Antisense strand to SEQ ID NO: 551873
uaccauccaggugacuaag

SEQ ID NO: 551875 - RNA, 19 nt, Artificial Sequence
  Description of Artificial Sequence: Synthetic oligonucleotide
  Sense strand starting at position 2101 of SEQ ID NO: 318298
cuggaugguagauguaauu

SEQ ID NO: 551876 - RNA, 19 nt, Artificial Sequence
  Description of Artificial Sequence: Synthetic oligonucleotide
  Antisense strand to SEQ ID NO: 551875
aauuacaucuaccauccag

SEQ ID NO: 551877 - RNA, 19 nt, Artificial Sequence
  Description of Artificial Sequence: Synthetic oligonucleotide
  Sense strand starting at position 2120 of SEQ ID NO: 318298
ucagauucucgucauccua

SEQ ID NO: 551878 - RNA, 19 nt, Artificial Sequence
  Description of Artificial Sequence: Synthetic oligonucleotide
  Antisense strand to SEQ ID NO: 551877
uaggaugacgagaaucuga

SEQ ID NO: 551879 - RNA, 19 nt, Artificial Sequence
  Description of Artificial Sequence: Synthetic oligonucleotide
  Sense strand starting at position 2133 of SEQ ID NO: 318298
auccuaauuucguuaugcu

SEQ ID NO: 551880 - RNA, 19 nt, Artificial Sequence
  Description of Artificial Sequence: Synthetic oligonucleotide
  Antisense strand to SEQ ID NO: 551879
agcauaacgaaauuaggau

SEQ ID NO: 551881 - RNA, 19 nt, Artificial Sequence
  Description of Artificial Sequence: Synthetic oligonucleotide
  Sense strand starting at position 2186 of SEQ ID NO: 318298
cuaguauggcaguaucaca

SEQ ID NO: 551882 - RNA, 19 nt, Artificial Sequence
  Description of Artificial Sequence: Synthetic oligonucleotide
  Antisense strand to SEQ ID NO: 551881
ugugauacugccauacuag

SEQ ID NO: 551883 - RNA, 19 nt, Artificial Sequence
  Description of Artificial Sequence: Synthetic oligonucleotide
  Sense strand starting at position 2240 of SEQ ID NO: 318298
uguaaaggucauuagcauu

SEQ ID NO: 551884 - RNA, 19 nt, Artificial Sequence
  Description of Artificial Sequence: Synthetic oligonucleotide
  Antisense strand to SEQ ID NO: 551883
aaugcuaaugaccuuuaca

SEQ ID NO: 551885 - RNA, 19 nt, Artificial Sequence
  Description of Artificial Sequence: Synthetic oligonucleotide
  Sense strand starting at position 2246 of SEQ ID NO: 318298
ggucauuagcauuauauca

SEQ ID NO: 551886 - RNA, 19 nt, Artificial Sequence
  Description of Artificial Sequence: Synthetic oligonucleotide
  Antisense strand to SEQ ID NO: 551885
ugauauaaugcuaaugacc

SEQ ID NO: 551887 - RNA, 19 nt, Artificial Sequence
  Description of Artificial Sequence: Synthetic oligonucleotide
  Sense strand starting at position 2388 of SEQ ID NO: 318298
ccuccugagggucauaauu

SEQ ID NO: 551888 - RNA, 19 nt, Artificial Sequence
  Description of Artificial Sequence: Synthetic oligonucleotide
  Antisense strand to SEQ ID NO: 551887
aauuaugacccucaggagg

SEQ ID NO: 551889 - RNA, 19 nt, Artificial Sequence
  Description of Artificial Sequence: Synthetic oligonucleotide
  Sense strand starting at position 3070 of SEQ ID NO: 318298
uggcacaugcaugaucaaa

SEQ ID NO: 551890 - RNA, 19 nt, Artificial Sequence
  Description of Artificial Sequence: Synthetic oligonucleotide
  Antisense strand to SEQ ID NO: 551889
uuugaucaugcaugugcca

SEQ ID NO: 551891 - RNA, 19 nt, Artificial Sequence
  Description of Artificial Sequence: Synthetic oligonucleotide
  Sense strand starting at position 3127 of SEQ ID NO: 318298
agugcaagucaggaguaua

SEQ ID NO: 551892 - RNA, 19 nt, Artificial Sequence
  Description of Artificial Sequence: Synthetic oligonucleotide
  Antisense strand to SEQ ID NO: 551891
uauacuccugacuugcacu

SEQ ID NO: 551893 - RNA, 19 nt, Artificial Sequence
  Description of Artificial Sequence: Synthetic oligonucleotide
  Sense strand starting at position 3130 of SEQ ID NO: 318298
gcaagucaggaguauauca

SEQ ID NO: 551894 - RNA, 19 nt, Artificial Sequence
  Description of Artificial Sequence: Synthetic oligonucleotide
  Antisense strand to SEQ ID NO: 551893
ugauauacuccugacuugc

SEQ ID NO: 551895 - RNA, 19 nt, Artificial Sequence
  Description of Artificial Sequence: Synthetic oligonucleotide
  Sense strand starting at position 3132 of SEQ ID NO: 318298
aagucaggaguauaucagu

SEQ ID NO: 551896 - RNA, 19 nt, Artificial Sequence
  Description of Artificial Sequence: Synthetic oligonucleotide
  Antisense strand to SEQ ID NO: 551895
acugauauacuccugacuu

SEQ ID NO: 551897 - RNA, 19 nt, Artificial Sequence
  Description of Artificial Sequence: Synthetic oligonucleotide
  Sense strand starting at position 3155 of SEQ ID NO: 318298
aacagaggcccauguuuaa

SEQ ID NO: 551898 - RNA, 19 nt, Artificial Sequence
  Description of Artificial Sequence: Synthetic oligonucleotide
  Antisense strand to SEQ ID NO: 551897
uuaaacaugggccucuguu

SEQ ID NO: 551899 - RNA, 19 nt, Artificial Sequence
  Description of Artificial Sequence: Synthetic oligonucleotide
  Sense strand starting at position 3255 of SEQ ID NO: 318298
ugugacuagaacuguaaga

SEQ ID NO: 551900 - RNA, 19 nt, Artificial Sequence
  Description of Artificial Sequence: Synthetic oligonucleotide
  Antisense strand to SEQ ID NO: 551899
ucuuacaguucuagucaca

SEQ ID NO: 551901 - RNA, 19 nt, Artificial Sequence
  Description of Artificial Sequence: Synthetic oligonucleotide
  Sense strand starting at position 3333 of SEQ ID NO: 318298
ggaagcugcgaucaucaca

SEQ ID NO: 551902 - RNA, 19 nt, Artificial Sequence
  Description of Artificial Sequence: Synthetic oligonucleotide
  Antisense strand to SEQ ID NO: 551901
ugugaugaucgcagcuucc

SEQ ID NO: 551903 - RNA, 19 nt, Artificial Sequence
  Description of Artificial Sequence: Synthetic oligonucleotide
  Sense strand starting at position 3413 of SEQ ID NO: 318298
uggacagauucgguaaucu

SEQ ID NO: 551904 - RNA, 19 nt, Artificial Sequence
  Description of Artificial Sequence: Synthetic oligonucleotide
  Antisense strand to SEQ ID NO: 551903
agauuaccgaaucugucca

SEQ ID NO: 551905 - RNA, 19 nt, Artificial Sequence
  Description of Artificial Sequence: Synthetic oligonucleotide
  Sense strand starting at position 3423 of SEQ ID NO: 318298
cgguaaucucagcacaauc

SEQ ID NO: 551906 - RNA, 19 nt, Artificial Sequence
  Description of Artificial Sequence: Synthetic oligonucleotide
  Antisense strand to SEQ ID NO: 551905
gauugugcugagauuaccg

SEQ ID NO: 551907 - RNA, 19 nt, Artificial Sequence
  Description of Artificial Sequence: Synthetic oligonucleotide
  Sense strand starting at position 3739 of SEQ ID NO: 318298
ugagaaagcucucuuguaa

SEQ ID NO: 551908 - RNA, 19 nt, Artificial Sequence
  Description of Artificial Sequence: Synthetic oligonucleotide
  Antisense strand to SEQ ID NO: 551907
uuacaagagagcuuucuca

SEQ ID NO: 551909 - RNA, 19 nt, Artificial Sequence
  Description of Artificial Sequence: Synthetic oligonucleotide
  Sense strand starting at position 3830 of SEQ ID NO: 318298
ccaagaaauguuuauuguu

SEQ ID NO: 551910 - RNA, 19 nt, Artificial Sequence
  Description of Artificial Sequence: Synthetic oligonucleotide
  Antisense strand to SEQ ID NO: 551909
aacaauaaacauuucuugg

SEQ ID NO: 551911 - RNA, 19 nt, Artificial Sequence
  Description of Artificial Sequence: Synthetic oligonucleotide
  Sense strand starting at position 3858 of SEQ ID NO: 318298
auggacauuucugaauaca

SEQ ID NO: 551912 - RNA, 19 nt, Artificial Sequence
  Description of Artificial Sequence: Synthetic oligonucleotide
  Antisense strand to SEQ ID NO: 551911
uguauucagaaauguccau

SEQ ID NO: 551913 - RNA, 19 nt, Artificial Sequence
  Description of Artificial Sequence: Synthetic oligonucleotide
  Sense strand starting at position 3970 of SEQ ID NO: 318298
uccagaaaggugcauuaau

SEQ ID NO: 551914 - RNA, 19 nt, Artificial Sequence
  Description of Artificial Sequence: Synthetic oligonucleotide
  Antisense strand to SEQ ID NO: 551913
auuaaugcaccuuucugga

SEQ ID NO: 551915 - RNA, 19 nt, Artificial Sequence
  Description of Artificial Sequence: Synthetic oligonucleotide
  Sense strand starting at position 3980 of SEQ ID NO: 318298
ugcauuaaucaagaggguu

SEQ ID NO: 551916 - RNA, 19 nt, Artificial Sequence
  Description of Artificial Sequence: Synthetic oligonucleotide
  Antisense strand to SEQ ID NO: 551915
aacccucuugauuaaugca

SEQ ID NO: 551917 - RNA, 19 nt, Artificial Sequence
  Description of Artificial Sequence: Synthetic oligonucleotide
  Sense strand starting at position 1008 of SEQ ID NO: 318299
uuugcauucccagauguga

SEQ ID NO: 551918 - RNA, 19 nt, Artificial Sequence
  Description of Artificial Sequence: Synthetic oligonucleotide
  Antisense strand to SEQ ID NO: 551917
ucacaucugggaaugcaaa

SEQ ID NO: 551919 - RNA, 19 nt, Artificial Sequence
  Description of Artificial Sequence: Synthetic oligonucleotide
  Sense strand starting at position 2179 of SEQ ID NO: 318299
auguacagugccuggaaua

SEQ ID NO: 551920 - RNA, 19 nt, Artificial Sequence
  Description of Artificial Sequence: Synthetic oligonucleotide
  Antisense strand to SEQ ID NO: 551919
uauuccaggcacuguacau

SEQ ID NO: 551921 - RNA, 19 nt, Artificial Sequence
  Description of Artificial Sequence: Synthetic oligonucleotide
  Sense strand starting at position 2219 of SEQ ID NO: 318299
ggcugaaugcacgaauggu

SEQ ID NO: 551922 - RNA, 19 nt, Artificial Sequence
  Description of Artificial Sequence: Synthetic oligonucleotide
  Antisense strand to SEQ ID NO: 551921
accauucgugcauucagcc

SEQ ID NO: 551923 - RNA, 19 nt, Artificial Sequence
  Description of Artificial Sequence: Synthetic oligonucleotide
  Sense strand starting at position 2287 of SEQ ID NO: 318299
agcauaagugcccaagagu

SEQ ID NO: 551924 - RNA, 19 nt, Artificial Sequence
  Description of Artificial Sequence: Synthetic oligonucleotide
  Antisense strand to SEQ ID NO: 551923
acucuugggcacuuaugcu

SEQ ID NO: 551925 - RNA, 19 nt, Artificial Sequence
  Description of Artificial Sequence: Synthetic oligonucleotide
  Sense strand starting at position 2294 of SEQ ID NO: 318299
gugcccaagaguugccaaa

SEQ ID NO: 551926 - RNA, 19 nt, Artificial Sequence
  Description of Artificial Sequence: Synthetic oligonucleotide
  Antisense strand to SEQ ID NO: 551925
uuuggcaacucuugggcac

SEQ ID NO: 551927 - RNA, 19 nt, Artificial Sequence
  Description of Artificial Sequence: Synthetic oligonucleotide
  Sense strand starting at position 2296 of SEQ ID NO: 318299
gcccaagaguugccaaacu

SEQ ID NO: 551928 - RNA, 19 nt, Artificial Sequence
  Description of Artificial Sequence: Synthetic oligonucleotide
  Antisense strand to SEQ ID NO: 551927
aguuuggcaacucuugggc

SEQ ID NO: 551929 - RNA, 19 nt, Artificial Sequence
  Description of Artificial Sequence: Synthetic oligonucleotide
  Sense strand starting at position 2384 of SEQ ID NO: 318299
gacugccaucccugaagga

SEQ ID NO: 551930 - RNA, 19 nt, Artificial Sequence
  Description of Artificial Sequence: Synthetic oligonucleotide
  Antisense strand to SEQ ID NO: 551929
uccuucagggauggcaguc

SEQ ID NO: 551931 - RNA, 19 nt, Artificial Sequence
  Description of Artificial Sequence: Synthetic oligonucleotide
  Sense strand starting at position 2518 of SEQ ID NO: 318299
ggaaacauucugcauuauu

SEQ ID NO: 551932 - RNA, 19 nt, Artificial Sequence
  Description of Artificial Sequence: Synthetic oligonucleotide
  Antisense strand to SEQ ID NO: 551931
aauaaugcagaauguuucc

SEQ ID NO: 551933 - RNA, 19 nt, Artificial Sequence
  Description of Artificial Sequence: Synthetic oligonucleotide
  Sense strand starting at position 2543 of SEQ ID NO: 318299
cacugcagccuuugaugua

SEQ ID NO: 551934 - RNA, 19 nt, Artificial Sequence
  Description of Artificial Sequence: Synthetic oligonucleotide
  Antisense strand to SEQ ID NO: 551933
uacaucaaaggcugcagug

SEQ ID NO: 551935 - RNA, 19 nt, Artificial Sequence
  Description of Artificial Sequence: Synthetic oligonucleotide
  Sense strand starting at position 2618 of SEQ ID NO: 318299
uccuguuuaggguaggaca

SEQ ID NO: 551936 - RNA, 19 nt, Artificial Sequence
  Description of Artificial Sequence: Synthetic oligonucleotide
  Antisense strand to SEQ ID NO: 551935
uguccuacccuaaacagga

SEQ ID NO: 551937 - RNA, 19 nt, Artificial Sequence
  Description of Artificial Sequence: Synthetic oligonucleotide
  Sense strand starting at position 2649 of SEQ ID NO: 318299
uuguccuuccuggauaugu

SEQ ID NO: 551938 - RNA, 19 nt, Artificial Sequence
  Description of Artificial Sequence: Synthetic oligonucleotide
  Antisense strand to SEQ ID NO: 551937
acauauccaggaaggacaa

SEQ ID NO: 551939 - RNA, 19 nt, Artificial Sequence
  Description of Artificial Sequence: Synthetic oligonucleotide
  Sense strand starting at position 2659 of SEQ ID NO: 318299
uggauauguugcuuugugu

SEQ ID NO: 551940 - RNA, 19 nt, Artificial Sequence
  Description of Artificial Sequence: Synthetic oligonucleotide
  Antisense strand to SEQ ID NO: 551939
acacaaagcaacauaucca

SEQ ID NO: 551941 - RNA, 19 nt, Artificial Sequence
  Description of Artificial Sequence: Synthetic oligonucleotide
  Sense strand starting at position 2756 of SEQ ID NO: 318299
gugcuuuaauuucucugaa

SEQ ID NO: 551942 - RNA, 19 nt, Artificial Sequence
  Description of Artificial Sequence: Synthetic oligonucleotide
  Antisense strand to SEQ ID NO: 551941
uucagagaaauuaaagcac

SEQ ID NO: 551943 - RNA, 19 nt, Artificial Sequence
  Description of Artificial Sequence: Synthetic oligonucleotide
  Sense strand starting at position 2811 of SEQ ID NO: 318299
auaguuaucuagccacaag

SEQ ID NO: 551944 - RNA, 19 nt, Artificial Sequence
  Description of Artificial Sequence: Synthetic oligonucleotide
  Antisense strand to SEQ ID NO: 551943
cuuguggcuagauaacuau

SEQ ID NO: 551945 - RNA, 19 nt, Artificial Sequence
  Description of Artificial Sequence: Synthetic oligonucleotide
  Sense strand starting at position 2909 of SEQ ID NO: 318299
augagcucuuaguuuacua

SEQ ID NO: 551946 - RNA, 19 nt, Artificial Sequence
  Description of Artificial Sequence: Synthetic oligonucleotide
  Antisense strand to SEQ ID NO: 551945
uaguaaacuaagagcucau

SEQ ID NO: 551947 - RNA, 19 nt, Artificial Sequence
  Description of Artificial Sequence: Synthetic oligonucleotide
  Sense strand starting at position 2913 of SEQ ID NO: 318299
gcucuuaguuuacuacuca

SEQ ID NO: 551948 - RNA, 19 nt, Artificial Sequence
  Description of Artificial Sequence: Synthetic oligonucleotide
  Antisense strand to SEQ ID NO: 551947
ugaguaguaaacuaagagc

SEQ ID NO: 551949 - RNA, 19 nt, Artificial Sequence
  Description of Artificial Sequence: Synthetic oligonucleotide
  Sense strand starting at position 2949 of SEQ ID NO: 318299
ucuugugacuuguccuaua

SEQ ID NO: 551950 - RNA, 19 nt, Artificial Sequence
  Description of Artificial Sequence: Synthetic oligonucleotide
  Antisense strand to SEQ ID NO: 551949
uauaggacaagucacaaga

SEQ ID NO: 551951 - RNA, 19 nt, Artificial Sequence
  Description of Artificial Sequence: Synthetic oligonucleotide
  Sense strand starting at position 2952 of SEQ ID NO: 318299
ugugacuuguccuauauuu

SEQ ID NO: 551952 - RNA, 19 nt, Artificial Sequence
  Description of Artificial Sequence: Synthetic oligonucleotide
  Antisense strand to SEQ ID NO: 551951
aaauauaggacaagucaca

SEQ ID NO: 551953 - RNA, 19 nt, Artificial Sequence
  Description of Artificial Sequence: Synthetic oligonucleotide
  Sense strand starting at position 3037 of SEQ ID NO: 318299
gcccuuaaggugugaugua

SEQ ID NO: 551954 - RNA, 19 nt, Artificial Sequence
  Description of Artificial Sequence: Synthetic oligonucleotide
  Antisense strand to SEQ ID NO: 551953
uacaucacaccuuaagggc

SEQ ID NO: 551955 - RNA, 19 nt, Artificial Sequence
  Description of Artificial Sequence: Synthetic oligonucleotide
  Sense strand starting at position 3108 of SEQ ID NO: 318299
ucuaguauguauuucugca

SEQ ID NO: 551956 - RNA, 19 nt, Artificial Sequence
  Description of Artificial Sequence: Synthetic oligonucleotide
  Antisense strand to SEQ ID NO: 551955
ugcagaaauacauacuaga

SEQ ID NO: 551957 - RNA, 19 nt, Artificial Sequence
  Description of Artificial Sequence: Synthetic oligonucleotide
  Sense strand starting at position 3112 of SEQ ID NO: 318299
guauguauuucugcaagau

SEQ ID NO: 551958 - RNA, 19 nt, Artificial Sequence
  Description of Artificial Sequence: Synthetic oligonucleotide
  Antisense strand to SEQ ID NO: 551957
aucuugcagaaauacauac

SEQ ID NO: 551959 - RNA, 19 nt, Artificial Sequence
  Description of Artificial Sequence: Synthetic oligonucleotide
  Sense strand starting at position 3162 of SEQ ID NO: 318299
agauccuuccaaggaucuu

SEQ ID NO: 551960 - RNA, 19 nt, Artificial Sequence
  Description of Artificial Sequence: Synthetic oligonucleotide
  Antisense strand to SEQ ID NO: 551959
aagauccuuggaaggaucu

SEQ ID NO: 551961 - RNA, 19 nt, Artificial Sequence
  Description of Artificial Sequence: Synthetic oligonucleotide
  Sense strand starting at position 3172 of SEQ ID NO: 318299
aaggaucuuccaggcuaga

SEQ ID NO: 551962 - RNA, 19 nt, Artificial Sequence
  Description of Artificial Sequence: Synthetic oligonucleotide
  Antisense strand to SEQ ID NO: 551961
ucuagccuggaagauccuu

SEQ ID NO: 551963 - RNA, 19 nt, Artificial Sequence
  Description of Artificial Sequence: Synthetic oligonucleotide
  Sense strand starting at position 3182 of SEQ ID NO: 318299
caggcuagauccuuaugga

SEQ ID NO: 551964 - RNA, 19 nt, Artificial Sequence
  Description of Artificial Sequence: Synthetic oligonucleotide
  Antisense strand to SEQ ID NO: 551963
uccauaaggaucuagccug

SEQ ID NO: 551965 - RNA, 19 nt, Artificial Sequence
  Description of Artificial Sequence: Synthetic oligonucleotide
  Sense strand starting at position 3198 of SEQ ID NO: 318299
ggagcacuuugcucaaagu

SEQ ID NO: 551966 - RNA, 19 nt, Artificial Sequence
  Description of Artificial Sequence: Synthetic oligonucleotide
  Antisense strand to SEQ ID NO: 551965
acuuugagcaaagugcucc

SEQ ID NO: 551967 - RNA, 19 nt, Artificial Sequence
  Description of Artificial Sequence: Synthetic oligonucleotide
  Sense strand starting at position 3199 of SEQ ID NO: 318299
gagcacuuugcucaaagua

SEQ ID NO: 551968 - RNA, 19 nt, Artificial Sequence
  Description of Artificial Sequence: Synthetic oligonucleotide
  Antisense strand to SEQ ID NO: 551967
uacuuugagcaaagugcuc

SEQ ID NO: 551969 - RNA, 19 nt, Artificial Sequence
  Description of Artificial Sequence: Synthetic oligonucleotide
  Sense strand starting at position 3223 of SEQ ID NO: 318299
gcccauauccaggauccuu

SEQ ID NO: 551970 - RNA, 19 nt, Artificial Sequence
  Description of Artificial Sequence: Synthetic oligonucleotide
  Antisense strand to SEQ ID NO: 551969
aaggauccuggauaugggc

SEQ ID NO: 551971 - RNA, 19 nt, Artificial Sequence
  Description of Artificial Sequence: Synthetic oligonucleotide
  Sense strand starting at position 3276 of SEQ ID NO: 318299
uuuauauuaugugugcuca

SEQ ID NO: 551972 - RNA, 19 nt, Artificial Sequence
  Description of Artificial Sequence: Synthetic oligonucleotide
  Antisense strand to SEQ ID NO: 551971
ugagcacacauaauauaaa

SEQ ID NO: 551973 - RNA, 19 nt, Artificial Sequence
  Description of Artificial Sequence: Synthetic oligonucleotide
  Sense strand starting at position 3284 of SEQ ID NO: 318299
augugugcucaacauacuu

SEQ ID NO: 551974 - RNA, 19 nt, Artificial Sequence
  Description of Artificial Sequence: Synthetic oligonucleotide
  Antisense strand to SEQ ID NO: 551973
aaguauguugagcacacau

SEQ ID NO: 551975 - RNA, 19 nt, Artificial Sequence
  Description of Artificial Sequence: Synthetic oligonucleotide
  Sense strand starting at position 3322 of SEQ ID NO: 318299
gcgccuuugagaugaaaca

SEQ ID NO: 551976 - RNA, 19 nt, Artificial Sequence
  Description of Artificial Sequence: Synthetic oligonucleotide
  Antisense strand to SEQ ID NO: 551975
uguuucaucucaaaggcgc

SEQ ID NO: 551977 - RNA, 19 nt, Artificial Sequence
  Description of Artificial Sequence: Synthetic oligonucleotide
  Sense strand starting at position 3462 of SEQ ID NO: 318299
ggagaacucaggugguauc

SEQ ID NO: 551978 - RNA, 19 nt, Artificial Sequence
  Description of Artificial Sequence: Synthetic oligonucleotide
  Antisense strand to SEQ ID NO: 551977
gauaccaccugaguucucc

SEQ ID NO: 551979 - RNA, 19 nt, Artificial Sequence
  Description of Artificial Sequence: Synthetic oligonucleotide
  Sense strand starting at position 3502 of SEQ ID NO: 318299
aaucuacauguuggaugau

SEQ ID NO: 551980 - RNA, 19 nt, Artificial Sequence
  Description of Artificial Sequence: Synthetic oligonucleotide
  Antisense strand to SEQ ID NO: 551979
aucauccaacauguagauu

SEQ ID NO: 551981 - RNA, 19 nt, Artificial Sequence
  Description of Artificial Sequence: Synthetic oligonucleotide
  Sense strand starting at position 3503 of SEQ ID NO: 318299
aucuacauguuggaugaua

SEQ ID NO: 551982 - RNA, 19 nt, Artificial Sequence
  Description of Artificial Sequence: Synthetic oligonucleotide
  Antisense strand to SEQ ID NO: 551981
uaucauccaacauguagau

SEQ ID NO: 551983 - RNA, 19 nt, Artificial Sequence
  Description of Artificial Sequence: Synthetic oligonucleotide
  Sense strand starting at position 3505 of SEQ ID NO: 318299
cuacauguuggaugauaga

SEQ ID NO: 551984 - RNA, 19 nt, Artificial Sequence
  Description of Artificial Sequence: Synthetic oligonucleotide
  Antisense strand to SEQ ID NO: 551983
ucuaucauccaacauguag

SEQ ID NO: 551985 - RNA, 19 nt, Artificial Sequence
  Description of Artificial Sequence: Synthetic oligonucleotide
  Sense strand starting at position 3537 of SEQ ID NO: 318299
auuccaccgguuuagaaua

SEQ ID NO: 551986 - RNA, 19 nt, Artificial Sequence
  Description of Artificial Sequence: Synthetic oligonucleotide
  Antisense strand to SEQ ID NO: 551985
uauucuaaaccgguggaau

SEQ ID NO: 551987 - RNA, 19 nt, Artificial Sequence
  Description of Artificial Sequence: Synthetic oligonucleotide
  Sense strand starting at position 3620 of SEQ ID NO: 318299
ggcccaacugcggaaguau

SEQ ID NO: 551988 - RNA, 19 nt, Artificial Sequence
  Description of Artificial Sequence: Synthetic oligonucleotide
  Antisense strand to SEQ ID NO: 551987
auacuuccgcaguugggcc

SEQ ID NO: 551989 - RNA, 19 nt, Artificial Sequence
  Description of Artificial Sequence: Synthetic oligonucleotide
  Sense strand starting at position 3667 of SEQ ID NO: 318299
aauaaugugauguggguau

SEQ ID NO: 551990 - RNA, 19 nt, Artificial Sequence
  Description of Artificial Sequence: Synthetic oligonucleotide
  Antisense strand to SEQ ID NO: 551989
auacccacaucacauuauu

SEQ ID NO: 551991 - RNA, 19 nt, Artificial Sequence
  Description of Artificial Sequence: Synthetic oligonucleotide
  Sense strand starting at position 3669 of SEQ ID NO: 318299
uaaugugauguggguauua

SEQ ID NO: 551992 - RNA, 19 nt, Artificial Sequence
  Description of Artificial Sequence: Synthetic oligonucleotide
  Antisense strand to SEQ ID NO: 551991
uaauacccacaucacauua

SEQ ID NO: 551993 - RNA, 19 nt, Artificial Sequence
  Description of Artificial Sequence: Synthetic oligonucleotide
  Sense strand starting at position 3671 of SEQ ID NO: 318299
augugauguggguauuaau

SEQ ID NO: 551994 - RNA, 19 nt, Artificial Sequence
  Description of Artificial Sequence: Synthetic oligonucleotide
  Antisense strand to SEQ ID NO: 551993
auuaauacccacaucacau

SEQ ID NO: 551995 - RNA, 19 nt, Artificial Sequence
  Description of Artificial Sequence: Synthetic oligonucleotide
  Sense strand starting at position 3819 of SEQ ID NO: 318299
cguauauacuagcuguuau

SEQ ID NO: 551996 - RNA, 19 nt, Artificial Sequence
  Description of Artificial Sequence: Synthetic oligonucleotide
  Antisense strand to SEQ ID NO: 551995
auaacagcuaguauauacg

SEQ ID NO: 551997 - RNA, 19 nt, Artificial Sequence
  Description of Artificial Sequence: Synthetic oligonucleotide
  Sense strand starting at position 36 of SEQ ID NO: 318300
agcuaaaucugguacuucu

SEQ ID NO: 551998 - RNA, 19 nt, Artificial Sequence
  Description of Artificial Sequence: Synthetic oligonucleotide
  Antisense strand to SEQ ID NO: 551997
agaaguaccagauuuagcu

SEQ ID NO: 551999 - RNA, 19 nt, Artificial Sequence
  Description of Artificial Sequence: Synthetic oligonucleotide
  Sense strand starting at position 43 of SEQ ID NO: 318300
ucugguacuucucauaugu

SEQ ID NO: 552000 - RNA, 19 nt, Artificial Sequence
  Description of Artificial Sequence: Synthetic oligonucleotide
  Antisense strand to SEQ ID NO: 551999
acauaugagaaguaccaga

SEQ ID NO: 552001 - RNA, 19 nt, Artificial Sequence
  Description of Artificial Sequence: Synthetic oligonucleotide
  Sense strand starting at position 133 of SEQ ID NO: 318300
gguagcaaggcauaguauu

SEQ ID NO: 552002 - RNA, 19 nt, Artificial Sequence
  Description of Artificial Sequence: Synthetic oligonucleotide
  Antisense strand to SEQ ID NO: 552001
aauacuaugccuugcuacc

SEQ ID NO: 552003 - RNA, 19 nt, Artificial Sequence
  Description of Artificial Sequence: Synthetic oligonucleotide
  Sense strand starting at position 368 of SEQ ID NO: 318300
gcugcauguuuauguaaac

SEQ ID NO: 552004 - RNA, 19 nt, Artificial Sequence
  Description of Artificial Sequence: Synthetic oligonucleotide
  Antisense strand to SEQ ID NO: 552003
guuuacauaaacaugcagc

SEQ ID NO: 552005 - RNA, 19 nt, Artificial Sequence
  Description of Artificial Sequence: Synthetic oligonucleotide
  Sense strand starting at position 603 of SEQ ID NO: 318300
uggcgugguccucgaaaca

SEQ ID NO: 552006 - RNA, 19 nt, Artificial Sequence
  Description of Artificial Sequence: Synthetic oligonucleotide
  Antisense strand to SEQ ID NO: 552005
uguuucgaggaccacgcca

SEQ ID NO: 552007 - RNA, 19 nt, Artificial Sequence
  Description of Artificial Sequence: Synthetic oligonucleotide
  Sense strand starting at position 873 of SEQ ID NO: 318300
aacagaaagucccgucaaa

SEQ ID NO: 552008 - RNA, 19 nt, Artificial Sequence
  Description of Artificial Sequence: Synthetic oligonucleotide
  Antisense strand to SEQ ID NO: 552007
uuugacgggacuuucuguu

SEQ ID NO: 552009 - RNA, 19 nt, Artificial Sequence
  Description of Artificial Sequence: Synthetic oligonucleotide
  Sense strand starting at position 939 of SEQ ID NO: 318300
cccacauucggugguguca

SEQ ID NO: 552010 - RNA, 19 nt, Artificial Sequence
  Description of Artificial Sequence: Synthetic oligonucleotide
  Antisense strand to SEQ ID NO: 552009
ugacaccaccgaauguggg

SEQ ID NO: 552011 - RNA, 19 nt, Artificial Sequence
  Description of Artificial Sequence: Synthetic oligonucleotide
  Sense strand starting at position 1099 of SEQ ID NO: 318300
gcgggaauuucccgauagg

SEQ ID NO: 552012 - RNA, 19 nt, Artificial Sequence
  Description of Artificial Sequence: Synthetic oligonucleotide
  Antisense strand to SEQ ID NO: 552011
ccuaucgggaaauucccgc

SEQ ID NO: 552013 - RNA, 19 nt, Artificial Sequence
  Description of Artificial Sequence: Synthetic oligonucleotide
  Sense strand starting at position 2047 of SEQ ID NO: 318300
uuugcauucccagauguga

SEQ ID NO: 552014 - RNA, 19 nt, Artificial Sequence
  Description of Artificial Sequence: Synthetic oligonucleotide
  Antisense strand to SEQ ID NO: 552013
ucacaucugggaaugcaaa

SEQ ID NO: 552015 - RNA, 19 nt, Artificial Sequence
  Description of Artificial Sequence: Synthetic oligonucleotide
  Sense strand starting at position 2589 of SEQ ID NO: 318300
gaauuauagucuuguggca

SEQ ID NO: 552016 - RNA, 19 nt, Artificial Sequence
  Description of Artificial Sequence: Synthetic oligonucleotide
  Antisense strand to SEQ ID NO: 552015
ugccacaagacuauaauuc

SEQ ID NO: 552017 - RNA, 19 nt, Artificial Sequence
  Description of Artificial Sequence: Synthetic oligonucleotide
  Sense strand starting at position 2591 of SEQ ID NO: 318300
auuauagucuuguggcaaa

SEQ ID NO: 552018 - RNA, 19 nt, Artificial Sequence
  Description of Artificial Sequence: Synthetic oligonucleotide
  Antisense strand to SEQ ID NO: 552017
uuugccacaagacuauaau

SEQ ID NO: 552019 - RNA, 19 nt, Artificial Sequence
  Description of Artificial Sequence: Synthetic oligonucleotide
  Sense strand starting at position 3218 of SEQ ID NO: 318300
auguacagugccuggaaua

SEQ ID NO: 552020 - RNA, 19 nt, Artificial Sequence
  Description of Artificial Sequence: Synthetic oligonucleotide
  Antisense strand to SEQ ID NO: 552019
uauuccaggcacuguacau

SEQ ID NO: 552021 - RNA, 19 nt, Artificial Sequence
  Description of Artificial Sequence: Synthetic oligonucleotide
  Sense strand starting at position 3258 of SEQ ID NO: 318300
ggcugaaugcacgaauggu

SEQ ID NO: 552022 - RNA, 19 nt, Artificial Sequence
  Description of Artificial Sequence: Synthetic oligonucleotide
  Antisense strand to SEQ ID NO: 552021
accauucgugcauucagcc

SEQ ID NO: 552023 - RNA, 19 nt, Artificial Sequence
  Description of Artificial Sequence: Synthetic oligonucleotide
  Sense strand starting at position 3326 of SEQ ID NO: 318300
agcauaagugcccaagagu

SEQ ID NO: 552024 - RNA, 19 nt, Artificial Sequence
  Description of Artificial Sequence: Synthetic oligonucleotide
  Antisense strand to SEQ ID NO: 552023
acucuugggcacuuaugcu

SEQ ID NO: 552025 - RNA, 19 nt, Artificial Sequence
  Description of Artificial Sequence: Synthetic oligonucleotide
  Sense strand starting at position 3333 of SEQ ID NO: 318300
gugcccaagaguugccaaa

SEQ ID NO: 552026 - RNA, 19 nt, Artificial Sequence
  Description of Artificial Sequence: Synthetic oligonucleotide
  Antisense strand to SEQ ID NO: 552025
uuuggcaacucuugggcac

SEQ ID NO: 552027 - RNA, 19 nt, Artificial Sequence
  Description of Artificial Sequence: Synthetic oligonucleotide
  Sense strand starting at position 3335 of SEQ ID NO: 318300
gcccaagaguugccaaacu

SEQ ID NO: 552028 - RNA, 19 nt, Artificial Sequence
  Description of Artificial Sequence: Synthetic oligonucleotide
  Antisense strand to SEQ ID NO: 552027
aguuuggcaacucuugggc

SEQ ID NO: 552029 - RNA, 19 nt, Artificial Sequence
  Description of Artificial Sequence: Synthetic oligonucleotide
  Sense strand starting at position 3423 of SEQ ID NO: 318300
gacugccaucccugaagga

SEQ ID NO: 552030 - RNA, 19 nt, Artificial Sequence
  Description of Artificial Sequence: Synthetic oligonucleotide
  Antisense strand to SEQ ID NO: 552029
uccuucagggauggcaguc

SEQ ID NO: 552031 - RNA, 19 nt, Artificial Sequence
  Description of Artificial Sequence: Synthetic oligonucleotide
  Sense strand starting at position 3557 of SEQ ID NO: 318300
ggaaacauucugcauuauu

SEQ ID NO: 552032 - RNA, 19 nt, Artificial Sequence
  Description of Artificial Sequence: Synthetic oligonucleotide
  Antisense strand to SEQ ID NO: 552031
aauaaugcagaauguuucc

SEQ ID NO: 552033 - RNA, 19 nt, Artificial Sequence
  Description of Artificial Sequence: Synthetic oligonucleotide
  Sense strand starting at position 3566 of SEQ ID NO: 318300
cugcauuauugagauccac

SEQ ID NO: 552034 - RNA, 19 nt, Artificial Sequence
  Description of Artificial Sequence: Synthetic oligonucleotide
  Antisense strand to SEQ ID NO: 552033
guggaucucaauaaugcag

SEQ ID NO: 552035 - RNA, 19 nt, Artificial Sequence
  Description of Artificial Sequence: Synthetic oligonucleotide
  Sense strand starting at position 3582 of SEQ ID NO: 318300
cacugcagccuuugaugua

SEQ ID NO: 552036 - RNA, 19 nt, Artificial Sequence
  Description of Artificial Sequence: Synthetic oligonucleotide
  Antisense strand to SEQ ID NO: 552035
uacaucaaaggcugcagug

SEQ ID NO: 552037 - RNA, 19 nt, Artificial Sequence
  Description of Artificial Sequence: Synthetic oligonucleotide
  Sense strand starting at position 3585 of SEQ ID NO: 318300
ugcagccuuugauguagua

SEQ ID NO: 552038 - RNA, 19 nt, Artificial Sequence
  Description of Artificial Sequence: Synthetic oligonucleotide
  Antisense strand to SEQ ID NO: 552037
uacuacaucaaaggcugca

SEQ ID NO: 552039 - RNA, 19 nt, Artificial Sequence
  Description of Artificial Sequence: Synthetic oligonucleotide
  Sense strand starting at position 3636 of SEQ ID NO: 318300
ucaguccucuccugaaaug

SEQ ID NO: 552040 - RNA, 19 nt, Artificial Sequence
  Description of Artificial Sequence: Synthetic oligonucleotide
  Antisense strand to SEQ ID NO: 552039
cauuucaggagaggacuga

SEQ ID NO: 552041 - RNA, 19 nt, Artificial Sequence
  Description of Artificial Sequence: Synthetic oligonucleotide
  Sense strand starting at position 3657 of SEQ ID NO: 318300
uccuguuuaggguaggaca

SEQ ID NO: 552042 - RNA, 19 nt, Artificial Sequence
  Description of Artificial Sequence: Synthetic oligonucleotide
  Antisense strand to SEQ ID NO: 552041
uguccuacccuaaacagga

SEQ ID NO: 552043 - RNA, 19 nt, Artificial Sequence
  Description of Artificial Sequence: Synthetic oligonucleotide
  Sense strand starting at position 3686 of SEQ ID NO: 318300
cuuuguccuuccuggauau

SEQ ID NO: 552044 - RNA, 19 nt, Artificial Sequence
  Description of Artificial Sequence: Synthetic oligonucleotide
  Antisense strand to SEQ ID NO: 552043
auauccaggaaggacaaag

SEQ ID NO: 552045 - RNA, 19 nt, Artificial Sequence
  Description of Artificial Sequence: Synthetic oligonucleotide
  Sense strand starting at position 3688 of SEQ ID NO: 318300
uuguccuuccuggauaugu

SEQ ID NO: 552046 - RNA, 19 nt, Artificial Sequence
  Description of Artificial Sequence: Synthetic oligonucleotide
  Antisense strand to SEQ ID NO: 552045
acauauccaggaaggacaa

SEQ ID NO: 552047 - RNA, 19 nt, Artificial Sequence
  Description of Artificial Sequence: Synthetic oligonucleotide
  Sense strand starting at position 3698 of SEQ ID NO: 318300
uggauauguugcuuugugu

SEQ ID NO: 552048 - RNA, 19 nt, Artificial Sequence
  Description of Artificial Sequence: Synthetic oligonucleotide
  Antisense strand to SEQ ID NO: 552047
acacaaagcaacauaucca

SEQ ID NO: 552049 - RNA, 19 nt, Artificial Sequence
  Description of Artificial Sequence: Synthetic oligonucleotide
  Sense strand starting at position 3761 of SEQ ID NO: 318300
cacugagaaucaugaguau

SEQ ID NO: 552050 - RNA, 19 nt, Artificial Sequence
  Description of Artificial Sequence: Synthetic oligonucleotide
  Antisense strand to SEQ ID NO: 552049
auacucaugauucucagug

SEQ ID NO: 552051 - RNA, 19 nt, Artificial Sequence
  Description of Artificial Sequence: Synthetic oligonucleotide
  Sense strand starting at position 3795 of SEQ ID NO: 318300
gugcuuuaauuucucugaa

SEQ ID NO: 552052 - RNA, 19 nt, Artificial Sequence
  Description of Artificial Sequence: Synthetic oligonucleotide
  Antisense strand to SEQ ID NO: 552051
uucagagaaauuaaagcac

SEQ ID NO: 552053 - RNA, 19 nt, Artificial Sequence
  Description of Artificial Sequence: Synthetic oligonucleotide
  Sense strand starting at position 3850 of SEQ ID NO: 318300
auaguuaucuagccacaag

SEQ ID NO: 552054 - RNA, 19 nt, Artificial Sequence
  Description of Artificial Sequence: Synthetic oligonucleotide
  Antisense strand to SEQ ID NO: 552053
cuuguggcuagauaacuau

SEQ ID NO: 552055 - RNA, 19 nt, Artificial Sequence
  Description of Artificial Sequence: Synthetic oligonucleotide
  Sense strand starting at position 3948 of SEQ ID NO: 318300
augagcucuuaguuuacua

SEQ ID NO: 552056 - RNA, 19 nt, Artificial Sequence
  Description of Artificial Sequence: Synthetic oligonucleotide
  Antisense strand to SEQ ID NO: 552055
uaguaaacuaagagcucau

SEQ ID NO: 552057 - RNA, 19 nt, Artificial Sequence
  Description of Artificial Sequence: Synthetic oligonucleotide
  Sense strand starting at position 3952 of SEQ ID NO: 318300
gcucuuaguuuacuacuca

SEQ ID NO: 552058 - RNA, 19 nt, Artificial Sequence
  Description of Artificial Sequence: Synthetic oligonucleotide
  Antisense strand to SEQ ID NO: 552057
ugaguaguaaacuaagagc

SEQ ID NO: 552059 - RNA, 19 nt, Artificial Sequence
  Description of Artificial Sequence: Synthetic oligonucleotide
  Sense strand starting at position 2 of SEQ ID NO: 318301
gaaccuggagucuguagaa

SEQ ID NO: 552060 - RNA, 19 nt, Artificial Sequence
  Description of Artificial Sequence: Synthetic oligonucleotide
  Antisense strand to SEQ ID NO: 552059
uucuacagacuccagguuc

SEQ ID NO: 552061 - RNA, 19 nt, Artificial Sequence
  Description of Artificial Sequence: Synthetic oligonucleotide
  Sense strand starting at position 63 of SEQ ID NO: 318301
ccgcuaagaucagugguau

SEQ ID NO: 552062 - RNA, 19 nt, Artificial Sequence
  Description of Artificial Sequence: Synthetic oligonucleotide
  Antisense strand to SEQ ID NO: 552061
auaccacugaucuuagcgg

SEQ ID NO: 552063 - RNA, 19 nt, Artificial Sequence
  Description of Artificial Sequence: Synthetic oligonucleotide
  Sense strand starting at position 64 of SEQ ID NO: 318301
cgcuaagaucagugguaug

SEQ ID NO: 552064 - RNA, 19 nt, Artificial Sequence
  Description of Artificial Sequence: Synthetic oligonucleotide
  Antisense strand to SEQ ID NO: 552063
cauaccacugaucuuagcg

SEQ ID NO: 552065 - RNA, 19 nt, Artificial Sequence
  Description of Artificial Sequence: Synthetic oligonucleotide
  Sense strand starting at position 69 of SEQ ID NO: 318301
agaucagugguaugcacuu

SEQ ID NO: 552066 - RNA, 19 nt, Artificial Sequence
  Description of Artificial Sequence: Synthetic oligonucleotide
  Antisense strand to SEQ ID NO: 552065
aagugcauaccacugaucu

SEQ ID NO: 552067 - RNA, 19 nt, Artificial Sequence
  Description of Artificial Sequence: Synthetic oligonucleotide
  Sense strand starting at position 242 of SEQ ID NO: 318301
aggcuaggauuugaagaga

SEQ ID NO: 552068 - RNA, 19 nt, Artificial Sequence
  Description of Artificial Sequence: Synthetic oligonucleotide
  Antisense strand to SEQ ID NO: 552067
ucucuucaaauccuagccu

SEQ ID NO: 552069 - RNA, 19 nt, Artificial Sequence
  Description of Artificial Sequence: Synthetic oligonucleotide
  Sense strand starting at position 268 of SEQ ID NO: 318301
agaucuaaggccuaacuuu

SEQ ID NO: 552070 - RNA, 19 nt, Artificial Sequence
  Description of Artificial Sequence: Synthetic oligonucleotide
  Antisense strand to SEQ ID NO: 552069
aaaguuaggccuuagaucu

SEQ ID NO: 552071 - RNA, 19 nt, Artificial Sequence
  Description of Artificial Sequence: Synthetic oligonucleotide
  Sense strand starting at position 276 of SEQ ID NO: 318301
ggccuaacuuuguuacuuu

SEQ ID NO: 552072 - RNA, 19 nt, Artificial Sequence
  Description of Artificial Sequence: Synthetic oligonucleotide
  Antisense strand to SEQ ID NO: 552071
aaaguaacaaaguuaggcc

SEQ ID NO: 552073 - RNA, 19 nt, Artificial Sequence
  Description of Artificial Sequence: Synthetic oligonucleotide
  Sense strand starting at position 294 of SEQ ID NO: 318301
uuagcugugggauacuaaa

SEQ ID NO: 552074 - RNA, 19 nt, Artificial Sequence
  Description of Artificial Sequence: Synthetic oligonucleotide
  Antisense strand to SEQ ID NO: 552073
uuuaguaucccacagcuaa

SEQ ID NO: 552075 - RNA, 19 nt, Artificial Sequence
  Description of Artificial Sequence: Synthetic oligonucleotide
  Sense strand starting at position 321 of SEQ ID NO: 318301
uucugaauuccgggauccu

SEQ ID NO: 552076 - RNA, 19 nt, Artificial Sequence
  Description of Artificial Sequence: Synthetic oligonucleotide
  Antisense strand to SEQ ID NO: 552075
aggaucccggaauucagaa

SEQ ID NO: 552077 - RNA, 19 nt, Artificial Sequence
  Description of Artificial Sequence: Synthetic oligonucleotide
  Sense strand starting at position 322 of SEQ ID NO: 318301
ucugaauuccgggauccuu

SEQ ID NO: 552078 - RNA, 19 nt, Artificial Sequence
  Description of Artificial Sequence: Synthetic oligonucleotide
  Antisense strand to SEQ ID NO: 552077
aaggaucccggaauucaga

SEQ ID NO: 552079 - RNA, 19 nt, Artificial Sequence
  Description of Artificial Sequence: Synthetic oligonucleotide
  Sense strand starting at position 331 of SEQ ID NO: 318301
cgggauccuucugucugua

SEQ ID NO: 552080 - RNA, 19 nt, Artificial Sequence
  Description of Artificial Sequence: Synthetic oligonucleotide
  Antisense strand to SEQ ID NO: 552079
uacagacagaaggaucccg

SEQ ID NO: 552081 - RNA, 19 nt, Artificial Sequence
  Description of Artificial Sequence: Synthetic oligonucleotide
  Sense strand starting at position 333 of SEQ ID NO: 318301
ggauccuucugucuguagu

SEQ ID NO: 552082 - RNA, 19 nt, Artificial Sequence
  Description of Artificial Sequence: Synthetic oligonucleotide
  Antisense strand to SEQ ID NO: 552081
acuacagacagaaggaucc

SEQ ID NO: 552083 - RNA, 19 nt, Artificial Sequence
  Description of Artificial Sequence: Synthetic oligonucleotide
  Sense strand starting at position 353 of SEQ ID NO: 318301
gggauauuauaauaucuac

SEQ ID NO: 552084 - RNA, 19 nt, Artificial Sequence
  Description of Artificial Sequence: Synthetic oligonucleotide
  Antisense strand to SEQ ID NO: 552083
guagauauuauaauauccc

SEQ ID NO: 552085 - RNA, 19 nt, Artificial Sequence
  Description of Artificial Sequence: Synthetic oligonucleotide
  Sense strand starting at position 385 of SEQ ID NO: 318301
uugaaaggcuuagauuaca

SEQ ID NO: 552086 - RNA, 19 nt, Artificial Sequence
  Description of Artificial Sequence: Synthetic oligonucleotide
  Antisense strand to SEQ ID NO: 552085
uguaaucuaagccuuucaa

SEQ ID NO: 552087 - RNA, 19 nt, Artificial Sequence
  Description of Artificial Sequence: Synthetic oligonucleotide
  Sense strand starting at position 397 of SEQ ID NO: 318301
gauuacagaucuugaaugu

SEQ ID NO: 552088 - RNA, 19 nt, Artificial Sequence
  Description of Artificial Sequence: Synthetic oligonucleotide
  Antisense strand to SEQ ID NO: 552087
acauucaagaucuguaauc

SEQ ID NO: 552089 - RNA, 19 nt, Artificial Sequence
  Description of Artificial Sequence: Synthetic oligonucleotide
  Sense strand starting at position 403 of SEQ ID NO: 318301
agaucuugaaugugagggu

SEQ ID NO: 552090 - RNA, 19 nt, Artificial Sequence
  Description of Artificial Sequence: Synthetic oligonucleotide
  Antisense strand to SEQ ID NO: 552089
acccucacauucaagaucu

SEQ ID NO: 552091 - RNA, 19 nt, Artificial Sequence
  Description of Artificial Sequence: Synthetic oligonucleotide
  Sense strand starting at position 404 of SEQ ID NO: 318301
gaucuugaaugugagggua

SEQ ID NO: 552092 - RNA, 19 nt, Artificial Sequence
  Description of Artificial Sequence: Synthetic oligonucleotide
  Antisense strand to SEQ ID NO: 552091
uacccucacauucaagauc

SEQ ID NO: 552093 - RNA, 19 nt, Artificial Sequence
  Description of Artificial Sequence: Synthetic oligonucleotide
  Sense strand starting at position 522 of SEQ ID NO: 318301
cagaguacgccugaagaca

SEQ ID NO: 552094 - RNA, 19 nt, Artificial Sequence
  Description of Artificial Sequence: Synthetic oligonucleotide
  Antisense strand to SEQ ID NO: 552093
ugucuucaggcguacucug

SEQ ID NO: 552095 - RNA, 19 nt, Artificial Sequence
  Description of Artificial Sequence: Synthetic oligonucleotide
  Sense strand starting at position 883 of SEQ ID NO: 318301
gcgugauucuccuucucaa

SEQ ID NO: 552096 - RNA, 19 nt, Artificial Sequence
  Description of Artificial Sequence: Synthetic oligonucleotide
  Antisense strand to SEQ ID NO: 552095
uugagaaggagaaucacgc

SEQ ID NO: 552097 - RNA, 19 nt, Artificial Sequence
  Description of Artificial Sequence: Synthetic oligonucleotide
  Sense strand starting at position 1079 of SEQ ID NO: 318301
aaauuaccugggcgaaaug

SEQ ID NO: 552098 - RNA, 19 nt, Artificial Sequence
  Description of Artificial Sequence: Synthetic oligonucleotide
  Antisense strand to SEQ ID NO: 552097
cauuucgcccagguaauuu

SEQ ID NO: 552099 - RNA, 19 nt, Artificial Sequence
  Description of Artificial Sequence: Synthetic oligonucleotide
  Sense strand starting at position 1260 of SEQ ID NO: 318301
aacugaaaugggcgguuaa

SEQ ID NO: 552100 - RNA, 19 nt, Artificial Sequence
  Description of Artificial Sequence: Synthetic oligonucleotide
  Antisense strand to SEQ ID NO: 552099
uuaaccgcccauuucaguu

SEQ ID NO: 552101 - RNA, 19 nt, Artificial Sequence
  Description of Artificial Sequence: Synthetic oligonucleotide
  Sense strand starting at position 1261 of SEQ ID NO: 318301
acugaaaugggcgguuaaa

SEQ ID NO: 552102 - RNA, 19 nt, Artificial Sequence
  Description of Artificial Sequence: Synthetic oligonucleotide
  Antisense strand to SEQ ID NO: 552101
uuuaaccgcccauuucagu

SEQ ID NO: 552103 - RNA, 19 nt, Artificial Sequence
  Description of Artificial Sequence: Synthetic oligonucleotide
  Sense strand starting at position 1292 of SEQ ID NO: 318301
augagauggugaguuuaac

SEQ ID NO: 552104 - RNA, 19 nt, Artificial Sequence
  Description of Artificial Sequence: Synthetic oligonucleotide
  Antisense strand to SEQ ID NO: 552103
guuaaacucaccaucucau

SEQ ID NO: 552105 - RNA, 19 nt, Artificial Sequence
  Description of Artificial Sequence: Synthetic oligonucleotide
  Sense strand starting at position 1300 of SEQ ID NO: 318301
gugaguuuaacgcaccacu

SEQ ID NO: 552106 - RNA, 19 nt, Artificial Sequence
  Description of Artificial Sequence: Synthetic oligonucleotide
  Antisense strand to SEQ ID NO: 552105
aguggugcguuaaacucac

SEQ ID NO: 552107 - RNA, 19 nt, Artificial Sequence
  Description of Artificial Sequence: Synthetic oligonucleotide
  Sense strand starting at position 1328 of SEQ ID NO: 318301
gguggugcugcauguuaaa

SEQ ID NO: 552108 - RNA, 19 nt, Artificial Sequence
  Description of Artificial Sequence: Synthetic oligonucleotide
  Antisense strand to SEQ ID NO: 552107
uuuaacaugcagcaccacc

SEQ ID NO: 552109 - RNA, 19 nt, Artificial Sequence
  Description of Artificial Sequence: Synthetic oligonucleotide
  Sense strand starting at position 1571 of SEQ ID NO: 318301
accgaauuguucugcaacu

SEQ ID NO: 552110 - RNA, 19 nt, Artificial Sequence
  Description of Artificial Sequence: Synthetic oligonucleotide
  Antisense strand to SEQ ID NO: 552109
aguugcagaacaauucggu

SEQ ID NO: 552111 - RNA, 19 nt, Artificial Sequence
  Description of Artificial Sequence: Synthetic oligonucleotide
  Sense strand starting at position 1572 of SEQ ID NO: 318301
ccgaauuguucugcaacua

SEQ ID NO: 552112 - RNA, 19 nt, Artificial Sequence
  Description of Artificial Sequence: Synthetic oligonucleotide
  Antisense strand to SEQ ID NO: 552111
uaguugcagaacaauucgg

SEQ ID NO: 552113 - RNA, 19 nt, Artificial Sequence
  Description of Artificial Sequence: Synthetic oligonucleotide
  Sense strand starting at position 1573 of SEQ ID NO: 318301
cgaauuguucugcaacuac

SEQ ID NO: 552114 - RNA, 19 nt, Artificial Sequence
  Description of Artificial Sequence: Synthetic oligonucleotide
  Antisense strand to SEQ ID NO: 552113
guaguugcagaacaauucg

SEQ ID NO: 552115 - RNA, 19 nt, Artificial Sequence
  Description of Artificial Sequence: Synthetic oligonucleotide
  Sense strand starting at position 1607 of SEQ ID NO: 318301
uuuguaguugcugaacaaa

SEQ ID NO: 552116 - RNA, 19 nt, Artificial Sequence
  Description of Artificial Sequence: Synthetic oligonucleotide
  Antisense strand to SEQ ID NO: 552115
uuuguucagcaacuacaaa

SEQ ID NO: 552117 - RNA, 19 nt, Artificial Sequence
  Description of Artificial Sequence: Synthetic oligonucleotide
  Sense strand starting at position 1661 of SEQ ID NO: 318301
aggcuucggcggaagugua

SEQ ID NO: 552118 - RNA, 19 nt, Artificial Sequence
  Description of Artificial Sequence: Synthetic oligonucleotide
  Antisense strand to SEQ ID NO: 552117
uacacuuccgccgaagccu

SEQ ID NO: 552119 - RNA, 19 nt, Artificial Sequence
  Description of Artificial Sequence: Synthetic oligonucleotide
  Sense strand starting at position 1669 of SEQ ID NO: 318301
gcggaaguguaaagucaag

SEQ ID NO: 552120 - RNA, 19 nt, Artificial Sequence
  Description of Artificial Sequence: Synthetic oligonucleotide
  Antisense strand to SEQ ID NO: 552119
cuugacuuuacacuuccgc

SEQ ID NO: 552121 - RNA, 19 nt, Artificial Sequence
  Description of Artificial Sequence: Synthetic oligonucleotide
  Sense strand starting at position 2527 of SEQ ID NO: 318301
uccuaagucuugcaguagu

SEQ ID NO: 552122 - RNA, 19 nt, Artificial Sequence
  Description of Artificial Sequence: Synthetic oligonucleotide
  Antisense strand to SEQ ID NO: 552121
acuacugcaagacuuagga

SEQ ID NO: 552123 - RNA, 19 nt, Artificial Sequence
  Description of Artificial Sequence: Synthetic oligonucleotide
  Sense strand starting at position 2611 of SEQ ID NO: 318301
cuggguuugccuggaccaa

SEQ ID NO: 552124 - RNA, 19 nt, Artificial Sequence
  Description of Artificial Sequence: Synthetic oligonucleotide
  Antisense strand to SEQ ID NO: 552123
uugguccaggcaaacccag

SEQ ID NO: 552125 - RNA, 19 nt, Artificial Sequence
  Description of Artificial Sequence: Synthetic oligonucleotide
  Sense strand starting at position 2612 of SEQ ID NO: 318301
uggguuugccuggaccaaa

SEQ ID NO: 552126 - RNA, 19 nt, Artificial Sequence
  Description of Artificial Sequence: Synthetic oligonucleotide
  Antisense strand to SEQ ID NO: 552125
uuugguccaggcaaaccca

SEQ ID NO: 552127 - RNA, 19 nt, Artificial Sequence
  Description of Artificial Sequence: Synthetic oligonucleotide
  Sense strand starting at position 2726 of SEQ ID NO: 318301
ugaacagauuuaggugaau

SEQ ID NO: 552128 - RNA, 19 nt, Artificial Sequence
  Description of Artificial Sequence: Synthetic oligonucleotide
  Antisense strand to SEQ ID NO: 552127
auucaccuaaaucuguuca

SEQ ID NO: 552129 - RNA, 19 nt, Artificial Sequence
  Description of Artificial Sequence: Synthetic oligonucleotide
  Sense strand starting at position 2813 of SEQ ID NO: 318301
agauguaauugacauacua

SEQ ID NO: 552130 - RNA, 19 nt, Artificial Sequence
  Description of Artificial Sequence: Synthetic oligonucleotide
  Antisense strand to SEQ ID NO: 552129
uaguaugucaauuacaucu

SEQ ID NO: 552131 - RNA, 19 nt, Artificial Sequence
  Description of Artificial Sequence: Synthetic oligonucleotide
  Sense strand starting at position 3354 of SEQ ID NO: 318301
gguaguuccagcuauccgu

SEQ ID NO: 552132 - RNA, 19 nt, Artificial Sequence
  Description of Artificial Sequence: Synthetic oligonucleotide
  Antisense strand to SEQ ID NO: 552131
acggauagcuggaacuacc

SEQ ID NO: 552133 - RNA, 19 nt, Artificial Sequence
  Description of Artificial Sequence: Synthetic oligonucleotide
  Sense strand starting at position 3360 of SEQ ID NO: 318301
uccagcuauccgugaggcu

SEQ ID NO: 552134 - RNA, 19 nt, Artificial Sequence
  Description of Artificial Sequence: Synthetic oligonucleotide
  Antisense strand to SEQ ID NO: 552133
agccucacggauagcugga

SEQ ID NO: 552135 - RNA, 19 nt, Artificial Sequence
  Description of Artificial Sequence: Synthetic oligonucleotide
  Sense strand starting at position 3435 of SEQ ID NO: 318301
gcauuccaucgacagcaaa

SEQ ID NO: 552136 - RNA, 19 nt, Artificial Sequence
  Description of Artificial Sequence: Synthetic oligonucleotide
  Antisense strand to SEQ ID NO: 552135
uuugcugucgauggaaugc

SEQ ID NO: 552137 - RNA, 19 nt, Artificial Sequence
  Description of Artificial Sequence: Synthetic oligonucleotide
  Sense strand starting at position 3652 of SEQ ID NO: 318301
ggcuucuguucuucccauu

SEQ ID NO: 552138 - RNA, 19 nt, Artificial Sequence
  Description of Artificial Sequence: Synthetic oligonucleotide
  Antisense strand to SEQ ID NO: 552137
aaugggaagaacagaagcc

SEQ ID NO: 552139 - RNA, 19 nt, Artificial Sequence
  Description of Artificial Sequence: Synthetic oligonucleotide
  Sense strand starting at position 535 of SEQ ID NO: 318302
aacuaucccugguugggaa

SEQ ID NO: 552140 - RNA, 19 nt, Artificial Sequence
  Description of Artificial Sequence: Synthetic oligonucleotide
  Antisense strand to SEQ ID NO: 552139
uucccaaccagggauaguu

SEQ ID NO: 552141 - RNA, 19 nt, Artificial Sequence
  Description of Artificial Sequence: Synthetic oligonucleotide
  Sense strand starting at position 585 of SEQ ID NO: 318302
gauaaacggugauuccuuu

SEQ ID NO: 552142 - RNA, 19 nt, Artificial Sequence
  Description of Artificial Sequence: Synthetic oligonucleotide
  Antisense strand to SEQ ID NO: 552141
aaaggaaucaccguuuauc

SEQ ID NO: 552143 - RNA, 19 nt, Artificial Sequence
  Description of Artificial Sequence: Synthetic oligonucleotide
  Sense strand starting at position 592 of SEQ ID NO: 318302
ggugauuccuuuguuccaa

SEQ ID NO: 552144 - RNA, 19 nt, Artificial Sequence
  Description of Artificial Sequence: Synthetic oligonucleotide
  Antisense strand to SEQ ID NO: 552143
uuggaacaaaggaaucacc

SEQ ID NO: 552145 - RNA, 19 nt, Artificial Sequence
  Description of Artificial Sequence: Synthetic oligonucleotide
  Sense strand starting at position 706 of SEQ ID NO: 318302
acgggaaacuguucauaug

SEQ ID NO: 552146 - RNA, 19 nt, Artificial Sequence
  Description of Artificial Sequence: Synthetic oligonucleotide
  Antisense strand to SEQ ID NO: 552145
cauaugaacaguuucccgu

SEQ ID NO: 552147 - RNA, 19 nt, Artificial Sequence
  Description of Artificial Sequence: Synthetic oligonucleotide
  Sense strand starting at position 736 of SEQ ID NO: 318302
ucaccuaaguagccugaua

SEQ ID NO: 552148 - RNA, 19 nt, Artificial Sequence
  Description of Artificial Sequence: Synthetic oligonucleotide
  Antisense strand to SEQ ID NO: 552147
uaucaggcuacuuagguga

SEQ ID NO: 552149 - RNA, 19 nt, Artificial Sequence
  Description of Artificial Sequence: Synthetic oligonucleotide
  Sense strand starting at position 738 of SEQ ID NO: 318302
accuaaguagccugauaga

SEQ ID NO: 552150 - RNA, 19 nt, Artificial Sequence
  Description of Artificial Sequence: Synthetic oligonucleotide
  Antisense strand to SEQ ID NO: 552149
ucuaucaggcuacuuaggu

SEQ ID NO: 552151 - RNA, 19 nt, Artificial Sequence
  Description of Artificial Sequence: Synthetic oligonucleotide
  Sense strand starting at position 862 of SEQ ID NO: 318302
agggaacucucaccugguu

SEQ ID NO: 552152 - RNA, 19 nt, Artificial Sequence
  Description of Artificial Sequence: Synthetic oligonucleotide
  Antisense strand to SEQ ID NO: 552151
aaccaggugagaguucccu

SEQ ID NO: 552153 - RNA, 19 nt, Artificial Sequence
  Description of Artificial Sequence: Synthetic oligonucleotide
  Sense strand starting at position 903 of SEQ ID NO: 318302
gugggucacccugacaguu

SEQ ID NO: 552154 - RNA, 19 nt, Artificial Sequence
  Description of Artificial Sequence: Synthetic oligonucleotide
  Antisense strand to SEQ ID NO: 552153
aacugucagggugacccac

SEQ ID NO: 552155 - RNA, 19 nt, Artificial Sequence
  Description of Artificial Sequence: Synthetic oligonucleotide
  Sense strand starting at position 977 of SEQ ID NO: 318302
auaguucggccucauagga

SEQ ID NO: 552156 - RNA, 19 nt, Artificial Sequence
  Description of Artificial Sequence: Synthetic oligonucleotide
  Antisense strand to SEQ ID NO: 552155
uccuaugaggccgaacuau

SEQ ID NO: 552157 - RNA, 19 nt, Artificial Sequence
  Description of Artificial Sequence: Synthetic oligonucleotide
  Sense strand starting at position 1422 of SEQ ID NO: 318302
ugugauagauaccucaaac

SEQ ID NO: 552158 - RNA, 19 nt, Artificial Sequence
  Description of Artificial Sequence: Synthetic oligonucleotide
  Antisense strand to SEQ ID NO: 552157
guuugagguaucuaucaca

SEQ ID NO: 552159 - RNA, 19 nt, Artificial Sequence
  Description of Artificial Sequence: Synthetic oligonucleotide
  Sense strand starting at position 1503 of SEQ ID NO: 318302
ggaggucucgguggugaaa

SEQ ID NO: 552160 - RNA, 19 nt, Artificial Sequence
  Description of Artificial Sequence: Synthetic oligonucleotide
  Antisense strand to SEQ ID NO: 552159
uuucaccaccgagaccucc

SEQ ID NO: 552161 - RNA, 19 nt, Artificial Sequence
  Description of Artificial Sequence: Synthetic oligonucleotide
  Sense strand starting at position 2198 of SEQ ID NO: 318302
ugguaauuaccuugauacu

SEQ ID NO: 552162 - RNA, 19 nt, Artificial Sequence
  Description of Artificial Sequence: Synthetic oligonucleotide
  Antisense strand to SEQ ID NO: 552161
aguaucaagguaauuacca

SEQ ID NO: 552163 - RNA, 19 nt, Artificial Sequence
  Description of Artificial Sequence: Synthetic oligonucleotide
  Sense strand starting at position 2243 of SEQ ID NO: 318302
gggugagaccucgagcauc

SEQ ID NO: 552164 - RNA, 19 nt, Artificial Sequence
  Description of Artificial Sequence: Synthetic oligonucleotide
  Antisense strand to SEQ ID NO: 552163
gaugcucgaggucucaccc

SEQ ID NO: 552165 - RNA, 19 nt, Artificial Sequence
  Description of Artificial Sequence: Synthetic oligonucleotide
  Sense strand starting at position 2306 of SEQ ID NO: 318302
acaaguacguccuuacaca

SEQ ID NO: 552166 - RNA, 19 nt, Artificial Sequence
  Description of Artificial Sequence: Synthetic oligonucleotide
  Antisense strand to SEQ ID NO: 552165
uguguaaggacguacuugu

SEQ ID NO: 552167 - RNA, 19 nt, Artificial Sequence
  Description of Artificial Sequence: Synthetic oligonucleotide
  Sense strand starting at position 2336 of SEQ ID NO: 318302
gggaccuugacuugucaca

SEQ ID NO: 552168 - RNA, 19 nt, Artificial Sequence
  Description of Artificial Sequence: Synthetic oligonucleotide
  Antisense strand to SEQ ID NO: 552167
ugugacaagucaagguccc

SEQ ID NO: 552169 - RNA, 19 nt, Artificial Sequence
  Description of Artificial Sequence: Synthetic oligonucleotide
  Sense strand starting at position 2394 of SEQ ID NO: 318302
ugucucauuucucuuuguu

SEQ ID NO: 552170 - RNA, 19 nt, Artificial Sequence
  Description of Artificial Sequence: Synthetic oligonucleotide
  Antisense strand to SEQ ID NO: 552169
aacaaagagaaaugagaca

SEQ ID NO: 552171 - RNA, 19 nt, Artificial Sequence
  Description of Artificial Sequence: Synthetic oligonucleotide
  Sense strand starting at position 2429 of SEQ ID NO: 318302
gugcauaugcaugagguau

SEQ ID NO: 552172 - RNA, 19 nt, Artificial Sequence
  Description of Artificial Sequence: Synthetic oligonucleotide
  Antisense strand to SEQ ID NO: 552171
auaccucaugcauaugcac

SEQ ID NO: 552173 - RNA, 19 nt, Artificial Sequence
  Description of Artificial Sequence: Synthetic oligonucleotide
  Sense strand starting at position 2518 of SEQ ID NO: 318302
gcuugaauugggcaaggcu

SEQ ID NO: 552174 - RNA, 19 nt, Artificial Sequence
  Description of Artificial Sequence: Synthetic oligonucleotide
  Antisense strand to SEQ ID NO: 552173
agccuugcccaauucaagc

SEQ ID NO: 552175 - RNA, 19 nt, Artificial Sequence
  Description of Artificial Sequence: Synthetic oligonucleotide
  Sense strand starting at position 2525 of SEQ ID NO: 318302
uugggcaaggcuugugaaa

SEQ ID NO: 552176 - RNA, 19 nt, Artificial Sequence
  Description of Artificial Sequence: Synthetic oligonucleotide
  Antisense strand to SEQ ID NO: 552175
uuucacaagccuugcccaa

SEQ ID NO: 552177 - RNA, 19 nt, Artificial Sequence
  Description of Artificial Sequence: Synthetic oligonucleotide
  Sense strand starting at position 2552 of SEQ ID NO: 318302
gguugaggaguagguguua

SEQ ID NO: 552178 - RNA, 19 nt, Artificial Sequence
  Description of Artificial Sequence: Synthetic oligonucleotide
  Antisense strand to SEQ ID NO: 552177
uaacaccuacuccucaacc

SEQ ID NO: 552179 - RNA, 19 nt, Artificial Sequence
  Description of Artificial Sequence: Synthetic oligonucleotide
  Sense strand starting at position 2861 of SEQ ID NO: 318302
gacagagcugccgaugaua

SEQ ID NO: 552180 - RNA, 19 nt, Artificial Sequence
  Description of Artificial Sequence: Synthetic oligonucleotide
  Antisense strand to SEQ ID NO: 552179
uaucaucggcagcucuguc

SEQ ID NO: 552181 - RNA, 19 nt, Artificial Sequence
  Description of Artificial Sequence: Synthetic oligonucleotide
  Sense strand starting at position 2926 of SEQ ID NO: 318302
cuggucucuggaugaacau

SEQ ID NO: 552182 - RNA, 19 nt, Artificial Sequence
  Description of Artificial Sequence: Synthetic oligonucleotide
  Antisense strand to SEQ ID NO: 552181
auguucauccagagaccag

SEQ ID NO: 552183 - RNA, 19 nt, Artificial Sequence
  Description of Artificial Sequence: Synthetic oligonucleotide
  Sense strand starting at position 2957 of SEQ ID NO: 318302
ugacauccaucuccguaua

SEQ ID NO: 552184 - RNA, 19 nt, Artificial Sequence
  Description of Artificial Sequence: Synthetic oligonucleotide
  Antisense strand to SEQ ID NO: 552183
uauacggagauggauguca

SEQ ID NO: 552185 - RNA, 19 nt, Artificial Sequence
  Description of Artificial Sequence: Synthetic oligonucleotide
  Sense strand starting at position 3078 of SEQ ID NO: 318302
ggcuuugaggucgugcauu

SEQ ID NO: 552186 - RNA, 19 nt, Artificial Sequence
  Description of Artificial Sequence: Synthetic oligonucleotide
  Antisense strand to SEQ ID NO: 552185
aaugcacgaccucaaagcc

SEQ ID NO: 552187 - RNA, 19 nt, Artificial Sequence
  Description of Artificial Sequence: Synthetic oligonucleotide
  Sense strand starting at position 3478 of SEQ ID NO: 318302
gcaccuauuccugaguucu

SEQ ID NO: 552188 - RNA, 19 nt, Artificial Sequence
  Description of Artificial Sequence: Synthetic oligonucleotide
  Antisense strand to SEQ ID NO: 552187
agaacucaggaauaggugc

SEQ ID NO: 552189 - RNA, 19 nt, Artificial Sequence
  Description of Artificial Sequence: Synthetic oligonucleotide
  Sense strand starting at position 3480 of SEQ ID NO: 318302
accuauuccugaguucucu

SEQ ID NO: 552190 - RNA, 19 nt, Artificial Sequence
  Description of Artificial Sequence: Synthetic oligonucleotide
  Antisense strand to SEQ ID NO: 552189
agagaacucaggaauaggu

SEQ ID NO: 552191 - RNA, 19 nt, Artificial Sequence
  Description of Artificial Sequence: Synthetic oligonucleotide
  Sense strand starting at position 3534 of SEQ ID NO: 318302
gggacaguacucuguacac

SEQ ID NO: 552192 - RNA, 19 nt, Artificial Sequence
  Description of Artificial Sequence: Synthetic oligonucleotide
  Antisense strand to SEQ ID NO: 552191
guguacagaguacuguccc

SEQ ID NO: 552193 - RNA, 19 nt, Artificial Sequence
  Description of Artificial Sequence: Synthetic oligonucleotide
  Sense strand starting at position 3601 of SEQ ID NO: 318302
acuguagggacucagucau

SEQ ID NO: 552194 - RNA, 19 nt, Artificial Sequence
  Description of Artificial Sequence: Synthetic oligonucleotide
  Antisense strand to SEQ ID NO: 552193
augacugagucccuacagu

SEQ ID NO: 552195 - RNA, 19 nt, Artificial Sequence
  Description of Artificial Sequence: Synthetic oligonucleotide
  Sense strand starting at position 3702 of SEQ ID NO: 318302
uccaaucugccaugacagu

SEQ ID NO: 552196 - RNA, 19 nt, Artificial Sequence
  Description of Artificial Sequence: Synthetic oligonucleotide
  Antisense strand to SEQ ID NO: 552195
acugucauggcagauugga

SEQ ID NO: 552197 - RNA, 19 nt, Artificial Sequence
  Description of Artificial Sequence: Synthetic oligonucleotide
  Sense strand starting at position 3711 of SEQ ID NO: 318302
ccaugacagugcuucuaac

SEQ ID NO: 552198 - RNA, 19 nt, Artificial Sequence
  Description of Artificial Sequence: Synthetic oligonucleotide
  Antisense strand to SEQ ID NO: 552197
guuagaagcacugucaugg

SEQ ID NO: 552199 - RNA, 19 nt, Artificial Sequence
  Description of Artificial Sequence: Synthetic oligonucleotide
  Sense strand starting at position 3764 of SEQ ID NO: 318302
cuguauaccauuuggcgaa

SEQ ID NO: 552200 - RNA, 19 nt, Artificial Sequence
  Description of Artificial Sequence: Synthetic oligonucleotide
  Antisense strand to SEQ ID NO: 552199
uucgccaaaugguauacag

SEQ ID NO: 552201 - RNA, 19 nt, Artificial Sequence
  Description of Artificial Sequence: Synthetic oligonucleotide
  Sense strand starting at position 3878 of SEQ ID NO: 318302
aagauuuagugccucaguu

SEQ ID NO: 552202 - RNA, 19 nt, Artificial Sequence
  Description of Artificial Sequence: Synthetic oligonucleotide
  Antisense strand to SEQ ID NO: 552201
aacugaggcacuaaaucuu

SEQ ID NO: 552203 - RNA, 19 nt, Artificial Sequence
  Description of Artificial Sequence: Synthetic oligonucleotide
  Sense strand starting at position 3931 of SEQ ID NO: 318302
uuccuaggguguuugagau

SEQ ID NO: 552204 - RNA, 19 nt, Artificial Sequence
  Description of Artificial Sequence: Synthetic oligonucleotide
  Antisense strand to SEQ ID NO: 552203
aucucaaacacccuaggaa

SEQ ID NO: 552205 - RNA, 19 nt, Artificial Sequence
  Description of Artificial Sequence: Synthetic oligonucleotide
  Sense strand starting at position 3937 of SEQ ID NO: 318302
ggguguuugagauacugug

SEQ ID NO: 552206 - RNA, 19 nt, Artificial Sequence
  Description of Artificial Sequence: Synthetic oligonucleotide
  Antisense strand to SEQ ID NO: 552205
cacaguaucucaaacaccc

SEQ ID NO: 552207 - RNA, 19 nt, Artificial Sequence
  Description of Artificial Sequence: Synthetic oligonucleotide
  Sense strand starting at position 3944 of SEQ ID NO: 318302
ugagauacugugggcuaaa

SEQ ID NO: 552208 - RNA, 19 nt, Artificial Sequence
  Description of Artificial Sequence: Synthetic oligonucleotide
  Antisense strand to SEQ ID NO: 552207
uuuagcccacaguaucuca

SEQ ID NO: 552209 - RNA, 19 nt, Artificial Sequence
  Description of Artificial Sequence: Synthetic oligonucleotide
  Sense strand starting at position 3945 of SEQ ID NO: 318302
gagauacugugggcuaaau

SEQ ID NO: 552210 - RNA, 19 nt, Artificial Sequence
  Description of Artificial Sequence: Synthetic oligonucleotide
  Antisense strand to SEQ ID NO: 552209
auuuagcccacaguaucuc

SEQ ID NO: 552211 - RNA, 19 nt, Artificial Sequence
  Description of Artificial Sequence: Synthetic oligonucleotide
  Sense strand starting at position 3947 of SEQ ID NO: 318302
gauacugugggcuaaaugu

SEQ ID NO: 552212 - RNA, 19 nt, Artificial Sequence
  Description of Artificial Sequence: Synthetic oligonucleotide
  Antisense strand to SEQ ID NO: 552211
acauuuagcccacaguauc

SEQ ID NO: 552213 - RNA, 19 nt, Artificial Sequence
  Description of Artificial Sequence: Synthetic oligonucleotide
  Sense strand starting at position 3956 of SEQ ID NO: 318302
ggcuaaauguggguacuca

SEQ ID NO: 552214 - RNA, 19 nt, Artificial Sequence
  Description of Artificial Sequence: Synthetic oligonucleotide
  Antisense strand to SEQ ID NO: 552213
ugaguacccacauuuagcc

SEQ ID NO: 552215 - RNA, 19 nt, Artificial Sequence
  Description of Artificial Sequence: Synthetic oligonucleotide
  Sense strand starting at position 3957 of SEQ ID NO: 318302
gcuaaauguggguacucaa

SEQ ID NO: 552216 - RNA, 19 nt, Artificial Sequence
  Description of Artificial Sequence: Synthetic oligonucleotide
  Antisense strand to SEQ ID NO: 552215
uugaguacccacauuuagc

SEQ ID NO: 552217 - RNA, 19 nt, Artificial Sequence
  Description of Artificial Sequence: Synthetic oligonucleotide
  Sense strand starting at position 3960 of SEQ ID NO: 318302
aaauguggguacucaacaa

SEQ ID NO: 552218 - RNA, 19 nt, Artificial Sequence
  Description of Artificial Sequence: Synthetic oligonucleotide
  Antisense strand to SEQ ID NO: 552217
uuguugaguacccacauuu

SEQ ID NO: 552219 - RNA, 19 nt, Artificial Sequence
  Description of Artificial Sequence: Synthetic oligonucleotide
  Sense strand starting at position 256 of SEQ ID NO: 318303
uguucuccaucacugagaa

SEQ ID NO: 552220 - RNA, 19 nt, Artificial Sequence
  Description of Artificial Sequence: Synthetic oligonucleotide
  Antisense strand to SEQ ID NO: 552219
uucucagugauggagaaca

SEQ ID NO: 552221 - RNA, 19 nt, Artificial Sequence
  Description of Artificial Sequence: Synthetic oligonucleotide
  Sense strand starting at position 257 of SEQ ID NO: 318303
guucuccaucacugagaag

SEQ ID NO: 552222 - RNA, 19 nt, Artificial Sequence
  Description of Artificial Sequence: Synthetic oligonucleotide
  Antisense strand to SEQ ID NO: 552221
cuucucagugauggagaac

SEQ ID NO: 552223 - RNA, 19 nt, Artificial Sequence
  Description of Artificial Sequence: Synthetic oligonucleotide
  Sense strand starting at position 278 of SEQ ID NO: 318303
guagccacucagcauaaau

SEQ ID NO: 552224 - RNA, 19 nt, Artificial Sequence
  Description of Artificial Sequence: Synthetic oligonucleotide
  Antisense strand to SEQ ID NO: 552223
auuuaugcugaguggcuac

SEQ ID NO: 552225 - RNA, 19 nt, Artificial Sequence
  Description of Artificial Sequence: Synthetic oligonucleotide
  Sense strand starting at position 411 of SEQ ID NO: 318303
ucccgauccagagaugucu

SEQ ID NO: 552226 - RNA, 19 nt, Artificial Sequence
  Description of Artificial Sequence: Synthetic oligonucleotide
  Antisense strand to SEQ ID NO: 552225
agacaucucuggaucggga

SEQ ID NO: 552227 - RNA, 19 nt, Artificial Sequence
  Description of Artificial Sequence: Synthetic oligonucleotide
  Sense strand starting at position 597 of SEQ ID NO: 318303
gugacacucugagugaaga

SEQ ID NO: 552228 - RNA, 19 nt, Artificial Sequence
  Description of Artificial Sequence: Synthetic oligonucleotide
  Antisense strand to SEQ ID NO: 552227
ucuucacucagagugucac

SEQ ID NO: 552229 - RNA, 19 nt, Artificial Sequence
  Description of Artificial Sequence: Synthetic oligonucleotide
  Sense strand starting at position 657 of SEQ ID NO: 318303
gaguuagugcuggagagug

SEQ ID NO: 552230 - RNA, 19 nt, Artificial Sequence
  Description of Artificial Sequence: Synthetic oligonucleotide
  Antisense strand to SEQ ID NO: 552229
cacucuccagcacuaacuc

SEQ ID NO: 552231 - RNA, 19 nt, Artificial Sequence
  Description of Artificial Sequence: Synthetic oligonucleotide
  Sense strand starting at position 697 of SEQ ID NO: 318303
ccacaaucucaauggugua

SEQ ID NO: 552232 - RNA, 19 nt, Artificial Sequence
  Description of Artificial Sequence: Synthetic oligonucleotide
  Antisense strand to SEQ ID NO: 552231
uacaccauugagauugugg

SEQ ID NO: 552233 - RNA, 19 nt, Artificial Sequence
  Description of Artificial Sequence: Synthetic oligonucleotide
  Sense strand starting at position 743 of SEQ ID NO: 318303
ggugguagucugcaggaaa

SEQ ID NO: 552234 - RNA, 19 nt, Artificial Sequence
  Description of Artificial Sequence: Synthetic oligonucleotide
  Antisense strand to SEQ ID NO: 552233
uuuccugcagacuaccacc

SEQ ID NO: 552235 - RNA, 19 nt, Artificial Sequence
  Description of Artificial Sequence: Synthetic oligonucleotide
  Sense strand starting at position 746 of SEQ ID NO: 318303
gguagucugcaggaaauac

SEQ ID NO: 552236 - RNA, 19 nt, Artificial Sequence
  Description of Artificial Sequence: Synthetic oligonucleotide
  Antisense strand to SEQ ID NO: 552235
guauuuccugcagacuacc

SEQ ID NO: 552237 - RNA, 19 nt, Artificial Sequence
  Description of Artificial Sequence: Synthetic oligonucleotide
  Sense strand starting at position 757 of SEQ ID NO: 318303
ggaaauacuucuucuugcu

SEQ ID NO: 552238 - RNA, 19 nt, Artificial Sequence
  Description of Artificial Sequence: Synthetic oligonucleotide
  Antisense strand to SEQ ID NO: 552237
agcaagaagaaguauuucc

SEQ ID NO: 552239 - RNA, 19 nt, Artificial Sequence
  Description of Artificial Sequence: Synthetic oligonucleotide
  Sense strand starting at position 902 of SEQ ID NO: 318303
ugccacauccucugagaug

SEQ ID NO: 552240 - RNA, 19 nt, Artificial Sequence
  Description of Artificial Sequence: Synthetic oligonucleotide
  Antisense strand to SEQ ID NO: 552239
caucucagaggauguggca

SEQ ID NO: 552241 - RNA, 19 nt, Artificial Sequence
  Description of Artificial Sequence: Synthetic oligonucleotide
  Sense strand starting at position 930 of SEQ ID NO: 318303
ccaucuugaugagucacua

SEQ ID NO: 552242 - RNA, 19 nt, Artificial Sequence
  Description of Artificial Sequence: Synthetic oligonucleotide
  Antisense strand to SEQ ID NO: 552241
uagugacucaucaagaugg

SEQ ID NO: 552243 - RNA, 19 nt, Artificial Sequence
  Description of Artificial Sequence: Synthetic oligonucleotide
  Sense strand starting at position 1099 of SEQ ID NO: 318303
ggcccugaacagugauaag

SEQ ID NO: 552244 - RNA, 19 nt, Artificial Sequence
  Description of Artificial Sequence: Synthetic oligonucleotide
  Antisense strand to SEQ ID NO: 552243
cuuaucacuguucagggcc

SEQ ID NO: 552245 - RNA, 19 nt, Artificial Sequence
  Description of Artificial Sequence: Synthetic oligonucleotide
  Sense strand starting at position 1108 of SEQ ID NO: 318303
cagugauaaguccaguguu

SEQ ID NO: 552246 - RNA, 19 nt, Artificial Sequence
  Description of Artificial Sequence: Synthetic oligonucleotide
  Antisense strand to SEQ ID NO: 552245
aacacuggacuuaucacug

SEQ ID NO: 552247 - RNA, 19 nt, Artificial Sequence
  Description of Artificial Sequence: Synthetic oligonucleotide
  Sense strand starting at position 1177 of SEQ ID NO: 318303
uguauucgauuucugcauu

SEQ ID NO: 552248 - RNA, 19 nt, Artificial Sequence
  Description of Artificial Sequence: Synthetic oligonucleotide
  Antisense strand to SEQ ID NO: 552247
aaugcagaaaucgaauaca

SEQ ID NO: 552249 - RNA, 19 nt, Artificial Sequence
  Description of Artificial Sequence: Synthetic oligonucleotide
  Sense strand starting at position 1647 of SEQ ID NO: 318303
gugugugcccgugugaaug

SEQ ID NO: 552250 - RNA, 19 nt, Artificial Sequence
  Description of Artificial Sequence: Synthetic oligonucleotide
  Antisense strand to SEQ ID NO: 552249
cauucacacgggcacacac

SEQ ID NO: 552251 - RNA, 19 nt, Artificial Sequence
  Description of Artificial Sequence: Synthetic oligonucleotide
  Sense strand starting at position 1714 of SEQ ID NO: 318303
cagaaugugugauuaaaug

SEQ ID NO: 552252 - RNA, 19 nt, Artificial Sequence
  Description of Artificial Sequence: Synthetic oligonucleotide
  Antisense strand to SEQ ID NO: 552251
cauuuaaucacacauucug

SEQ ID NO: 552253 - RNA, 19 nt, Artificial Sequence
  Description of Artificial Sequence: Synthetic oligonucleotide
  Sense strand starting at position 1721 of SEQ ID NO: 318303
ugugauuaaaugugauaug

SEQ ID NO: 552254 - RNA, 19 nt, Artificial Sequence
  Description of Artificial Sequence: Synthetic oligonucleotide
  Antisense strand to SEQ ID NO: 552253
cauaucacauuuaaucaca

SEQ ID NO: 552255 - RNA, 19 nt, Artificial Sequence
  Description of Artificial Sequence: Synthetic oligonucleotide
  Sense strand starting at position 1733 of SEQ ID NO: 318303
ugauauguuugugugagaa

SEQ ID NO: 552256 - RNA, 19 nt, Artificial Sequence
  Description of Artificial Sequence: Synthetic oligonucleotide
  Antisense strand to SEQ ID NO: 552255
uucucacacaaacauauca

SEQ ID NO: 552257 - RNA, 19 nt, Artificial Sequence
  Description of Artificial Sequence: Synthetic oligonucleotide
  Sense strand starting at position 1783 of SEQ ID NO: 318303
cagaaugugugauuaugug

SEQ ID NO: 552258 - RNA, 19 nt, Artificial Sequence
  Description of Artificial Sequence: Synthetic oligonucleotide
  Antisense strand to SEQ ID NO: 552257
cacauaaucacacauucug

SEQ ID NO: 552259 - RNA, 19 nt, Artificial Sequence
  Description of Artificial Sequence: Synthetic oligonucleotide
  Sense strand starting at position 1789 of SEQ ID NO: 318303
gugugauuaugugugauuu

SEQ ID NO: 552260 - RNA, 19 nt, Artificial Sequence
  Description of Artificial Sequence: Synthetic oligonucleotide
  Antisense strand to SEQ ID NO: 552259
aaaucacacauaaucacac

SEQ ID NO: 552261 - RNA, 19 nt, Artificial Sequence
  Description of Artificial Sequence: Synthetic oligonucleotide
  Sense strand starting at position 1813 of SEQ ID NO: 318303
ugagaagguauauguguuu

SEQ ID NO: 552262 - RNA, 19 nt, Artificial Sequence
  Description of Artificial Sequence: Synthetic oligonucleotide
  Antisense strand to SEQ ID NO: 552261
aaacacauauaccuucuca

SEQ ID NO: 552263 - RNA, 19 nt, Artificial Sequence
  Description of Artificial Sequence: Synthetic oligonucleotide
  Sense strand starting at position 1844 of SEQ ID NO: 318303
guuugcacacaugaguaaa

SEQ ID NO: 552264 - RNA, 19 nt, Artificial Sequence
  Description of Artificial Sequence: Synthetic oligonucleotide
  Antisense strand to SEQ ID NO: 552263
uuuacucaugugugcaaac

SEQ ID NO: 552265 - RNA, 19 nt, Artificial Sequence
  Description of Artificial Sequence: Synthetic oligonucleotide
  Sense strand starting at position 1922 of SEQ ID NO: 318303
aggguugugggucagagaa

SEQ ID NO: 552266 - RNA, 19 nt, Artificial Sequence
  Description of Artificial Sequence: Synthetic oligonucleotide
  Antisense strand to SEQ ID NO: 552265
uucucugacccacaacccu

SEQ ID NO: 552267 - RNA, 19 nt, Artificial Sequence
  Description of Artificial Sequence: Synthetic oligonucleotide
  Sense strand starting at position 2211 of SEQ ID NO: 318303
auacaaacaugguugguaa

SEQ ID NO: 552268 - RNA, 19 nt, Artificial Sequence
  Description of Artificial Sequence: Synthetic oligonucleotide
  Antisense strand to SEQ ID NO: 552267
uuaccaaccauguuuguau

SEQ ID NO: 552269 - RNA, 19 nt, Artificial Sequence
  Description of Artificial Sequence: Synthetic oligonucleotide
  Sense strand starting at position 2212 of SEQ ID NO: 318303
uacaaacaugguugguaau

SEQ ID NO: 552270 - RNA, 19 nt, Artificial Sequence
  Description of Artificial Sequence: Synthetic oligonucleotide
  Antisense strand to SEQ ID NO: 552269
auuaccaaccauguuugua

SEQ ID NO: 552271 - RNA, 19 nt, Artificial Sequence
  Description of Artificial Sequence: Synthetic oligonucleotide
  Sense strand starting at position 2282 of SEQ ID NO: 318303
aaacaugagggcuggaguu

SEQ ID NO: 552272 - RNA, 19 nt, Artificial Sequence
  Description of Artificial Sequence: Synthetic oligonucleotide
  Antisense strand to SEQ ID NO: 552271
aacuccagcccucauguuu

SEQ ID NO: 552273 - RNA, 19 nt, Artificial Sequence
  Description of Artificial Sequence: Synthetic oligonucleotide
  Sense strand starting at position 2350 of SEQ ID NO: 318303
aagcauaacuuggcagagu

SEQ ID NO: 552274 - RNA, 19 nt, Artificial Sequence
  Description of Artificial Sequence: Synthetic oligonucleotide
  Antisense strand to SEQ ID NO: 552273
acucugccaaguuaugcuu

SEQ ID NO: 552275 - RNA, 19 nt, Artificial Sequence
  Description of Artificial Sequence: Synthetic oligonucleotide
  Sense strand starting at position 2386 of SEQ ID NO: 318303
agaagaguccuggguucaa

SEQ ID NO: 552276 - RNA, 19 nt, Artificial Sequence
  Description of Artificial Sequence: Synthetic oligonucleotide
  Antisense strand to SEQ ID NO: 552275
uugaacccaggacucuucu

SEQ ID NO: 552277 - RNA, 19 nt, Artificial Sequence
  Description of Artificial Sequence: Synthetic oligonucleotide
  Sense strand starting at position 2474 of SEQ ID NO: 318303
gucuaugaaugugugaaau

SEQ ID NO: 552278 - RNA, 19 nt, Artificial Sequence
  Description of Artificial Sequence: Synthetic oligonucleotide
  Antisense strand to SEQ ID NO: 552277
auuucacacauucauagac

SEQ ID NO: 552279 - RNA, 19 nt, Artificial Sequence
  Description of Artificial Sequence: Synthetic oligonucleotide
  Sense strand starting at position 2521 of SEQ ID NO: 318303
aacuguggugagcaucaaa

SEQ ID NO: 552280 - RNA, 19 nt, Artificial Sequence
  Description of Artificial Sequence: Synthetic oligonucleotide
  Antisense strand to SEQ ID NO: 552279
uuugaugcucaccacaguu

SEQ ID NO: 552281 - RNA, 19 nt, Artificial Sequence
  Description of Artificial Sequence: Synthetic oligonucleotide
  Sense strand starting at position 2579 of SEQ ID NO: 318303
cagggaaagugcucccuaa

SEQ ID NO: 552282 - RNA, 19 nt, Artificial Sequence
  Description of Artificial Sequence: Synthetic oligonucleotide
  Antisense strand to SEQ ID NO: 552281
uuagggagcacuuucccug

SEQ ID NO: 552283 - RNA, 19 nt, Artificial Sequence
  Description of Artificial Sequence: Synthetic oligonucleotide
  Sense strand starting at position 2774 of SEQ ID NO: 318303
ugaagacuccugggcaaug

SEQ ID NO: 552284 - RNA, 19 nt, Artificial Sequence
  Description of Artificial Sequence: Synthetic oligonucleotide
  Antisense strand to SEQ ID NO: 552283
cauugcccaggagucuuca

SEQ ID NO: 552285 - RNA, 19 nt, Artificial Sequence
  Description of Artificial Sequence: Synthetic oligonucleotide
  Sense strand starting at position 2874 of SEQ ID NO: 318303
ugucaucaacuuuaugaug

SEQ ID NO: 552286 - RNA, 19 nt, Artificial Sequence
  Description of Artificial Sequence: Synthetic oligonucleotide
  Antisense strand to SEQ ID NO: 552285
caucauaaaguugaugaca

SEQ ID NO: 552287 - RNA, 19 nt, Artificial Sequence
  Description of Artificial Sequence: Synthetic oligonucleotide
  Sense strand starting at position 3179 of SEQ ID NO: 318303
cucugaacucauuagcugu

SEQ ID NO: 552288 - RNA, 19 nt, Artificial Sequence
  Description of Artificial Sequence: Synthetic oligonucleotide
  Antisense strand to SEQ ID NO: 552287
acagcuaaugaguucagag

SEQ ID NO: 552289 - RNA, 19 nt, Artificial Sequence
  Description of Artificial Sequence: Synthetic oligonucleotide
  Sense strand starting at position 3185 of SEQ ID NO: 318303
acucauuagcuguaggaua

SEQ ID NO: 552290 - RNA, 19 nt, Artificial Sequence
  Description of Artificial Sequence: Synthetic oligonucleotide
  Antisense strand to SEQ ID NO: 552289
uauccuacagcuaaugagu

SEQ ID NO: 552291 - RNA, 19 nt, Artificial Sequence
  Description of Artificial Sequence: Synthetic oligonucleotide
  Sense strand starting at position 3255 of SEQ ID NO: 318303
ggauaauacuuaccuugua

SEQ ID NO: 552292 - RNA, 19 nt, Artificial Sequence
  Description of Artificial Sequence: Synthetic oligonucleotide
  Antisense strand to SEQ ID NO: 552291
uacaagguaaguauuaucc

SEQ ID NO: 552293 - RNA, 19 nt, Artificial Sequence
  Description of Artificial Sequence: Synthetic oligonucleotide
  Sense strand starting at position 3265 of SEQ ID NO: 318303
uaccuuguacuguaaggau

SEQ ID NO: 552294 - RNA, 19 nt, Artificial Sequence
  Description of Artificial Sequence: Synthetic oligonucleotide
  Antisense strand to SEQ ID NO: 552293
auccuuacaguacaaggua

SEQ ID NO: 552295 - RNA, 19 nt, Artificial Sequence
  Description of Artificial Sequence: Synthetic oligonucleotide
  Sense strand starting at position 3332 of SEQ ID NO: 318303
ggcuauuauuauuugcuau

SEQ ID NO: 552296 - RNA, 19 nt, Artificial Sequence
  Description of Artificial Sequence: Synthetic oligonucleotide
  Antisense strand to SEQ ID NO: 552295
auagcaaauaauaauagcc

SEQ ID NO: 552297 - RNA, 19 nt, Artificial Sequence
  Description of Artificial Sequence: Synthetic oligonucleotide
  Sense strand starting at position 3960 of SEQ ID NO: 318303
aacuaucccugguugggaa

SEQ ID NO: 552298 - RNA, 19 nt, Artificial Sequence
  Description of Artificial Sequence: Synthetic oligonucleotide
  Antisense strand to SEQ ID NO: 552297
uucccaaccagggauaguu

SEQ ID NO: 552299 - RNA, 19 nt, Artificial Sequence
  Description of Artificial Sequence: Synthetic oligonucleotide
  Sense strand starting at position 130 of SEQ ID NO: 318304
ccagucuuuccuggcagaa

SEQ ID NO: 552300 - RNA, 19 nt, Artificial Sequence
  Description of Artificial Sequence: Synthetic oligonucleotide
  Antisense strand to SEQ ID NO: 552299
uucugccaggaaagacugg

SEQ ID NO: 552301 - RNA, 19 nt, Artificial Sequence
  Description of Artificial Sequence: Synthetic oligonucleotide
  Sense strand starting at position 427 of SEQ ID NO: 318304
cagcuaaauggcuggaaga

SEQ ID NO: 552302 - RNA, 19 nt, Artificial Sequence
  Description of Artificial Sequence: Synthetic oligonucleotide
  Antisense strand to SEQ ID NO: 552301
ucuuccagccauuuagcug

SEQ ID NO: 552303 - RNA, 19 nt, Artificial Sequence
  Description of Artificial Sequence: Synthetic oligonucleotide
  Sense strand starting at position 635 of SEQ ID NO: 318304
ugccgauauuuacaauaau

SEQ ID NO: 552304 - RNA, 19 nt, Artificial Sequence
  Description of Artificial Sequence: Synthetic oligonucleotide
  Antisense strand to SEQ ID NO: 552303
auuauuguaaauaucggca

SEQ ID NO: 552305 - RNA, 19 nt, Artificial Sequence
  Description of Artificial Sequence: Synthetic oligonucleotide
  Sense strand starting at position 650 of SEQ ID NO: 318304
uaauaaugucgcgauuaac

SEQ ID NO: 552306 - RNA, 19 nt, Artificial Sequence
  Description of Artificial Sequence: Synthetic oligonucleotide
  Antisense strand to SEQ ID NO: 552305
guuaaucgcgacauuauua

SEQ ID NO: 552307 - RNA, 19 nt, Artificial Sequence
  Description of Artificial Sequence: Synthetic oligonucleotide
  Sense strand starting at position 704 of SEQ ID NO: 318304
gcggcuucuccugccugaa

SEQ ID NO: 552308 - RNA, 19 nt, Artificial Sequence
  Description of Artificial Sequence: Synthetic oligonucleotide
  Antisense strand to SEQ ID NO: 552307
uucaggcaggagaagccgc

SEQ ID NO: 552309 - RNA, 19 nt, Artificial Sequence
  Description of Artificial Sequence: Synthetic oligonucleotide
  Sense strand starting at position 790 of SEQ ID NO: 318304
ugugacacuguugguuuaa

SEQ ID NO: 552310 - RNA, 19 nt, Artificial Sequence
  Description of Artificial Sequence: Synthetic oligonucleotide
  Antisense strand to SEQ ID NO: 552309
uuaaaccaacagugucaca

SEQ ID NO: 552311 - RNA, 19 nt, Artificial Sequence
  Description of Artificial Sequence: Synthetic oligonucleotide
  Sense strand starting at position 815 of SEQ ID NO: 318304
ugugacacccaguguuaag

SEQ ID NO: 552312 - RNA, 19 nt, Artificial Sequence
  Description of Artificial Sequence: Synthetic oligonucleotide
  Antisense strand to SEQ ID NO: 552311
cuuaacacugggugucaca

SEQ ID NO: 552313 - RNA, 19 nt, Artificial Sequence
  Description of Artificial Sequence: Synthetic oligonucleotide
  Sense strand starting at position 824 of SEQ ID NO: 318304
caguguuaagaugggugaa

SEQ ID NO: 552314 - RNA, 19 nt, Artificial Sequence
  Description of Artificial Sequence: Synthetic oligonucleotide
  Antisense strand to SEQ ID NO: 552313
uucacccaucuuaacacug

SEQ ID NO: 552315 - RNA, 19 nt, Artificial Sequence
  Description of Artificial Sequence: Synthetic oligonucleotide
  Sense strand starting at position 825 of SEQ ID NO: 318304
aguguuaagaugggugaag

SEQ ID NO: 552316 - RNA, 19 nt, Artificial Sequence
  Description of Artificial Sequence: Synthetic oligonucleotide
  Antisense strand to SEQ ID NO: 552315
cuucacccaucuuaacacu

SEQ ID NO: 552317 - RNA, 19 nt, Artificial Sequence
  Description of Artificial Sequence: Synthetic oligonucleotide
  Sense strand starting at position 827 of SEQ ID NO: 318304
uguuaagaugggugaagca

SEQ ID NO: 552318 - RNA, 19 nt, Artificial Sequence
  Description of Artificial Sequence: Synthetic oligonucleotide
  Antisense strand to SEQ ID NO: 552317
ugcuucacccaucuuaaca

SEQ ID NO: 552319 - RNA, 19 nt, Artificial Sequence
  Description of Artificial Sequence: Synthetic oligonucleotide
  Sense strand starting at position 886 of SEQ ID NO: 318304
gccaauuccuguguuagag

SEQ ID NO: 552320 - RNA, 19 nt, Artificial Sequence
  Description of Artificial Sequence: Synthetic oligonucleotide
  Antisense strand to SEQ ID NO: 552319
cucuaacacaggaauuggc

SEQ ID NO: 552321 - RNA, 19 nt, Artificial Sequence
  Description of Artificial Sequence: Synthetic oligonucleotide
  Sense strand starting at position 925 of SEQ ID NO: 318304
cugagauacuggguugugu

SEQ ID NO: 552322 - RNA, 19 nt, Artificial Sequence
  Description of Artificial Sequence: Synthetic oligonucleotide
  Antisense strand to SEQ ID NO: 552321
acacaacccaguaucucag

SEQ ID NO: 552323 - RNA, 19 nt, Artificial Sequence
  Description of Artificial Sequence: Synthetic oligonucleotide
  Sense strand starting at position 992 of SEQ ID NO: 318304
cuauguucuggccaagaag

SEQ ID NO: 552324 - RNA, 19 nt, Artificial Sequence
  Description of Artificial Sequence: Synthetic oligonucleotide
  Antisense strand to SEQ ID NO: 552323
cuucuuggccagaacauag

SEQ ID NO: 552325 - RNA, 19 nt, Artificial Sequence
  Description of Artificial Sequence: Synthetic oligonucleotide
  Sense strand starting at position 1030 of SEQ ID NO: 318304
uaggguguguuccuuaaag

SEQ ID NO: 552326 - RNA, 19 nt, Artificial Sequence
  Description of Artificial Sequence: Synthetic oligonucleotide
  Antisense strand to SEQ ID NO: 552325
cuuuaaggaacacacccua

SEQ ID NO: 552327 - RNA, 19 nt, Artificial Sequence
  Description of Artificial Sequence: Synthetic oligonucleotide
  Sense strand starting at position 1032 of SEQ ID NO: 318304
ggguguguuccuuaaagga

SEQ ID NO: 552328 - RNA, 19 nt, Artificial Sequence
  Description of Artificial Sequence: Synthetic oligonucleotide
  Antisense strand to SEQ ID NO: 552327
uccuuuaaggaacacaccc

SEQ ID NO: 552329 - RNA, 19 nt, Artificial Sequence
  Description of Artificial Sequence: Synthetic oligonucleotide
  Sense strand starting at position 1163 of SEQ ID NO: 318304
gguuguguuauugcucugu

SEQ ID NO: 552330 - RNA, 19 nt, Artificial Sequence
  Description of Artificial Sequence: Synthetic oligonucleotide
  Antisense strand to SEQ ID NO: 552329
acagagcaauaacacaacc

SEQ ID NO: 552331 - RNA, 19 nt, Artificial Sequence
  Description of Artificial Sequence: Synthetic oligonucleotide
  Sense strand starting at position 1205 of SEQ ID NO: 318304
gcugcugaucgugcagaca

SEQ ID NO: 552332 - RNA, 19 nt, Artificial Sequence
  Description of Artificial Sequence: Synthetic oligonucleotide
  Antisense strand to SEQ ID NO: 552331
ugucugcacgaucagcagc

SEQ ID NO: 552333 - RNA, 19 nt, Artificial Sequence
  Description of Artificial Sequence: Synthetic oligonucleotide
  Sense strand starting at position 1272 of SEQ ID NO: 318304
gcgggagguaugucugugu

SEQ ID NO: 552334 - RNA, 19 nt, Artificial Sequence
  Description of Artificial Sequence: Synthetic oligonucleotide
  Antisense strand to SEQ ID NO: 552333
acacagacauaccucccgc

SEQ ID NO: 552335 - RNA, 19 nt, Artificial Sequence
  Description of Artificial Sequence: Synthetic oligonucleotide
  Sense strand starting at position 1291 of SEQ ID NO: 318304
gcacauaugcagggaugua

SEQ ID NO: 552336 - RNA, 19 nt, Artificial Sequence
  Description of Artificial Sequence: Synthetic oligonucleotide
  Antisense strand to SEQ ID NO: 552335
uacaucccugcauaugugc

SEQ ID NO: 552337 - RNA, 19 nt, Artificial Sequence
  Description of Artificial Sequence: Synthetic oligonucleotide
  Sense strand starting at position 1296 of SEQ ID NO: 318304
uaugcagggauguauguau

SEQ ID NO: 552338 - RNA, 19 nt, Artificial Sequence
  Description of Artificial Sequence: Synthetic oligonucleotide
  Antisense strand to SEQ ID NO: 552337
auacauacaucccugcaua

SEQ ID NO: 552339 - RNA, 19 nt, Artificial Sequence
  Description of Artificial Sequence: Synthetic oligonucleotide
  Sense strand starting at position 1372 of SEQ ID NO: 318304
cugagugagccgagguagu

SEQ ID NO: 552340 - RNA, 19 nt, Artificial Sequence
  Description of Artificial Sequence: Synthetic oligonucleotide
  Antisense strand to SEQ ID NO: 552339
acuaccucggcucacucag

SEQ ID NO: 552341 - RNA, 19 nt, Artificial Sequence
  Description of Artificial Sequence: Synthetic oligonucleotide
  Sense strand starting at position 1382 of SEQ ID NO: 318304
cgagguaguugcccaacaa

SEQ ID NO: 552342 - RNA, 19 nt, Artificial Sequence
  Description of Artificial Sequence: Synthetic oligonucleotide
  Antisense strand to SEQ ID NO: 552341
uuguugggcaacuaccucg

SEQ ID NO: 552343 - RNA, 19 nt, Artificial Sequence
  Description of Artificial Sequence: Synthetic oligonucleotide
  Sense strand starting at position 1383 of SEQ ID NO: 318304
gagguaguugcccaacaag

SEQ ID NO: 552344 - RNA, 19 nt, Artificial Sequence
  Description of Artificial Sequence: Synthetic oligonucleotide
  Antisense strand to SEQ ID NO: 552343
cuuguugggcaacuaccuc

SEQ ID NO: 552345 - RNA, 19 nt, Artificial Sequence
  Description of Artificial Sequence: Synthetic oligonucleotide
  Sense strand starting at position 1394 of SEQ ID NO: 318304
ccaacaaguguguauguau

SEQ ID NO: 552346 - RNA, 19 nt, Artificial Sequence
  Description of Artificial Sequence: Synthetic oligonucleotide
  Antisense strand to SEQ ID NO: 552345
auacauacacacuuguugg

SEQ ID NO: 552347 - RNA, 19 nt, Artificial Sequence
  Description of Artificial Sequence: Synthetic oligonucleotide
  Sense strand starting at position 2742 of SEQ ID NO: 318304
cguauuugccagugacuua

SEQ ID NO: 552348 - RNA, 19 nt, Artificial Sequence
  Description of Artificial Sequence: Synthetic oligonucleotide
  Antisense strand to SEQ ID NO: 552347
uaagucacuggcaaauacg

SEQ ID NO: 552349 - RNA, 19 nt, Artificial Sequence
  Description of Artificial Sequence: Synthetic oligonucleotide
  Sense strand starting at position 2944 of SEQ ID NO: 318304
ucuagaggucucugaguag

SEQ ID NO: 552350 - RNA, 19 nt, Artificial Sequence
  Description of Artificial Sequence: Synthetic oligonucleotide
  Antisense strand to SEQ ID NO: 552349
cuacucagagaccucuaga

SEQ ID NO: 552351 - RNA, 19 nt, Artificial Sequence
  Description of Artificial Sequence: Synthetic oligonucleotide
  Sense strand starting at position 2947 of SEQ ID NO: 318304
agaggucucugaguagcuu

SEQ ID NO: 552352 - RNA, 19 nt, Artificial Sequence
  Description of Artificial Sequence: Synthetic oligonucleotide
  Antisense strand to SEQ ID NO: 552351
aagcuacucagagaccucu

SEQ ID NO: 552353 - RNA, 19 nt, Artificial Sequence
  Description of Artificial Sequence: Synthetic oligonucleotide
  Sense strand starting at position 2981 of SEQ ID NO: 318304
ugcgcuugcgguuugguaa

SEQ ID NO: 552354 - RNA, 19 nt, Artificial Sequence
  Description of Artificial Sequence: Synthetic oligonucleotide
  Antisense strand to SEQ ID NO: 552353
uuaccaaaccgcaagcgca

SEQ ID NO: 552355 - RNA, 19 nt, Artificial Sequence
  Description of Artificial Sequence: Synthetic oligonucleotide
  Sense strand starting at position 3062 of SEQ ID NO: 318304
cagaguguucuaggucaaa

SEQ ID NO: 552356 - RNA, 19 nt, Artificial Sequence
  Description of Artificial Sequence: Synthetic oligonucleotide
  Antisense strand to SEQ ID NO: 552355
uuugaccuagaacacucug

SEQ ID NO: 552357 - RNA, 19 nt, Artificial Sequence
  Description of Artificial Sequence: Synthetic oligonucleotide
  Sense strand starting at position 3089 of SEQ ID NO: 318304
gaagguuaucccuagccag

SEQ ID NO: 552358 - RNA, 19 nt, Artificial Sequence
  Description of Artificial Sequence: Synthetic oligonucleotide
  Antisense strand to SEQ ID NO: 552357
cuggcuagggauaaccuuc

SEQ ID NO: 552359 - RNA, 19 nt, Artificial Sequence
  Description of Artificial Sequence: Synthetic oligonucleotide
  Sense strand starting at position 3134 of SEQ ID NO: 318304
uuguuaugggaugaccagu

SEQ ID NO: 552360 - RNA, 19 nt, Artificial Sequence
  Description of Artificial Sequence: Synthetic oligonucleotide
  Antisense strand to SEQ ID NO: 552359
acuggucaucccauaacaa

SEQ ID NO: 552361 - RNA, 19 nt, Artificial Sequence
  Description of Artificial Sequence: Synthetic oligonucleotide
  Sense strand starting at position 3283 of SEQ ID NO: 318304
gugggaugcucuucagggu

SEQ ID NO: 552362 - RNA, 19 nt, Artificial Sequence
  Description of Artificial Sequence: Synthetic oligonucleotide
  Antisense strand to SEQ ID NO: 552361
acccugaagagcaucccac

SEQ ID NO: 552363 - RNA, 19 nt, Artificial Sequence
  Description of Artificial Sequence: Synthetic oligonucleotide
  Sense strand starting at position 3284 of SEQ ID NO: 318304
ugggaugcucuucagggua

SEQ ID NO: 552364 - RNA, 19 nt, Artificial Sequence
  Description of Artificial Sequence: Synthetic oligonucleotide
  Antisense strand to SEQ ID NO: 552363
uacccugaagagcauccca

SEQ ID NO: 552365 - RNA, 19 nt, Artificial Sequence
  Description of Artificial Sequence: Synthetic oligonucleotide
  Sense strand starting at position 3307 of SEQ ID NO: 318304
uggaaucucugguuagcua

SEQ ID NO: 552366 - RNA, 19 nt, Artificial Sequence
  Description of Artificial Sequence: Synthetic oligonucleotide
  Antisense strand to SEQ ID NO: 552365
uagcuaaccagagauucca

SEQ ID NO: 552367 - RNA, 19 nt, Artificial Sequence
  Description of Artificial Sequence: Synthetic oligonucleotide
  Sense strand starting at position 3308 of SEQ ID NO: 318304
ggaaucucugguuagcuaa

SEQ ID NO: 552368 - RNA, 19 nt, Artificial Sequence
  Description of Artificial Sequence: Synthetic oligonucleotide
  Antisense strand to SEQ ID NO: 552367
uuagcuaaccagagauucc

SEQ ID NO: 552369 - RNA, 19 nt, Artificial Sequence
  Description of Artificial Sequence: Synthetic oligonucleotide
  Sense strand starting at position 3310 of SEQ ID NO: 318304
aaucucugguuagcuaaga

SEQ ID NO: 552370 - RNA, 19 nt, Artificial Sequence
  Description of Artificial Sequence: Synthetic oligonucleotide
  Antisense strand to SEQ ID NO: 552369
ucuuagcuaaccagagauu

SEQ ID NO: 552371 - RNA, 19 nt, Artificial Sequence
  Description of Artificial Sequence: Synthetic oligonucleotide
  Sense strand starting at position 3334 of SEQ ID NO: 318304
agcaaagucuguccaagau

SEQ ID NO: 552372 - RNA, 19 nt, Artificial Sequence
  Description of Artificial Sequence: Synthetic oligonucleotide
  Antisense strand to SEQ ID NO: 552371
aucuuggacagacuuugcu

SEQ ID NO: 552373 - RNA, 19 nt, Artificial Sequence
  Description of Artificial Sequence: Synthetic oligonucleotide
  Sense strand starting at position 3481 of SEQ ID NO: 318304
gggucuguucuguaaguag

SEQ ID NO: 552374 - RNA, 19 nt, Artificial Sequence
  Description of Artificial Sequence: Synthetic oligonucleotide
  Antisense strand to SEQ ID NO: 552373
cuacuuacagaacagaccc

SEQ ID NO: 552375 - RNA, 19 nt, Artificial Sequence
  Description of Artificial Sequence: Synthetic oligonucleotide
  Sense strand starting at position 3502 of SEQ ID NO: 318304
ucuuucugucucuagaaag

SEQ ID NO: 552376 - RNA, 19 nt, Artificial Sequence
  Description of Artificial Sequence: Synthetic oligonucleotide
  Antisense strand to SEQ ID NO: 552375
cuuucuagagacagaaaga

SEQ ID NO: 552377 - RNA, 19 nt, Artificial Sequence
  Description of Artificial Sequence: Synthetic oligonucleotide
  Sense strand starting at position 3753 of SEQ ID NO: 318304
gcuaaucucccagauguuc

SEQ ID NO: 552378 - RNA, 19 nt, Artificial Sequence
  Description of Artificial Sequence: Synthetic oligonucleotide
  Antisense strand to SEQ ID NO: 552377
gaacaucugggagauuagc

SEQ ID NO: 552379 - RNA, 19 nt, Artificial Sequence
  Description of Artificial Sequence: Synthetic oligonucleotide
  Sense strand starting at position 28 of SEQ ID NO: 318305
uuggauuuccagugccagu

SEQ ID NO: 552380 - RNA, 19 nt, Artificial Sequence
  Description of Artificial Sequence: Synthetic oligonucleotide
  Antisense strand to SEQ ID NO: 552379
acuggcacuggaaauccaa

SEQ ID NO: 552381 - RNA, 19 nt, Artificial Sequence
  Description of Artificial Sequence: Synthetic oligonucleotide
  Sense strand starting at position 87 of SEQ ID NO: 318305
agacguugaccuugaccaa

SEQ ID NO: 552382 - RNA, 19 nt, Artificial Sequence
  Description of Artificial Sequence: Synthetic oligonucleotide
  Antisense strand to SEQ ID NO: 552381
uuggucaaggucaacgucu

SEQ ID NO: 552383 - RNA, 19 nt, Artificial Sequence
  Description of Artificial Sequence: Synthetic oligonucleotide
  Sense strand starting at position 142 of SEQ ID NO: 318305
ggcaguuaacaccagauca

SEQ ID NO: 552384 - RNA, 19 nt, Artificial Sequence
  Description of Artificial Sequence: Synthetic oligonucleotide
  Antisense strand to SEQ ID NO: 552383
ugaucugguguuaacugcc

SEQ ID NO: 552385 - RNA, 19 nt, Artificial Sequence
  Description of Artificial Sequence: Synthetic oligonucleotide
  Sense strand starting at position 249 of SEQ ID NO: 318305
caaagugcucacugggaga

SEQ ID NO: 552386 - RNA, 19 nt, Artificial Sequence
  Description of Artificial Sequence: Synthetic oligonucleotide
  Antisense strand to SEQ ID NO: 552385
ucucccagugagcacuuug

SEQ ID NO: 552387 - RNA, 19 nt, Artificial Sequence
  Description of Artificial Sequence: Synthetic oligonucleotide
  Sense strand starting at position 251 of SEQ ID NO: 318305
aagugcucacugggagaca

SEQ ID NO: 552388 - RNA, 19 nt, Artificial Sequence
  Description of Artificial Sequence: Synthetic oligonucleotide
  Antisense strand to SEQ ID NO: 552387
ugucucccagugagcacuu

SEQ ID NO: 552389 - RNA, 19 nt, Artificial Sequence
  Description of Artificial Sequence: Synthetic oligonucleotide
  Sense strand starting at position 400 of SEQ ID NO: 318305
gucauugauguccagcacu

SEQ ID NO: 552390 - RNA, 19 nt, Artificial Sequence
  Description of Artificial Sequence: Synthetic oligonucleotide
  Antisense strand to SEQ ID NO: 552389
agugcuggacaucaaugac

SEQ ID NO: 552391 - RNA, 19 nt, Artificial Sequence
  Description of Artificial Sequence: Synthetic oligonucleotide
  Sense strand starting at position 648 of SEQ ID NO: 318305
ucccgaucacuguaccaga

SEQ ID NO: 552392 - RNA, 19 nt, Artificial Sequence
  Description of Artificial Sequence: Synthetic oligonucleotide
  Antisense strand to SEQ ID NO: 552391
ucugguacagugaucggga

SEQ ID NO: 552393 - RNA, 19 nt, Artificial Sequence
  Description of Artificial Sequence: Synthetic oligonucleotide
  Sense strand starting at position 665 of SEQ ID NO: 318305
gauggcacuuccucugaca

SEQ ID NO: 552394 - RNA, 19 nt, Artificial Sequence
  Description of Artificial Sequence: Synthetic oligonucleotide
  Antisense strand to SEQ ID NO: 552393
ugucagaggaagugccauc

SEQ ID NO: 552395 - RNA, 19 nt, Artificial Sequence
  Description of Artificial Sequence: Synthetic oligonucleotide
  Sense strand starting at position 685 of SEQ ID NO: 318305
uugguauuucaccgugaga

SEQ ID NO: 552396 - RNA, 19 nt, Artificial Sequence
  Description of Artificial Sequence: Synthetic oligonucleotide
  Antisense strand to SEQ ID NO: 552395
ucucacggugaaauaccaa

SEQ ID NO: 552397 - RNA, 19 nt, Artificial Sequence
  Description of Artificial Sequence: Synthetic oligonucleotide
  Sense strand starting at position 687 of SEQ ID NO: 318305
gguauuucaccgugagagu

SEQ ID NO: 552398 - RNA, 19 nt, Artificial Sequence
  Description of Artificial Sequence: Synthetic oligonucleotide
  Antisense strand to SEQ ID NO: 552397
acucucacggugaaauacc

SEQ ID NO: 552399 - RNA, 19 nt, Artificial Sequence
  Description of Artificial Sequence: Synthetic oligonucleotide
  Sense strand starting at position 842 of SEQ ID NO: 318305
ggacaaguccuccaguguu

SEQ ID NO: 552400 - RNA, 19 nt, Artificial Sequence
  Description of Artificial Sequence: Synthetic oligonucleotide
  Antisense strand to SEQ ID NO: 552399
aacacuggaggacuugucc

SEQ ID NO: 552401 - RNA, 19 nt, Artificial Sequence
  Description of Artificial Sequence: Synthetic oligonucleotide
  Sense strand starting at position 854 of SEQ ID NO: 318305
caguguuuccuggauggcu

SEQ ID NO: 552402 - RNA, 19 nt, Artificial Sequence
  Description of Artificial Sequence: Synthetic oligonucleotide
  Antisense strand to SEQ ID NO: 552401
agccauccaggaaacacug

SEQ ID NO: 552403 - RNA, 19 nt, Artificial Sequence
  Description of Artificial Sequence: Synthetic oligonucleotide
  Sense strand starting at position 907 of SEQ ID NO: 318305
ggcacaaccuugucccaua

SEQ ID NO: 552404 - RNA, 19 nt, Artificial Sequence
  Description of Artificial Sequence: Synthetic oligonucleotide
  Antisense strand to SEQ ID NO: 552403
uaugggacaagguugugcc

SEQ ID NO: 552405 - RNA, 19 nt, Artificial Sequence
  Description of Artificial Sequence: Synthetic oligonucleotide
  Sense strand starting at position 974 of SEQ ID NO: 318305
uuggaagcgaucugagaug

SEQ ID NO: 552406 - RNA, 19 nt, Artificial Sequence
  Description of Artificial Sequence: Synthetic oligonucleotide
  Antisense strand to SEQ ID NO: 552405
caucucagaucgcuuccaa

SEQ ID NO: 552407 - RNA, 19 nt, Artificial Sequence
  Description of Artificial Sequence: Synthetic oligonucleotide
  Sense strand starting at position 979 of SEQ ID NO: 318305
agcgaucugagauguccaa

SEQ ID NO: 552408 - RNA, 19 nt, Artificial Sequence
  Description of Artificial Sequence: Synthetic oligonucleotide
  Antisense strand to SEQ ID NO: 552407
uuggacaucucagaucgcu

SEQ ID NO: 552409 - RNA, 19 nt, Artificial Sequence
  Description of Artificial Sequence: Synthetic oligonucleotide
  Sense strand starting at position 1036 of SEQ ID NO: 318305
ggaacuaguugguccacuu

SEQ ID NO: 552410 - RNA, 19 nt, Artificial Sequence
  Description of Artificial Sequence: Synthetic oligonucleotide
  Antisense strand to SEQ ID NO: 552409
aaguggaccaacuaguucc

SEQ ID NO: 552411 - RNA, 19 nt, Artificial Sequence
  Description of Artificial Sequence: Synthetic oligonucleotide
  Sense strand starting at position 1065 of SEQ ID NO: 318305
uggacaagagcuggucuaa

SEQ ID NO: 552412 - RNA, 19 nt, Artificial Sequence
  Description of Artificial Sequence: Synthetic oligonucleotide
  Antisense strand to SEQ ID NO: 552411
uuagaccagcucuugucca

SEQ ID NO: 552413 - RNA, 19 nt, Artificial Sequence
  Description of Artificial Sequence: Synthetic oligonucleotide
  Sense strand starting at position 1193 of SEQ ID NO: 318305
aagggagggcugugaguuu

SEQ ID NO: 552414 - RNA, 19 nt, Artificial Sequence
  Description of Artificial Sequence: Synthetic oligonucleotide
  Antisense strand to SEQ ID NO: 552413
aaacucacagcccucccuu

SEQ ID NO: 552415 - RNA, 19 nt, Artificial Sequence
  Description of Artificial Sequence: Synthetic oligonucleotide
  Sense strand starting at position 1573 of SEQ ID NO: 318305
agcagcugugauuaacaga

SEQ ID NO: 552416 - RNA, 19 nt, Artificial Sequence
  Description of Artificial Sequence: Synthetic oligonucleotide
  Antisense strand to SEQ ID NO: 552415
ucuguuaaucacagcugcu

SEQ ID NO: 552417 - RNA, 19 nt, Artificial Sequence
  Description of Artificial Sequence: Synthetic oligonucleotide
  Sense strand starting at position 1602 of SEQ ID NO: 318305
gagguaaacugccugaguu

SEQ ID NO: 552418 - RNA, 19 nt, Artificial Sequence
  Description of Artificial Sequence: Synthetic oligonucleotide
  Antisense strand to SEQ ID NO: 552417
aacucaggcaguuuaccuc

SEQ ID NO: 552419 - RNA, 19 nt, Artificial Sequence
  Description of Artificial Sequence: Synthetic oligonucleotide
  Sense strand starting at position 1603 of SEQ ID NO: 318305
agguaaacugccugaguuc

SEQ ID NO: 552420 - RNA, 19 nt, Artificial Sequence
  Description of Artificial Sequence: Synthetic oligonucleotide
  Antisense strand to SEQ ID NO: 552419
gaacucaggcaguuuaccu

SEQ ID NO: 552421 - RNA, 19 nt, Artificial Sequence
  Description of Artificial Sequence: Synthetic oligonucleotide
  Sense strand starting at position 1647 of SEQ ID NO: 318305
cggugucaucugggacaag

SEQ ID NO: 552422 - RNA, 19 nt, Artificial Sequence
  Description of Artificial Sequence: Synthetic oligonucleotide
  Antisense strand to SEQ ID NO: 552421
cuugucccagaugacaccg

SEQ ID NO: 552423 - RNA, 19 nt, Artificial Sequence
  Description of Artificial Sequence: Synthetic oligonucleotide
  Sense strand starting at position 1836 of SEQ ID NO: 318305
uguuguaaucugcacaacu

SEQ ID NO: 552424 - RNA, 19 nt, Artificial Sequence
  Description of Artificial Sequence: Synthetic oligonucleotide
  Antisense strand to SEQ ID NO: 552423
aguugugcagauuacaaca

SEQ ID NO: 552425 - RNA, 19 nt, Artificial Sequence
  Description of Artificial Sequence: Synthetic oligonucleotide
  Sense strand starting at position 1838 of SEQ ID NO: 318305
uuguaaucugcacaacuug

SEQ ID NO: 552426 - RNA, 19 nt, Artificial Sequence
  Description of Artificial Sequence: Synthetic oligonucleotide
  Antisense strand to SEQ ID NO: 552425
caaguugugcagauuacaa

SEQ ID NO: 552427 - RNA, 19 nt, Artificial Sequence
  Description of Artificial Sequence: Synthetic oligonucleotide
  Sense strand starting at position 1917 of SEQ ID NO: 318305
gacuuaugagggugcccau

SEQ ID NO: 552428 - RNA, 19 nt, Artificial Sequence
  Description of Artificial Sequence: Synthetic oligonucleotide
  Antisense strand to SEQ ID NO: 552427
augggcacccucauaaguc

SEQ ID NO: 552429 - RNA, 19 nt, Artificial Sequence
  Description of Artificial Sequence: Synthetic oligonucleotide
  Sense strand starting at position 2189 of SEQ ID NO: 318305
auaagagucccgugaagca

SEQ ID NO: 552430 - RNA, 19 nt, Artificial Sequence
  Description of Artificial Sequence: Synthetic oligonucleotide
  Antisense strand to SEQ ID NO: 552429
ugcuucacgggacucuuau

SEQ ID NO: 552431 - RNA, 19 nt, Artificial Sequence
  Description of Artificial Sequence: Synthetic oligonucleotide
  Sense strand starting at position 2411 of SEQ ID NO: 318305
aagguugaucccugaggcu

SEQ ID NO: 552432 - RNA, 19 nt, Artificial Sequence
  Description of Artificial Sequence: Synthetic oligonucleotide
  Antisense strand to SEQ ID NO: 552431
agccucagggaucaaccuu

SEQ ID NO: 552433 - RNA, 19 nt, Artificial Sequence
  Description of Artificial Sequence: Synthetic oligonucleotide
  Sense strand starting at position 2653 of SEQ ID NO: 318305
uccugagguuucccaacua

SEQ ID NO: 552434 - RNA, 19 nt, Artificial Sequence
  Description of Artificial Sequence: Synthetic oligonucleotide
  Antisense strand to SEQ ID NO: 552433
uaguugggaaaccucagga

SEQ ID NO: 552435 - RNA, 19 nt, Artificial Sequence
  Description of Artificial Sequence: Synthetic oligonucleotide
  Sense strand starting at position 2755 of SEQ ID NO: 318305
acucacaagcucugagaca

SEQ ID NO: 552436 - RNA, 19 nt, Artificial Sequence
  Description of Artificial Sequence: Synthetic oligonucleotide
  Antisense strand to SEQ ID NO: 552435
ugucucagagcuugugagu

SEQ ID NO: 552437 - RNA, 19 nt, Artificial Sequence
  Description of Artificial Sequence: Synthetic oligonucleotide
  Sense strand starting at position 3234 of SEQ ID NO: 318305
guagaauggcucuggaauc

SEQ ID NO: 552438 - RNA, 19 nt, Artificial Sequence
  Description of Artificial Sequence: Synthetic oligonucleotide
  Antisense strand to SEQ ID NO: 552437
gauuccagagccauucuac

SEQ ID NO: 552439 - RNA, 19 nt, Artificial Sequence
  Description of Artificial Sequence: Synthetic oligonucleotide
  Sense strand starting at position 3315 of SEQ ID NO: 318305
gagugagcccgaggaaguu

SEQ ID NO: 552440 - RNA, 19 nt, Artificial Sequence
  Description of Artificial Sequence: Synthetic oligonucleotide
  Antisense strand to SEQ ID NO: 552439
aacuuccucgggcucacuc

SEQ ID NO: 552441 - RNA, 19 nt, Artificial Sequence
  Description of Artificial Sequence: Synthetic oligonucleotide
  Sense strand starting at position 3500 of SEQ ID NO: 318305
ggguucccauggcuaagaa

SEQ ID NO: 552442 - RNA, 19 nt, Artificial Sequence
  Description of Artificial Sequence: Synthetic oligonucleotide
  Antisense strand to SEQ ID NO: 552441
uucuuagccaugggaaccc

SEQ ID NO: 552443 - RNA, 19 nt, Artificial Sequence
  Description of Artificial Sequence: Synthetic oligonucleotide
  Sense strand starting at position 3501 of SEQ ID NO: 318305
gguucccauggcuaagaau

SEQ ID NO: 552444 - RNA, 19 nt, Artificial Sequence
  Description of Artificial Sequence: Synthetic oligonucleotide
  Antisense strand to SEQ ID NO: 552443
auucuuagccaugggaacc

SEQ ID NO: 552445 - RNA, 19 nt, Artificial Sequence
  Description of Artificial Sequence: Synthetic oligonucleotide
  Sense strand starting at position 3504 of SEQ ID NO: 318305
ucccauggcuaagaauuua

SEQ ID NO: 552446 - RNA, 19 nt, Artificial Sequence
  Description of Artificial Sequence: Synthetic oligonucleotide
  Antisense strand to SEQ ID NO: 552445
uaaauucuuagccauggga

SEQ ID NO: 552447 - RNA, 19 nt, Artificial Sequence
  Description of Artificial Sequence: Synthetic oligonucleotide
  Sense strand starting at position 3557 of SEQ ID NO: 318305
aagcucuacgcaggauaau

SEQ ID NO: 552448 - RNA, 19 nt, Artificial Sequence
  Description of Artificial Sequence: Synthetic oligonucleotide
  Antisense strand to SEQ ID NO: 552447
auuauccugcguagagcuu

SEQ ID NO: 552449 - RNA, 19 nt, Artificial Sequence
  Description of Artificial Sequence: Synthetic oligonucleotide
  Sense strand starting at position 3707 of SEQ ID NO: 318305
agaugugcccuccagaaag

SEQ ID NO: 552450 - RNA, 19 nt, Artificial Sequence
  Description of Artificial Sequence: Synthetic oligonucleotide
  Antisense strand to SEQ ID NO: 552449
cuuucuggagggcacaucu

SEQ ID NO: 552451 - RNA, 19 nt, Artificial Sequence
  Description of Artificial Sequence: Synthetic oligonucleotide
  Sense strand starting at position 3783 of SEQ ID NO: 318305
ccuaguugagaguaaugca

SEQ ID NO: 552452 - RNA, 19 nt, Artificial Sequence
  Description of Artificial Sequence: Synthetic oligonucleotide
  Antisense strand to SEQ ID NO: 552451
ugcauuacucucaacuagg

SEQ ID NO: 552453 - RNA, 19 nt, Artificial Sequence
  Description of Artificial Sequence: Synthetic oligonucleotide
  Sense strand starting at position 3946 of SEQ ID NO: 318305
ccgugcuacacagaagaau

SEQ ID NO: 552454 - RNA, 19 nt, Artificial Sequence
  Description of Artificial Sequence: Synthetic oligonucleotide
  Antisense strand to SEQ ID NO: 552453
auucuucuguguagcacgg

SEQ ID NO: 552455 - RNA, 19 nt, Artificial Sequence
  Description of Artificial Sequence: Synthetic oligonucleotide
  Sense strand starting at position 3970 of SEQ ID NO: 318305
aggagaagcuacucacuga

SEQ ID NO: 552456 - RNA, 19 nt, Artificial Sequence
  Description of Artificial Sequence: Synthetic oligonucleotide
  Antisense strand to SEQ ID NO: 552455
ucagugaguagcuucuccu

SEQ ID NO: 552457 - RNA, 19 nt, Artificial Sequence
  Description of Artificial Sequence: Synthetic oligonucleotide
  Sense strand starting at position 3973 of SEQ ID NO: 318305
agaagcuacucacugauga

SEQ ID NO: 552458 - RNA, 19 nt, Artificial Sequence
  Description of Artificial Sequence: Synthetic oligonucleotide
  Antisense strand to SEQ ID NO: 552457
ucaucagugaguagcuucu

SEQ ID NO: 552459 - RNA, 19 nt, Artificial Sequence
  Description of Artificial Sequence: Synthetic oligonucleotide
  Sense strand starting at position 2036 of SEQ ID NO: 318306
acaucauguggccaaugua

SEQ ID NO: 552460 - RNA, 19 nt, Artificial Sequence
  Description of Artificial Sequence: Synthetic oligonucleotide
  Antisense strand to SEQ ID NO: 552459
uacauuggccacaugaugu

SEQ ID NO: 552461 - RNA, 19 nt, Artificial Sequence
  Description of Artificial Sequence: Synthetic oligonucleotide
  Sense strand starting at position 2039 of SEQ ID NO: 318306
ucauguggccaauguaaau

SEQ ID NO: 552462 - RNA, 19 nt, Artificial Sequence
  Description of Artificial Sequence: Synthetic oligonucleotide
  Antisense strand to SEQ ID NO: 552461
auuuacauuggccacauga

SEQ ID NO: 552463 - RNA, 19 nt, Artificial Sequence
  Description of Artificial Sequence: Synthetic oligonucleotide
  Sense strand starting at position 2059 of SEQ ID NO: 318306
uuagauccauucguugauu

SEQ ID NO: 552464 - RNA, 19 nt, Artificial Sequence
  Description of Artificial Sequence: Synthetic oligonucleotide
  Antisense strand to SEQ ID NO: 552463
aaucaacgaauggaucuaa

SEQ ID NO: 552465 - RNA, 19 nt, Artificial Sequence
  Description of Artificial Sequence: Synthetic oligonucleotide
  Sense strand starting at position 2091 of SEQ ID NO: 318306
cuauauccgucugcaauuu

SEQ ID NO: 552466 - RNA, 19 nt, Artificial Sequence
  Description of Artificial Sequence: Synthetic oligonucleotide
  Antisense strand to SEQ ID NO: 552465
aaauugcagacggauauag

SEQ ID NO: 552467 - RNA, 19 nt, Artificial Sequence
  Description of Artificial Sequence: Synthetic oligonucleotide
  Sense strand starting at position 2099 of SEQ ID NO: 318306
gucugcaauuuguuaaaug

SEQ ID NO: 552468 - RNA, 19 nt, Artificial Sequence
  Description of Artificial Sequence: Synthetic oligonucleotide
  Antisense strand to SEQ ID NO: 552467
cauuuaacaaauugcagac

SEQ ID NO: 552469 - RNA, 19 nt, Artificial Sequence
  Description of Artificial Sequence: Synthetic oligonucleotide
  Sense strand starting at position 2166 of SEQ ID NO: 318306
cucauuggagaguguguaa

SEQ ID NO: 552470 - RNA, 19 nt, Artificial Sequence
  Description of Artificial Sequence: Synthetic oligonucleotide
  Antisense strand to SEQ ID NO: 552469
uuacacacucuccaaugag

SEQ ID NO: 552471 - RNA, 19 nt, Artificial Sequence
  Description of Artificial Sequence: Synthetic oligonucleotide
  Sense strand starting at position 2317 of SEQ ID NO: 318306
uuugcaacugaaugucaaa

SEQ ID NO: 552472 - RNA, 19 nt, Artificial Sequence
  Description of Artificial Sequence: Synthetic oligonucleotide
  Antisense strand to SEQ ID NO: 552471
uuugacauucaguugcaaa

SEQ ID NO: 552473 - RNA, 19 nt, Artificial Sequence
  Description of Artificial Sequence: Synthetic oligonucleotide
  Sense strand starting at position 2346 of SEQ ID NO: 318306
aagguaguuugacugauau

SEQ ID NO: 552474 - RNA, 19 nt, Artificial Sequence
  Description of Artificial Sequence: Synthetic oligonucleotide
  Antisense strand to SEQ ID NO: 552473
auaucagucaaacuaccuu

SEQ ID NO: 552475 - RNA, 19 nt, Artificial Sequence
  Description of Artificial Sequence: Synthetic oligonucleotide
  Sense strand starting at position 2348 of SEQ ID NO: 318306
gguaguuugacugauauga

SEQ ID NO: 552476 - RNA, 19 nt, Artificial Sequence
  Description of Artificial Sequence: Synthetic oligonucleotide
  Antisense strand to SEQ ID NO: 552475
ucauaucagucaaacuacc

SEQ ID NO: 552477 - RNA, 19 nt, Artificial Sequence
  Description of Artificial Sequence: Synthetic oligonucleotide
  Sense strand starting at position 2378 of SEQ ID NO: 318306
cuaggauagcuuggguguu

SEQ ID NO: 552478 - RNA, 19 nt, Artificial Sequence
  Description of Artificial Sequence: Synthetic oligonucleotide
  Antisense strand to SEQ ID NO: 552477
aacacccaagcuauccuag

SEQ ID NO: 552479 - RNA, 19 nt, Artificial Sequence
  Description of Artificial Sequence: Synthetic oligonucleotide
  Sense strand starting at position 2449 of SEQ ID NO: 318306
guuaucagguacuuacaga

SEQ ID NO: 552480 - RNA, 19 nt, Artificial Sequence
  Description of Artificial Sequence: Synthetic oligonucleotide
  Antisense strand to SEQ ID NO: 552479
ucuguaaguaccugauaac

SEQ ID NO: 552481 - RNA, 19 nt, Artificial Sequence
  Description of Artificial Sequence: Synthetic oligonucleotide
  Sense strand starting at position 2507 of SEQ ID NO: 318306
uuuaaugugguaugaacaa

SEQ ID NO: 552482 - RNA, 19 nt, Artificial Sequence
  Description of Artificial Sequence: Synthetic oligonucleotide
  Antisense strand to SEQ ID NO: 552481
uuguucauaccacauuaaa

SEQ ID NO: 552483 - RNA, 19 nt, Artificial Sequence
  Description of Artificial Sequence: Synthetic oligonucleotide
  Sense strand starting at position 2577 of SEQ ID NO: 318306
uuucccuuguuguuauaua

SEQ ID NO: 552484 - RNA, 19 nt, Artificial Sequence
  Description of Artificial Sequence: Synthetic oligonucleotide
  Antisense strand to SEQ ID NO: 552483
uauauaacaacaagggaaa

SEQ ID NO: 552485 - RNA, 19 nt, Artificial Sequence
  Description of Artificial Sequence: Synthetic oligonucleotide
  Sense strand starting at position 2658 of SEQ ID NO: 318306
aucgguguccacuagaucu

SEQ ID NO: 552486 - RNA, 19 nt, Artificial Sequence
  Description of Artificial Sequence: Synthetic oligonucleotide
  Antisense strand to SEQ ID NO: 552485
agaucuaguggacaccgau

SEQ ID NO: 552487 - RNA, 19 nt, Artificial Sequence
  Description of Artificial Sequence: Synthetic oligonucleotide
  Sense strand starting at position 2660 of SEQ ID NO: 318306
cgguguccacuagaucuuu

SEQ ID NO: 552488 - RNA, 19 nt, Artificial Sequence
  Description of Artificial Sequence: Synthetic oligonucleotide
  Antisense strand to SEQ ID NO: 552487
aaagaucuaguggacaccg

SEQ ID NO: 552489 - RNA, 19 nt, Artificial Sequence
  Description of Artificial Sequence: Synthetic oligonucleotide
  Sense strand starting at position 2760 of SEQ ID NO: 318306
auugaaucgcaauaucaga

SEQ ID NO: 552490 - RNA, 19 nt, Artificial Sequence
  Description of Artificial Sequence: Synthetic oligonucleotide
  Antisense strand to SEQ ID NO: 552489
ucugauauugcgauucaau

SEQ ID NO: 552491 - RNA, 19 nt, Artificial Sequence
  Description of Artificial Sequence: Synthetic oligonucleotide
  Sense strand starting at position 2767 of SEQ ID NO: 318306
cgcaauaucagagacacgu

SEQ ID NO: 552492 - RNA, 19 nt, Artificial Sequence
  Description of Artificial Sequence: Synthetic oligonucleotide
  Antisense strand to SEQ ID NO: 552491
acgugucucugauauugcg

SEQ ID NO: 552493 - RNA, 19 nt, Artificial Sequence
  Description of Artificial Sequence: Synthetic oligonucleotide
  Sense strand starting at position 2824 of SEQ ID NO: 318306
uguaaaucuuaugcaaaga

SEQ ID NO: 552494 - RNA, 19 nt, Artificial Sequence
  Description of Artificial Sequence: Synthetic oligonucleotide
  Antisense strand to SEQ ID NO: 552493
ucuuugcauaagauuuaca

SEQ ID NO: 552495 - RNA, 19 nt, Artificial Sequence
  Description of Artificial Sequence: Synthetic oligonucleotide
  Sense strand starting at position 2929 of SEQ ID NO: 318306
gcuacaucuuaguuugacu

SEQ ID NO: 552496 - RNA, 19 nt, Artificial Sequence
  Description of Artificial Sequence: Synthetic oligonucleotide
  Antisense strand to SEQ ID NO: 552495
agucaaacuaagauguagc

SEQ ID NO: 552497 - RNA, 19 nt, Artificial Sequence
  Description of Artificial Sequence: Synthetic oligonucleotide
  Sense strand starting at position 2934 of SEQ ID NO: 318306
aucuuaguuugacuaagaa

SEQ ID NO: 552498 - RNA, 19 nt, Artificial Sequence
  Description of Artificial Sequence: Synthetic oligonucleotide
  Antisense strand to SEQ ID NO: 552497
uucuuagucaaacuaagau

SEQ ID NO: 552499 - RNA, 19 nt, Artificial Sequence
  Description of Artificial Sequence: Synthetic oligonucleotide
  Sense strand starting at position 2995 of SEQ ID NO: 318306
uggccauaauguuuauauu

SEQ ID NO: 552500 - RNA, 19 nt, Artificial Sequence
  Description of Artificial Sequence: Synthetic oligonucleotide
  Antisense strand to SEQ ID NO: 552499
aauauaaacauuauggcca

SEQ ID NO: 552501 - RNA, 19 nt, Artificial Sequence
  Description of Artificial Sequence: Synthetic oligonucleotide
  Sense strand starting at position 3035 of SEQ ID NO: 318306
ggacauuaaugugaauaag

SEQ ID NO: 552502 - RNA, 19 nt, Artificial Sequence
  Description of Artificial Sequence: Synthetic oligonucleotide
  Antisense strand to SEQ ID NO: 552501
cuuauucacauuaaugucc

SEQ ID NO: 552503 - RNA, 19 nt, Artificial Sequence
  Description of Artificial Sequence: Synthetic oligonucleotide
  Sense strand starting at position 3274 of SEQ ID NO: 318306
cauucuaaagguuagcaga

SEQ ID NO: 552504 - RNA, 19 nt, Artificial Sequence
  Description of Artificial Sequence: Synthetic oligonucleotide
  Antisense strand to SEQ ID NO: 552503
ucugcuaaccuuuagaaug

SEQ ID NO: 552505 - RNA, 19 nt, Artificial Sequence
  Description of Artificial Sequence: Synthetic oligonucleotide
  Sense strand starting at position 3276 of SEQ ID NO: 318306
uucuaaagguuagcagauu

SEQ ID NO: 552506 - RNA, 19 nt, Artificial Sequence
  Description of Artificial Sequence: Synthetic oligonucleotide
  Antisense strand to SEQ ID NO: 552505
aaucugcuaaccuuuagaa

SEQ ID NO: 552507 - RNA, 19 nt, Artificial Sequence
  Description of Artificial Sequence: Synthetic oligonucleotide
  Sense strand starting at position 3277 of SEQ ID NO: 318306
ucuaaagguuagcagauuu

SEQ ID NO: 552508 - RNA, 19 nt, Artificial Sequence
  Description of Artificial Sequence: Synthetic oligonucleotide
  Antisense strand to SEQ ID NO: 552507
aaaucugcuaaccuuuaga

SEQ ID NO: 552509 - RNA, 19 nt, Artificial Sequence
  Description of Artificial Sequence: Synthetic oligonucleotide
  Sense strand starting at position 3285 of SEQ ID NO: 318306
uuagcagauuuagagaaca

SEQ ID NO: 552510 - RNA, 19 nt, Artificial Sequence
  Description of Artificial Sequence: Synthetic oligonucleotide
  Antisense strand to SEQ ID NO: 552509
uguucucuaaaucugcuaa

SEQ ID NO: 552511 - RNA, 19 nt, Artificial Sequence
  Description of Artificial Sequence: Synthetic oligonucleotide
  Sense strand starting at position 3293 of SEQ ID NO: 318306
uuuagagaacauugucaac

SEQ ID NO: 552512 - RNA, 19 nt, Artificial Sequence
  Description of Artificial Sequence: Synthetic oligonucleotide
  Antisense strand to SEQ ID NO: 552511
guugacaauguucucuaaa

SEQ ID NO: 552513 - RNA, 19 nt, Artificial Sequence
  Description of Artificial Sequence: Synthetic oligonucleotide
  Sense strand starting at position 3296 of SEQ ID NO: 318306
agagaacauugucaacauu

SEQ ID NO: 552514 - RNA, 19 nt, Artificial Sequence
  Description of Artificial Sequence: Synthetic oligonucleotide
  Antisense strand to SEQ ID NO: 552513
aauguugacaauguucucu

SEQ ID NO: 552515 - RNA, 19 nt, Artificial Sequence
  Description of Artificial Sequence: Synthetic oligonucleotide
  Sense strand starting at position 3354 of SEQ ID NO: 318306
gacugacacaguggugaaa

SEQ ID NO: 552516 - RNA, 19 nt, Artificial Sequence
  Description of Artificial Sequence: Synthetic oligonucleotide
  Antisense strand to SEQ ID NO: 552515
uuucaccacugugucaguc

SEQ ID NO: 552517 - RNA, 19 nt, Artificial Sequence
  Description of Artificial Sequence: Synthetic oligonucleotide
  Sense strand starting at position 3365 of SEQ ID NO: 318306
uggugaaaucucuggguuu

SEQ ID NO: 552518 - RNA, 19 nt, Artificial Sequence
  Description of Artificial Sequence: Synthetic oligonucleotide
  Antisense strand to SEQ ID NO: 552517
aaacccagagauuucacca

SEQ ID NO: 552519 - RNA, 19 nt, Artificial Sequence
  Description of Artificial Sequence: Synthetic oligonucleotide
  Sense strand starting at position 3426 of SEQ ID NO: 318306
ccagaaacauuauugggua

SEQ ID NO: 552520 - RNA, 19 nt, Artificial Sequence
  Description of Artificial Sequence: Synthetic oligonucleotide
  Antisense strand to SEQ ID NO: 552519
uacccaauaauguuucugg

SEQ ID NO: 552521 - RNA, 19 nt, Artificial Sequence
  Description of Artificial Sequence: Synthetic oligonucleotide
  Sense strand starting at position 3430 of SEQ ID NO: 318306
aaacauuauuggguacuga

SEQ ID NO: 552522 - RNA, 19 nt, Artificial Sequence
  Description of Artificial Sequence: Synthetic oligonucleotide
  Antisense strand to SEQ ID NO: 552521
ucaguacccaauaauguuu

SEQ ID NO: 552523 - RNA, 19 nt, Artificial Sequence
  Description of Artificial Sequence: Synthetic oligonucleotide
  Sense strand starting at position 3471 of SEQ ID NO: 318306
gcaugcuuucucuagacaa

SEQ ID NO: 552524 - RNA, 19 nt, Artificial Sequence
  Description of Artificial Sequence: Synthetic oligonucleotide
  Antisense strand to SEQ ID NO: 552523
uugucuagagaaagcaugc

SEQ ID NO: 552525 - RNA, 19 nt, Artificial Sequence
  Description of Artificial Sequence: Synthetic oligonucleotide
  Sense strand starting at position 3473 of SEQ ID NO: 318306
augcuuucucuagacaaag

SEQ ID NO: 552526 - RNA, 19 nt, Artificial Sequence
  Description of Artificial Sequence: Synthetic oligonucleotide
  Antisense strand to SEQ ID NO: 552525
cuuugucuagagaaagcau

SEQ ID NO: 552527 - RNA, 19 nt, Artificial Sequence
  Description of Artificial Sequence: Synthetic oligonucleotide
  Sense strand starting at position 3600 of SEQ ID NO: 318306
gggaaucuagauuaacgcu

SEQ ID NO: 552528 - RNA, 19 nt, Artificial Sequence
  Description of Artificial Sequence: Synthetic oligonucleotide
  Antisense strand to SEQ ID NO: 552527
agcguuaaucuagauuccc

SEQ ID NO: 552529 - RNA, 19 nt, Artificial Sequence
  Description of Artificial Sequence: Synthetic oligonucleotide
  Sense strand starting at position 3646 of SEQ ID NO: 318306
aauacuucuggugguauca

SEQ ID NO: 552530 - RNA, 19 nt, Artificial Sequence
  Description of Artificial Sequence: Synthetic oligonucleotide
  Antisense strand to SEQ ID NO: 552529
ugauaccaccagaaguauu

SEQ ID NO: 552531 - RNA, 19 nt, Artificial Sequence
  Description of Artificial Sequence: Synthetic oligonucleotide
  Sense strand starting at position 3843 of SEQ ID NO: 318306
accugaggcggguaaucua

SEQ ID NO: 552532 - RNA, 19 nt, Artificial Sequence
  Description of Artificial Sequence: Synthetic oligonucleotide
  Antisense strand to SEQ ID NO: 552531
uagauuacccgccucaggu

SEQ ID NO: 552533 - RNA, 19 nt, Artificial Sequence
  Description of Artificial Sequence: Synthetic oligonucleotide
  Sense strand starting at position 3846 of SEQ ID NO: 318306
ugaggcggguaaucuauaa

SEQ ID NO: 552534 - RNA, 19 nt, Artificial Sequence
  Description of Artificial Sequence: Synthetic oligonucleotide
  Antisense strand to SEQ ID NO: 552533
uuauagauuacccgccuca

SEQ ID NO: 552535 - RNA, 19 nt, Artificial Sequence
  Description of Artificial Sequence: Synthetic oligonucleotide
  Sense strand starting at position 3850 of SEQ ID NO: 318306
gcggguaaucuauaaagaa

SEQ ID NO: 552536 - RNA, 19 nt, Artificial Sequence
  Description of Artificial Sequence: Synthetic oligonucleotide
  Antisense strand to SEQ ID NO: 552535
uucuuuauagauuacccgc

SEQ ID NO: 552537 - RNA, 19 nt, Artificial Sequence
  Description of Artificial Sequence: Synthetic oligonucleotide
  Sense strand starting at position 3982 of SEQ ID NO: 318306
gccagcauagcucauggua

SEQ ID NO: 552538 - RNA, 19 nt, Artificial Sequence
  Description of Artificial Sequence: Synthetic oligonucleotide
  Antisense strand to SEQ ID NO: 552537
uaccaugagcuaugcuggc

SEQ ID NO: 552539 - RNA, 19 nt, Artificial Sequence
  Description of Artificial Sequence: Synthetic oligonucleotide
  Sense strand starting at position 1984 of SEQ ID NO: 318307
ggcugaugccuuuguucua

SEQ ID NO: 552540 - RNA, 19 nt, Artificial Sequence
  Description of Artificial Sequence: Synthetic oligonucleotide
  Antisense strand to SEQ ID NO: 552539
uagaacaaaggcaucagcc

SEQ ID NO: 552541 - RNA, 19 nt, Artificial Sequence
  Description of Artificial Sequence: Synthetic oligonucleotide
  Sense strand starting at position 1985 of SEQ ID NO: 318307
gcugaugccuuuguucuaa

SEQ ID NO: 552542 - RNA, 19 nt, Artificial Sequence
  Description of Artificial Sequence: Synthetic oligonucleotide
  Antisense strand to SEQ ID NO: 552541
uuagaacaaaggcaucagc

SEQ ID NO: 552543 - RNA, 19 nt, Artificial Sequence
  Description of Artificial Sequence: Synthetic oligonucleotide
  Sense strand starting at position 2025 of SEQ ID NO: 318307
gcgacauccgguggcuuua

SEQ ID NO: 552544 - RNA, 19 nt, Artificial Sequence
  Description of Artificial Sequence: Synthetic oligonucleotide
  Antisense strand to SEQ ID NO: 552543
uaaagccaccggaugucgc

SEQ ID NO: 552545 - RNA, 19 nt, Artificial Sequence
  Description of Artificial Sequence: Synthetic oligonucleotide
  Sense strand starting at position 2034 of SEQ ID NO: 318307
gguggcuuuagguguaagu

SEQ ID NO: 552546 - RNA, 19 nt, Artificial Sequence
  Description of Artificial Sequence: Synthetic oligonucleotide
  Antisense strand to SEQ ID NO: 552545
acuuacaccuaaagccacc

SEQ ID NO: 552547 - RNA, 19 nt, Artificial Sequence
  Description of Artificial Sequence: Synthetic oligonucleotide
  Sense strand starting at position 2048 of SEQ ID NO: 318307
uaaguacgauuccaugagu

SEQ ID NO: 552548 - RNA, 19 nt, Artificial Sequence
  Description of Artificial Sequence: Synthetic oligonucleotide
  Antisense strand to SEQ ID NO: 552547
acucauggaaucguacuua

SEQ ID NO: 552549 - RNA, 19 nt, Artificial Sequence
  Description of Artificial Sequence: Synthetic oligonucleotide
  Sense strand starting at position 2174 of SEQ ID NO: 318307
guugaucccacgugcaaug

SEQ ID NO: 552550 - RNA, 19 nt, Artificial Sequence
  Description of Artificial Sequence: Synthetic oligonucleotide
  Antisense strand to SEQ ID NO: 552549
cauugcacgugggaucaac

SEQ ID NO: 552551 - RNA, 19 nt, Artificial Sequence
  Description of Artificial Sequence: Synthetic oligonucleotide
  Sense strand starting at position 2201 of SEQ ID NO: 318307
aauguagacucucagagua

SEQ ID NO: 552552 - RNA, 19 nt, Artificial Sequence
  Description of Artificial Sequence: Synthetic oligonucleotide
  Antisense strand to SEQ ID NO: 552551
uacucugagagucuacauu

SEQ ID NO: 552553 - RNA, 19 nt, Artificial Sequence
  Description of Artificial Sequence: Synthetic oligonucleotide
  Sense strand starting at position 2209 of SEQ ID NO: 318307
cucucagaguagugauuuc

SEQ ID NO: 552554 - RNA, 19 nt, Artificial Sequence
  Description of Artificial Sequence: Synthetic oligonucleotide
  Antisense strand to SEQ ID NO: 552553
gaaaucacuacucugagag

SEQ ID NO: 552555 - RNA, 19 nt, Artificial Sequence
  Description of Artificial Sequence: Synthetic oligonucleotide
  Sense strand starting at position 2281 of SEQ ID NO: 318307
gcauacuacugaguauacu

SEQ ID NO: 552556 - RNA, 19 nt, Artificial Sequence
  Description of Artificial Sequence: Synthetic oligonucleotide
  Antisense strand to SEQ ID NO: 552555
aguauacucaguaguaugc

SEQ ID NO: 552557 - RNA, 19 nt, Artificial Sequence
  Description of Artificial Sequence: Synthetic oligonucleotide
  Sense strand starting at position 2417 of SEQ ID NO: 318307
cuaucugugagguguuuau

SEQ ID NO: 552558 - RNA, 19 nt, Artificial Sequence
  Description of Artificial Sequence: Synthetic oligonucleotide
  Antisense strand to SEQ ID NO: 552557
auaaacaccucacagauag

SEQ ID NO: 552559 - RNA, 19 nt, Artificial Sequence
  Description of Artificial Sequence: Synthetic oligonucleotide
  Sense strand starting at position 2421 of SEQ ID NO: 318307
cugugagguguuuauaacu

SEQ ID NO: 552560 - RNA, 19 nt, Artificial Sequence
  Description of Artificial Sequence: Synthetic oligonucleotide
  Antisense strand to SEQ ID NO: 552559
aguuauaaacaccucacag

SEQ ID NO: 552561 - RNA, 19 nt, Artificial Sequence
  Description of Artificial Sequence: Synthetic oligonucleotide
  Sense strand starting at position 2426 of SEQ ID NO: 318307
agguguuuauaacuccgaa

SEQ ID NO: 552562 - RNA, 19 nt, Artificial Sequence
  Description of Artificial Sequence: Synthetic oligonucleotide
  Antisense strand to SEQ ID NO: 552561
uucggaguuauaaacaccu

SEQ ID NO: 552563 - RNA, 19 nt, Artificial Sequence
  Description of Artificial Sequence: Synthetic oligonucleotide
  Sense strand starting at position 2429 of SEQ ID NO: 318307
uguuuauaacuccgaagau

SEQ ID NO: 552564 - RNA, 19 nt, Artificial Sequence
  Description of Artificial Sequence: Synthetic oligonucleotide
  Antisense strand to SEQ ID NO: 552563
aucuucggaguuauaaaca

SEQ ID NO: 552565 - RNA, 19 nt, Artificial Sequence
  Description of Artificial Sequence: Synthetic oligonucleotide
  Sense strand starting at position 2430 of SEQ ID NO: 318307
guuuauaacuccgaagauc

SEQ ID NO: 552566 - RNA, 19 nt, Artificial Sequence
  Description of Artificial Sequence: Synthetic oligonucleotide
  Antisense strand to SEQ ID NO: 552565
gaucuucggaguuauaaac

SEQ ID NO: 552567 - RNA, 19 nt, Artificial Sequence
  Description of Artificial Sequence: Synthetic oligonucleotide
  Sense strand starting at position 2464 of SEQ ID NO: 318307
uuuagagaucauuagcuuc

SEQ ID NO: 552568 - RNA, 19 nt, Artificial Sequence
  Description of Artificial Sequence: Synthetic oligonucleotide
  Antisense strand to SEQ ID NO: 552567
gaagcuaaugaucucuaaa

SEQ ID NO: 552569 - RNA, 19 nt, Artificial Sequence
  Description of Artificial Sequence: Synthetic oligonucleotide
  Sense strand starting at position 2528 of SEQ ID NO: 318307
agccacaugacuugggaaa

SEQ ID NO: 552570 - RNA, 19 nt, Artificial Sequence
  Description of Artificial Sequence: Synthetic oligonucleotide
  Antisense strand to SEQ ID NO: 552569
uuucccaagucauguggcu

SEQ ID NO: 552571 - RNA, 19 nt, Artificial Sequence
  Description of Artificial Sequence: Synthetic oligonucleotide
  Sense strand starting at position 2583 of SEQ ID NO: 318307
auaacuuuggccuaauagu

SEQ ID NO: 552572 - RNA, 19 nt, Artificial Sequence
  Description of Artificial Sequence: Synthetic oligonucleotide
  Antisense strand to SEQ ID NO: 552571
acuauuaggccaaaguuau

SEQ ID NO: 552573 - RNA, 19 nt, Artificial Sequence
  Description of Artificial Sequence: Synthetic oligonucleotide
  Sense strand starting at position 2597 of SEQ ID NO: 318307
auaguaauacggugguuga

SEQ ID NO: 552574 - RNA, 19 nt, Artificial Sequence
  Description of Artificial Sequence: Synthetic oligonucleotide
  Antisense strand to SEQ ID NO: 552573
ucaaccaccguauuacuau

SEQ ID NO: 552575 - RNA, 19 nt, Artificial Sequence
  Description of Artificial Sequence: Synthetic oligonucleotide
  Sense strand starting at position 2604 of SEQ ID NO: 318307
uacggugguugagugaauu

SEQ ID NO: 552576 - RNA, 19 nt, Artificial Sequence
  Description of Artificial Sequence: Synthetic oligonucleotide
  Antisense strand to SEQ ID NO: 552575
aauucacucaaccaccgua

SEQ ID NO: 552577 - RNA, 19 nt, Artificial Sequence
  Description of Artificial Sequence: Synthetic oligonucleotide
  Sense strand starting at position 2627 of SEQ ID NO: 318307
uauaguaagugcuugcaau

SEQ ID NO: 552578 - RNA, 19 nt, Artificial Sequence
  Description of Artificial Sequence: Synthetic oligonucleotide
  Antisense strand to SEQ ID NO: 552577
auugcaagcacuuacuaua

SEQ ID NO: 552579 - RNA, 19 nt, Artificial Sequence
  Description of Artificial Sequence: Synthetic oligonucleotide
  Sense strand starting at position 2628 of SEQ ID NO: 318307
auaguaagugcuugcaaua

SEQ ID NO: 552580 - RNA, 19 nt, Artificial Sequence
  Description of Artificial Sequence: Synthetic oligonucleotide
  Antisense strand to SEQ ID NO: 552579
uauugcaagcacuuacuau

SEQ ID NO: 552581 - RNA, 19 nt, Artificial Sequence
  Description of Artificial Sequence: Synthetic oligonucleotide
  Sense strand starting at position 2644 of SEQ ID NO: 318307
auaguaccuuaaggagaau

SEQ ID NO: 552582 - RNA, 19 nt, Artificial Sequence
  Description of Artificial Sequence: Synthetic oligonucleotide
  Antisense strand to SEQ ID NO: 552581
auucuccuuaagguacuau

SEQ ID NO: 552583 - RNA, 19 nt, Artificial Sequence
  Description of Artificial Sequence: Synthetic oligonucleotide
  Sense strand starting at position 2693 of SEQ ID NO: 318307
gccucaauuuggccacauu

SEQ ID NO: 552584 - RNA, 19 nt, Artificial Sequence
  Description of Artificial Sequence: Synthetic oligonucleotide
  Antisense strand to SEQ ID NO: 552583
aauguggccaaauugaggc

SEQ ID NO: 552585 - RNA, 19 nt, Artificial Sequence
  Description of Artificial Sequence: Synthetic oligonucleotide
  Sense strand starting at position 3007 of SEQ ID NO: 318307
agacacaguucugaaauau

SEQ ID NO: 552586 - RNA, 19 nt, Artificial Sequence
  Description of Artificial Sequence: Synthetic oligonucleotide
  Antisense strand to SEQ ID NO: 552585
auauuucagaacugugucu

SEQ ID NO: 552587 - RNA, 19 nt, Artificial Sequence
  Description of Artificial Sequence: Synthetic oligonucleotide
  Sense strand starting at position 3037 of SEQ ID NO: 318307
uuaucaaugucagugaagu

SEQ ID NO: 552588 - RNA, 19 nt, Artificial Sequence
  Description of Artificial Sequence: Synthetic oligonucleotide
  Antisense strand to SEQ ID NO: 552587
acuucacugacauugauaa

SEQ ID NO: 552589 - RNA, 19 nt, Artificial Sequence
  Description of Artificial Sequence: Synthetic oligonucleotide
  Sense strand starting at position 3038 of SEQ ID NO: 318307
uaucaaugucagugaaguu

SEQ ID NO: 552590 - RNA, 19 nt, Artificial Sequence
  Description of Artificial Sequence: Synthetic oligonucleotide
  Antisense strand to SEQ ID NO: 552589
aacuucacugacauugaua

SEQ ID NO: 552591 - RNA, 19 nt, Artificial Sequence
  Description of Artificial Sequence: Synthetic oligonucleotide
  Sense strand starting at position 3132 of SEQ ID NO: 318307
guaauauaucugugcugcu

SEQ ID NO: 552592 - RNA, 19 nt, Artificial Sequence
  Description of Artificial Sequence: Synthetic oligonucleotide
  Antisense strand to SEQ ID NO: 552591
agcagcacagauauauuac

SEQ ID NO: 552593 - RNA, 19 nt, Artificial Sequence
  Description of Artificial Sequence: Synthetic oligonucleotide
  Sense strand starting at position 3198 of SEQ ID NO: 318307
acagacauauuggucuuau

SEQ ID NO: 552594 - RNA, 19 nt, Artificial Sequence
  Description of Artificial Sequence: Synthetic oligonucleotide
  Antisense strand to SEQ ID NO: 552593
auaagaccaauaugucugu

SEQ ID NO: 552595 - RNA, 19 nt, Artificial Sequence
  Description of Artificial Sequence: Synthetic oligonucleotide
  Sense strand starting at position 3199 of SEQ ID NO: 318307
cagacauauuggucuuaug

SEQ ID NO: 552596 - RNA, 19 nt, Artificial Sequence
  Description of Artificial Sequence: Synthetic oligonucleotide
  Antisense strand to SEQ ID NO: 552595
cauaagaccaauaugucug

SEQ ID NO: 552597 - RNA, 19 nt, Artificial Sequence
  Description of Artificial Sequence: Synthetic oligonucleotide
  Sense strand starting at position 3202 of SEQ ID NO: 318307
acauauuggucuuaugcaa

SEQ ID NO: 552598 - RNA, 19 nt, Artificial Sequence
  Description of Artificial Sequence: Synthetic oligonucleotide
  Antisense strand to SEQ ID NO: 552597
uugcauaagaccaauaugu

SEQ ID NO: 552599 - RNA, 19 nt, Artificial Sequence
  Description of Artificial Sequence: Synthetic oligonucleotide
  Sense strand starting at position 3209 of SEQ ID NO: 318307
ggucuuaugcaaggguuaa

SEQ ID NO: 552600 - RNA, 19 nt, Artificial Sequence
  Description of Artificial Sequence: Synthetic oligonucleotide
  Antisense strand to SEQ ID NO: 552599
uuaacccuugcauaagacc

SEQ ID NO: 552601 - RNA, 19 nt, Artificial Sequence
  Description of Artificial Sequence: Synthetic oligonucleotide
  Sense strand starting at position 3210 of SEQ ID NO: 318307
gucuuaugcaaggguuaau

SEQ ID NO: 552602 - RNA, 19 nt, Artificial Sequence
  Description of Artificial Sequence: Synthetic oligonucleotide
  Antisense strand to SEQ ID NO: 552601
auuaacccuugcauaagac

SEQ ID NO: 552603 - RNA, 19 nt, Artificial Sequence
  Description of Artificial Sequence: Synthetic oligonucleotide
  Sense strand starting at position 3276 of SEQ ID NO: 318307
ugugucaauuacuuuaaac

SEQ ID NO: 552604 - RNA, 19 nt, Artificial Sequence
  Description of Artificial Sequence: Synthetic oligonucleotide
  Antisense strand to SEQ ID NO: 552603
guuuaaaguaauugacaca

SEQ ID NO: 552605 - RNA, 19 nt, Artificial Sequence
  Description of Artificial Sequence: Synthetic oligonucleotide
  Sense strand starting at position 3349 of SEQ ID NO: 318307
gacagaaaugggugucacu

SEQ ID NO: 552606 - RNA, 19 nt, Artificial Sequence
  Description of Artificial Sequence: Synthetic oligonucleotide
  Antisense strand to SEQ ID NO: 552605
agugacacccauuucuguc

SEQ ID NO: 552607 - RNA, 19 nt, Artificial Sequence
  Description of Artificial Sequence: Synthetic oligonucleotide
  Sense strand starting at position 3352 of SEQ ID NO: 318307
agaaaugggugucacuuaa

SEQ ID NO: 552608 - RNA, 19 nt, Artificial Sequence
  Description of Artificial Sequence: Synthetic oligonucleotide
  Antisense strand to SEQ ID NO: 552607
uuaagugacacccauuucu

SEQ ID NO: 552609 - RNA, 19 nt, Artificial Sequence
  Description of Artificial Sequence: Synthetic oligonucleotide
  Sense strand starting at position 3359 of SEQ ID NO: 318307
ggugucacuuaauccauca

SEQ ID NO: 552610 - RNA, 19 nt, Artificial Sequence
  Description of Artificial Sequence: Synthetic oligonucleotide
  Antisense strand to SEQ ID NO: 552609
ugauggauuaagugacacc

SEQ ID NO: 552611 - RNA, 19 nt, Artificial Sequence
  Description of Artificial Sequence: Synthetic oligonucleotide
  Sense strand starting at position 3376 of SEQ ID NO: 318307
caguuuauguguccuacua

SEQ ID NO: 552612 - RNA, 19 nt, Artificial Sequence
  Description of Artificial Sequence: Synthetic oligonucleotide
  Antisense strand to SEQ ID NO: 552611
uaguaggacacauaaacug

SEQ ID NO: 552613 - RNA, 19 nt, Artificial Sequence
  Description of Artificial Sequence: Synthetic oligonucleotide
  Sense strand starting at position 3412 of SEQ ID NO: 318307
ucucuacuccucuggaaug

SEQ ID NO: 552614 - RNA, 19 nt, Artificial Sequence
  Description of Artificial Sequence: Synthetic oligonucleotide
  Antisense strand to SEQ ID NO: 552613
cauuccagaggaguagaga

SEQ ID NO: 552615 - RNA, 19 nt, Artificial Sequence
  Description of Artificial Sequence: Synthetic oligonucleotide
  Sense strand starting at position 3534 of SEQ ID NO: 318307
uuuagcuaucuggagcgua

SEQ ID NO: 552616 - RNA, 19 nt, Artificial Sequence
  Description of Artificial Sequence: Synthetic oligonucleotide
  Antisense strand to SEQ ID NO: 552615
uacgcuccagauagcuaaa

SEQ ID NO: 552617 - RNA, 19 nt, Artificial Sequence
  Description of Artificial Sequence: Synthetic oligonucleotide
  Sense strand starting at position 3559 of SEQ ID NO: 318307
guuugccauugaucaauca

SEQ ID NO: 552618 - RNA, 19 nt, Artificial Sequence
  Description of Artificial Sequence: Synthetic oligonucleotide
  Antisense strand to SEQ ID NO: 552617
ugauugaucaauggcaaac

SEQ ID NO: 552619 - RNA, 19 nt, Artificial Sequence
  Description of Artificial Sequence: Synthetic oligonucleotide
  Sense strand starting at position 2039 of SEQ ID NO: 318308
uucccaauguugucauaac

SEQ ID NO: 552620 - RNA, 19 nt, Artificial Sequence
  Description of Artificial Sequence: Synthetic oligonucleotide
  Antisense strand to SEQ ID NO: 552619
guuaugacaacauugggaa

SEQ ID NO: 552621 - RNA, 19 nt, Artificial Sequence
  Description of Artificial Sequence: Synthetic oligonucleotide
  Sense strand starting at position 2324 of SEQ ID NO: 318308
agucuugcgagguagggaa

SEQ ID NO: 552622 - RNA, 19 nt, Artificial Sequence
  Description of Artificial Sequence: Synthetic oligonucleotide
  Antisense strand to SEQ ID NO: 552621
uucccuaccucgcaagacu

SEQ ID NO: 552623 - RNA, 19 nt, Artificial Sequence
  Description of Artificial Sequence: Synthetic oligonucleotide
  Sense strand starting at position 2415 of SEQ ID NO: 318308
gguguuaauuuccaacaau

SEQ ID NO: 552624 - RNA, 19 nt, Artificial Sequence
  Description of Artificial Sequence: Synthetic oligonucleotide
  Antisense strand to SEQ ID NO: 552623
auuguuggaaauuaacacc

SEQ ID NO: 552625 - RNA, 19 nt, Artificial Sequence
  Description of Artificial Sequence: Synthetic oligonucleotide
  Sense strand starting at position 2492 of SEQ ID NO: 318308
ugauauaguguaugaauca

SEQ ID NO: 552626 - RNA, 19 nt, Artificial Sequence
  Description of Artificial Sequence: Synthetic oligonucleotide
  Antisense strand to SEQ ID NO: 552625
ugauucauacacuauauca

SEQ ID NO: 552627 - RNA, 19 nt, Artificial Sequence
  Description of Artificial Sequence: Synthetic oligonucleotide
  Sense strand starting at position 2576 of SEQ ID NO: 318308
aagagauuaugcgcccuuu

SEQ ID NO: 552628 - RNA, 19 nt, Artificial Sequence
  Description of Artificial Sequence: Synthetic oligonucleotide
  Antisense strand to SEQ ID NO: 552627
aaagggcgcauaaucucuu

SEQ ID NO: 552629 - RNA, 19 nt, Artificial Sequence
  Description of Artificial Sequence: Synthetic oligonucleotide
  Sense strand starting at position 2603 of SEQ ID NO: 318308
cuuugaggaucagccuaau

SEQ ID NO: 552630 - RNA, 19 nt, Artificial Sequence
  Description of Artificial Sequence: Synthetic oligonucleotide
  Antisense strand to SEQ ID NO: 552629
auuaggcugauccucaaag

SEQ ID NO: 552631 - RNA, 19 nt, Artificial Sequence
  Description of Artificial Sequence: Synthetic oligonucleotide
  Sense strand starting at position 2615 of SEQ ID NO: 318308
gccuaauaucuggguauag

SEQ ID NO: 552632 - RNA, 19 nt, Artificial Sequence
  Description of Artificial Sequence: Synthetic oligonucleotide
  Antisense strand to SEQ ID NO: 552631
cuauacccagauauuaggc

SEQ ID NO: 552633 - RNA, 19 nt, Artificial Sequence
  Description of Artificial Sequence: Synthetic oligonucleotide
  Sense strand starting at position 2702 of SEQ ID NO: 318308
ggaacuuugugccugacuu

SEQ ID NO: 552634 - RNA, 19 nt, Artificial Sequence
  Description of Artificial Sequence: Synthetic oligonucleotide
  Antisense strand to SEQ ID NO: 552633
aagucaggcacaaaguucc

SEQ ID NO: 552635 - RNA, 19 nt, Artificial Sequence
  Description of Artificial Sequence: Synthetic oligonucleotide
  Sense strand starting at position 2703 of SEQ ID NO: 318308
gaacuuugugccugacuuu

SEQ ID NO: 552636 - RNA, 19 nt, Artificial Sequence
  Description of Artificial Sequence: Synthetic oligonucleotide
  Antisense strand to SEQ ID NO: 552635
aaagucaggcacaaaguuc

SEQ ID NO: 552637 - RNA, 19 nt, Artificial Sequence
  Description of Artificial Sequence: Synthetic oligonucleotide
  Sense strand starting at position 2720 of SEQ ID NO: 318308
uuuacuauaucagucagga

SEQ ID NO: 552638 - RNA, 19 nt, Artificial Sequence
  Description of Artificial Sequence: Synthetic oligonucleotide
  Antisense strand to SEQ ID NO: 552637
uccugacugauauaguaaa

SEQ ID NO: 552639 - RNA, 19 nt, Artificial Sequence
  Description of Artificial Sequence: Synthetic oligonucleotide
  Sense strand starting at position 2754 of SEQ ID NO: 318308
uauguccuguuagucauau

SEQ ID NO: 552640 - RNA, 19 nt, Artificial Sequence
  Description of Artificial Sequence: Synthetic oligonucleotide
  Antisense strand to SEQ ID NO: 552639
auaugacuaacaggacaua

SEQ ID NO: 552641 - RNA, 19 nt, Artificial Sequence
  Description of Artificial Sequence: Synthetic oligonucleotide
  Sense strand starting at position 2755 of SEQ ID NO: 318308
auguccuguuagucauaua

SEQ ID NO: 552642 - RNA, 19 nt, Artificial Sequence
  Description of Artificial Sequence: Synthetic oligonucleotide
  Antisense strand to SEQ ID NO: 552641
uauaugacuaacaggacau

SEQ ID NO: 552643 - RNA, 19 nt, Artificial Sequence
  Description of Artificial Sequence: Synthetic oligonucleotide
  Sense strand starting at position 2772 of SEQ ID NO: 318308
uaaguauuagagugcauag

SEQ ID NO: 552644 - RNA, 19 nt, Artificial Sequence
  Description of Artificial Sequence: Synthetic oligonucleotide
  Antisense strand to SEQ ID NO: 552643
cuaugcacucuaauacuua

SEQ ID NO: 552645 - RNA, 19 nt, Artificial Sequence
  Description of Artificial Sequence: Synthetic oligonucleotide
  Sense strand starting at position 2774 of SEQ ID NO: 318308
aguauuagagugcauaguu

SEQ ID NO: 552646 - RNA, 19 nt, Artificial Sequence
  Description of Artificial Sequence: Synthetic oligonucleotide
  Antisense strand to SEQ ID NO: 552645
aacuaugcacucuaauacu

SEQ ID NO: 552647 - RNA, 19 nt, Artificial Sequence
  Description of Artificial Sequence: Synthetic oligonucleotide
  Sense strand starting at position 2960 of SEQ ID NO: 318308
aggauuuauuccgugaugc

SEQ ID NO: 552648 - RNA, 19 nt, Artificial Sequence
  Description of Artificial Sequence: Synthetic oligonucleotide
  Antisense strand to SEQ ID NO: 552647
gcaucacggaauaaauccu

SEQ ID NO: 552649 - RNA, 19 nt, Artificial Sequence
  Description of Artificial Sequence: Synthetic oligonucleotide
  Sense strand starting at position 2961 of SEQ ID NO: 318308
ggauuuauuccgugaugcu

SEQ ID NO: 552650 - RNA, 19 nt, Artificial Sequence
  Description of Artificial Sequence: Synthetic oligonucleotide
  Antisense strand to SEQ ID NO: 552649
agcaucacggaauaaaucc

SEQ ID NO: 552651 - RNA, 19 nt, Artificial Sequence
  Description of Artificial Sequence: Synthetic oligonucleotide
  Sense strand starting at position 2988 of SEQ ID NO: 318308
ucuaucauggcuuagucaa

SEQ ID NO: 552652 - RNA, 19 nt, Artificial Sequence
  Description of Artificial Sequence: Synthetic oligonucleotide
  Antisense strand to SEQ ID NO: 552651
uugacuaagccaugauaga

SEQ ID NO: 552653 - RNA, 19 nt, Artificial Sequence
  Description of Artificial Sequence: Synthetic oligonucleotide
  Sense strand starting at position 2990 of SEQ ID NO: 318308
uaucauggcuuagucaagu

SEQ ID NO: 552654 - RNA, 19 nt, Artificial Sequence
  Description of Artificial Sequence: Synthetic oligonucleotide
  Antisense strand to SEQ ID NO: 552653
acuugacuaagccaugaua

SEQ ID NO: 552655 - RNA, 19 nt, Artificial Sequence
  Description of Artificial Sequence: Synthetic oligonucleotide
  Sense strand starting at position 3016 of SEQ ID NO: 318308
guuauuuggucacaaauca

SEQ ID NO: 552656 - RNA, 19 nt, Artificial Sequence
  Description of Artificial Sequence: Synthetic oligonucleotide
  Antisense strand to SEQ ID NO: 552655
ugauuugugaccaaauaac

SEQ ID NO: 552657 - RNA, 19 nt, Artificial Sequence
  Description of Artificial Sequence: Synthetic oligonucleotide
  Sense strand starting at position 3032 of SEQ ID NO: 318308
ucauuugucaguuguuaug

SEQ ID NO: 552658 - RNA, 19 nt, Artificial Sequence
  Description of Artificial Sequence: Synthetic oligonucleotide
  Antisense strand to SEQ ID NO: 552657
cauaacaacugacaaauga

SEQ ID NO: 552659 - RNA, 19 nt, Artificial Sequence
  Description of Artificial Sequence: Synthetic oligonucleotide
  Sense strand starting at position 3116 of SEQ ID NO: 318308
gggaaucuaugucuuuaaa

SEQ ID NO: 552660 - RNA, 19 nt, Artificial Sequence
  Description of Artificial Sequence: Synthetic oligonucleotide
  Antisense strand to SEQ ID NO: 552659
uuuaaagacauagauuccc

SEQ ID NO: 552661 - RNA, 19 nt, Artificial Sequence
  Description of Artificial Sequence: Synthetic oligonucleotide
  Sense strand starting at position 3138 of SEQ ID NO: 318308
guuauugaaguaugcaaua

SEQ ID NO: 552662 - RNA, 19 nt, Artificial Sequence
  Description of Artificial Sequence: Synthetic oligonucleotide
  Antisense strand to SEQ ID NO: 552661
uauugcauacuucaauaac

SEQ ID NO: 552663 - RNA, 19 nt, Artificial Sequence
  Description of Artificial Sequence: Synthetic oligonucleotide
  Sense strand starting at position 3143 of SEQ ID NO: 318308
ugaaguaugcaauauugua

SEQ ID NO: 552664 - RNA, 19 nt, Artificial Sequence
  Description of Artificial Sequence: Synthetic oligonucleotide
  Antisense strand to SEQ ID NO: 552663
uacaauauugcauacuuca

SEQ ID NO: 552665 - RNA, 19 nt, Artificial Sequence
  Description of Artificial Sequence: Synthetic oligonucleotide
  Sense strand starting at position 3168 of SEQ ID NO: 318308
ucuugaauccuuuggccaa

SEQ ID NO: 552666 - RNA, 19 nt, Artificial Sequence
  Description of Artificial Sequence: Synthetic oligonucleotide
  Antisense strand to SEQ ID NO: 552665
uuggccaaaggauucaaga

SEQ ID NO: 552667 - RNA, 19 nt, Artificial Sequence
  Description of Artificial Sequence: Synthetic oligonucleotide
  Sense strand starting at position 3171 of SEQ ID NO: 318308
ugaauccuuuggccaaguu

SEQ ID NO: 552668 - RNA, 19 nt, Artificial Sequence
  Description of Artificial Sequence: Synthetic oligonucleotide
  Antisense strand to SEQ ID NO: 552667
aacuuggccaaaggauuca

SEQ ID NO: 552669 - RNA, 19 nt, Artificial Sequence
  Description of Artificial Sequence: Synthetic oligonucleotide
  Sense strand starting at position 3290 of SEQ ID NO: 318308
uaguuuagguguuccacaa

SEQ ID NO: 552670 - RNA, 19 nt, Artificial Sequence
  Description of Artificial Sequence: Synthetic oligonucleotide
  Antisense strand to SEQ ID NO: 552669
uuguggaacaccuaaacua

SEQ ID NO: 552671 - RNA, 19 nt, Artificial Sequence
  Description of Artificial Sequence: Synthetic oligonucleotide
  Sense strand starting at position 3297 of SEQ ID NO: 318308
gguguuccacaaggauauu

SEQ ID NO: 552672 - RNA, 19 nt, Artificial Sequence
  Description of Artificial Sequence: Synthetic oligonucleotide
  Antisense strand to SEQ ID NO: 552671
aauauccuuguggaacacc

SEQ ID NO: 552673 - RNA, 19 nt, Artificial Sequence
  Description of Artificial Sequence: Synthetic oligonucleotide
  Sense strand starting at position 3347 of SEQ ID NO: 318308
guuaaacgauucuuacuua

SEQ ID NO: 552674 - RNA, 19 nt, Artificial Sequence
  Description of Artificial Sequence: Synthetic oligonucleotide
  Antisense strand to SEQ ID NO: 552673
uaaguaagaaucguuuaac

SEQ ID NO: 552675 - RNA, 19 nt, Artificial Sequence
  Description of Artificial Sequence: Synthetic oligonucleotide
  Sense strand starting at position 3381 of SEQ ID NO: 318308
acagauacguaguucuuau

SEQ ID NO: 552676 - RNA, 19 nt, Artificial Sequence
  Description of Artificial Sequence: Synthetic oligonucleotide
  Antisense strand to SEQ ID NO: 552675
auaagaacuacguaucugu

SEQ ID NO: 552677 - RNA, 19 nt, Artificial Sequence
  Description of Artificial Sequence: Synthetic oligonucleotide
  Sense strand starting at position 3575 of SEQ ID NO: 318308
ucaugaaguuucuucuaag

SEQ ID NO: 552678 - RNA, 19 nt, Artificial Sequence
  Description of Artificial Sequence: Synthetic oligonucleotide
  Antisense strand to SEQ ID NO: 552677
cuuagaagaaacuucauga

SEQ ID NO: 552679 - RNA, 19 nt, Artificial Sequence
  Description of Artificial Sequence: Synthetic oligonucleotide
  Sense strand starting at position 3650 of SEQ ID NO: 318308
gaccauguuugagcagaga

SEQ ID NO: 552680 - RNA, 19 nt, Artificial Sequence
  Description of Artificial Sequence: Synthetic oligonucleotide
  Antisense strand to SEQ ID NO: 552679
ucucugcucaaacaugguc

SEQ ID NO: 552681 - RNA, 19 nt, Artificial Sequence
  Description of Artificial Sequence: Synthetic oligonucleotide
  Sense strand starting at position 3758 of SEQ ID NO: 318308
auguacuggcacuggauaa

SEQ ID NO: 552682 - RNA, 19 nt, Artificial Sequence
  Description of Artificial Sequence: Synthetic oligonucleotide
  Antisense strand to SEQ ID NO: 552681
uuauccagugccaguacau

SEQ ID NO: 552683 - RNA, 19 nt, Artificial Sequence
  Description of Artificial Sequence: Synthetic oligonucleotide
  Sense strand starting at position 3759 of SEQ ID NO: 318308
uguacuggcacuggauaaa

SEQ ID NO: 552684 - RNA, 19 nt, Artificial Sequence
  Description of Artificial Sequence: Synthetic oligonucleotide
  Antisense strand to SEQ ID NO: 552683
uuuauccagugccaguaca

SEQ ID NO: 552685 - RNA, 19 nt, Artificial Sequence
  Description of Artificial Sequence: Synthetic oligonucleotide
  Sense strand starting at position 3825 of SEQ ID NO: 318308
agucauauguacuuuagaa

SEQ ID NO: 552686 - RNA, 19 nt, Artificial Sequence
  Description of Artificial Sequence: Synthetic oligonucleotide
  Antisense strand to SEQ ID NO: 552685
uucuaaaguacauaugacu

SEQ ID NO: 552687 - RNA, 19 nt, Artificial Sequence
  Description of Artificial Sequence: Synthetic oligonucleotide
  Sense strand starting at position 3917 of SEQ ID NO: 318308
cucaaacaauggugauuua

SEQ ID NO: 552688 - RNA, 19 nt, Artificial Sequence
  Description of Artificial Sequence: Synthetic oligonucleotide
  Antisense strand to SEQ ID NO: 552687
uaaaucaccauuguuugag

SEQ ID NO: 552689 - RNA, 19 nt, Artificial Sequence
  Description of Artificial Sequence: Synthetic oligonucleotide
  Sense strand starting at position 3928 of SEQ ID NO: 318308
gugauuuauuaucaugagu

SEQ ID NO: 552690 - RNA, 19 nt, Artificial Sequence
  Description of Artificial Sequence: Synthetic oligonucleotide
  Antisense strand to SEQ ID NO: 552689
acucaugauaauaaaucac

SEQ ID NO: 552691 - RNA, 19 nt, Artificial Sequence
  Description of Artificial Sequence: Synthetic oligonucleotide
  Sense strand starting at position 3933 of SEQ ID NO: 318308
uuauuaucaugaguuacug

SEQ ID NO: 552692 - RNA, 19 nt, Artificial Sequence
  Description of Artificial Sequence: Synthetic oligonucleotide
  Antisense strand to SEQ ID NO: 552691
caguaacucaugauaauaa

SEQ ID NO: 552693 - RNA, 19 nt, Artificial Sequence
  Description of Artificial Sequence: Synthetic oligonucleotide
  Sense strand starting at position 3941 of SEQ ID NO: 318308
augaguuacugaucaauau

SEQ ID NO: 552694 - RNA, 19 nt, Artificial Sequence
  Description of Artificial Sequence: Synthetic oligonucleotide
  Antisense strand to SEQ ID NO: 552693
auauugaucaguaacucau

SEQ ID NO: 552695 - RNA, 19 nt, Artificial Sequence
  Description of Artificial Sequence: Synthetic oligonucleotide
  Sense strand starting at position 3951 of SEQ ID NO: 318308
gaucaauauuggcucuugu

SEQ ID NO: 552696 - RNA, 19 nt, Artificial Sequence
  Description of Artificial Sequence: Synthetic oligonucleotide
  Antisense strand to SEQ ID NO: 552695
acaagagccaauauugauc

SEQ ID NO: 552697 - RNA, 19 nt, Artificial Sequence
  Description of Artificial Sequence: Synthetic oligonucleotide
  Sense strand starting at position 3968 of SEQ ID NO: 318308
guccuauagcuauggauga

SEQ ID NO: 552698 - RNA, 19 nt, Artificial Sequence
  Description of Artificial Sequence: Synthetic oligonucleotide
  Antisense strand to SEQ ID NO: 552697
ucauccauagcuauaggac

SEQ ID NO: 552699 - RNA, 19 nt, Artificial Sequence
  Description of Artificial Sequence: Synthetic oligonucleotide
  Sense strand starting at position 2040 of SEQ ID NO: 318309
agcgacaucaugugacuga

SEQ ID NO: 552700 - RNA, 19 nt, Artificial Sequence
  Description of Artificial Sequence: Synthetic oligonucleotide
  Antisense strand to SEQ ID NO: 552699
ucagucacaugaugucgcu

SEQ ID NO: 552701 - RNA, 19 nt, Artificial Sequence
  Description of Artificial Sequence: Synthetic oligonucleotide
  Sense strand starting at position 2041 of SEQ ID NO: 318309
gcgacaucaugugacugau

SEQ ID NO: 552702 - RNA, 19 nt, Artificial Sequence
  Description of Artificial Sequence: Synthetic oligonucleotide
  Antisense strand to SEQ ID NO: 552701
aucagucacaugaugucgc

SEQ ID NO: 552703 - RNA, 19 nt, Artificial Sequence
  Description of Artificial Sequence: Synthetic oligonucleotide
  Sense strand starting at position 2043 of SEQ ID NO: 318309
gacaucaugugacugauua

SEQ ID NO: 552704 - RNA, 19 nt, Artificial Sequence
  Description of Artificial Sequence: Synthetic oligonucleotide
  Antisense strand to SEQ ID NO: 552703
uaaucagucacaugauguc

SEQ ID NO: 552705 - RNA, 19 nt, Artificial Sequence
  Description of Artificial Sequence: Synthetic oligonucleotide
  Sense strand starting at position 2044 of SEQ ID NO: 318309
acaucaugugacugauuau

SEQ ID NO: 552706 - RNA, 19 nt, Artificial Sequence
  Description of Artificial Sequence: Synthetic oligonucleotide
  Antisense strand to SEQ ID NO: 552705
auaaucagucacaugaugu

SEQ ID NO: 552707 - RNA, 19 nt, Artificial Sequence
  Description of Artificial Sequence: Synthetic oligonucleotide
  Sense strand starting at position 2047 of SEQ ID NO: 318309
ucaugugacugauuaugua

SEQ ID NO: 552708 - RNA, 19 nt, Artificial Sequence
  Description of Artificial Sequence: Synthetic oligonucleotide
  Antisense strand to SEQ ID NO: 552707
uacauaaucagucacauga

SEQ ID NO: 552709 - RNA, 19 nt, Artificial Sequence
  Description of Artificial Sequence: Synthetic oligonucleotide
  Sense strand starting at position 2051 of SEQ ID NO: 318309
gugacugauuauguaagua

SEQ ID NO: 552710 - RNA, 19 nt, Artificial Sequence
  Description of Artificial Sequence: Synthetic oligonucleotide
  Antisense strand to SEQ ID NO: 552709
uacuuacauaaucagucac

SEQ ID NO: 552711 - RNA, 19 nt, Artificial Sequence
  Description of Artificial Sequence: Synthetic oligonucleotide
  Sense strand starting at position 2070 of SEQ ID NO: 318309
caagaaagauccugagguu

SEQ ID NO: 552712 - RNA, 19 nt, Artificial Sequence
  Description of Artificial Sequence: Synthetic oligonucleotide
  Antisense strand to SEQ ID NO: 552711
aaccucaggaucuuucuug

SEQ ID NO: 552713 - RNA, 19 nt, Artificial Sequence
  Description of Artificial Sequence: Synthetic oligonucleotide
  Sense strand starting at position 2073 of SEQ ID NO: 318309
gaaagauccugagguucuu

SEQ ID NO: 552714 - RNA, 19 nt, Artificial Sequence
  Description of Artificial Sequence: Synthetic oligonucleotide
  Antisense strand to SEQ ID NO: 552713
aagaaccucaggaucuuuc

SEQ ID NO: 552715 - RNA, 19 nt, Artificial Sequence
  Description of Artificial Sequence: Synthetic oligonucleotide
  Sense strand starting at position 2109 of SEQ ID NO: 318309
cugggucacucuuaauucu

SEQ ID NO: 552716 - RNA, 19 nt, Artificial Sequence
  Description of Artificial Sequence: Synthetic oligonucleotide
  Antisense strand to SEQ ID NO: 552715
agaauuaagagugacccag

SEQ ID NO: 552717 - RNA, 19 nt, Artificial Sequence
  Description of Artificial Sequence: Synthetic oligonucleotide
  Sense strand starting at position 2129 of SEQ ID NO: 318309
auguuucgacuuuggguua

SEQ ID NO: 552718 - RNA, 19 nt, Artificial Sequence
  Description of Artificial Sequence: Synthetic oligonucleotide
  Antisense strand to SEQ ID NO: 552717
uaacccaaagucgaaacau

SEQ ID NO: 552719 - RNA, 19 nt, Artificial Sequence
  Description of Artificial Sequence: Synthetic oligonucleotide
  Sense strand starting at position 2132 of SEQ ID NO: 318309
uuucgacuuuggguuauuu

SEQ ID NO: 552720 - RNA, 19 nt, Artificial Sequence
  Description of Artificial Sequence: Synthetic oligonucleotide
  Antisense strand to SEQ ID NO: 552719
aaauaacccaaagucgaaa

SEQ ID NO: 552721 - RNA, 19 nt, Artificial Sequence
  Description of Artificial Sequence: Synthetic oligonucleotide
  Sense strand starting at position 2161 of SEQ ID NO: 318309
auuuauaaaugcggguuua

SEQ ID NO: 552722 - RNA, 19 nt, Artificial Sequence
  Description of Artificial Sequence: Synthetic oligonucleotide
  Antisense strand to SEQ ID NO: 552721
uaaacccgcauuuauaaau

SEQ ID NO: 552723 - RNA, 19 nt, Artificial Sequence
  Description of Artificial Sequence: Synthetic oligonucleotide
  Sense strand starting at position 2173 of SEQ ID NO: 318309
ggguuuaguuaauauacau

SEQ ID NO: 552724 - RNA, 19 nt, Artificial Sequence
  Description of Artificial Sequence: Synthetic oligonucleotide
  Antisense strand to SEQ ID NO: 552723
auguauauuaacuaaaccc

SEQ ID NO: 552725 - RNA, 19 nt, Artificial Sequence
  Description of Artificial Sequence: Synthetic oligonucleotide
  Sense strand starting at position 2218 of SEQ ID NO: 318309
uuuauuacgcuguagcuua

SEQ ID NO: 552726 - RNA, 19 nt, Artificial Sequence
  Description of Artificial Sequence: Synthetic oligonucleotide
  Antisense strand to SEQ ID NO: 552725
uaagcuacagcguaauaaa

SEQ ID NO: 552727 - RNA, 19 nt, Artificial Sequence
  Description of Artificial Sequence: Synthetic oligonucleotide
  Sense strand starting at position 2387 of SEQ ID NO: 318309
caagcacuccaucguaaga

SEQ ID NO: 552728 - RNA, 19 nt, Artificial Sequence
  Description of Artificial Sequence: Synthetic oligonucleotide
  Antisense strand to SEQ ID NO: 552727
ucuuacgauggagugcuug

SEQ ID NO: 552729 - RNA, 19 nt, Artificial Sequence
  Description of Artificial Sequence: Synthetic oligonucleotide
  Sense strand starting at position 2389 of SEQ ID NO: 318309
agcacuccaucguaagauu

SEQ ID NO: 552730 - RNA, 19 nt, Artificial Sequence
  Description of Artificial Sequence: Synthetic oligonucleotide
  Antisense strand to SEQ ID NO: 552729
aaucuuacgauggagugcu

SEQ ID NO: 552731 - RNA, 19 nt, Artificial Sequence
  Description of Artificial Sequence: Synthetic oligonucleotide
  Sense strand starting at position 2409 of SEQ ID NO: 318309
uagagaaaguuaggaauuu

SEQ ID NO: 552732 - RNA, 19 nt, Artificial Sequence
  Description of Artificial Sequence: Synthetic oligonucleotide
  Antisense strand to SEQ ID NO: 552731
aaauuccuaacuuucucua

SEQ ID NO: 552733 - RNA, 19 nt, Artificial Sequence
  Description of Artificial Sequence: Synthetic oligonucleotide
  Sense strand starting at position 2501 of SEQ ID NO: 318309
ucauaaaucugaugaaagu

SEQ ID NO: 552734 - RNA, 19 nt, Artificial Sequence
  Description of Artificial Sequence: Synthetic oligonucleotide
  Antisense strand to SEQ ID NO: 552733
acuuucaucagauuuauga

SEQ ID NO: 552735 - RNA, 19 nt, Artificial Sequence
  Description of Artificial Sequence: Synthetic oligonucleotide
  Sense strand starting at position 2533 of SEQ ID NO: 318309
aaauauggagagcguuauu

SEQ ID NO: 552736 - RNA, 19 nt, Artificial Sequence
  Description of Artificial Sequence: Synthetic oligonucleotide
  Antisense strand to SEQ ID NO: 552735
aauaacgcucuccauauuu

SEQ ID NO: 552737 - RNA, 19 nt, Artificial Sequence
  Description of Artificial Sequence: Synthetic oligonucleotide
  Sense strand starting at position 2536 of SEQ ID NO: 318309
uauggagagcguuauuguu

SEQ ID NO: 552738 - RNA, 19 nt, Artificial Sequence
  Description of Artificial Sequence: Synthetic oligonucleotide
  Antisense strand to SEQ ID NO: 552737
aacaauaacgcucuccaua

SEQ ID NO: 552739 - RNA, 19 nt, Artificial Sequence
  Description of Artificial Sequence: Synthetic oligonucleotide
  Sense strand starting at position 2542 of SEQ ID NO: 318309
gagcguuauuguuugguuc

SEQ ID NO: 552740 - RNA, 19 nt, Artificial Sequence
  Description of Artificial Sequence: Synthetic oligonucleotide
  Antisense strand to SEQ ID NO: 552739
gaaccaaacaauaacgcuc

SEQ ID NO: 552741 - RNA, 19 nt, Artificial Sequence
  Description of Artificial Sequence: Synthetic oligonucleotide
  Sense strand starting at position 2558 of SEQ ID NO: 318309
uuccuugaugcuugaaugu

SEQ ID NO: 552742 - RNA, 19 nt, Artificial Sequence
  Description of Artificial Sequence: Synthetic oligonucleotide
  Antisense strand to SEQ ID NO: 552741
acauucaagcaucaaggaa

SEQ ID NO: 552743 - RNA, 19 nt, Artificial Sequence
  Description of Artificial Sequence: Synthetic oligonucleotide
  Sense strand starting at position 2565 of SEQ ID NO: 318309
augcuugaaugugauaacu

SEQ ID NO: 552744 - RNA, 19 nt, Artificial Sequence
  Description of Artificial Sequence: Synthetic oligonucleotide
  Antisense strand to SEQ ID NO: 552743
aguuaucacauucaagcau

SEQ ID NO: 552745 - RNA, 19 nt, Artificial Sequence
  Description of Artificial Sequence: Synthetic oligonucleotide
  Sense strand starting at position 2630 of SEQ ID NO: 318309
aggaauagauucuggaaag

SEQ ID NO: 552746 - RNA, 19 nt, Artificial Sequence
  Description of Artificial Sequence: Synthetic oligonucleotide
  Antisense strand to SEQ ID NO: 552745
cuuuccagaaucuauuccu

SEQ ID NO: 552747 - RNA, 19 nt, Artificial Sequence
  Description of Artificial Sequence: Synthetic oligonucleotide
  Sense strand starting at position 2631 of SEQ ID NO: 318309
ggaauagauucuggaaagu

SEQ ID NO: 552748 - RNA, 19 nt, Artificial Sequence
  Description of Artificial Sequence: Synthetic oligonucleotide
  Antisense strand to SEQ ID NO: 552747
acuuuccagaaucuauucc

SEQ ID NO: 552749 - RNA, 19 nt, Artificial Sequence
  Description of Artificial Sequence: Synthetic oligonucleotide
  Sense strand starting at position 2664 of SEQ ID NO: 318309
aguaaagcacuuuaaugua

SEQ ID NO: 552750 - RNA, 19 nt, Artificial Sequence
  Description of Artificial Sequence: Synthetic oligonucleotide
  Antisense strand to SEQ ID NO: 552749
uacauuaaagugcuuuacu

SEQ ID NO: 552751 - RNA, 19 nt, Artificial Sequence
  Description of Artificial Sequence: Synthetic oligonucleotide
  Sense strand starting at position 2744 of SEQ ID NO: 318309
ugcgaaagaucucuuaaag

SEQ ID NO: 552752 - RNA, 19 nt, Artificial Sequence
  Description of Artificial Sequence: Synthetic oligonucleotide
  Antisense strand to SEQ ID NO: 552751
cuuuaagagaucuuucgca

SEQ ID NO: 552753 - RNA, 19 nt, Artificial Sequence
  Description of Artificial Sequence: Synthetic oligonucleotide
  Sense strand starting at position 2766 of SEQ ID NO: 318309
uuuggagccuaaucucauu

SEQ ID NO: 552754 - RNA, 19 nt, Artificial Sequence
  Description of Artificial Sequence: Synthetic oligonucleotide
  Antisense strand to SEQ ID NO: 552753
aaugagauuaggcuccaaa

SEQ ID NO: 552755 - RNA, 19 nt, Artificial Sequence
  Description of Artificial Sequence: Synthetic oligonucleotide
  Sense strand starting at position 2801 of SEQ ID NO: 318309
augugaacuugauaucaac

SEQ ID NO: 552756 - RNA, 19 nt, Artificial Sequence
  Description of Artificial Sequence: Synthetic oligonucleotide
  Antisense strand to SEQ ID NO: 552755
guugauaucaaguucacau

SEQ ID NO: 552757 - RNA, 19 nt, Artificial Sequence
  Description of Artificial Sequence: Synthetic oligonucleotide
  Sense strand starting at position 2889 of SEQ ID NO: 318309
ucagaauggugacuguuau

SEQ ID NO: 552758 - RNA, 19 nt, Artificial Sequence
  Description of Artificial Sequence: Synthetic oligonucleotide
  Antisense strand to SEQ ID NO: 552757
auaacagucaccauucuga

SEQ ID NO: 552759 - RNA, 19 nt, Artificial Sequence
  Description of Artificial Sequence: Synthetic oligonucleotide
  Sense strand starting at position 2890 of SEQ ID NO: 318309
cagaauggugacuguuaug

SEQ ID NO: 552760 - RNA, 19 nt, Artificial Sequence
  Description of Artificial Sequence: Synthetic oligonucleotide
  Antisense strand to SEQ ID NO: 552759
cauaacagucaccauucug

SEQ ID NO: 552761 - RNA, 19 nt, Artificial Sequence
  Description of Artificial Sequence: Synthetic oligonucleotide
  Sense strand starting at position 3027 of SEQ ID NO: 318309
gucuauuaauacucaaguc

SEQ ID NO: 552762 - RNA, 19 nt, Artificial Sequence
  Description of Artificial Sequence: Synthetic oligonucleotide
  Antisense strand to SEQ ID NO: 552761
gacuugaguauuaauagac

SEQ ID NO: 552763 - RNA, 19 nt, Artificial Sequence
  Description of Artificial Sequence: Synthetic oligonucleotide
  Sense strand starting at position 3154 of SEQ ID NO: 318309
gcucuacaaguauaagaua

SEQ ID NO: 552764 - RNA, 19 nt, Artificial Sequence
  Description of Artificial Sequence: Synthetic oligonucleotide
  Antisense strand to SEQ ID NO: 552763
uaucuuauacuuguagagc

SEQ ID NO: 552765 - RNA, 19 nt, Artificial Sequence
  Description of Artificial Sequence: Synthetic oligonucleotide
  Sense strand starting at position 3224 of SEQ ID NO: 318309
augucaucaggcuaauuau

SEQ ID NO: 552766 - RNA, 19 nt, Artificial Sequence
  Description of Artificial Sequence: Synthetic oligonucleotide
  Antisense strand to SEQ ID NO: 552765
auaauuagccugaugacau

SEQ ID NO: 552767 - RNA, 19 nt, Artificial Sequence
  Description of Artificial Sequence: Synthetic oligonucleotide
  Sense strand starting at position 3297 of SEQ ID NO: 318309
uggucaauguaccauacau

SEQ ID NO: 552768 - RNA, 19 nt, Artificial Sequence
  Description of Artificial Sequence: Synthetic oligonucleotide
  Antisense strand to SEQ ID NO: 552767
auguaugguacauugacca

SEQ ID NO: 552769 - RNA, 19 nt, Artificial Sequence
  Description of Artificial Sequence: Synthetic oligonucleotide
  Sense strand starting at position 3640 of SEQ ID NO: 318309
auaauaguguguuauguag

SEQ ID NO: 552770 - RNA, 19 nt, Artificial Sequence
  Description of Artificial Sequence: Synthetic oligonucleotide
  Antisense strand to SEQ ID NO: 552769
cuacauaacacacuauuau

SEQ ID NO: 552771 - RNA, 19 nt, Artificial Sequence
  Description of Artificial Sequence: Synthetic oligonucleotide
  Sense strand starting at position 3651 of SEQ ID NO: 318309
uuauguaguucucacauac

SEQ ID NO: 552772 - RNA, 19 nt, Artificial Sequence
  Description of Artificial Sequence: Synthetic oligonucleotide
  Antisense strand to SEQ ID NO: 552771
guaugugagaacuacauaa

SEQ ID NO: 552773 - RNA, 19 nt, Artificial Sequence
  Description of Artificial Sequence: Synthetic oligonucleotide
  Sense strand starting at position 3777 of SEQ ID NO: 318309
augcaaucuuggcauuaag

SEQ ID NO: 552774 - RNA, 19 nt, Artificial Sequence
  Description of Artificial Sequence: Synthetic oligonucleotide
  Antisense strand to SEQ ID NO: 552773
cuuaaugccaagauugcau

SEQ ID NO: 552775 - RNA, 19 nt, Artificial Sequence
  Description of Artificial Sequence: Synthetic oligonucleotide
  Sense strand starting at position 3965 of SEQ ID NO: 318309
augaguaauguaugcccua

SEQ ID NO: 552776 - RNA, 19 nt, Artificial Sequence
  Description of Artificial Sequence: Synthetic oligonucleotide
  Antisense strand to SEQ ID NO: 552775
uagggcauacauuacucau

SEQ ID NO: 552777 - RNA, 19 nt, Artificial Sequence
  Description of Artificial Sequence: Synthetic oligonucleotide
  Sense strand starting at position 3966 of SEQ ID NO: 318309
ugaguaauguaugcccuau

SEQ ID NO: 552778 - RNA, 19 nt, Artificial Sequence
  Description of Artificial Sequence: Synthetic oligonucleotide
  Antisense strand to SEQ ID NO: 552777
auagggcauacauuacuca

SEQ ID NO: 552779 - RNA, 19 nt, Artificial Sequence
  Description of Artificial Sequence: Synthetic oligonucleotide
  Sense strand starting at position 2085 of SEQ ID NO: 318310
cuuccuagugcggaaggau

SEQ ID NO: 552780 - RNA, 19 nt, Artificial Sequence
  Description of Artificial Sequence: Synthetic oligonucleotide
  Antisense strand to SEQ ID NO: 552779
auccuuccgcacuaggaag

SEQ ID NO: 552781 - RNA, 19 nt, Artificial Sequence
  Description of Artificial Sequence: Synthetic oligonucleotide
  Sense strand starting at position 2093 of SEQ ID NO: 318310
ugcggaaggauucgcaaga

SEQ ID NO: 552782 - RNA, 19 nt, Artificial Sequence
  Description of Artificial Sequence: Synthetic oligonucleotide
  Antisense strand to SEQ ID NO: 552781
ucuugcgaauccuuccgca

SEQ ID NO: 552783 - RNA, 19 nt, Artificial Sequence
  Description of Artificial Sequence: Synthetic oligonucleotide
  Sense strand starting at position 2098 of SEQ ID NO: 318310
aaggauucgcaagagguau

SEQ ID NO: 552784 - RNA, 19 nt, Artificial Sequence
  Description of Artificial Sequence: Synthetic oligonucleotide
  Antisense strand to SEQ ID NO: 552783
auaccucuugcgaauccuu

SEQ ID NO: 552785 - RNA, 19 nt, Artificial Sequence
  Description of Artificial Sequence: Synthetic oligonucleotide
  Sense strand starting at position 2112 of SEQ ID NO: 318310
gguauuccgcuuucugcua

SEQ ID NO: 552786 - RNA, 19 nt, Artificial Sequence
  Description of Artificial Sequence: Synthetic oligonucleotide
  Antisense strand to SEQ ID NO: 552785
uagcagaaagcggaauacc

SEQ ID NO: 552787 - RNA, 19 nt, Artificial Sequence
  Description of Artificial Sequence: Synthetic oligonucleotide
  Sense strand starting at position 2116 of SEQ ID NO: 318310
uuccgcuuucugcuauauu

SEQ ID NO: 552788 - RNA, 19 nt, Artificial Sequence
  Description of Artificial Sequence: Synthetic oligonucleotide
  Antisense strand to SEQ ID NO: 552787
aauauagcagaaagcggaa

SEQ ID NO: 552789 - RNA, 19 nt, Artificial Sequence
  Description of Artificial Sequence: Synthetic oligonucleotide
  Sense strand starting at position 2168 of SEQ ID NO: 318310
gcggaaacguucucaguga

SEQ ID NO: 552790 - RNA, 19 nt, Artificial Sequence
  Description of Artificial Sequence: Synthetic oligonucleotide
  Antisense strand to SEQ ID NO: 552789
ucacugagaacguuuccgc

SEQ ID NO: 552791 - RNA, 19 nt, Artificial Sequence
  Description of Artificial Sequence: Synthetic oligonucleotide
  Sense strand starting at position 2172 of SEQ ID NO: 318310
aaacguucucagugaagag

SEQ ID NO: 552792 - RNA, 19 nt, Artificial Sequence
  Description of Artificial Sequence: Synthetic oligonucleotide
  Antisense strand to SEQ ID NO: 552791
cucuucacugagaacguuu

SEQ ID NO: 552793 - RNA, 19 nt, Artificial Sequence
  Description of Artificial Sequence: Synthetic oligonucleotide
  Sense strand starting at position 2209 of SEQ ID NO: 318310
cguguaaguguaaguauga

SEQ ID NO: 552794 - RNA, 19 nt, Artificial Sequence
  Description of Artificial Sequence: Synthetic oligonucleotide
  Antisense strand to SEQ ID NO: 552793
ucauacuuacacuuacacg

SEQ ID NO: 552795 - RNA, 19 nt, Artificial Sequence
  Description of Artificial Sequence: Synthetic oligonucleotide
  Sense strand starting at position 2218 of SEQ ID NO: 318310
guaaguaugacucagucuu

SEQ ID NO: 552796 - RNA, 19 nt, Artificial Sequence
  Description of Artificial Sequence: Synthetic oligonucleotide
  Antisense strand to SEQ ID NO: 552795
aagacugagucauacuuac

SEQ ID NO: 552797 - RNA, 19 nt, Artificial Sequence
  Description of Artificial Sequence: Synthetic oligonucleotide
  Sense strand starting at position 2373 of SEQ ID NO: 318310
gcugacaauugguugauga

SEQ ID NO: 552798 - RNA, 19 nt, Artificial Sequence
  Description of Artificial Sequence: Synthetic oligonucleotide
  Antisense strand to SEQ ID NO: 552797
ucaucaaccaauugucagc

SEQ ID NO: 552799 - RNA, 19 nt, Artificial Sequence
  Description of Artificial Sequence: Synthetic oligonucleotide
  Sense strand starting at position 2375 of SEQ ID NO: 318310
ugacaauugguugaugagu

SEQ ID NO: 552800 - RNA, 19 nt, Artificial Sequence
  Description of Artificial Sequence: Synthetic oligonucleotide
  Antisense strand to SEQ ID NO: 552799
acucaucaaccaauuguca

SEQ ID NO: 552801 - RNA, 19 nt, Artificial Sequence
  Description of Artificial Sequence: Synthetic oligonucleotide
  Sense strand starting at position 2425 of SEQ ID NO: 318310
guaagaauuccaugcagaa

SEQ ID NO: 552802 - RNA, 19 nt, Artificial Sequence
  Description of Artificial Sequence: Synthetic oligonucleotide
  Antisense strand to SEQ ID NO: 552801
uucugcauggaauucuuac

SEQ ID NO: 552803 - RNA, 19 nt, Artificial Sequence
  Description of Artificial Sequence: Synthetic oligonucleotide
  Sense strand starting at position 2454 of SEQ ID NO: 318310
aagaauauucgacacucgu

SEQ ID NO: 552804 - RNA, 19 nt, Artificial Sequence
  Description of Artificial Sequence: Synthetic oligonucleotide
  Antisense strand to SEQ ID NO: 552803
acgagugucgaauauucuu

SEQ ID NO: 552805 - RNA, 19 nt, Artificial Sequence
  Description of Artificial Sequence: Synthetic oligonucleotide
  Sense strand starting at position 2476 of SEQ ID NO: 318310
gggacaauugaucgguagu

SEQ ID NO: 552806 - RNA, 19 nt, Artificial Sequence
  Description of Artificial Sequence: Synthetic oligonucleotide
  Antisense strand to SEQ ID NO: 552805
acuaccgaucaauuguccc

SEQ ID NO: 552807 - RNA, 19 nt, Artificial Sequence
  Description of Artificial Sequence: Synthetic oligonucleotide
  Sense strand starting at position 2477 of SEQ ID NO: 318310
ggacaauugaucgguaguu

SEQ ID NO: 552808 - RNA, 19 nt, Artificial Sequence
  Description of Artificial Sequence: Synthetic oligonucleotide
  Antisense strand to SEQ ID NO: 552807
aacuaccgaucaauugucc

SEQ ID NO: 552809 - RNA, 19 nt, Artificial Sequence
  Description of Artificial Sequence: Synthetic oligonucleotide
  Sense strand starting at position 2478 of SEQ ID NO: 318310
gacaauugaucgguaguuc

SEQ ID NO: 552810 - RNA, 19 nt, Artificial Sequence
  Description of Artificial Sequence: Synthetic oligonucleotide
  Antisense strand to SEQ ID NO: 552809
gaacuaccgaucaauuguc

SEQ ID NO: 552811 - RNA, 19 nt, Artificial Sequence
  Description of Artificial Sequence: Synthetic oligonucleotide
  Sense strand starting at position 2479 of SEQ ID NO: 318310
acaauugaucgguaguucu

SEQ ID NO: 552812 - RNA, 19 nt, Artificial Sequence
  Description of Artificial Sequence: Synthetic oligonucleotide
  Antisense strand to SEQ ID NO: 552811
agaacuaccgaucaauugu

SEQ ID NO: 552813 - RNA, 19 nt, Artificial Sequence
  Description of Artificial Sequence: Synthetic oligonucleotide
  Sense strand starting at position 2489 of SEQ ID NO: 318310
gguaguucugcauagucau

SEQ ID NO: 552814 - RNA, 19 nt, Artificial Sequence
  Description of Artificial Sequence: Synthetic oligonucleotide
  Antisense strand to SEQ ID NO: 552813
augacuaugcagaacuacc

SEQ ID NO: 552815 - RNA, 19 nt, Artificial Sequence
  Description of Artificial Sequence: Synthetic oligonucleotide
  Sense strand starting at position 2492 of SEQ ID NO: 318310
aguucugcauagucaugua

SEQ ID NO: 552816 - RNA, 19 nt, Artificial Sequence
  Description of Artificial Sequence: Synthetic oligonucleotide
  Antisense strand to SEQ ID NO: 552815
uacaugacuaugcagaacu

SEQ ID NO: 552817 - RNA, 19 nt, Artificial Sequence
  Description of Artificial Sequence: Synthetic oligonucleotide
  Sense strand starting at position 2497 of SEQ ID NO: 318310
ugcauagucauguagguuu

SEQ ID NO: 552818 - RNA, 19 nt, Artificial Sequence
  Description of Artificial Sequence: Synthetic oligonucleotide
  Antisense strand to SEQ ID NO: 552817
aaaccuacaugacuaugca

SEQ ID NO: 552819 - RNA, 19 nt, Artificial Sequence
  Description of Artificial Sequence: Synthetic oligonucleotide
  Sense strand starting at position 2523 of SEQ ID NO: 318310
acuguccucuuccuguaau

SEQ ID NO: 552820 - RNA, 19 nt, Artificial Sequence
  Description of Artificial Sequence: Synthetic oligonucleotide
  Antisense strand to SEQ ID NO: 552819
auuacaggaagaggacagu

SEQ ID NO: 552821 - RNA, 19 nt, Artificial Sequence
  Description of Artificial Sequence: Synthetic oligonucleotide
  Sense strand starting at position 2526 of SEQ ID NO: 318310
guccucuuccuguaauauu

SEQ ID NO: 552822 - RNA, 19 nt, Artificial Sequence
  Description of Artificial Sequence: Synthetic oligonucleotide
  Antisense strand to SEQ ID NO: 552821
aauauuacaggaagaggac

SEQ ID NO: 552823 - RNA, 19 nt, Artificial Sequence
  Description of Artificial Sequence: Synthetic oligonucleotide
  Sense strand starting at position 2683 of SEQ ID NO: 318310
cccucaaugugacuugaga

SEQ ID NO: 552824 - RNA, 19 nt, Artificial Sequence
  Description of Artificial Sequence: Synthetic oligonucleotide
  Antisense strand to SEQ ID NO: 552823
ucucaagucacauugaggg

SEQ ID NO: 552825 - RNA, 19 nt, Artificial Sequence
  Description of Artificial Sequence: Synthetic oligonucleotide
  Sense strand starting at position 2685 of SEQ ID NO: 318310
cucaaugugacuugagaug

SEQ ID NO: 552826 - RNA, 19 nt, Artificial Sequence
  Description of Artificial Sequence: Synthetic oligonucleotide
  Antisense strand to SEQ ID NO: 552825
caucucaagucacauugag

SEQ ID NO: 552827 - RNA, 19 nt, Artificial Sequence
  Description of Artificial Sequence: Synthetic oligonucleotide
  Sense strand starting at position 2690 of SEQ ID NO: 318310
ugugacuugagauguagau

SEQ ID NO: 552828 - RNA, 19 nt, Artificial Sequence
  Description of Artificial Sequence: Synthetic oligonucleotide
  Antisense strand to SEQ ID NO: 552827
aucuacaucucaagucaca

SEQ ID NO: 552829 - RNA, 19 nt, Artificial Sequence
  Description of Artificial Sequence: Synthetic oligonucleotide
  Sense strand starting at position 2732 of SEQ ID NO: 318310
guguucagucaauaugugu

SEQ ID NO: 552830 - RNA, 19 nt, Artificial Sequence
  Description of Artificial Sequence: Synthetic oligonucleotide
  Antisense strand to SEQ ID NO: 552829
acacauauugacugaacac

SEQ ID NO: 552831 - RNA, 19 nt, Artificial Sequence
  Description of Artificial Sequence: Synthetic oligonucleotide
  Sense strand starting at position 2737 of SEQ ID NO: 318310
cagucaauaugugugggau

SEQ ID NO: 552832 - RNA, 19 nt, Artificial Sequence
  Description of Artificial Sequence: Synthetic oligonucleotide
  Antisense strand to SEQ ID NO: 552831
aucccacacauauugacug

SEQ ID NO: 552833 - RNA, 19 nt, Artificial Sequence
  Description of Artificial Sequence: Synthetic oligonucleotide
  Sense strand starting at position 2738 of SEQ ID NO: 318310
agucaauaugugugggauu

SEQ ID NO: 552834 - RNA, 19 nt, Artificial Sequence
  Description of Artificial Sequence: Synthetic oligonucleotide
  Antisense strand to SEQ ID NO: 552833
aaucccacacauauugacu

SEQ ID NO: 552835 - RNA, 19 nt, Artificial Sequence
  Description of Artificial Sequence: Synthetic oligonucleotide
  Sense strand starting at position 2801 of SEQ ID NO: 318310
acaacaaugcucuaagguu

SEQ ID NO: 552836 - RNA, 19 nt, Artificial Sequence
  Description of Artificial Sequence: Synthetic oligonucleotide
  Antisense strand to SEQ ID NO: 552835
aaccuuagagcauuguugu

SEQ ID NO: 552837 - RNA, 19 nt, Artificial Sequence
  Description of Artificial Sequence: Synthetic oligonucleotide
  Sense strand starting at position 3066 of SEQ ID NO: 318310
agacaaagauguuaacaua

SEQ ID NO: 552838 - RNA, 19 nt, Artificial Sequence
  Description of Artificial Sequence: Synthetic oligonucleotide
  Antisense strand to SEQ ID NO: 552837
uauguuaacaucuuugucu

SEQ ID NO: 552839 - RNA, 19 nt, Artificial Sequence
  Description of Artificial Sequence: Synthetic oligonucleotide
  Sense strand starting at position 3163 of SEQ ID NO: 318310
ggccaaaugguguaaugaa

SEQ ID NO: 552840 - RNA, 19 nt, Artificial Sequence
  Description of Artificial Sequence: Synthetic oligonucleotide
  Antisense strand to SEQ ID NO: 552839
uucauuacaccauuuggcc

SEQ ID NO: 552841 - RNA, 19 nt, Artificial Sequence
  Description of Artificial Sequence: Synthetic oligonucleotide
  Sense strand starting at position 3211 of SEQ ID NO: 318310
gccuguucugugcacaacu

SEQ ID NO: 552842 - RNA, 19 nt, Artificial Sequence
  Description of Artificial Sequence: Synthetic oligonucleotide
  Antisense strand to SEQ ID NO: 552841
aguugugcacagaacaggc

SEQ ID NO: 552843 - RNA, 19 nt, Artificial Sequence
  Description of Artificial Sequence: Synthetic oligonucleotide
  Sense strand starting at position 3224 of SEQ ID NO: 318310
acaacucuauaggaaauga

SEQ ID NO: 552844 - RNA, 19 nt, Artificial Sequence
  Description of Artificial Sequence: Synthetic oligonucleotide
  Antisense strand to SEQ ID NO: 552843
ucauuuccuauagaguugu

SEQ ID NO: 552845 - RNA, 19 nt, Artificial Sequence
  Description of Artificial Sequence: Synthetic oligonucleotide
  Sense strand starting at position 3238 of SEQ ID NO: 318310
aaugacuguuggguuuauu

SEQ ID NO: 552846 - RNA, 19 nt, Artificial Sequence
  Description of Artificial Sequence: Synthetic oligonucleotide
  Antisense strand to SEQ ID NO: 552845
aauaaacccaacagucauu

SEQ ID NO: 552847 - RNA, 19 nt, Artificial Sequence
  Description of Artificial Sequence: Synthetic oligonucleotide
  Sense strand starting at position 3247 of SEQ ID NO: 318310
uggguuuauuuccauagcu

SEQ ID NO: 552848 - RNA, 19 nt, Artificial Sequence
  Description of Artificial Sequence: Synthetic oligonucleotide
  Antisense strand to SEQ ID NO: 552847
agcuauggaaauaaaccca

SEQ ID NO: 552849 - RNA, 19 nt, Artificial Sequence
  Description of Artificial Sequence: Synthetic oligonucleotide
  Sense strand starting at position 3289 of SEQ ID NO: 318310
cagaguauuugguauucuc

SEQ ID NO: 552850 - RNA, 19 nt, Artificial Sequence
  Description of Artificial Sequence: Synthetic oligonucleotide
  Antisense strand to SEQ ID NO: 552849
gagaauaccaaauacucug

SEQ ID NO: 552851 - RNA, 19 nt, Artificial Sequence
  Description of Artificial Sequence: Synthetic oligonucleotide
  Sense strand starting at position 3299 of SEQ ID NO: 318310
gguauucucuuacccucau

SEQ ID NO: 552852 - RNA, 19 nt, Artificial Sequence
  Description of Artificial Sequence: Synthetic oligonucleotide
  Antisense strand to SEQ ID NO: 552851
augaggguaagagaauacc

SEQ ID NO: 552853 - RNA, 19 nt, Artificial Sequence
  Description of Artificial Sequence: Synthetic oligonucleotide
  Sense strand starting at position 3622 of SEQ ID NO: 318310
ugggcucucaagugaauug

SEQ ID NO: 552854 - RNA, 19 nt, Artificial Sequence
  Description of Artificial Sequence: Synthetic oligonucleotide
  Antisense strand to SEQ ID NO: 552853
caauucacuugagagccca

SEQ ID NO: 552855 - RNA, 19 nt, Artificial Sequence
  Description of Artificial Sequence: Synthetic oligonucleotide
  Sense strand starting at position 3623 of SEQ ID NO: 318310
gggcucucaagugaauuga

SEQ ID NO: 552856 - RNA, 19 nt, Artificial Sequence
  Description of Artificial Sequence: Synthetic oligonucleotide
  Antisense strand to SEQ ID NO: 552855
ucaauucacuugagagccc

SEQ ID NO: 552857 - RNA, 19 nt, Artificial Sequence
  Description of Artificial Sequence: Synthetic oligonucleotide
  Sense strand starting at position 3633 of SEQ ID NO: 318310
gugaauugauaauuaacuc

SEQ ID NO: 552858 - RNA, 19 nt, Artificial Sequence
  Description of Artificial Sequence: Synthetic oligonucleotide
  Antisense strand to SEQ ID NO: 552857
gaguuaauuaucaauucac

SEQ ID NO: 552859 - RNA, 19 nt, Artificial Sequence
  Description of Artificial Sequence: Synthetic oligonucleotide
  Sense strand starting at position 1992 of SEQ ID NO: 318311
cuccgcuucucugaaguaa

SEQ ID NO: 552860 - RNA, 19 nt, Artificial Sequence
  Description of Artificial Sequence: Synthetic oligonucleotide
  Antisense strand to SEQ ID NO: 552859
uuacuucagagaagcggag

SEQ ID NO: 552861 - RNA, 19 nt, Artificial Sequence
  Description of Artificial Sequence: Synthetic oligonucleotide
  Sense strand starting at position 2060 of SEQ ID NO: 318311
agcgacaucauguggcuaa

SEQ ID NO: 552862 - RNA, 19 nt, Artificial Sequence
  Description of Artificial Sequence: Synthetic oligonucleotide
  Antisense strand to SEQ ID NO: 552861
uuagccacaugaugucgcu

SEQ ID NO: 552863 - RNA, 19 nt, Artificial Sequence
  Description of Artificial Sequence: Synthetic oligonucleotide
  Sense strand starting at position 2078 of SEQ ID NO: 318311
aaaggaaggcucuacuguu

SEQ ID NO: 552864 - RNA, 19 nt, Artificial Sequence
  Description of Artificial Sequence: Synthetic oligonucleotide
  Antisense strand to SEQ ID NO: 552863
aacaguagagccuuccuuu

SEQ ID NO: 552865 - RNA, 19 nt, Artificial Sequence
  Description of Artificial Sequence: Synthetic oligonucleotide
  Sense strand starting at position 2091 of SEQ ID NO: 318311
acuguuuauucuguagauu

SEQ ID NO: 552866 - RNA, 19 nt, Artificial Sequence
  Description of Artificial Sequence: Synthetic oligonucleotide
  Antisense strand to SEQ ID NO: 552865
aaucuacagaauaaacagu

SEQ ID NO: 552867 - RNA, 19 nt, Artificial Sequence
  Description of Artificial Sequence: Synthetic oligonucleotide
  Sense strand starting at position 2127 of SEQ ID NO: 318311
cugguuuaaguuuacucau

SEQ ID NO: 552868 - RNA, 19 nt, Artificial Sequence
  Description of Artificial Sequence: Synthetic oligonucleotide
  Antisense strand to SEQ ID NO: 552867
augaguaaacuuaaaccag

SEQ ID NO: 552869 - RNA, 19 nt, Artificial Sequence
  Description of Artificial Sequence: Synthetic oligonucleotide
  Sense strand starting at position 2129 of SEQ ID NO: 318311
gguuuaaguuuacucauag

SEQ ID NO: 552870 - RNA, 19 nt, Artificial Sequence
  Description of Artificial Sequence: Synthetic oligonucleotide
  Antisense strand to SEQ ID NO: 552869
cuaugaguaaacuuaaacc

SEQ ID NO: 552871 - RNA, 19 nt, Artificial Sequence
  Description of Artificial Sequence: Synthetic oligonucleotide
  Sense strand starting at position 2430 of SEQ ID NO: 318311
uuagauauuucguguaagu

SEQ ID NO: 552872 - RNA, 19 nt, Artificial Sequence
  Description of Artificial Sequence: Synthetic oligonucleotide
  Antisense strand to SEQ ID NO: 552871
acuuacacgaaauaucuaa

SEQ ID NO: 552873 - RNA, 19 nt, Artificial Sequence
  Description of Artificial Sequence: Synthetic oligonucleotide
  Sense strand starting at position 2439 of SEQ ID NO: 318311
ucguguaaguggacucgua

SEQ ID NO: 552874 - RNA, 19 nt, Artificial Sequence
  Description of Artificial Sequence: Synthetic oligonucleotide
  Antisense strand to SEQ ID NO: 552873
uacgaguccacuuacacga

SEQ ID NO: 552875 - RNA, 19 nt, Artificial Sequence
  Description of Artificial Sequence: Synthetic oligonucleotide
  Sense strand starting at position 2452 of SEQ ID NO: 318311
cucguaaaguauuugucuu

SEQ ID NO: 552876 - RNA, 19 nt, Artificial Sequence
  Description of Artificial Sequence: Synthetic oligonucleotide
  Antisense strand to SEQ ID NO: 552875
aagacaaauacuuuacgag

SEQ ID NO: 552877 - RNA, 19 nt, Artificial Sequence
  Description of Artificial Sequence: Synthetic oligonucleotide
  Sense strand starting at position 2559 of SEQ ID NO: 318311
ugaauacuaguccaucgua

SEQ ID NO: 552878 - RNA, 19 nt, Artificial Sequence
  Description of Artificial Sequence: Synthetic oligonucleotide
  Antisense strand to SEQ ID NO: 552877
uacgauggacuaguauuca

SEQ ID NO: 552879 - RNA, 19 nt, Artificial Sequence
  Description of Artificial Sequence: Synthetic oligonucleotide
  Sense strand starting at position 2562 of SEQ ID NO: 318311
auacuaguccaucguaugu

SEQ ID NO: 552880 - RNA, 19 nt, Artificial Sequence
  Description of Artificial Sequence: Synthetic oligonucleotide
  Antisense strand to SEQ ID NO: 552879
acauacgauggacuaguau

SEQ ID NO: 552881 - RNA, 19 nt, Artificial Sequence
  Description of Artificial Sequence: Synthetic oligonucleotide
  Sense strand starting at position 2564 of SEQ ID NO: 318311
acuaguccaucguauguau

SEQ ID NO: 552882 - RNA, 19 nt, Artificial Sequence
  Description of Artificial Sequence: Synthetic oligonucleotide
  Antisense strand to SEQ ID NO: 552881
auacauacgauggacuagu

SEQ ID NO: 552883 - RNA, 19 nt, Artificial Sequence
  Description of Artificial Sequence: Synthetic oligonucleotide
  Sense strand starting at position 2567 of SEQ ID NO: 318311
aguccaucguauguauaca

SEQ ID NO: 552884 - RNA, 19 nt, Artificial Sequence
  Description of Artificial Sequence: Synthetic oligonucleotide
  Antisense strand to SEQ ID NO: 552883
uguauacauacgauggacu

SEQ ID NO: 552885 - RNA, 19 nt, Artificial Sequence
  Description of Artificial Sequence: Synthetic oligonucleotide
  Sense strand starting at position 2615 of SEQ ID NO: 318311
guggaugguuccucaaggu

SEQ ID NO: 552886 - RNA, 19 nt, Artificial Sequence
  Description of Artificial Sequence: Synthetic oligonucleotide
  Antisense strand to SEQ ID NO: 552885
accuugaggaaccauccac

SEQ ID NO: 552887 - RNA, 19 nt, Artificial Sequence
  Description of Artificial Sequence: Synthetic oligonucleotide
  Sense strand starting at position 2637 of SEQ ID NO: 318311
uccauauuguaacauguga

SEQ ID NO: 552888 - RNA, 19 nt, Artificial Sequence
  Description of Artificial Sequence: Synthetic oligonucleotide
  Antisense strand to SEQ ID NO: 552887
ucacauguuacaauaugga

SEQ ID NO: 552889 - RNA, 19 nt, Artificial Sequence
  Description of Artificial Sequence: Synthetic oligonucleotide
  Sense strand starting at position 2678 of SEQ ID NO: 318311
gcugaauaauaguccaaca

SEQ ID NO: 552890 - RNA, 19 nt, Artificial Sequence
  Description of Artificial Sequence: Synthetic oligonucleotide
  Antisense strand to SEQ ID NO: 552889
uguuggacuauuauucagc

SEQ ID NO: 552891 - RNA, 19 nt, Artificial Sequence
  Description of Artificial Sequence: Synthetic oligonucleotide
  Sense strand starting at position 2726 of SEQ ID NO: 318311
ucaaguauucguggacauu

SEQ ID NO: 552892 - RNA, 19 nt, Artificial Sequence
  Description of Artificial Sequence: Synthetic oligonucleotide
  Antisense strand to SEQ ID NO: 552891
aauguccacgaauacuuga

SEQ ID NO: 552893 - RNA, 19 nt, Artificial Sequence
  Description of Artificial Sequence: Synthetic oligonucleotide
  Sense strand starting at position 2751 of SEQ ID NO: 318311
gcuuccauuucuugacugu

SEQ ID NO: 552894 - RNA, 19 nt, Artificial Sequence
  Description of Artificial Sequence: Synthetic oligonucleotide
  Antisense strand to SEQ ID NO: 552893
acagucaagaaauggaagc

SEQ ID NO: 552895 - RNA, 19 nt, Artificial Sequence
  Description of Artificial Sequence: Synthetic oligonucleotide
  Sense strand starting at position 2758 of SEQ ID NO: 318311
uuucuugacuguugugaac

SEQ ID NO: 552896 - RNA, 19 nt, Artificial Sequence
  Description of Artificial Sequence: Synthetic oligonucleotide
  Antisense strand to SEQ ID NO: 552895
guucacaacagucaagaaa

SEQ ID NO: 552897 - RNA, 19 nt, Artificial Sequence
  Description of Artificial Sequence: Synthetic oligonucleotide
  Sense strand starting at position 2787 of SEQ ID NO: 318311
ugaacaugggugugcauau

SEQ ID NO: 552898 - RNA, 19 nt, Artificial Sequence
  Description of Artificial Sequence: Synthetic oligonucleotide
  Antisense strand to SEQ ID NO: 552897
auaugcacacccauguuca

SEQ ID NO: 552899 - RNA, 19 nt, Artificial Sequence
  Description of Artificial Sequence: Synthetic oligonucleotide
  Sense strand starting at position 2788 of SEQ ID NO: 318311
gaacaugggugugcauaua

SEQ ID NO: 552900 - RNA, 19 nt, Artificial Sequence
  Description of Artificial Sequence: Synthetic oligonucleotide
  Antisense strand to SEQ ID NO: 552899
uauaugcacacccauguuc

SEQ ID NO: 552901 - RNA, 19 nt, Artificial Sequence
  Description of Artificial Sequence: Synthetic oligonucleotide
  Sense strand starting at position 2870 of SEQ ID NO: 318311
ugaagaacauaguaaucaa

SEQ ID NO: 552902 - RNA, 19 nt, Artificial Sequence
  Description of Artificial Sequence: Synthetic oligonucleotide
  Antisense strand to SEQ ID NO: 552901
uugauuacuauguucuuca

SEQ ID NO: 552903 - RNA, 19 nt, Artificial Sequence
  Description of Artificial Sequence: Synthetic oligonucleotide
  Sense strand starting at position 3000 of SEQ ID NO: 318311
ucauuuggauaauguacua

SEQ ID NO: 552904 - RNA, 19 nt, Artificial Sequence
  Description of Artificial Sequence: Synthetic oligonucleotide
  Antisense strand to SEQ ID NO: 552903
uaguacauuauccaaauga

SEQ ID NO: 552905 - RNA, 19 nt, Artificial Sequence
  Description of Artificial Sequence: Synthetic oligonucleotide
  Sense strand starting at position 3005 of SEQ ID NO: 318311
uggauaauguacuauuacu

SEQ ID NO: 552906 - RNA, 19 nt, Artificial Sequence
  Description of Artificial Sequence: Synthetic oligonucleotide
  Antisense strand to SEQ ID NO: 552905
aguaauaguacauuaucca

SEQ ID NO: 552907 - RNA, 19 nt, Artificial Sequence
  Description of Artificial Sequence: Synthetic oligonucleotide
  Sense strand starting at position 3089 of SEQ ID NO: 318311
uuguguuaauuacuugaga

SEQ ID NO: 552908 - RNA, 19 nt, Artificial Sequence
  Description of Artificial Sequence: Synthetic oligonucleotide
  Antisense strand to SEQ ID NO: 552907
ucucaaguaauuaacacaa

SEQ ID NO: 552909 - RNA, 19 nt, Artificial Sequence
  Description of Artificial Sequence: Synthetic oligonucleotide
  Sense strand starting at position 3090 of SEQ ID NO: 318311
uguguuaauuacuugagaa

SEQ ID NO: 552910 - RNA, 19 nt, Artificial Sequence
  Description of Artificial Sequence: Synthetic oligonucleotide
  Antisense strand to SEQ ID NO: 552909
uucucaaguaauuaacaca

SEQ ID NO: 552911 - RNA, 19 nt, Artificial Sequence
  Description of Artificial Sequence: Synthetic oligonucleotide
  Sense strand starting at position 3319 of SEQ ID NO: 318311
uugcaauguccguaagaga

SEQ ID NO: 552912 - RNA, 19 nt, Artificial Sequence
  Description of Artificial Sequence: Synthetic oligonucleotide
  Antisense strand to SEQ ID NO: 552911
ucucuuacggacauugcaa

SEQ ID NO: 552913 - RNA, 19 nt, Artificial Sequence
  Description of Artificial Sequence: Synthetic oligonucleotide
  Sense strand starting at position 3422 of SEQ ID NO: 318311
uuguaccaucuauggaaau

SEQ ID NO: 552914 - RNA, 19 nt, Artificial Sequence
  Description of Artificial Sequence: Synthetic oligonucleotide
  Antisense strand to SEQ ID NO: 552913
auuuccauagaugguacaa

SEQ ID NO: 552915 - RNA, 19 nt, Artificial Sequence
  Description of Artificial Sequence: Synthetic oligonucleotide
  Sense strand starting at position 3423 of SEQ ID NO: 318311
uguaccaucuauggaaaug

SEQ ID NO: 552916 - RNA, 19 nt, Artificial Sequence
  Description of Artificial Sequence: Synthetic oligonucleotide
  Antisense strand to SEQ ID NO: 552915
cauuuccauagaugguaca

SEQ ID NO: 552917 - RNA, 19 nt, Artificial Sequence
  Description of Artificial Sequence: Synthetic oligonucleotide
  Sense strand starting at position 3634 of SEQ ID NO: 318311
ugcugaacuucuucucaga

SEQ ID NO: 552918 - RNA, 19 nt, Artificial Sequence
  Description of Artificial Sequence: Synthetic oligonucleotide
  Antisense strand to SEQ ID NO: 552917
ucugagaagaaguucagca

SEQ ID NO: 552919 - RNA, 19 nt, Artificial Sequence
  Description of Artificial Sequence: Synthetic oligonucleotide
  Sense strand starting at position 3637 of SEQ ID NO: 318311
ugaacuucuucucagauag

SEQ ID NO: 552920 - RNA, 19 nt, Artificial Sequence
  Description of Artificial Sequence: Synthetic oligonucleotide
  Antisense strand to SEQ ID NO: 552919
cuaucugagaagaaguuca

SEQ ID NO: 552921 - RNA, 19 nt, Artificial Sequence
  Description of Artificial Sequence: Synthetic oligonucleotide
  Sense strand starting at position 3686 of SEQ ID NO: 318311
aguagcuuucuagacuaaa

SEQ ID NO: 552922 - RNA, 19 nt, Artificial Sequence
  Description of Artificial Sequence: Synthetic oligonucleotide
  Antisense strand to SEQ ID NO: 552921
uuuagucuagaaagcuacu

SEQ ID NO: 552923 - RNA, 19 nt, Artificial Sequence
  Description of Artificial Sequence: Synthetic oligonucleotide
  Sense strand starting at position 3707 of SEQ ID NO: 318311
uuaccaguuugaugacucu

SEQ ID NO: 552924 - RNA, 19 nt, Artificial Sequence
  Description of Artificial Sequence: Synthetic oligonucleotide
  Antisense strand to SEQ ID NO: 552923
agagucaucaaacugguaa

SEQ ID NO: 552925 - RNA, 19 nt, Artificial Sequence
  Description of Artificial Sequence: Synthetic oligonucleotide
  Sense strand starting at position 3714 of SEQ ID NO: 318311
uuugaugacucuuaccaga

SEQ ID NO: 552926 - RNA, 19 nt, Artificial Sequence
  Description of Artificial Sequence: Synthetic oligonucleotide
  Antisense strand to SEQ ID NO: 552925
ucugguaagagucaucaaa

SEQ ID NO: 552927 - RNA, 19 nt, Artificial Sequence
  Description of Artificial Sequence: Synthetic oligonucleotide
  Sense strand starting at position 3787 of SEQ ID NO: 318311
caguuuggaugauguaaau

SEQ ID NO: 552928 - RNA, 19 nt, Artificial Sequence
  Description of Artificial Sequence: Synthetic oligonucleotide
  Antisense strand to SEQ ID NO: 552927
auuuacaucauccaaacug

SEQ ID NO: 552929 - RNA, 19 nt, Artificial Sequence
  Description of Artificial Sequence: Synthetic oligonucleotide
  Sense strand starting at position 3807 of SEQ ID NO: 318311
uccuuuagucaauaauugu

SEQ ID NO: 552930 - RNA, 19 nt, Artificial Sequence
  Description of Artificial Sequence: Synthetic oligonucleotide
  Antisense strand to SEQ ID NO: 552929
acaauuauugacuaaagga

SEQ ID NO: 552931 - RNA, 19 nt, Artificial Sequence
  Description of Artificial Sequence: Synthetic oligonucleotide
  Sense strand starting at position 3832 of SEQ ID NO: 318311
ucucacauuggcuagacau

SEQ ID NO: 552932 - RNA, 19 nt, Artificial Sequence
  Description of Artificial Sequence: Synthetic oligonucleotide
  Antisense strand to SEQ ID NO: 552931
augucuagccaaugugaga

SEQ ID NO: 552933 - RNA, 19 nt, Artificial Sequence
  Description of Artificial Sequence: Synthetic oligonucleotide
  Sense strand starting at position 3897 of SEQ ID NO: 318311
ccuaaauuaugugaacuga

SEQ ID NO: 552934 - RNA, 19 nt, Artificial Sequence
  Description of Artificial Sequence: Synthetic oligonucleotide
  Antisense strand to SEQ ID NO: 552933
ucaguucacauaauuuagg

SEQ ID NO: 552935 - RNA, 19 nt, Artificial Sequence
  Description of Artificial Sequence: Synthetic oligonucleotide
  Sense strand starting at position 3969 of SEQ ID NO: 318311
cccaaauucuccuggagcu

SEQ ID NO: 552936 - RNA, 19 nt, Artificial Sequence
  Description of Artificial Sequence: Synthetic oligonucleotide
  Antisense strand to SEQ ID NO: 552935
agcuccaggagaauuuggg

SEQ ID NO: 552937 - RNA, 19 nt, Artificial Sequence
  Description of Artificial Sequence: Synthetic oligonucleotide
  Sense strand starting at position 3970 of SEQ ID NO: 318311
ccaaauucuccuggagcuu

SEQ ID NO: 552938 - RNA, 19 nt, Artificial Sequence
  Description of Artificial Sequence: Synthetic oligonucleotide
  Antisense strand to SEQ ID NO: 552937
aagcuccaggagaauuugg

SEQ ID NO: 552939 - RNA, 19 nt, Artificial Sequence
  Description of Artificial Sequence: Synthetic oligonucleotide
  Sense strand starting at position 2058 of SEQ ID NO: 318312
auucgaguuccuuaucuuc

SEQ ID NO: 552940 - RNA, 19 nt, Artificial Sequence
  Description of Artificial Sequence: Synthetic oligonucleotide
  Antisense strand to SEQ ID NO: 552939
gaagauaaggaacucgaau

SEQ ID NO: 552941 - RNA, 19 nt, Artificial Sequence
  Description of Artificial Sequence: Synthetic oligonucleotide
  Sense strand starting at position 2080 of SEQ ID NO: 318312
ucuuaaacuccucgguguu

SEQ ID NO: 552942 - RNA, 19 nt, Artificial Sequence
  Description of Artificial Sequence: Synthetic oligonucleotide
  Antisense strand to SEQ ID NO: 552941
aacaccgaggaguuuaaga

SEQ ID NO: 552943 - RNA, 19 nt, Artificial Sequence
  Description of Artificial Sequence: Synthetic oligonucleotide
  Sense strand starting at position 2081 of SEQ ID NO: 318312
cuuaaacuccucgguguua

SEQ ID NO: 552944 - RNA, 19 nt, Artificial Sequence
  Description of Artificial Sequence: Synthetic oligonucleotide
  Antisense strand to SEQ ID NO: 552943
uaacaccgaggaguuuaag

SEQ ID NO: 552945 - RNA, 19 nt, Artificial Sequence
  Description of Artificial Sequence: Synthetic oligonucleotide
  Sense strand starting at position 2082 of SEQ ID NO: 318312
uuaaacuccucgguguuaa

SEQ ID NO: 552946 - RNA, 19 nt, Artificial Sequence
  Description of Artificial Sequence: Synthetic oligonucleotide
  Antisense strand to SEQ ID NO: 552945
uuaacaccgaggaguuuaa

SEQ ID NO: 552947 - RNA, 19 nt, Artificial Sequence
  Description of Artificial Sequence: Synthetic oligonucleotide
  Sense strand starting at position 2083 of SEQ ID NO: 318312
uaaacuccucgguguuaaa

SEQ ID NO: 552948 - RNA, 19 nt, Artificial Sequence
  Description of Artificial Sequence: Synthetic oligonucleotide
  Antisense strand to SEQ ID NO: 552947
uuuaacaccgaggaguuua

SEQ ID NO: 552949 - RNA, 19 nt, Artificial Sequence
  Description of Artificial Sequence: Synthetic oligonucleotide
  Sense strand starting at position 2115 of SEQ ID NO: 318312
gaagcaaagcaguaucuga

SEQ ID NO: 552950 - RNA, 19 nt, Artificial Sequence
  Description of Artificial Sequence: Synthetic oligonucleotide
  Antisense strand to SEQ ID NO: 552949
ucagauacugcuuugcuuc

SEQ ID NO: 552951 - RNA, 19 nt, Artificial Sequence
  Description of Artificial Sequence: Synthetic oligonucleotide
  Sense strand starting at position 2123 of SEQ ID NO: 318312
gcaguaucugaauacguaa

SEQ ID NO: 552952 - RNA, 19 nt, Artificial Sequence
  Description of Artificial Sequence: Synthetic oligonucleotide
  Antisense strand to SEQ ID NO: 552951
uuacguauucagauacugc

SEQ ID NO: 552953 - RNA, 19 nt, Artificial Sequence
  Description of Artificial Sequence: Synthetic oligonucleotide
  Sense strand starting at position 2135 of SEQ ID NO: 318312
uacguaaugcacgcuguua

SEQ ID NO: 552954 - RNA, 19 nt, Artificial Sequence
  Description of Artificial Sequence: Synthetic oligonucleotide
  Antisense strand to SEQ ID NO: 552953
uaacagcgugcauuacgua

SEQ ID NO: 552955 - RNA, 19 nt, Artificial Sequence
  Description of Artificial Sequence: Synthetic oligonucleotide
  Sense strand starting at position 2136 of SEQ ID NO: 318312
acguaaugcacgcuguuau

SEQ ID NO: 552956 - RNA, 19 nt, Artificial Sequence
  Description of Artificial Sequence: Synthetic oligonucleotide
  Antisense strand to SEQ ID NO: 552955
auaacagcgugcauuacgu

SEQ ID NO: 552957 - RNA, 19 nt, Artificial Sequence
  Description of Artificial Sequence: Synthetic oligonucleotide
  Sense strand starting at position 2164 of SEQ ID NO: 318312
ggagaaagaccuuguggug

SEQ ID NO: 552958 - RNA, 19 nt, Artificial Sequence
  Description of Artificial Sequence: Synthetic oligonucleotide
  Antisense strand to SEQ ID NO: 552957
caccacaaggucuuucucc

SEQ ID NO: 552959 - RNA, 19 nt, Artificial Sequence
  Description of Artificial Sequence: Synthetic oligonucleotide
  Sense strand starting at position 2198 of SEQ ID NO: 318312
uggcuaaacguguaaguau

SEQ ID NO: 552960 - RNA, 19 nt, Artificial Sequence
  Description of Artificial Sequence: Synthetic oligonucleotide
  Antisense strand to SEQ ID NO: 552959
auacuuacacguuuagcca

SEQ ID NO: 552961 - RNA, 19 nt, Artificial Sequence
  Description of Artificial Sequence: Synthetic oligonucleotide
  Sense strand starting at position 2201 of SEQ ID NO: 318312
cuaaacguguaaguauuaa

SEQ ID NO: 552962 - RNA, 19 nt, Artificial Sequence
  Description of Artificial Sequence: Synthetic oligonucleotide
  Antisense strand to SEQ ID NO: 552961
uuaauacuuacacguuuag

SEQ ID NO: 552963 - RNA, 19 nt, Artificial Sequence
  Description of Artificial Sequence: Synthetic oligonucleotide
  Sense strand starting at position 2242 of SEQ ID NO: 318312
ccuuguaugucguuugaac

SEQ ID NO: 552964 - RNA, 19 nt, Artificial Sequence
  Description of Artificial Sequence: Synthetic oligonucleotide
  Antisense strand to SEQ ID NO: 552963
guucaaacgacauacaagg

SEQ ID NO: 552965 - RNA, 19 nt, Artificial Sequence
  Description of Artificial Sequence: Synthetic oligonucleotide
  Sense strand starting at position 2283 of SEQ ID NO: 318312
auuguaauauccuucgguc

SEQ ID NO: 552966 - RNA, 19 nt, Artificial Sequence
  Description of Artificial Sequence: Synthetic oligonucleotide
  Antisense strand to SEQ ID NO: 552965
gaccgaaggauauuacaau

SEQ ID NO: 552967 - RNA, 19 nt, Artificial Sequence
  Description of Artificial Sequence: Synthetic oligonucleotide
  Sense strand starting at position 2285 of SEQ ID NO: 318312
uguaauauccuucggucac

SEQ ID NO: 552968 - RNA, 19 nt, Artificial Sequence
  Description of Artificial Sequence: Synthetic oligonucleotide
  Antisense strand to SEQ ID NO: 552967
gugaccgaaggauauuaca

SEQ ID NO: 552969 - RNA, 19 nt, Artificial Sequence
  Description of Artificial Sequence: Synthetic oligonucleotide
  Sense strand starting at position 2295 of SEQ ID NO: 318312
uucggucacuccucaaagu

SEQ ID NO: 552970 - RNA, 19 nt, Artificial Sequence
  Description of Artificial Sequence: Synthetic oligonucleotide
  Antisense strand to SEQ ID NO: 552969
acuuugaggagugaccgaa

SEQ ID NO: 552971 - RNA, 19 nt, Artificial Sequence
  Description of Artificial Sequence: Synthetic oligonucleotide
  Sense strand starting at position 2420 of SEQ ID NO: 318312
ggacaucuauuggaaauau

SEQ ID NO: 552972 - RNA, 19 nt, Artificial Sequence
  Description of Artificial Sequence: Synthetic oligonucleotide
  Antisense strand to SEQ ID NO: 552971
auauuuccaauagaugucc

SEQ ID NO: 552973 - RNA, 19 nt, Artificial Sequence
  Description of Artificial Sequence: Synthetic oligonucleotide
  Sense strand starting at position 2431 of SEQ ID NO: 318312
ggaaauauuucccauguga

SEQ ID NO: 552974 - RNA, 19 nt, Artificial Sequence
  Description of Artificial Sequence: Synthetic oligonucleotide
  Antisense strand to SEQ ID NO: 552973
ucacaugggaaauauuucc

SEQ ID NO: 552975 - RNA, 19 nt, Artificial Sequence
  Description of Artificial Sequence: Synthetic oligonucleotide
  Sense strand starting at position 2459 of SEQ ID NO: 318312
uucuauuugucuuaaugga

SEQ ID NO: 552976 - RNA, 19 nt, Artificial Sequence
  Description of Artificial Sequence: Synthetic oligonucleotide
  Antisense strand to SEQ ID NO: 552975
uccauuaagacaaauagaa

SEQ ID NO: 552977 - RNA, 19 nt, Artificial Sequence
  Description of Artificial Sequence: Synthetic oligonucleotide
  Sense strand starting at position 2560 of SEQ ID NO: 318312
acgauauuaucucuuggua

SEQ ID NO: 552978 - RNA, 19 nt, Artificial Sequence
  Description of Artificial Sequence: Synthetic oligonucleotide
  Antisense strand to SEQ ID NO: 552977
uaccaagagauaauaucgu

SEQ ID NO: 552979 - RNA, 19 nt, Artificial Sequence
  Description of Artificial Sequence: Synthetic oligonucleotide
  Sense strand starting at position 2563 of SEQ ID NO: 318312
auauuaucucuugguacga

SEQ ID NO: 552980 - RNA, 19 nt, Artificial Sequence
  Description of Artificial Sequence: Synthetic oligonucleotide
  Antisense strand to SEQ ID NO: 552979
ucguaccaagagauaauau

SEQ ID NO: 552981 - RNA, 19 nt, Artificial Sequence
  Description of Artificial Sequence: Synthetic oligonucleotide
  Sense strand starting at position 2564 of SEQ ID NO: 318312
uauuaucucuugguacgau

SEQ ID NO: 552982 - RNA, 19 nt, Artificial Sequence
  Description of Artificial Sequence: Synthetic oligonucleotide
  Antisense strand to SEQ ID NO: 552981
aucguaccaagagauaaua

SEQ ID NO: 552983 - RNA, 19 nt, Artificial Sequence
  Description of Artificial Sequence: Synthetic oligonucleotide
  Sense strand starting at position 2714 of SEQ ID NO: 318312
gugugugcuguauauauua

SEQ ID NO: 552984 - RNA, 19 nt, Artificial Sequence
  Description of Artificial Sequence: Synthetic oligonucleotide
  Antisense strand to SEQ ID NO: 552983
uaauauauacagcacacac

SEQ ID NO: 552985 - RNA, 19 nt, Artificial Sequence
  Description of Artificial Sequence: Synthetic oligonucleotide
  Sense strand starting at position 2716 of SEQ ID NO: 318312
gugugcuguauauauuaaa

SEQ ID NO: 552986 - RNA, 19 nt, Artificial Sequence
  Description of Artificial Sequence: Synthetic oligonucleotide
  Antisense strand to SEQ ID NO: 552985
uuuaauauauacagcacac

SEQ ID NO: 552987 - RNA, 19 nt, Artificial Sequence
  Description of Artificial Sequence: Synthetic oligonucleotide
  Sense strand starting at position 2755 of SEQ ID NO: 318312
auguuauuacagcaacugu

SEQ ID NO: 552988 - RNA, 19 nt, Artificial Sequence
  Description of Artificial Sequence: Synthetic oligonucleotide
  Antisense strand to SEQ ID NO: 552987
acaguugcuguaauaacau

SEQ ID NO: 552989 - RNA, 19 nt, Artificial Sequence
  Description of Artificial Sequence: Synthetic oligonucleotide
  Sense strand starting at position 2811 of SEQ ID NO: 318312
uuuguagaaugucuguaau

SEQ ID NO: 552990 - RNA, 19 nt, Artificial Sequence
  Description of Artificial Sequence: Synthetic oligonucleotide
  Antisense strand to SEQ ID NO: 552989
auuacagacauucuacaaa

SEQ ID NO: 552991 - RNA, 19 nt, Artificial Sequence
  Description of Artificial Sequence: Synthetic oligonucleotide
  Sense strand starting at position 2813 of SEQ ID NO: 318312
uguagaaugucuguaauuc

SEQ ID NO: 552992 - RNA, 19 nt, Artificial Sequence
  Description of Artificial Sequence: Synthetic oligonucleotide
  Antisense strand to SEQ ID NO: 552991
gaauuacagacauucuaca

SEQ ID NO: 552993 - RNA, 19 nt, Artificial Sequence
  Description of Artificial Sequence: Synthetic oligonucleotide
  Sense strand starting at position 2814 of SEQ ID NO: 318312
guagaaugucuguaauucc

SEQ ID NO: 552994 - RNA, 19 nt, Artificial Sequence
  Description of Artificial Sequence: Synthetic oligonucleotide
  Antisense strand to SEQ ID NO: 552993
ggaauuacagacauucuac

SEQ ID NO: 552995 - RNA, 19 nt, Artificial Sequence
  Description of Artificial Sequence: Synthetic oligonucleotide
  Sense strand starting at position 2821 of SEQ ID NO: 318312
gucuguaauucccucccau

SEQ ID NO: 552996 - RNA, 19 nt, Artificial Sequence
  Description of Artificial Sequence: Synthetic oligonucleotide
  Antisense strand to SEQ ID NO: 552995
augggagggaauuacagac

SEQ ID NO: 552997 - RNA, 19 nt, Artificial Sequence
  Description of Artificial Sequence: Synthetic oligonucleotide
  Sense strand starting at position 2908 of SEQ ID NO: 318312
cgguccuuuacagagaaau

SEQ ID NO: 552998 - RNA, 19 nt, Artificial Sequence
  Description of Artificial Sequence: Synthetic oligonucleotide
  Antisense strand to SEQ ID NO: 552997
auuucucuguaaaggaccg

SEQ ID NO: 552999 - RNA, 19 nt, Artificial Sequence
  Description of Artificial Sequence: Synthetic oligonucleotide
  Sense strand starting at position 2943 of SEQ ID NO: 318312
uuuccuauugugggaaugu

SEQ ID NO: 553000 - RNA, 19 nt, Artificial Sequence
  Description of Artificial Sequence: Synthetic oligonucleotide
  Antisense strand to SEQ ID NO: 552999
acauucccacaauaggaaa

SEQ ID NO: 553001 - RNA, 19 nt, Artificial Sequence
  Description of Artificial Sequence: Synthetic oligonucleotide
  Sense strand starting at position 3249 of SEQ ID NO: 318312
uucuaaagauaucugugaa

SEQ ID NO: 553002 - RNA, 19 nt, Artificial Sequence
  Description of Artificial Sequence: Synthetic oligonucleotide
  Antisense strand to SEQ ID NO: 553001
uucacagauaucuuuagaa

SEQ ID NO: 553003 - RNA, 19 nt, Artificial Sequence
  Description of Artificial Sequence: Synthetic oligonucleotide
  Sense strand starting at position 3279 of SEQ ID NO: 318312
gcaugaauucucgccgcau

SEQ ID NO: 553004 - RNA, 19 nt, Artificial Sequence
  Description of Artificial Sequence: Synthetic oligonucleotide
  Antisense strand to SEQ ID NO: 553003
augcggcgagaauucaugc

SEQ ID NO: 553005 - RNA, 19 nt, Artificial Sequence
  Description of Artificial Sequence: Synthetic oligonucleotide
  Sense strand starting at position 3281 of SEQ ID NO: 318312
augaauucucgccgcauuu

SEQ ID NO: 553006 - RNA, 19 nt, Artificial Sequence
  Description of Artificial Sequence: Synthetic oligonucleotide
  Antisense strand to SEQ ID NO: 553005
aaaugcggcgagaauucau

SEQ ID NO: 553007 - RNA, 19 nt, Artificial Sequence
  Description of Artificial Sequence: Synthetic oligonucleotide
  Sense strand starting at position 3330 of SEQ ID NO: 318312
aggucaaauuuagagaaau

SEQ ID NO: 553008 - RNA, 19 nt, Artificial Sequence
  Description of Artificial Sequence: Synthetic oligonucleotide
  Antisense strand to SEQ ID NO: 553007
auuucucuaaauuugaccu

SEQ ID NO: 553009 - RNA, 19 nt, Artificial Sequence
  Description of Artificial Sequence: Synthetic oligonucleotide
  Sense strand starting at position 3746 of SEQ ID NO: 318312
guuaccacuuugcugaauu

SEQ ID NO: 553010 - RNA, 19 nt, Artificial Sequence
  Description of Artificial Sequence: Synthetic oligonucleotide
  Antisense strand to SEQ ID NO: 553009
aauucagcaaagugguaac

SEQ ID NO: 553011 - RNA, 19 nt, Artificial Sequence
  Description of Artificial Sequence: Synthetic oligonucleotide
  Sense strand starting at position 3767 of SEQ ID NO: 318312
uaaagaugguagcuaguuu

SEQ ID NO: 553012 - RNA, 19 nt, Artificial Sequence
  Description of Artificial Sequence: Synthetic oligonucleotide
  Antisense strand to SEQ ID NO: 553011
aaacuagcuaccaucuuua

SEQ ID NO: 553013 - RNA, 19 nt, Artificial Sequence
  Description of Artificial Sequence: Synthetic oligonucleotide
  Sense strand starting at position 3771 of SEQ ID NO: 318312
gaugguagcuaguuugaaa

SEQ ID NO: 553014 - RNA, 19 nt, Artificial Sequence
  Description of Artificial Sequence: Synthetic oligonucleotide
  Antisense strand to SEQ ID NO: 553013
uuucaaacuagcuaccauc

SEQ ID NO: 553015 - RNA, 19 nt, Artificial Sequence
  Description of Artificial Sequence: Synthetic oligonucleotide
  Sense strand starting at position 3836 of SEQ ID NO: 318312
augagaugccuuugacaac

SEQ ID NO: 553016 - RNA, 19 nt, Artificial Sequence
  Description of Artificial Sequence: Synthetic oligonucleotide
  Antisense strand to SEQ ID NO: 553015
guugucaaaggcaucucau

SEQ ID NO: 553017 - RNA, 19 nt, Artificial Sequence
  Description of Artificial Sequence: Synthetic oligonucleotide
  Sense strand starting at position 3906 of SEQ ID NO: 318312
aauggaaugucacaugaga

SEQ ID NO: 553018 - RNA, 19 nt, Artificial Sequence
  Description of Artificial Sequence: Synthetic oligonucleotide
  Antisense strand to SEQ ID NO: 553017
ucucaugugacauuccauu

SEQ ID NO: 553019 - RNA, 19 nt, Artificial Sequence
  Description of Artificial Sequence: Synthetic oligonucleotide
  Sense strand starting at position 1989 of SEQ ID NO: 318313
gacuccaaagaguguauau

SEQ ID NO: 553020 - RNA, 19 nt, Artificial Sequence
  Description of Artificial Sequence: Synthetic oligonucleotide
  Antisense strand to SEQ ID NO: 553019
auauacacucuuuggaguc

SEQ ID NO: 553021 - RNA, 19 nt, Artificial Sequence
  Description of Artificial Sequence: Synthetic oligonucleotide
  Sense strand starting at position 2002 of SEQ ID NO: 318313
guauaugguuccuuccagu

SEQ ID NO: 553022 - RNA, 19 nt, Artificial Sequence
  Description of Artificial Sequence: Synthetic oligonucleotide
  Antisense strand to SEQ ID NO: 553021
acuggaaggaaccauauac

SEQ ID NO: 553023 - RNA, 19 nt, Artificial Sequence
  Description of Artificial Sequence: Synthetic oligonucleotide
  Sense strand starting at position 2070 of SEQ ID NO: 318313
gguaaagagcgacaucaug

SEQ ID NO: 553024 - RNA, 19 nt, Artificial Sequence
  Description of Artificial Sequence: Synthetic oligonucleotide
  Antisense strand to SEQ ID NO: 553023
caugaugucgcucuuuacc

SEQ ID NO: 553025 - RNA, 19 nt, Artificial Sequence
  Description of Artificial Sequence: Synthetic oligonucleotide
  Sense strand starting at position 2080 of SEQ ID NO: 318313
gacaucauguggcuccaaa

SEQ ID NO: 553026 - RNA, 19 nt, Artificial Sequence
  Description of Artificial Sequence: Synthetic oligonucleotide
  Antisense strand to SEQ ID NO: 553025
uuuggagccacaugauguc

SEQ ID NO: 553027 - RNA, 19 nt, Artificial Sequence
  Description of Artificial Sequence: Synthetic oligonucleotide
  Sense strand starting at position 2101 of SEQ ID NO: 318313
guaaguagcaauuguggaa

SEQ ID NO: 553028 - RNA, 19 nt, Artificial Sequence
  Description of Artificial Sequence: Synthetic oligonucleotide
  Antisense strand to SEQ ID NO: 553027
uuccacaauugcuacuuac

SEQ ID NO: 553029 - RNA, 19 nt, Artificial Sequence
  Description of Artificial Sequence: Synthetic oligonucleotide
  Sense strand starting at position 2135 of SEQ ID NO: 318313
acuguaaacuacuugguuu

SEQ ID NO: 553030 - RNA, 19 nt, Artificial Sequence
  Description of Artificial Sequence: Synthetic oligonucleotide
  Antisense strand to SEQ ID NO: 553029
aaaccaaguaguuuacagu

SEQ ID NO: 553031 - RNA, 19 nt, Artificial Sequence
  Description of Artificial Sequence: Synthetic oligonucleotide
  Sense strand starting at position 2160 of SEQ ID NO: 318313
uuauuucagucguuucgga

SEQ ID NO: 553032 - RNA, 19 nt, Artificial Sequence
  Description of Artificial Sequence: Synthetic oligonucleotide
  Antisense strand to SEQ ID NO: 553031
uccgaaacgacugaaauaa

SEQ ID NO: 553033 - RNA, 19 nt, Artificial Sequence
  Description of Artificial Sequence: Synthetic oligonucleotide
  Sense strand starting at position 2167 of SEQ ID NO: 318313
agucguuucggagaauagg

SEQ ID NO: 553034 - RNA, 19 nt, Artificial Sequence
  Description of Artificial Sequence: Synthetic oligonucleotide
  Antisense strand to SEQ ID NO: 553033
ccuauucuccgaaacgacu

SEQ ID NO: 553035 - RNA, 19 nt, Artificial Sequence
  Description of Artificial Sequence: Synthetic oligonucleotide
  Sense strand starting at position 2170 of SEQ ID NO: 318313
cguuucggagaauaggaau

SEQ ID NO: 553036 - RNA, 19 nt, Artificial Sequence
  Description of Artificial Sequence: Synthetic oligonucleotide
  Antisense strand to SEQ ID NO: 553035
auuccuauucuccgaaacg

SEQ ID NO: 553037 - RNA, 19 nt, Artificial Sequence
  Description of Artificial Sequence: Synthetic oligonucleotide
  Sense strand starting at position 2228 of SEQ ID NO: 318313
gauugagugugguccuuag

SEQ ID NO: 553038 - RNA, 19 nt, Artificial Sequence
  Description of Artificial Sequence: Synthetic oligonucleotide
  Antisense strand to SEQ ID NO: 553037
cuaaggaccacacucaauc

SEQ ID NO: 553039 - RNA, 19 nt, Artificial Sequence
  Description of Artificial Sequence: Synthetic oligonucleotide
  Sense strand starting at position 2232 of SEQ ID NO: 318313
gagugugguccuuaguuuc

SEQ ID NO: 553040 - RNA, 19 nt, Artificial Sequence
  Description of Artificial Sequence: Synthetic oligonucleotide
  Antisense strand to SEQ ID NO: 553039
gaaacuaaggaccacacuc

SEQ ID NO: 553041 - RNA, 19 nt, Artificial Sequence
  Description of Artificial Sequence: Synthetic oligonucleotide
  Sense strand starting at position 2334 of SEQ ID NO: 318313
guaaacauguaacuguaaa

SEQ ID NO: 553042 - RNA, 19 nt, Artificial Sequence
  Description of Artificial Sequence: Synthetic oligonucleotide
  Antisense strand to SEQ ID NO: 553041
uuuacaguuacauguuuac

SEQ ID NO: 553043 - RNA, 19 nt, Artificial Sequence
  Description of Artificial Sequence: Synthetic oligonucleotide
  Sense strand starting at position 2346 of SEQ ID NO: 318313
cuguaaacuguugauuaga

SEQ ID NO: 553044 - RNA, 19 nt, Artificial Sequence
  Description of Artificial Sequence: Synthetic oligonucleotide
  Antisense strand to SEQ ID NO: 553043
ucuaaucaacaguuuacag

SEQ ID NO: 553045 - RNA, 19 nt, Artificial Sequence
  Description of Artificial Sequence: Synthetic oligonucleotide
  Sense strand starting at position 2348 of SEQ ID NO: 318313
guaaacuguugauuagaaa

SEQ ID NO: 553046 - RNA, 19 nt, Artificial Sequence
  Description of Artificial Sequence: Synthetic oligonucleotide
  Antisense strand to SEQ ID NO: 553045
uuucuaaucaacaguuuac

SEQ ID NO: 553047 - RNA, 19 nt, Artificial Sequence
  Description of Artificial Sequence: Synthetic oligonucleotide
  Sense strand starting at position 2375 of SEQ ID NO: 318313
acagauuccuguguuccca

SEQ ID NO: 553048 - RNA, 19 nt, Artificial Sequence
  Description of Artificial Sequence: Synthetic oligonucleotide
  Antisense strand to SEQ ID NO: 553047
ugggaacacaggaaucugu

SEQ ID NO: 553049 - RNA, 19 nt, Artificial Sequence
  Description of Artificial Sequence: Synthetic oligonucleotide
  Sense strand starting at position 2379 of SEQ ID NO: 318313
auuccuguguucccaagaa

SEQ ID NO: 553050 - RNA, 19 nt, Artificial Sequence
  Description of Artificial Sequence: Synthetic oligonucleotide
  Antisense strand to SEQ ID NO: 553049
uucuugggaacacaggaau

SEQ ID NO: 553051 - RNA, 19 nt, Artificial Sequence
  Description of Artificial Sequence: Synthetic oligonucleotide
  Sense strand starting at position 2504 of SEQ ID NO: 318313
agcuauugacagggaaauu

SEQ ID NO: 553052 - RNA, 19 nt, Artificial Sequence
  Description of Artificial Sequence: Synthetic oligonucleotide
  Antisense strand to SEQ ID NO: 553051
aauuucccugucaauagcu

SEQ ID NO: 553053 - RNA, 19 nt, Artificial Sequence
  Description of Artificial Sequence: Synthetic oligonucleotide
  Sense strand starting at position 2513 of SEQ ID NO: 318313
cagggaaauuugcagaugu

SEQ ID NO: 553054 - RNA, 19 nt, Artificial Sequence
  Description of Artificial Sequence: Synthetic oligonucleotide
  Antisense strand to SEQ ID NO: 553053
acaucugcaaauuucccug

SEQ ID NO: 553055 - RNA, 19 nt, Artificial Sequence
  Description of Artificial Sequence: Synthetic oligonucleotide
  Sense strand starting at position 2565 of SEQ ID NO: 318313
uuagaugucuuccuugagu

SEQ ID NO: 553056 - RNA, 19 nt, Artificial Sequence
  Description of Artificial Sequence: Synthetic oligonucleotide
  Antisense strand to SEQ ID NO: 553055
acucaaggaagacaucuaa

SEQ ID NO: 553057 - RNA, 19 nt, Artificial Sequence
  Description of Artificial Sequence: Synthetic oligonucleotide
  Sense strand starting at position 2567 of SEQ ID NO: 318313
agaugucuuccuugaguca

SEQ ID NO: 553058 - RNA, 19 nt, Artificial Sequence
  Description of Artificial Sequence: Synthetic oligonucleotide
  Antisense strand to SEQ ID NO: 553057
ugacucaaggaagacaucu

SEQ ID NO: 553059 - RNA, 19 nt, Artificial Sequence
  Description of Artificial Sequence: Synthetic oligonucleotide
  Sense strand starting at position 2568 of SEQ ID NO: 318313
gaugucuuccuugagucau

SEQ ID NO: 553060 - RNA, 19 nt, Artificial Sequence
  Description of Artificial Sequence: Synthetic oligonucleotide
  Antisense strand to SEQ ID NO: 553059
augacucaaggaagacauc

SEQ ID NO: 553061 - RNA, 19 nt, Artificial Sequence
  Description of Artificial Sequence: Synthetic oligonucleotide
  Sense strand starting at position 2580 of SEQ ID NO: 318313
gagucaugucagggcugaa

SEQ ID NO: 553062 - RNA, 19 nt, Artificial Sequence
  Description of Artificial Sequence: Synthetic oligonucleotide
  Antisense strand to SEQ ID NO: 553061
uucagcccugacaugacuc

SEQ ID NO: 553063 - RNA, 19 nt, Artificial Sequence
  Description of Artificial Sequence: Synthetic oligonucleotide
  Sense strand starting at position 2583 of SEQ ID NO: 318313
ucaugucagggcugaaagu

SEQ ID NO: 553064 - RNA, 19 nt, Artificial Sequence
  Description of Artificial Sequence: Synthetic oligonucleotide
  Antisense strand to SEQ ID NO: 553063
acuuucagcccugacauga

SEQ ID NO: 553065 - RNA, 19 nt, Artificial Sequence
  Description of Artificial Sequence: Synthetic oligonucleotide
  Sense strand starting at position 2672 of SEQ ID NO: 318313
cucauuugcucccaugaga

SEQ ID NO: 553066 - RNA, 19 nt, Artificial Sequence
  Description of Artificial Sequence: Synthetic oligonucleotide
  Antisense strand to SEQ ID NO: 553065
ucucaugggagcaaaugag

SEQ ID NO: 553067 - RNA, 19 nt, Artificial Sequence
  Description of Artificial Sequence: Synthetic oligonucleotide
  Sense strand starting at position 2685 of SEQ ID NO: 318313
augagaaacgcugguauuc

SEQ ID NO: 553068 - RNA, 19 nt, Artificial Sequence
  Description of Artificial Sequence: Synthetic oligonucleotide
  Antisense strand to SEQ ID NO: 553067
gaauaccagcguuucucau

SEQ ID NO: 553069 - RNA, 19 nt, Artificial Sequence
  Description of Artificial Sequence: Synthetic oligonucleotide
  Sense strand starting at position 2712 of SEQ ID NO: 318313
acucuuacaguuuauaagu

SEQ ID NO: 553070 - RNA, 19 nt, Artificial Sequence
  Description of Artificial Sequence: Synthetic oligonucleotide
  Antisense strand to SEQ ID NO: 553069
acuuauaaacuguaagagu

SEQ ID NO: 553071 - RNA, 19 nt, Artificial Sequence
  Description of Artificial Sequence: Synthetic oligonucleotide
  Sense strand starting at position 2736 of SEQ ID NO: 318313
cuuguucuccaguauguaa

SEQ ID NO: 553072 - RNA, 19 nt, Artificial Sequence
  Description of Artificial Sequence: Synthetic oligonucleotide
  Antisense strand to SEQ ID NO: 553071
uuacauacuggagaacaag

SEQ ID NO: 553073 - RNA, 19 nt, Artificial Sequence
  Description of Artificial Sequence: Synthetic oligonucleotide
  Sense strand starting at position 2775 of SEQ ID NO: 318313
cuccuauagugcuuauaua

SEQ ID NO: 553074 - RNA, 19 nt, Artificial Sequence
  Description of Artificial Sequence: Synthetic oligonucleotide
  Antisense strand to SEQ ID NO: 553073
uauauaagcacuauaggag

SEQ ID NO: 553075 - RNA, 19 nt, Artificial Sequence
  Description of Artificial Sequence: Synthetic oligonucleotide
  Sense strand starting at position 2776 of SEQ ID NO: 318313
uccuauagugcuuauauau

SEQ ID NO: 553076 - RNA, 19 nt, Artificial Sequence
  Description of Artificial Sequence: Synthetic oligonucleotide
  Antisense strand to SEQ ID NO: 553075
auauauaagcacuauagga

SEQ ID NO: 553077 - RNA, 19 nt, Artificial Sequence
  Description of Artificial Sequence: Synthetic oligonucleotide
  Sense strand starting at position 2857 of SEQ ID NO: 318313
uuguccugucuauaaguaa

SEQ ID NO: 553078 - RNA, 19 nt, Artificial Sequence
  Description of Artificial Sequence: Synthetic oligonucleotide
  Antisense strand to SEQ ID NO: 553077
uuacuuauagacaggacaa

SEQ ID NO: 553079 - RNA, 19 nt, Artificial Sequence
  Description of Artificial Sequence: Synthetic oligonucleotide
  Sense strand starting at position 2864 of SEQ ID NO: 318313
gucuauaaguaauccacau

SEQ ID NO: 553080 - RNA, 19 nt, Artificial Sequence
  Description of Artificial Sequence: Synthetic oligonucleotide
  Antisense strand to SEQ ID NO: 553079
auguggauuacuuauagac

SEQ ID NO: 553081 - RNA, 19 nt, Artificial Sequence
  Description of Artificial Sequence: Synthetic oligonucleotide
  Sense strand starting at position 2936 of SEQ ID NO: 318313
uucccugacccaugaagaa

SEQ ID NO: 553082 - RNA, 19 nt, Artificial Sequence
  Description of Artificial Sequence: Synthetic oligonucleotide
  Antisense strand to SEQ ID NO: 553081
uucuucaugggucagggaa

SEQ ID NO: 553083 - RNA, 19 nt, Artificial Sequence
  Description of Artificial Sequence: Synthetic oligonucleotide
  Sense strand starting at position 3026 of SEQ ID NO: 318313
ugggccauuuauuacauua

SEQ ID NO: 553084 - RNA, 19 nt, Artificial Sequence
  Description of Artificial Sequence: Synthetic oligonucleotide
  Antisense strand to SEQ ID NO: 553083
uaauguaauaaauggccca

SEQ ID NO: 553085 - RNA, 19 nt, Artificial Sequence
  Description of Artificial Sequence: Synthetic oligonucleotide
  Sense strand starting at position 3228 of SEQ ID NO: 318313
ucgcauaucuaguugggaa

SEQ ID NO: 553086 - RNA, 19 nt, Artificial Sequence
  Description of Artificial Sequence: Synthetic oligonucleotide
  Antisense strand to SEQ ID NO: 553085
uucccaacuagauaugcga

SEQ ID NO: 553087 - RNA, 19 nt, Artificial Sequence
  Description of Artificial Sequence: Synthetic oligonucleotide
  Sense strand starting at position 3229 of SEQ ID NO: 318313
cgcauaucuaguugggaaa

SEQ ID NO: 553088 - RNA, 19 nt, Artificial Sequence
  Description of Artificial Sequence: Synthetic oligonucleotide
  Antisense strand to SEQ ID NO: 553087
uuucccaacuagauaugcg

SEQ ID NO: 553089 - RNA, 19 nt, Artificial Sequence
  Description of Artificial Sequence: Synthetic oligonucleotide
  Sense strand starting at position 3377 of SEQ ID NO: 318313
cuugguaaucaugaucuuu

SEQ ID NO: 553090 - RNA, 19 nt, Artificial Sequence
  Description of Artificial Sequence: Synthetic oligonucleotide
  Antisense strand to SEQ ID NO: 553089
aaagaucaugauuaccaag

SEQ ID NO: 553091 - RNA, 19 nt, Artificial Sequence
  Description of Artificial Sequence: Synthetic oligonucleotide
  Sense strand starting at position 3379 of SEQ ID NO: 318313
ugguaaucaugaucuuuga

SEQ ID NO: 553092 - RNA, 19 nt, Artificial Sequence
  Description of Artificial Sequence: Synthetic oligonucleotide
  Antisense strand to SEQ ID NO: 553091
ucaaagaucaugauuacca

SEQ ID NO: 553093 - RNA, 19 nt, Artificial Sequence
  Description of Artificial Sequence: Synthetic oligonucleotide
  Sense strand starting at position 3394 of SEQ ID NO: 318313
uugaaucauccuggguauu

SEQ ID NO: 553094 - RNA, 19 nt, Artificial Sequence
  Description of Artificial Sequence: Synthetic oligonucleotide
  Antisense strand to SEQ ID NO: 553093
aauacccaggaugauucaa

SEQ ID NO: 553095 - RNA, 19 nt, Artificial Sequence
  Description of Artificial Sequence: Synthetic oligonucleotide
  Sense strand starting at position 3395 of SEQ ID NO: 318313
ugaaucauccuggguauua

SEQ ID NO: 553096 - RNA, 19 nt, Artificial Sequence
  Description of Artificial Sequence: Synthetic oligonucleotide
  Antisense strand to SEQ ID NO: 553095
uaauacccaggaugauuca

SEQ ID NO: 553097 - RNA, 19 nt, Artificial Sequence
  Description of Artificial Sequence: Synthetic oligonucleotide
  Sense strand starting at position 3396 of SEQ ID NO: 318313
gaaucauccuggguauuaa

SEQ ID NO: 553098 - RNA, 19 nt, Artificial Sequence
  Description of Artificial Sequence: Synthetic oligonucleotide
  Antisense strand to SEQ ID NO: 553097
uuaauacccaggaugauuc

SEQ ID NO: 553099 - RNA, 19 nt, Artificial Sequence
  Description of Artificial Sequence: Synthetic oligonucleotide
  Sense strand starting at position 2501 of SEQ ID NO: 318313
acaagcuauugacagggaa

SEQ ID NO: 553100 - RNA, 19 nt, Artificial Sequence
  Description of Artificial Sequence: Synthetic oligonucleotide
  Antisense strand to SEQ ID NO: 553099
uucccugucaauagcuugu

SEQ ID NO: 553101 - RNA, 19 nt, Artificial Sequence
  Description of Artificial Sequence: Synthetic oligonucleotide
  Sense strand starting at position 2140 of SEQ ID NO: 318314
uuuccuuucugucuaagga

SEQ ID NO: 553102 - RNA, 19 nt, Artificial Sequence
  Description of Artificial Sequence: Synthetic oligonucleotide
  Antisense strand to SEQ ID NO: 553101
uccuuagacagaaaggaaa

SEQ ID NO: 553103 - RNA, 19 nt, Artificial Sequence
  Description of Artificial Sequence: Synthetic oligonucleotide
  Sense strand starting at position 2141 of SEQ ID NO: 318314
uuccuuucugucuaaggaa

SEQ ID NO: 553104 - RNA, 19 nt, Artificial Sequence
  Description of Artificial Sequence: Synthetic oligonucleotide
  Antisense strand to SEQ ID NO: 553103
uuccuuagacagaaaggaa

SEQ ID NO: 553105 - RNA, 19 nt, Artificial Sequence
  Description of Artificial Sequence: Synthetic oligonucleotide
  Sense strand starting at position 2169 of SEQ ID NO: 318314
acuguauuccuuugaggcu

SEQ ID NO: 553106 - RNA, 19 nt, Artificial Sequence
  Description of Artificial Sequence: Synthetic oligonucleotide
  Antisense strand to SEQ ID NO: 553105
agccucaaaggaauacagu

SEQ ID NO: 553107 - RNA, 19 nt, Artificial Sequence
  Description of Artificial Sequence: Synthetic oligonucleotide
  Sense strand starting at position 2216 of SEQ ID NO: 318314
agcgacaucauguggauga

SEQ ID NO: 553108 - RNA, 19 nt, Artificial Sequence
  Description of Artificial Sequence: Synthetic oligonucleotide
  Antisense strand to SEQ ID NO: 553107
ucauccacaugaugucgcu

SEQ ID NO: 553109 - RNA, 19 nt, Artificial Sequence
  Description of Artificial Sequence: Synthetic oligonucleotide
  Sense strand starting at position 2269 of SEQ ID NO: 318314
agcuuauauucgucaauau

SEQ ID NO: 553110 - RNA, 19 nt, Artificial Sequence
  Description of Artificial Sequence: Synthetic oligonucleotide
  Antisense strand to SEQ ID NO: 553109
auauugacgaauauaagcu

SEQ ID NO: 553111 - RNA, 19 nt, Artificial Sequence
  Description of Artificial Sequence: Synthetic oligonucleotide
  Sense strand starting at position 2270 of SEQ ID NO: 318314
gcuuauauucgucaauauu

SEQ ID NO: 553112 - RNA, 19 nt, Artificial Sequence
  Description of Artificial Sequence: Synthetic oligonucleotide
  Antisense strand to SEQ ID NO: 553111
aauauugacgaauauaagc

SEQ ID NO: 553113 - RNA, 19 nt, Artificial Sequence
  Description of Artificial Sequence: Synthetic oligonucleotide
  Sense strand starting at position 2278 of SEQ ID NO: 318314
ucgucaauauuucucaagu

SEQ ID NO: 553114 - RNA, 19 nt, Artificial Sequence
  Description of Artificial Sequence: Synthetic oligonucleotide
  Antisense strand to SEQ ID NO: 553113
acuugagaaauauugacga

SEQ ID NO: 553115 - RNA, 19 nt, Artificial Sequence
  Description of Artificial Sequence: Synthetic oligonucleotide
  Sense strand starting at position 2280 of SEQ ID NO: 318314
gucaauauuucucaaguau

SEQ ID NO: 553116 - RNA, 19 nt, Artificial Sequence
  Description of Artificial Sequence: Synthetic oligonucleotide
  Antisense strand to SEQ ID NO: 553115
auacuugagaaauauugac

SEQ ID NO: 553117 - RNA, 19 nt, Artificial Sequence
  Description of Artificial Sequence: Synthetic oligonucleotide
  Sense strand starting at position 2384 of SEQ ID NO: 318314
caauauaagugcgucauua

SEQ ID NO: 553118 - RNA, 19 nt, Artificial Sequence
  Description of Artificial Sequence: Synthetic oligonucleotide
  Antisense strand to SEQ ID NO: 553117
uaaugacgcacuuauauug

SEQ ID NO: 553119 - RNA, 19 nt, Artificial Sequence
  Description of Artificial Sequence: Synthetic oligonucleotide
  Sense strand starting at position 2386 of SEQ ID NO: 318314
auauaagugcgucauuaaa

SEQ ID NO: 553120 - RNA, 19 nt, Artificial Sequence
  Description of Artificial Sequence: Synthetic oligonucleotide
  Antisense strand to SEQ ID NO: 553119
uuuaaugacgcacuuauau

SEQ ID NO: 553121 - RNA, 19 nt, Artificial Sequence
  Description of Artificial Sequence: Synthetic oligonucleotide
  Sense strand starting at position 2455 of SEQ ID NO: 318314
gaaauuugugcugguguau

SEQ ID NO: 553122 - RNA, 19 nt, Artificial Sequence
  Description of Artificial Sequence: Synthetic oligonucleotide
  Antisense strand to SEQ ID NO: 553121
auacaccagcacaaauuuc

SEQ ID NO: 553123 - RNA, 19 nt, Artificial Sequence
  Description of Artificial Sequence: Synthetic oligonucleotide
  Sense strand starting at position 2592 of SEQ ID NO: 318314
uguauuagucaauggaaug

SEQ ID NO: 553124 - RNA, 19 nt, Artificial Sequence
  Description of Artificial Sequence: Synthetic oligonucleotide
  Antisense strand to SEQ ID NO: 553123
cauuccauugacuaauaca

SEQ ID NO: 553125 - RNA, 19 nt, Artificial Sequence
  Description of Artificial Sequence: Synthetic oligonucleotide
  Sense strand starting at position 2593 of SEQ ID NO: 318314
guauuagucaauggaaugu

SEQ ID NO: 553126 - RNA, 19 nt, Artificial Sequence
  Description of Artificial Sequence: Synthetic oligonucleotide
  Antisense strand to SEQ ID NO: 553125
acauuccauugacuaauac

SEQ ID NO: 553127 - RNA, 19 nt, Artificial Sequence
  Description of Artificial Sequence: Synthetic oligonucleotide
  Sense strand starting at position 2606 of SEQ ID NO: 318314
gaauguuuguaugcuaucu

SEQ ID NO: 553128 - RNA, 19 nt, Artificial Sequence
  Description of Artificial Sequence: Synthetic oligonucleotide
  Antisense strand to SEQ ID NO: 553127
agauagcauacaaacauuc

SEQ ID NO: 553129 - RNA, 19 nt, Artificial Sequence
  Description of Artificial Sequence: Synthetic oligonucleotide
  Sense strand starting at position 2621 of SEQ ID NO: 318314
aucuccguguuacucauaa

SEQ ID NO: 553130 - RNA, 19 nt, Artificial Sequence
  Description of Artificial Sequence: Synthetic oligonucleotide
  Antisense strand to SEQ ID NO: 553129
uuaugaguaacacggagau

SEQ ID NO: 553131 - RNA, 19 nt, Artificial Sequence
  Description of Artificial Sequence: Synthetic oligonucleotide
  Sense strand starting at position 2720 of SEQ ID NO: 318314
auggcauucuuaccugagu

SEQ ID NO: 553132 - RNA, 19 nt, Artificial Sequence
  Description of Artificial Sequence: Synthetic oligonucleotide
  Antisense strand to SEQ ID NO: 553131
acucagguaagaaugccau

SEQ ID NO: 553133 - RNA, 19 nt, Artificial Sequence
  Description of Artificial Sequence: Synthetic oligonucleotide
  Sense strand starting at position 2721 of SEQ ID NO: 318314
uggcauucuuaccugaguu

SEQ ID NO: 553134 - RNA, 19 nt, Artificial Sequence
  Description of Artificial Sequence: Synthetic oligonucleotide
  Antisense strand to SEQ ID NO: 553133
aacucagguaagaaugcca

SEQ ID NO: 553135 - RNA, 19 nt, Artificial Sequence
  Description of Artificial Sequence: Synthetic oligonucleotide
  Sense strand starting at position 2725 of SEQ ID NO: 318314
auucuuaccugaguuucuu

SEQ ID NO: 553136 - RNA, 19 nt, Artificial Sequence
  Description of Artificial Sequence: Synthetic oligonucleotide
  Antisense strand to SEQ ID NO: 553135
aagaaacucagguaagaau

SEQ ID NO: 553137 - RNA, 19 nt, Artificial Sequence
  Description of Artificial Sequence: Synthetic oligonucleotide
  Sense strand starting at position 2731 of SEQ ID NO: 318314
accugaguuucuucucgga

SEQ ID NO: 553138 - RNA, 19 nt, Artificial Sequence
  Description of Artificial Sequence: Synthetic oligonucleotide
  Antisense strand to SEQ ID NO: 553137
uccgagaagaaacucaggu

SEQ ID NO: 553139 - RNA, 19 nt, Artificial Sequence
  Description of Artificial Sequence: Synthetic oligonucleotide
  Sense strand starting at position 2733 of SEQ ID NO: 318314
cugaguuucuucucggagu

SEQ ID NO: 553140 - RNA, 19 nt, Artificial Sequence
  Description of Artificial Sequence: Synthetic oligonucleotide
  Antisense strand to SEQ ID NO: 553139
acuccgagaagaaacucag

SEQ ID NO: 553141 - RNA, 19 nt, Artificial Sequence
  Description of Artificial Sequence: Synthetic oligonucleotide
  Sense strand starting at position 2735 of SEQ ID NO: 318314
gaguuucuucucggaguuc

SEQ ID NO: 553142 - RNA, 19 nt, Artificial Sequence
  Description of Artificial Sequence: Synthetic oligonucleotide
  Antisense strand to SEQ ID NO: 553141
gaacuccgagaagaaacuc

SEQ ID NO: 553143 - RNA, 19 nt, Artificial Sequence
  Description of Artificial Sequence: Synthetic oligonucleotide
  Sense strand starting at position 2861 of SEQ ID NO: 318314
agcauaauagaacgacuuu

SEQ ID NO: 553144 - RNA, 19 nt, Artificial Sequence
  Description of Artificial Sequence: Synthetic oligonucleotide
  Antisense strand to SEQ ID NO: 553143
aaagucguucuauuaugcu

SEQ ID NO: 553145 - RNA, 19 nt, Artificial Sequence
  Description of Artificial Sequence: Synthetic oligonucleotide
  Sense strand starting at position 2867 of SEQ ID NO: 318314
auagaacgacuuugguaaa

SEQ ID NO: 553146 - RNA, 19 nt, Artificial Sequence
  Description of Artificial Sequence: Synthetic oligonucleotide
  Antisense strand to SEQ ID NO: 553145
uuuaccaaagucguucuau

SEQ ID NO: 553147 - RNA, 19 nt, Artificial Sequence
  Description of Artificial Sequence: Synthetic oligonucleotide
  Sense strand starting at position 3141 of SEQ ID NO: 318314
aacuguuuacuggauggua

SEQ ID NO: 553148 - RNA, 19 nt, Artificial Sequence
  Description of Artificial Sequence: Synthetic oligonucleotide
  Antisense strand to SEQ ID NO: 553147
uaccauccaguaaacaguu

SEQ ID NO: 553149 - RNA, 19 nt, Artificial Sequence
  Description of Artificial Sequence: Synthetic oligonucleotide
  Sense strand starting at position 3149 of SEQ ID NO: 318314
acuggaugguaugauuuga

SEQ ID NO: 553150 - RNA, 19 nt, Artificial Sequence
  Description of Artificial Sequence: Synthetic oligonucleotide
  Antisense strand to SEQ ID NO: 553149
ucaaaucauaccauccagu

SEQ ID NO: 553151 - RNA, 19 nt, Artificial Sequence
  Description of Artificial Sequence: Synthetic oligonucleotide
  Sense strand starting at position 3249 of SEQ ID NO: 318314
agcuaacauucugcuugua

SEQ ID NO: 553152 - RNA, 19 nt, Artificial Sequence
  Description of Artificial Sequence: Synthetic oligonucleotide
  Antisense strand to SEQ ID NO: 553151
uacaagcagaauguuagcu

SEQ ID NO: 553153 - RNA, 19 nt, Artificial Sequence
  Description of Artificial Sequence: Synthetic oligonucleotide
  Sense strand starting at position 3304 of SEQ ID NO: 318314
aucccuuaccugugaagac

SEQ ID NO: 553154 - RNA, 19 nt, Artificial Sequence
  Description of Artificial Sequence: Synthetic oligonucleotide
  Antisense strand to SEQ ID NO: 553153
gucuucacagguaagggau

SEQ ID NO: 553155 - RNA, 19 nt, Artificial Sequence
  Description of Artificial Sequence: Synthetic oligonucleotide
  Sense strand starting at position 3342 of SEQ ID NO: 318314
gcaauucuauuguuggaua

SEQ ID NO: 553156 - RNA, 19 nt, Artificial Sequence
  Description of Artificial Sequence: Synthetic oligonucleotide
  Antisense strand to SEQ ID NO: 553155
uauccaacaauagaauugc

SEQ ID NO: 553157 - RNA, 19 nt, Artificial Sequence
  Description of Artificial Sequence: Synthetic oligonucleotide
  Sense strand starting at position 3409 of SEQ ID NO: 318314
aaugcaaagucagaggaaa

SEQ ID NO: 553158 - RNA, 19 nt, Artificial Sequence
  Description of Artificial Sequence: Synthetic oligonucleotide
  Antisense strand to SEQ ID NO: 553157
uuuccucugacuuugcauu

SEQ ID NO: 553159 - RNA, 19 nt, Artificial Sequence
  Description of Artificial Sequence: Synthetic oligonucleotide
  Sense strand starting at position 3411 of SEQ ID NO: 318314
ugcaaagucagaggaaauu

SEQ ID NO: 553160 - RNA, 19 nt, Artificial Sequence
  Description of Artificial Sequence: Synthetic oligonucleotide
  Antisense strand to SEQ ID NO: 553159
aauuuccucugacuuugca

SEQ ID NO: 553161 - RNA, 19 nt, Artificial Sequence
  Description of Artificial Sequence: Synthetic oligonucleotide
  Sense strand starting at position 3429 of SEQ ID NO: 318314
ucacuugauuucuggaauu

SEQ ID NO: 553162 - RNA, 19 nt, Artificial Sequence
  Description of Artificial Sequence: Synthetic oligonucleotide
  Antisense strand to SEQ ID NO: 553161
aauuccagaaaucaaguga

SEQ ID NO: 553163 - RNA, 19 nt, Artificial Sequence
  Description of Artificial Sequence: Synthetic oligonucleotide
  Sense strand starting at position 3463 of SEQ ID NO: 318314
acaagauauugucauagaa

SEQ ID NO: 553164 - RNA, 19 nt, Artificial Sequence
  Description of Artificial Sequence: Synthetic oligonucleotide
  Antisense strand to SEQ ID NO: 553163
uucuaugacaauaucuugu

SEQ ID NO: 553165 - RNA, 19 nt, Artificial Sequence
  Description of Artificial Sequence: Synthetic oligonucleotide
  Sense strand starting at position 3473 of SEQ ID NO: 318314
gucauagaauuguuucuga

SEQ ID NO: 553166 - RNA, 19 nt, Artificial Sequence
  Description of Artificial Sequence: Synthetic oligonucleotide
  Antisense strand to SEQ ID NO: 553165
ucagaaacaauucuaugac

SEQ ID NO: 553167 - RNA, 19 nt, Artificial Sequence
  Description of Artificial Sequence: Synthetic oligonucleotide
  Sense strand starting at position 3476 of SEQ ID NO: 318314
auagaauuguuucugauac

SEQ ID NO: 553168 - RNA, 19 nt, Artificial Sequence
  Description of Artificial Sequence: Synthetic oligonucleotide
  Antisense strand to SEQ ID NO: 553167
guaucagaaacaauucuau

SEQ ID NO: 553169 - RNA, 19 nt, Artificial Sequence
  Description of Artificial Sequence: Synthetic oligonucleotide
  Sense strand starting at position 3561 of SEQ ID NO: 318314
cacuaauauuuggaucguu

SEQ ID NO: 553170 - RNA, 19 nt, Artificial Sequence
  Description of Artificial Sequence: Synthetic oligonucleotide
  Antisense strand to SEQ ID NO: 553169
aacgauccaaauauuagug

SEQ ID NO: 553171 - RNA, 19 nt, Artificial Sequence
  Description of Artificial Sequence: Synthetic oligonucleotide
  Sense strand starting at position 3696 of SEQ ID NO: 318314
acagcauuagcugauguua

SEQ ID NO: 553172 - RNA, 19 nt, Artificial Sequence
  Description of Artificial Sequence: Synthetic oligonucleotide
  Antisense strand to SEQ ID NO: 553171
uaacaucagcuaaugcugu

SEQ ID NO: 553173 - RNA, 19 nt, Artificial Sequence
  Description of Artificial Sequence: Synthetic oligonucleotide
  Sense strand starting at position 3711 of SEQ ID NO: 318314
guuagccacuuucuauuau

SEQ ID NO: 553174 - RNA, 19 nt, Artificial Sequence
  Description of Artificial Sequence: Synthetic oligonucleotide
  Antisense strand to SEQ ID NO: 553173
auaauagaaaguggcuaac

SEQ ID NO: 553175 - RNA, 19 nt, Artificial Sequence
  Description of Artificial Sequence: Synthetic oligonucleotide
  Sense strand starting at position 3841 of SEQ ID NO: 318314
gcaaauuaacaauguagua

SEQ ID NO: 553176 - RNA, 19 nt, Artificial Sequence
  Description of Artificial Sequence: Synthetic oligonucleotide
  Antisense strand to SEQ ID NO: 553175
uacuacauuguuaauuugc

SEQ ID NO: 553177 - RNA, 19 nt, Artificial Sequence
  Description of Artificial Sequence: Synthetic oligonucleotide
  Sense strand starting at position 3873 of SEQ ID NO: 318314
cauuguaaucugcagagua

SEQ ID NO: 553178 - RNA, 19 nt, Artificial Sequence
  Description of Artificial Sequence: Synthetic oligonucleotide
  Antisense strand to SEQ ID NO: 553177
uacucugcagauuacaaug

SEQ ID NO: 553179 - RNA, 19 nt, Artificial Sequence
  Description of Artificial Sequence: Synthetic oligonucleotide
  Sense strand starting at position 3875 of SEQ ID NO: 318314
uuguaaucugcagaguauu

SEQ ID NO: 553180 - RNA, 19 nt, Artificial Sequence
  Description of Artificial Sequence: Synthetic oligonucleotide
  Antisense strand to SEQ ID NO: 553179
aauacucugcagauuacaa

SEQ ID NO: 553181 - RNA, 19 nt, Artificial Sequence
  Description of Artificial Sequence: Synthetic oligonucleotide
  Sense strand starting at position 2048 of SEQ ID NO: 318315
guaacagugcuauaccaua

SEQ ID NO: 553182 - RNA, 19 nt, Artificial Sequence
  Description of Artificial Sequence: Synthetic oligonucleotide
  Antisense strand to SEQ ID NO: 553181
uaugguauagcacuguuac

SEQ ID NO: 553183 - RNA, 19 nt, Artificial Sequence
  Description of Artificial Sequence: Synthetic oligonucleotide
  Sense strand starting at position 2111 of SEQ ID NO: 318315
ccuccucacguuuguaauu

SEQ ID NO: 553184 - RNA, 19 nt, Artificial Sequence
  Description of Artificial Sequence: Synthetic oligonucleotide
  Antisense strand to SEQ ID NO: 553183
aauuacaaacgugaggagg

SEQ ID NO: 553185 - RNA, 19 nt, Artificial Sequence
  Description of Artificial Sequence: Synthetic oligonucleotide
  Sense strand starting at position 2112 of SEQ ID NO: 318315
cuccucacguuuguaauuu

SEQ ID NO: 553186 - RNA, 19 nt, Artificial Sequence
  Description of Artificial Sequence: Synthetic oligonucleotide
  Antisense strand to SEQ ID NO: 553185
aaauuacaaacgugaggag

SEQ ID NO: 553187 - RNA, 19 nt, Artificial Sequence
  Description of Artificial Sequence: Synthetic oligonucleotide
  Sense strand starting at position 2123 of SEQ ID NO: 318315
uguaauuugcacggucagu

SEQ ID NO: 553188 - RNA, 19 nt, Artificial Sequence
  Description of Artificial Sequence: Synthetic oligonucleotide
  Antisense strand to SEQ ID NO: 553187
acugaccgugcaaauuaca

SEQ ID NO: 553189 - RNA, 19 nt, Artificial Sequence
  Description of Artificial Sequence: Synthetic oligonucleotide
  Sense strand starting at position 2138 of SEQ ID NO: 318315
caguguuaucccgacuucu

SEQ ID NO: 553190 - RNA, 19 nt, Artificial Sequence
  Description of Artificial Sequence: Synthetic oligonucleotide
  Antisense strand to SEQ ID NO: 553189
agaagucgggauaacacug

SEQ ID NO: 553191 - RNA, 19 nt, Artificial Sequence
  Description of Artificial Sequence: Synthetic oligonucleotide
  Sense strand starting at position 2245 of SEQ ID NO: 318315
aaauuuaaguguuaacgga

SEQ ID NO: 553192 - RNA, 19 nt, Artificial Sequence
  Description of Artificial Sequence: Synthetic oligonucleotide
  Antisense strand to SEQ ID NO: 553191
uccguuaacacuuaaauuu

SEQ ID NO: 553193 - RNA, 19 nt, Artificial Sequence
  Description of Artificial Sequence: Synthetic oligonucleotide
  Sense strand starting at position 2294 of SEQ ID NO: 318315
ucuacacucuugguagaaa

SEQ ID NO: 553194 - RNA, 19 nt, Artificial Sequence
  Description of Artificial Sequence: Synthetic oligonucleotide
  Antisense strand to SEQ ID NO: 553193
uuucuaccaagaguguaga

SEQ ID NO: 553195 - RNA, 19 nt, Artificial Sequence
  Description of Artificial Sequence: Synthetic oligonucleotide
  Sense strand starting at position 2325 of SEQ ID NO: 318315
acaucugucuuuccuagga

SEQ ID NO: 553196 - RNA, 19 nt, Artificial Sequence
  Description of Artificial Sequence: Synthetic oligonucleotide
  Antisense strand to SEQ ID NO: 553195
uccuaggaaagacagaugu

SEQ ID NO: 553197 - RNA, 19 nt, Artificial Sequence
  Description of Artificial Sequence: Synthetic oligonucleotide
  Sense strand starting at position 2329 of SEQ ID NO: 318315
cugucuuuccuaggacaug

SEQ ID NO: 553198 - RNA, 19 nt, Artificial Sequence
  Description of Artificial Sequence: Synthetic oligonucleotide
  Antisense strand to SEQ ID NO: 553197
cauguccuaggaaagacag

SEQ ID NO: 553199 - RNA, 19 nt, Artificial Sequence
  Description of Artificial Sequence: Synthetic oligonucleotide
  Sense strand starting at position 2340 of SEQ ID NO: 318315
aggacaugcuauuauauag

SEQ ID NO: 553200 - RNA, 19 nt, Artificial Sequence
  Description of Artificial Sequence: Synthetic oligonucleotide
  Antisense strand to SEQ ID NO: 553199
cuauauaauagcauguccu

SEQ ID NO: 553201 - RNA, 19 nt, Artificial Sequence
  Description of Artificial Sequence: Synthetic oligonucleotide
  Sense strand starting at position 2352 of SEQ ID NO: 318315
uauauagugcucuagggaa

SEQ ID NO: 553202 - RNA, 19 nt, Artificial Sequence
  Description of Artificial Sequence: Synthetic oligonucleotide
  Antisense strand to SEQ ID NO: 553201
uucccuagagcacuauaua

SEQ ID NO: 553203 - RNA, 19 nt, Artificial Sequence
  Description of Artificial Sequence: Synthetic oligonucleotide
  Sense strand starting at position 2415 of SEQ ID NO: 318315
ccuuauagauuauugaagu

SEQ ID NO: 553204 - RNA, 19 nt, Artificial Sequence
  Description of Artificial Sequence: Synthetic oligonucleotide
  Antisense strand to SEQ ID NO: 553203
acuucaauaaucuauaagg

SEQ ID NO: 553205 - RNA, 19 nt, Artificial Sequence
  Description of Artificial Sequence: Synthetic oligonucleotide
  Sense strand starting at position 2470 of SEQ ID NO: 318315
uaagguucuucuguguaau

SEQ ID NO: 553206 - RNA, 19 nt, Artificial Sequence
  Description of Artificial Sequence: Synthetic oligonucleotide
  Antisense strand to SEQ ID NO: 553205
auuacacagaagaaccuua

SEQ ID NO: 553207 - RNA, 19 nt, Artificial Sequence
  Description of Artificial Sequence: Synthetic oligonucleotide
  Sense strand starting at position 2471 of SEQ ID NO: 318315
aagguucuucuguguaaug

SEQ ID NO: 553208 - RNA, 19 nt, Artificial Sequence
  Description of Artificial Sequence: Synthetic oligonucleotide
  Antisense strand to SEQ ID NO: 553207
cauuacacagaagaaccuu

SEQ ID NO: 553209 - RNA, 19 nt, Artificial Sequence
  Description of Artificial Sequence: Synthetic oligonucleotide
  Sense strand starting at position 2472 of SEQ ID NO: 318315
agguucuucuguguaauga

SEQ ID NO: 553210 - RNA, 19 nt, Artificial Sequence
  Description of Artificial Sequence: Synthetic oligonucleotide
  Antisense strand to SEQ ID NO: 553209
ucauuacacagaagaaccu

SEQ ID NO: 553211 - RNA, 19 nt, Artificial Sequence
  Description of Artificial Sequence: Synthetic oligonucleotide
  Sense strand starting at position 2473 of SEQ ID NO: 318315
gguucuucuguguaaugau

SEQ ID NO: 553212 - RNA, 19 nt, Artificial Sequence
  Description of Artificial Sequence: Synthetic oligonucleotide
  Antisense strand to SEQ ID NO: 553211
aucauuacacagaagaacc

SEQ ID NO: 553213 - RNA, 19 nt, Artificial Sequence
  Description of Artificial Sequence: Synthetic oligonucleotide
  Sense strand starting at position 2480 of SEQ ID NO: 318315
cuguguaaugauggaagau

SEQ ID NO: 553214 - RNA, 19 nt, Artificial Sequence
  Description of Artificial Sequence: Synthetic oligonucleotide
  Antisense strand to SEQ ID NO: 553213
aucuuccaucauuacacag

SEQ ID NO: 553215 - RNA, 19 nt, Artificial Sequence
  Description of Artificial Sequence: Synthetic oligonucleotide
  Sense strand starting at position 2546 of SEQ ID NO: 318315
auauuaggauucuugcuua

SEQ ID NO: 553216 - RNA, 19 nt, Artificial Sequence
  Description of Artificial Sequence: Synthetic oligonucleotide
  Antisense strand to SEQ ID NO: 553215
uaagcaagaauccuaauau

SEQ ID NO: 553217 - RNA, 19 nt, Artificial Sequence
  Description of Artificial Sequence: Synthetic oligonucleotide
  Sense strand starting at position 2651 of SEQ ID NO: 318315
guuccuaaaugaucucguu

SEQ ID NO: 553218 - RNA, 19 nt, Artificial Sequence
  Description of Artificial Sequence: Synthetic oligonucleotide
  Antisense strand to SEQ ID NO: 553217
aacgagaucauuuaggaac

SEQ ID NO: 553219 - RNA, 19 nt, Artificial Sequence
  Description of Artificial Sequence: Synthetic oligonucleotide
  Sense strand starting at position 2790 of SEQ ID NO: 318315
cuauguuucuaauugucac

SEQ ID NO: 553220 - RNA, 19 nt, Artificial Sequence
  Description of Artificial Sequence: Synthetic oligonucleotide
  Antisense strand to SEQ ID NO: 553219
gugacaauuagaaacauag

SEQ ID NO: 553221 - RNA, 19 nt, Artificial Sequence
  Description of Artificial Sequence: Synthetic oligonucleotide
  Sense strand starting at position 2793 of SEQ ID NO: 318315
uguuucuaauugucacuuu

SEQ ID NO: 553222 - RNA, 19 nt, Artificial Sequence
  Description of Artificial Sequence: Synthetic oligonucleotide
  Antisense strand to SEQ ID NO: 553221
aaagugacaauuagaaaca

SEQ ID NO: 553223 - RNA, 19 nt, Artificial Sequence
  Description of Artificial Sequence: Synthetic oligonucleotide
  Sense strand starting at position 2917 of SEQ ID NO: 318315
augagcauuucccauguca

SEQ ID NO: 553224 - RNA, 19 nt, Artificial Sequence
  Description of Artificial Sequence: Synthetic oligonucleotide
  Antisense strand to SEQ ID NO: 553223
ugacaugggaaaugcucau

SEQ ID NO: 553225 - RNA, 19 nt, Artificial Sequence
  Description of Artificial Sequence: Synthetic oligonucleotide
  Sense strand starting at position 3083 of SEQ ID NO: 318315
uugagaaacuucuaguaac

SEQ ID NO: 553226 - RNA, 19 nt, Artificial Sequence
  Description of Artificial Sequence: Synthetic oligonucleotide
  Antisense strand to SEQ ID NO: 553225
guuacuagaaguuucucaa

SEQ ID NO: 553227 - RNA, 19 nt, Artificial Sequence
  Description of Artificial Sequence: Synthetic oligonucleotide
  Sense strand starting at position 3112 of SEQ ID NO: 318315
aucacauguuagguaauca

SEQ ID NO: 553228 - RNA, 19 nt, Artificial Sequence
  Description of Artificial Sequence: Synthetic oligonucleotide
  Antisense strand to SEQ ID NO: 553227
ugauuaccuaacaugugau

SEQ ID NO: 553229 - RNA, 19 nt, Artificial Sequence
  Description of Artificial Sequence: Synthetic oligonucleotide
  Sense strand starting at position 3333 of SEQ ID NO: 318315
uguuauccauuugaaguga

SEQ ID NO: 553230 - RNA, 19 nt, Artificial Sequence
  Description of Artificial Sequence: Synthetic oligonucleotide
  Antisense strand to SEQ ID NO: 553229
ucacuucaaauggauaaca

SEQ ID NO: 553231 - RNA, 19 nt, Artificial Sequence
  Description of Artificial Sequence: Synthetic oligonucleotide
  Sense strand starting at position 3456 of SEQ ID NO: 318315
cucacagaugauugugaca

SEQ ID NO: 553232 - RNA, 19 nt, Artificial Sequence
  Description of Artificial Sequence: Synthetic oligonucleotide
  Antisense strand to SEQ ID NO: 553231
ugucacaaucaucugugag

SEQ ID NO: 553233 - RNA, 19 nt, Artificial Sequence
  Description of Artificial Sequence: Synthetic oligonucleotide
  Sense strand starting at position 3458 of SEQ ID NO: 318315
cacagaugauugugacaca

SEQ ID NO: 553234 - RNA, 19 nt, Artificial Sequence
  Description of Artificial Sequence: Synthetic oligonucleotide
  Antisense strand to SEQ ID NO: 553233
ugugucacaaucaucugug

SEQ ID NO: 553235 - RNA, 19 nt, Artificial Sequence
  Description of Artificial Sequence: Synthetic oligonucleotide
  Sense strand starting at position 3459 of SEQ ID NO: 318315
acagaugauugugacacaa

SEQ ID NO: 553236 - RNA, 19 nt, Artificial Sequence
  Description of Artificial Sequence: Synthetic oligonucleotide
  Antisense strand to SEQ ID NO: 553235
uugugucacaaucaucugu

SEQ ID NO: 553237 - RNA, 19 nt, Artificial Sequence
  Description of Artificial Sequence: Synthetic oligonucleotide
  Sense strand starting at position 3461 of SEQ ID NO: 318315
agaugauugugacacaaag

SEQ ID NO: 553238 - RNA, 19 nt, Artificial Sequence
  Description of Artificial Sequence: Synthetic oligonucleotide
  Antisense strand to SEQ ID NO: 553237
cuuugugucacaaucaucu

SEQ ID NO: 553239 - RNA, 19 nt, Artificial Sequence
  Description of Artificial Sequence: Synthetic oligonucleotide
  Sense strand starting at position 3522 of SEQ ID NO: 318315
ggaucuauuuaguaguucu

SEQ ID NO: 553240 - RNA, 19 nt, Artificial Sequence
  Description of Artificial Sequence: Synthetic oligonucleotide
  Antisense strand to SEQ ID NO: 553239
agaacuacuaaauagaucc

SEQ ID NO: 553241 - RNA, 19 nt, Artificial Sequence
  Description of Artificial Sequence: Synthetic oligonucleotide
  Sense strand starting at position 3535 of SEQ ID NO: 318315
aguucuuaucacugacuuu

SEQ ID NO: 553242 - RNA, 19 nt, Artificial Sequence
  Description of Artificial Sequence: Synthetic oligonucleotide
  Antisense strand to SEQ ID NO: 553241
aaagucagugauaagaacu

SEQ ID NO: 553243 - RNA, 19 nt, Artificial Sequence
  Description of Artificial Sequence: Synthetic oligonucleotide
  Sense strand starting at position 3720 of SEQ ID NO: 318315
augugaccauuguuaacuu

SEQ ID NO: 553244 - RNA, 19 nt, Artificial Sequence
  Description of Artificial Sequence: Synthetic oligonucleotide
  Antisense strand to SEQ ID NO: 553243
aaguuaacaauggucacau

SEQ ID NO: 553245 - RNA, 19 nt, Artificial Sequence
  Description of Artificial Sequence: Synthetic oligonucleotide
  Sense strand starting at position 3785 of SEQ ID NO: 318315
cucaaaguagcucaggaua

SEQ ID NO: 553246 - RNA, 19 nt, Artificial Sequence
  Description of Artificial Sequence: Synthetic oligonucleotide
  Antisense strand to SEQ ID NO: 553245
uauccugagcuacuuugag

SEQ ID NO: 553247 - RNA, 19 nt, Artificial Sequence
  Description of Artificial Sequence: Synthetic oligonucleotide
  Sense strand starting at position 3793 of SEQ ID NO: 318315
agcucaggauauuaggaau

SEQ ID NO: 553248 - RNA, 19 nt, Artificial Sequence
  Description of Artificial Sequence: Synthetic oligonucleotide
  Antisense strand to SEQ ID NO: 553247
auuccuaauauccugagcu

SEQ ID NO: 553249 - RNA, 19 nt, Artificial Sequence
  Description of Artificial Sequence: Synthetic oligonucleotide
  Sense strand starting at position 3796 of SEQ ID NO: 318315
ucaggauauuaggaauaua

SEQ ID NO: 553250 - RNA, 19 nt, Artificial Sequence
  Description of Artificial Sequence: Synthetic oligonucleotide
  Antisense strand to SEQ ID NO: 553249
uauauuccuaauauccuga

SEQ ID NO: 553251 - RNA, 19 nt, Artificial Sequence
  Description of Artificial Sequence: Synthetic oligonucleotide
  Sense strand starting at position 3821 of SEQ ID NO: 318315
gcaugauagaaggguacuu

SEQ ID NO: 553252 - RNA, 19 nt, Artificial Sequence
  Description of Artificial Sequence: Synthetic oligonucleotide
  Antisense strand to SEQ ID NO: 553251
aaguacccuucuaucaugc

SEQ ID NO: 553253 - RNA, 19 nt, Artificial Sequence
  Description of Artificial Sequence: Synthetic oligonucleotide
  Sense strand starting at position 3846 of SEQ ID NO: 318315
uugaaugcauaugagaaua

SEQ ID NO: 553254 - RNA, 19 nt, Artificial Sequence
  Description of Artificial Sequence: Synthetic oligonucleotide
  Antisense strand to SEQ ID NO: 553253
uauucucauaugcauucaa

SEQ ID NO: 553255 - RNA, 19 nt, Artificial Sequence
  Description of Artificial Sequence: Synthetic oligonucleotide
  Sense strand starting at position 3908 of SEQ ID NO: 318315
ucauguaaaguguggacua

SEQ ID NO: 553256 - RNA, 19 nt, Artificial Sequence
  Description of Artificial Sequence: Synthetic oligonucleotide
  Antisense strand to SEQ ID NO: 553255
uaguccacacuuuacauga

SEQ ID NO: 553257 - RNA, 19 nt, Artificial Sequence
  Description of Artificial Sequence: Synthetic oligonucleotide
  Sense strand starting at position 3910 of SEQ ID NO: 318315
auguaaaguguggacuauu

SEQ ID NO: 553258 - RNA, 19 nt, Artificial Sequence
  Description of Artificial Sequence: Synthetic oligonucleotide
  Antisense strand to SEQ ID NO: 553257
aauaguccacacuuuacau

SEQ ID NO: 553259 - RNA, 19 nt, Artificial Sequence
  Description of Artificial Sequence: Synthetic oligonucleotide
  Sense strand starting at position 3965 of SEQ ID NO: 318315
guagacaaaugguucucau

SEQ ID NO: 553260 - RNA, 19 nt, Artificial Sequence
  Description of Artificial Sequence: Synthetic oligonucleotide
  Antisense strand to SEQ ID NO: 553259
augagaaccauuugucuac

SEQ ID NO: 553261 - RNA, 19 nt, Artificial Sequence
  Description of Artificial Sequence: Synthetic oligonucleotide
  Sense strand starting at position 2003 of SEQ ID NO: 318316
ucaaauuauuggcuuguuu

SEQ ID NO: 553262 - RNA, 19 nt, Artificial Sequence
  Description of Artificial Sequence: Synthetic oligonucleotide
  Antisense strand to SEQ ID NO: 553261
aaacaagccaauaauuuga

SEQ ID NO: 553263 - RNA, 19 nt, Artificial Sequence
  Description of Artificial Sequence: Synthetic oligonucleotide
  Sense strand starting at position 2101 of SEQ ID NO: 318316
ugugcauccaaagagugaa

SEQ ID NO: 553264 - RNA, 19 nt, Artificial Sequence
  Description of Artificial Sequence: Synthetic oligonucleotide
  Antisense strand to SEQ ID NO: 553263
uucacucuuuggaugcaca

SEQ ID NO: 553265 - RNA, 19 nt, Artificial Sequence
  Description of Artificial Sequence: Synthetic oligonucleotide
  Sense strand starting at position 2104 of SEQ ID NO: 318316
gcauccaaagagugaaaga

SEQ ID NO: 553266 - RNA, 19 nt, Artificial Sequence
  Description of Artificial Sequence: Synthetic oligonucleotide
  Antisense strand to SEQ ID NO: 553265
ucuuucacucuuuggaugc

SEQ ID NO: 553267 - RNA, 19 nt, Artificial Sequence
  Description of Artificial Sequence: Synthetic oligonucleotide
  Sense strand starting at position 2129 of SEQ ID NO: 318316
agcgucuuuccagugcgaa

SEQ ID NO: 553268 - RNA, 19 nt, Artificial Sequence
  Description of Artificial Sequence: Synthetic oligonucleotide
  Antisense strand to SEQ ID NO: 553267
uucgcacuggaaagacgcu

SEQ ID NO: 553269 - RNA, 19 nt, Artificial Sequence
  Description of Artificial Sequence: Synthetic oligonucleotide
  Sense strand starting at position 2197 of SEQ ID NO: 318316
gacaucauguggccaucau

SEQ ID NO: 553270 - RNA, 19 nt, Artificial Sequence
  Description of Artificial Sequence: Synthetic oligonucleotide
  Antisense strand to SEQ ID NO: 553269
augauggccacaugauguc

SEQ ID NO: 553271 - RNA, 19 nt, Artificial Sequence
  Description of Artificial Sequence: Synthetic oligonucleotide
  Sense strand starting at position 2201 of SEQ ID NO: 318316
ucauguggccaucauguaa

SEQ ID NO: 553272 - RNA, 19 nt, Artificial Sequence
  Description of Artificial Sequence: Synthetic oligonucleotide
  Antisense strand to SEQ ID NO: 553271
uuacaugauggccacauga

SEQ ID NO: 553273 - RNA, 19 nt, Artificial Sequence
  Description of Artificial Sequence: Synthetic oligonucleotide
  Sense strand starting at position 2205 of SEQ ID NO: 318316
guggccaucauguaaguaa

SEQ ID NO: 553274 - RNA, 19 nt, Artificial Sequence
  Description of Artificial Sequence: Synthetic oligonucleotide
  Antisense strand to SEQ ID NO: 553273
uuacuuacaugauggccac

SEQ ID NO: 553275 - RNA, 19 nt, Artificial Sequence
  Description of Artificial Sequence: Synthetic oligonucleotide
  Sense strand starting at position 2208 of SEQ ID NO: 318316
gccaucauguaaguaagaa

SEQ ID NO: 553276 - RNA, 19 nt, Artificial Sequence
  Description of Artificial Sequence: Synthetic oligonucleotide
  Antisense strand to SEQ ID NO: 553275
uucuuacuuacaugauggc

SEQ ID NO: 553277 - RNA, 19 nt, Artificial Sequence
  Description of Artificial Sequence: Synthetic oligonucleotide
  Sense strand starting at position 2319 of SEQ ID NO: 318316
uucucaugauuguuagaag

SEQ ID NO: 553278 - RNA, 19 nt, Artificial Sequence
  Description of Artificial Sequence: Synthetic oligonucleotide
  Antisense strand to SEQ ID NO: 553277
cuucuaacaaucaugagaa

SEQ ID NO: 553279 - RNA, 19 nt, Artificial Sequence
  Description of Artificial Sequence: Synthetic oligonucleotide
  Sense strand starting at position 2336 of SEQ ID NO: 318316
agcauucuuaggcgacuga

SEQ ID NO: 553280 - RNA, 19 nt, Artificial Sequence
  Description of Artificial Sequence: Synthetic oligonucleotide
  Antisense strand to SEQ ID NO: 553279
ucagucgccuaagaaugcu

SEQ ID NO: 553281 - RNA, 19 nt, Artificial Sequence
  Description of Artificial Sequence: Synthetic oligonucleotide
  Sense strand starting at position 2337 of SEQ ID NO: 318316
gcauucuuaggcgacugau

SEQ ID NO: 553282 - RNA, 19 nt, Artificial Sequence
  Description of Artificial Sequence: Synthetic oligonucleotide
  Antisense strand to SEQ ID NO: 553281
aucagucgccuaagaaugc

SEQ ID NO: 553283 - RNA, 19 nt, Artificial Sequence
  Description of Artificial Sequence: Synthetic oligonucleotide
  Sense strand starting at position 2360 of SEQ ID NO: 318316
uuugaauacucaguguuac

SEQ ID NO: 553284 - RNA, 19 nt, Artificial Sequence
  Description of Artificial Sequence: Synthetic oligonucleotide
  Antisense strand to SEQ ID NO: 553283
guaacacugaguauucaaa

SEQ ID NO: 553285 - RNA, 19 nt, Artificial Sequence
  Description of Artificial Sequence: Synthetic oligonucleotide
  Sense strand starting at position 2492 of SEQ ID NO: 318316
ugaucuagaucccaggaaa

SEQ ID NO: 553286 - RNA, 19 nt, Artificial Sequence
  Description of Artificial Sequence: Synthetic oligonucleotide
  Antisense strand to SEQ ID NO: 553285
uuuccugggaucuagauca

SEQ ID NO: 553287 - RNA, 19 nt, Artificial Sequence
  Description of Artificial Sequence: Synthetic oligonucleotide
  Sense strand starting at position 2727 of SEQ ID NO: 318316
aagaauuuguaucauguga

SEQ ID NO: 553288 - RNA, 19 nt, Artificial Sequence
  Description of Artificial Sequence: Synthetic oligonucleotide
  Antisense strand to SEQ ID NO: 553287
ucacaugauacaaauucuu

SEQ ID NO: 553289 - RNA, 19 nt, Artificial Sequence
  Description of Artificial Sequence: Synthetic oligonucleotide
  Sense strand starting at position 2756 of SEQ ID NO: 318316
gaggaaguauucugaauuu

SEQ ID NO: 553290 - RNA, 19 nt, Artificial Sequence
  Description of Artificial Sequence: Synthetic oligonucleotide
  Antisense strand to SEQ ID NO: 553289
aaauucagaauacuuccuc

SEQ ID NO: 553291 - RNA, 19 nt, Artificial Sequence
  Description of Artificial Sequence: Synthetic oligonucleotide
  Sense strand starting at position 2775 of SEQ ID NO: 318316
uuugcuuuagcagaaucua

SEQ ID NO: 553292 - RNA, 19 nt, Artificial Sequence
  Description of Artificial Sequence: Synthetic oligonucleotide
  Antisense strand to SEQ ID NO: 553291
uagauucugcuaaagcaaa

SEQ ID NO: 553293 - RNA, 19 nt, Artificial Sequence
  Description of Artificial Sequence: Synthetic oligonucleotide
  Sense strand starting at position 2850 of SEQ ID NO: 318316
gaacacuuguguguuauga

SEQ ID NO: 553294 - RNA, 19 nt, Artificial Sequence
  Description of Artificial Sequence: Synthetic oligonucleotide
  Antisense strand to SEQ ID NO: 553293
ucauaacacacaaguguuc

SEQ ID NO: 553295 - RNA, 19 nt, Artificial Sequence
  Description of Artificial Sequence: Synthetic oligonucleotide
  Sense strand starting at position 2970 of SEQ ID NO: 318316
acagcagcccuuugaucaa

SEQ ID NO: 553296 - RNA, 19 nt, Artificial Sequence
  Description of Artificial Sequence: Synthetic oligonucleotide
  Antisense strand to SEQ ID NO: 553295
uugaucaaagggcugcugu

SEQ ID NO: 553297 - RNA, 19 nt, Artificial Sequence
  Description of Artificial Sequence: Synthetic oligonucleotide
  Sense strand starting at position 2982 of SEQ ID NO: 318316
ugaucaagucuugagguau

SEQ ID NO: 553298 - RNA, 19 nt, Artificial Sequence
  Description of Artificial Sequence: Synthetic oligonucleotide
  Antisense strand to SEQ ID NO: 553297
auaccucaagacuugauca

SEQ ID NO: 553299 - RNA, 19 nt, Artificial Sequence
  Description of Artificial Sequence: Synthetic oligonucleotide
  Sense strand starting at position 3054 of SEQ ID NO: 318316
caauguucccaauggcaug

SEQ ID NO: 553300 - RNA, 19 nt, Artificial Sequence
  Description of Artificial Sequence: Synthetic oligonucleotide
  Antisense strand to SEQ ID NO: 553299
caugccauugggaacauug

SEQ ID NO: 553301 - RNA, 19 nt, Artificial Sequence
  Description of Artificial Sequence: Synthetic oligonucleotide
  Sense strand starting at position 3125 of SEQ ID NO: 318316
gcugcucuccugguguauu

SEQ ID NO: 553302 - RNA, 19 nt, Artificial Sequence
  Description of Artificial Sequence: Synthetic oligonucleotide
  Antisense strand to SEQ ID NO: 553301
aauacaccaggagagcagc

SEQ ID NO: 553303 - RNA, 19 nt, Artificial Sequence
  Description of Artificial Sequence: Synthetic oligonucleotide
  Sense strand starting at position 3135 of SEQ ID NO: 318316
ugguguauugcaguagcuu

SEQ ID NO: 553304 - RNA, 19 nt, Artificial Sequence
  Description of Artificial Sequence: Synthetic oligonucleotide
  Antisense strand to SEQ ID NO: 553303
aagcuacugcaauacacca

SEQ ID NO: 553305 - RNA, 19 nt, Artificial Sequence
  Description of Artificial Sequence: Synthetic oligonucleotide
  Sense strand starting at position 3208 of SEQ ID NO: 318316
gucaucuuccguuaauacu

SEQ ID NO: 553306 - RNA, 19 nt, Artificial Sequence
  Description of Artificial Sequence: Synthetic oligonucleotide
  Antisense strand to SEQ ID NO: 553305
aguauuaacggaagaugac

SEQ ID NO: 553307 - RNA, 19 nt, Artificial Sequence
  Description of Artificial Sequence: Synthetic oligonucleotide
  Sense strand starting at position 3268 of SEQ ID NO: 318316
gacuuugaagagugucaaa

SEQ ID NO: 553308 - RNA, 19 nt, Artificial Sequence
  Description of Artificial Sequence: Synthetic oligonucleotide
  Antisense strand to SEQ ID NO: 553307
uuugacacucuucaaaguc

SEQ ID NO: 553309 - RNA, 19 nt, Artificial Sequence
  Description of Artificial Sequence: Synthetic oligonucleotide
  Sense strand starting at position 3292 of SEQ ID NO: 318316
ucgucuaguacucaaaguu

SEQ ID NO: 553310 - RNA, 19 nt, Artificial Sequence
  Description of Artificial Sequence: Synthetic oligonucleotide
  Antisense strand to SEQ ID NO: 553309
aacuuugaguacuagacga

SEQ ID NO: 553311 - RNA, 19 nt, Artificial Sequence
  Description of Artificial Sequence: Synthetic oligonucleotide
  Sense strand starting at position 3365 of SEQ ID NO: 318316
augggaaccaugugcuuua

SEQ ID NO: 553312 - RNA, 19 nt, Artificial Sequence
  Description of Artificial Sequence: Synthetic oligonucleotide
  Antisense strand to SEQ ID NO: 553311
uaaagcacaugguucccau

SEQ ID NO: 553313 - RNA, 19 nt, Artificial Sequence
  Description of Artificial Sequence: Synthetic oligonucleotide
  Sense strand starting at position 3408 of SEQ ID NO: 318316
cuagguacauuuggaauuu

SEQ ID NO: 553314 - RNA, 19 nt, Artificial Sequence
  Description of Artificial Sequence: Synthetic oligonucleotide
  Antisense strand to SEQ ID NO: 553313
aaauuccaaauguaccuag

SEQ ID NO: 553315 - RNA, 19 nt, Artificial Sequence
  Description of Artificial Sequence: Synthetic oligonucleotide
  Sense strand starting at position 3427 of SEQ ID NO: 318316
ucuguauacucacuuaagu

SEQ ID NO: 553316 - RNA, 19 nt, Artificial Sequence
  Description of Artificial Sequence: Synthetic oligonucleotide
  Antisense strand to SEQ ID NO: 553315
acuuaagugaguauacaga

SEQ ID NO: 553317 - RNA, 19 nt, Artificial Sequence
  Description of Artificial Sequence: Synthetic oligonucleotide
  Sense strand starting at position 3464 of SEQ ID NO: 318316
accuguuagucuccauauu

SEQ ID NO: 553318 - RNA, 19 nt, Artificial Sequence
  Description of Artificial Sequence: Synthetic oligonucleotide
  Antisense strand to SEQ ID NO: 553317
aauauggagacuaacaggu

SEQ ID NO: 553319 - RNA, 19 nt, Artificial Sequence
  Description of Artificial Sequence: Synthetic oligonucleotide
  Sense strand starting at position 3465 of SEQ ID NO: 318316
ccuguuagucuccauauuc

SEQ ID NO: 553320 - RNA, 19 nt, Artificial Sequence
  Description of Artificial Sequence: Synthetic oligonucleotide
  Antisense strand to SEQ ID NO: 553319
gaauauggagacuaacagg

SEQ ID NO: 553321 - RNA, 19 nt, Artificial Sequence
  Description of Artificial Sequence: Synthetic oligonucleotide
  Sense strand starting at position 3636 of SEQ ID NO: 318316
cuaucaucguauuuaugua

SEQ ID NO: 553322 - RNA, 19 nt, Artificial Sequence
  Description of Artificial Sequence: Synthetic oligonucleotide
  Antisense strand to SEQ ID NO: 553321
uacauaaauacgaugauag

SEQ ID NO: 553323 - RNA, 19 nt, Artificial Sequence
  Description of Artificial Sequence: Synthetic oligonucleotide
  Sense strand starting at position 3644 of SEQ ID NO: 318316
guauuuauguaggauacuu

SEQ ID NO: 553324 - RNA, 19 nt, Artificial Sequence
  Description of Artificial Sequence: Synthetic oligonucleotide
  Antisense strand to SEQ ID NO: 553323
aaguauccuacauaaauac

SEQ ID NO: 553325 - RNA, 19 nt, Artificial Sequence
  Description of Artificial Sequence: Synthetic oligonucleotide
  Sense strand starting at position 3652 of SEQ ID NO: 318316
guaggauacuuaccuuuau

SEQ ID NO: 553326 - RNA, 19 nt, Artificial Sequence
  Description of Artificial Sequence: Synthetic oligonucleotide
  Antisense strand to SEQ ID NO: 553325
auaaagguaaguauccuac

SEQ ID NO: 553327 - RNA, 19 nt, Artificial Sequence
  Description of Artificial Sequence: Synthetic oligonucleotide
  Sense strand starting at position 3697 of SEQ ID NO: 318316
uuguuaauucgaugauucu

SEQ ID NO: 553328 - RNA, 19 nt, Artificial Sequence
  Description of Artificial Sequence: Synthetic oligonucleotide
  Antisense strand to SEQ ID NO: 553327
agaaucaucgaauuaacaa

SEQ ID NO: 553329 - RNA, 19 nt, Artificial Sequence
  Description of Artificial Sequence: Synthetic oligonucleotide
  Sense strand starting at position 3698 of SEQ ID NO: 318316
uguuaauucgaugauucuc

SEQ ID NO: 553330 - RNA, 19 nt, Artificial Sequence
  Description of Artificial Sequence: Synthetic oligonucleotide
  Antisense strand to SEQ ID NO: 553329
gagaaucaucgaauuaaca

SEQ ID NO: 553331 - RNA, 19 nt, Artificial Sequence
  Description of Artificial Sequence: Synthetic oligonucleotide
  Sense strand starting at position 3706 of SEQ ID NO: 318316
cgaugauucucagcaggca

SEQ ID NO: 553332 - RNA, 19 nt, Artificial Sequence
  Description of Artificial Sequence: Synthetic oligonucleotide
  Antisense strand to SEQ ID NO: 553331
ugccugcugagaaucaucg

SEQ ID NO: 553333 - RNA, 19 nt, Artificial Sequence
  Description of Artificial Sequence: Synthetic oligonucleotide
  Sense strand starting at position 3805 of SEQ ID NO: 318316
cuaagaaaguaugcuguuu

SEQ ID NO: 553334 - RNA, 19 nt, Artificial Sequence
  Description of Artificial Sequence: Synthetic oligonucleotide
  Antisense strand to SEQ ID NO: 553333
aaacagcauacuuucuuag

SEQ ID NO: 553335 - RNA, 19 nt, Artificial Sequence
  Description of Artificial Sequence: Synthetic oligonucleotide
  Sense strand starting at position 3831 of SEQ ID NO: 318316
guuagauaucauuagcuac

SEQ ID NO: 553336 - RNA, 19 nt, Artificial Sequence
  Description of Artificial Sequence: Synthetic oligonucleotide
  Antisense strand to SEQ ID NO: 553335
guagcuaaugauaucuaac

SEQ ID NO: 553337 - RNA, 19 nt, Artificial Sequence
  Description of Artificial Sequence: Synthetic oligonucleotide
  Sense strand starting at position 3890 of SEQ ID NO: 318316
acucuuaaguauguagagu

SEQ ID NO: 553338 - RNA, 19 nt, Artificial Sequence
  Description of Artificial Sequence: Synthetic oligonucleotide
  Antisense strand to SEQ ID NO: 553337
acucuacauacuuaagagu

SEQ ID NO: 553339 - RNA, 19 nt, Artificial Sequence
  Description of Artificial Sequence: Synthetic oligonucleotide
  Sense strand starting at position 3891 of SEQ ID NO: 318316
cucuuaaguauguagaguu

SEQ ID NO: 553340 - RNA, 19 nt, Artificial Sequence
  Description of Artificial Sequence: Synthetic oligonucleotide
  Antisense strand to SEQ ID NO: 553339
aacucuacauacuuaagag

SEQ ID NO: 553341 - RNA, 19 nt, Artificial Sequence
  Description of Artificial Sequence: Synthetic oligonucleotide
  Sense strand starting at position 1989 of SEQ ID NO: 318317
agugauaauccauguuaaa

SEQ ID NO: 553342 - RNA, 19 nt, Artificial Sequence
  Description of Artificial Sequence: Synthetic oligonucleotide
  Antisense strand to SEQ ID NO: 553341
uuuaacauggauuaucacu

SEQ ID NO: 553343 - RNA, 19 nt, Artificial Sequence
  Description of Artificial Sequence: Synthetic oligonucleotide
  Sense strand starting at position 2002 of SEQ ID NO: 318317
guuaaauagucguuuccua

SEQ ID NO: 553344 - RNA, 19 nt, Artificial Sequence
  Description of Artificial Sequence: Synthetic oligonucleotide
  Antisense strand to SEQ ID NO: 553343
uaggaaacgacuauuuaac

SEQ ID NO: 553345 - RNA, 19 nt, Artificial Sequence
  Description of Artificial Sequence: Synthetic oligonucleotide
  Sense strand starting at position 2103 of SEQ ID NO: 318317
ucggccuuuagagacagau

SEQ ID NO: 553346 - RNA, 19 nt, Artificial Sequence
  Description of Artificial Sequence: Synthetic oligonucleotide
  Antisense strand to SEQ ID NO: 553345
aucugucucuaaaggccga

SEQ ID NO: 553347 - RNA, 19 nt, Artificial Sequence
  Description of Artificial Sequence: Synthetic oligonucleotide
  Sense strand starting at position 2155 of SEQ ID NO: 318317
ccagaacuucuugguagac

SEQ ID NO: 553348 - RNA, 19 nt, Artificial Sequence
  Description of Artificial Sequence: Synthetic oligonucleotide
  Antisense strand to SEQ ID NO: 553347
gucuaccaagaaguucugg

SEQ ID NO: 553349 - RNA, 19 nt, Artificial Sequence
  Description of Artificial Sequence: Synthetic oligonucleotide
  Sense strand starting at position 2156 of SEQ ID NO: 318317
cagaacuucuugguagaca

SEQ ID NO: 553350 - RNA, 19 nt, Artificial Sequence
  Description of Artificial Sequence: Synthetic oligonucleotide
  Antisense strand to SEQ ID NO: 553349
ugucuaccaagaaguucug

SEQ ID NO: 553351 - RNA, 19 nt, Artificial Sequence
  Description of Artificial Sequence: Synthetic oligonucleotide
  Sense strand starting at position 2196 of SEQ ID NO: 318317
agguaaugauuacaugaau

SEQ ID NO: 553352 - RNA, 19 nt, Artificial Sequence
  Description of Artificial Sequence: Synthetic oligonucleotide
  Antisense strand to SEQ ID NO: 553351
auucauguaaucauuaccu

SEQ ID NO: 553353 - RNA, 19 nt, Artificial Sequence
  Description of Artificial Sequence: Synthetic oligonucleotide
  Sense strand starting at position 2210 of SEQ ID NO: 318317
ugaauuacuuccgcaauau

SEQ ID NO: 553354 - RNA, 19 nt, Artificial Sequence
  Description of Artificial Sequence: Synthetic oligonucleotide
  Antisense strand to SEQ ID NO: 553353
auauugcggaaguaauuca

SEQ ID NO: 553355 - RNA, 19 nt, Artificial Sequence
  Description of Artificial Sequence: Synthetic oligonucleotide
  Sense strand starting at position 2230 of SEQ ID NO: 318317
uggguucuucuaugcacuu

SEQ ID NO: 553356 - RNA, 19 nt, Artificial Sequence
  Description of Artificial Sequence: Synthetic oligonucleotide
  Antisense strand to SEQ ID NO: 553355
aagugcauagaagaaccca

SEQ ID NO: 553357 - RNA, 19 nt, Artificial Sequence
  Description of Artificial Sequence: Synthetic oligonucleotide
  Sense strand starting at position 2231 of SEQ ID NO: 318317
ggguucuucuaugcacuuu

SEQ ID NO: 553358 - RNA, 19 nt, Artificial Sequence
  Description of Artificial Sequence: Synthetic oligonucleotide
  Antisense strand to SEQ ID NO: 553357
aaagugcauagaagaaccc

SEQ ID NO: 553359 - RNA, 19 nt, Artificial Sequence
  Description of Artificial Sequence: Synthetic oligonucleotide
  Sense strand starting at position 2288 of SEQ ID NO: 318317
uuaucaauugcagaggcau

SEQ ID NO: 553360 - RNA, 19 nt, Artificial Sequence
  Description of Artificial Sequence: Synthetic oligonucleotide
  Antisense strand to SEQ ID NO: 553359
augccucugcaauugauaa

SEQ ID NO: 553361 - RNA, 19 nt, Artificial Sequence
  Description of Artificial Sequence: Synthetic oligonucleotide
  Sense strand starting at position 2312 of SEQ ID NO: 318317
cugucuggcuccuuacauu

SEQ ID NO: 553362 - RNA, 19 nt, Artificial Sequence
  Description of Artificial Sequence: Synthetic oligonucleotide
  Antisense strand to SEQ ID NO: 553361
aauguaaggagccagacag

SEQ ID NO: 553363 - RNA, 19 nt, Artificial Sequence
  Description of Artificial Sequence: Synthetic oligonucleotide
  Sense strand starting at position 2412 of SEQ ID NO: 318317
uuaaguaugaccuguaugu

SEQ ID NO: 553364 - RNA, 19 nt, Artificial Sequence
  Description of Artificial Sequence: Synthetic oligonucleotide
  Antisense strand to SEQ ID NO: 553363
acauacaggucauacuuaa

SEQ ID NO: 553365 - RNA, 19 nt, Artificial Sequence
  Description of Artificial Sequence: Synthetic oligonucleotide
  Sense strand starting at position 2414 of SEQ ID NO: 318317
aaguaugaccuguauguca

SEQ ID NO: 553366 - RNA, 19 nt, Artificial Sequence
  Description of Artificial Sequence: Synthetic oligonucleotide
  Antisense strand to SEQ ID NO: 553365
ugacauacaggucauacuu

SEQ ID NO: 553367 - RNA, 19 nt, Artificial Sequence
  Description of Artificial Sequence: Synthetic oligonucleotide
  Sense strand starting at position 2416 of SEQ ID NO: 318317
guaugaccuguaugucaug

SEQ ID NO: 553368 - RNA, 19 nt, Artificial Sequence
  Description of Artificial Sequence: Synthetic oligonucleotide
  Antisense strand to SEQ ID NO: 553367
caugacauacaggucauac

SEQ ID NO: 553369 - RNA, 19 nt, Artificial Sequence
  Description of Artificial Sequence: Synthetic oligonucleotide
  Sense strand starting at position 2422 of SEQ ID NO: 318317
ccuguaugucauggauauc

SEQ ID NO: 553370 - RNA, 19 nt, Artificial Sequence
  Description of Artificial Sequence: Synthetic oligonucleotide
  Antisense strand to SEQ ID NO: 553369
gauauccaugacauacagg

SEQ ID NO: 553371 - RNA, 19 nt, Artificial Sequence
  Description of Artificial Sequence: Synthetic oligonucleotide
  Sense strand starting at position 2428 of SEQ ID NO: 318317
ugucauggauaucagaaau

SEQ ID NO: 553372 - RNA, 19 nt, Artificial Sequence
  Description of Artificial Sequence: Synthetic oligonucleotide
  Antisense strand to SEQ ID NO: 553371
auuucugauauccaugaca

SEQ ID NO: 553373 - RNA, 19 nt, Artificial Sequence
  Description of Artificial Sequence: Synthetic oligonucleotide
  Sense strand starting at position 2460 of SEQ ID NO: 318317
cauaguuucguguggaaga

SEQ ID NO: 553374 - RNA, 19 nt, Artificial Sequence
  Description of Artificial Sequence: Synthetic oligonucleotide
  Antisense strand to SEQ ID NO: 553373
ucuuccacacgaaacuaug

SEQ ID NO: 553375 - RNA, 19 nt, Artificial Sequence
  Description of Artificial Sequence: Synthetic oligonucleotide
  Sense strand starting at position 2462 of SEQ ID NO: 318317
uaguuucguguggaagaaa

SEQ ID NO: 553376 - RNA, 19 nt, Artificial Sequence
  Description of Artificial Sequence: Synthetic oligonucleotide
  Antisense strand to SEQ ID NO: 553375
uuucuuccacacgaaacua

SEQ ID NO: 553377 - RNA, 19 nt, Artificial Sequence
  Description of Artificial Sequence: Synthetic oligonucleotide
  Sense strand starting at position 2516 of SEQ ID NO: 318317
uauauauuacucugaggug

SEQ ID NO: 553378 - RNA, 19 nt, Artificial Sequence
  Description of Artificial Sequence: Synthetic oligonucleotide
  Antisense strand to SEQ ID NO: 553377
caccucagaguaauauaua

SEQ ID NO: 553379 - RNA, 19 nt, Artificial Sequence
  Description of Artificial Sequence: Synthetic oligonucleotide
  Sense strand starting at position 2521 of SEQ ID NO: 318317
auuacucugaggugagcau

SEQ ID NO: 553380 - RNA, 19 nt, Artificial Sequence
  Description of Artificial Sequence: Synthetic oligonucleotide
  Antisense strand to SEQ ID NO: 553379
augcucaccucagaguaau

SEQ ID NO: 553381 - RNA, 19 nt, Artificial Sequence
  Description of Artificial Sequence: Synthetic oligonucleotide
  Sense strand starting at position 2525 of SEQ ID NO: 318317
cucugaggugagcauauaa

SEQ ID NO: 553382 - RNA, 19 nt, Artificial Sequence
  Description of Artificial Sequence: Synthetic oligonucleotide
  Antisense strand to SEQ ID NO: 553381
uuauaugcucaccucagag

SEQ ID NO: 553383 - RNA, 19 nt, Artificial Sequence
  Description of Artificial Sequence: Synthetic oligonucleotide
  Sense strand starting at position 2562 of SEQ ID NO: 318317
uuaucuucuuguguucuua

SEQ ID NO: 553384 - RNA, 19 nt, Artificial Sequence
  Description of Artificial Sequence: Synthetic oligonucleotide
  Antisense strand to SEQ ID NO: 553383
uaagaacacaagaagauaa

SEQ ID NO: 553385 - RNA, 19 nt, Artificial Sequence
  Description of Artificial Sequence: Synthetic oligonucleotide
  Sense strand starting at position 2564 of SEQ ID NO: 318317
aucuucuuguguucuuauu

SEQ ID NO: 553386 - RNA, 19 nt, Artificial Sequence
  Description of Artificial Sequence: Synthetic oligonucleotide
  Antisense strand to SEQ ID NO: 553385
aauaagaacacaagaagau

SEQ ID NO: 553387 - RNA, 19 nt, Artificial Sequence
  Description of Artificial Sequence: Synthetic oligonucleotide
  Sense strand starting at position 2615 of SEQ ID NO: 318317
gucaaauugccugaaccgu

SEQ ID NO: 553388 - RNA, 19 nt, Artificial Sequence
  Description of Artificial Sequence: Synthetic oligonucleotide
  Antisense strand to SEQ ID NO: 553387
acgguucaggcaauuugac

SEQ ID NO: 553389 - RNA, 19 nt, Artificial Sequence
  Description of Artificial Sequence: Synthetic oligonucleotide
  Sense strand starting at position 2661 of SEQ ID NO: 318317
ugugcauauucuuuacacu

SEQ ID NO: 553390 - RNA, 19 nt, Artificial Sequence
  Description of Artificial Sequence: Synthetic oligonucleotide
  Antisense strand to SEQ ID NO: 553389
aguguaaagaauaugcaca

SEQ ID NO: 553391 - RNA, 19 nt, Artificial Sequence
  Description of Artificial Sequence: Synthetic oligonucleotide
  Sense strand starting at position 2662 of SEQ ID NO: 318317
gugcauauucuuuacacua

SEQ ID NO: 553392 - RNA, 19 nt, Artificial Sequence
  Description of Artificial Sequence: Synthetic oligonucleotide
  Antisense strand to SEQ ID NO: 553391
uaguguaaagaauaugcac

SEQ ID NO: 553393 - RNA, 19 nt, Artificial Sequence
  Description of Artificial Sequence: Synthetic oligonucleotide
  Sense strand starting at position 2740 of SEQ ID NO: 318317
ugauuucucugacaugcca

SEQ ID NO: 553394 - RNA, 19 nt, Artificial Sequence
  Description of Artificial Sequence: Synthetic oligonucleotide
  Antisense strand to SEQ ID NO: 553393
uggcaugucagagaaauca

SEQ ID NO: 553395 - RNA, 19 nt, Artificial Sequence
  Description of Artificial Sequence: Synthetic oligonucleotide
  Sense strand starting at position 2763 of SEQ ID NO: 318317
cuagcaguauugccaucau

SEQ ID NO: 553396 - RNA, 19 nt, Artificial Sequence
  Description of Artificial Sequence: Synthetic oligonucleotide
  Antisense strand to SEQ ID NO: 553395
augauggcaauacugcuag

SEQ ID NO: 553397 - RNA, 19 nt, Artificial Sequence
  Description of Artificial Sequence: Synthetic oligonucleotide
  Sense strand starting at position 2775 of SEQ ID NO: 318317
ccaucauuggcuuguuagu

SEQ ID NO: 553398 - RNA, 19 nt, Artificial Sequence
  Description of Artificial Sequence: Synthetic oligonucleotide
  Antisense strand to SEQ ID NO: 553397
acuaacaagccaaugaugg

SEQ ID NO: 553399 - RNA, 19 nt, Artificial Sequence
  Description of Artificial Sequence: Synthetic oligonucleotide
  Sense strand starting at position 2820 of SEQ ID NO: 318317
gugaguauuuaccagaauu

SEQ ID NO: 553400 - RNA, 19 nt, Artificial Sequence
  Description of Artificial Sequence: Synthetic oligonucleotide
  Antisense strand to SEQ ID NO: 553399
aauucugguaaauacucac

SEQ ID NO: 553401 - RNA, 19 nt, Artificial Sequence
  Description of Artificial Sequence: Synthetic oligonucleotide
  Sense strand starting at position 2877 of SEQ ID NO: 318317
uuucuauuuccacggcuuu

SEQ ID NO: 553402 - RNA, 19 nt, Artificial Sequence
  Description of Artificial Sequence: Synthetic oligonucleotide
  Antisense strand to SEQ ID NO: 553401
aaagccguggaaauagaaa

SEQ ID NO: 553403 - RNA, 19 nt, Artificial Sequence
  Description of Artificial Sequence: Synthetic oligonucleotide
  Sense strand starting at position 2878 of SEQ ID NO: 318317
uucuauuuccacggcuuua

SEQ ID NO: 553404 - RNA, 19 nt, Artificial Sequence
  Description of Artificial Sequence: Synthetic oligonucleotide
  Antisense strand to SEQ ID NO: 553403
uaaagccguggaaauagaa

SEQ ID NO: 553405 - RNA, 19 nt, Artificial Sequence
  Description of Artificial Sequence: Synthetic oligonucleotide
  Sense strand starting at position 2901 of SEQ ID NO: 318317
agccuauuauuugaaguau

SEQ ID NO: 553406 - RNA, 19 nt, Artificial Sequence
  Description of Artificial Sequence: Synthetic oligonucleotide
  Antisense strand to SEQ ID NO: 553405
auacuucaaauaauaggcu

SEQ ID NO: 553407 - RNA, 19 nt, Artificial Sequence
  Description of Artificial Sequence: Synthetic oligonucleotide
  Sense strand starting at position 2998 of SEQ ID NO: 318317
aaaugagucgaccaaaguu

SEQ ID NO: 553408 - RNA, 19 nt, Artificial Sequence
  Description of Artificial Sequence: Synthetic oligonucleotide
  Antisense strand to SEQ ID NO: 553407
aacuuuggucgacucauuu

SEQ ID NO: 553409 - RNA, 19 nt, Artificial Sequence
  Description of Artificial Sequence: Synthetic oligonucleotide
  Sense strand starting at position 3178 of SEQ ID NO: 318317
gugugauaauuucuguccu

SEQ ID NO: 553410 - RNA, 19 nt, Artificial Sequence
  Description of Artificial Sequence: Synthetic oligonucleotide
  Antisense strand to SEQ ID NO: 553409
aggacagaaauuaucacac

SEQ ID NO: 553411 - RNA, 19 nt, Artificial Sequence
  Description of Artificial Sequence: Synthetic oligonucleotide
  Sense strand starting at position 3473 of SEQ ID NO: 318317
guaaauucuccauggauuc

SEQ ID NO: 553412 - RNA, 19 nt, Artificial Sequence
  Description of Artificial Sequence: Synthetic oligonucleotide
  Antisense strand to SEQ ID NO: 553411
gaauccauggagaauuuac

SEQ ID NO: 553413 - RNA, 19 nt, Artificial Sequence
  Description of Artificial Sequence: Synthetic oligonucleotide
  Sense strand starting at position 3642 of SEQ ID NO: 318317
cucuguaguugacucuaaa

SEQ ID NO: 553414 - RNA, 19 nt, Artificial Sequence
  Description of Artificial Sequence: Synthetic oligonucleotide
  Antisense strand to SEQ ID NO: 553413
uuuagagucaacuacagag

SEQ ID NO: 553415 - RNA, 19 nt, Artificial Sequence
  Description of Artificial Sequence: Synthetic oligonucleotide
  Sense strand starting at position 3645 of SEQ ID NO: 318317
uguaguugacucuaaauag

SEQ ID NO: 553416 - RNA, 19 nt, Artificial Sequence
  Description of Artificial Sequence: Synthetic oligonucleotide
  Antisense strand to SEQ ID NO: 553415
cuauuuagagucaacuaca

SEQ ID NO: 553417 - RNA, 19 nt, Artificial Sequence
  Description of Artificial Sequence: Synthetic oligonucleotide
  Sense strand starting at position 3666 of SEQ ID NO: 318317
gcaaacaauuuguaaagaa

SEQ ID NO: 553418 - RNA, 19 nt, Artificial Sequence
  Description of Artificial Sequence: Synthetic oligonucleotide
  Antisense strand to SEQ ID NO: 553417
uucuuuacaaauuguuugc

SEQ ID NO: 553419 - RNA, 19 nt, Artificial Sequence
  Description of Artificial Sequence: Synthetic oligonucleotide
  Sense strand starting at position 3696 of SEQ ID NO: 318317
ucgauaucucaggaguuug

SEQ ID NO: 553420 - RNA, 19 nt, Artificial Sequence
  Description of Artificial Sequence: Synthetic oligonucleotide
  Antisense strand to SEQ ID NO: 553419
caaacuccugagauaucga

SEQ ID NO: 553421 - RNA, 19 nt, Artificial Sequence
  Description of Artificial Sequence: Synthetic oligonucleotide
  Sense strand starting at position 2074 of SEQ ID NO: 318318
uuuccagaaauguguuguu

SEQ ID NO: 553422 - RNA, 19 nt, Artificial Sequence
  Description of Artificial Sequence: Synthetic oligonucleotide
  Antisense strand to SEQ ID NO: 553421
aacaacacauuucuggaaa

SEQ ID NO: 553423 - RNA, 19 nt, Artificial Sequence
  Description of Artificial Sequence: Synthetic oligonucleotide
  Sense strand starting at position 2123 of SEQ ID NO: 318318
auaaucucuucuuuguagu

SEQ ID NO: 553424 - RNA, 19 nt, Artificial Sequence
  Description of Artificial Sequence: Synthetic oligonucleotide
  Antisense strand to SEQ ID NO: 553423
acuacaaagaagagauuau

SEQ ID NO: 553425 - RNA, 19 nt, Artificial Sequence
  Description of Artificial Sequence: Synthetic oligonucleotide
  Sense strand starting at position 2129 of SEQ ID NO: 318318
ucuucuuuguagucuccaa

SEQ ID NO: 553426 - RNA, 19 nt, Artificial Sequence
  Description of Artificial Sequence: Synthetic oligonucleotide
  Antisense strand to SEQ ID NO: 553425
uuggagacuacaaagaaga

SEQ ID NO: 553427 - RNA, 19 nt, Artificial Sequence
  Description of Artificial Sequence: Synthetic oligonucleotide
  Sense strand starting at position 2133 of SEQ ID NO: 318318
cuuuguagucuccaauaua

SEQ ID NO: 553428 - RNA, 19 nt, Artificial Sequence
  Description of Artificial Sequence: Synthetic oligonucleotide
  Antisense strand to SEQ ID NO: 553427
uauauuggagacuacaaag

SEQ ID NO: 553429 - RNA, 19 nt, Artificial Sequence
  Description of Artificial Sequence: Synthetic oligonucleotide
  Sense strand starting at position 2136 of SEQ ID NO: 318318
uguagucuccaauauaguu

SEQ ID NO: 553430 - RNA, 19 nt, Artificial Sequence
  Description of Artificial Sequence: Synthetic oligonucleotide
  Antisense strand to SEQ ID NO: 553429
aacuauauuggagacuaca

SEQ ID NO: 553431 - RNA, 19 nt, Artificial Sequence
  Description of Artificial Sequence: Synthetic oligonucleotide
  Sense strand starting at position 2143 of SEQ ID NO: 318318
uccaauauaguuuguguaa

SEQ ID NO: 553432 - RNA, 19 nt, Artificial Sequence
  Description of Artificial Sequence: Synthetic oligonucleotide
  Antisense strand to SEQ ID NO: 553431
uuacacaaacuauauugga

SEQ ID NO: 553433 - RNA, 19 nt, Artificial Sequence
  Description of Artificial Sequence: Synthetic oligonucleotide
  Sense strand starting at position 2144 of SEQ ID NO: 318318
ccaauauaguuuguguaau

SEQ ID NO: 553434 - RNA, 19 nt, Artificial Sequence
  Description of Artificial Sequence: Synthetic oligonucleotide
  Antisense strand to SEQ ID NO: 553433
auuacacaaacuauauugg

SEQ ID NO: 553435 - RNA, 19 nt, Artificial Sequence
  Description of Artificial Sequence: Synthetic oligonucleotide
  Sense strand starting at position 2252 of SEQ ID NO: 318318
cugacuaaguucuacaaag

SEQ ID NO: 553436 - RNA, 19 nt, Artificial Sequence
  Description of Artificial Sequence: Synthetic oligonucleotide
  Antisense strand to SEQ ID NO: 553435
cuuuguagaacuuagucag

SEQ ID NO: 553437 - RNA, 19 nt, Artificial Sequence
  Description of Artificial Sequence: Synthetic oligonucleotide
  Sense strand starting at position 2303 of SEQ ID NO: 318318
guccaagucgauuaauuaa

SEQ ID NO: 553438 - RNA, 19 nt, Artificial Sequence
  Description of Artificial Sequence: Synthetic oligonucleotide
  Antisense strand to SEQ ID NO: 553437
uuaauuaaucgacuuggac

SEQ ID NO: 553439 - RNA, 19 nt, Artificial Sequence
  Description of Artificial Sequence: Synthetic oligonucleotide
  Sense strand starting at position 2357 of SEQ ID NO: 318318
aaccgugaguguuuauugu

SEQ ID NO: 553440 - RNA, 19 nt, Artificial Sequence
  Description of Artificial Sequence: Synthetic oligonucleotide
  Antisense strand to SEQ ID NO: 553439
acaauaaacacucacgguu

SEQ ID NO: 553441 - RNA, 19 nt, Artificial Sequence
  Description of Artificial Sequence: Synthetic oligonucleotide
  Sense strand starting at position 2364 of SEQ ID NO: 318318
aguguuuauugugccauua

SEQ ID NO: 553442 - RNA, 19 nt, Artificial Sequence
  Description of Artificial Sequence: Synthetic oligonucleotide
  Antisense strand to SEQ ID NO: 553441
uaauggcacaauaaacacu

SEQ ID NO: 553443 - RNA, 19 nt, Artificial Sequence
  Description of Artificial Sequence: Synthetic oligonucleotide
  Sense strand starting at position 2453 of SEQ ID NO: 318318
gcuucuguccuugauuacu

SEQ ID NO: 553444 - RNA, 19 nt, Artificial Sequence
  Description of Artificial Sequence: Synthetic oligonucleotide
  Antisense strand to SEQ ID NO: 553443
aguaaucaaggacagaagc

SEQ ID NO: 553445 - RNA, 19 nt, Artificial Sequence
  Description of Artificial Sequence: Synthetic oligonucleotide
  Sense strand starting at position 2531 of SEQ ID NO: 318318
ugcucaagguaguuaaaua

SEQ ID NO: 553446 - RNA, 19 nt, Artificial Sequence
  Description of Artificial Sequence: Synthetic oligonucleotide
  Antisense strand to SEQ ID NO: 553445
uauuuaacuaccuugagca

SEQ ID NO: 553447 - RNA, 19 nt, Artificial Sequence
  Description of Artificial Sequence: Synthetic oligonucleotide
  Sense strand starting at position 2532 of SEQ ID NO: 318318
gcucaagguaguuaaauag

SEQ ID NO: 553448 - RNA, 19 nt, Artificial Sequence
  Description of Artificial Sequence: Synthetic oligonucleotide
  Antisense strand to SEQ ID NO: 553447
cuauuuaacuaccuugagc

SEQ ID NO: 553449 - RNA, 19 nt, Artificial Sequence
  Description of Artificial Sequence: Synthetic oligonucleotide
  Sense strand starting at position 2539 of SEQ ID NO: 318318
guaguuaaauagcucccaa

SEQ ID NO: 553450 - RNA, 19 nt, Artificial Sequence
  Description of Artificial Sequence: Synthetic oligonucleotide
  Antisense strand to SEQ ID NO: 553449
uugggagcuauuuaacuac

SEQ ID NO: 553451 - RNA, 19 nt, Artificial Sequence
  Description of Artificial Sequence: Synthetic oligonucleotide
  Sense strand starting at position 2563 of SEQ ID NO: 318318
ucuaaagaguggccaaauu

SEQ ID NO: 553452 - RNA, 19 nt, Artificial Sequence
  Description of Artificial Sequence: Synthetic oligonucleotide
  Antisense strand to SEQ ID NO: 553451
aauuuggccacucuuuaga

SEQ ID NO: 553453 - RNA, 19 nt, Artificial Sequence
  Description of Artificial Sequence: Synthetic oligonucleotide
  Sense strand starting at position 2596 of SEQ ID NO: 318318
ggcccuuuaguuuauuacu

SEQ ID NO: 553454 - RNA, 19 nt, Artificial Sequence
  Description of Artificial Sequence: Synthetic oligonucleotide
  Antisense strand to SEQ ID NO: 553453
aguaauaaacuaaagggcc

SEQ ID NO: 553455 - RNA, 19 nt, Artificial Sequence
  Description of Artificial Sequence: Synthetic oligonucleotide
  Sense strand starting at position 2924 of SEQ ID NO: 318318
ccuugcauugugugacuca

SEQ ID NO: 553456 - RNA, 19 nt, Artificial Sequence
  Description of Artificial Sequence: Synthetic oligonucleotide
  Antisense strand to SEQ ID NO: 553455
ugagucacacaaugcaagg

SEQ ID NO: 553457 - RNA, 19 nt, Artificial Sequence
  Description of Artificial Sequence: Synthetic oligonucleotide
  Sense strand starting at position 2927 of SEQ ID NO: 318318
ugcauugugugacucauau

SEQ ID NO: 553458 - RNA, 19 nt, Artificial Sequence
  Description of Artificial Sequence: Synthetic oligonucleotide
  Antisense strand to SEQ ID NO: 553457
auaugagucacacaaugca

SEQ ID NO: 553459 - RNA, 19 nt, Artificial Sequence
  Description of Artificial Sequence: Synthetic oligonucleotide
  Sense strand starting at position 2934 of SEQ ID NO: 318318
ugugacucauauucuuuau

SEQ ID NO: 553460 - RNA, 19 nt, Artificial Sequence
  Description of Artificial Sequence: Synthetic oligonucleotide
  Antisense strand to SEQ ID NO: 553459
auaaagaauaugagucaca

SEQ ID NO: 553461 - RNA, 19 nt, Artificial Sequence
  Description of Artificial Sequence: Synthetic oligonucleotide
  Sense strand starting at position 3002 of SEQ ID NO: 318318
acaugaugauaugcuguua

SEQ ID NO: 553462 - RNA, 19 nt, Artificial Sequence
  Description of Artificial Sequence: Synthetic oligonucleotide
  Antisense strand to SEQ ID NO: 553461
uaacagcauaucaucaugu

SEQ ID NO: 553463 - RNA, 19 nt, Artificial Sequence
  Description of Artificial Sequence: Synthetic oligonucleotide
  Sense strand starting at position 3015 of SEQ ID NO: 318318
cuguuagagaucuguaagg

SEQ ID NO: 553464 - RNA, 19 nt, Artificial Sequence
  Description of Artificial Sequence: Synthetic oligonucleotide
  Antisense strand to SEQ ID NO: 553463
ccuuacagaucucuaacag

SEQ ID NO: 553465 - RNA, 19 nt, Artificial Sequence
  Description of Artificial Sequence: Synthetic oligonucleotide
  Sense strand starting at position 3017 of SEQ ID NO: 318318
guuagagaucuguaagggu

SEQ ID NO: 553466 - RNA, 19 nt, Artificial Sequence
  Description of Artificial Sequence: Synthetic oligonucleotide
  Antisense strand to SEQ ID NO: 553465
acccuuacagaucucuaac

SEQ ID NO: 553467 - RNA, 19 nt, Artificial Sequence
  Description of Artificial Sequence: Synthetic oligonucleotide
  Sense strand starting at position 3021 of SEQ ID NO: 318318
gagaucuguaaggguccua

SEQ ID NO: 553468 - RNA, 19 nt, Artificial Sequence
  Description of Artificial Sequence: Synthetic oligonucleotide
  Antisense strand to SEQ ID NO: 553467
uaggacccuuacagaucuc

SEQ ID NO: 553469 - RNA, 19 nt, Artificial Sequence
  Description of Artificial Sequence: Synthetic oligonucleotide
  Sense strand starting at position 3026 of SEQ ID NO: 318318
cuguaaggguccuauuuaa

SEQ ID NO: 553470 - RNA, 19 nt, Artificial Sequence
  Description of Artificial Sequence: Synthetic oligonucleotide
  Antisense strand to SEQ ID NO: 553469
uuaaauaggacccuuacag

SEQ ID NO: 553471 - RNA, 19 nt, Artificial Sequence
  Description of Artificial Sequence: Synthetic oligonucleotide
  Sense strand starting at position 3033 of SEQ ID NO: 318318
gguccuauuuaauguuuaa

SEQ ID NO: 553472 - RNA, 19 nt, Artificial Sequence
  Description of Artificial Sequence: Synthetic oligonucleotide
  Antisense strand to SEQ ID NO: 553471
uuaaacauuaaauaggacc

SEQ ID NO: 553473 - RNA, 19 nt, Artificial Sequence
  Description of Artificial Sequence: Synthetic oligonucleotide
  Sense strand starting at position 3047 of SEQ ID NO: 318318
uuuaaugaagacugguuau

SEQ ID NO: 553474 - RNA, 19 nt, Artificial Sequence
  Description of Artificial Sequence: Synthetic oligonucleotide
  Antisense strand to SEQ ID NO: 553473
auaaccagucuucauuaaa

SEQ ID NO: 553475 - RNA, 19 nt, Artificial Sequence
  Description of Artificial Sequence: Synthetic oligonucleotide
  Sense strand starting at position 3050 of SEQ ID NO: 318318
aaugaagacugguuauuac

SEQ ID NO: 553476 - RNA, 19 nt, Artificial Sequence
  Description of Artificial Sequence: Synthetic oligonucleotide
  Antisense strand to SEQ ID NO: 553475
guaauaaccagucuucauu

SEQ ID NO: 553477 - RNA, 19 nt, Artificial Sequence
  Description of Artificial Sequence: Synthetic oligonucleotide
  Sense strand starting at position 3053 of SEQ ID NO: 318318
gaagacugguuauuacaau

SEQ ID NO: 553478 - RNA, 19 nt, Artificial Sequence
  Description of Artificial Sequence: Synthetic oligonucleotide
  Antisense strand to SEQ ID NO: 553477
auuguaauaaccagucuuc

SEQ ID NO: 553479 - RNA, 19 nt, Artificial Sequence
  Description of Artificial Sequence: Synthetic oligonucleotide
  Sense strand starting at position 3560 of SEQ ID NO: 318318
auggaaagaucucauacau

SEQ ID NO: 553480 - RNA, 19 nt, Artificial Sequence
  Description of Artificial Sequence: Synthetic oligonucleotide
  Antisense strand to SEQ ID NO: 553479
auguaugagaucuuuccau

SEQ ID NO: 553481 - RNA, 19 nt, Artificial Sequence
  Description of Artificial Sequence: Synthetic oligonucleotide
  Sense strand starting at position 3666 of SEQ ID NO: 318318
gucuacacauuccuuggaa

SEQ ID NO: 553482 - RNA, 19 nt, Artificial Sequence
  Description of Artificial Sequence: Synthetic oligonucleotide
  Antisense strand to SEQ ID NO: 553481
uuccaaggaauguguagac

SEQ ID NO: 553483 - RNA, 19 nt, Artificial Sequence
  Description of Artificial Sequence: Synthetic oligonucleotide
  Sense strand starting at position 3726 of SEQ ID NO: 318318
guguuaacuugacuuuccu

SEQ ID NO: 553484 - RNA, 19 nt, Artificial Sequence
  Description of Artificial Sequence: Synthetic oligonucleotide
  Antisense strand to SEQ ID NO: 553483
aggaaagucaaguuaacac

SEQ ID NO: 553485 - RNA, 19 nt, Artificial Sequence
  Description of Artificial Sequence: Synthetic oligonucleotide
  Sense strand starting at position 3798 of SEQ ID NO: 318318
auugaaacauccuagguua

SEQ ID NO: 553486 - RNA, 19 nt, Artificial Sequence
  Description of Artificial Sequence: Synthetic oligonucleotide
  Antisense strand to SEQ ID NO: 553485
uaaccuaggauguuucaau

SEQ ID NO: 553487 - RNA, 19 nt, Artificial Sequence
  Description of Artificial Sequence: Synthetic oligonucleotide
  Sense strand starting at position 3800 of SEQ ID NO: 318318
ugaaacauccuagguuaau

SEQ ID NO: 553488 - RNA, 19 nt, Artificial Sequence
  Description of Artificial Sequence: Synthetic oligonucleotide
  Antisense strand to SEQ ID NO: 553487
auuaaccuaggauguuuca

SEQ ID NO: 553489 - RNA, 19 nt, Artificial Sequence
  Description of Artificial Sequence: Synthetic oligonucleotide
  Sense strand starting at position 3898 of SEQ ID NO: 318318
uagguugccuuucugcaau

SEQ ID NO: 553490 - RNA, 19 nt, Artificial Sequence
  Description of Artificial Sequence: Synthetic oligonucleotide
  Antisense strand to SEQ ID NO: 553489
auugcagaaaggcaaccua

SEQ ID NO: 553491 - RNA, 19 nt, Artificial Sequence
  Description of Artificial Sequence: Synthetic oligonucleotide
  Sense strand starting at position 3900 of SEQ ID NO: 318318
gguugccuuucugcaauca

SEQ ID NO: 553492 - RNA, 19 nt, Artificial Sequence
  Description of Artificial Sequence: Synthetic oligonucleotide
  Antisense strand to SEQ ID NO: 553491
ugauugcagaaaggcaacc

SEQ ID NO: 553493 - RNA, 19 nt, Artificial Sequence
  Description of Artificial Sequence: Synthetic oligonucleotide
  Sense strand starting at position 3929 of SEQ ID NO: 318318
uucucuuaagaaugguaau

SEQ ID NO: 553494 - RNA, 19 nt, Artificial Sequence
  Description of Artificial Sequence: Synthetic oligonucleotide
  Antisense strand to SEQ ID NO: 553493
auuaccauucuuaagagaa

SEQ ID NO: 553495 - RNA, 19 nt, Artificial Sequence
  Description of Artificial Sequence: Synthetic oligonucleotide
  Sense strand starting at position 3932 of SEQ ID NO: 318318
ucuuaagaaugguaauaac

SEQ ID NO: 553496 - RNA, 19 nt, Artificial Sequence
  Description of Artificial Sequence: Synthetic oligonucleotide
  Antisense strand to SEQ ID NO: 553495
guuauuaccauucuuaaga

SEQ ID NO: 553497 - RNA, 19 nt, Artificial Sequence
  Description of Artificial Sequence: Synthetic oligonucleotide
  Sense strand starting at position 3966 of SEQ ID NO: 318318
accuaucacuugccagagu

SEQ ID NO: 553498 - RNA, 19 nt, Artificial Sequence
  Description of Artificial Sequence: Synthetic oligonucleotide
  Antisense strand to SEQ ID NO: 553497
acucuggcaagugauaggu

SEQ ID NO: 553499 - RNA, 19 nt, Artificial Sequence
  Description of Artificial Sequence: Synthetic oligonucleotide
  Sense strand starting at position 3974 of SEQ ID NO: 318318
cuugccagaguuuauuauu

SEQ ID NO: 553500 - RNA, 19 nt, Artificial Sequence
  Description of Artificial Sequence: Synthetic oligonucleotide
  Antisense strand to SEQ ID NO: 553499
aauaauaaacucuggcaag

SEQ ID NO: 553501 - RNA, 19 nt, Artificial Sequence
  Description of Artificial Sequence: Synthetic oligonucleotide
  Sense strand starting at position 2045 of SEQ ID NO: 318319
ugggcagccgucugggaaa

SEQ ID NO: 553502 - RNA, 19 nt, Artificial Sequence
  Description of Artificial Sequence: Synthetic oligonucleotide
  Antisense strand to SEQ ID NO: 553501
uuucccagacggcugccca

SEQ ID NO: 553503 - RNA, 19 nt, Artificial Sequence
  Description of Artificial Sequence: Synthetic oligonucleotide
  Sense strand starting at position 2271 of SEQ ID NO: 318319
ugaggcugcccagaucuua

SEQ ID NO: 553504 - RNA, 19 nt, Artificial Sequence
  Description of Artificial Sequence: Synthetic oligonucleotide
  Antisense strand to SEQ ID NO: 553503
uaagaucugggcagccuca

SEQ ID NO: 553505 - RNA, 19 nt, Artificial Sequence
  Description of Artificial Sequence: Synthetic oligonucleotide
  Sense strand starting at position 2305 of SEQ ID NO: 318319
gcccgcagauugcugauaa

SEQ ID NO: 553506 - RNA, 19 nt, Artificial Sequence
  Description of Artificial Sequence: Synthetic oligonucleotide
  Antisense strand to SEQ ID NO: 553505
uuaucagcaaucugcgggc

SEQ ID NO: 553507 - RNA, 19 nt, Artificial Sequence
  Description of Artificial Sequence: Synthetic oligonucleotide
  Sense strand starting at position 2306 of SEQ ID NO: 318319
cccgcagauugcugauaac

SEQ ID NO: 553508 - RNA, 19 nt, Artificial Sequence
  Description of Artificial Sequence: Synthetic oligonucleotide
  Antisense strand to SEQ ID NO: 553507
guuaucagcaaucugcggg

SEQ ID NO: 553509 - RNA, 19 nt, Artificial Sequence
  Description of Artificial Sequence: Synthetic oligonucleotide
  Sense strand starting at position 2309 of SEQ ID NO: 318319
gcagauugcugauaacugu

SEQ ID NO: 553510 - RNA, 19 nt, Artificial Sequence
  Description of Artificial Sequence: Synthetic oligonucleotide
  Antisense strand to SEQ ID NO: 553509
acaguuaucagcaaucugc

SEQ ID NO: 553511 - RNA, 19 nt, Artificial Sequence
  Description of Artificial Sequence: Synthetic oligonucleotide
  Sense strand starting at position 2315 of SEQ ID NO: 318319
ugcugauaacuguggcuga

SEQ ID NO: 553512 - RNA, 19 nt, Artificial Sequence
  Description of Artificial Sequence: Synthetic oligonucleotide
  Antisense strand to SEQ ID NO: 553511
ucagccacaguuaucagca

SEQ ID NO: 553513 - RNA, 19 nt, Artificial Sequence
  Description of Artificial Sequence: Synthetic oligonucleotide
  Sense strand starting at position 2563 of SEQ ID NO: 318319
agagcuuuccgcgcuggau

SEQ ID NO: 553514 - RNA, 19 nt, Artificial Sequence
  Description of Artificial Sequence: Synthetic oligonucleotide
  Antisense strand to SEQ ID NO: 553513
auccagcgcggaaagcucu

SEQ ID NO: 553515 - RNA, 19 nt, Artificial Sequence
  Description of Artificial Sequence: Synthetic oligonucleotide
  Sense strand starting at position 2673 of SEQ ID NO: 318319
gggaauaguguccgcauca

SEQ ID NO: 553516 - RNA, 19 nt, Artificial Sequence
  Description of Artificial Sequence: Synthetic oligonucleotide
  Antisense strand to SEQ ID NO: 553515
ugaugcggacacuauuccc

SEQ ID NO: 553517 - RNA, 19 nt, Artificial Sequence
  Description of Artificial Sequence: Synthetic oligonucleotide
  Sense strand starting at position 2674 of SEQ ID NO: 318319
ggaauaguguccgcaucaa

SEQ ID NO: 553518 - RNA, 19 nt, Artificial Sequence
  Description of Artificial Sequence: Synthetic oligonucleotide
  Antisense strand to SEQ ID NO: 553517
uugaugcggacacuauucc

SEQ ID NO: 553519 - RNA, 19 nt, Artificial Sequence
  Description of Artificial Sequence: Synthetic oligonucleotide
  Sense strand starting at position 2791 of SEQ ID NO: 318319
uugggagugcuuugcaaac

SEQ ID NO: 553520 - RNA, 19 nt, Artificial Sequence
  Description of Artificial Sequence: Synthetic oligonucleotide
  Antisense strand to SEQ ID NO: 553519
guuugcaaagcacucccaa

SEQ ID NO: 553521 - RNA, 19 nt, Artificial Sequence
  Description of Artificial Sequence: Synthetic oligonucleotide
  Sense strand starting at position 2814 of SEQ ID NO: 318319
cuugacgaucugggugaaa

SEQ ID NO: 553522 - RNA, 19 nt, Artificial Sequence
  Description of Artificial Sequence: Synthetic oligonucleotide
  Antisense strand to SEQ ID NO: 553521
uuucacccagaucgucaag

SEQ ID NO: 553523 - RNA, 19 nt, Artificial Sequence
  Description of Artificial Sequence: Synthetic oligonucleotide
  Sense strand starting at position 2816 of SEQ ID NO: 318319
ugacgaucugggugaaaga

SEQ ID NO: 553524 - RNA, 19 nt, Artificial Sequence
  Description of Artificial Sequence: Synthetic oligonucleotide
  Antisense strand to SEQ ID NO: 553523
ucuuucacccagaucguca

SEQ ID NO: 553525 - RNA, 19 nt, Artificial Sequence
  Description of Artificial Sequence: Synthetic oligonucleotide
  Sense strand starting at position 2927 of SEQ ID NO: 318319
cugagauacucauuagagu

SEQ ID NO: 553526 - RNA, 19 nt, Artificial Sequence
  Description of Artificial Sequence: Synthetic oligonucleotide
  Antisense strand to SEQ ID NO: 553525
acucuaaugaguaucucag

SEQ ID NO: 553527 - RNA, 19 nt, Artificial Sequence
  Description of Artificial Sequence: Synthetic oligonucleotide
  Sense strand starting at position 2950 of SEQ ID NO: 318319
ccaggaaacuacucuguaa

SEQ ID NO: 553528 - RNA, 19 nt, Artificial Sequence
  Description of Artificial Sequence: Synthetic oligonucleotide
  Antisense strand to SEQ ID NO: 553527
uuacagaguaguuuccugg

SEQ ID NO: 553529 - RNA, 19 nt, Artificial Sequence
  Description of Artificial Sequence: Synthetic oligonucleotide
  Sense strand starting at position 2953 of SEQ ID NO: 318319
ggaaacuacucuguaaauu

SEQ ID NO: 553530 - RNA, 19 nt, Artificial Sequence
  Description of Artificial Sequence: Synthetic oligonucleotide
  Antisense strand to SEQ ID NO: 553529
aauuuacagaguaguuucc

SEQ ID NO: 553531 - RNA, 19 nt, Artificial Sequence
  Description of Artificial Sequence: Synthetic oligonucleotide
  Sense strand starting at position 3178 of SEQ ID NO: 318319
agguauuucuccucgcuuu

SEQ ID NO: 553532 - RNA, 19 nt, Artificial Sequence
  Description of Artificial Sequence: Synthetic oligonucleotide
  Antisense strand to SEQ ID NO: 553531
aaagcgaggagaaauaccu

SEQ ID NO: 553533 - RNA, 19 nt, Artificial Sequence
  Description of Artificial Sequence: Synthetic oligonucleotide
  Sense strand starting at position 3227 of SEQ ID NO: 318319
agugaucaguucuaugaga

SEQ ID NO: 553534 - RNA, 19 nt, Artificial Sequence
  Description of Artificial Sequence: Synthetic oligonucleotide
  Antisense strand to SEQ ID NO: 553533
ucucauagaacugaucacu

SEQ ID NO: 553535 - RNA, 19 nt, Artificial Sequence
  Description of Artificial Sequence: Synthetic oligonucleotide
  Sense strand starting at position 3229 of SEQ ID NO: 318319
ugaucaguucuaugagaaa

SEQ ID NO: 553536 - RNA, 19 nt, Artificial Sequence
  Description of Artificial Sequence: Synthetic oligonucleotide
  Antisense strand to SEQ ID NO: 553535
uuucucauagaacugauca

SEQ ID NO: 553537 - RNA, 19 nt, Artificial Sequence
  Description of Artificial Sequence: Synthetic oligonucleotide
  Sense strand starting at position 3300 of SEQ ID NO: 318319
aguuccuuucccuaagaag

SEQ ID NO: 553538 - RNA, 19 nt, Artificial Sequence
  Description of Artificial Sequence: Synthetic oligonucleotide
  Antisense strand to SEQ ID NO: 553537
cuucuuagggaaaggaacu

SEQ ID NO: 553539 - RNA, 19 nt, Artificial Sequence
  Description of Artificial Sequence: Synthetic oligonucleotide
  Sense strand starting at position 3461 of SEQ ID NO: 318319
gaauuaaaguuuccaggac

SEQ ID NO: 553540 - RNA, 19 nt, Artificial Sequence
  Description of Artificial Sequence: Synthetic oligonucleotide
  Antisense strand to SEQ ID NO: 553539
guccuggaaacuuuaauuc

SEQ ID NO: 553541 - RNA, 19 nt, Artificial Sequence
  Description of Artificial Sequence: Synthetic oligonucleotide
  Sense strand starting at position 3510 of SEQ ID NO: 318319
aucgauaauuauugaagcu

SEQ ID NO: 553542 - RNA, 19 nt, Artificial Sequence
  Description of Artificial Sequence: Synthetic oligonucleotide
  Antisense strand to SEQ ID NO: 553541
agcuucaauaauuaucgau

SEQ ID NO: 553543 - RNA, 19 nt, Artificial Sequence
  Description of Artificial Sequence: Synthetic oligonucleotide
  Sense strand starting at position 2184 of SEQ ID NO: 318320
gcucaacuccuagggcaaa

SEQ ID NO: 553544 - RNA, 19 nt, Artificial Sequence
  Description of Artificial Sequence: Synthetic oligonucleotide
  Antisense strand to SEQ ID NO: 553543
uuugcccuaggaguugagc

SEQ ID NO: 553545 - RNA, 19 nt, Artificial Sequence
  Description of Artificial Sequence: Synthetic oligonucleotide
  Sense strand starting at position 2385 of SEQ ID NO: 318320
aggcaaaucuauuauuuga

SEQ ID NO: 553546 - RNA, 19 nt, Artificial Sequence
  Description of Artificial Sequence: Synthetic oligonucleotide
  Antisense strand to SEQ ID NO: 553545
ucaaauaauagauuugccu

SEQ ID NO: 553547 - RNA, 19 nt, Artificial Sequence
  Description of Artificial Sequence: Synthetic oligonucleotide
  Sense strand starting at position 2446 of SEQ ID NO: 318320
agagauucuucucucaagc

SEQ ID NO: 553548 - RNA, 19 nt, Artificial Sequence
  Description of Artificial Sequence: Synthetic oligonucleotide
  Antisense strand to SEQ ID NO: 553547
gcuugagagaagaaucucu

SEQ ID NO: 553549 - RNA, 19 nt, Artificial Sequence
  Description of Artificial Sequence: Synthetic oligonucleotide
  Sense strand starting at position 2539 of SEQ ID NO: 318320
uucuuuaauggaugacaau

SEQ ID NO: 553550 - RNA, 19 nt, Artificial Sequence
  Description of Artificial Sequence: Synthetic oligonucleotide
  Antisense strand to SEQ ID NO: 553549
auugucauccauuaaagaa

SEQ ID NO: 553551 - RNA, 19 nt, Artificial Sequence
  Description of Artificial Sequence: Synthetic oligonucleotide
  Sense strand starting at position 2578 of SEQ ID NO: 318320
ccauuaaaucaagagcguu

SEQ ID NO: 553552 - RNA, 19 nt, Artificial Sequence
  Description of Artificial Sequence: Synthetic oligonucleotide
  Antisense strand to SEQ ID NO: 553551
aacgcucuugauuuaaugg

SEQ ID NO: 553553 - RNA, 19 nt, Artificial Sequence
  Description of Artificial Sequence: Synthetic oligonucleotide
  Sense strand starting at position 2581 of SEQ ID NO: 318320
uuaaaucaagagcguuacu

SEQ ID NO: 553554 - RNA, 19 nt, Artificial Sequence
  Description of Artificial Sequence: Synthetic oligonucleotide
  Antisense strand to SEQ ID NO: 553553
aguaacgcucuugauuuaa

SEQ ID NO: 553555 - RNA, 19 nt, Artificial Sequence
  Description of Artificial Sequence: Synthetic oligonucleotide
  Sense strand starting at position 2584 of SEQ ID NO: 318320
aaucaagagcguuacuguu

SEQ ID NO: 553556 - RNA, 19 nt, Artificial Sequence
  Description of Artificial Sequence: Synthetic oligonucleotide
  Antisense strand to SEQ ID NO: 553555
aacaguaacgcucuugauu

SEQ ID NO: 553557 - RNA, 19 nt, Artificial Sequence
  Description of Artificial Sequence: Synthetic oligonucleotide
  Sense strand starting at position 2625 of SEQ ID NO: 318320
uuuggauuccauuaaugcu

SEQ ID NO: 553558 - RNA, 19 nt, Artificial Sequence
  Description of Artificial Sequence: Synthetic oligonucleotide
  Antisense strand to SEQ ID NO: 553557
agcauuaauggaauccaaa

SEQ ID NO: 553559 - RNA, 19 nt, Artificial Sequence
  Description of Artificial Sequence: Synthetic oligonucleotide
  Sense strand starting at position 2666 of SEQ ID NO: 318320
aucugcugucauuaagcaa

SEQ ID NO: 553560 - RNA, 19 nt, Artificial Sequence
  Description of Artificial Sequence: Synthetic oligonucleotide
  Antisense strand to SEQ ID NO: 553559
uugcuuaaugacagcagau

SEQ ID NO: 553561 - RNA, 19 nt, Artificial Sequence
  Description of Artificial Sequence: Synthetic oligonucleotide
  Sense strand starting at position 2688 of SEQ ID NO: 318320
gugggagucugggauuuau

SEQ ID NO: 553562 - RNA, 19 nt, Artificial Sequence
  Description of Artificial Sequence: Synthetic oligonucleotide
  Antisense strand to SEQ ID NO: 553561
auaaaucccagacucccac

SEQ ID NO: 553563 - RNA, 19 nt, Artificial Sequence
  Description of Artificial Sequence: Synthetic oligonucleotide
  Sense strand starting at position 2697 of SEQ ID NO: 318320
ugggauuuaucuuacaaua

SEQ ID NO: 553564 - RNA, 19 nt, Artificial Sequence
  Description of Artificial Sequence: Synthetic oligonucleotide
  Antisense strand to SEQ ID NO: 553563
uauuguaagauaaauccca

SEQ ID NO: 553565 - RNA, 19 nt, Artificial Sequence
  Description of Artificial Sequence: Synthetic oligonucleotide
  Sense strand starting at position 2857 of SEQ ID NO: 318320
guagaaggaucagaggaaa

SEQ ID NO: 553566 - RNA, 19 nt, Artificial Sequence
  Description of Artificial Sequence: Synthetic oligonucleotide
  Antisense strand to SEQ ID NO: 553565
uuuccucugauccuucuac

SEQ ID NO: 553567 - RNA, 19 nt, Artificial Sequence
  Description of Artificial Sequence: Synthetic oligonucleotide
  Sense strand starting at position 3023 of SEQ ID NO: 318320
aguauucugucaucuguag

SEQ ID NO: 553568 - RNA, 19 nt, Artificial Sequence
  Description of Artificial Sequence: Synthetic oligonucleotide
  Antisense strand to SEQ ID NO: 553567
cuacagaugacagaauacu

SEQ ID NO: 553569 - RNA, 19 nt, Artificial Sequence
  Description of Artificial Sequence: Synthetic oligonucleotide
  Sense strand starting at position 3027 of SEQ ID NO: 318320
uucugucaucuguagaucu

SEQ ID NO: 553570 - RNA, 19 nt, Artificial Sequence
  Description of Artificial Sequence: Synthetic oligonucleotide
  Antisense strand to SEQ ID NO: 553569
agaucuacagaugacagaa

SEQ ID NO: 553571 - RNA, 19 nt, Artificial Sequence
  Description of Artificial Sequence: Synthetic oligonucleotide
  Sense strand starting at position 3039 of SEQ ID NO: 318320
uagaucuuccucuaugggu

SEQ ID NO: 553572 - RNA, 19 nt, Artificial Sequence
  Description of Artificial Sequence: Synthetic oligonucleotide
  Antisense strand to SEQ ID NO: 553571
acccauagaggaagaucua

SEQ ID NO: 553573 - RNA, 19 nt, Artificial Sequence
  Description of Artificial Sequence: Synthetic oligonucleotide
  Sense strand starting at position 3041 of SEQ ID NO: 318320
gaucuuccucuauggguca

SEQ ID NO: 553574 - RNA, 19 nt, Artificial Sequence
  Description of Artificial Sequence: Synthetic oligonucleotide
  Antisense strand to SEQ ID NO: 553573
ugacccauagaggaagauc

SEQ ID NO: 553575 - RNA, 19 nt, Artificial Sequence
  Description of Artificial Sequence: Synthetic oligonucleotide
  Sense strand starting at position 3064 of SEQ ID NO: 318320
cuagcuauggacuggaaca

SEQ ID NO: 553576 - RNA, 19 nt, Artificial Sequence
  Description of Artificial Sequence: Synthetic oligonucleotide
  Antisense strand to SEQ ID NO: 553575
uguuccaguccauagcuag

SEQ ID NO: 553577 - RNA, 19 nt, Artificial Sequence
  Description of Artificial Sequence: Synthetic oligonucleotide
  Sense strand starting at position 3241 of SEQ ID NO: 318320
uagccaguguuauuccaga

SEQ ID NO: 553578 - RNA, 19 nt, Artificial Sequence
  Description of Artificial Sequence: Synthetic oligonucleotide
  Antisense strand to SEQ ID NO: 553577
ucuggaauaacacuggcua

SEQ ID NO: 553579 - RNA, 19 nt, Artificial Sequence
  Description of Artificial Sequence: Synthetic oligonucleotide
  Sense strand starting at position 3246 of SEQ ID NO: 318320
aguguuauuccagagaagc

SEQ ID NO: 553580 - RNA, 19 nt, Artificial Sequence
  Description of Artificial Sequence: Synthetic oligonucleotide
  Antisense strand to SEQ ID NO: 553579
gcuucucuggaauaacacu

SEQ ID NO: 553581 - RNA, 19 nt, Artificial Sequence
  Description of Artificial Sequence: Synthetic oligonucleotide
  Sense strand starting at position 3289 of SEQ ID NO: 318320
ucuuauuuguccucuuugu

SEQ ID NO: 553582 - RNA, 19 nt, Artificial Sequence
  Description of Artificial Sequence: Synthetic oligonucleotide
  Antisense strand to SEQ ID NO: 553581
acaaagaggacaaauaaga

SEQ ID NO: 553583 - RNA, 19 nt, Artificial Sequence
  Description of Artificial Sequence: Synthetic oligonucleotide
  Sense strand starting at position 3304 of SEQ ID NO: 318320
uuguuuccucaaggguaca

SEQ ID NO: 553584 - RNA, 19 nt, Artificial Sequence
  Description of Artificial Sequence: Synthetic oligonucleotide
  Antisense strand to SEQ ID NO: 553583
uguacccuugaggaaacaa

SEQ ID NO: 553585 - RNA, 19 nt, Artificial Sequence
  Description of Artificial Sequence: Synthetic oligonucleotide
  Sense strand starting at position 3449 of SEQ ID NO: 318320
uuugaucucggaggccuua

SEQ ID NO: 553586 - RNA, 19 nt, Artificial Sequence
  Description of Artificial Sequence: Synthetic oligonucleotide
  Antisense strand to SEQ ID NO: 553585
uaaggccuccgagaucaaa

SEQ ID NO: 553587 - RNA, 19 nt, Artificial Sequence
  Description of Artificial Sequence: Synthetic oligonucleotide
  Sense strand starting at position 3460 of SEQ ID NO: 318320
aggccuuaaucucucaagu

SEQ ID NO: 553588 - RNA, 19 nt, Artificial Sequence
  Description of Artificial Sequence: Synthetic oligonucleotide
  Antisense strand to SEQ ID NO: 553587
acuugagagauuaaggccu

SEQ ID NO: 553589 - RNA, 19 nt, Artificial Sequence
  Description of Artificial Sequence: Synthetic oligonucleotide
  Sense strand starting at position 3509 of SEQ ID NO: 318320
acccauuacuuguuucuga

SEQ ID NO: 553590 - RNA, 19 nt, Artificial Sequence
  Description of Artificial Sequence: Synthetic oligonucleotide
  Antisense strand to SEQ ID NO: 553589
ucagaaacaaguaaugggu

SEQ ID NO: 553591 - RNA, 19 nt, Artificial Sequence
  Description of Artificial Sequence: Synthetic oligonucleotide
  Sense strand starting at position 3533 of SEQ ID NO: 318320
aauggcuuauaaguggaau

SEQ ID NO: 553592 - RNA, 19 nt, Artificial Sequence
  Description of Artificial Sequence: Synthetic oligonucleotide
  Antisense strand to SEQ ID NO: 553591
auuccacuuauaagccauu

SEQ ID NO: 553593 - RNA, 19 nt, Artificial Sequence
  Description of Artificial Sequence: Synthetic oligonucleotide
  Sense strand starting at position 3534 of SEQ ID NO: 318320
auggcuuauaaguggaauc

SEQ ID NO: 553594 - RNA, 19 nt, Artificial Sequence
  Description of Artificial Sequence: Synthetic oligonucleotide
  Antisense strand to SEQ ID NO: 553593
gauuccacuuauaagccau

SEQ ID NO: 553595 - RNA, 19 nt, Artificial Sequence
  Description of Artificial Sequence: Synthetic oligonucleotide
  Sense strand starting at position 3535 of SEQ ID NO: 318320
uggcuuauaaguggaauca

SEQ ID NO: 553596 - RNA, 19 nt, Artificial Sequence
  Description of Artificial Sequence: Synthetic oligonucleotide
  Antisense strand to SEQ ID NO: 553595
ugauuccacuuauaagcca

SEQ ID NO: 553597 - RNA, 19 nt, Artificial Sequence
  Description of Artificial Sequence: Synthetic oligonucleotide
  Sense strand starting at position 3545 of SEQ ID NO: 318320
guggaaucaaguuguaagu

SEQ ID NO: 553598 - RNA, 19 nt, Artificial Sequence
  Description of Artificial Sequence: Synthetic oligonucleotide
  Antisense strand to SEQ ID NO: 553597
acuuacaacuugauuccac

SEQ ID NO: 553599 - RNA, 19 nt, Artificial Sequence
  Description of Artificial Sequence: Synthetic oligonucleotide
  Sense strand starting at position 3554 of SEQ ID NO: 318320
aguuguaaguugucaugaa

SEQ ID NO: 553600 - RNA, 19 nt, Artificial Sequence
  Description of Artificial Sequence: Synthetic oligonucleotide
  Antisense strand to SEQ ID NO: 553599
uucaugacaacuuacaacu

SEQ ID NO: 553601 - RNA, 19 nt, Artificial Sequence
  Description of Artificial Sequence: Synthetic oligonucleotide
  Sense strand starting at position 3654 of SEQ ID NO: 318320
ggguauugaccaggcauag

SEQ ID NO: 553602 - RNA, 19 nt, Artificial Sequence
  Description of Artificial Sequence: Synthetic oligonucleotide
  Antisense strand to SEQ ID NO: 553601
cuaugccuggucaauaccc

SEQ ID NO: 553603 - RNA, 19 nt, Artificial Sequence
  Description of Artificial Sequence: Synthetic oligonucleotide
  Sense strand starting at position 3666 of SEQ ID NO: 318320
ggcauagaccugugacugu

SEQ ID NO: 553604 - RNA, 19 nt, Artificial Sequence
  Description of Artificial Sequence: Synthetic oligonucleotide
  Antisense strand to SEQ ID NO: 553603
acagucacaggucuaugcc

SEQ ID NO: 553605 - RNA, 19 nt, Artificial Sequence
  Description of Artificial Sequence: Synthetic oligonucleotide
  Sense strand starting at position 3670 of SEQ ID NO: 318320
uagaccugugacugugaaa

SEQ ID NO: 553606 - RNA, 19 nt, Artificial Sequence
  Description of Artificial Sequence: Synthetic oligonucleotide
  Antisense strand to SEQ ID NO: 553605
uuucacagucacaggucua

SEQ ID NO: 553607 - RNA, 19 nt, Artificial Sequence
  Description of Artificial Sequence: Synthetic oligonucleotide
  Sense strand starting at position 3708 of SEQ ID NO: 318320
aagagauuacaguggcaga

SEQ ID NO: 553608 - RNA, 19 nt, Artificial Sequence
  Description of Artificial Sequence: Synthetic oligonucleotide
  Antisense strand to SEQ ID NO: 553607
ucugccacuguaaucucuu

SEQ ID NO: 553609 - RNA, 19 nt, Artificial Sequence
  Description of Artificial Sequence: Synthetic oligonucleotide
  Sense strand starting at position 3719 of SEQ ID NO: 318320
guggcagaggcuugguaau

SEQ ID NO: 553610 - RNA, 19 nt, Artificial Sequence
  Description of Artificial Sequence: Synthetic oligonucleotide
  Antisense strand to SEQ ID NO: 553609
auuaccaagccucugccac

SEQ ID NO: 553611 - RNA, 19 nt, Artificial Sequence
  Description of Artificial Sequence: Synthetic oligonucleotide
  Sense strand starting at position 3721 of SEQ ID NO: 318320
ggcagaggcuugguaauuu

SEQ ID NO: 553612 - RNA, 19 nt, Artificial Sequence
  Description of Artificial Sequence: Synthetic oligonucleotide
  Antisense strand to SEQ ID NO: 553611
aaauuaccaagccucugcc

SEQ ID NO: 553613 - RNA, 19 nt, Artificial Sequence
  Description of Artificial Sequence: Synthetic oligonucleotide
  Sense strand starting at position 3888 of SEQ ID NO: 318320
cugccuuaauuauuaagga

SEQ ID NO: 553614 - RNA, 19 nt, Artificial Sequence
  Description of Artificial Sequence: Synthetic oligonucleotide
  Antisense strand to SEQ ID NO: 553613
uccuuaauaauuaaggcag

SEQ ID NO: 553615 - RNA, 19 nt, Artificial Sequence
  Description of Artificial Sequence: Synthetic oligonucleotide
  Sense strand starting at position 3939 of SEQ ID NO: 318320
uuugaaagacauuguacua

SEQ ID NO: 553616 - RNA, 19 nt, Artificial Sequence
  Description of Artificial Sequence: Synthetic oligonucleotide
  Antisense strand to SEQ ID NO: 553615
uaguacaaugucuuucaaa

SEQ ID NO: 553617 - RNA, 19 nt, Artificial Sequence
  Description of Artificial Sequence: Synthetic oligonucleotide
  Sense strand starting at position 3944 of SEQ ID NO: 318320
aagacauuguacuaaagag

SEQ ID NO: 553618 - RNA, 19 nt, Artificial Sequence
  Description of Artificial Sequence: Synthetic oligonucleotide
  Antisense strand to SEQ ID NO: 553617
cucuuuaguacaaugucuu

SEQ ID NO: 553619 - RNA, 19 nt, Artificial Sequence
  Description of Artificial Sequence: Synthetic oligonucleotide
  Sense strand starting at position 3952 of SEQ ID NO: 318320
guacuaaagagaugguaua

SEQ ID NO: 553620 - RNA, 19 nt, Artificial Sequence
  Description of Artificial Sequence: Synthetic oligonucleotide
  Antisense strand to SEQ ID NO: 553619
uauaccaucucuuuaguac

SEQ ID NO: 553621 - RNA, 19 nt, Artificial Sequence
  Description of Artificial Sequence: Synthetic oligonucleotide
  Sense strand starting at position 3980 of SEQ ID NO: 318320
gcacuauaaugauuucguu

SEQ ID NO: 553622 - RNA, 19 nt, Artificial Sequence
  Description of Artificial Sequence: Synthetic oligonucleotide
  Antisense strand to SEQ ID NO: 553621
aacgaaaucauuauagugc

SEQ ID NO: 553623 - RNA, 19 nt, Artificial Sequence
  Description of Artificial Sequence: Synthetic oligonucleotide
  Sense strand starting at position 2767 of SEQ ID NO: 318321
acucuuaaguacugcagaa

SEQ ID NO: 553624 - RNA, 19 nt, Artificial Sequence
  Description of Artificial Sequence: Synthetic oligonucleotide
  Antisense strand to SEQ ID NO: 553623
uucugcaguacuuaagagu

SEQ ID NO: 553625 - RNA, 19 nt, Artificial Sequence
  Description of Artificial Sequence: Synthetic oligonucleotide
  Sense strand starting at position 2789 of SEQ ID NO: 318321
gcucaacuccuagggcaaa

SEQ ID NO: 553626 - RNA, 19 nt, Artificial Sequence
  Description of Artificial Sequence: Synthetic oligonucleotide
  Antisense strand to SEQ ID NO: 553625
uuugcccuaggaguugagc

SEQ ID NO: 553627 - RNA, 19 nt, Artificial Sequence
  Description of Artificial Sequence: Synthetic oligonucleotide
  Sense strand starting at position 2819 of SEQ ID NO: 318321
ggcaaaugcugcccucuuu

SEQ ID NO: 553628 - RNA, 19 nt, Artificial Sequence
  Description of Artificial Sequence: Synthetic oligonucleotide
  Antisense strand to SEQ ID NO: 553627
aaagagggcagcauuugcc

SEQ ID NO: 553629 - RNA, 19 nt, Artificial Sequence
  Description of Artificial Sequence: Synthetic oligonucleotide
  Sense strand starting at position 2829 of SEQ ID NO: 318321
gcccucuuuccgggagcaa

SEQ ID NO: 553630 - RNA, 19 nt, Artificial Sequence
  Description of Artificial Sequence: Synthetic oligonucleotide
  Antisense strand to SEQ ID NO: 553629
uugcucccggaaagagggc

SEQ ID NO: 553631 - RNA, 19 nt, Artificial Sequence
  Description of Artificial Sequence: Synthetic oligonucleotide
  Sense strand starting at position 2912 of SEQ ID NO: 318321
cagugugugccuuggcaaa

SEQ ID NO: 553632 - RNA, 19 nt, Artificial Sequence
  Description of Artificial Sequence: Synthetic oligonucleotide
  Antisense strand to SEQ ID NO: 553631
uuugccaaggcacacacug

SEQ ID NO: 553633 - RNA, 19 nt, Artificial Sequence
  Description of Artificial Sequence: Synthetic oligonucleotide
  Sense strand starting at position 2990 of SEQ ID NO: 318321
aggcaaaucuauuauuuga

SEQ ID NO: 553634 - RNA, 19 nt, Artificial Sequence
  Description of Artificial Sequence: Synthetic oligonucleotide
  Antisense strand to SEQ ID NO: 553633
ucaaauaauagauuugccu

SEQ ID NO: 553635 - RNA, 19 nt, Artificial Sequence
  Description of Artificial Sequence: Synthetic oligonucleotide
  Sense strand starting at position 3051 of SEQ ID NO: 318321
agagauucuucucucaagc

SEQ ID NO: 553636 - RNA, 19 nt, Artificial Sequence
  Description of Artificial Sequence: Synthetic oligonucleotide
  Antisense strand to SEQ ID NO: 553635
gcuugagagaagaaucucu

SEQ ID NO: 553637 - RNA, 19 nt, Artificial Sequence
  Description of Artificial Sequence: Synthetic oligonucleotide
  Sense strand starting at position 3144 of SEQ ID NO: 318321
uucuuuaauggaugacaau

SEQ ID NO: 553638 - RNA, 19 nt, Artificial Sequence
  Description of Artificial Sequence: Synthetic oligonucleotide
  Antisense strand to SEQ ID NO: 553637
auugucauccauuaaagaa

SEQ ID NO: 553639 - RNA, 19 nt, Artificial Sequence
  Description of Artificial Sequence: Synthetic oligonucleotide
  Sense strand starting at position 3183 of SEQ ID NO: 318321
ccauuaaaucaagagcguu

SEQ ID NO: 553640 - RNA, 19 nt, Artificial Sequence
  Description of Artificial Sequence: Synthetic oligonucleotide
  Antisense strand to SEQ ID NO: 553639
aacgcucuugauuuaaugg

SEQ ID NO: 553641 - RNA, 19 nt, Artificial Sequence
  Description of Artificial Sequence: Synthetic oligonucleotide
  Sense strand starting at position 3186 of SEQ ID NO: 318321
uuaaaucaagagcguuacu

SEQ ID NO: 553642 - RNA, 19 nt, Artificial Sequence
  Description of Artificial Sequence: Synthetic oligonucleotide
  Antisense strand to SEQ ID NO: 553641
aguaacgcucuugauuuaa

SEQ ID NO: 553643 - RNA, 19 nt, Artificial Sequence
  Description of Artificial Sequence: Synthetic oligonucleotide
  Sense strand starting at position 3189 of SEQ ID NO: 318321
aaucaagagcguuacuguu

SEQ ID NO: 553644 - RNA, 19 nt, Artificial Sequence
  Description of Artificial Sequence: Synthetic oligonucleotide
  Antisense strand to SEQ ID NO: 553643
aacaguaacgcucuugauu

SEQ ID NO: 553645 - RNA, 19 nt, Artificial Sequence
  Description of Artificial Sequence: Synthetic oligonucleotide
  Sense strand starting at position 3195 of SEQ ID NO: 318321
gagcguuacuguugaucuc

SEQ ID NO: 553646 - RNA, 19 nt, Artificial Sequence
  Description of Artificial Sequence: Synthetic oligonucleotide
  Antisense strand to SEQ ID NO: 553645
gagaucaacaguaacgcuc

SEQ ID NO: 553647 - RNA, 19 nt, Artificial Sequence
  Description of Artificial Sequence: Synthetic oligonucleotide
  Sense strand starting at position 3230 of SEQ ID NO: 318321
uuuggauuccauuaaugcu

SEQ ID NO: 553648 - RNA, 19 nt, Artificial Sequence
  Description of Artificial Sequence: Synthetic oligonucleotide
  Antisense strand to SEQ ID NO: 553647
agcauuaauggaauccaaa

SEQ ID NO: 553649 - RNA, 19 nt, Artificial Sequence
  Description of Artificial Sequence: Synthetic oligonucleotide
  Sense strand starting at position 3238 of SEQ ID NO: 318321
ccauuaaugcuuugcaguu

SEQ ID NO: 553650 - RNA, 19 nt, Artificial Sequence
  Description of Artificial Sequence: Synthetic oligonucleotide
  Antisense strand to SEQ ID NO: 553649
aacugcaaagcauuaaugg

SEQ ID NO: 553651 - RNA, 19 nt, Artificial Sequence
  Description of Artificial Sequence: Synthetic oligonucleotide
  Sense strand starting at position 3240 of SEQ ID NO: 318321
auuaaugcuuugcaguuaa

SEQ ID NO: 553652 - RNA, 19 nt, Artificial Sequence
  Description of Artificial Sequence: Synthetic oligonucleotide
  Antisense strand to SEQ ID NO: 553651
uuaacugcaaagcauuaau

SEQ ID NO: 553653 - RNA, 19 nt, Artificial Sequence
  Description of Artificial Sequence: Synthetic oligonucleotide
  Sense strand starting at position 3271 of SEQ ID NO: 318321
aucugcugucauuaagcaa

SEQ ID NO: 553654 - RNA, 19 nt, Artificial Sequence
  Description of Artificial Sequence: Synthetic oligonucleotide
  Antisense strand to SEQ ID NO: 553653
uugcuuaaugacagcagau

SEQ ID NO: 553655 - RNA, 19 nt, Artificial Sequence
  Description of Artificial Sequence: Synthetic oligonucleotide
  Sense strand starting at position 3293 of SEQ ID NO: 318321
gugggagucugggauuuau

SEQ ID NO: 553656 - RNA, 19 nt, Artificial Sequence
  Description of Artificial Sequence: Synthetic oligonucleotide
  Antisense strand to SEQ ID NO: 553655
auaaaucccagacucccac

SEQ ID NO: 553657 - RNA, 19 nt, Artificial Sequence
  Description of Artificial Sequence: Synthetic oligonucleotide
  Sense strand starting at position 3302 of SEQ ID NO: 318321
ugggauuuaucuuacaaua

SEQ ID NO: 553658 - RNA, 19 nt, Artificial Sequence
  Description of Artificial Sequence: Synthetic oligonucleotide
  Antisense strand to SEQ ID NO: 553657
uauuguaagauaaauccca

SEQ ID NO: 553659 - RNA, 19 nt, Artificial Sequence
  Description of Artificial Sequence: Synthetic oligonucleotide
  Sense strand starting at position 3367 of SEQ ID NO: 318321
uccuuagacuucuguucuu

SEQ ID NO: 553660 - RNA, 19 nt, Artificial Sequence
  Description of Artificial Sequence: Synthetic oligonucleotide
  Antisense strand to SEQ ID NO: 553659
aagaacagaagucuaagga

SEQ ID NO: 553661 - RNA, 19 nt, Artificial Sequence
  Description of Artificial Sequence: Synthetic oligonucleotide
  Sense strand starting at position 3400 of SEQ ID NO: 318321
uuccucuuguacugcuaua

SEQ ID NO: 553662 - RNA, 19 nt, Artificial Sequence
  Description of Artificial Sequence: Synthetic oligonucleotide
  Antisense strand to SEQ ID NO: 553661
uauagcaguacaagaggaa

SEQ ID NO: 553663 - RNA, 19 nt, Artificial Sequence
  Description of Artificial Sequence: Synthetic oligonucleotide
  Sense strand starting at position 3462 of SEQ ID NO: 318321
guagaaggaucagaggaaa

SEQ ID NO: 553664 - RNA, 19 nt, Artificial Sequence
  Description of Artificial Sequence: Synthetic oligonucleotide
  Antisense strand to SEQ ID NO: 553663
uuuccucugauccuucuac

SEQ ID NO: 553665 - RNA, 19 nt, Artificial Sequence
  Description of Artificial Sequence: Synthetic oligonucleotide
  Sense strand starting at position 3482 of SEQ ID NO: 318321
cuuuccaugcugugucauu

SEQ ID NO: 553666 - RNA, 19 nt, Artificial Sequence
  Description of Artificial Sequence: Synthetic oligonucleotide
  Antisense strand to SEQ ID NO: 553665
aaugacacagcauggaaag

SEQ ID NO: 553667 - RNA, 19 nt, Artificial Sequence
  Description of Artificial Sequence: Synthetic oligonucleotide
  Sense strand starting at position 3507 of SEQ ID NO: 318321
gcugcucaguucugaauau

SEQ ID NO: 553668 - RNA, 19 nt, Artificial Sequence
  Description of Artificial Sequence: Synthetic oligonucleotide
  Antisense strand to SEQ ID NO: 553667
auauucagaacugagcagc

SEQ ID NO: 553669 - RNA, 19 nt, Artificial Sequence
  Description of Artificial Sequence: Synthetic oligonucleotide
  Sense strand starting at position 3508 of SEQ ID NO: 318321
cugcucaguucugaauauu

SEQ ID NO: 553670 - RNA, 19 nt, Artificial Sequence
  Description of Artificial Sequence: Synthetic oligonucleotide
  Antisense strand to SEQ ID NO: 553669
aauauucagaacugagcag

SEQ ID NO: 553671 - RNA, 19 nt, Artificial Sequence
  Description of Artificial Sequence: Synthetic oligonucleotide
  Sense strand starting at position 3570 of SEQ ID NO: 318321
ucuauugccucaugugcaa

SEQ ID NO: 553672 - RNA, 19 nt, Artificial Sequence
  Description of Artificial Sequence: Synthetic oligonucleotide
  Antisense strand to SEQ ID NO: 553671
uugcacaugaggcaauaga

SEQ ID NO: 553673 - RNA, 19 nt, Artificial Sequence
  Description of Artificial Sequence: Synthetic oligonucleotide
  Sense strand starting at position 3623 of SEQ ID NO: 318321
cucccaguauucugucauc

SEQ ID NO: 553674 - RNA, 19 nt, Artificial Sequence
  Description of Artificial Sequence: Synthetic oligonucleotide
  Antisense strand to SEQ ID NO: 553673
gaugacagaauacugggag

SEQ ID NO: 553675 - RNA, 19 nt, Artificial Sequence
  Description of Artificial Sequence: Synthetic oligonucleotide
  Sense strand starting at position 3626 of SEQ ID NO: 318321
ccaguauucugucaucugu

SEQ ID NO: 553676 - RNA, 19 nt, Artificial Sequence
  Description of Artificial Sequence: Synthetic oligonucleotide
  Antisense strand to SEQ ID NO: 553675
acagaugacagaauacugg

SEQ ID NO: 553677 - RNA, 19 nt, Artificial Sequence
  Description of Artificial Sequence: Synthetic oligonucleotide
  Sense strand starting at position 3628 of SEQ ID NO: 318321
aguauucugucaucuguag

SEQ ID NO: 553678 - RNA, 19 nt, Artificial Sequence
  Description of Artificial Sequence: Synthetic oligonucleotide
  Antisense strand to SEQ ID NO: 553677
cuacagaugacagaauacu

SEQ ID NO: 553679 - RNA, 19 nt, Artificial Sequence
  Description of Artificial Sequence: Synthetic oligonucleotide
  Sense strand starting at position 3632 of SEQ ID NO: 318321
uucugucaucuguagaucu

SEQ ID NO: 553680 - RNA, 19 nt, Artificial Sequence
  Description of Artificial Sequence: Synthetic oligonucleotide
  Antisense strand to SEQ ID NO: 553679
agaucuacagaugacagaa

SEQ ID NO: 553681 - RNA, 19 nt, Artificial Sequence
  Description of Artificial Sequence: Synthetic oligonucleotide
  Sense strand starting at position 3644 of SEQ ID NO: 318321
uagaucuuccucuaugggu

SEQ ID NO: 553682 - RNA, 19 nt, Artificial Sequence
  Description of Artificial Sequence: Synthetic oligonucleotide
  Antisense strand to SEQ ID NO: 553681
acccauagaggaagaucua

SEQ ID NO: 553683 - RNA, 19 nt, Artificial Sequence
  Description of Artificial Sequence: Synthetic oligonucleotide
  Sense strand starting at position 3646 of SEQ ID NO: 318321
gaucuuccucuauggguca

SEQ ID NO: 553684 - RNA, 19 nt, Artificial Sequence
  Description of Artificial Sequence: Synthetic oligonucleotide
  Antisense strand to SEQ ID NO: 553683
ugacccauagaggaagauc

SEQ ID NO: 553685 - RNA, 19 nt, Artificial Sequence
  Description of Artificial Sequence: Synthetic oligonucleotide
  Sense strand starting at position 3669 of SEQ ID NO: 318321
cuagcuauggacuggaaca

SEQ ID NO: 553686 - RNA, 19 nt, Artificial Sequence
  Description of Artificial Sequence: Synthetic oligonucleotide
  Antisense strand to SEQ ID NO: 553685
uguuccaguccauagcuag

SEQ ID NO: 553687 - RNA, 19 nt, Artificial Sequence
  Description of Artificial Sequence: Synthetic oligonucleotide
  Sense strand starting at position 3841 of SEQ ID NO: 318321
cuaccuagccaguguuauu

SEQ ID NO: 553688 - RNA, 19 nt, Artificial Sequence
  Description of Artificial Sequence: Synthetic oligonucleotide
  Antisense strand to SEQ ID NO: 553687
aauaacacuggcuagguag

SEQ ID NO: 553689 - RNA, 19 nt, Artificial Sequence
  Description of Artificial Sequence: Synthetic oligonucleotide
  Sense strand starting at position 3846 of SEQ ID NO: 318321
uagccaguguuauuccaga

SEQ ID NO: 553690 - RNA, 19 nt, Artificial Sequence
  Description of Artificial Sequence: Synthetic oligonucleotide
  Antisense strand to SEQ ID NO: 553689
ucuggaauaacacuggcua

SEQ ID NO: 553691 - RNA, 19 nt, Artificial Sequence
  Description of Artificial Sequence: Synthetic oligonucleotide
  Sense strand starting at position 3851 of SEQ ID NO: 318321
aguguuauuccagagaagc

SEQ ID NO: 553692 - RNA, 19 nt, Artificial Sequence
  Description of Artificial Sequence: Synthetic oligonucleotide
  Antisense strand to SEQ ID NO: 553691
gcuucucuggaauaacacu

SEQ ID NO: 553693 - RNA, 19 nt, Artificial Sequence
  Description of Artificial Sequence: Synthetic oligonucleotide
  Sense strand starting at position 3894 of SEQ ID NO: 318321
ucuuauuuguccucuuugu

SEQ ID NO: 553694 - RNA, 19 nt, Artificial Sequence
  Description of Artificial Sequence: Synthetic oligonucleotide
  Antisense strand to SEQ ID NO: 553693
acaaagaggacaaauaaga

SEQ ID NO: 553695 - RNA, 19 nt, Artificial Sequence
  Description of Artificial Sequence: Synthetic oligonucleotide
  Sense strand starting at position 3909 of SEQ ID NO: 318321
uuguuuccucaaggguaca

SEQ ID NO: 553696 - RNA, 19 nt, Artificial Sequence
  Description of Artificial Sequence: Synthetic oligonucleotide
  Antisense strand to SEQ ID NO: 553695
uguacccuugaggaaacaa

SEQ ID NO: 553697 - RNA, 19 nt, Artificial Sequence
  Description of Artificial Sequence: Synthetic oligonucleotide
  Sense strand starting at position 2075 of SEQ ID NO: 318322
uuugcauugagcgacucaa

SEQ ID NO: 553698 - RNA, 19 nt, Artificial Sequence
  Description of Artificial Sequence: Synthetic oligonucleotide
  Antisense strand to SEQ ID NO: 553697
uugagucgcucaaugcaaa

SEQ ID NO: 553699 - RNA, 19 nt, Artificial Sequence
  Description of Artificial Sequence: Synthetic oligonucleotide
  Sense strand starting at position 2126 of SEQ ID NO: 318322
guucucauuccggagaguu

SEQ ID NO: 553700 - RNA, 19 nt, Artificial Sequence
  Description of Artificial Sequence: Synthetic oligonucleotide
  Antisense strand to SEQ ID NO: 553699
aacucuccggaaugagaac

SEQ ID NO: 553701 - RNA, 19 nt, Artificial Sequence
  Description of Artificial Sequence: Synthetic oligonucleotide
  Sense strand starting at position 2128 of SEQ ID NO: 318322
ucucauuccggagaguuag

SEQ ID NO: 553702 - RNA, 19 nt, Artificial Sequence
  Description of Artificial Sequence: Synthetic oligonucleotide
  Antisense strand to SEQ ID NO: 553701
cuaacucuccggaaugaga

SEQ ID NO: 553703 - RNA, 19 nt, Artificial Sequence
  Description of Artificial Sequence: Synthetic oligonucleotide
  Sense strand starting at position 2136 of SEQ ID NO: 318322
cggagaguuagguagaggu

SEQ ID NO: 553704 - RNA, 19 nt, Artificial Sequence
  Description of Artificial Sequence: Synthetic oligonucleotide
  Antisense strand to SEQ ID NO: 553703
accucuaccuaacucuccg

SEQ ID NO: 553705 - RNA, 19 nt, Artificial Sequence
  Description of Artificial Sequence: Synthetic oligonucleotide
  Sense strand starting at position 2140 of SEQ ID NO: 318322
gaguuagguagagguugaa

SEQ ID NO: 553706 - RNA, 19 nt, Artificial Sequence
  Description of Artificial Sequence: Synthetic oligonucleotide
  Antisense strand to SEQ ID NO: 553705
uucaaccucuaccuaacuc

SEQ ID NO: 553707 - RNA, 19 nt, Artificial Sequence
  Description of Artificial Sequence: Synthetic oligonucleotide
  Sense strand starting at position 2143 of SEQ ID NO: 318322
uuagguagagguugaaagu

SEQ ID NO: 553708 - RNA, 19 nt, Artificial Sequence
  Description of Artificial Sequence: Synthetic oligonucleotide
  Antisense strand to SEQ ID NO: 553707
acuuucaaccucuaccuaa

SEQ ID NO: 553709 - RNA, 19 nt, Artificial Sequence
  Description of Artificial Sequence: Synthetic oligonucleotide
  Sense strand starting at position 2215 of SEQ ID NO: 318322
guccuugggaauugagaag

SEQ ID NO: 553710 - RNA, 19 nt, Artificial Sequence
  Description of Artificial Sequence: Synthetic oligonucleotide
  Antisense strand to SEQ ID NO: 553709
cuucucaauucccaaggac

SEQ ID NO: 553711 - RNA, 19 nt, Artificial Sequence
  Description of Artificial Sequence: Synthetic oligonucleotide
  Sense strand starting at position 2226 of SEQ ID NO: 318322
uugagaagccaaugagauu

SEQ ID NO: 553712 - RNA, 19 nt, Artificial Sequence
  Description of Artificial Sequence: Synthetic oligonucleotide
  Antisense strand to SEQ ID NO: 553711
aaucucauuggcuucucaa

SEQ ID NO: 553713 - RNA, 19 nt, Artificial Sequence
  Description of Artificial Sequence: Synthetic oligonucleotide
  Sense strand starting at position 2535 of SEQ ID NO: 318322
cuugauuugcacuacgcua

SEQ ID NO: 553714 - RNA, 19 nt, Artificial Sequence
  Description of Artificial Sequence: Synthetic oligonucleotide
  Antisense strand to SEQ ID NO: 553713
uagcguagugcaaaucaag

SEQ ID NO: 553715 - RNA, 19 nt, Artificial Sequence
  Description of Artificial Sequence: Synthetic oligonucleotide
  Sense strand starting at position 2641 of SEQ ID NO: 318322
uuauaauggcaguaguauu

SEQ ID NO: 553716 - RNA, 19 nt, Artificial Sequence
  Description of Artificial Sequence: Synthetic oligonucleotide
  Antisense strand to SEQ ID NO: 553715
aauacuacugccauuauaa

SEQ ID NO: 553717 - RNA, 19 nt, Artificial Sequence
  Description of Artificial Sequence: Synthetic oligonucleotide
  Sense strand starting at position 2664 of SEQ ID NO: 318322
ggauaugauuuccauguac

SEQ ID NO: 553718 - RNA, 19 nt, Artificial Sequence
  Description of Artificial Sequence: Synthetic oligonucleotide
  Antisense strand to SEQ ID NO: 553717
guacauggaaaucauaucc

SEQ ID NO: 553719 - RNA, 19 nt, Artificial Sequence
  Description of Artificial Sequence: Synthetic oligonucleotide
  Sense strand starting at position 3018 of SEQ ID NO: 318322
uugaguuuccuuuaugauc

SEQ ID NO: 553720 - RNA, 19 nt, Artificial Sequence
  Description of Artificial Sequence: Synthetic oligonucleotide
  Antisense strand to SEQ ID NO: 553719
gaucauaaaggaaacucaa

SEQ ID NO: 553721 - RNA, 19 nt, Artificial Sequence
  Description of Artificial Sequence: Synthetic oligonucleotide
  Sense strand starting at position 3144 of SEQ ID NO: 318322
gcccgaagugaugaaguca

SEQ ID NO: 553722 - RNA, 19 nt, Artificial Sequence
  Description of Artificial Sequence: Synthetic oligonucleotide
  Antisense strand to SEQ ID NO: 553721
ugacuucaucacuucgggc

SEQ ID NO: 553723 - RNA, 19 nt, Artificial Sequence
  Description of Artificial Sequence: Synthetic oligonucleotide
  Sense strand starting at position 3155 of SEQ ID NO: 318322
ugaagucacuugcccaauu

SEQ ID NO: 553724 - RNA, 19 nt, Artificial Sequence
  Description of Artificial Sequence: Synthetic oligonucleotide
  Antisense strand to SEQ ID NO: 553723
aauugggcaagugacuuca

SEQ ID NO: 553725 - RNA, 19 nt, Artificial Sequence
  Description of Artificial Sequence: Synthetic oligonucleotide
  Sense strand starting at position 3182 of SEQ ID NO: 318322
uacucauggcaguguaaga

SEQ ID NO: 553726 - RNA, 19 nt, Artificial Sequence
  Description of Artificial Sequence: Synthetic oligonucleotide
  Antisense strand to SEQ ID NO: 553725
ucuuacacugccaugagua

SEQ ID NO: 553727 - RNA, 19 nt, Artificial Sequence
  Description of Artificial Sequence: Synthetic oligonucleotide
  Sense strand starting at position 3201 of SEQ ID NO: 318322
acuagaacuugucuucuga

SEQ ID NO: 553728 - RNA, 19 nt, Artificial Sequence
  Description of Artificial Sequence: Synthetic oligonucleotide
  Antisense strand to SEQ ID NO: 553727
ucagaagacaaguucuagu

SEQ ID NO: 553729 - RNA, 19 nt, Artificial Sequence
  Description of Artificial Sequence: Synthetic oligonucleotide
  Sense strand starting at position 3203 of SEQ ID NO: 318322
uagaacuugucuucugaug

SEQ ID NO: 553730 - RNA, 19 nt, Artificial Sequence
  Description of Artificial Sequence: Synthetic oligonucleotide
  Antisense strand to SEQ ID NO: 553729
caucagaagacaaguucua

SEQ ID NO: 553731 - RNA, 19 nt, Artificial Sequence
  Description of Artificial Sequence: Synthetic oligonucleotide
  Sense strand starting at position 3310 of SEQ ID NO: 318322
acggaaaucuaacuauauu

SEQ ID NO: 553732 - RNA, 19 nt, Artificial Sequence
  Description of Artificial Sequence: Synthetic oligonucleotide
  Antisense strand to SEQ ID NO: 553731
aauauaguuagauuuccgu

SEQ ID NO: 553733 - RNA, 19 nt, Artificial Sequence
  Description of Artificial Sequence: Synthetic oligonucleotide
  Sense strand starting at position 3486 of SEQ ID NO: 318322
cuauauaucuuacuugagu

SEQ ID NO: 553734 - RNA, 19 nt, Artificial Sequence
  Description of Artificial Sequence: Synthetic oligonucleotide
  Antisense strand to SEQ ID NO: 553733
acucaaguaagauauauag

SEQ ID NO: 553735 - RNA, 19 nt, Artificial Sequence
  Description of Artificial Sequence: Synthetic oligonucleotide
  Sense strand starting at position 3492 of SEQ ID NO: 318322
aucuuacuugaguaugagu

SEQ ID NO: 553736 - RNA, 19 nt, Artificial Sequence
  Description of Artificial Sequence: Synthetic oligonucleotide
  Antisense strand to SEQ ID NO: 553735
acucauacucaaguaagau

SEQ ID NO: 553737 - RNA, 19 nt, Artificial Sequence
  Description of Artificial Sequence: Synthetic oligonucleotide
  Sense strand starting at position 3497 of SEQ ID NO: 318322
acuugaguaugaguagaaa

SEQ ID NO: 553738 - RNA, 19 nt, Artificial Sequence
  Description of Artificial Sequence: Synthetic oligonucleotide
  Antisense strand to SEQ ID NO: 553737
uuucuacucauacucaagu

SEQ ID NO: 553739 - RNA, 19 nt, Artificial Sequence
  Description of Artificial Sequence: Synthetic oligonucleotide
  Sense strand starting at position 3533 of SEQ ID NO: 318322
ucaaguaaaguguacagua

SEQ ID NO: 553740 - RNA, 19 nt, Artificial Sequence
  Description of Artificial Sequence: Synthetic oligonucleotide
  Antisense strand to SEQ ID NO: 553739
uacuguacacuuuacuuga

SEQ ID NO: 553741 - RNA, 19 nt, Artificial Sequence
  Description of Artificial Sequence: Synthetic oligonucleotide
  Sense strand starting at position 3538 of SEQ ID NO: 318322
uaaaguguacaguagguaa

SEQ ID NO: 553742 - RNA, 19 nt, Artificial Sequence
  Description of Artificial Sequence: Synthetic oligonucleotide
  Antisense strand to SEQ ID NO: 553741
uuaccuacuguacacuuua

SEQ ID NO: 553743 - RNA, 19 nt, Artificial Sequence
  Description of Artificial Sequence: Synthetic oligonucleotide
  Sense strand starting at position 3654 of SEQ ID NO: 318322
accaauauauugucaaugu

SEQ ID NO: 553744 - RNA, 19 nt, Artificial Sequence
  Description of Artificial Sequence: Synthetic oligonucleotide
  Antisense strand to SEQ ID NO: 553743
acauugacaauauauuggu

SEQ ID NO: 553745 - RNA, 19 nt, Artificial Sequence
  Description of Artificial Sequence: Synthetic oligonucleotide
  Sense strand starting at position 3671 of SEQ ID NO: 318322
guccuuuagcuagagacca

SEQ ID NO: 553746 - RNA, 19 nt, Artificial Sequence
  Description of Artificial Sequence: Synthetic oligonucleotide
  Antisense strand to SEQ ID NO: 553745
uggucucuagcuaaaggac

SEQ ID NO: 553747 - RNA, 19 nt, Artificial Sequence
  Description of Artificial Sequence: Synthetic oligonucleotide
  Sense strand starting at position 3770 of SEQ ID NO: 318322
uggagcaucucagugaaac

SEQ ID NO: 553748 - RNA, 19 nt, Artificial Sequence
  Description of Artificial Sequence: Synthetic oligonucleotide
  Antisense strand to SEQ ID NO: 553747
guuucacugagaugcucca

SEQ ID NO: 553749 - RNA, 19 nt, Artificial Sequence
  Description of Artificial Sequence: Synthetic oligonucleotide
  Sense strand starting at position 3771 of SEQ ID NO: 318322
ggagcaucucagugaaacg

SEQ ID NO: 553750 - RNA, 19 nt, Artificial Sequence
  Description of Artificial Sequence: Synthetic oligonucleotide
  Antisense strand to SEQ ID NO: 553749
cguuucacugagaugcucc

SEQ ID NO: 553751 - RNA, 19 nt, Artificial Sequence
  Description of Artificial Sequence: Synthetic oligonucleotide
  Sense strand starting at position 3847 of SEQ ID NO: 318322
cagagugcucuggauugga

SEQ ID NO: 553752 - RNA, 19 nt, Artificial Sequence
  Description of Artificial Sequence: Synthetic oligonucleotide
  Antisense strand to SEQ ID NO: 553751
uccaauccagagcacucug

SEQ ID NO: 553753 - RNA, 19 nt, Artificial Sequence
  Description of Artificial Sequence: Synthetic oligonucleotide
  Sense strand starting at position 3860 of SEQ ID NO: 318322
auuggaugucaucauaagu

SEQ ID NO: 553754 - RNA, 19 nt, Artificial Sequence
  Description of Artificial Sequence: Synthetic oligonucleotide
  Antisense strand to SEQ ID NO: 553753
acuuaugaugacauccaau

SEQ ID NO: 553755 - RNA, 19 nt, Artificial Sequence
  Description of Artificial Sequence: Synthetic oligonucleotide
  Sense strand starting at position 3865 of SEQ ID NO: 318322
augucaucauaaguggagu

SEQ ID NO: 553756 - RNA, 19 nt, Artificial Sequence
  Description of Artificial Sequence: Synthetic oligonucleotide
  Antisense strand to SEQ ID NO: 553755
acuccacuuaugaugacau

SEQ ID NO: 553757 - RNA, 19 nt, Artificial Sequence
  Description of Artificial Sequence: Synthetic oligonucleotide
  Sense strand starting at position 3867 of SEQ ID NO: 318322
gucaucauaaguggaguua

SEQ ID NO: 553758 - RNA, 19 nt, Artificial Sequence
  Description of Artificial Sequence: Synthetic oligonucleotide
  Antisense strand to SEQ ID NO: 553757
uaacuccacuuaugaugac

SEQ ID NO: 553759 - RNA, 19 nt, Artificial Sequence
  Description of Artificial Sequence: Synthetic oligonucleotide
  Sense strand starting at position 3880 of SEQ ID NO: 318322
gaguuaacucuaugaugag

SEQ ID NO: 553760 - RNA, 19 nt, Artificial Sequence
  Description of Artificial Sequence: Synthetic oligonucleotide
  Antisense strand to SEQ ID NO: 553759
cucaucauagaguuaacuc

SEQ ID NO: 553761 - RNA, 19 nt, Artificial Sequence
  Description of Artificial Sequence: Synthetic oligonucleotide
  Sense strand starting at position 3886 of SEQ ID NO: 318322
acucuaugaugaguauauu

SEQ ID NO: 553762 - RNA, 19 nt, Artificial Sequence
  Description of Artificial Sequence: Synthetic oligonucleotide
  Antisense strand to SEQ ID NO: 553761
aauauacucaucauagagu

SEQ ID NO: 553763 - RNA, 19 nt, Artificial Sequence
  Description of Artificial Sequence: Synthetic oligonucleotide
  Sense strand starting at position 3905 of SEQ ID NO: 318322
gauaauucuuauguagaag

SEQ ID NO: 553764 - RNA, 19 nt, Artificial Sequence
  Description of Artificial Sequence: Synthetic oligonucleotide
  Antisense strand to SEQ ID NO: 553763
cuucuacauaagaauuauc

SEQ ID NO: 553765 - RNA, 19 nt, Artificial Sequence
  Description of Artificial Sequence: Synthetic oligonucleotide
  Sense strand starting at position 3911 of SEQ ID NO: 318322
ucuuauguagaaggugaga

SEQ ID NO: 553766 - RNA, 19 nt, Artificial Sequence
  Description of Artificial Sequence: Synthetic oligonucleotide
  Antisense strand to SEQ ID NO: 553765
ucucaccuucuacauaaga

SEQ ID NO: 553767 - RNA, 19 nt, Artificial Sequence
  Description of Artificial Sequence: Synthetic oligonucleotide
  Sense strand starting at position 3940 of SEQ ID NO: 318322
gaggcuaacucugugauug

SEQ ID NO: 553768 - RNA, 19 nt, Artificial Sequence
  Description of Artificial Sequence: Synthetic oligonucleotide
  Antisense strand to SEQ ID NO: 553767
caaucacagaguuagccuc

SEQ ID NO: 553769 - RNA, 19 nt, Artificial Sequence
  Description of Artificial Sequence: Synthetic oligonucleotide
  Sense strand starting at position 3944 of SEQ ID NO: 318322
cuaacucugugauugguaa

SEQ ID NO: 553770 - RNA, 19 nt, Artificial Sequence
  Description of Artificial Sequence: Synthetic oligonucleotide
  Antisense strand to SEQ ID NO: 553769
uuaccaaucacagaguuag

SEQ ID NO: 553771 - RNA, 19 nt, Artificial Sequence
  Description of Artificial Sequence: Synthetic oligonucleotide
  Sense strand starting at position 3945 of SEQ ID NO: 318322
uaacucugugauugguaag

SEQ ID NO: 553772 - RNA, 19 nt, Artificial Sequence
  Description of Artificial Sequence: Synthetic oligonucleotide
  Antisense strand to SEQ ID NO: 553771
cuuaccaaucacagaguua

SEQ ID NO: 553773 - RNA, 19 nt, Artificial Sequence
  Description of Artificial Sequence: Synthetic oligonucleotide
  Sense strand starting at position 3963 of SEQ ID NO: 318322
guaagcugaagugacuaau

SEQ ID NO: 553774 - RNA, 19 nt, Artificial Sequence
  Description of Artificial Sequence: Synthetic oligonucleotide
  Antisense strand to SEQ ID NO: 553773
auuagucacuucagcuuac

SEQ ID NO: 553775 - RNA, 19 nt, Artificial Sequence
  Description of Artificial Sequence: Synthetic oligonucleotide
  Sense strand starting at position 3966 of SEQ ID NO: 318322
agcugaagugacuaauacu

SEQ ID NO: 553776 - RNA, 19 nt, Artificial Sequence
  Description of Artificial Sequence: Synthetic oligonucleotide
  Antisense strand to SEQ ID NO: 553775
aguauuagucacuucagcu

SEQ ID NO: 553777 - RNA, 19 nt, Artificial Sequence
  Description of Artificial Sequence: Synthetic oligonucleotide
  Sense strand starting at position 1988 of SEQ ID NO: 318323
cuguccgugucuuccuuua

SEQ ID NO: 553778 - RNA, 19 nt, Artificial Sequence
  Description of Artificial Sequence: Synthetic oligonucleotide
  Antisense strand to SEQ ID NO: 553777
uaaaggaagacacggacag

SEQ ID NO: 553779 - RNA, 19 nt, Artificial Sequence
  Description of Artificial Sequence: Synthetic oligonucleotide
  Sense strand starting at position 1990 of SEQ ID NO: 318323
guccgugucuuccuuuauu

SEQ ID NO: 553780 - RNA, 19 nt, Artificial Sequence
  Description of Artificial Sequence: Synthetic oligonucleotide
  Antisense strand to SEQ ID NO: 553779
aauaaaggaagacacggac

SEQ ID NO: 553781 - RNA, 19 nt, Artificial Sequence
  Description of Artificial Sequence: Synthetic oligonucleotide
  Sense strand starting at position 1993 of SEQ ID NO: 318323
cgugucuuccuuuauuagu

SEQ ID NO: 553782 - RNA, 19 nt, Artificial Sequence
  Description of Artificial Sequence: Synthetic oligonucleotide
  Antisense strand to SEQ ID NO: 553781
acuaauaaaggaagacacg

SEQ ID NO: 553783 - RNA, 19 nt, Artificial Sequence
  Description of Artificial Sequence: Synthetic oligonucleotide
  Sense strand starting at position 1995 of SEQ ID NO: 318323
ugucuuccuuuauuaguga

SEQ ID NO: 553784 - RNA, 19 nt, Artificial Sequence
  Description of Artificial Sequence: Synthetic oligonucleotide
  Antisense strand to SEQ ID NO: 553783
ucacuaauaaaggaagaca

SEQ ID NO: 553785 - RNA, 19 nt, Artificial Sequence
  Description of Artificial Sequence: Synthetic oligonucleotide
  Sense strand starting at position 2006 of SEQ ID NO: 318323
auuagugacuugcauagca

SEQ ID NO: 553786 - RNA, 19 nt, Artificial Sequence
  Description of Artificial Sequence: Synthetic oligonucleotide
  Antisense strand to SEQ ID NO: 553785
ugcuaugcaagucacuaau

SEQ ID NO: 553787 - RNA, 19 nt, Artificial Sequence
  Description of Artificial Sequence: Synthetic oligonucleotide
  Sense strand starting at position 2019 of SEQ ID NO: 318323
auagcauccucagagcaau

SEQ ID NO: 553788 - RNA, 19 nt, Artificial Sequence
  Description of Artificial Sequence: Synthetic oligonucleotide
  Antisense strand to SEQ ID NO: 553787
auugcucugaggaugcuau

SEQ ID NO: 553789 - RNA, 19 nt, Artificial Sequence
  Description of Artificial Sequence: Synthetic oligonucleotide
  Sense strand starting at position 2200 of SEQ ID NO: 318323
gagaaauagucacauuguu

SEQ ID NO: 553790 - RNA, 19 nt, Artificial Sequence
  Description of Artificial Sequence: Synthetic oligonucleotide
  Antisense strand to SEQ ID NO: 553789
aacaaugugacuauuucuc

SEQ ID NO: 553791 - RNA, 19 nt, Artificial Sequence
  Description of Artificial Sequence: Synthetic oligonucleotide
  Sense strand starting at position 2205 of SEQ ID NO: 318323
auagucacauuguugagau

SEQ ID NO: 553792 - RNA, 19 nt, Artificial Sequence
  Description of Artificial Sequence: Synthetic oligonucleotide
  Antisense strand to SEQ ID NO: 553791
aucucaacaaugugacuau

SEQ ID NO: 553793 - RNA, 19 nt, Artificial Sequence
  Description of Artificial Sequence: Synthetic oligonucleotide
  Sense strand starting at position 2206 of SEQ ID NO: 318323
uagucacauuguugagauu

SEQ ID NO: 553794 - RNA, 19 nt, Artificial Sequence
  Description of Artificial Sequence: Synthetic oligonucleotide
  Antisense strand to SEQ ID NO: 553793
aaucucaacaaugugacua

SEQ ID NO: 553795 - RNA, 19 nt, Artificial Sequence
  Description of Artificial Sequence: Synthetic oligonucleotide
  Sense strand starting at position 2209 of SEQ ID NO: 318323
ucacauuguugagauucuu

SEQ ID NO: 553796 - RNA, 19 nt, Artificial Sequence
  Description of Artificial Sequence: Synthetic oligonucleotide
  Antisense strand to SEQ ID NO: 553795
aagaaucucaacaauguga

SEQ ID NO: 553797 - RNA, 19 nt, Artificial Sequence
  Description of Artificial Sequence: Synthetic oligonucleotide
  Sense strand starting at position 2425 of SEQ ID NO: 318323
ccagaaacaucgggauaag

SEQ ID NO: 553798 - RNA, 19 nt, Artificial Sequence
  Description of Artificial Sequence: Synthetic oligonucleotide
  Antisense strand to SEQ ID NO: 553797
cuuaucccgauguuucugg

SEQ ID NO: 553799 - RNA, 19 nt, Artificial Sequence
  Description of Artificial Sequence: Synthetic oligonucleotide
  Sense strand starting at position 2518 of SEQ ID NO: 318323
ggagaaucaucacucugua

SEQ ID NO: 553800 - RNA, 19 nt, Artificial Sequence
  Description of Artificial Sequence: Synthetic oligonucleotide
  Antisense strand to SEQ ID NO: 553799
uacagagugaugauucucc

SEQ ID NO: 553801 - RNA, 19 nt, Artificial Sequence
  Description of Artificial Sequence: Synthetic oligonucleotide
  Sense strand starting at position 2526 of SEQ ID NO: 318323
aucacucuguaaucuugua

SEQ ID NO: 553802 - RNA, 19 nt, Artificial Sequence
  Description of Artificial Sequence: Synthetic oligonucleotide
  Antisense strand to SEQ ID NO: 553801
uacaagauuacagagugau

SEQ ID NO: 553803 - RNA, 19 nt, Artificial Sequence
  Description of Artificial Sequence: Synthetic oligonucleotide
  Sense strand starting at position 2531 of SEQ ID NO: 318323
ucuguaaucuuguauaaug

SEQ ID NO: 553804 - RNA, 19 nt, Artificial Sequence
  Description of Artificial Sequence: Synthetic oligonucleotide
  Antisense strand to SEQ ID NO: 553803
cauuauacaagauuacaga

SEQ ID NO: 553805 - RNA, 19 nt, Artificial Sequence
  Description of Artificial Sequence: Synthetic oligonucleotide
  Sense strand starting at position 2533 of SEQ ID NO: 318323
uguaaucuuguauaaugca

SEQ ID NO: 553806 - RNA, 19 nt, Artificial Sequence
  Description of Artificial Sequence: Synthetic oligonucleotide
  Antisense strand to SEQ ID NO: 553805
ugcauuauacaagauuaca

SEQ ID NO: 553807 - RNA, 19 nt, Artificial Sequence
  Description of Artificial Sequence: Synthetic oligonucleotide
  Sense strand starting at position 2599 of SEQ ID NO: 318323
cuaugauugcccugcaaau

SEQ ID NO: 553808 - RNA, 19 nt, Artificial Sequence
  Description of Artificial Sequence: Synthetic oligonucleotide
  Antisense strand to SEQ ID NO: 553807
auuugcagggcaaucauag

SEQ ID NO: 553809 - RNA, 19 nt, Artificial Sequence
  Description of Artificial Sequence: Synthetic oligonucleotide
  Sense strand starting at position 2601 of SEQ ID NO: 318323
augauugcccugcaaauau

SEQ ID NO: 553810 - RNA, 19 nt, Artificial Sequence
  Description of Artificial Sequence: Synthetic oligonucleotide
  Antisense strand to SEQ ID NO: 553809
auauuugcagggcaaucau

SEQ ID NO: 553811 - RNA, 19 nt, Artificial Sequence
  Description of Artificial Sequence: Synthetic oligonucleotide
  Sense strand starting at position 2656 of SEQ ID NO: 318323
caaugugugggcuacuuaa

SEQ ID NO: 553812 - RNA, 19 nt, Artificial Sequence
  Description of Artificial Sequence: Synthetic oligonucleotide
  Antisense strand to SEQ ID NO: 553811
uuaaguagcccacacauug

SEQ ID NO: 553813 - RNA, 19 nt, Artificial Sequence
  Description of Artificial Sequence: Synthetic oligonucleotide
  Sense strand starting at position 2680 of SEQ ID NO: 318323
ggaacuauguccuaaucau

SEQ ID NO: 553814 - RNA, 19 nt, Artificial Sequence
  Description of Artificial Sequence: Synthetic oligonucleotide
  Antisense strand to SEQ ID NO: 553813
augauuaggacauaguucc

SEQ ID NO: 553815 - RNA, 19 nt, Artificial Sequence
  Description of Artificial Sequence: Synthetic oligonucleotide
  Sense strand starting at position 2686 of SEQ ID NO: 318323
auguccuaaucaucuguga

SEQ ID NO: 553816 - RNA, 19 nt, Artificial Sequence
  Description of Artificial Sequence: Synthetic oligonucleotide
  Antisense strand to SEQ ID NO: 553815
ucacagaugauuaggacau

SEQ ID NO: 553817 - RNA, 19 nt, Artificial Sequence
  Description of Artificial Sequence: Synthetic oligonucleotide
  Sense strand starting at position 2688 of SEQ ID NO: 318323
guccuaaucaucugugagu

SEQ ID NO: 553818 - RNA, 19 nt, Artificial Sequence
  Description of Artificial Sequence: Synthetic oligonucleotide
  Antisense strand to SEQ ID NO: 553817
acucacagaugauuaggac

SEQ ID NO: 553819 - RNA, 19 nt, Artificial Sequence
  Description of Artificial Sequence: Synthetic oligonucleotide
  Sense strand starting at position 2690 of SEQ ID NO: 318323
ccuaaucaucugugaguga

SEQ ID NO: 553820 - RNA, 19 nt, Artificial Sequence
  Description of Artificial Sequence: Synthetic oligonucleotide
  Antisense strand to SEQ ID NO: 553819
ucacucacagaugauuagg

SEQ ID NO: 553821 - RNA, 19 nt, Artificial Sequence
  Description of Artificial Sequence: Synthetic oligonucleotide
  Sense strand starting at position 2697 of SEQ ID NO: 318323
aucugugagugacaaauca

SEQ ID NO: 553822 - RNA, 19 nt, Artificial Sequence
  Description of Artificial Sequence: Synthetic oligonucleotide
  Antisense strand to SEQ ID NO: 553821
ugauuugucacucacagau

SEQ ID NO: 553823 - RNA, 19 nt, Artificial Sequence
  Description of Artificial Sequence: Synthetic oligonucleotide
  Sense strand starting at position 2734 of SEQ ID NO: 318323
ccuguauuaggacaugcau

SEQ ID NO: 553824 - RNA, 19 nt, Artificial Sequence
  Description of Artificial Sequence: Synthetic oligonucleotide
  Antisense strand to SEQ ID NO: 553823
augcauguccuaauacagg

SEQ ID NO: 553825 - RNA, 19 nt, Artificial Sequence
  Description of Artificial Sequence: Synthetic oligonucleotide
  Sense strand starting at position 2752 of SEQ ID NO: 318323
uaaauaaacucagaugggu

SEQ ID NO: 553826 - RNA, 19 nt, Artificial Sequence
  Description of Artificial Sequence: Synthetic oligonucleotide
  Antisense strand to SEQ ID NO: 553825
acccaucugaguuuauuua

SEQ ID NO: 553827 - RNA, 19 nt, Artificial Sequence
  Description of Artificial Sequence: Synthetic oligonucleotide
  Sense strand starting at position 2011 of SEQ ID NO: 318324
cuuguaggcuucuugaaga

SEQ ID NO: 553828 - RNA, 19 nt, Artificial Sequence
  Description of Artificial Sequence: Synthetic oligonucleotide
  Antisense strand to SEQ ID NO: 553827
ucuucaagaagccuacaag

SEQ ID NO: 553829 - RNA, 19 nt, Artificial Sequence
  Description of Artificial Sequence: Synthetic oligonucleotide
  Sense strand starting at position 2074 of SEQ ID NO: 318324
uccucuguggucuaaggau

SEQ ID NO: 553830 - RNA, 19 nt, Artificial Sequence
  Description of Artificial Sequence: Synthetic oligonucleotide
  Antisense strand to SEQ ID NO: 553829
auccuuagaccacagagga

SEQ ID NO: 553831 - RNA, 19 nt, Artificial Sequence
  Description of Artificial Sequence: Synthetic oligonucleotide
  Sense strand starting at position 2161 of SEQ ID NO: 318324
gugugcacuggauaucagu

SEQ ID NO: 553832 - RNA, 19 nt, Artificial Sequence
  Description of Artificial Sequence: Synthetic oligonucleotide
  Antisense strand to SEQ ID NO: 553831
acugauauccagugcacac

SEQ ID NO: 553833 - RNA, 19 nt, Artificial Sequence
  Description of Artificial Sequence: Synthetic oligonucleotide
  Sense strand starting at position 2186 of SEQ ID NO: 318324
aacgccauccagugaauau

SEQ ID NO: 553834 - RNA, 19 nt, Artificial Sequence
  Description of Artificial Sequence: Synthetic oligonucleotide
  Antisense strand to SEQ ID NO: 553833
auauucacuggauggcguu

SEQ ID NO: 553835 - RNA, 19 nt, Artificial Sequence
  Description of Artificial Sequence: Synthetic oligonucleotide
  Sense strand starting at position 2263 of SEQ ID NO: 318324
ggugaaagcuaccuaaauu

SEQ ID NO: 553836 - RNA, 19 nt, Artificial Sequence
  Description of Artificial Sequence: Synthetic oligonucleotide
  Antisense strand to SEQ ID NO: 553835
aauuuagguagcuuucacc

SEQ ID NO: 553837 - RNA, 19 nt, Artificial Sequence
  Description of Artificial Sequence: Synthetic oligonucleotide
  Sense strand starting at position 2288 of SEQ ID NO: 318324
acuuauauguccuccggaa

SEQ ID NO: 553838 - RNA, 19 nt, Artificial Sequence
  Description of Artificial Sequence: Synthetic oligonucleotide
  Antisense strand to SEQ ID NO: 553837
uuccggaggacauauaagu

SEQ ID NO: 553839 - RNA, 19 nt, Artificial Sequence
  Description of Artificial Sequence: Synthetic oligonucleotide
  Sense strand starting at position 2290 of SEQ ID NO: 318324
uuauauguccuccggaaac

SEQ ID NO: 553840 - RNA, 19 nt, Artificial Sequence
  Description of Artificial Sequence: Synthetic oligonucleotide
  Antisense strand to SEQ ID NO: 553839
guuuccggaggacauauaa

SEQ ID NO: 553841 - RNA, 19 nt, Artificial Sequence
  Description of Artificial Sequence: Synthetic oligonucleotide
  Sense strand starting at position 2292 of SEQ ID NO: 318324
auauguccuccggaaacaa

SEQ ID NO: 553842 - RNA, 19 nt, Artificial Sequence
  Description of Artificial Sequence: Synthetic oligonucleotide
  Antisense strand to SEQ ID NO: 553841
uuguuuccggaggacauau

SEQ ID NO: 553843 - RNA, 19 nt, Artificial Sequence
  Description of Artificial Sequence: Synthetic oligonucleotide
  Sense strand starting at position 2379 of SEQ ID NO: 318324
uucucuuuaguuugauaug

SEQ ID NO: 553844 - RNA, 19 nt, Artificial Sequence
  Description of Artificial Sequence: Synthetic oligonucleotide
  Antisense strand to SEQ ID NO: 553843
cauaucaaacuaaagagaa

SEQ ID NO: 553845 - RNA, 19 nt, Artificial Sequence
  Description of Artificial Sequence: Synthetic oligonucleotide
  Sense strand starting at position 2456 of SEQ ID NO: 318324
cuuaguuguggugaauaca

SEQ ID NO: 553846 - RNA, 19 nt, Artificial Sequence
  Description of Artificial Sequence: Synthetic oligonucleotide
  Antisense strand to SEQ ID NO: 553845
uguauucaccacaacuaag

SEQ ID NO: 553847 - RNA, 19 nt, Artificial Sequence
  Description of Artificial Sequence: Synthetic oligonucleotide
  Sense strand starting at position 2459 of SEQ ID NO: 318324
aguuguggugaauacagaa

SEQ ID NO: 553848 - RNA, 19 nt, Artificial Sequence
  Description of Artificial Sequence: Synthetic oligonucleotide
  Antisense strand to SEQ ID NO: 553847
uucuguauucaccacaacu

SEQ ID NO: 553849 - RNA, 19 nt, Artificial Sequence
  Description of Artificial Sequence: Synthetic oligonucleotide
  Sense strand starting at position 2508 of SEQ ID NO: 318324
uuuguaaucuuucugagaa

SEQ ID NO: 553850 - RNA, 19 nt, Artificial Sequence
  Description of Artificial Sequence: Synthetic oligonucleotide
  Antisense strand to SEQ ID NO: 553849
uucucagaaagauuacaaa

SEQ ID NO: 553851 - RNA, 19 nt, Artificial Sequence
  Description of Artificial Sequence: Synthetic oligonucleotide
  Sense strand starting at position 2586 of SEQ ID NO: 318324
gacuuuccuuaggugguaa

SEQ ID NO: 553852 - RNA, 19 nt, Artificial Sequence
  Description of Artificial Sequence: Synthetic oligonucleotide
  Antisense strand to SEQ ID NO: 553851
uuaccaccuaaggaaaguc

SEQ ID NO: 553853 - RNA, 19 nt, Artificial Sequence
  Description of Artificial Sequence: Synthetic oligonucleotide
  Sense strand starting at position 2638 of SEQ ID NO: 318324
aguccucucagaggauaug

SEQ ID NO: 553854 - RNA, 19 nt, Artificial Sequence
  Description of Artificial Sequence: Synthetic oligonucleotide
  Antisense strand to SEQ ID NO: 553853
cauauccucugagaggacu

SEQ ID NO: 553855 - RNA, 19 nt, Artificial Sequence
  Description of Artificial Sequence: Synthetic oligonucleotide
  Sense strand starting at position 2677 of SEQ ID NO: 318324
ugggacauacuuugauagu

SEQ ID NO: 553856 - RNA, 19 nt, Artificial Sequence
  Description of Artificial Sequence: Synthetic oligonucleotide
  Antisense strand to SEQ ID NO: 553855
acuaucaaaguauguccca

SEQ ID NO: 553857 - RNA, 19 nt, Artificial Sequence
  Description of Artificial Sequence: Synthetic oligonucleotide
  Sense strand starting at position 2734 of SEQ ID NO: 318324
guagcaaggaauugugaac

SEQ ID NO: 553858 - RNA, 19 nt, Artificial Sequence
  Description of Artificial Sequence: Synthetic oligonucleotide
  Antisense strand to SEQ ID NO: 553857
guucacaauuccuugcuac

SEQ ID NO: 553859 - RNA, 19 nt, Artificial Sequence
  Description of Artificial Sequence: Synthetic oligonucleotide
  Sense strand starting at position 2741 of SEQ ID NO: 318324
ggaauugugaacugcuaga

SEQ ID NO: 553860 - RNA, 19 nt, Artificial Sequence
  Description of Artificial Sequence: Synthetic oligonucleotide
  Antisense strand to SEQ ID NO: 553859
ucuagcaguucacaauucc

SEQ ID NO: 553861 - RNA, 19 nt, Artificial Sequence
  Description of Artificial Sequence: Synthetic oligonucleotide
  Sense strand starting at position 2746 of SEQ ID NO: 318324
ugugaacugcuagaaagua

SEQ ID NO: 553862 - RNA, 19 nt, Artificial Sequence
  Description of Artificial Sequence: Synthetic oligonucleotide
  Antisense strand to SEQ ID NO: 553861
uacuuucuagcaguucaca

SEQ ID NO: 553863 - RNA, 19 nt, Artificial Sequence
  Description of Artificial Sequence: Synthetic oligonucleotide
  Sense strand starting at position 2960 of SEQ ID NO: 318324
aagacagaaugagagauau

SEQ ID NO: 553864 - RNA, 19 nt, Artificial Sequence
  Description of Artificial Sequence: Synthetic oligonucleotide
  Antisense strand to SEQ ID NO: 553863
auaucucucauucugucuu

SEQ ID NO: 553865 - RNA, 19 nt, Artificial Sequence
  Description of Artificial Sequence: Synthetic oligonucleotide
  Sense strand starting at position 3054 of SEQ ID NO: 318324
ugaagaaaucagugucuca

SEQ ID NO: 553866 - RNA, 19 nt, Artificial Sequence
  Description of Artificial Sequence: Synthetic oligonucleotide
  Antisense strand to SEQ ID NO: 553865
ugagacacugauuucuuca

SEQ ID NO: 553867 - RNA, 19 nt, Artificial Sequence
  Description of Artificial Sequence: Synthetic oligonucleotide
  Sense strand starting at position 3057 of SEQ ID NO: 318324
agaaaucagugucucaaga

SEQ ID NO: 553868 - RNA, 19 nt, Artificial Sequence
  Description of Artificial Sequence: Synthetic oligonucleotide
  Antisense strand to SEQ ID NO: 553867
ucuugagacacugauuucu

SEQ ID NO: 553869 - RNA, 19 nt, Artificial Sequence
  Description of Artificial Sequence: Synthetic oligonucleotide
  Sense strand starting at position 3064 of SEQ ID NO: 318324
agugucucaagauguauag

SEQ ID NO: 553870 - RNA, 19 nt, Artificial Sequence
  Description of Artificial Sequence: Synthetic oligonucleotide
  Antisense strand to SEQ ID NO: 553869
cuauacaucuugagacacu

SEQ ID NO: 553871 - RNA, 19 nt, Artificial Sequence
  Description of Artificial Sequence: Synthetic oligonucleotide
  Sense strand starting at position 3092 of SEQ ID NO: 318324
uagagauuauagucccaga

SEQ ID NO: 553872 - RNA, 19 nt, Artificial Sequence
  Description of Artificial Sequence: Synthetic oligonucleotide
  Antisense strand to SEQ ID NO: 553871
ucugggacuauaaucucua

SEQ ID NO: 553873 - RNA, 19 nt, Artificial Sequence
  Description of Artificial Sequence: Synthetic oligonucleotide
  Sense strand starting at position 3213 of SEQ ID NO: 318324
ggagauaguuggaauaggu

SEQ ID NO: 553874 - RNA, 19 nt, Artificial Sequence
  Description of Artificial Sequence: Synthetic oligonucleotide
  Antisense strand to SEQ ID NO: 553873
accuauuccaacuaucucc

SEQ ID NO: 553875 - RNA, 19 nt, Artificial Sequence
  Description of Artificial Sequence: Synthetic oligonucleotide
  Sense strand starting at position 3222 of SEQ ID NO: 318324
uggaauaggugcuuggaaa

SEQ ID NO: 553876 - RNA, 19 nt, Artificial Sequence
  Description of Artificial Sequence: Synthetic oligonucleotide
  Antisense strand to SEQ ID NO: 553875
uuuccaagcaccuauucca

SEQ ID NO: 553877 - RNA, 19 nt, Artificial Sequence
  Description of Artificial Sequence: Synthetic oligonucleotide
  Sense strand starting at position 3223 of SEQ ID NO: 318324
ggaauaggugcuuggaaac

SEQ ID NO: 553878 - RNA, 19 nt, Artificial Sequence
  Description of Artificial Sequence: Synthetic oligonucleotide
  Antisense strand to SEQ ID NO: 553877
guuuccaagcaccuauucc

SEQ ID NO: 553879 - RNA, 19 nt, Artificial Sequence
  Description of Artificial Sequence: Synthetic oligonucleotide
  Sense strand starting at position 3236 of SEQ ID NO: 318324
ggaaacuaccaaugguauc

SEQ ID NO: 553880 - RNA, 19 nt, Artificial Sequence
  Description of Artificial Sequence: Synthetic oligonucleotide
  Antisense strand to SEQ ID NO: 553879
gauaccauugguaguuucc

SEQ ID NO: 553881 - RNA, 19 nt, Artificial Sequence
  Description of Artificial Sequence: Synthetic oligonucleotide
  Sense strand starting at position 3246 of SEQ ID NO: 318324
aaugguauccacuguuaga

SEQ ID NO: 553882 - RNA, 19 nt, Artificial Sequence
  Description of Artificial Sequence: Synthetic oligonucleotide
  Antisense strand to SEQ ID NO: 553881
ucuaacaguggauaccauu

SEQ ID NO: 553883 - RNA, 19 nt, Artificial Sequence
  Description of Artificial Sequence: Synthetic oligonucleotide
  Sense strand starting at position 3372 of SEQ ID NO: 318324
auuaucagugcagaagagu

SEQ ID NO: 553884 - RNA, 19 nt, Artificial Sequence
  Description of Artificial Sequence: Synthetic oligonucleotide
  Antisense strand to SEQ ID NO: 553883
acucuucugcacugauaau

SEQ ID NO: 553885 - RNA, 19 nt, Artificial Sequence
  Description of Artificial Sequence: Synthetic oligonucleotide
  Sense strand starting at position 3394 of SEQ ID NO: 318324
aauugaauaguauguggau

SEQ ID NO: 553886 - RNA, 19 nt, Artificial Sequence
  Description of Artificial Sequence: Synthetic oligonucleotide
  Antisense strand to SEQ ID NO: 553885
auccacauacuauucaauu

SEQ ID NO: 553887 - RNA, 19 nt, Artificial Sequence
  Description of Artificial Sequence: Synthetic oligonucleotide
  Sense strand starting at position 3395 of SEQ ID NO: 318324
auugaauaguauguggauu

SEQ ID NO: 553888 - RNA, 19 nt, Artificial Sequence
  Description of Artificial Sequence: Synthetic oligonucleotide
  Antisense strand to SEQ ID NO: 553887
aauccacauacuauucaau

SEQ ID NO: 553889 - RNA, 19 nt, Artificial Sequence
  Description of Artificial Sequence: Synthetic oligonucleotide
  Sense strand starting at position 3401 of SEQ ID NO: 318324
uaguauguggauugacuau

SEQ ID NO: 553890 - RNA, 19 nt, Artificial Sequence
  Description of Artificial Sequence: Synthetic oligonucleotide
  Antisense strand to SEQ ID NO: 553889
auagucaauccacauacua

SEQ ID NO: 553891 - RNA, 19 nt, Artificial Sequence
  Description of Artificial Sequence: Synthetic oligonucleotide
  Sense strand starting at position 3658 of SEQ ID NO: 318324
ggaggaaccagguguauaa

SEQ ID NO: 553892 - RNA, 19 nt, Artificial Sequence
  Description of Artificial Sequence: Synthetic oligonucleotide
  Antisense strand to SEQ ID NO: 553891
uuauacaccugguuccucc

SEQ ID NO: 553893 - RNA, 19 nt, Artificial Sequence
  Description of Artificial Sequence: Synthetic oligonucleotide
  Sense strand starting at position 3668 of SEQ ID NO: 318324
gguguauaagaaggcugaa

SEQ ID NO: 553894 - RNA, 19 nt, Artificial Sequence
  Description of Artificial Sequence: Synthetic oligonucleotide
  Antisense strand to SEQ ID NO: 553893
uucagccuucuuauacacc

SEQ ID NO: 553895 - RNA, 19 nt, Artificial Sequence
  Description of Artificial Sequence: Synthetic oligonucleotide
  Sense strand starting at position 3707 of SEQ ID NO: 318324
agaaguuauuaguugaaag

SEQ ID NO: 553896 - RNA, 19 nt, Artificial Sequence
  Description of Artificial Sequence: Synthetic oligonucleotide
  Antisense strand to SEQ ID NO: 553895
cuuucaacuaauaacuucu

SEQ ID NO: 553897 - RNA, 19 nt, Artificial Sequence
  Description of Artificial Sequence: Synthetic oligonucleotide
  Sense strand starting at position 3717 of SEQ ID NO: 318324
aguugaaaguauguaugua

SEQ ID NO: 553898 - RNA, 19 nt, Artificial Sequence
  Description of Artificial Sequence: Synthetic oligonucleotide
  Antisense strand to SEQ ID NO: 553897
uacauacauacuuucaacu

SEQ ID NO: 553899 - RNA, 19 nt, Artificial Sequence
  Description of Artificial Sequence: Synthetic oligonucleotide
  Sense strand starting at position 3718 of SEQ ID NO: 318324
guugaaaguauguauguag

SEQ ID NO: 553900 - RNA, 19 nt, Artificial Sequence
  Description of Artificial Sequence: Synthetic oligonucleotide
  Antisense strand to SEQ ID NO: 553899
cuacauacauacuuucaac

SEQ ID NO: 553901 - RNA, 19 nt, Artificial Sequence
  Description of Artificial Sequence: Synthetic oligonucleotide
  Sense strand starting at position 3721 of SEQ ID NO: 318324
gaaaguauguauguaggau

SEQ ID NO: 553902 - RNA, 19 nt, Artificial Sequence
  Description of Artificial Sequence: Synthetic oligonucleotide
  Antisense strand to SEQ ID NO: 553901
auccuacauacauacuuuc

SEQ ID NO: 553903 - RNA, 19 nt, Artificial Sequence
  Description of Artificial Sequence: Synthetic oligonucleotide
  Sense strand starting at position 3727 of SEQ ID NO: 318324
auguauguaggauaguuga

SEQ ID NO: 553904 - RNA, 19 nt, Artificial Sequence
  Description of Artificial Sequence: Synthetic oligonucleotide
  Antisense strand to SEQ ID NO: 553903
ucaacuauccuacauacau

SEQ ID NO: 553905 - RNA, 19 nt, Artificial Sequence
  Description of Artificial Sequence: Synthetic oligonucleotide
  Sense strand starting at position 3951 of SEQ ID NO: 318324
ugagacuccuagccaugau

SEQ ID NO: 553906 - RNA, 19 nt, Artificial Sequence
  Description of Artificial Sequence: Synthetic oligonucleotide
  Antisense strand to SEQ ID NO: 553905
aucauggcuaggagucuca

SEQ ID NO: 553907 - RNA, 19 nt, Artificial Sequence
  Description of Artificial Sequence: Synthetic oligonucleotide
  Sense strand starting at position 2162 of SEQ ID NO: 318325
auuccuucuguugaaguaa

SEQ ID NO: 553908 - RNA, 19 nt, Artificial Sequence
  Description of Artificial Sequence: Synthetic oligonucleotide
  Antisense strand to SEQ ID NO: 553907
uuacuucaacagaaggaau

SEQ ID NO: 553909 - RNA, 19 nt, Artificial Sequence
  Description of Artificial Sequence: Synthetic oligonucleotide
  Sense strand starting at position 2221 of SEQ ID NO: 318325
ucuuuauaguuugugauga

SEQ ID NO: 553910 - RNA, 19 nt, Artificial Sequence
  Description of Artificial Sequence: Synthetic oligonucleotide
  Antisense strand to SEQ ID NO: 553909
ucaucacaaacuauaaaga

SEQ ID NO: 553911 - RNA, 19 nt, Artificial Sequence
  Description of Artificial Sequence: Synthetic oligonucleotide
  Sense strand starting at position 2226 of SEQ ID NO: 318325
auaguuugugaugaugauu

SEQ ID NO: 553912 - RNA, 19 nt, Artificial Sequence
  Description of Artificial Sequence: Synthetic oligonucleotide
  Antisense strand to SEQ ID NO: 553911
aaucaucaucacaaacuau

SEQ ID NO: 553913 - RNA, 19 nt, Artificial Sequence
  Description of Artificial Sequence: Synthetic oligonucleotide
  Sense strand starting at position 2303 of SEQ ID NO: 318325
aguugugguaaacacagau

SEQ ID NO: 553914 - RNA, 19 nt, Artificial Sequence
  Description of Artificial Sequence: Synthetic oligonucleotide
  Antisense strand to SEQ ID NO: 553913
aucuguguuuaccacaacu

SEQ ID NO: 553915 - RNA, 19 nt, Artificial Sequence
  Description of Artificial Sequence: Synthetic oligonucleotide
  Sense strand starting at position 2356 of SEQ ID NO: 318325
guguuucugagacaauugu

SEQ ID NO: 553916 - RNA, 19 nt, Artificial Sequence
  Description of Artificial Sequence: Synthetic oligonucleotide
  Antisense strand to SEQ ID NO: 553915
acaauugucucagaaacac

SEQ ID NO: 553917 - RNA, 19 nt, Artificial Sequence
  Description of Artificial Sequence: Synthetic oligonucleotide
  Sense strand starting at position 2365 of SEQ ID NO: 318325
agacaauuguaagccugaa

SEQ ID NO: 553918 - RNA, 19 nt, Artificial Sequence
  Description of Artificial Sequence: Synthetic oligonucleotide
  Antisense strand to SEQ ID NO: 553917
uucaggcuuacaauugucu

SEQ ID NO: 553919 - RNA, 19 nt, Artificial Sequence
  Description of Artificial Sequence: Synthetic oligonucleotide
  Sense strand starting at position 2389 of SEQ ID NO: 318325
caggguauaagugauuguu

SEQ ID NO: 553920 - RNA, 19 nt, Artificial Sequence
  Description of Artificial Sequence: Synthetic oligonucleotide
  Antisense strand to SEQ ID NO: 553919
aacaaucacuuauacccug

SEQ ID NO: 553921 - RNA, 19 nt, Artificial Sequence
  Description of Artificial Sequence: Synthetic oligonucleotide
  Sense strand starting at position 2391 of SEQ ID NO: 318325
ggguauaagugauuguuaa

SEQ ID NO: 553922 - RNA, 19 nt, Artificial Sequence
  Description of Artificial Sequence: Synthetic oligonucleotide
  Antisense strand to SEQ ID NO: 553921
uuaacaaucacuuauaccc

SEQ ID NO: 553923 - RNA, 19 nt, Artificial Sequence
  Description of Artificial Sequence: Synthetic oligonucleotide
  Sense strand starting at position 2392 of SEQ ID NO: 318325
gguauaagugauuguuaag

SEQ ID NO: 553924 - RNA, 19 nt, Artificial Sequence
  Description of Artificial Sequence: Synthetic oligonucleotide
  Antisense strand to SEQ ID NO: 553923
cuuaacaaucacuuauacc

SEQ ID NO: 553925 - RNA, 19 nt, Artificial Sequence
  Description of Artificial Sequence: Synthetic oligonucleotide
  Sense strand starting at position 2398 of SEQ ID NO: 318325
agugauuguuaagcugaau

SEQ ID NO: 553926 - RNA, 19 nt, Artificial Sequence
  Description of Artificial Sequence: Synthetic oligonucleotide
  Antisense strand to SEQ ID NO: 553925
auucagcuuaacaaucacu

SEQ ID NO: 553927 - RNA, 19 nt, Artificial Sequence
  Description of Artificial Sequence: Synthetic oligonucleotide
  Sense strand starting at position 2404 of SEQ ID NO: 318325
uguuaagcugaaugaaauu

SEQ ID NO: 553928 - RNA, 19 nt, Artificial Sequence
  Description of Artificial Sequence: Synthetic oligonucleotide
  Antisense strand to SEQ ID NO: 553927
aauuucauucagcuuaaca

SEQ ID NO: 553929 - RNA, 19 nt, Artificial Sequence
  Description of Artificial Sequence: Synthetic oligonucleotide
  Sense strand starting at position 2520 of SEQ ID NO: 318325
gcauauauaggucaacaca

SEQ ID NO: 553930 - RNA, 19 nt, Artificial Sequence
  Description of Artificial Sequence: Synthetic oligonucleotide
  Antisense strand to SEQ ID NO: 553929
uguguugaccuauauaugc

SEQ ID NO: 553931 - RNA, 19 nt, Artificial Sequence
  Description of Artificial Sequence: Synthetic oligonucleotide
  Sense strand starting at position 2548 of SEQ ID NO: 318325
aaaggcacuucuguagauu

SEQ ID NO: 553932 - RNA, 19 nt, Artificial Sequence
  Description of Artificial Sequence: Synthetic oligonucleotide
  Antisense strand to SEQ ID NO: 553931
aaucuacagaagugccuuu

SEQ ID NO: 553933 - RNA, 19 nt, Artificial Sequence
  Description of Artificial Sequence: Synthetic oligonucleotide
  Sense strand starting at position 2568 of SEQ ID NO: 318325
ccuuaauagcaaugaauug

SEQ ID NO: 553934 - RNA, 19 nt, Artificial Sequence
  Description of Artificial Sequence: Synthetic oligonucleotide
  Antisense strand to SEQ ID NO: 553933
caauucauugcuauuaagg

SEQ ID NO: 553935 - RNA, 19 nt, Artificial Sequence
  Description of Artificial Sequence: Synthetic oligonucleotide
  Sense strand starting at position 2693 of SEQ ID NO: 318325
gcaugagcaaguuaguuua

SEQ ID NO: 553936 - RNA, 19 nt, Artificial Sequence
  Description of Artificial Sequence: Synthetic oligonucleotide
  Antisense strand to SEQ ID NO: 553935
uaaacuaacuugcucaugc

SEQ ID NO: 553937 - RNA, 19 nt, Artificial Sequence
  Description of Artificial Sequence: Synthetic oligonucleotide
  Sense strand starting at position 2695 of SEQ ID NO: 318325
augagcaaguuaguuuaau

SEQ ID NO: 553938 - RNA, 19 nt, Artificial Sequence
  Description of Artificial Sequence: Synthetic oligonucleotide
  Antisense strand to SEQ ID NO: 553937
auuaaacuaacuugcucau

SEQ ID NO: 553939 - RNA, 19 nt, Artificial Sequence
  Description of Artificial Sequence: Synthetic oligonucleotide
  Sense strand starting at position 2819 of SEQ ID NO: 318325
guaagagucuaucccuaaa

SEQ ID NO: 553940 - RNA, 19 nt, Artificial Sequence
  Description of Artificial Sequence: Synthetic oligonucleotide
  Antisense strand to SEQ ID NO: 553939
uuuagggauagacucuuac

SEQ ID NO: 553941 - RNA, 19 nt, Artificial Sequence
  Description of Artificial Sequence: Synthetic oligonucleotide
  Sense strand starting at position 3042 of SEQ ID NO: 318325
aguaccucauugguacaaa

SEQ ID NO: 553942 - RNA, 19 nt, Artificial Sequence
  Description of Artificial Sequence: Synthetic oligonucleotide
  Antisense strand to SEQ ID NO: 553941
uuuguaccaaugagguacu

SEQ ID NO: 553943 - RNA, 19 nt, Artificial Sequence
  Description of Artificial Sequence: Synthetic oligonucleotide
  Sense strand starting at position 3063 of SEQ ID NO: 318325
gagggagacuguuugcaac

SEQ ID NO: 553944 - RNA, 19 nt, Artificial Sequence
  Description of Artificial Sequence: Synthetic oligonucleotide
  Antisense strand to SEQ ID NO: 553943
guugcaaacagucucccuc

SEQ ID NO: 553945 - RNA, 19 nt, Artificial Sequence
  Description of Artificial Sequence: Synthetic oligonucleotide
  Sense strand starting at position 3084 of SEQ ID NO: 318325
augcuaagggcucaucagu

SEQ ID NO: 553946 - RNA, 19 nt, Artificial Sequence
  Description of Artificial Sequence: Synthetic oligonucleotide
  Antisense strand to SEQ ID NO: 553945
acugaugagcccuuagcau

SEQ ID NO: 553947 - RNA, 19 nt, Artificial Sequence
  Description of Artificial Sequence: Synthetic oligonucleotide
  Sense strand starting at position 3089 of SEQ ID NO: 318325
aagggcucaucagugauau

SEQ ID NO: 553948 - RNA, 19 nt, Artificial Sequence
  Description of Artificial Sequence: Synthetic oligonucleotide
  Antisense strand to SEQ ID NO: 553947
auaucacugaugagcccuu

SEQ ID NO: 553949 - RNA, 19 nt, Artificial Sequence
  Description of Artificial Sequence: Synthetic oligonucleotide
  Sense strand starting at position 3090 of SEQ ID NO: 318325
agggcucaucagugauauu

SEQ ID NO: 553950 - RNA, 19 nt, Artificial Sequence
  Description of Artificial Sequence: Synthetic oligonucleotide
  Antisense strand to SEQ ID NO: 553949
aauaucacugaugagcccu

SEQ ID NO: 553951 - RNA, 19 nt, Artificial Sequence
  Description of Artificial Sequence: Synthetic oligonucleotide
  Sense strand starting at position 3091 of SEQ ID NO: 318325
gggcucaucagugauauuc

SEQ ID NO: 553952 - RNA, 19 nt, Artificial Sequence
  Description of Artificial Sequence: Synthetic oligonucleotide
  Antisense strand to SEQ ID NO: 553951
gaauaucacugaugagccc

SEQ ID NO: 553953 - RNA, 19 nt, Artificial Sequence
  Description of Artificial Sequence: Synthetic oligonucleotide
  Sense strand starting at position 3122 of SEQ ID NO: 318325
cuuaaagugcacuaagaau

SEQ ID NO: 553954 - RNA, 19 nt, Artificial Sequence
  Description of Artificial Sequence: Synthetic oligonucleotide
  Antisense strand to SEQ ID NO: 553953
auucuuagugcacuuuaag

SEQ ID NO: 553955 - RNA, 19 nt, Artificial Sequence
  Description of Artificial Sequence: Synthetic oligonucleotide
  Sense strand starting at position 3212 of SEQ ID NO: 318325
cuggauacaugguugaaau

SEQ ID NO: 553956 - RNA, 19 nt, Artificial Sequence
  Description of Artificial Sequence: Synthetic oligonucleotide
  Antisense strand to SEQ ID NO: 553955
auuucaaccauguauccag

SEQ ID NO: 553957 - RNA, 19 nt, Artificial Sequence
  Description of Artificial Sequence: Synthetic oligonucleotide
  Sense strand starting at position 3456 of SEQ ID NO: 318325
aaguuccugcauugaagau

SEQ ID NO: 553958 - RNA, 19 nt, Artificial Sequence
  Description of Artificial Sequence: Synthetic oligonucleotide
  Antisense strand to SEQ ID NO: 553957
aucuucaaugcaggaacuu

SEQ ID NO: 553959 - RNA, 19 nt, Artificial Sequence
  Description of Artificial Sequence: Synthetic oligonucleotide
  Sense strand starting at position 3468 of SEQ ID NO: 318325
ugaagauacucacaagaaa

SEQ ID NO: 553960 - RNA, 19 nt, Artificial Sequence
  Description of Artificial Sequence: Synthetic oligonucleotide
  Antisense strand to SEQ ID NO: 553959
uuucuugugaguaucuuca

SEQ ID NO: 553961 - RNA, 19 nt, Artificial Sequence
  Description of Artificial Sequence: Synthetic oligonucleotide
  Sense strand starting at position 3561 of SEQ ID NO: 318325
aaguuauuaguuggaagua

SEQ ID NO: 553962 - RNA, 19 nt, Artificial Sequence
  Description of Artificial Sequence: Synthetic oligonucleotide
  Antisense strand to SEQ ID NO: 553961
uacuuccaacuaauaacuu

SEQ ID NO: 553963 - RNA, 19 nt, Artificial Sequence
  Description of Artificial Sequence: Synthetic oligonucleotide
  Sense strand starting at position 3570 of SEQ ID NO: 318325
guuggaaguauguguagag

SEQ ID NO: 553964 - RNA, 19 nt, Artificial Sequence
  Description of Artificial Sequence: Synthetic oligonucleotide
  Antisense strand to SEQ ID NO: 553963
cucuacacauacuuccaac

SEQ ID NO: 553965 - RNA, 19 nt, Artificial Sequence
  Description of Artificial Sequence: Synthetic oligonucleotide
  Sense strand starting at position 3577 of SEQ ID NO: 318325
guauguguagaggauaauu

SEQ ID NO: 553966 - RNA, 19 nt, Artificial Sequence
  Description of Artificial Sequence: Synthetic oligonucleotide
  Antisense strand to SEQ ID NO: 553965
aauuauccucuacacauac

SEQ ID NO: 553967 - RNA, 19 nt, Artificial Sequence
  Description of Artificial Sequence: Synthetic oligonucleotide
  Sense strand starting at position 3657 of SEQ ID NO: 318325
gaaaguuuauucucuggag

SEQ ID NO: 553968 - RNA, 19 nt, Artificial Sequence
  Description of Artificial Sequence: Synthetic oligonucleotide
  Antisense strand to SEQ ID NO: 553967
cuccagagaauaaacuuuc

SEQ ID NO: 553969 - RNA, 19 nt, Artificial Sequence
  Description of Artificial Sequence: Synthetic oligonucleotide
  Sense strand starting at position 3658 of SEQ ID NO: 318325
aaaguuuauucucuggaga

SEQ ID NO: 553970 - RNA, 19 nt, Artificial Sequence
  Description of Artificial Sequence: Synthetic oligonucleotide
  Antisense strand to SEQ ID NO: 553969
ucuccagagaauaaacuuu

SEQ ID NO: 553971 - RNA, 19 nt, Artificial Sequence
  Description of Artificial Sequence: Synthetic oligonucleotide
  Sense strand starting at position 3672 of SEQ ID NO: 318325
ggagaaauuuaaugggacu

SEQ ID NO: 553972 - RNA, 19 nt, Artificial Sequence
  Description of Artificial Sequence: Synthetic oligonucleotide
  Antisense strand to SEQ ID NO: 553971
agucccauuaaauuucucc

SEQ ID NO: 553973 - RNA, 19 nt, Artificial Sequence
  Description of Artificial Sequence: Synthetic oligonucleotide
  Sense strand starting at position 3684 of SEQ ID NO: 318325
ugggacuuucucuagucuu

SEQ ID NO: 553974 - RNA, 19 nt, Artificial Sequence
  Description of Artificial Sequence: Synthetic oligonucleotide
  Antisense strand to SEQ ID NO: 553973
aagacuagagaaaguccca

SEQ ID NO: 553975 - RNA, 19 nt, Artificial Sequence
  Description of Artificial Sequence: Synthetic oligonucleotide
  Sense strand starting at position 3725 of SEQ ID NO: 318325
acaagugugaggugucaaa

SEQ ID NO: 553976 - RNA, 19 nt, Artificial Sequence
  Description of Artificial Sequence: Synthetic oligonucleotide
  Antisense strand to SEQ ID NO: 553975
uuugacaccucacacuugu

SEQ ID NO: 553977 - RNA, 19 nt, Artificial Sequence
  Description of Artificial Sequence: Synthetic oligonucleotide
  Sense strand starting at position 3812 of SEQ ID NO: 318325
auacucuuagacuguagga

SEQ ID NO: 553978 - RNA, 19 nt, Artificial Sequence
  Description of Artificial Sequence: Synthetic oligonucleotide
  Antisense strand to SEQ ID NO: 553977
uccuacagucuaagaguau

SEQ ID NO: 553979 - RNA, 19 nt, Artificial Sequence
  Description of Artificial Sequence: Synthetic oligonucleotide
  Sense strand starting at position 3868 of SEQ ID NO: 318325
guguauauuguagaauucu

SEQ ID NO: 553980 - RNA, 19 nt, Artificial Sequence
  Description of Artificial Sequence: Synthetic oligonucleotide
  Antisense strand to SEQ ID NO: 553979
agaauucuacaauauacac

SEQ ID NO: 553981 - RNA, 19 nt, Artificial Sequence
  Description of Artificial Sequence: Synthetic oligonucleotide
  Sense strand starting at position 3877 of SEQ ID NO: 318325
guagaauucuaaccuggag

SEQ ID NO: 553982 - RNA, 19 nt, Artificial Sequence
  Description of Artificial Sequence: Synthetic oligonucleotide
  Antisense strand to SEQ ID NO: 553981
cuccagguuagaauucuac

SEQ ID NO: 553983 - RNA, 19 nt, Artificial Sequence
  Description of Artificial Sequence: Synthetic oligonucleotide
  Sense strand starting at position 3946 of SEQ ID NO: 318325
guaauagacuuauccuagc

SEQ ID NO: 553984 - RNA, 19 nt, Artificial Sequence
  Description of Artificial Sequence: Synthetic oligonucleotide
  Antisense strand to SEQ ID NO: 553983
gcuaggauaagucuauuac

SEQ ID NO: 553985 - RNA, 19 nt, Artificial Sequence
  Description of Artificial Sequence: Synthetic oligonucleotide
  Sense strand starting at position 3957 of SEQ ID NO: 318325
auccuagcaugguuauauu

SEQ ID NO: 553986 - RNA, 19 nt, Artificial Sequence
  Description of Artificial Sequence: Synthetic oligonucleotide
  Antisense strand to SEQ ID NO: 553985
aauauaaccaugcuaggau

SEQ ID NO: 553987 - RNA, 19 nt, Artificial Sequence
  Description of Artificial Sequence: Synthetic oligonucleotide
  Sense strand starting at position 2072 of SEQ ID NO: 318326
guggaaugauaauggaugu

SEQ ID NO: 553988 - RNA, 19 nt, Artificial Sequence
  Description of Artificial Sequence: Synthetic oligonucleotide
  Antisense strand to SEQ ID NO: 553987
acauccauuaucauuccac

SEQ ID NO: 553989 - RNA, 19 nt, Artificial Sequence
  Description of Artificial Sequence: Synthetic oligonucleotide
  Sense strand starting at position 2121 of SEQ ID NO: 318326
gagacuauguaagguuaca

SEQ ID NO: 553990 - RNA, 19 nt, Artificial Sequence
  Description of Artificial Sequence: Synthetic oligonucleotide
  Antisense strand to SEQ ID NO: 553989
uguaaccuuacauagucuc

SEQ ID NO: 553991 - RNA, 19 nt, Artificial Sequence
  Description of Artificial Sequence: Synthetic oligonucleotide
  Sense strand starting at position 2146 of SEQ ID NO: 318326
ccguuaauaucgccggacu

SEQ ID NO: 553992 - RNA, 19 nt, Artificial Sequence
  Description of Artificial Sequence: Synthetic oligonucleotide
  Antisense strand to SEQ ID NO: 553991
aguccggcgauauuaacgg

SEQ ID NO: 553993 - RNA, 19 nt, Artificial Sequence
  Description of Artificial Sequence: Synthetic oligonucleotide
  Sense strand starting at position 2147 of SEQ ID NO: 318326
cguuaauaucgccggacuu

SEQ ID NO: 553994 - RNA, 19 nt, Artificial Sequence
  Description of Artificial Sequence: Synthetic oligonucleotide
  Antisense strand to SEQ ID NO: 553993
aaguccggcgauauuaacg

SEQ ID NO: 553995 - RNA, 19 nt, Artificial Sequence
  Description of Artificial Sequence: Synthetic oligonucleotide
  Sense strand starting at position 2148 of SEQ ID NO: 318326
guuaauaucgccggacuuu

SEQ ID NO: 553996 - RNA, 19 nt, Artificial Sequence
  Description of Artificial Sequence: Synthetic oligonucleotide
  Antisense strand to SEQ ID NO: 553995
aaaguccggcgauauuaac

SEQ ID NO: 553997 - RNA, 19 nt, Artificial Sequence
  Description of Artificial Sequence: Synthetic oligonucleotide
  Sense strand starting at position 2149 of SEQ ID NO: 318326
uuaauaucgccggacuuua

SEQ ID NO: 553998 - RNA, 19 nt, Artificial Sequence
  Description of Artificial Sequence: Synthetic oligonucleotide
  Antisense strand to SEQ ID NO: 553997
uaaaguccggcgauauuaa

SEQ ID NO: 553999 - RNA, 19 nt, Artificial Sequence
  Description of Artificial Sequence: Synthetic oligonucleotide
  Sense strand starting at position 2158 of SEQ ID NO: 318326
ccggacuuuagugagcaga

SEQ ID NO: 554000 - RNA, 19 nt, Artificial Sequence
  Description of Artificial Sequence: Synthetic oligonucleotide
  Antisense strand to SEQ ID NO: 553999
ucugcucacuaaaguccgg

SEQ ID NO: 554001 - RNA, 19 nt, Artificial Sequence
  Description of Artificial Sequence: Synthetic oligonucleotide
  Sense strand starting at position 2160 of SEQ ID NO: 318326
ggacuuuagugagcagaca

SEQ ID NO: 554002 - RNA, 19 nt, Artificial Sequence
  Description of Artificial Sequence: Synthetic oligonucleotide
  Antisense strand to SEQ ID NO: 554001
ugucugcucacuaaagucc

SEQ ID NO: 554003 - RNA, 19 nt, Artificial Sequence
  Description of Artificial Sequence: Synthetic oligonucleotide
  Sense strand starting at position 2252 of SEQ ID NO: 318326
guaauagucuagcuuggca

SEQ ID NO: 554004 - RNA, 19 nt, Artificial Sequence
  Description of Artificial Sequence: Synthetic oligonucleotide
  Antisense strand to SEQ ID NO: 554003
ugccaagcuagacuauuac

SEQ ID NO: 554005 - RNA, 19 nt, Artificial Sequence
  Description of Artificial Sequence: Synthetic oligonucleotide
  Sense strand starting at position 2254 of SEQ ID NO: 318326
aauagucuagcuuggcaaa

SEQ ID NO: 554006 - RNA, 19 nt, Artificial Sequence
  Description of Artificial Sequence: Synthetic oligonucleotide
  Antisense strand to SEQ ID NO: 554005
uuugccaagcuagacuauu

SEQ ID NO: 554007 - RNA, 19 nt, Artificial Sequence
  Description of Artificial Sequence: Synthetic oligonucleotide
  Sense strand starting at position 2291 of SEQ ID NO: 318326
uguaguuaucauggacaac

SEQ ID NO: 554008 - RNA, 19 nt, Artificial Sequence
  Description of Artificial Sequence: Synthetic oligonucleotide
  Antisense strand to SEQ ID NO: 554007
guuguccaugauaacuaca

SEQ ID NO: 554009 - RNA, 19 nt, Artificial Sequence
  Description of Artificial Sequence: Synthetic oligonucleotide
  Sense strand starting at position 2303 of SEQ ID NO: 318326
ggacaacauuuagaucuuu

SEQ ID NO: 554010 - RNA, 19 nt, Artificial Sequence
  Description of Artificial Sequence: Synthetic oligonucleotide
  Antisense strand to SEQ ID NO: 554009
aaagaucuaaauguugucc

SEQ ID NO: 554011 - RNA, 19 nt, Artificial Sequence
  Description of Artificial Sequence: Synthetic oligonucleotide
  Sense strand starting at position 2465 of SEQ ID NO: 318326
ccuuaaacaugaggaaucu

SEQ ID NO: 554012 - RNA, 19 nt, Artificial Sequence
  Description of Artificial Sequence: Synthetic oligonucleotide
  Antisense strand to SEQ ID NO: 554011
agauuccucauguuuaagg

SEQ ID NO: 554013 - RNA, 19 nt, Artificial Sequence
  Description of Artificial Sequence: Synthetic oligonucleotide
  Sense strand starting at position 2474 of SEQ ID NO: 318326
ugaggaaucuaaugcaaau

SEQ ID NO: 554014 - RNA, 19 nt, Artificial Sequence
  Description of Artificial Sequence: Synthetic oligonucleotide
  Antisense strand to SEQ ID NO: 554013
auuugcauuagauuccuca

SEQ ID NO: 554015 - RNA, 19 nt, Artificial Sequence
  Description of Artificial Sequence: Synthetic oligonucleotide
  Sense strand starting at position 2533 of SEQ ID NO: 318326
gcaauuugaugccaucaag

SEQ ID NO: 554016 - RNA, 19 nt, Artificial Sequence
  Description of Artificial Sequence: Synthetic oligonucleotide
  Antisense strand to SEQ ID NO: 554015
cuugauggcaucaaauugc

SEQ ID NO: 554017 - RNA, 19 nt, Artificial Sequence
  Description of Artificial Sequence: Synthetic oligonucleotide
  Sense strand starting at position 2547 of SEQ ID NO: 318326
ucaaguaacugagucuuga

SEQ ID NO: 554018 - RNA, 19 nt, Artificial Sequence
  Description of Artificial Sequence: Synthetic oligonucleotide
  Antisense strand to SEQ ID NO: 554017
ucaagacucaguuacuuga

SEQ ID NO: 554019 - RNA, 19 nt, Artificial Sequence
  Description of Artificial Sequence: Synthetic oligonucleotide
  Sense strand starting at position 2555 of SEQ ID NO: 318326
cugagucuugauggcauaa

SEQ ID NO: 554020 - RNA, 19 nt, Artificial Sequence
  Description of Artificial Sequence: Synthetic oligonucleotide
  Antisense strand to SEQ ID NO: 554019
uuaugccaucaagacucag

SEQ ID NO: 554021 - RNA, 19 nt, Artificial Sequence
  Description of Artificial Sequence: Synthetic oligonucleotide
  Sense strand starting at position 2557 of SEQ ID NO: 318326
gagucuugauggcauaaau

SEQ ID NO: 554022 - RNA, 19 nt, Artificial Sequence
  Description of Artificial Sequence: Synthetic oligonucleotide
  Antisense strand to SEQ ID NO: 554021
auuuaugccaucaagacuc

SEQ ID NO: 554023 - RNA, 19 nt, Artificial Sequence
  Description of Artificial Sequence: Synthetic oligonucleotide
  Sense strand starting at position 2669 of SEQ ID NO: 318326
uagagagguuauguccaau

SEQ ID NO: 554024 - RNA, 19 nt, Artificial Sequence
  Description of Artificial Sequence: Synthetic oligonucleotide
  Antisense strand to SEQ ID NO: 554023
auuggacauaaccucucua

SEQ ID NO: 554025 - RNA, 19 nt, Artificial Sequence
  Description of Artificial Sequence: Synthetic oligonucleotide
  Sense strand starting at position 2706 of SEQ ID NO: 318326
aggaaaggcuggagaguuu

SEQ ID NO: 554026 - RNA, 19 nt, Artificial Sequence
  Description of Artificial Sequence: Synthetic oligonucleotide
  Antisense strand to SEQ ID NO: 554025
aaacucuccagccuuuccu

SEQ ID NO: 554027 - RNA, 19 nt, Artificial Sequence
  Description of Artificial Sequence: Synthetic oligonucleotide
  Sense strand starting at position 2713 of SEQ ID NO: 318326
gcuggagaguuugucuaaa

SEQ ID NO: 554028 - RNA, 19 nt, Artificial Sequence
  Description of Artificial Sequence: Synthetic oligonucleotide
  Antisense strand to SEQ ID NO: 554027
uuuagacaaacucuccagc

SEQ ID NO: 554029 - RNA, 19 nt, Artificial Sequence
  Description of Artificial Sequence: Synthetic oligonucleotide
  Sense strand starting at position 2715 of SEQ ID NO: 318326
uggagaguuugucuaaaua

SEQ ID NO: 554030 - RNA, 19 nt, Artificial Sequence
  Description of Artificial Sequence: Synthetic oligonucleotide
  Antisense strand to SEQ ID NO: 554029
uauuuagacaaacucucca

SEQ ID NO: 554031 - RNA, 19 nt, Artificial Sequence
  Description of Artificial Sequence: Synthetic oligonucleotide
  Sense strand starting at position 2861 of SEQ ID NO: 318326
ggaguauaaugauccucca

SEQ ID NO: 554032 - RNA, 19 nt, Artificial Sequence
  Description of Artificial Sequence: Synthetic oligonucleotide
  Antisense strand to SEQ ID NO: 554031
uggaggaucauuauacucc

SEQ ID NO: 554033 - RNA, 19 nt, Artificial Sequence
  Description of Artificial Sequence: Synthetic oligonucleotide
  Sense strand starting at position 2864 of SEQ ID NO: 318326
guauaaugauccuccaagg

SEQ ID NO: 554034 - RNA, 19 nt, Artificial Sequence
  Description of Artificial Sequence: Synthetic oligonucleotide
  Antisense strand to SEQ ID NO: 554033
ccuuggaggaucauuauac

SEQ ID NO: 554035 - RNA, 19 nt, Artificial Sequence
  Description of Artificial Sequence: Synthetic oligonucleotide
  Sense strand starting at position 3041 of SEQ ID NO: 318326
gcuuaaguacaaugccauu

SEQ ID NO: 554036 - RNA, 19 nt, Artificial Sequence
  Description of Artificial Sequence: Synthetic oligonucleotide
  Antisense strand to SEQ ID NO: 554035
aauggcauuguacuuaagc

SEQ ID NO: 554037 - RNA, 19 nt, Artificial Sequence
  Description of Artificial Sequence: Synthetic oligonucleotide
  Sense strand starting at position 3176 of SEQ ID NO: 318326
guauuugagugguagaccu

SEQ ID NO: 554038 - RNA, 19 nt, Artificial Sequence
  Description of Artificial Sequence: Synthetic oligonucleotide
  Antisense strand to SEQ ID NO: 554037
aggucuaccacucaaauac

SEQ ID NO: 554039 - RNA, 19 nt, Artificial Sequence
  Description of Artificial Sequence: Synthetic oligonucleotide
  Sense strand starting at position 3321 of SEQ ID NO: 318326
guccuuagauucuauccca

SEQ ID NO: 554040 - RNA, 19 nt, Artificial Sequence
  Description of Artificial Sequence: Synthetic oligonucleotide
  Antisense strand to SEQ ID NO: 554039
ugggauagaaucuaaggac

SEQ ID NO: 554041 - RNA, 19 nt, Artificial Sequence
  Description of Artificial Sequence: Synthetic oligonucleotide
  Sense strand starting at position 3342 of SEQ ID NO: 318326
agugauaugcaguaauacu

SEQ ID NO: 554042 - RNA, 19 nt, Artificial Sequence
  Description of Artificial Sequence: Synthetic oligonucleotide
  Antisense strand to SEQ ID NO: 554041
aguauuacugcauaucacu

SEQ ID NO: 554043 - RNA, 19 nt, Artificial Sequence
  Description of Artificial Sequence: Synthetic oligonucleotide
  Sense strand starting at position 3356 of SEQ ID NO: 318326
auacuagcuuuauuagagu

SEQ ID NO: 554044 - RNA, 19 nt, Artificial Sequence
  Description of Artificial Sequence: Synthetic oligonucleotide
  Antisense strand to SEQ ID NO: 554043
acucuaauaaagcuaguau

SEQ ID NO: 554045 - RNA, 19 nt, Artificial Sequence
  Description of Artificial Sequence: Synthetic oligonucleotide
  Sense strand starting at position 3369 of SEQ ID NO: 318326
uagaguuacuggcacuagu

SEQ ID NO: 554046 - RNA, 19 nt, Artificial Sequence
  Description of Artificial Sequence: Synthetic oligonucleotide
  Antisense strand to SEQ ID NO: 554045
acuagugccaguaacucua

SEQ ID NO: 554047 - RNA, 19 nt, Artificial Sequence
  Description of Artificial Sequence: Synthetic oligonucleotide
  Sense strand starting at position 3372 of SEQ ID NO: 318326
aguuacuggcacuaguuua

SEQ ID NO: 554048 - RNA, 19 nt, Artificial Sequence
  Description of Artificial Sequence: Synthetic oligonucleotide
  Antisense strand to SEQ ID NO: 554047
uaaacuagugccaguaacu

SEQ ID NO: 554049 - RNA, 19 nt, Artificial Sequence
  Description of Artificial Sequence: Synthetic oligonucleotide
  Sense strand starting at position 3377 of SEQ ID NO: 318326
cuggcacuaguuuauaaua

SEQ ID NO: 554050 - RNA, 19 nt, Artificial Sequence
  Description of Artificial Sequence: Synthetic oligonucleotide
  Antisense strand to SEQ ID NO: 554049
uauuauaaacuagugccag

SEQ ID NO: 554051 - RNA, 19 nt, Artificial Sequence
  Description of Artificial Sequence: Synthetic oligonucleotide
  Sense strand starting at position 3379 of SEQ ID NO: 318326
ggcacuaguuuauaauaua

SEQ ID NO: 554052 - RNA, 19 nt, Artificial Sequence
  Description of Artificial Sequence: Synthetic oligonucleotide
  Antisense strand to SEQ ID NO: 554051
uauauuauaaacuagugcc

SEQ ID NO: 554053 - RNA, 19 nt, Artificial Sequence
  Description of Artificial Sequence: Synthetic oligonucleotide
  Sense strand starting at position 3577 of SEQ ID NO: 318326
agugcaguauagguaagaa

SEQ ID NO: 554054 - RNA, 19 nt, Artificial Sequence
  Description of Artificial Sequence: Synthetic oligonucleotide
  Antisense strand to SEQ ID NO: 554053
uucuuaccuauacugcacu

SEQ ID NO: 554055 - RNA, 19 nt, Artificial Sequence
  Description of Artificial Sequence: Synthetic oligonucleotide
  Sense strand starting at position 3648 of SEQ ID NO: 318326
augggugacucuggaaaua

SEQ ID NO: 554056 - RNA, 19 nt, Artificial Sequence
  Description of Artificial Sequence: Synthetic oligonucleotide
  Antisense strand to SEQ ID NO: 554055
uauuuccagagucacccau

SEQ ID NO: 554057 - RNA, 19 nt, Artificial Sequence
  Description of Artificial Sequence: Synthetic oligonucleotide
  Sense strand starting at position 3658 of SEQ ID NO: 318326
cuggaaauauacuacaaug

SEQ ID NO: 554058 - RNA, 19 nt, Artificial Sequence
  Description of Artificial Sequence: Synthetic oligonucleotide
  Antisense strand to SEQ ID NO: 554057
cauuguaguauauuuccag

SEQ ID NO: 554059 - RNA, 19 nt, Artificial Sequence
  Description of Artificial Sequence: Synthetic oligonucleotide
  Sense strand starting at position 3749 of SEQ ID NO: 318326
gugaaaugauaguuauaug

SEQ ID NO: 554060 - RNA, 19 nt, Artificial Sequence
  Description of Artificial Sequence: Synthetic oligonucleotide
  Antisense strand to SEQ ID NO: 554059
cauauaacuaucauuucac

SEQ ID NO: 554061 - RNA, 19 nt, Artificial Sequence
  Description of Artificial Sequence: Synthetic oligonucleotide
  Sense strand starting at position 1999 of SEQ ID NO: 318327
aauacauugugaucugaag

SEQ ID NO: 554062 - RNA, 19 nt, Artificial Sequence
  Description of Artificial Sequence: Synthetic oligonucleotide
  Antisense strand to SEQ ID NO: 554061
cuucagaucacaauguauu

SEQ ID NO: 554063 - RNA, 19 nt, Artificial Sequence
  Description of Artificial Sequence: Synthetic oligonucleotide
  Sense strand starting at position 2005 of SEQ ID NO: 318327
uugugaucugaaggaacua

SEQ ID NO: 554064 - RNA, 19 nt, Artificial Sequence
  Description of Artificial Sequence: Synthetic oligonucleotide
  Antisense strand to SEQ ID NO: 554063
uaguuccuucagaucacaa

SEQ ID NO: 554065 - RNA, 19 nt, Artificial Sequence
  Description of Artificial Sequence: Synthetic oligonucleotide
  Sense strand starting at position 2076 of SEQ ID NO: 318327
ugaaguaugccuuggacuu

SEQ ID NO: 554066 - RNA, 19 nt, Artificial Sequence
  Description of Artificial Sequence: Synthetic oligonucleotide
  Antisense strand to SEQ ID NO: 554065
aaguccaaggcauacuuca

SEQ ID NO: 554067 - RNA, 19 nt, Artificial Sequence
  Description of Artificial Sequence: Synthetic oligonucleotide
  Sense strand starting at position 2077 of SEQ ID NO: 318327
gaaguaugccuuggacuuu

SEQ ID NO: 554068 - RNA, 19 nt, Artificial Sequence
  Description of Artificial Sequence: Synthetic oligonucleotide
  Antisense strand to SEQ ID NO: 554067
aaaguccaaggcauacuuc

SEQ ID NO: 554069 - RNA, 19 nt, Artificial Sequence
  Description of Artificial Sequence: Synthetic oligonucleotide
  Sense strand starting at position 2187 of SEQ ID NO: 318327
uugaauuuauccuaaaggu

SEQ ID NO: 554070 - RNA, 19 nt, Artificial Sequence
  Description of Artificial Sequence: Synthetic oligonucleotide
  Antisense strand to SEQ ID NO: 554069
accuuuaggauaaauucaa

SEQ ID NO: 554071 - RNA, 19 nt, Artificial Sequence
  Description of Artificial Sequence: Synthetic oligonucleotide
  Sense strand starting at position 2305 of SEQ ID NO: 318327
gggagugacuggagaauca

SEQ ID NO: 554072 - RNA, 19 nt, Artificial Sequence
  Description of Artificial Sequence: Synthetic oligonucleotide
  Antisense strand to SEQ ID NO: 554071
ugauucuccagucacuccc

SEQ ID NO: 554073 - RNA, 19 nt, Artificial Sequence
  Description of Artificial Sequence: Synthetic oligonucleotide
  Sense strand starting at position 2357 of SEQ ID NO: 318327
ggauaaugccaguguggau

SEQ ID NO: 554074 - RNA, 19 nt, Artificial Sequence
  Description of Artificial Sequence: Synthetic oligonucleotide
  Antisense strand to SEQ ID NO: 554073
auccacacuggcauuaucc

SEQ ID NO: 554075 - RNA, 19 nt, Artificial Sequence
  Description of Artificial Sequence: Synthetic oligonucleotide
  Sense strand starting at position 2459 of SEQ ID NO: 318327
gggaaagacucagagauga

SEQ ID NO: 554076 - RNA, 19 nt, Artificial Sequence
  Description of Artificial Sequence: Synthetic oligonucleotide
  Antisense strand to SEQ ID NO: 554075
ucaucucugagucuuuccc

SEQ ID NO: 554077 - RNA, 19 nt, Artificial Sequence
  Description of Artificial Sequence: Synthetic oligonucleotide
  Sense strand starting at position 2603 of SEQ ID NO: 318327
gagguaagugccuguagga

SEQ ID NO: 554078 - RNA, 19 nt, Artificial Sequence
  Description of Artificial Sequence: Synthetic oligonucleotide
  Antisense strand to SEQ ID NO: 554077
uccuacaggcacuuaccuc

SEQ ID NO: 554079 - RNA, 19 nt, Artificial Sequence
  Description of Artificial Sequence: Synthetic oligonucleotide
  Sense strand starting at position 2616 of SEQ ID NO: 318327
guaggauguguguuugcgu

SEQ ID NO: 554080 - RNA, 19 nt, Artificial Sequence
  Description of Artificial Sequence: Synthetic oligonucleotide
  Antisense strand to SEQ ID NO: 554079
acgcaaacacacauccuac

SEQ ID NO: 554081 - RNA, 19 nt, Artificial Sequence
  Description of Artificial Sequence: Synthetic oligonucleotide
  Sense strand starting at position 2704 of SEQ ID NO: 318327
ugaacugugguguguauau

SEQ ID NO: 554082 - RNA, 19 nt, Artificial Sequence
  Description of Artificial Sequence: Synthetic oligonucleotide
  Antisense strand to SEQ ID NO: 554081
auauacacaccacaguuca

SEQ ID NO: 554083 - RNA, 19 nt, Artificial Sequence
  Description of Artificial Sequence: Synthetic oligonucleotide
  Sense strand starting at position 2904 of SEQ ID NO: 318327
augaaugcucuaggauaac

SEQ ID NO: 554084 - RNA, 19 nt, Artificial Sequence
  Description of Artificial Sequence: Synthetic oligonucleotide
  Antisense strand to SEQ ID NO: 554083
guuauccuagagcauucau

SEQ ID NO: 554085 - RNA, 19 nt, Artificial Sequence
  Description of Artificial Sequence: Synthetic oligonucleotide
  Sense strand starting at position 2963 of SEQ ID NO: 318327
acagaacucugagaaacau

SEQ ID NO: 554086 - RNA, 19 nt, Artificial Sequence
  Description of Artificial Sequence: Synthetic oligonucleotide
  Antisense strand to SEQ ID NO: 554085
auguuucucagaguucugu

SEQ ID NO: 554087 - RNA, 19 nt, Artificial Sequence
  Description of Artificial Sequence: Synthetic oligonucleotide
  Sense strand starting at position 3086 of SEQ ID NO: 318327
gaagaucaauggcugcaaa

SEQ ID NO: 554088 - RNA, 19 nt, Artificial Sequence
  Description of Artificial Sequence: Synthetic oligonucleotide
  Antisense strand to SEQ ID NO: 554087
uuugcagccauugaucuuc

SEQ ID NO: 554089 - RNA, 19 nt, Artificial Sequence
  Description of Artificial Sequence: Synthetic oligonucleotide
  Sense strand starting at position 3136 of SEQ ID NO: 318327
acaauuauccagugggcuu

SEQ ID NO: 554090 - RNA, 19 nt, Artificial Sequence
  Description of Artificial Sequence: Synthetic oligonucleotide
  Antisense strand to SEQ ID NO: 554089
aagcccacuggauaauugu

SEQ ID NO: 554091 - RNA, 19 nt, Artificial Sequence
  Description of Artificial Sequence: Synthetic oligonucleotide
  Sense strand starting at position 3161 of SEQ ID NO: 318327
auggucauuguggaggauu

SEQ ID NO: 554092 - RNA, 19 nt, Artificial Sequence
  Description of Artificial Sequence: Synthetic oligonucleotide
  Antisense strand to SEQ ID NO: 554091
aauccuccacaaugaccau

SEQ ID NO: 554093 - RNA, 19 nt, Artificial Sequence
  Description of Artificial Sequence: Synthetic oligonucleotide
  Sense strand starting at position 3163 of SEQ ID NO: 318327
ggucauuguggaggauucu

SEQ ID NO: 554094 - RNA, 19 nt, Artificial Sequence
  Description of Artificial Sequence: Synthetic oligonucleotide
  Antisense strand to SEQ ID NO: 554093
agaauccuccacaaugacc

SEQ ID NO: 554095 - RNA, 19 nt, Artificial Sequence
  Description of Artificial Sequence: Synthetic oligonucleotide
  Sense strand starting at position 3179 of SEQ ID NO: 318327
ucugauagaugucugacaa

SEQ ID NO: 554096 - RNA, 19 nt, Artificial Sequence
  Description of Artificial Sequence: Synthetic oligonucleotide
  Antisense strand to SEQ ID NO: 554095
uugucagacaucuaucaga

SEQ ID NO: 554097 - RNA, 19 nt, Artificial Sequence
  Description of Artificial Sequence: Synthetic oligonucleotide
  Sense strand starting at position 3180 of SEQ ID NO: 318327
cugauagaugucugacaaa

SEQ ID NO: 554098 - RNA, 19 nt, Artificial Sequence
  Description of Artificial Sequence: Synthetic oligonucleotide
  Antisense strand to SEQ ID NO: 554097
uuugucagacaucuaucag

SEQ ID NO: 554099 - RNA, 19 nt, Artificial Sequence
  Description of Artificial Sequence: Synthetic oligonucleotide
  Sense strand starting at position 3225 of SEQ ID NO: 318327
auagaacugugcccaggua

SEQ ID NO: 554100 - RNA, 19 nt, Artificial Sequence
  Description of Artificial Sequence: Synthetic oligonucleotide
  Antisense strand to SEQ ID NO: 554099
uaccugggcacaguucuau

SEQ ID NO: 554101 - RNA, 19 nt, Artificial Sequence
  Description of Artificial Sequence: Synthetic oligonucleotide
  Sense strand starting at position 3226 of SEQ ID NO: 318327
uagaacugugcccagguau

SEQ ID NO: 554102 - RNA, 19 nt, Artificial Sequence
  Description of Artificial Sequence: Synthetic oligonucleotide
  Antisense strand to SEQ ID NO: 554101
auaccugggcacaguucua

SEQ ID NO: 554103 - RNA, 19 nt, Artificial Sequence
  Description of Artificial Sequence: Synthetic oligonucleotide
  Sense strand starting at position 3237 of SEQ ID NO: 318327
ccagguauguggccaugaa

SEQ ID NO: 554104 - RNA, 19 nt, Artificial Sequence
  Description of Artificial Sequence: Synthetic oligonucleotide
  Antisense strand to SEQ ID NO: 554103
uucauggccacauaccugg

SEQ ID NO: 554105 - RNA, 19 nt, Artificial Sequence
  Description of Artificial Sequence: Synthetic oligonucleotide
  Sense strand starting at position 3238 of SEQ ID NO: 318327
cagguauguggccaugaag

SEQ ID NO: 554106 - RNA, 19 nt, Artificial Sequence
  Description of Artificial Sequence: Synthetic oligonucleotide
  Antisense strand to SEQ ID NO: 554105
cuucauggccacauaccug

SEQ ID NO: 554107 - RNA, 19 nt, Artificial Sequence
  Description of Artificial Sequence: Synthetic oligonucleotide
  Sense strand starting at position 3241 of SEQ ID NO: 318327
guauguggccaugaaggua

SEQ ID NO: 554108 - RNA, 19 nt, Artificial Sequence
  Description of Artificial Sequence: Synthetic oligonucleotide
  Antisense strand to SEQ ID NO: 554107
uaccuucauggccacauac

SEQ ID NO: 554109 - RNA, 19 nt, Artificial Sequence
  Description of Artificial Sequence: Synthetic oligonucleotide
  Sense strand starting at position 3282 of SEQ ID NO: 318327
uguauuugaguguggccaa

SEQ ID NO: 554110 - RNA, 19 nt, Artificial Sequence
  Description of Artificial Sequence: Synthetic oligonucleotide
  Antisense strand to SEQ ID NO: 554109
uuggccacacucaaauaca

SEQ ID NO: 554111 - RNA, 19 nt, Artificial Sequence
  Description of Artificial Sequence: Synthetic oligonucleotide
  Sense strand starting at position 3295 of SEQ ID NO: 318327
ggccaagugaauuaaguuc

SEQ ID NO: 554112 - RNA, 19 nt, Artificial Sequence
  Description of Artificial Sequence: Synthetic oligonucleotide
  Antisense strand to SEQ ID NO: 554111
gaacuuaauucacuuggcc

SEQ ID NO: 554113 - RNA, 19 nt, Artificial Sequence
  Description of Artificial Sequence: Synthetic oligonucleotide
  Sense strand starting at position 3302 of SEQ ID NO: 318327
ugaauuaaguucucacaga

SEQ ID NO: 554114 - RNA, 19 nt, Artificial Sequence
  Description of Artificial Sequence: Synthetic oligonucleotide
  Antisense strand to SEQ ID NO: 554113
ucugugagaacuuaauuca

SEQ ID NO: 554115 - RNA, 19 nt, Artificial Sequence
  Description of Artificial Sequence: Synthetic oligonucleotide
  Sense strand starting at position 3319 of SEQ ID NO: 318327
gauggauugugagcagaau

SEQ ID NO: 554116 - RNA, 19 nt, Artificial Sequence
  Description of Artificial Sequence: Synthetic oligonucleotide
  Antisense strand to SEQ ID NO: 554115
auucugcucacaauccauc

SEQ ID NO: 554117 - RNA, 19 nt, Artificial Sequence
  Description of Artificial Sequence: Synthetic oligonucleotide
  Sense strand starting at position 3452 of SEQ ID NO: 318327
ugccauagggaauguugaa

SEQ ID NO: 554118 - RNA, 19 nt, Artificial Sequence
  Description of Artificial Sequence: Synthetic oligonucleotide
  Antisense strand to SEQ ID NO: 554117
uucaacauucccuauggca

SEQ ID NO: 554119 - RNA, 19 nt, Artificial Sequence
  Description of Artificial Sequence: Synthetic oligonucleotide
  Sense strand starting at position 3593 of SEQ ID NO: 318327
gugucauugcaucacauug

SEQ ID NO: 554120 - RNA, 19 nt, Artificial Sequence
  Description of Artificial Sequence: Synthetic oligonucleotide
  Antisense strand to SEQ ID NO: 554119
caaugugaugcaaugacac

SEQ ID NO: 554121 - RNA, 19 nt, Artificial Sequence
  Description of Artificial Sequence: Synthetic oligonucleotide
  Sense strand starting at position 3601 of SEQ ID NO: 318327
gcaucacauugguuccaca

SEQ ID NO: 554122 - RNA, 19 nt, Artificial Sequence
  Description of Artificial Sequence: Synthetic oligonucleotide
  Antisense strand to SEQ ID NO: 554121
uguggaaccaaugugaugc

SEQ ID NO: 554123 - RNA, 19 nt, Artificial Sequence
  Description of Artificial Sequence: Synthetic oligonucleotide
  Sense strand starting at position 3609 of SEQ ID NO: 318327
uugguuccacaguauaauc

SEQ ID NO: 554124 - RNA, 19 nt, Artificial Sequence
  Description of Artificial Sequence: Synthetic oligonucleotide
  Antisense strand to SEQ ID NO: 554123
gauuauacuguggaaccaa

SEQ ID NO: 554125 - RNA, 19 nt, Artificial Sequence
  Description of Artificial Sequence: Synthetic oligonucleotide
  Sense strand starting at position 3637 of SEQ ID NO: 318327
auggaaaucuuugauaaca

SEQ ID NO: 554126 - RNA, 19 nt, Artificial Sequence
  Description of Artificial Sequence: Synthetic oligonucleotide
  Antisense strand to SEQ ID NO: 554125
uguuaucaaagauuuccau

SEQ ID NO: 554127 - RNA, 19 nt, Artificial Sequence
  Description of Artificial Sequence: Synthetic oligonucleotide
  Sense strand starting at position 3639 of SEQ ID NO: 318327
ggaaaucuuugauaacauu

SEQ ID NO: 554128 - RNA, 19 nt, Artificial Sequence
  Description of Artificial Sequence: Synthetic oligonucleotide
  Antisense strand to SEQ ID NO: 554127
aauguuaucaaagauuucc

SEQ ID NO: 554129 - RNA, 19 nt, Artificial Sequence
  Description of Artificial Sequence: Synthetic oligonucleotide
  Sense strand starting at position 3668 of SEQ ID NO: 318327
guuucaguagaaugguugu

SEQ ID NO: 554130 - RNA, 19 nt, Artificial Sequence
  Description of Artificial Sequence: Synthetic oligonucleotide
  Antisense strand to SEQ ID NO: 554129
acaaccauucuacugaaac

SEQ ID NO: 554131 - RNA, 19 nt, Artificial Sequence
  Description of Artificial Sequence: Synthetic oligonucleotide
  Sense strand starting at position 3671 of SEQ ID NO: 318327
ucaguagaaugguugugau

SEQ ID NO: 554132 - RNA, 19 nt, Artificial Sequence
  Description of Artificial Sequence: Synthetic oligonucleotide
  Antisense strand to SEQ ID NO: 554131
aucacaaccauucuacuga

SEQ ID NO: 554133 - RNA, 19 nt, Artificial Sequence
  Description of Artificial Sequence: Synthetic oligonucleotide
  Sense strand starting at position 3698 of SEQ ID NO: 318327
gauuguacuucggugcaaa

SEQ ID NO: 554134 - RNA, 19 nt, Artificial Sequence
  Description of Artificial Sequence: Synthetic oligonucleotide
  Antisense strand to SEQ ID NO: 554133
uuugcaccgaaguacaauc

SEQ ID NO: 554135 - RNA, 19 nt, Artificial Sequence
  Description of Artificial Sequence: Synthetic oligonucleotide
  Sense strand starting at position 3874 of SEQ ID NO: 318327
auacauugguaucuggaga

SEQ ID NO: 554136 - RNA, 19 nt, Artificial Sequence
  Description of Artificial Sequence: Synthetic oligonucleotide
  Antisense strand to SEQ ID NO: 554135
ucuccagauaccaauguau

SEQ ID NO: 554137 - RNA, 19 nt, Artificial Sequence
  Description of Artificial Sequence: Synthetic oligonucleotide
  Sense strand starting at position 3956 of SEQ ID NO: 318327
guguaauguucaguaggga

SEQ ID NO: 554138 - RNA, 19 nt, Artificial Sequence
  Description of Artificial Sequence: Synthetic oligonucleotide
  Antisense strand to SEQ ID NO: 554137
ucccuacugaacauuacac

SEQ ID NO: 554139 - RNA, 19 nt, Artificial Sequence
  Description of Artificial Sequence: Synthetic oligonucleotide
  Sense strand starting at position 3957 of SEQ ID NO: 318327
uguaauguucaguagggaa

SEQ ID NO: 554140 - RNA, 19 nt, Artificial Sequence
  Description of Artificial Sequence: Synthetic oligonucleotide
  Antisense strand to SEQ ID NO: 554139
uucccuacugaacauuaca

SEQ ID NO: 554141 - RNA, 19 nt, Artificial Sequence
  Description of Artificial Sequence: Synthetic oligonucleotide
  Sense strand starting at position 2029 of SEQ ID NO: 318328
cguugucuuugcuucgaaa

SEQ ID NO: 554142 - RNA, 19 nt, Artificial Sequence
  Description of Artificial Sequence: Synthetic oligonucleotide
  Antisense strand to SEQ ID NO: 554141
uuucgaagcaaagacaacg

SEQ ID NO: 554143 - RNA, 19 nt, Artificial Sequence
  Description of Artificial Sequence: Synthetic oligonucleotide
  Sense strand starting at position 2032 of SEQ ID NO: 318328
ugucuuugcuucgaaacga

SEQ ID NO: 554144 - RNA, 19 nt, Artificial Sequence
  Description of Artificial Sequence: Synthetic oligonucleotide
  Antisense strand to SEQ ID NO: 554143
ucguuucgaagcaaagaca

SEQ ID NO: 554145 - RNA, 19 nt, Artificial Sequence
  Description of Artificial Sequence: Synthetic oligonucleotide
  Sense strand starting at position 2043 of SEQ ID NO: 318328
cgaaacgaauugcuacaau

SEQ ID NO: 554146 - RNA, 19 nt, Artificial Sequence
  Description of Artificial Sequence: Synthetic oligonucleotide
  Antisense strand to SEQ ID NO: 554145
auuguagcaauucguuucg

SEQ ID NO: 554147 - RNA, 19 nt, Artificial Sequence
  Description of Artificial Sequence: Synthetic oligonucleotide
  Sense strand starting at position 2070 of SEQ ID NO: 318328
ucucuauucuauuaggagu

SEQ ID NO: 554148 - RNA, 19 nt, Artificial Sequence
  Description of Artificial Sequence: Synthetic oligonucleotide
  Antisense strand to SEQ ID NO: 554147
acuccuaauagaauagaga

SEQ ID NO: 554149 - RNA, 19 nt, Artificial Sequence
  Description of Artificial Sequence: Synthetic oligonucleotide
  Sense strand starting at position 2072 of SEQ ID NO: 318328
ucuauucuauuaggaguuu

SEQ ID NO: 554150 - RNA, 19 nt, Artificial Sequence
  Description of Artificial Sequence: Synthetic oligonucleotide
  Antisense strand to SEQ ID NO: 554149
aaacuccuaauagaauaga

SEQ ID NO: 554151 - RNA, 19 nt, Artificial Sequence
  Description of Artificial Sequence: Synthetic oligonucleotide
  Sense strand starting at position 2078 of SEQ ID NO: 318328
cuauuaggaguuuggaaau

SEQ ID NO: 554152 - RNA, 19 nt, Artificial Sequence
  Description of Artificial Sequence: Synthetic oligonucleotide
  Antisense strand to SEQ ID NO: 554151
auuuccaaacuccuaauag

SEQ ID NO: 554153 - RNA, 19 nt, Artificial Sequence
  Description of Artificial Sequence: Synthetic oligonucleotide
  Sense strand starting at position 2125 of SEQ ID NO: 318328
acgcaaugguaauuauuaa

SEQ ID NO: 554154 - RNA, 19 nt, Artificial Sequence
  Description of Artificial Sequence: Synthetic oligonucleotide
  Antisense strand to SEQ ID NO: 554153
uuaauaauuaccauugcgu

SEQ ID NO: 554155 - RNA, 19 nt, Artificial Sequence
  Description of Artificial Sequence: Synthetic oligonucleotide
  Sense strand starting at position 2157 of SEQ ID NO: 318328
aggaguauuauuggucucu

SEQ ID NO: 554156 - RNA, 19 nt, Artificial Sequence
  Description of Artificial Sequence: Synthetic oligonucleotide
  Antisense strand to SEQ ID NO: 554155
agagaccaauaauacuccu

SEQ ID NO: 554157 - RNA, 19 nt, Artificial Sequence
  Description of Artificial Sequence: Synthetic oligonucleotide
  Sense strand starting at position 2158 of SEQ ID NO: 318328
ggaguauuauuggucucua

SEQ ID NO: 554158 - RNA, 19 nt, Artificial Sequence
  Description of Artificial Sequence: Synthetic oligonucleotide
  Antisense strand to SEQ ID NO: 554157
uagagaccaauaauacucc

SEQ ID NO: 554159 - RNA, 19 nt, Artificial Sequence
  Description of Artificial Sequence: Synthetic oligonucleotide
  Sense strand starting at position 2159 of SEQ ID NO: 318328
gaguauuauuggucucuau

SEQ ID NO: 554160 - RNA, 19 nt, Artificial Sequence
  Description of Artificial Sequence: Synthetic oligonucleotide
  Antisense strand to SEQ ID NO: 554159
auagagaccaauaauacuc

SEQ ID NO: 554161 - RNA, 19 nt, Artificial Sequence
  Description of Artificial Sequence: Synthetic oligonucleotide
  Sense strand starting at position 2168 of SEQ ID NO: 318328
uggucucuaugugccaaau

SEQ ID NO: 554162 - RNA, 19 nt, Artificial Sequence
  Description of Artificial Sequence: Synthetic oligonucleotide
  Antisense strand to SEQ ID NO: 554161
auuuggcacauagagacca

SEQ ID NO: 554163 - RNA, 19 nt, Artificial Sequence
  Description of Artificial Sequence: Synthetic oligonucleotide
  Sense strand starting at position 2170 of SEQ ID NO: 318328
gucucuaugugccaaauua

SEQ ID NO: 554164 - RNA, 19 nt, Artificial Sequence
  Description of Artificial Sequence: Synthetic oligonucleotide
  Antisense strand to SEQ ID NO: 554163
uaauuuggcacauagagac

SEQ ID NO: 554165 - RNA, 19 nt, Artificial Sequence
  Description of Artificial Sequence: Synthetic oligonucleotide
  Sense strand starting at position 2177 of SEQ ID NO: 318328
ugugccaaauuaugaaaua

SEQ ID NO: 554166 - RNA, 19 nt, Artificial Sequence
  Description of Artificial Sequence: Synthetic oligonucleotide
  Antisense strand to SEQ ID NO: 554165
uauuucauaauuuggcaca

SEQ ID NO: 554167 - RNA, 19 nt, Artificial Sequence
  Description of Artificial Sequence: Synthetic oligonucleotide
  Sense strand starting at position 2178 of SEQ ID NO: 318328
gugccaaauuaugaaauac

SEQ ID NO: 554168 - RNA, 19 nt, Artificial Sequence
  Description of Artificial Sequence: Synthetic oligonucleotide
  Antisense strand to SEQ ID NO: 554167
guauuucauaauuuggcac

SEQ ID NO: 554169 - RNA, 19 nt, Artificial Sequence
  Description of Artificial Sequence: Synthetic oligonucleotide
  Sense strand starting at position 2236 of SEQ ID NO: 318328
ccuguagucuggguguagu

SEQ ID NO: 554170 - RNA, 19 nt, Artificial Sequence
  Description of Artificial Sequence: Synthetic oligonucleotide
  Antisense strand to SEQ ID NO: 554169
acuacacccagacuacagg

SEQ ID NO: 554171 - RNA, 19 nt, Artificial Sequence
  Description of Artificial Sequence: Synthetic oligonucleotide
  Sense strand starting at position 2247 of SEQ ID NO: 318328
gguguaguguucugaggga

SEQ ID NO: 554172 - RNA, 19 nt, Artificial Sequence
  Description of Artificial Sequence: Synthetic oligonucleotide
  Antisense strand to SEQ ID NO: 554171
ucccucagaacacuacacc

SEQ ID NO: 554173 - RNA, 19 nt, Artificial Sequence
  Description of Artificial Sequence: Synthetic oligonucleotide
  Sense strand starting at position 2251 of SEQ ID NO: 318328
uaguguucugagggaaauu

SEQ ID NO: 554174 - RNA, 19 nt, Artificial Sequence
  Description of Artificial Sequence: Synthetic oligonucleotide
  Antisense strand to SEQ ID NO: 554173
aauuucccucagaacacua

SEQ ID NO: 554175 - RNA, 19 nt, Artificial Sequence
  Description of Artificial Sequence: Synthetic oligonucleotide
  Sense strand starting at position 2260 of SEQ ID NO: 318328
gagggaaauugagaaguga

SEQ ID NO: 554176 - RNA, 19 nt, Artificial Sequence
  Description of Artificial Sequence: Synthetic oligonucleotide
  Antisense strand to SEQ ID NO: 554175
ucacuucucaauuucccuc

SEQ ID NO: 554177 - RNA, 19 nt, Artificial Sequence
  Description of Artificial Sequence: Synthetic oligonucleotide
  Sense strand starting at position 2285 of SEQ ID NO: 318328
acauaauagugaucaguca

SEQ ID NO: 554178 - RNA, 19 nt, Artificial Sequence
  Description of Artificial Sequence: Synthetic oligonucleotide
  Antisense strand to SEQ ID NO: 554177
ugacugaucacuauuaugu

SEQ ID NO: 554179 - RNA, 19 nt, Artificial Sequence
  Description of Artificial Sequence: Synthetic oligonucleotide
  Sense strand starting at position 2292 of SEQ ID NO: 318328
agugaucagucaucuugua

SEQ ID NO: 554180 - RNA, 19 nt, Artificial Sequence
  Description of Artificial Sequence: Synthetic oligonucleotide
  Antisense strand to SEQ ID NO: 554179
uacaagaugacugaucacu

SEQ ID NO: 554181 - RNA, 19 nt, Artificial Sequence
  Description of Artificial Sequence: Synthetic oligonucleotide
  Sense strand starting at position 2297 of SEQ ID NO: 318328
ucagucaucuuguaauaau

SEQ ID NO: 554182 - RNA, 19 nt, Artificial Sequence
  Description of Artificial Sequence: Synthetic oligonucleotide
  Antisense strand to SEQ ID NO: 554181
auuauuacaagaugacuga

SEQ ID NO: 554183 - RNA, 19 nt, Artificial Sequence
  Description of Artificial Sequence: Synthetic oligonucleotide
  Sense strand starting at position 2319 of SEQ ID NO: 318328
aacauaaagccacgugauu

SEQ ID NO: 554184 - RNA, 19 nt, Artificial Sequence
  Description of Artificial Sequence: Synthetic oligonucleotide
  Antisense strand to SEQ ID NO: 554183
aaucacguggcuuuauguu

SEQ ID NO: 554185 - RNA, 19 nt, Artificial Sequence
  Description of Artificial Sequence: Synthetic oligonucleotide
  Sense strand starting at position 2397 of SEQ ID NO: 318328
gccuauguaccagaauugu

SEQ ID NO: 554186 - RNA, 19 nt, Artificial Sequence
  Description of Artificial Sequence: Synthetic oligonucleotide
  Antisense strand to SEQ ID NO: 554185
acaauucugguacauaggc

SEQ ID NO: 554187 - RNA, 19 nt, Artificial Sequence
  Description of Artificial Sequence: Synthetic oligonucleotide
  Sense strand starting at position 2406 of SEQ ID NO: 318328
ccagaauugugcucccauu

SEQ ID NO: 554188 - RNA, 19 nt, Artificial Sequence
  Description of Artificial Sequence: Synthetic oligonucleotide
  Antisense strand to SEQ ID NO: 554187
aaugggagcacaauucugg

SEQ ID NO: 554189 - RNA, 19 nt, Artificial Sequence
  Description of Artificial Sequence: Synthetic oligonucleotide
  Sense strand starting at position 2416 of SEQ ID NO: 318328
gcucccauugguuggauua

SEQ ID NO: 554190 - RNA, 19 nt, Artificial Sequence
  Description of Artificial Sequence: Synthetic oligonucleotide
  Antisense strand to SEQ ID NO: 554189
uaauccaaccaaugggagc

SEQ ID NO: 554191 - RNA, 19 nt, Artificial Sequence
  Description of Artificial Sequence: Synthetic oligonucleotide
  Sense strand starting at position 2418 of SEQ ID NO: 318328
ucccauugguuggauuaca

SEQ ID NO: 554192 - RNA, 19 nt, Artificial Sequence
  Description of Artificial Sequence: Synthetic oligonucleotide
  Antisense strand to SEQ ID NO: 554191
uguaauccaaccaauggga

SEQ ID NO: 554193 - RNA, 19 nt, Artificial Sequence
  Description of Artificial Sequence: Synthetic oligonucleotide
  Sense strand starting at position 2453 of SEQ ID NO: 318328
cguuaauuccaguguggua

SEQ ID NO: 554194 - RNA, 19 nt, Artificial Sequence
  Description of Artificial Sequence: Synthetic oligonucleotide
  Antisense strand to SEQ ID NO: 554193
uaccacacuggaauuaacg

SEQ ID NO: 554195 - RNA, 19 nt, Artificial Sequence
  Description of Artificial Sequence: Synthetic oligonucleotide
  Sense strand starting at position 2466 of SEQ ID NO: 318328
gugguauccuuucuacaua

SEQ ID NO: 554196 - RNA, 19 nt, Artificial Sequence
  Description of Artificial Sequence: Synthetic oligonucleotide
  Antisense strand to SEQ ID NO: 554195
uauguagaaaggauaccac

SEQ ID NO: 554197 - RNA, 19 nt, Artificial Sequence
  Description of Artificial Sequence: Synthetic oligonucleotide
  Sense strand starting at position 2479 of SEQ ID NO: 318328
uacauaaagucagagaguu

SEQ ID NO: 554198 - RNA, 19 nt, Artificial Sequence
  Description of Artificial Sequence: Synthetic oligonucleotide
  Antisense strand to SEQ ID NO: 554197
aacucucugacuuuaugua

SEQ ID NO: 554199 - RNA, 19 nt, Artificial Sequence
  Description of Artificial Sequence: Synthetic oligonucleotide
  Sense strand starting at position 2194 of SEQ ID NO: 318329
ggauauggcacguagagaa

SEQ ID NO: 554200 - RNA, 19 nt, Artificial Sequence
  Description of Artificial Sequence: Synthetic oligonucleotide
  Antisense strand to SEQ ID NO: 554199
uucucuacgugccauaucc

SEQ ID NO: 554201 - RNA, 19 nt, Artificial Sequence
  Description of Artificial Sequence: Synthetic oligonucleotide
  Sense strand starting at position 2230 of SEQ ID NO: 318329
cagguuaauucgcucauca

SEQ ID NO: 554202 - RNA, 19 nt, Artificial Sequence
  Description of Artificial Sequence: Synthetic oligonucleotide
  Antisense strand to SEQ ID NO: 554201
ugaugagcgaauuaaccug

SEQ ID NO: 554203 - RNA, 19 nt, Artificial Sequence
  Description of Artificial Sequence: Synthetic oligonucleotide
  Sense strand starting at position 2232 of SEQ ID NO: 318329
gguuaauucgcucaucaua

SEQ ID NO: 554204 - RNA, 19 nt, Artificial Sequence
  Description of Artificial Sequence: Synthetic oligonucleotide
  Antisense strand to SEQ ID NO: 554203
uaugaugagcgaauuaacc

SEQ ID NO: 554205 - RNA, 19 nt, Artificial Sequence
  Description of Artificial Sequence: Synthetic oligonucleotide
  Sense strand starting at position 2237 of SEQ ID NO: 318329
auucgcucaucauaaaguu

SEQ ID NO: 554206 - RNA, 19 nt, Artificial Sequence
  Description of Artificial Sequence: Synthetic oligonucleotide
  Antisense strand to SEQ ID NO: 554205
aacuuuaugaugagcgaau

SEQ ID NO: 554207 - RNA, 19 nt, Artificial Sequence
  Description of Artificial Sequence: Synthetic oligonucleotide
  Sense strand starting at position 2260 of SEQ ID NO: 318329
uguaguaucugucccagca

SEQ ID NO: 554208 - RNA, 19 nt, Artificial Sequence
  Description of Artificial Sequence: Synthetic oligonucleotide
  Antisense strand to SEQ ID NO: 554207
ugcugggacagauacuaca

SEQ ID NO: 554209 - RNA, 19 nt, Artificial Sequence
  Description of Artificial Sequence: Synthetic oligonucleotide
  Sense strand starting at position 2273 of SEQ ID NO: 318329
ccagcauacuuagagcuuu

SEQ ID NO: 554210 - RNA, 19 nt, Artificial Sequence
  Description of Artificial Sequence: Synthetic oligonucleotide
  Antisense strand to SEQ ID NO: 554209
aaagcucuaaguaugcugg

SEQ ID NO: 554211 - RNA, 19 nt, Artificial Sequence
  Description of Artificial Sequence: Synthetic oligonucleotide
  Sense strand starting at position 2285 of SEQ ID NO: 318329
gagcuuugauaagaacaug

SEQ ID NO: 554212 - RNA, 19 nt, Artificial Sequence
  Description of Artificial Sequence: Synthetic oligonucleotide
  Antisense strand to SEQ ID NO: 554211
cauguucuuaucaaagcuc

SEQ ID NO: 554213 - RNA, 19 nt, Artificial Sequence
  Description of Artificial Sequence: Synthetic oligonucleotide
  Sense strand starting at position 2302 of SEQ ID NO: 318329
uggguauauuugugcagag

SEQ ID NO: 554214 - RNA, 19 nt, Artificial Sequence
  Description of Artificial Sequence: Synthetic oligonucleotide
  Antisense strand to SEQ ID NO: 554213
cucugcacaaauauaccca

SEQ ID NO: 554215 - RNA, 19 nt, Artificial Sequence
  Description of Artificial Sequence: Synthetic oligonucleotide
  Sense strand starting at position 2303 of SEQ ID NO: 318329
ggguauauuugugcagagu

SEQ ID NO: 554216 - RNA, 19 nt, Artificial Sequence
  Description of Artificial Sequence: Synthetic oligonucleotide
  Antisense strand to SEQ ID NO: 554215
acucugcacaaauauaccc

SEQ ID NO: 554217 - RNA, 19 nt, Artificial Sequence
  Description of Artificial Sequence: Synthetic oligonucleotide
  Sense strand starting at position 2312 of SEQ ID NO: 318329
ugugcagaguaguauaaac

SEQ ID NO: 554218 - RNA, 19 nt, Artificial Sequence
  Description of Artificial Sequence: Synthetic oligonucleotide
  Antisense strand to SEQ ID NO: 554217
guuuauacuacucugcaca

SEQ ID NO: 554219 - RNA, 19 nt, Artificial Sequence
  Description of Artificial Sequence: Synthetic oligonucleotide
  Sense strand starting at position 2314 of SEQ ID NO: 318329
ugcagaguaguauaaacaa

SEQ ID NO: 554220 - RNA, 19 nt, Artificial Sequence
  Description of Artificial Sequence: Synthetic oligonucleotide
  Antisense strand to SEQ ID NO: 554219
uuguuuauacuacucugca

SEQ ID NO: 554221 - RNA, 19 nt, Artificial Sequence
  Description of Artificial Sequence: Synthetic oligonucleotide
  Sense strand starting at position 2365 of SEQ ID NO: 318329
aguuuaguucauggaguag

SEQ ID NO: 554222 - RNA, 19 nt, Artificial Sequence
  Description of Artificial Sequence: Synthetic oligonucleotide
  Antisense strand to SEQ ID NO: 554221
cuacuccaugaacuaaacu

SEQ ID NO: 554223 - RNA, 19 nt, Artificial Sequence
  Description of Artificial Sequence: Synthetic oligonucleotide
  Sense strand starting at position 2433 of SEQ ID NO: 318329
ucaguuaaugccugaccau

SEQ ID NO: 554224 - RNA, 19 nt, Artificial Sequence
  Description of Artificial Sequence: Synthetic oligonucleotide
  Antisense strand to SEQ ID NO: 554223
auggucaggcauuaacuga

SEQ ID NO: 554225 - RNA, 19 nt, Artificial Sequence
  Description of Artificial Sequence: Synthetic oligonucleotide
  Sense strand starting at position 2436 of SEQ ID NO: 318329
guuaaugccugaccauaua

SEQ ID NO: 554226 - RNA, 19 nt, Artificial Sequence
  Description of Artificial Sequence: Synthetic oligonucleotide
  Antisense strand to SEQ ID NO: 554225
uauauggucaggcauuaac

SEQ ID NO: 554227 - RNA, 19 nt, Artificial Sequence
  Description of Artificial Sequence: Synthetic oligonucleotide
  Sense strand starting at position 2452 of SEQ ID NO: 318329
auagcauauuggcuagacu

SEQ ID NO: 554228 - RNA, 19 nt, Artificial Sequence
  Description of Artificial Sequence: Synthetic oligonucleotide
  Antisense strand to SEQ ID NO: 554227
agucuagccaauaugcuau

SEQ ID NO: 554229 - RNA, 19 nt, Artificial Sequence
  Description of Artificial Sequence: Synthetic oligonucleotide
  Sense strand starting at position 2453 of SEQ ID NO: 318329
uagcauauuggcuagacuu

SEQ ID NO: 554230 - RNA, 19 nt, Artificial Sequence
  Description of Artificial Sequence: Synthetic oligonucleotide
  Antisense strand to SEQ ID NO: 554229
aagucuagccaauaugcua

SEQ ID NO: 554231 - RNA, 19 nt, Artificial Sequence
  Description of Artificial Sequence: Synthetic oligonucleotide
  Sense strand starting at position 2455 of SEQ ID NO: 318329
gcauauuggcuagacuuag

SEQ ID NO: 554232 - RNA, 19 nt, Artificial Sequence
  Description of Artificial Sequence: Synthetic oligonucleotide
  Antisense strand to SEQ ID NO: 554231
cuaagucuagccaauaugc

SEQ ID NO: 554233 - RNA, 19 nt, Artificial Sequence
  Description of Artificial Sequence: Synthetic oligonucleotide
  Sense strand starting at position 2461 of SEQ ID NO: 318329
uggcuagacuuagauuaua

SEQ ID NO: 554234 - RNA, 19 nt, Artificial Sequence
  Description of Artificial Sequence: Synthetic oligonucleotide
  Antisense strand to SEQ ID NO: 554233
uauaaucuaagucuagcca

SEQ ID NO: 554235 - RNA, 19 nt, Artificial Sequence
  Description of Artificial Sequence: Synthetic oligonucleotide
  Sense strand starting at position 2739 of SEQ ID NO: 318329
ucgaacuacugagcucaaa

SEQ ID NO: 554236 - RNA, 19 nt, Artificial Sequence
  Description of Artificial Sequence: Synthetic oligonucleotide
  Antisense strand to SEQ ID NO: 554235
uuugagcucaguaguucga

SEQ ID NO: 554237 - RNA, 19 nt, Artificial Sequence
  Description of Artificial Sequence: Synthetic oligonucleotide
  Sense strand starting at position 2873 of SEQ ID NO: 318329
ugucaacucccuuaggacu

SEQ ID NO: 554238 - RNA, 19 nt, Artificial Sequence
  Description of Artificial Sequence: Synthetic oligonucleotide
  Antisense strand to SEQ ID NO: 554237
aguccuaagggaguugaca

SEQ ID NO: 554239 - RNA, 19 nt, Artificial Sequence
  Description of Artificial Sequence: Synthetic oligonucleotide
  Sense strand starting at position 3068 of SEQ ID NO: 318329
gaauuaugauuagagucca

SEQ ID NO: 554240 - RNA, 19 nt, Artificial Sequence
  Description of Artificial Sequence: Synthetic oligonucleotide
  Antisense strand to SEQ ID NO: 554239
uggacucuaaucauaauuc

SEQ ID NO: 554241 - RNA, 19 nt, Artificial Sequence
  Description of Artificial Sequence: Synthetic oligonucleotide
  Sense strand starting at position 3076 of SEQ ID NO: 318329
auuagaguccacuggauau

SEQ ID NO: 554242 - RNA, 19 nt, Artificial Sequence
  Description of Artificial Sequence: Synthetic oligonucleotide
  Antisense strand to SEQ ID NO: 554241
auauccaguggacucuaau

SEQ ID NO: 554243 - RNA, 19 nt, Artificial Sequence
  Description of Artificial Sequence: Synthetic oligonucleotide
  Sense strand starting at position 3088 of SEQ ID NO: 318329
uggauauacuaaugaagag

SEQ ID NO: 554244 - RNA, 19 nt, Artificial Sequence
  Description of Artificial Sequence: Synthetic oligonucleotide
  Antisense strand to SEQ ID NO: 554243
cucuucauuaguauaucca

SEQ ID NO: 554245 - RNA, 19 nt, Artificial Sequence
  Description of Artificial Sequence: Synthetic oligonucleotide
  Sense strand starting at position 3155 of SEQ ID NO: 318329
gggcaaauguaguguaauu

SEQ ID NO: 554246 - RNA, 19 nt, Artificial Sequence
  Description of Artificial Sequence: Synthetic oligonucleotide
  Antisense strand to SEQ ID NO: 554245
aauuacacuacauuugccc

SEQ ID NO: 554247 - RNA, 19 nt, Artificial Sequence
  Description of Artificial Sequence: Synthetic oligonucleotide
  Sense strand starting at position 2013 of SEQ ID NO: 318330
gggugcuuuguuucugcua

SEQ ID NO: 554248 - RNA, 19 nt, Artificial Sequence
  Description of Artificial Sequence: Synthetic oligonucleotide
  Antisense strand to SEQ ID NO: 554247
uagcagaaacaaagcaccc

SEQ ID NO: 554249 - RNA, 19 nt, Artificial Sequence
  Description of Artificial Sequence: Synthetic oligonucleotide
  Sense strand starting at position 2016 of SEQ ID NO: 318330
ugcuuuguuucugcuacuu

SEQ ID NO: 554250 - RNA, 19 nt, Artificial Sequence
  Description of Artificial Sequence: Synthetic oligonucleotide
  Antisense strand to SEQ ID NO: 554249
aaguagcagaaacaaagca

SEQ ID NO: 554251 - RNA, 19 nt, Artificial Sequence
  Description of Artificial Sequence: Synthetic oligonucleotide
  Sense strand starting at position 2118 of SEQ ID NO: 318330
gcugauggcaaucgaaauu

SEQ ID NO: 554252 - RNA, 19 nt, Artificial Sequence
  Description of Artificial Sequence: Synthetic oligonucleotide
  Antisense strand to SEQ ID NO: 554251
aauuucgauugccaucagc

SEQ ID NO: 554253 - RNA, 19 nt, Artificial Sequence
  Description of Artificial Sequence: Synthetic oligonucleotide
  Sense strand starting at position 2124 of SEQ ID NO: 318330
ggcaaucgaaauugaguau

SEQ ID NO: 554254 - RNA, 19 nt, Artificial Sequence
  Description of Artificial Sequence: Synthetic oligonucleotide
  Antisense strand to SEQ ID NO: 554253
auacucaauuucgauugcc

SEQ ID NO: 554255 - RNA, 19 nt, Artificial Sequence
  Description of Artificial Sequence: Synthetic oligonucleotide
  Sense strand starting at position 2125 of SEQ ID NO: 318330
gcaaucgaaauugaguauu

SEQ ID NO: 554256 - RNA, 19 nt, Artificial Sequence
  Description of Artificial Sequence: Synthetic oligonucleotide
  Antisense strand to SEQ ID NO: 554255
aauacucaauuucgauugc

SEQ ID NO: 554257 - RNA, 19 nt, Artificial Sequence
  Description of Artificial Sequence: Synthetic oligonucleotide
  Sense strand starting at position 2146 of SEQ ID NO: 318330
caaguagugucucucagug

SEQ ID NO: 554258 - RNA, 19 nt, Artificial Sequence
  Description of Artificial Sequence: Synthetic oligonucleotide
  Antisense strand to SEQ ID NO: 554257
cacugagagacacuacuug

SEQ ID NO: 554259 - RNA, 19 nt, Artificial Sequence
  Description of Artificial Sequence: Synthetic oligonucleotide
  Sense strand starting at position 2168 of SEQ ID NO: 318330
cgaagucuuauuggcguuu

SEQ ID NO: 554260 - RNA, 19 nt, Artificial Sequence
  Description of Artificial Sequence: Synthetic oligonucleotide
  Antisense strand to SEQ ID NO: 554259
aaacgccaauaagacuucg

SEQ ID NO: 554261 - RNA, 19 nt, Artificial Sequence
  Description of Artificial Sequence: Synthetic oligonucleotide
  Sense strand starting at position 2171 of SEQ ID NO: 318330
agucuuauuggcguuucga

SEQ ID NO: 554262 - RNA, 19 nt, Artificial Sequence
  Description of Artificial Sequence: Synthetic oligonucleotide
  Antisense strand to SEQ ID NO: 554261
ucgaaacgccaauaagacu

SEQ ID NO: 554263 - RNA, 19 nt, Artificial Sequence
  Description of Artificial Sequence: Synthetic oligonucleotide
  Sense strand starting at position 2172 of SEQ ID NO: 318330
gucuuauuggcguuucgaa

SEQ ID NO: 554264 - RNA, 19 nt, Artificial Sequence
  Description of Artificial Sequence: Synthetic oligonucleotide
  Antisense strand to SEQ ID NO: 554263
uucgaaacgccaauaagac

SEQ ID NO: 554265 - RNA, 19 nt, Artificial Sequence
  Description of Artificial Sequence: Synthetic oligonucleotide
  Sense strand starting at position 2324 of SEQ ID NO: 318330
uagcaugcuucggaaagaa

SEQ ID NO: 554266 - RNA, 19 nt, Artificial Sequence
  Description of Artificial Sequence: Synthetic oligonucleotide
  Antisense strand to SEQ ID NO: 554265
uucuuuccgaagcaugcua

SEQ ID NO: 554267 - RNA, 19 nt, Artificial Sequence
  Description of Artificial Sequence: Synthetic oligonucleotide
  Sense strand starting at position 2343 of SEQ ID NO: 318330
ggcuuagacuaagaaaguu

SEQ ID NO: 554268 - RNA, 19 nt, Artificial Sequence
  Description of Artificial Sequence: Synthetic oligonucleotide
  Antisense strand to SEQ ID NO: 554267
aacuuucuuagucuaagcc

SEQ ID NO: 554269 - RNA, 19 nt, Artificial Sequence
  Description of Artificial Sequence: Synthetic oligonucleotide
  Sense strand starting at position 2395 of SEQ ID NO: 318330
cucaguggugguuagauua

SEQ ID NO: 554270 - RNA, 19 nt, Artificial Sequence
  Description of Artificial Sequence: Synthetic oligonucleotide
  Antisense strand to SEQ ID NO: 554269
uaaucuaaccaccacugag

SEQ ID NO: 554271 - RNA, 19 nt, Artificial Sequence
  Description of Artificial Sequence: Synthetic oligonucleotide
  Sense strand starting at position 2402 of SEQ ID NO: 318330
gugguuagauuaccaucau

SEQ ID NO: 554272 - RNA, 19 nt, Artificial Sequence
  Description of Artificial Sequence: Synthetic oligonucleotide
  Antisense strand to SEQ ID NO: 554271
augaugguaaucuaaccac

SEQ ID NO: 554273 - RNA, 19 nt, Artificial Sequence
  Description of Artificial Sequence: Synthetic oligonucleotide
  Sense strand starting at position 2403 of SEQ ID NO: 318330
ugguuagauuaccaucauc

SEQ ID NO: 554274 - RNA, 19 nt, Artificial Sequence
  Description of Artificial Sequence: Synthetic oligonucleotide
  Antisense strand to SEQ ID NO: 554273
gaugaugguaaucuaacca

SEQ ID NO: 554275 - RNA, 19 nt, Artificial Sequence
  Description of Artificial Sequence: Synthetic oligonucleotide
  Sense strand starting at position 2483 of SEQ ID NO: 318330
uuuaaugggcacugaaaua

SEQ ID NO: 554276 - RNA, 19 nt, Artificial Sequence
  Description of Artificial Sequence: Synthetic oligonucleotide
  Antisense strand to SEQ ID NO: 554275
uauuucagugcccauuaaa

SEQ ID NO: 554277 - RNA, 19 nt, Artificial Sequence
  Description of Artificial Sequence: Synthetic oligonucleotide
  Sense strand starting at position 2553 of SEQ ID NO: 318330
ugaacuuugaugugucuga

SEQ ID NO: 554278 - RNA, 19 nt, Artificial Sequence
  Description of Artificial Sequence: Synthetic oligonucleotide
  Antisense strand to SEQ ID NO: 554277
ucagacacaucaaaguuca

SEQ ID NO: 554279 - RNA, 19 nt, Artificial Sequence
  Description of Artificial Sequence: Synthetic oligonucleotide
  Sense strand starting at position 2557 of SEQ ID NO: 318330
cuuugaugugucugagccu

SEQ ID NO: 554280 - RNA, 19 nt, Artificial Sequence
  Description of Artificial Sequence: Synthetic oligonucleotide
  Antisense strand to SEQ ID NO: 554279
aggcucagacacaucaaag

SEQ ID NO: 554281 - RNA, 19 nt, Artificial Sequence
  Description of Artificial Sequence: Synthetic oligonucleotide
  Sense strand starting at position 2560 of SEQ ID NO: 318330
ugaugugucugagccucau

SEQ ID NO: 554282 - RNA, 19 nt, Artificial Sequence
  Description of Artificial Sequence: Synthetic oligonucleotide
  Antisense strand to SEQ ID NO: 554281
augaggcucagacacauca

SEQ ID NO: 554283 - RNA, 19 nt, Artificial Sequence
  Description of Artificial Sequence: Synthetic oligonucleotide
  Sense strand starting at position 2564 of SEQ ID NO: 318330
gugucugagccucaugaaa

SEQ ID NO: 554284 - RNA, 19 nt, Artificial Sequence
  Description of Artificial Sequence: Synthetic oligonucleotide
  Antisense strand to SEQ ID NO: 554283
uuucaugaggcucagacac

SEQ ID NO: 554285 - RNA, 19 nt, Artificial Sequence
  Description of Artificial Sequence: Synthetic oligonucleotide
  Sense strand starting at position 2637 of SEQ ID NO: 318330
cuuucuaaugccuaggaga

SEQ ID NO: 554286 - RNA, 19 nt, Artificial Sequence
  Description of Artificial Sequence: Synthetic oligonucleotide
  Antisense strand to SEQ ID NO: 554285
ucuccuaggcauuagaaag

SEQ ID NO: 554287 - RNA, 19 nt, Artificial Sequence
  Description of Artificial Sequence: Synthetic oligonucleotide
  Sense strand starting at position 2639 of SEQ ID NO: 318330
uucuaaugccuaggagaac

SEQ ID NO: 554288 - RNA, 19 nt, Artificial Sequence
  Description of Artificial Sequence: Synthetic oligonucleotide
  Antisense strand to SEQ ID NO: 554287
guucuccuaggcauuagaa

SEQ ID NO: 554289 - RNA, 19 nt, Artificial Sequence
  Description of Artificial Sequence: Synthetic oligonucleotide
  Sense strand starting at position 2640 of SEQ ID NO: 318330
ucuaaugccuaggagaacu

SEQ ID NO: 554290 - RNA, 19 nt, Artificial Sequence
  Description of Artificial Sequence: Synthetic oligonucleotide
  Antisense strand to SEQ ID NO: 554289
aguucuccuaggcauuaga

SEQ ID NO: 554291 - RNA, 19 nt, Artificial Sequence
  Description of Artificial Sequence: Synthetic oligonucleotide
  Sense strand starting at position 2720 of SEQ ID NO: 318330
gccaguaaauauuccaguu

SEQ ID NO: 554292 - RNA, 19 nt, Artificial Sequence
  Description of Artificial Sequence: Synthetic oligonucleotide
  Antisense strand to SEQ ID NO: 554291
aacuggaauauuuacuggc

SEQ ID NO: 554293 - RNA, 19 nt, Artificial Sequence
  Description of Artificial Sequence: Synthetic oligonucleotide
  Sense strand starting at position 2799 of SEQ ID NO: 318330
ggguauauaugucauuguu

SEQ ID NO: 554294 - RNA, 19 nt, Artificial Sequence
  Description of Artificial Sequence: Synthetic oligonucleotide
  Antisense strand to SEQ ID NO: 554293
aacaaugacauauauaccc

SEQ ID NO: 554295 - RNA, 19 nt, Artificial Sequence
  Description of Artificial Sequence: Synthetic oligonucleotide
  Sense strand starting at position 2801 of SEQ ID NO: 318330
guauauaugucauuguuug

SEQ ID NO: 554296 - RNA, 19 nt, Artificial Sequence
  Description of Artificial Sequence: Synthetic oligonucleotide
  Antisense strand to SEQ ID NO: 554295
caaacaaugacauauauac

SEQ ID NO: 554297 - RNA, 19 nt, Artificial Sequence
  Description of Artificial Sequence: Synthetic oligonucleotide
  Sense strand starting at position 2807 of SEQ ID NO: 318330
augucauuguuuguuguua

SEQ ID NO: 554298 - RNA, 19 nt, Artificial Sequence
  Description of Artificial Sequence: Synthetic oligonucleotide
  Antisense strand to SEQ ID NO: 554297
uaacaacaaacaaugacau

SEQ ID NO: 554299 - RNA, 19 nt, Artificial Sequence
  Description of Artificial Sequence: Synthetic oligonucleotide
  Sense strand starting at position 2811 of SEQ ID NO: 318330
cauuguuuguuguuagguu

SEQ ID NO: 554300 - RNA, 19 nt, Artificial Sequence
  Description of Artificial Sequence: Synthetic oligonucleotide
  Antisense strand to SEQ ID NO: 554299
aaccuaacaacaaacaaug

SEQ ID NO: 554301 - RNA, 19 nt, Artificial Sequence
  Description of Artificial Sequence: Synthetic oligonucleotide
  Sense strand starting at position 2947 of SEQ ID NO: 318330
aggcaaugauacuguauaa

SEQ ID NO: 554302 - RNA, 19 nt, Artificial Sequence
  Description of Artificial Sequence: Synthetic oligonucleotide
  Antisense strand to SEQ ID NO: 554301
uuauacaguaucauugccu

SEQ ID NO: 554303 - RNA, 19 nt, Artificial Sequence
  Description of Artificial Sequence: Synthetic oligonucleotide
  Sense strand starting at position 3021 of SEQ ID NO: 318330
agugauagcuaggaagaag

SEQ ID NO: 554304 - RNA, 19 nt, Artificial Sequence
  Description of Artificial Sequence: Synthetic oligonucleotide
  Antisense strand to SEQ ID NO: 554303
cuucuuccuagcuaucacu

SEQ ID NO: 554305 - RNA, 19 nt, Artificial Sequence
  Description of Artificial Sequence: Synthetic oligonucleotide
  Sense strand starting at position 3069 of SEQ ID NO: 318330
gguacuuuacgauacuaca

SEQ ID NO: 554306 - RNA, 19 nt, Artificial Sequence
  Description of Artificial Sequence: Synthetic oligonucleotide
  Antisense strand to SEQ ID NO: 554305
uguaguaucguaaaguacc

SEQ ID NO: 554307 - RNA, 19 nt, Artificial Sequence
  Description of Artificial Sequence: Synthetic oligonucleotide
  Sense strand starting at position 3077 of SEQ ID NO: 318330
acgauacuacaaugguaga

SEQ ID NO: 554308 - RNA, 19 nt, Artificial Sequence
  Description of Artificial Sequence: Synthetic oligonucleotide
  Antisense strand to SEQ ID NO: 554307
ucuaccauuguaguaucgu

SEQ ID NO: 554309 - RNA, 19 nt, Artificial Sequence
  Description of Artificial Sequence: Synthetic oligonucleotide
  Sense strand starting at position 3078 of SEQ ID NO: 318330
cgauacuacaaugguagau

SEQ ID NO: 554310 - RNA, 19 nt, Artificial Sequence
  Description of Artificial Sequence: Synthetic oligonucleotide
  Antisense strand to SEQ ID NO: 554309
aucuaccauuguaguaucg

SEQ ID NO: 554311 - RNA, 19 nt, Artificial Sequence
  Description of Artificial Sequence: Synthetic oligonucleotide
  Sense strand starting at position 3102 of SEQ ID NO: 318330
acauuaugccguugucaaa

SEQ ID NO: 554312 - RNA, 19 nt, Artificial Sequence
  Description of Artificial Sequence: Synthetic oligonucleotide
  Antisense strand to SEQ ID NO: 554311
uuugacaacggcauaaugu

SEQ ID NO: 554313 - RNA, 19 nt, Artificial Sequence
  Description of Artificial Sequence: Synthetic oligonucleotide
  Sense strand starting at position 3241 of SEQ ID NO: 318330
agggaaacuuugaguggga

SEQ ID NO: 554314 - RNA, 19 nt, Artificial Sequence
  Description of Artificial Sequence: Synthetic oligonucleotide
  Antisense strand to SEQ ID NO: 554313
ucccacucaaaguuucccu

SEQ ID NO: 554315 - RNA, 19 nt, Artificial Sequence
  Description of Artificial Sequence: Synthetic oligonucleotide
  Sense strand starting at position 3609 of SEQ ID NO: 318330
uaaauauuaggaugugucu

SEQ ID NO: 554316 - RNA, 19 nt, Artificial Sequence
  Description of Artificial Sequence: Synthetic oligonucleotide
  Antisense strand to SEQ ID NO: 554315
agacacauccuaauauuua

SEQ ID NO: 554317 - RNA, 19 nt, Artificial Sequence
  Description of Artificial Sequence: Synthetic oligonucleotide
  Sense strand starting at position 3763 of SEQ ID NO: 318330
uguucuaucuuauucugua

SEQ ID NO: 554318 - RNA, 19 nt, Artificial Sequence
  Description of Artificial Sequence: Synthetic oligonucleotide
  Antisense strand to SEQ ID NO: 554317
uacagaauaagauagaaca

SEQ ID NO: 554319 - RNA, 19 nt, Artificial Sequence
  Description of Artificial Sequence: Synthetic oligonucleotide
  Sense strand starting at position 3764 of SEQ ID NO: 318330
guucuaucuuauucuguac

SEQ ID NO: 554320 - RNA, 19 nt, Artificial Sequence
  Description of Artificial Sequence: Synthetic oligonucleotide
  Antisense strand to SEQ ID NO: 554319
guacagaauaagauagaac

SEQ ID NO: 554321 - RNA, 19 nt, Artificial Sequence
  Description of Artificial Sequence: Synthetic oligonucleotide
  Sense strand starting at position 3796 of SEQ ID NO: 318330
ucugaugacuuauaugaaa

SEQ ID NO: 554322 - RNA, 19 nt, Artificial Sequence
  Description of Artificial Sequence: Synthetic oligonucleotide
  Antisense strand to SEQ ID NO: 554321
uuucauauaagucaucaga

SEQ ID NO: 554323 - RNA, 19 nt, Artificial Sequence
  Description of Artificial Sequence: Synthetic oligonucleotide
  Sense strand starting at position 3799 of SEQ ID NO: 318330
gaugacuuauaugaaagua

SEQ ID NO: 554324 - RNA, 19 nt, Artificial Sequence
  Description of Artificial Sequence: Synthetic oligonucleotide
  Antisense strand to SEQ ID NO: 554323
uacuuucauauaagucauc

SEQ ID NO: 554325 - RNA, 19 nt, Artificial Sequence
  Description of Artificial Sequence: Synthetic oligonucleotide
  Sense strand starting at position 3811 of SEQ ID NO: 318330
gaaaguaacuugcagacau

SEQ ID NO: 554326 - RNA, 19 nt, Artificial Sequence
  Description of Artificial Sequence: Synthetic oligonucleotide
  Antisense strand to SEQ ID NO: 554325
augucugcaaguuacuuuc

SEQ ID NO: 554327 - RNA, 19 nt, Artificial Sequence
  Description of Artificial Sequence: Synthetic oligonucleotide
  Sense strand starting at position 2000 of SEQ ID NO: 318331
cagcgauucuuccugguag

SEQ ID NO: 554328 - RNA, 19 nt, Artificial Sequence
  Description of Artificial Sequence: Synthetic oligonucleotide
  Antisense strand to SEQ ID NO: 554327
cuaccaggaagaaucgcug

SEQ ID NO: 554329 - RNA, 19 nt, Artificial Sequence
  Description of Artificial Sequence: Synthetic oligonucleotide
  Sense strand starting at position 2002 of SEQ ID NO: 318331
gcgauucuuccugguagag

SEQ ID NO: 554330 - RNA, 19 nt, Artificial Sequence
  Description of Artificial Sequence: Synthetic oligonucleotide
  Antisense strand to SEQ ID NO: 554329
cucuaccaggaagaaucgc

SEQ ID NO: 554331 - RNA, 19 nt, Artificial Sequence
  Description of Artificial Sequence: Synthetic oligonucleotide
  Sense strand starting at position 2171 of SEQ ID NO: 318331
gugaaaugagcccgaauug

SEQ ID NO: 554332 - RNA, 19 nt, Artificial Sequence
  Description of Artificial Sequence: Synthetic oligonucleotide
  Antisense strand to SEQ ID NO: 554331
caauucgggcucauuucac

SEQ ID NO: 554333 - RNA, 19 nt, Artificial Sequence
  Description of Artificial Sequence: Synthetic oligonucleotide
  Sense strand starting at position 2180 of SEQ ID NO: 318331
gcccgaauugcauauacca

SEQ ID NO: 554334 - RNA, 19 nt, Artificial Sequence
  Description of Artificial Sequence: Synthetic oligonucleotide
  Antisense strand to SEQ ID NO: 554333
ugguauaugcaauucgggc

SEQ ID NO: 554335 - RNA, 19 nt, Artificial Sequence
  Description of Artificial Sequence: Synthetic oligonucleotide
  Sense strand starting at position 2249 of SEQ ID NO: 318331
uaucaugucagagguggau

SEQ ID NO: 554336 - RNA, 19 nt, Artificial Sequence
  Description of Artificial Sequence: Synthetic oligonucleotide
  Antisense strand to SEQ ID NO: 554335
auccaccucugacaugaua

SEQ ID NO: 554337 - RNA, 19 nt, Artificial Sequence
  Description of Artificial Sequence: Synthetic oligonucleotide
  Sense strand starting at position 2298 of SEQ ID NO: 318331
agauuaucaugcucaagga

SEQ ID NO: 554338 - RNA, 19 nt, Artificial Sequence
  Description of Artificial Sequence: Synthetic oligonucleotide
  Antisense strand to SEQ ID NO: 554337
uccuugagcaugauaaucu

SEQ ID NO: 554339 - RNA, 19 nt, Artificial Sequence
  Description of Artificial Sequence: Synthetic oligonucleotide
  Sense strand starting at position 2325 of SEQ ID NO: 318331
agugcuuucucuucuuauu

SEQ ID NO: 554340 - RNA, 19 nt, Artificial Sequence
  Description of Artificial Sequence: Synthetic oligonucleotide
  Antisense strand to SEQ ID NO: 554339
aauaagaagagaaagcacu

SEQ ID NO: 554341 - RNA, 19 nt, Artificial Sequence
  Description of Artificial Sequence: Synthetic oligonucleotide
  Sense strand starting at position 2379 of SEQ ID NO: 318331
uuaguuuauuuccacagau

SEQ ID NO: 554342 - RNA, 19 nt, Artificial Sequence
  Description of Artificial Sequence: Synthetic oligonucleotide
  Antisense strand to SEQ ID NO: 554341
aucuguggaaauaaacuaa

SEQ ID NO: 554343 - RNA, 19 nt, Artificial Sequence
  Description of Artificial Sequence: Synthetic oligonucleotide
  Sense strand starting at position 2395 of SEQ ID NO: 318331
gauaauuguugaguuugua

SEQ ID NO: 554344 - RNA, 19 nt, Artificial Sequence
  Description of Artificial Sequence: Synthetic oligonucleotide
  Antisense strand to SEQ ID NO: 554343
uacaaacucaacaauuauc

SEQ ID NO: 554345 - RNA, 19 nt, Artificial Sequence
  Description of Artificial Sequence: Synthetic oligonucleotide
  Sense strand starting at position 2398 of SEQ ID NO: 318331
aauuguugaguuuguagaa

SEQ ID NO: 554346 - RNA, 19 nt, Artificial Sequence
  Description of Artificial Sequence: Synthetic oligonucleotide
  Antisense strand to SEQ ID NO: 554345
uucuacaaacucaacaauu

SEQ ID NO: 554347 - RNA, 19 nt, Artificial Sequence
  Description of Artificial Sequence: Synthetic oligonucleotide
  Sense strand starting at position 2399 of SEQ ID NO: 318331
auuguugaguuuguagaag

SEQ ID NO: 554348 - RNA, 19 nt, Artificial Sequence
  Description of Artificial Sequence: Synthetic oligonucleotide
  Antisense strand to SEQ ID NO: 554347
cuucuacaaacucaacaau

SEQ ID NO: 554349 - RNA, 19 nt, Artificial Sequence
  Description of Artificial Sequence: Synthetic oligonucleotide
  Sense strand starting at position 2407 of SEQ ID NO: 318331
guuuguagaaguuaggcaa

SEQ ID NO: 554350 - RNA, 19 nt, Artificial Sequence
  Description of Artificial Sequence: Synthetic oligonucleotide
  Antisense strand to SEQ ID NO: 554349
uugccuaacuucuacaaac

SEQ ID NO: 554351 - RNA, 19 nt, Artificial Sequence
  Description of Artificial Sequence: Synthetic oligonucleotide
  Sense strand starting at position 2435 of SEQ ID NO: 318331
acaagacaaugucuguaua

SEQ ID NO: 554352 - RNA, 19 nt, Artificial Sequence
  Description of Artificial Sequence: Synthetic oligonucleotide
  Antisense strand to SEQ ID NO: 554351
uauacagacauugucuugu

SEQ ID NO: 554353 - RNA, 19 nt, Artificial Sequence
  Description of Artificial Sequence: Synthetic oligonucleotide
  Sense strand starting at position 2438 of SEQ ID NO: 318331
agacaaugucuguauaucu

SEQ ID NO: 554354 - RNA, 19 nt, Artificial Sequence
  Description of Artificial Sequence: Synthetic oligonucleotide
  Antisense strand to SEQ ID NO: 554353
agauauacagacauugucu

SEQ ID NO: 554355 - RNA, 19 nt, Artificial Sequence
  Description of Artificial Sequence: Synthetic oligonucleotide
  Sense strand starting at position 2443 of SEQ ID NO: 318331
augucuguauaucuuacaa

SEQ ID NO: 554356 - RNA, 19 nt, Artificial Sequence
  Description of Artificial Sequence: Synthetic oligonucleotide
  Antisense strand to SEQ ID NO: 554355
uuguaagauauacagacau

SEQ ID NO: 554357 - RNA, 19 nt, Artificial Sequence
  Description of Artificial Sequence: Synthetic oligonucleotide
  Sense strand starting at position 2499 of SEQ ID NO: 318331
auguuuaaacagugugaaa

SEQ ID NO: 554358 - RNA, 19 nt, Artificial Sequence
  Description of Artificial Sequence: Synthetic oligonucleotide
  Antisense strand to SEQ ID NO: 554357
uuucacacuguuuaaacau

SEQ ID NO: 554359 - RNA, 19 nt, Artificial Sequence
  Description of Artificial Sequence: Synthetic oligonucleotide
  Sense strand starting at position 2536 of SEQ ID NO: 318331
uacugagugcacugaaagu

SEQ ID NO: 554360 - RNA, 19 nt, Artificial Sequence
  Description of Artificial Sequence: Synthetic oligonucleotide
  Antisense strand to SEQ ID NO: 554359
acuuucagugcacucagua

SEQ ID NO: 554361 - RNA, 19 nt, Artificial Sequence
  Description of Artificial Sequence: Synthetic oligonucleotide
  Sense strand starting at position 2581 of SEQ ID NO: 318331
gagagugauuaagaaaguu

SEQ ID NO: 554362 - RNA, 19 nt, Artificial Sequence
  Description of Artificial Sequence: Synthetic oligonucleotide
  Antisense strand to SEQ ID NO: 554361
aacuuucuuaaucacucuc

SEQ ID NO: 554363 - RNA, 19 nt, Artificial Sequence
  Description of Artificial Sequence: Synthetic oligonucleotide
  Sense strand starting at position 2669 of SEQ ID NO: 318331
gugugaaggcccugagaga

SEQ ID NO: 554364 - RNA, 19 nt, Artificial Sequence
  Description of Artificial Sequence: Synthetic oligonucleotide
  Antisense strand to SEQ ID NO: 554363
ucucucagggccuucacac

SEQ ID NO: 554365 - RNA, 19 nt, Artificial Sequence
  Description of Artificial Sequence: Synthetic oligonucleotide
  Sense strand starting at position 2687 of SEQ ID NO: 318331
agcaaagcauagcuauuaa

SEQ ID NO: 554366 - RNA, 19 nt, Artificial Sequence
  Description of Artificial Sequence: Synthetic oligonucleotide
  Antisense strand to SEQ ID NO: 554365
uuaauagcuaugcuuugcu

SEQ ID NO: 554367 - RNA, 19 nt, Artificial Sequence
  Description of Artificial Sequence: Synthetic oligonucleotide
  Sense strand starting at position 2745 of SEQ ID NO: 318331
ucucaagaguaaguggaaa

SEQ ID NO: 554368 - RNA, 19 nt, Artificial Sequence
  Description of Artificial Sequence: Synthetic oligonucleotide
  Antisense strand to SEQ ID NO: 554367
uuuccacuuacucuugaga

SEQ ID NO: 554369 - RNA, 19 nt, Artificial Sequence
  Description of Artificial Sequence: Synthetic oligonucleotide
  Sense strand starting at position 2846 of SEQ ID NO: 318331
guuguugguacagaaauaa

SEQ ID NO: 554370 - RNA, 19 nt, Artificial Sequence
  Description of Artificial Sequence: Synthetic oligonucleotide
  Antisense strand to SEQ ID NO: 554369
uuauuucuguaccaacaac

SEQ ID NO: 554371 - RNA, 19 nt, Artificial Sequence
  Description of Artificial Sequence: Synthetic oligonucleotide
  Sense strand starting at position 2917 of SEQ ID NO: 318331
ucaagaauguuugcucuua

SEQ ID NO: 554372 - RNA, 19 nt, Artificial Sequence
  Description of Artificial Sequence: Synthetic oligonucleotide
  Antisense strand to SEQ ID NO: 554371
uaagagcaaacauucuuga

SEQ ID NO: 554373 - RNA, 19 nt, Artificial Sequence
  Description of Artificial Sequence: Synthetic oligonucleotide
  Sense strand starting at position 2986 of SEQ ID NO: 318331
ugaguauaacugcaagcua

SEQ ID NO: 554374 - RNA, 19 nt, Artificial Sequence
  Description of Artificial Sequence: Synthetic oligonucleotide
  Antisense strand to SEQ ID NO: 554373
uagcuugcaguuauacuca

SEQ ID NO: 554375 - RNA, 19 nt, Artificial Sequence
  Description of Artificial Sequence: Synthetic oligonucleotide
  Sense strand starting at position 3067 of SEQ ID NO: 318331
cagguaaugaguugguuga

SEQ ID NO: 554376 - RNA, 19 nt, Artificial Sequence
  Description of Artificial Sequence: Synthetic oligonucleotide
  Antisense strand to SEQ ID NO: 554375
ucaaccaacucauuaccug

SEQ ID NO: 554377 - RNA, 19 nt, Artificial Sequence
  Description of Artificial Sequence: Synthetic oligonucleotide
  Sense strand starting at position 3068 of SEQ ID NO: 318331
agguaaugaguugguugau

SEQ ID NO: 554378 - RNA, 19 nt, Artificial Sequence
  Description of Artificial Sequence: Synthetic oligonucleotide
  Antisense strand to SEQ ID NO: 554377
aucaaccaacucauuaccu

SEQ ID NO: 554379 - RNA, 19 nt, Artificial Sequence
  Description of Artificial Sequence: Synthetic oligonucleotide
  Sense strand starting at position 3069 of SEQ ID NO: 318331
gguaaugaguugguugauc

SEQ ID NO: 554380 - RNA, 19 nt, Artificial Sequence
  Description of Artificial Sequence: Synthetic oligonucleotide
  Antisense strand to SEQ ID NO: 554379
gaucaaccaacucauuacc

SEQ ID NO: 554381 - RNA, 19 nt, Artificial Sequence
  Description of Artificial Sequence: Synthetic oligonucleotide
  Sense strand starting at position 3071 of SEQ ID NO: 318331
uaaugaguugguugaucag

SEQ ID NO: 554382 - RNA, 19 nt, Artificial Sequence
  Description of Artificial Sequence: Synthetic oligonucleotide
  Antisense strand to SEQ ID NO: 554381
cugaucaaccaacucauua

SEQ ID NO: 554383 - RNA, 19 nt, Artificial Sequence
  Description of Artificial Sequence: Synthetic oligonucleotide
  Sense strand starting at position 3074 of SEQ ID NO: 318331
ugaguugguugaucagaga

SEQ ID NO: 554384 - RNA, 19 nt, Artificial Sequence
  Description of Artificial Sequence: Synthetic oligonucleotide
  Antisense strand to SEQ ID NO: 554383
ucucugaucaaccaacuca

SEQ ID NO: 554385 - RNA, 19 nt, Artificial Sequence
  Description of Artificial Sequence: Synthetic oligonucleotide
  Sense strand starting at position 3255 of SEQ ID NO: 318331
auguauggaucagaaagua

SEQ ID NO: 554386 - RNA, 19 nt, Artificial Sequence
  Description of Artificial Sequence: Synthetic oligonucleotide
  Antisense strand to SEQ ID NO: 554385
uacuuucugauccauacau

SEQ ID NO: 554387 - RNA, 19 nt, Artificial Sequence
  Description of Artificial Sequence: Synthetic oligonucleotide
  Sense strand starting at position 3299 of SEQ ID NO: 318331
gugagucauuuagggaacu

SEQ ID NO: 554388 - RNA, 19 nt, Artificial Sequence
  Description of Artificial Sequence: Synthetic oligonucleotide
  Antisense strand to SEQ ID NO: 554387
aguucccuaaaugacucac

SEQ ID NO: 554389 - RNA, 19 nt, Artificial Sequence
  Description of Artificial Sequence: Synthetic oligonucleotide
  Sense strand starting at position 3300 of SEQ ID NO: 318331
ugagucauuuagggaacua

SEQ ID NO: 554390 - RNA, 19 nt, Artificial Sequence
  Description of Artificial Sequence: Synthetic oligonucleotide
  Antisense strand to SEQ ID NO: 554389
uaguucccuaaaugacuca

SEQ ID NO: 554391 - RNA, 19 nt, Artificial Sequence
  Description of Artificial Sequence: Synthetic oligonucleotide
  Sense strand starting at position 3443 of SEQ ID NO: 318331
gaaugauaacugcauguuc

SEQ ID NO: 554392 - RNA, 19 nt, Artificial Sequence
  Description of Artificial Sequence: Synthetic oligonucleotide
  Antisense strand to SEQ ID NO: 554391
gaacaugcaguuaucauuc

SEQ ID NO: 554393 - RNA, 19 nt, Artificial Sequence
  Description of Artificial Sequence: Synthetic oligonucleotide
  Sense strand starting at position 3518 of SEQ ID NO: 318331
aguauuugauuccagcaaa

SEQ ID NO: 554394 - RNA, 19 nt, Artificial Sequence
  Description of Artificial Sequence: Synthetic oligonucleotide
  Antisense strand to SEQ ID NO: 554393
uuugcuggaaucaaauacu

SEQ ID NO: 554395 - RNA, 19 nt, Artificial Sequence
  Description of Artificial Sequence: Synthetic oligonucleotide
  Sense strand starting at position 3543 of SEQ ID NO: 318331
uccuuuaaguguucuaguu

SEQ ID NO: 554396 - RNA, 19 nt, Artificial Sequence
  Description of Artificial Sequence: Synthetic oligonucleotide
  Antisense strand to SEQ ID NO: 554395
aacuagaacacuuaaagga

SEQ ID NO: 554397 - RNA, 19 nt, Artificial Sequence
  Description of Artificial Sequence: Synthetic oligonucleotide
  Sense strand starting at position 3774 of SEQ ID NO: 318331
aauagagugaguggugcua

SEQ ID NO: 554398 - RNA, 19 nt, Artificial Sequence
  Description of Artificial Sequence: Synthetic oligonucleotide
  Antisense strand to SEQ ID NO: 554397
uagcaccacucacucuauu

SEQ ID NO: 554399 - RNA, 19 nt, Artificial Sequence
  Description of Artificial Sequence: Synthetic oligonucleotide
  Sense strand starting at position 3807 of SEQ ID NO: 318331
ccuaaaggcuuguuucuaa

SEQ ID NO: 554400 - RNA, 19 nt, Artificial Sequence
  Description of Artificial Sequence: Synthetic oligonucleotide
  Antisense strand to SEQ ID NO: 554399
uuagaaacaagccuuuagg

SEQ ID NO: 554401 - RNA, 19 nt, Artificial Sequence
  Description of Artificial Sequence: Synthetic oligonucleotide
  Sense strand starting at position 3814 of SEQ ID NO: 318331
gcuuguuucuaagugaauc

SEQ ID NO: 554402 - RNA, 19 nt, Artificial Sequence
  Description of Artificial Sequence: Synthetic oligonucleotide
  Antisense strand to SEQ ID NO: 554401
gauucacuuagaaacaagc

SEQ ID NO: 554403 - RNA, 19 nt, Artificial Sequence
  Description of Artificial Sequence: Synthetic oligonucleotide
  Sense strand starting at position 3880 of SEQ ID NO: 318331
gaggguucuaaagguaaag

SEQ ID NO: 554404 - RNA, 19 nt, Artificial Sequence
  Description of Artificial Sequence: Synthetic oligonucleotide
  Antisense strand to SEQ ID NO: 554403
cuuuaccuuuagaacccuc

SEQ ID NO: 554405 - RNA, 19 nt, Artificial Sequence
  Description of Artificial Sequence: Synthetic oligonucleotide
  Sense strand starting at position 3935 of SEQ ID NO: 318331
uaaugaagugcucaaaguu

SEQ ID NO: 554406 - RNA, 19 nt, Artificial Sequence
  Description of Artificial Sequence: Synthetic oligonucleotide
  Antisense strand to SEQ ID NO: 554405
aacuuugagcacuucauua

SEQ ID NO: 554407 - RNA, 19 nt, Artificial Sequence
  Description of Artificial Sequence: Synthetic oligonucleotide
  Sense strand starting at position 2018 of SEQ ID NO: 318332
cugcgucuugauugagaaa

SEQ ID NO: 554408 - RNA, 19 nt, Artificial Sequence
  Description of Artificial Sequence: Synthetic oligonucleotide
  Antisense strand to SEQ ID NO: 554407
uuucucaaucaagacgcag

SEQ ID NO: 554409 - RNA, 19 nt, Artificial Sequence
  Description of Artificial Sequence: Synthetic oligonucleotide
  Sense strand starting at position 2019 of SEQ ID NO: 318332
ugcgucuugauugagaaau

SEQ ID NO: 554410 - RNA, 19 nt, Artificial Sequence
  Description of Artificial Sequence: Synthetic oligonucleotide
  Antisense strand to SEQ ID NO: 554409
auuucucaaucaagacgca

SEQ ID NO: 554411 - RNA, 19 nt, Artificial Sequence
  Description of Artificial Sequence: Synthetic oligonucleotide
  Sense strand starting at position 2052 of SEQ ID NO: 318332
caacguauuugggaaguuu

SEQ ID NO: 554412 - RNA, 19 nt, Artificial Sequence
  Description of Artificial Sequence: Synthetic oligonucleotide
  Antisense strand to SEQ ID NO: 554411
aaacuucccaaauacguug

SEQ ID NO: 554413 - RNA, 19 nt, Artificial Sequence
  Description of Artificial Sequence: Synthetic oligonucleotide
  Sense strand starting at position 2157 of SEQ ID NO: 318332
gugcacgaaccagaauaau

SEQ ID NO: 554414 - RNA, 19 nt, Artificial Sequence
  Description of Artificial Sequence: Synthetic oligonucleotide
  Antisense strand to SEQ ID NO: 554413
auuauucugguucgugcac

SEQ ID NO: 554415 - RNA, 19 nt, Artificial Sequence
  Description of Artificial Sequence: Synthetic oligonucleotide
  Sense strand starting at position 2212 of SEQ ID NO: 318332
acacgcuuaucagugaaac

SEQ ID NO: 554416 - RNA, 19 nt, Artificial Sequence
  Description of Artificial Sequence: Synthetic oligonucleotide
  Antisense strand to SEQ ID NO: 554415
guuucacugauaagcgugu

SEQ ID NO: 554417 - RNA, 19 nt, Artificial Sequence
  Description of Artificial Sequence: Synthetic oligonucleotide
  Sense strand starting at position 2213 of SEQ ID NO: 318332
cacgcuuaucagugaaacu

SEQ ID NO: 554418 - RNA, 19 nt, Artificial Sequence
  Description of Artificial Sequence: Synthetic oligonucleotide
  Antisense strand to SEQ ID NO: 554417
aguuucacugauaagcgug

SEQ ID NO: 554419 - RNA, 19 nt, Artificial Sequence
  Description of Artificial Sequence: Synthetic oligonucleotide
  Sense strand starting at position 2334 of SEQ ID NO: 318332
augugaggacuuugugaug

SEQ ID NO: 554420 - RNA, 19 nt, Artificial Sequence
  Description of Artificial Sequence: Synthetic oligonucleotide
  Antisense strand to SEQ ID NO: 554419
caucacaaaguccucacau

SEQ ID NO: 554421 - RNA, 19 nt, Artificial Sequence
  Description of Artificial Sequence: Synthetic oligonucleotide
  Sense strand starting at position 2340 of SEQ ID NO: 318332
ggacuuugugaugaugcaa

SEQ ID NO: 554422 - RNA, 19 nt, Artificial Sequence
  Description of Artificial Sequence: Synthetic oligonucleotide
  Antisense strand to SEQ ID NO: 554421
uugcaucaucacaaagucc

SEQ ID NO: 554423 - RNA, 19 nt, Artificial Sequence
  Description of Artificial Sequence: Synthetic oligonucleotide
  Sense strand starting at position 2360 of SEQ ID NO: 318332
aguuuaagauguucucuau

SEQ ID NO: 554424 - RNA, 19 nt, Artificial Sequence
  Description of Artificial Sequence: Synthetic oligonucleotide
  Antisense strand to SEQ ID NO: 554423
auagagaacaucuuaaacu

SEQ ID NO: 554425 - RNA, 19 nt, Artificial Sequence
  Description of Artificial Sequence: Synthetic oligonucleotide
  Sense strand starting at position 2373 of SEQ ID NO: 318332
cucuauacauggucuaaag

SEQ ID NO: 554426 - RNA, 19 nt, Artificial Sequence
  Description of Artificial Sequence: Synthetic oligonucleotide
  Antisense strand to SEQ ID NO: 554425
cuuuagaccauguauagag

SEQ ID NO: 554427 - RNA, 19 nt, Artificial Sequence
  Description of Artificial Sequence: Synthetic oligonucleotide
  Sense strand starting at position 2453 of SEQ ID NO: 318332
ggugaauagacagguaucu

SEQ ID NO: 554428 - RNA, 19 nt, Artificial Sequence
  Description of Artificial Sequence: Synthetic oligonucleotide
  Antisense strand to SEQ ID NO: 554427
agauaccugucuauucacc

SEQ ID NO: 554429 - RNA, 19 nt, Artificial Sequence
  Description of Artificial Sequence: Synthetic oligonucleotide
  Sense strand starting at position 2532 of SEQ ID NO: 318332
guauuagaaucacagauuc

SEQ ID NO: 554430 - RNA, 19 nt, Artificial Sequence
  Description of Artificial Sequence: Synthetic oligonucleotide
  Antisense strand to SEQ ID NO: 554429
gaaucugugauucuaauac

SEQ ID NO: 554431 - RNA, 19 nt, Artificial Sequence
  Description of Artificial Sequence: Synthetic oligonucleotide
  Sense strand starting at position 2603 of SEQ ID NO: 318332
gguaacaggacuugauuau

SEQ ID NO: 554432 - RNA, 19 nt, Artificial Sequence
  Description of Artificial Sequence: Synthetic oligonucleotide
  Antisense strand to SEQ ID NO: 554431
auaaucaaguccuguuacc

SEQ ID NO: 554433 - RNA, 19 nt, Artificial Sequence
  Description of Artificial Sequence: Synthetic oligonucleotide
  Sense strand starting at position 2610 of SEQ ID NO: 318332
ggacuugauuauucuaugu

SEQ ID NO: 554434 - RNA, 19 nt, Artificial Sequence
  Description of Artificial Sequence: Synthetic oligonucleotide
  Antisense strand to SEQ ID NO: 554433
acauagaauaaucaagucc

SEQ ID NO: 554435 - RNA, 19 nt, Artificial Sequence
  Description of Artificial Sequence: Synthetic oligonucleotide
  Sense strand starting at position 2614 of SEQ ID NO: 318332
uugauuauucuaugugacu

SEQ ID NO: 554436 - RNA, 19 nt, Artificial Sequence
  Description of Artificial Sequence: Synthetic oligonucleotide
  Antisense strand to SEQ ID NO: 554435
agucacauagaauaaucaa

SEQ ID NO: 554437 - RNA, 19 nt, Artificial Sequence
  Description of Artificial Sequence: Synthetic oligonucleotide
  Sense strand starting at position 2615 of SEQ ID NO: 318332
ugauuauucuaugugacua

SEQ ID NO: 554438 - RNA, 19 nt, Artificial Sequence
  Description of Artificial Sequence: Synthetic oligonucleotide
  Antisense strand to SEQ ID NO: 554437
uagucacauagaauaauca

SEQ ID NO: 554439 - RNA, 19 nt, Artificial Sequence
  Description of Artificial Sequence: Synthetic oligonucleotide
  Sense strand starting at position 2620 of SEQ ID NO: 318332
auucuaugugacuauuaug

SEQ ID NO: 554440 - RNA, 19 nt, Artificial Sequence
  Description of Artificial Sequence: Synthetic oligonucleotide
  Antisense strand to SEQ ID NO: 554439
cauaauagucacauagaau

SEQ ID NO: 554441 - RNA, 19 nt, Artificial Sequence
  Description of Artificial Sequence: Synthetic oligonucleotide
  Sense strand starting at position 2626 of SEQ ID NO: 318332
ugugacuauuaugaggaua

SEQ ID NO: 554442 - RNA, 19 nt, Artificial Sequence
  Description of Artificial Sequence: Synthetic oligonucleotide
  Antisense strand to SEQ ID NO: 554441
uauccucauaauagucaca

SEQ ID NO: 554443 - RNA, 19 nt, Artificial Sequence
  Description of Artificial Sequence: Synthetic oligonucleotide
  Sense strand starting at position 2628 of SEQ ID NO: 318332
ugacuauuaugaggauaau

SEQ ID NO: 554444 - RNA, 19 nt, Artificial Sequence
  Description of Artificial Sequence: Synthetic oligonucleotide
  Antisense strand to SEQ ID NO: 554443
auuauccucauaauaguca

SEQ ID NO: 554445 - RNA, 19 nt, Artificial Sequence
  Description of Artificial Sequence: Synthetic oligonucleotide
  Sense strand starting at position 2637 of SEQ ID NO: 318332
ugaggauaaugucaagaca

SEQ ID NO: 554446 - RNA, 19 nt, Artificial Sequence
  Description of Artificial Sequence: Synthetic oligonucleotide
  Antisense strand to SEQ ID NO: 554445
ugucuugacauuauccuca

SEQ ID NO: 554447 - RNA, 19 nt, Artificial Sequence
  Description of Artificial Sequence: Synthetic oligonucleotide
  Sense strand starting at position 2661 of SEQ ID NO: 318332
gaguaacagucacagaauu

SEQ ID NO: 554448 - RNA, 19 nt, Artificial Sequence
  Description of Artificial Sequence: Synthetic oligonucleotide
  Antisense strand to SEQ ID NO: 554447
aauucugugacuguuacuc

SEQ ID NO: 554449 - RNA, 19 nt, Artificial Sequence
  Description of Artificial Sequence: Synthetic oligonucleotide
  Sense strand starting at position 2692 of SEQ ID NO: 318332
aggcuuuaagcugagcuua

SEQ ID NO: 554450 - RNA, 19 nt, Artificial Sequence
  Description of Artificial Sequence: Synthetic oligonucleotide
  Antisense strand to SEQ ID NO: 554449
uaagcucagcuuaaagccu

SEQ ID NO: 554451 - RNA, 19 nt, Artificial Sequence
  Description of Artificial Sequence: Synthetic oligonucleotide
  Sense strand starting at position 2694 of SEQ ID NO: 318332
gcuuuaagcugagcuuauu

SEQ ID NO: 554452 - RNA, 19 nt, Artificial Sequence
  Description of Artificial Sequence: Synthetic oligonucleotide
  Antisense strand to SEQ ID NO: 554451
aauaagcucagcuuaaagc

SEQ ID NO: 554453 - RNA, 19 nt, Artificial Sequence
  Description of Artificial Sequence: Synthetic oligonucleotide
  Sense strand starting at position 2700 of SEQ ID NO: 318332
agcugagcuuauuuagcaa

SEQ ID NO: 554454 - RNA, 19 nt, Artificial Sequence
  Description of Artificial Sequence: Synthetic oligonucleotide
  Antisense strand to SEQ ID NO: 554453
uugcuaaauaagcucagcu

SEQ ID NO: 554455 - RNA, 19 nt, Artificial Sequence
  Description of Artificial Sequence: Synthetic oligonucleotide
  Sense strand starting at position 2741 of SEQ ID NO: 318332
caaugaguuugccuguuac

SEQ ID NO: 554456 - RNA, 19 nt, Artificial Sequence
  Description of Artificial Sequence: Synthetic oligonucleotide
  Antisense strand to SEQ ID NO: 554455
guaacaggcaaacucauug

SEQ ID NO: 554457 - RNA, 19 nt, Artificial Sequence
  Description of Artificial Sequence: Synthetic oligonucleotide
  Sense strand starting at position 2850 of SEQ ID NO: 318332
gugaccaaagggugacuua

SEQ ID NO: 554458 - RNA, 19 nt, Artificial Sequence
  Description of Artificial Sequence: Synthetic oligonucleotide
  Antisense strand to SEQ ID NO: 554457
uaagucacccuuuggucac

SEQ ID NO: 554459 - RNA, 19 nt, Artificial Sequence
  Description of Artificial Sequence: Synthetic oligonucleotide
  Sense strand starting at position 2869 of SEQ ID NO: 318332
ggcugucucuacucagaua

SEQ ID NO: 554460 - RNA, 19 nt, Artificial Sequence
  Description of Artificial Sequence: Synthetic oligonucleotide
  Antisense strand to SEQ ID NO: 554459
uaucugaguagagacagcc

SEQ ID NO: 554461 - RNA, 19 nt, Artificial Sequence
  Description of Artificial Sequence: Synthetic oligonucleotide
  Sense strand starting at position 2894 of SEQ ID NO: 318332
aguaaagagacuuguguau

SEQ ID NO: 554462 - RNA, 19 nt, Artificial Sequence
  Description of Artificial Sequence: Synthetic oligonucleotide
  Antisense strand to SEQ ID NO: 554461
auacacaagucucuuuacu

SEQ ID NO: 554463 - RNA, 19 nt, Artificial Sequence
  Description of Artificial Sequence: Synthetic oligonucleotide
  Sense strand starting at position 3174 of SEQ ID NO: 318332
uucugauagugauagaaag

SEQ ID NO: 554464 - RNA, 19 nt, Artificial Sequence
  Description of Artificial Sequence: Synthetic oligonucleotide
  Antisense strand to SEQ ID NO: 554463
cuuucuaucacuaucagaa

SEQ ID NO: 554465 - RNA, 19 nt, Artificial Sequence
  Description of Artificial Sequence: Synthetic oligonucleotide
  Sense strand starting at position 3289 of SEQ ID NO: 318332
agcagauuauugucagauc

SEQ ID NO: 554466 - RNA, 19 nt, Artificial Sequence
  Description of Artificial Sequence: Synthetic oligonucleotide
  Antisense strand to SEQ ID NO: 554465
gaucugacaauaaucugcu

SEQ ID NO: 554467 - RNA, 19 nt, Artificial Sequence
  Description of Artificial Sequence: Synthetic oligonucleotide
  Sense strand starting at position 3292 of SEQ ID NO: 318332
agauuauugucagaucaua

SEQ ID NO: 554468 - RNA, 19 nt, Artificial Sequence
  Description of Artificial Sequence: Synthetic oligonucleotide
  Antisense strand to SEQ ID NO: 554467
uaugaucugacaauaaucu

SEQ ID NO: 554469 - RNA, 19 nt, Artificial Sequence
  Description of Artificial Sequence: Synthetic oligonucleotide
  Sense strand starting at position 3318 of SEQ ID NO: 318332
ccuugaacaugucugaaac

SEQ ID NO: 554470 - RNA, 19 nt, Artificial Sequence
  Description of Artificial Sequence: Synthetic oligonucleotide
  Antisense strand to SEQ ID NO: 554469
guuucagacauguucaagg

SEQ ID NO: 554471 - RNA, 19 nt, Artificial Sequence
  Description of Artificial Sequence: Synthetic oligonucleotide
  Sense strand starting at position 3319 of SEQ ID NO: 318332
cuugaacaugucugaaacu

SEQ ID NO: 554472 - RNA, 19 nt, Artificial Sequence
  Description of Artificial Sequence: Synthetic oligonucleotide
  Antisense strand to SEQ ID NO: 554471
aguuucagacauguucaag

SEQ ID NO: 554473 - RNA, 19 nt, Artificial Sequence
  Description of Artificial Sequence: Synthetic oligonucleotide
  Sense strand starting at position 3426 of SEQ ID NO: 318332
gggauauaucaauggcagu

SEQ ID NO: 554474 - RNA, 19 nt, Artificial Sequence
  Description of Artificial Sequence: Synthetic oligonucleotide
  Antisense strand to SEQ ID NO: 554473
acugccauugauauauccc

SEQ ID NO: 554475 - RNA, 19 nt, Artificial Sequence
  Description of Artificial Sequence: Synthetic oligonucleotide
  Sense strand starting at position 3427 of SEQ ID NO: 318332
ggauauaucaauggcagua

SEQ ID NO: 554476 - RNA, 19 nt, Artificial Sequence
  Description of Artificial Sequence: Synthetic oligonucleotide
  Antisense strand to SEQ ID NO: 554475
uacugccauugauauaucc

SEQ ID NO: 554477 - RNA, 19 nt, Artificial Sequence
  Description of Artificial Sequence: Synthetic oligonucleotide
  Sense strand starting at position 3593 of SEQ ID NO: 318332
acaaaucuccugggcaaau

SEQ ID NO: 554478 - RNA, 19 nt, Artificial Sequence
  Description of Artificial Sequence: Synthetic oligonucleotide
  Antisense strand to SEQ ID NO: 554477
auuugcccaggagauuugu

SEQ ID NO: 554479 - RNA, 19 nt, Artificial Sequence
  Description of Artificial Sequence: Synthetic oligonucleotide
  Sense strand starting at position 3724 of SEQ ID NO: 318332
agaguaagaauugggucuu

SEQ ID NO: 554480 - RNA, 19 nt, Artificial Sequence
  Description of Artificial Sequence: Synthetic oligonucleotide
  Antisense strand to SEQ ID NO: 554479
aagacccaauucuuacucu

SEQ ID NO: 554481 - RNA, 19 nt, Artificial Sequence
  Description of Artificial Sequence: Synthetic oligonucleotide
  Sense strand starting at position 3833 of SEQ ID NO: 318332
ugcguauguugacucauuu

SEQ ID NO: 554482 - RNA, 19 nt, Artificial Sequence
  Description of Artificial Sequence: Synthetic oligonucleotide
  Antisense strand to SEQ ID NO: 554481
aaaugagucaacauacgca

SEQ ID NO: 554483 - RNA, 19 nt, Artificial Sequence
  Description of Artificial Sequence: Synthetic oligonucleotide
  Sense strand starting at position 3879 of SEQ ID NO: 318332
gcagucuuauuagccacau

SEQ ID NO: 554484 - RNA, 19 nt, Artificial Sequence
  Description of Artificial Sequence: Synthetic oligonucleotide
  Antisense strand to SEQ ID NO: 554483
auguggcuaauaagacugc

SEQ ID NO: 554485 - RNA, 19 nt, Artificial Sequence
  Description of Artificial Sequence: Synthetic oligonucleotide
  Sense strand starting at position 3946 of SEQ ID NO: 318332
agucauacagcaugugaaa

SEQ ID NO: 554486 - RNA, 19 nt, Artificial Sequence
  Description of Artificial Sequence: Synthetic oligonucleotide
  Antisense strand to SEQ ID NO: 554485
uuucacaugcuguaugacu

SEQ ID NO: 554487 - RNA, 19 nt, Artificial Sequence
  Description of Artificial Sequence: Synthetic oligonucleotide
  Sense strand starting at position 2069 of SEQ ID NO: 318333
cuaacugacguguauccau

SEQ ID NO: 554488 - RNA, 19 nt, Artificial Sequence
  Description of Artificial Sequence: Synthetic oligonucleotide
  Antisense strand to SEQ ID NO: 554487
auggauacacgucaguuag

SEQ ID NO: 554489 - RNA, 19 nt, Artificial Sequence
  Description of Artificial Sequence: Synthetic oligonucleotide
  Sense strand starting at position 2101 of SEQ ID NO: 318333
auaagcucucccgauggua

SEQ ID NO: 554490 - RNA, 19 nt, Artificial Sequence
  Description of Artificial Sequence: Synthetic oligonucleotide
  Antisense strand to SEQ ID NO: 554489
uaccaucgggagagcuuau

SEQ ID NO: 554491 - RNA, 19 nt, Artificial Sequence
  Description of Artificial Sequence: Synthetic oligonucleotide
  Sense strand starting at position 2127 of SEQ ID NO: 318333
cucuuaguugcugaaaguu

SEQ ID NO: 554492 - RNA, 19 nt, Artificial Sequence
  Description of Artificial Sequence: Synthetic oligonucleotide
  Antisense strand to SEQ ID NO: 554491
aacuuucagcaacuaagag

SEQ ID NO: 554493 - RNA, 19 nt, Artificial Sequence
  Description of Artificial Sequence: Synthetic oligonucleotide
  Sense strand starting at position 2150 of SEQ ID NO: 318333
auaaauguuguggaguuaa

SEQ ID NO: 554494 - RNA, 19 nt, Artificial Sequence
  Description of Artificial Sequence: Synthetic oligonucleotide
  Antisense strand to SEQ ID NO: 554493
uuaacuccacaacauuuau

SEQ ID NO: 554495 - RNA, 19 nt, Artificial Sequence
  Description of Artificial Sequence: Synthetic oligonucleotide
  Sense strand starting at position 2259 of SEQ ID NO: 318333
ugguguuucuuauuugauu

SEQ ID NO: 554496 - RNA, 19 nt, Artificial Sequence
  Description of Artificial Sequence: Synthetic oligonucleotide
  Antisense strand to SEQ ID NO: 554495
aaucaaauaagaaacacca

SEQ ID NO: 554497 - RNA, 19 nt, Artificial Sequence
  Description of Artificial Sequence: Synthetic oligonucleotide
  Sense strand starting at position 2578 of SEQ ID NO: 318333
ggaguuauagauuguuacu

SEQ ID NO: 554498 - RNA, 19 nt, Artificial Sequence
  Description of Artificial Sequence: Synthetic oligonucleotide
  Antisense strand to SEQ ID NO: 554497
aguaacaaucuauaacucc

SEQ ID NO: 554499 - RNA, 19 nt, Artificial Sequence
  Description of Artificial Sequence: Synthetic oligonucleotide
  Sense strand starting at position 2580 of SEQ ID NO: 318333
aguuauagauuguuacucu

SEQ ID NO: 554500 - RNA, 19 nt, Artificial Sequence
  Description of Artificial Sequence: Synthetic oligonucleotide
  Antisense strand to SEQ ID NO: 554499
agaguaacaaucuauaacu

SEQ ID NO: 554501 - RNA, 19 nt, Artificial Sequence
  Description of Artificial Sequence: Synthetic oligonucleotide
  Sense strand starting at position 2636 of SEQ ID NO: 318333
caaauugaucuguggcauc

SEQ ID NO: 554502 - RNA, 19 nt, Artificial Sequence
  Description of Artificial Sequence: Synthetic oligonucleotide
  Antisense strand to SEQ ID NO: 554501
gaugccacagaucaauuug

SEQ ID NO: 554503 - RNA, 19 nt, Artificial Sequence
  Description of Artificial Sequence: Synthetic oligonucleotide
  Sense strand starting at position 2773 of SEQ ID NO: 318333
guaguacugguauaaacau

SEQ ID NO: 554504 - RNA, 19 nt, Artificial Sequence
  Description of Artificial Sequence: Synthetic oligonucleotide
  Antisense strand to SEQ ID NO: 554503
auguuuauaccaguacuac

SEQ ID NO: 554505 - RNA, 19 nt, Artificial Sequence
  Description of Artificial Sequence: Synthetic oligonucleotide
  Sense strand starting at position 2782 of SEQ ID NO: 318333
guauaaacauccuuguacu

SEQ ID NO: 554506 - RNA, 19 nt, Artificial Sequence
  Description of Artificial Sequence: Synthetic oligonucleotide
  Antisense strand to SEQ ID NO: 554505
aguacaaggauguuuauac

SEQ ID NO: 554507 - RNA, 19 nt, Artificial Sequence
  Description of Artificial Sequence: Synthetic oligonucleotide
  Sense strand starting at position 2814 of SEQ ID NO: 318333
ccacauauauguguuuaug

SEQ ID NO: 554508 - RNA, 19 nt, Artificial Sequence
  Description of Artificial Sequence: Synthetic oligonucleotide
  Antisense strand to SEQ ID NO: 554507
cauaaacacauauaugugg

SEQ ID NO: 554509 - RNA, 19 nt, Artificial Sequence
  Description of Artificial Sequence: Synthetic oligonucleotide
  Sense strand starting at position 2817 of SEQ ID NO: 318333
cauauauguguuuauguug

SEQ ID NO: 554510 - RNA, 19 nt, Artificial Sequence
  Description of Artificial Sequence: Synthetic oligonucleotide
  Antisense strand to SEQ ID NO: 554509
caacauaaacacauauaug

SEQ ID NO: 554511 - RNA, 19 nt, Artificial Sequence
  Description of Artificial Sequence: Synthetic oligonucleotide
  Sense strand starting at position 2853 of SEQ ID NO: 318333
uggauugcuaugcauuaag

SEQ ID NO: 554512 - RNA, 19 nt, Artificial Sequence
  Description of Artificial Sequence: Synthetic oligonucleotide
  Antisense strand to SEQ ID NO: 554511
cuuaaugcauagcaaucca

SEQ ID NO: 554513 - RNA, 19 nt, Artificial Sequence
  Description of Artificial Sequence: Synthetic oligonucleotide
  Sense strand starting at position 2856 of SEQ ID NO: 318333
auugcuaugcauuaagaug

SEQ ID NO: 554514 - RNA, 19 nt, Artificial Sequence
  Description of Artificial Sequence: Synthetic oligonucleotide
  Antisense strand to SEQ ID NO: 554513
caucuuaaugcauagcaau

SEQ ID NO: 554515 - RNA, 19 nt, Artificial Sequence
  Description of Artificial Sequence: Synthetic oligonucleotide
  Sense strand starting at position 2867 of SEQ ID NO: 318333
uuaagaugugcacauauau

SEQ ID NO: 554516 - RNA, 19 nt, Artificial Sequence
  Description of Artificial Sequence: Synthetic oligonucleotide
  Antisense strand to SEQ ID NO: 554515
auauaugugcacaucuuaa

SEQ ID NO: 554517 - RNA, 19 nt, Artificial Sequence
  Description of Artificial Sequence: Synthetic oligonucleotide
  Sense strand starting at position 2886 of SEQ ID NO: 318333
uuugcuuuagcagauaaug

SEQ ID NO: 554518 - RNA, 19 nt, Artificial Sequence
  Description of Artificial Sequence: Synthetic oligonucleotide
  Antisense strand to SEQ ID NO: 554517
cauuaucugcuaaagcaaa

SEQ ID NO: 554519 - RNA, 19 nt, Artificial Sequence
  Description of Artificial Sequence: Synthetic oligonucleotide
  Sense strand starting at position 2888 of SEQ ID NO: 318333
ugcuuuagcagauaaugag

SEQ ID NO: 554520 - RNA, 19 nt, Artificial Sequence
  Description of Artificial Sequence: Synthetic oligonucleotide
  Antisense strand to SEQ ID NO: 554519
cucauuaucugcuaaagca

SEQ ID NO: 554521 - RNA, 19 nt, Artificial Sequence
  Description of Artificial Sequence: Synthetic oligonucleotide
  Sense strand starting at position 3093 of SEQ ID NO: 318333
uuuaucagccauuaggaua

SEQ ID NO: 554522 - RNA, 19 nt, Artificial Sequence
  Description of Artificial Sequence: Synthetic oligonucleotide
  Antisense strand to SEQ ID NO: 554521
uauccuaauggcugauaaa

SEQ ID NO: 554523 - RNA, 19 nt, Artificial Sequence
  Description of Artificial Sequence: Synthetic oligonucleotide
  Sense strand starting at position 3112 of SEQ ID NO: 318333
caaucuugugaagggcuua

SEQ ID NO: 554524 - RNA, 19 nt, Artificial Sequence
  Description of Artificial Sequence: Synthetic oligonucleotide
  Antisense strand to SEQ ID NO: 554523
uaagcccuucacaagauug

SEQ ID NO: 554525 - RNA, 19 nt, Artificial Sequence
  Description of Artificial Sequence: Synthetic oligonucleotide
  Sense strand starting at position 3117 of SEQ ID NO: 318333
uugugaagggcuuaugcaa

SEQ ID NO: 554526 - RNA, 19 nt, Artificial Sequence
  Description of Artificial Sequence: Synthetic oligonucleotide
  Antisense strand to SEQ ID NO: 554525
uugcauaagcccuucacaa

SEQ ID NO: 554527 - RNA, 19 nt, Artificial Sequence
  Description of Artificial Sequence: Synthetic oligonucleotide
  Sense strand starting at position 3174 of SEQ ID NO: 318333
gcuuauugaucugcagaag

SEQ ID NO: 554528 - RNA, 19 nt, Artificial Sequence
  Description of Artificial Sequence: Synthetic oligonucleotide
  Antisense strand to SEQ ID NO: 554527
cuucugcagaucaauaagc

SEQ ID NO: 554529 - RNA, 19 nt, Artificial Sequence
  Description of Artificial Sequence: Synthetic oligonucleotide
  Sense strand starting at position 3175 of SEQ ID NO: 318333
cuuauugaucugcagaagu

SEQ ID NO: 554530 - RNA, 19 nt, Artificial Sequence
  Description of Artificial Sequence: Synthetic oligonucleotide
  Antisense strand to SEQ ID NO: 554529
acuucugcagaucaauaag

SEQ ID NO: 554531 - RNA, 19 nt, Artificial Sequence
  Description of Artificial Sequence: Synthetic oligonucleotide
  Sense strand starting at position 3177 of SEQ ID NO: 318333
uauugaucugcagaaguuu

SEQ ID NO: 554532 - RNA, 19 nt, Artificial Sequence
  Description of Artificial Sequence: Synthetic oligonucleotide
  Antisense strand to SEQ ID NO: 554531
aaacuucugcagaucaaua

SEQ ID NO: 554533 - RNA, 19 nt, Artificial Sequence
  Description of Artificial Sequence: Synthetic oligonucleotide
  Sense strand starting at position 3185 of SEQ ID NO: 318333
ugcagaaguuucucauaua

SEQ ID NO: 554534 - RNA, 19 nt, Artificial Sequence
  Description of Artificial Sequence: Synthetic oligonucleotide
  Antisense strand to SEQ ID NO: 554533
uauaugagaaacuucugca

SEQ ID NO: 554535 - RNA, 19 nt, Artificial Sequence
  Description of Artificial Sequence: Synthetic oligonucleotide
  Sense strand starting at position 3197 of SEQ ID NO: 318333
ucauauauucugggcauaa

SEQ ID NO: 554536 - RNA, 19 nt, Artificial Sequence
  Description of Artificial Sequence: Synthetic oligonucleotide
  Antisense strand to SEQ ID NO: 554535
uuaugcccagaauauauga

SEQ ID NO: 554537 - RNA, 19 nt, Artificial Sequence
  Description of Artificial Sequence: Synthetic oligonucleotide
  Sense strand starting at position 3199 of SEQ ID NO: 318333
auauauucugggcauaagu

SEQ ID NO: 554538 - RNA, 19 nt, Artificial Sequence
  Description of Artificial Sequence: Synthetic oligonucleotide
  Antisense strand to SEQ ID NO: 554537
acuuaugcccagaauauau

SEQ ID NO: 554539 - RNA, 19 nt, Artificial Sequence
  Description of Artificial Sequence: Synthetic oligonucleotide
  Sense strand starting at position 3279 of SEQ ID NO: 318333
uauuaugugucuuugauga

SEQ ID NO: 554540 - RNA, 19 nt, Artificial Sequence
  Description of Artificial Sequence: Synthetic oligonucleotide
  Antisense strand to SEQ ID NO: 554539
ucaucaaagacacauaaua

SEQ ID NO: 554541 - RNA, 19 nt, Artificial Sequence
  Description of Artificial Sequence: Synthetic oligonucleotide
  Sense strand starting at position 3284 of SEQ ID NO: 318333
ugugucuuugaugaauaaa

SEQ ID NO: 554542 - RNA, 19 nt, Artificial Sequence
  Description of Artificial Sequence: Synthetic oligonucleotide
  Antisense strand to SEQ ID NO: 554541
uuuauucaucaaagacaca

SEQ ID NO: 554543 - RNA, 19 nt, Artificial Sequence
  Description of Artificial Sequence: Synthetic oligonucleotide
  Sense strand starting at position 3305 of SEQ ID NO: 318333
uucuuaccuuuagucagau

SEQ ID NO: 554544 - RNA, 19 nt, Artificial Sequence
  Description of Artificial Sequence: Synthetic oligonucleotide
  Antisense strand to SEQ ID NO: 554543
aucugacuaaagguaagaa

SEQ ID NO: 554545 - RNA, 19 nt, Artificial Sequence
  Description of Artificial Sequence: Synthetic oligonucleotide
  Sense strand starting at position 3306 of SEQ ID NO: 318333
ucuuaccuuuagucagauu

SEQ ID NO: 554546 - RNA, 19 nt, Artificial Sequence
  Description of Artificial Sequence: Synthetic oligonucleotide
  Antisense strand to SEQ ID NO: 554545
aaucugacuaaagguaaga

SEQ ID NO: 554547 - RNA, 19 nt, Artificial Sequence
  Description of Artificial Sequence: Synthetic oligonucleotide
  Sense strand starting at position 3513 of SEQ ID NO: 318333
aaauguaaguaucugaaug

SEQ ID NO: 554548 - RNA, 19 nt, Artificial Sequence
  Description of Artificial Sequence: Synthetic oligonucleotide
  Antisense strand to SEQ ID NO: 554547
cauucagauacuuacauuu

SEQ ID NO: 554549 - RNA, 19 nt, Artificial Sequence
  Description of Artificial Sequence: Synthetic oligonucleotide
  Sense strand starting at position 3521 of SEQ ID NO: 318333
guaucugaaugcuuuaaac

SEQ ID NO: 554550 - RNA, 19 nt, Artificial Sequence
  Description of Artificial Sequence: Synthetic oligonucleotide
  Antisense strand to SEQ ID NO: 554549
guuuaaagcauucagauac

SEQ ID NO: 554551 - RNA, 19 nt, Artificial Sequence
  Description of Artificial Sequence: Synthetic oligonucleotide
  Sense strand starting at position 3599 of SEQ ID NO: 318333
guuauaaauuagguaacca

SEQ ID NO: 554552 - RNA, 19 nt, Artificial Sequence
  Description of Artificial Sequence: Synthetic oligonucleotide
  Antisense strand to SEQ ID NO: 554551
ugguuaccuaauuuauaac

SEQ ID NO: 554553 - RNA, 19 nt, Artificial Sequence
  Description of Artificial Sequence: Synthetic oligonucleotide
  Sense strand starting at position 3616 of SEQ ID NO: 318333
cauagcucugaagauguuu

SEQ ID NO: 554554 - RNA, 19 nt, Artificial Sequence
  Description of Artificial Sequence: Synthetic oligonucleotide
  Antisense strand to SEQ ID NO: 554553
aaacaucuucagagcuaug

SEQ ID NO: 554555 - RNA, 19 nt, Artificial Sequence
  Description of Artificial Sequence: Synthetic oligonucleotide
  Sense strand starting at position 3655 of SEQ ID NO: 318333
acaauaacucauuguguua

SEQ ID NO: 554556 - RNA, 19 nt, Artificial Sequence
  Description of Artificial Sequence: Synthetic oligonucleotide
  Antisense strand to SEQ ID NO: 554555
uaacacaaugaguuauugu

SEQ ID NO: 554557 - RNA, 19 nt, Artificial Sequence
  Description of Artificial Sequence: Synthetic oligonucleotide
  Sense strand starting at position 3677 of SEQ ID NO: 318333
auuauagcuuuaucaugag

SEQ ID NO: 554558 - RNA, 19 nt, Artificial Sequence
  Description of Artificial Sequence: Synthetic oligonucleotide
  Antisense strand to SEQ ID NO: 554557
cucaugauaaagcuauaau

SEQ ID NO: 554559 - RNA, 19 nt, Artificial Sequence
  Description of Artificial Sequence: Synthetic oligonucleotide
  Sense strand starting at position 3708 of SEQ ID NO: 318333
agaaguaaguucuccaguu

SEQ ID NO: 554560 - RNA, 19 nt, Artificial Sequence
  Description of Artificial Sequence: Synthetic oligonucleotide
  Antisense strand to SEQ ID NO: 554559
aacuggagaacuuacuucu

SEQ ID NO: 554561 - RNA, 19 nt, Artificial Sequence
  Description of Artificial Sequence: Synthetic oligonucleotide
  Sense strand starting at position 3868 of SEQ ID NO: 318333
uuugcuacagcugaugaau

SEQ ID NO: 554562 - RNA, 19 nt, Artificial Sequence
  Description of Artificial Sequence: Synthetic oligonucleotide
  Antisense strand to SEQ ID NO: 554561
auucaucagcuguagcaaa

SEQ ID NO: 554563 - RNA, 19 nt, Artificial Sequence
  Description of Artificial Sequence: Synthetic oligonucleotide
  Sense strand starting at position 3871 of SEQ ID NO: 318333
gcuacagcugaugaaucua

SEQ ID NO: 554564 - RNA, 19 nt, Artificial Sequence
  Description of Artificial Sequence: Synthetic oligonucleotide
  Antisense strand to SEQ ID NO: 554563
uagauucaucagcuguagc

SEQ ID NO: 554565 - RNA, 19 nt, Artificial Sequence
  Description of Artificial Sequence: Synthetic oligonucleotide
  Sense strand starting at position 3911 of SEQ ID NO: 318333
uggaguccauaguuuacau

SEQ ID NO: 554566 - RNA, 19 nt, Artificial Sequence
  Description of Artificial Sequence: Synthetic oligonucleotide
  Antisense strand to SEQ ID NO: 554565
auguaaacuauggacucca

SEQ ID NO: 554567 - RNA, 19 nt, Artificial Sequence
  Description of Artificial Sequence: Synthetic oligonucleotide
  Sense strand starting at position 1993 of SEQ ID NO: 318334
uugcaucaugucuauuaug

SEQ ID NO: 554568 - RNA, 19 nt, Artificial Sequence
  Description of Artificial Sequence: Synthetic oligonucleotide
  Antisense strand to SEQ ID NO: 554567
cauaauagacaugaugcaa

SEQ ID NO: 554569 - RNA, 19 nt, Artificial Sequence
  Description of Artificial Sequence: Synthetic oligonucleotide
  Sense strand starting at position 2001 of SEQ ID NO: 318334
ugucuauuaugucugaaua

SEQ ID NO: 554570 - RNA, 19 nt, Artificial Sequence
  Description of Artificial Sequence: Synthetic oligonucleotide
  Antisense strand to SEQ ID NO: 554569
uauucagacauaauagaca

SEQ ID NO: 554571 - RNA, 19 nt, Artificial Sequence
  Description of Artificial Sequence: Synthetic oligonucleotide
  Sense strand starting at position 2002 of SEQ ID NO: 318334
gucuauuaugucugaauac

SEQ ID NO: 554572 - RNA, 19 nt, Artificial Sequence
  Description of Artificial Sequence: Synthetic oligonucleotide
  Antisense strand to SEQ ID NO: 554571
guauucagacauaauagac

SEQ ID NO: 554573 - RNA, 19 nt, Artificial Sequence
  Description of Artificial Sequence: Synthetic oligonucleotide
  Sense strand starting at position 2159 of SEQ ID NO: 318334
gcuguaaacguggucugua

SEQ ID NO: 554574 - RNA, 19 nt, Artificial Sequence
  Description of Artificial Sequence: Synthetic oligonucleotide
  Antisense strand to SEQ ID NO: 554573
uacagaccacguuuacagc

SEQ ID NO: 554575 - RNA, 19 nt, Artificial Sequence
  Description of Artificial Sequence: Synthetic oligonucleotide
  Sense strand starting at position 2162 of SEQ ID NO: 318334
guaaacguggucuguauuu

SEQ ID NO: 554576 - RNA, 19 nt, Artificial Sequence
  Description of Artificial Sequence: Synthetic oligonucleotide
  Antisense strand to SEQ ID NO: 554575
aaauacagaccacguuuac

SEQ ID NO: 554577 - RNA, 19 nt, Artificial Sequence
  Description of Artificial Sequence: Synthetic oligonucleotide
  Sense strand starting at position 2307 of SEQ ID NO: 318334
ucagaaaucugagcauuau

SEQ ID NO: 554578 - RNA, 19 nt, Artificial Sequence
  Description of Artificial Sequence: Synthetic oligonucleotide
  Antisense strand to SEQ ID NO: 554577
auaaugcucagauuucuga

SEQ ID NO: 554579 - RNA, 19 nt, Artificial Sequence
  Description of Artificial Sequence: Synthetic oligonucleotide
  Sense strand starting at position 2468 of SEQ ID NO: 318334
aaucaaauucccugguggu

SEQ ID NO: 554580 - RNA, 19 nt, Artificial Sequence
  Description of Artificial Sequence: Synthetic oligonucleotide
  Antisense strand to SEQ ID NO: 554579
accaccagggaauuugauu

SEQ ID NO: 554581 - RNA, 19 nt, Artificial Sequence
  Description of Artificial Sequence: Synthetic oligonucleotide
  Sense strand starting at position 2503 of SEQ ID NO: 318334
gauugaagugcagauucua

SEQ ID NO: 554582 - RNA, 19 nt, Artificial Sequence
  Description of Artificial Sequence: Synthetic oligonucleotide
  Antisense strand to SEQ ID NO: 554581
uagaaucugcacuucaauc

SEQ ID NO: 554583 - RNA, 19 nt, Artificial Sequence
  Description of Artificial Sequence: Synthetic oligonucleotide
  Sense strand starting at position 2584 of SEQ ID NO: 318334
cuauuaguccaagagguac

SEQ ID NO: 554584 - RNA, 19 nt, Artificial Sequence
  Description of Artificial Sequence: Synthetic oligonucleotide
  Antisense strand to SEQ ID NO: 554583
guaccucuuggacuaauag

SEQ ID NO: 554585 - RNA, 19 nt, Artificial Sequence
  Description of Artificial Sequence: Synthetic oligonucleotide
  Sense strand starting at position 2590 of SEQ ID NO: 318334
guccaagagguacacuauu

SEQ ID NO: 554586 - RNA, 19 nt, Artificial Sequence
  Description of Artificial Sequence: Synthetic oligonucleotide
  Antisense strand to SEQ ID NO: 554585
aauaguguaccucuuggac

SEQ ID NO: 554587 - RNA, 19 nt, Artificial Sequence
  Description of Artificial Sequence: Synthetic oligonucleotide
  Sense strand starting at position 2642 of SEQ ID NO: 318334
guuuguuagcaacaauaau

SEQ ID NO: 554588 - RNA, 19 nt, Artificial Sequence
  Description of Artificial Sequence: Synthetic oligonucleotide
  Antisense strand to SEQ ID NO: 554587
auuauuguugcuaacaaac

SEQ ID NO: 554589 - RNA, 19 nt, Artificial Sequence
  Description of Artificial Sequence: Synthetic oligonucleotide
  Sense strand starting at position 2790 of SEQ ID NO: 318334
ccaagaaguacguaugaua

SEQ ID NO: 554590 - RNA, 19 nt, Artificial Sequence
  Description of Artificial Sequence: Synthetic oligonucleotide
  Antisense strand to SEQ ID NO: 554589
uaucauacguacuucuugg

SEQ ID NO: 554591 - RNA, 19 nt, Artificial Sequence
  Description of Artificial Sequence: Synthetic oligonucleotide
  Sense strand starting at position 2797 of SEQ ID NO: 318334
guacguaugauacauguau

SEQ ID NO: 554592 - RNA, 19 nt, Artificial Sequence
  Description of Artificial Sequence: Synthetic oligonucleotide
  Antisense strand to SEQ ID NO: 554591
auacauguaucauacguac

SEQ ID NO: 554593 - RNA, 19 nt, Artificial Sequence
  Description of Artificial Sequence: Synthetic oligonucleotide
  Sense strand starting at position 2804 of SEQ ID NO: 318334
ugauacauguaucuaagua

SEQ ID NO: 554594 - RNA, 19 nt, Artificial Sequence
  Description of Artificial Sequence: Synthetic oligonucleotide
  Antisense strand to SEQ ID NO: 554593
uacuuagauacauguauca

SEQ ID NO: 554595 - RNA, 19 nt, Artificial Sequence
  Description of Artificial Sequence: Synthetic oligonucleotide
  Sense strand starting at position 3119 of SEQ ID NO: 318334
acaggugaguuacauuuga

SEQ ID NO: 554596 - RNA, 19 nt, Artificial Sequence
  Description of Artificial Sequence: Synthetic oligonucleotide
  Antisense strand to SEQ ID NO: 554595
ucaaauguaacucaccugu

SEQ ID NO: 554597 - RNA, 19 nt, Artificial Sequence
  Description of Artificial Sequence: Synthetic oligonucleotide
  Sense strand starting at position 3124 of SEQ ID NO: 318334
ugaguuacauuugagugaa

SEQ ID NO: 554598 - RNA, 19 nt, Artificial Sequence
  Description of Artificial Sequence: Synthetic oligonucleotide
  Antisense strand to SEQ ID NO: 554597
uucacucaaauguaacuca

SEQ ID NO: 554599 - RNA, 19 nt, Artificial Sequence
  Description of Artificial Sequence: Synthetic oligonucleotide
  Sense strand starting at position 3136 of SEQ ID NO: 318334
gagugaaugccauggaauu

SEQ ID NO: 554600 - RNA, 19 nt, Artificial Sequence
  Description of Artificial Sequence: Synthetic oligonucleotide
  Antisense strand to SEQ ID NO: 554599
aauuccauggcauucacuc

SEQ ID NO: 554601 - RNA, 19 nt, Artificial Sequence
  Description of Artificial Sequence: Synthetic oligonucleotide
  Sense strand starting at position 3137 of SEQ ID NO: 318334
agugaaugccauggaauuc

SEQ ID NO: 554602 - RNA, 19 nt, Artificial Sequence
  Description of Artificial Sequence: Synthetic oligonucleotide
  Antisense strand to SEQ ID NO: 554601
gaauuccauggcauucacu

SEQ ID NO: 554603 - RNA, 19 nt, Artificial Sequence
  Description of Artificial Sequence: Synthetic oligonucleotide
  Sense strand starting at position 3162 of SEQ ID NO: 318334
ggaauauuauggcuauauc

SEQ ID NO: 554604 - RNA, 19 nt, Artificial Sequence
  Description of Artificial Sequence: Synthetic oligonucleotide
  Antisense strand to SEQ ID NO: 554603
gauauagccauaauauucc

SEQ ID NO: 554605 - RNA, 19 nt, Artificial Sequence
  Description of Artificial Sequence: Synthetic oligonucleotide
  Sense strand starting at position 3193 of SEQ ID NO: 318334
acuaguuucuacucagaua

SEQ ID NO: 554606 - RNA, 19 nt, Artificial Sequence
  Description of Artificial Sequence: Synthetic oligonucleotide
  Antisense strand to SEQ ID NO: 554605
uaucugaguagaaacuagu

SEQ ID NO: 554607 - RNA, 19 nt, Artificial Sequence
  Description of Artificial Sequence: Synthetic oligonucleotide
  Sense strand starting at position 3215 of SEQ ID NO: 318334
uggaacauguaucucuaaa

SEQ ID NO: 554608 - RNA, 19 nt, Artificial Sequence
  Description of Artificial Sequence: Synthetic oligonucleotide
  Antisense strand to SEQ ID NO: 554607
uuuagagauacauguucca

SEQ ID NO: 554609 - RNA, 19 nt, Artificial Sequence
  Description of Artificial Sequence: Synthetic oligonucleotide
  Sense strand starting at position 3244 of SEQ ID NO: 318334
augugugaaauagauuagu

SEQ ID NO: 554610 - RNA, 19 nt, Artificial Sequence
  Description of Artificial Sequence: Synthetic oligonucleotide
  Antisense strand to SEQ ID NO: 554609
acuaaucuauuucacacau

SEQ ID NO: 554611 - RNA, 19 nt, Artificial Sequence
  Description of Artificial Sequence: Synthetic oligonucleotide
  Sense strand starting at position 3247 of SEQ ID NO: 318334
ugugaaauagauuagugca

SEQ ID NO: 554612 - RNA, 19 nt, Artificial Sequence
  Description of Artificial Sequence: Synthetic oligonucleotide
  Antisense strand to SEQ ID NO: 554611
ugcacuaaucuauuucaca

SEQ ID NO: 554613 - RNA, 19 nt, Artificial Sequence
  Description of Artificial Sequence: Synthetic oligonucleotide
  Sense strand starting at position 3317 of SEQ ID NO: 318334
cauauuuauugagagguga

SEQ ID NO: 554614 - RNA, 19 nt, Artificial Sequence
  Description of Artificial Sequence: Synthetic oligonucleotide
  Antisense strand to SEQ ID NO: 554613
ucaccucucaauaaauaug

SEQ ID NO: 554615 - RNA, 19 nt, Artificial Sequence
  Description of Artificial Sequence: Synthetic oligonucleotide
  Sense strand starting at position 3321 of SEQ ID NO: 318334
uuuauugagaggugaaauc

SEQ ID NO: 554616 - RNA, 19 nt, Artificial Sequence
  Description of Artificial Sequence: Synthetic oligonucleotide
  Antisense strand to SEQ ID NO: 554615
gauuucaccucucaauaaa

SEQ ID NO: 554617 - RNA, 19 nt, Artificial Sequence
  Description of Artificial Sequence: Synthetic oligonucleotide
  Sense strand starting at position 3331 of SEQ ID NO: 318334
ggugaaaucaauugaguuc

SEQ ID NO: 554618 - RNA, 19 nt, Artificial Sequence
  Description of Artificial Sequence: Synthetic oligonucleotide
  Antisense strand to SEQ ID NO: 554617
gaacucaauugauuucacc

SEQ ID NO: 554619 - RNA, 19 nt, Artificial Sequence
  Description of Artificial Sequence: Synthetic oligonucleotide
  Sense strand starting at position 3495 of SEQ ID NO: 318334
accucuauguagccagaaa

SEQ ID NO: 554620 - RNA, 19 nt, Artificial Sequence
  Description of Artificial Sequence: Synthetic oligonucleotide
  Antisense strand to SEQ ID NO: 554619
uuucuggcuacauagaggu

SEQ ID NO: 554621 - RNA, 19 nt, Artificial Sequence
  Description of Artificial Sequence: Synthetic oligonucleotide
  Sense strand starting at position 3572 of SEQ ID NO: 318334
acacacuguuccuugagaa

SEQ ID NO: 554622 - RNA, 19 nt, Artificial Sequence
  Description of Artificial Sequence: Synthetic oligonucleotide
  Antisense strand to SEQ ID NO: 554621
uucucaaggaacagugugu

SEQ ID NO: 554623 - RNA, 19 nt, Artificial Sequence
  Description of Artificial Sequence: Synthetic oligonucleotide
  Sense strand starting at position 3631 of SEQ ID NO: 318334
acauauuggacugguguca

SEQ ID NO: 554624 - RNA, 19 nt, Artificial Sequence
  Description of Artificial Sequence: Synthetic oligonucleotide
  Antisense strand to SEQ ID NO: 554623
ugacaccaguccaauaugu

SEQ ID NO: 554625 - RNA, 19 nt, Artificial Sequence
  Description of Artificial Sequence: Synthetic oligonucleotide
  Sense strand starting at position 3667 of SEQ ID NO: 318334
ggccauuauuuccugcuca

SEQ ID NO: 554626 - RNA, 19 nt, Artificial Sequence
  Description of Artificial Sequence: Synthetic oligonucleotide
  Antisense strand to SEQ ID NO: 554625
ugagcaggaaauaauggcc

SEQ ID NO: 554627 - RNA, 19 nt, Artificial Sequence
  Description of Artificial Sequence: Synthetic oligonucleotide
  Sense strand starting at position 3786 of SEQ ID NO: 318334
ccaggcauccucgaauaua

SEQ ID NO: 554628 - RNA, 19 nt, Artificial Sequence
  Description of Artificial Sequence: Synthetic oligonucleotide
  Antisense strand to SEQ ID NO: 554627
uauauucgaggaugccugg

SEQ ID NO: 554629 - RNA, 19 nt, Artificial Sequence
  Description of Artificial Sequence: Synthetic oligonucleotide
  Sense strand starting at position 3796 of SEQ ID NO: 318334
ucgaauauagguuguugaa

SEQ ID NO: 554630 - RNA, 19 nt, Artificial Sequence
  Description of Artificial Sequence: Synthetic oligonucleotide
  Antisense strand to SEQ ID NO: 554629
uucaacaaccuauauucga

SEQ ID NO: 554631 - RNA, 19 nt, Artificial Sequence
  Description of Artificial Sequence: Synthetic oligonucleotide
  Sense strand starting at position 3798 of SEQ ID NO: 318334
gaauauagguuguugaauu

SEQ ID NO: 554632 - RNA, 19 nt, Artificial Sequence
  Description of Artificial Sequence: Synthetic oligonucleotide
  Antisense strand to SEQ ID NO: 554631
aauucaacaaccuauauuc

SEQ ID NO: 554633 - RNA, 19 nt, Artificial Sequence
  Description of Artificial Sequence: Synthetic oligonucleotide
  Sense strand starting at position 3845 of SEQ ID NO: 318334
gcaguacaguauuugucaa

SEQ ID NO: 554634 - RNA, 19 nt, Artificial Sequence
  Description of Artificial Sequence: Synthetic oligonucleotide
  Antisense strand to SEQ ID NO: 554633
uugacaaauacuguacugc

SEQ ID NO: 554635 - RNA, 19 nt, Artificial Sequence
  Description of Artificial Sequence: Synthetic oligonucleotide
  Sense strand starting at position 3878 of SEQ ID NO: 318334
cuugaaaugucuuugauaa

SEQ ID NO: 554636 - RNA, 19 nt, Artificial Sequence
  Description of Artificial Sequence: Synthetic oligonucleotide
  Antisense strand to SEQ ID NO: 554635
uuaucaaagacauuucaag

SEQ ID NO: 554637 - RNA, 19 nt, Artificial Sequence
  Description of Artificial Sequence: Synthetic oligonucleotide
  Sense strand starting at position 3879 of SEQ ID NO: 318334
uugaaaugucuuugauaac

SEQ ID NO: 554638 - RNA, 19 nt, Artificial Sequence
  Description of Artificial Sequence: Synthetic oligonucleotide
  Antisense strand to SEQ ID NO: 554637
guuaucaaagacauuucaa

SEQ ID NO: 554639 - RNA, 19 nt, Artificial Sequence
  Description of Artificial Sequence: Synthetic oligonucleotide
  Sense strand starting at position 3888 of SEQ ID NO: 318334
cuuugauaacauugguagu

SEQ ID NO: 554640 - RNA, 19 nt, Artificial Sequence
  Description of Artificial Sequence: Synthetic oligonucleotide
  Antisense strand to SEQ ID NO: 554639
acuaccaauguuaucaaag

SEQ ID NO: 554641 - RNA, 19 nt, Artificial Sequence
  Description of Artificial Sequence: Synthetic oligonucleotide
  Sense strand starting at position 3890 of SEQ ID NO: 318334
uugauaacauugguaguua

SEQ ID NO: 554642 - RNA, 19 nt, Artificial Sequence
  Description of Artificial Sequence: Synthetic oligonucleotide
  Antisense strand to SEQ ID NO: 554641
uaacuaccaauguuaucaa

SEQ ID NO: 554643 - RNA, 19 nt, Artificial Sequence
  Description of Artificial Sequence: Synthetic oligonucleotide
  Sense strand starting at position 3944 of SEQ ID NO: 318334
aagauaucaguugggucua

SEQ ID NO: 554644 - RNA, 19 nt, Artificial Sequence
  Description of Artificial Sequence: Synthetic oligonucleotide
  Antisense strand to SEQ ID NO: 554643
uagacccaacugauaucuu

SEQ ID NO: 554645 - RNA, 19 nt, Artificial Sequence
  Description of Artificial Sequence: Synthetic oligonucleotide
  Sense strand starting at position 3949 of SEQ ID NO: 318334
aucaguugggucuaucaag

SEQ ID NO: 554646 - RNA, 19 nt, Artificial Sequence
  Description of Artificial Sequence: Synthetic oligonucleotide
  Antisense strand to SEQ ID NO: 554645
cuugauagacccaacugau

SEQ ID NO: 554647 - RNA, 19 nt, Artificial Sequence
  Description of Artificial Sequence: Synthetic oligonucleotide
  Sense strand starting at position 2060 of SEQ ID NO: 318335
uguuauucccguuaucaag

SEQ ID NO: 554648 - RNA, 19 nt, Artificial Sequence
  Description of Artificial Sequence: Synthetic oligonucleotide
  Antisense strand to SEQ ID NO: 554647
cuugauaacgggaauaaca

SEQ ID NO: 554649 - RNA, 19 nt, Artificial Sequence
  Description of Artificial Sequence: Synthetic oligonucleotide
  Sense strand starting at position 2066 of SEQ ID NO: 318335
ucccguuaucaagacuaga

SEQ ID NO: 554650 - RNA, 19 nt, Artificial Sequence
  Description of Artificial Sequence: Synthetic oligonucleotide
  Antisense strand to SEQ ID NO: 554649
ucuagucuugauaacggga

SEQ ID NO: 554651 - RNA, 19 nt, Artificial Sequence
  Description of Artificial Sequence: Synthetic oligonucleotide
  Sense strand starting at position 2095 of SEQ ID NO: 318335
ggcggauugaaggaauucu

SEQ ID NO: 554652 - RNA, 19 nt, Artificial Sequence
  Description of Artificial Sequence: Synthetic oligonucleotide
  Antisense strand to SEQ ID NO: 554651
agaauuccuucaauccgcc

SEQ ID NO: 554653 - RNA, 19 nt, Artificial Sequence
  Description of Artificial Sequence: Synthetic oligonucleotide
  Sense strand starting at position 2165 of SEQ ID NO: 318335
uccucaaauggucacagua

SEQ ID NO: 554654 - RNA, 19 nt, Artificial Sequence
  Description of Artificial Sequence: Synthetic oligonucleotide
  Antisense strand to SEQ ID NO: 554653
uacugugaccauuugagga

SEQ ID NO: 554655 - RNA, 19 nt, Artificial Sequence
  Description of Artificial Sequence: Synthetic oligonucleotide
  Sense strand starting at position 2218 of SEQ ID NO: 318335
ugugauaaucuggauucgu

SEQ ID NO: 554656 - RNA, 19 nt, Artificial Sequence
  Description of Artificial Sequence: Synthetic oligonucleotide
  Antisense strand to SEQ ID NO: 554655
acgaauccagauuaucaca

SEQ ID NO: 554657 - RNA, 19 nt, Artificial Sequence
  Description of Artificial Sequence: Synthetic oligonucleotide
  Sense strand starting at position 2222 of SEQ ID NO: 318335
auaaucuggauucguagaa

SEQ ID NO: 554658 - RNA, 19 nt, Artificial Sequence
  Description of Artificial Sequence: Synthetic oligonucleotide
  Antisense strand to SEQ ID NO: 554657
uucuacgaauccagauuau

SEQ ID NO: 554659 - RNA, 19 nt, Artificial Sequence
  Description of Artificial Sequence: Synthetic oligonucleotide
  Sense strand starting at position 2223 of SEQ ID NO: 318335
uaaucuggauucguagaag

SEQ ID NO: 554660 - RNA, 19 nt, Artificial Sequence
  Description of Artificial Sequence: Synthetic oligonucleotide
  Antisense strand to SEQ ID NO: 554659
cuucuacgaauccagauua

SEQ ID NO: 554661 - RNA, 19 nt, Artificial Sequence
  Description of Artificial Sequence: Synthetic oligonucleotide
  Sense strand starting at position 2257 of SEQ ID NO: 318335
uucuuaaaucuaggagcau

SEQ ID NO: 554662 - RNA, 19 nt, Artificial Sequence
  Description of Artificial Sequence: Synthetic oligonucleotide
  Antisense strand to SEQ ID NO: 554661
augcuccuagauuuaagaa

SEQ ID NO: 554663 - RNA, 19 nt, Artificial Sequence
  Description of Artificial Sequence: Synthetic oligonucleotide
  Sense strand starting at position 2491 of SEQ ID NO: 318335
uuccacuuuccaggucuua

SEQ ID NO: 554664 - RNA, 19 nt, Artificial Sequence
  Description of Artificial Sequence: Synthetic oligonucleotide
  Antisense strand to SEQ ID NO: 554663
uaagaccuggaaaguggaa

SEQ ID NO: 554665 - RNA, 19 nt, Artificial Sequence
  Description of Artificial Sequence: Synthetic oligonucleotide
  Sense strand starting at position 2503 of SEQ ID NO: 318335
ggucuuaacucuuuaccug

SEQ ID NO: 554666 - RNA, 19 nt, Artificial Sequence
  Description of Artificial Sequence: Synthetic oligonucleotide
  Antisense strand to SEQ ID NO: 554665
cagguaaagaguuaagacc

SEQ ID NO: 554667 - RNA, 19 nt, Artificial Sequence
  Description of Artificial Sequence: Synthetic oligonucleotide
  Sense strand starting at position 2504 of SEQ ID NO: 318335
gucuuaacucuuuaccugu

SEQ ID NO: 554668 - RNA, 19 nt, Artificial Sequence
  Description of Artificial Sequence: Synthetic oligonucleotide
  Antisense strand to SEQ ID NO: 554667
acagguaaagaguuaagac

SEQ ID NO: 554669 - RNA, 19 nt, Artificial Sequence
  Description of Artificial Sequence: Synthetic oligonucleotide
  Sense strand starting at position 2510 of SEQ ID NO: 318335
acucuuuaccugugauauu

SEQ ID NO: 554670 - RNA, 19 nt, Artificial Sequence
  Description of Artificial Sequence: Synthetic oligonucleotide
  Antisense strand to SEQ ID NO: 554669
aauaucacagguaaagagu

SEQ ID NO: 554671 - RNA, 19 nt, Artificial Sequence
  Description of Artificial Sequence: Synthetic oligonucleotide
  Sense strand starting at position 2522 of SEQ ID NO: 318335
ugauauuucuuggaacacu

SEQ ID NO: 554672 - RNA, 19 nt, Artificial Sequence
  Description of Artificial Sequence: Synthetic oligonucleotide
  Antisense strand to SEQ ID NO: 554671
aguguuccaagaaauauca

SEQ ID NO: 554673 - RNA, 19 nt, Artificial Sequence
  Description of Artificial Sequence: Synthetic oligonucleotide
  Sense strand starting at position 2623 of SEQ ID NO: 318335
ugacuagaaucuccaaugu

SEQ ID NO: 554674 - RNA, 19 nt, Artificial Sequence
  Description of Artificial Sequence: Synthetic oligonucleotide
  Antisense strand to SEQ ID NO: 554673
acauuggagauucuaguca

SEQ ID NO: 554675 - RNA, 19 nt, Artificial Sequence
  Description of Artificial Sequence: Synthetic oligonucleotide
  Sense strand starting at position 2720 of SEQ ID NO: 318335
caacuaugaugguugaucu

SEQ ID NO: 554676 - RNA, 19 nt, Artificial Sequence
  Description of Artificial Sequence: Synthetic oligonucleotide
  Antisense strand to SEQ ID NO: 554675
agaucaaccaucauaguug

SEQ ID NO: 554677 - RNA, 19 nt, Artificial Sequence
  Description of Artificial Sequence: Synthetic oligonucleotide
  Sense strand starting at position 2724 of SEQ ID NO: 318335
uaugaugguugaucucaau

SEQ ID NO: 554678 - RNA, 19 nt, Artificial Sequence
  Description of Artificial Sequence: Synthetic oligonucleotide
  Antisense strand to SEQ ID NO: 554677
auugagaucaaccaucaua

SEQ ID NO: 554679 - RNA, 19 nt, Artificial Sequence
  Description of Artificial Sequence: Synthetic oligonucleotide
  Sense strand starting at position 2727 of SEQ ID NO: 318335
gaugguugaucucaauuug

SEQ ID NO: 554680 - RNA, 19 nt, Artificial Sequence
  Description of Artificial Sequence: Synthetic oligonucleotide
  Antisense strand to SEQ ID NO: 554679
caaauugagaucaaccauc

SEQ ID NO: 554681 - RNA, 19 nt, Artificial Sequence
  Description of Artificial Sequence: Synthetic oligonucleotide
  Sense strand starting at position 2812 of SEQ ID NO: 318335
uugauagcuguugaaauaa

SEQ ID NO: 554682 - RNA, 19 nt, Artificial Sequence
  Description of Artificial Sequence: Synthetic oligonucleotide
  Antisense strand to SEQ ID NO: 554681
uuauuucaacagcuaucaa

SEQ ID NO: 554683 - RNA, 19 nt, Artificial Sequence
  Description of Artificial Sequence: Synthetic oligonucleotide
  Sense strand starting at position 2846 of SEQ ID NO: 318335
guuucuaaauuacugaguu

SEQ ID NO: 554684 - RNA, 19 nt, Artificial Sequence
  Description of Artificial Sequence: Synthetic oligonucleotide
  Antisense strand to SEQ ID NO: 554683
aacucaguaauuuagaaac

SEQ ID NO: 554685 - RNA, 19 nt, Artificial Sequence
  Description of Artificial Sequence: Synthetic oligonucleotide
  Sense strand starting at position 2850 of SEQ ID NO: 318335
cuaaauuacugaguuauug

SEQ ID NO: 554686 - RNA, 19 nt, Artificial Sequence
  Description of Artificial Sequence: Synthetic oligonucleotide
  Antisense strand to SEQ ID NO: 554685
caauaacucaguaauuuag

SEQ ID NO: 554687 - RNA, 19 nt, Artificial Sequence
  Description of Artificial Sequence: Synthetic oligonucleotide
  Sense strand starting at position 2916 of SEQ ID NO: 318335
uagauaugaugugucaaca

SEQ ID NO: 554688 - RNA, 19 nt, Artificial Sequence
  Description of Artificial Sequence: Synthetic oligonucleotide
  Antisense strand to SEQ ID NO: 554687
uguugacacaucauaucua

SEQ ID NO: 554689 - RNA, 19 nt, Artificial Sequence
  Description of Artificial Sequence: Synthetic oligonucleotide
  Sense strand starting at position 2953 of SEQ ID NO: 318335
aguuaauguuguuuaccua

SEQ ID NO: 554690 - RNA, 19 nt, Artificial Sequence
  Description of Artificial Sequence: Synthetic oligonucleotide
  Antisense strand to SEQ ID NO: 554689
uagguaaacaacauuaacu

SEQ ID NO: 554691 - RNA, 19 nt, Artificial Sequence
  Description of Artificial Sequence: Synthetic oligonucleotide
  Sense strand starting at position 3016 of SEQ ID NO: 318335
ggcaucauagaauguguua

SEQ ID NO: 554692 - RNA, 19 nt, Artificial Sequence
  Description of Artificial Sequence: Synthetic oligonucleotide
  Antisense strand to SEQ ID NO: 554691
uaacacauucuaugaugcc

SEQ ID NO: 554693 - RNA, 19 nt, Artificial Sequence
  Description of Artificial Sequence: Synthetic oligonucleotide
  Sense strand starting at position 3025 of SEQ ID NO: 318335
gaauguguuagggagcuuu

SEQ ID NO: 554694 - RNA, 19 nt, Artificial Sequence
  Description of Artificial Sequence: Synthetic oligonucleotide
  Antisense strand to SEQ ID NO: 554693
aaagcucccuaacacauuc

SEQ ID NO: 554695 - RNA, 19 nt, Artificial Sequence
  Description of Artificial Sequence: Synthetic oligonucleotide
  Sense strand starting at position 3146 of SEQ ID NO: 318335
ugcaguagaucagugacua

SEQ ID NO: 554696 - RNA, 19 nt, Artificial Sequence
  Description of Artificial Sequence: Synthetic oligonucleotide
  Antisense strand to SEQ ID NO: 554695
uagucacugaucuacugca

SEQ ID NO: 554697 - RNA, 19 nt, Artificial Sequence
  Description of Artificial Sequence: Synthetic oligonucleotide
  Sense strand starting at position 3147 of SEQ ID NO: 318335
gcaguagaucagugacuac

SEQ ID NO: 554698 - RNA, 19 nt, Artificial Sequence
  Description of Artificial Sequence: Synthetic oligonucleotide
  Antisense strand to SEQ ID NO: 554697
guagucacugaucuacugc

SEQ ID NO: 554699 - RNA, 19 nt, Artificial Sequence
  Description of Artificial Sequence: Synthetic oligonucleotide
  Sense strand starting at position 3150 of SEQ ID NO: 318335
guagaucagugacuaccau

SEQ ID NO: 554700 - RNA, 19 nt, Artificial Sequence
  Description of Artificial Sequence: Synthetic oligonucleotide
  Antisense strand to SEQ ID NO: 554699
augguagucacugaucuac

SEQ ID NO: 554701 - RNA, 19 nt, Artificial Sequence
  Description of Artificial Sequence: Synthetic oligonucleotide
  Sense strand starting at position 3281 of SEQ ID NO: 318335
uugcguuauuuaccuuuaa

SEQ ID NO: 554702 - RNA, 19 nt, Artificial Sequence
  Description of Artificial Sequence: Synthetic oligonucleotide
  Antisense strand to SEQ ID NO: 554701
uuaaagguaaauaacgcaa

SEQ ID NO: 554703 - RNA, 19 nt, Artificial Sequence
  Description of Artificial Sequence: Synthetic oligonucleotide
  Sense strand starting at position 3282 of SEQ ID NO: 318335
ugcguuauuuaccuuuaau

SEQ ID NO: 554704 - RNA, 19 nt, Artificial Sequence
  Description of Artificial Sequence: Synthetic oligonucleotide
  Antisense strand to SEQ ID NO: 554703
auuaaagguaaauaacgca

SEQ ID NO: 554705 - RNA, 19 nt, Artificial Sequence
  Description of Artificial Sequence: Synthetic oligonucleotide
  Sense strand starting at position 3345 of SEQ ID NO: 318335
uuuauucuuggugagacuu

SEQ ID NO: 554706 - RNA, 19 nt, Artificial Sequence
  Description of Artificial Sequence: Synthetic oligonucleotide
  Antisense strand to SEQ ID NO: 554705
aagucucaccaagaauaaa

SEQ ID NO: 554707 - RNA, 19 nt, Artificial Sequence
  Description of Artificial Sequence: Synthetic oligonucleotide
  Sense strand starting at position 3351 of SEQ ID NO: 318335
cuuggugagacuugcaaga

SEQ ID NO: 554708 - RNA, 19 nt, Artificial Sequence
  Description of Artificial Sequence: Synthetic oligonucleotide
  Antisense strand to SEQ ID NO: 554707
ucuugcaagucucaccaag

SEQ ID NO: 554709 - RNA, 19 nt, Artificial Sequence
  Description of Artificial Sequence: Synthetic oligonucleotide
  Sense strand starting at position 3362 of SEQ ID NO: 318335
uugcaagagcucuacuuua

SEQ ID NO: 554710 - RNA, 19 nt, Artificial Sequence
  Description of Artificial Sequence: Synthetic oligonucleotide
  Antisense strand to SEQ ID NO: 554709
uaaaguagagcucuugcaa

SEQ ID NO: 554711 - RNA, 19 nt, Artificial Sequence
  Description of Artificial Sequence: Synthetic oligonucleotide
  Sense strand starting at position 3367 of SEQ ID NO: 318335
agagcucuacuuuacugau

SEQ ID NO: 554712 - RNA, 19 nt, Artificial Sequence
  Description of Artificial Sequence: Synthetic oligonucleotide
  Antisense strand to SEQ ID NO: 554711
aucaguaaaguagagcucu

SEQ ID NO: 554713 - RNA, 19 nt, Artificial Sequence
  Description of Artificial Sequence: Synthetic oligonucleotide
  Sense strand starting at position 3413 of SEQ ID NO: 318335
auauaugaccuugguccaa

SEQ ID NO: 554714 - RNA, 19 nt, Artificial Sequence
  Description of Artificial Sequence: Synthetic oligonucleotide
  Antisense strand to SEQ ID NO: 554713
uuggaccaaggucauauau

SEQ ID NO: 554715 - RNA, 19 nt, Artificial Sequence
  Description of Artificial Sequence: Synthetic oligonucleotide
  Sense strand starting at position 3653 of SEQ ID NO: 318335
uugggaacauuauugugua

SEQ ID NO: 554716 - RNA, 19 nt, Artificial Sequence
  Description of Artificial Sequence: Synthetic oligonucleotide
  Antisense strand to SEQ ID NO: 554715
uacacaauaauguucccaa

SEQ ID NO: 554717 - RNA, 19 nt, Artificial Sequence
  Description of Artificial Sequence: Synthetic oligonucleotide
  Sense strand starting at position 3772 of SEQ ID NO: 318335
gauacaauugccugucagu

SEQ ID NO: 554718 - RNA, 19 nt, Artificial Sequence
  Description of Artificial Sequence: Synthetic oligonucleotide
  Antisense strand to SEQ ID NO: 554717
acugacaggcaauuguauc

SEQ ID NO: 554719 - RNA, 19 nt, Artificial Sequence
  Description of Artificial Sequence: Synthetic oligonucleotide
  Sense strand starting at position 3902 of SEQ ID NO: 318335
gcugucauucuuggaauuc

SEQ ID NO: 554720 - RNA, 19 nt, Artificial Sequence
  Description of Artificial Sequence: Synthetic oligonucleotide
  Antisense strand to SEQ ID NO: 554719
gaauuccaagaaugacagc

SEQ ID NO: 554721 - RNA, 19 nt, Artificial Sequence
  Description of Artificial Sequence: Synthetic oligonucleotide
  Sense strand starting at position 3911 of SEQ ID NO: 318335
cuuggaauucuuugccuuu

SEQ ID NO: 554722 - RNA, 19 nt, Artificial Sequence
  Description of Artificial Sequence: Synthetic oligonucleotide
  Antisense strand to SEQ ID NO: 554721
aaaggcaaagaauuccaag

SEQ ID NO: 554723 - RNA, 19 nt, Artificial Sequence
  Description of Artificial Sequence: Synthetic oligonucleotide
  Sense strand starting at position 3934 of SEQ ID NO: 318335
cuggauguguuugcuauuu

SEQ ID NO: 554724 - RNA, 19 nt, Artificial Sequence
  Description of Artificial Sequence: Synthetic oligonucleotide
  Antisense strand to SEQ ID NO: 554723
aaauagcaaacacauccag

SEQ ID NO: 554725 - RNA, 19 nt, Artificial Sequence
  Description of Artificial Sequence: Synthetic oligonucleotide
  Sense strand starting at position 3943 of SEQ ID NO: 318335
uuugcuauuucugggauuu

SEQ ID NO: 554726 - RNA, 19 nt, Artificial Sequence
  Description of Artificial Sequence: Synthetic oligonucleotide
  Antisense strand to SEQ ID NO: 554725
aaaucccagaaauagcaaa

SEQ ID NO: 554727 - RNA, 19 nt, Artificial Sequence
  Description of Artificial Sequence: Synthetic oligonucleotide
  Sense strand starting at position 2069 of SEQ ID NO: 318336
guauguacccugggacuau

SEQ ID NO: 554728 - RNA, 19 nt, Artificial Sequence
  Description of Artificial Sequence: Synthetic oligonucleotide
  Antisense strand to SEQ ID NO: 554727
auagucccaggguacauac

SEQ ID NO: 554729 - RNA, 19 nt, Artificial Sequence
  Description of Artificial Sequence: Synthetic oligonucleotide
  Sense strand starting at position 2073 of SEQ ID NO: 318336
guacccugggacuauguaa

SEQ ID NO: 554730 - RNA, 19 nt, Artificial Sequence
  Description of Artificial Sequence: Synthetic oligonucleotide
  Antisense strand to SEQ ID NO: 554729
uuacauagucccaggguac

SEQ ID NO: 554731 - RNA, 19 nt, Artificial Sequence
  Description of Artificial Sequence: Synthetic oligonucleotide
  Sense strand starting at position 2106 of SEQ ID NO: 318336
gguuaauaucgccggacgu

SEQ ID NO: 554732 - RNA, 19 nt, Artificial Sequence
  Description of Artificial Sequence: Synthetic oligonucleotide
  Antisense strand to SEQ ID NO: 554731
acguccggcgauauuaacc

SEQ ID NO: 554733 - RNA, 19 nt, Artificial Sequence
  Description of Artificial Sequence: Synthetic oligonucleotide
  Sense strand starting at position 2107 of SEQ ID NO: 318336
guuaauaucgccggacguu

SEQ ID NO: 554734 - RNA, 19 nt, Artificial Sequence
  Description of Artificial Sequence: Synthetic oligonucleotide
  Antisense strand to SEQ ID NO: 554733
aacguccggcgauauuaac

SEQ ID NO: 554735 - RNA, 19 nt, Artificial Sequence
  Description of Artificial Sequence: Synthetic oligonucleotide
  Sense strand starting at position 2108 of SEQ ID NO: 318336
uuaauaucgccggacguua

SEQ ID NO: 554736 - RNA, 19 nt, Artificial Sequence
  Description of Artificial Sequence: Synthetic oligonucleotide
  Antisense strand to SEQ ID NO: 554735
uaacguccggcgauauuaa

SEQ ID NO: 554737 - RNA, 19 nt, Artificial Sequence
  Description of Artificial Sequence: Synthetic oligonucleotide
  Sense strand starting at position 2119 of SEQ ID NO: 318336
ggacguuacugagcagaca

SEQ ID NO: 554738 - RNA, 19 nt, Artificial Sequence
  Description of Artificial Sequence: Synthetic oligonucleotide
  Antisense strand to SEQ ID NO: 554737
ugucugcucaguaacgucc

SEQ ID NO: 554739 - RNA, 19 nt, Artificial Sequence
  Description of Artificial Sequence: Synthetic oligonucleotide
  Sense strand starting at position 2120 of SEQ ID NO: 318336
gacguuacugagcagacaa

SEQ ID NO: 554740 - RNA, 19 nt, Artificial Sequence
  Description of Artificial Sequence: Synthetic oligonucleotide
  Antisense strand to SEQ ID NO: 554739
uugucugcucaguaacguc

SEQ ID NO: 554741 - RNA, 19 nt, Artificial Sequence
  Description of Artificial Sequence: Synthetic oligonucleotide
  Sense strand starting at position 2147 of SEQ ID NO: 318336
aggagaaauugcguuaguc

SEQ ID NO: 554742 - RNA, 19 nt, Artificial Sequence
  Description of Artificial Sequence: Synthetic oligonucleotide
  Antisense strand to SEQ ID NO: 554741
gacuaacgcaauuucuccu

SEQ ID NO: 554743 - RNA, 19 nt, Artificial Sequence
  Description of Artificial Sequence: Synthetic oligonucleotide
  Sense strand starting at position 2149 of SEQ ID NO: 318336
gagaaauugcguuagucuu

SEQ ID NO: 554744 - RNA, 19 nt, Artificial Sequence
  Description of Artificial Sequence: Synthetic oligonucleotide
  Antisense strand to SEQ ID NO: 554743
aagacuaacgcaauuucuc

SEQ ID NO: 554745 - RNA, 19 nt, Artificial Sequence
  Description of Artificial Sequence: Synthetic oligonucleotide
  Sense strand starting at position 2198 of SEQ ID NO: 318336
aggaaauauuuagguaaca

SEQ ID NO: 554746 - RNA, 19 nt, Artificial Sequence
  Description of Artificial Sequence: Synthetic oligonucleotide
  Antisense strand to SEQ ID NO: 554745
uguuaccuaaauauuuccu

SEQ ID NO: 554747 - RNA, 19 nt, Artificial Sequence
  Description of Artificial Sequence: Synthetic oligonucleotide
  Sense strand starting at position 2213 of SEQ ID NO: 318336
aacagucuagcuuggcaaa

SEQ ID NO: 554748 - RNA, 19 nt, Artificial Sequence
  Description of Artificial Sequence: Synthetic oligonucleotide
  Antisense strand to SEQ ID NO: 554747
uuugccaagcuagacuguu

SEQ ID NO: 554749 - RNA, 19 nt, Artificial Sequence
  Description of Artificial Sequence: Synthetic oligonucleotide
  Sense strand starting at position 2251 of SEQ ID NO: 318336
guaguuaacaugggcaaca

SEQ ID NO: 554750 - RNA, 19 nt, Artificial Sequence
  Description of Artificial Sequence: Synthetic oligonucleotide
  Antisense strand to SEQ ID NO: 554749
uguugcccauguuaacuac

SEQ ID NO: 554751 - RNA, 19 nt, Artificial Sequence
  Description of Artificial Sequence: Synthetic oligonucleotide
  Sense strand starting at position 2253 of SEQ ID NO: 318336
aguuaacaugggcaacauu

SEQ ID NO: 554752 - RNA, 19 nt, Artificial Sequence
  Description of Artificial Sequence: Synthetic oligonucleotide
  Antisense strand to SEQ ID NO: 554751
aauguugcccauguuaacu

SEQ ID NO: 554753 - RNA, 19 nt, Artificial Sequence
  Description of Artificial Sequence: Synthetic oligonucleotide
  Sense strand starting at position 2262 of SEQ ID NO: 318336
gggcaacauuuagaucuuu

SEQ ID NO: 554754 - RNA, 19 nt, Artificial Sequence
  Description of Artificial Sequence: Synthetic oligonucleotide
  Antisense strand to SEQ ID NO: 554753
aaagaucuaaauguugccc

SEQ ID NO: 554755 - RNA, 19 nt, Artificial Sequence
  Description of Artificial Sequence: Synthetic oligonucleotide
  Sense strand starting at position 2472 of SEQ ID NO: 318336
aacuauguacccgguauau

SEQ ID NO: 554756 - RNA, 19 nt, Artificial Sequence
  Description of Artificial Sequence: Synthetic oligonucleotide
  Antisense strand to SEQ ID NO: 554755
auauaccggguacauaguu

SEQ ID NO: 554757 - RNA, 19 nt, Artificial Sequence
  Description of Artificial Sequence: Synthetic oligonucleotide
  Sense strand starting at position 2510 of SEQ ID NO: 318336
guaggugacucugcauaaa

SEQ ID NO: 554758 - RNA, 19 nt, Artificial Sequence
  Description of Artificial Sequence: Synthetic oligonucleotide
  Antisense strand to SEQ ID NO: 554757
uuuaugcagagucaccuac

SEQ ID NO: 554759 - RNA, 19 nt, Artificial Sequence
  Description of Artificial Sequence: Synthetic oligonucleotide
  Sense strand starting at position 2600 of SEQ ID NO: 318336
uagagaaguuaugucaaac

SEQ ID NO: 554760 - RNA, 19 nt, Artificial Sequence
  Description of Artificial Sequence: Synthetic oligonucleotide
  Antisense strand to SEQ ID NO: 554759
guuugacauaacuucucua

SEQ ID NO: 554761 - RNA, 19 nt, Artificial Sequence
  Description of Artificial Sequence: Synthetic oligonucleotide
  Sense strand starting at position 2642 of SEQ ID NO: 318336
uggagagcuugucuaaaua

SEQ ID NO: 554762 - RNA, 19 nt, Artificial Sequence
  Description of Artificial Sequence: Synthetic oligonucleotide
  Antisense strand to SEQ ID NO: 554761
uauuuagacaagcucucca

SEQ ID NO: 554763 - RNA, 19 nt, Artificial Sequence
  Description of Artificial Sequence: Synthetic oligonucleotide
  Sense strand starting at position 2671 of SEQ ID NO: 318336
guguaacagcaguggugau

SEQ ID NO: 554764 - RNA, 19 nt, Artificial Sequence
  Description of Artificial Sequence: Synthetic oligonucleotide
  Antisense strand to SEQ ID NO: 554763
aucaccacugcuguuacac

SEQ ID NO: 554765 - RNA, 19 nt, Artificial Sequence
  Description of Artificial Sequence: Synthetic oligonucleotide
  Sense strand starting at position 2813 of SEQ ID NO: 318336
ugcaauuacucaguacuag

SEQ ID NO: 554766 - RNA, 19 nt, Artificial Sequence
  Description of Artificial Sequence: Synthetic oligonucleotide
  Antisense strand to SEQ ID NO: 554765
cuaguacugaguaauugca

SEQ ID NO: 554767 - RNA, 19 nt, Artificial Sequence
  Description of Artificial Sequence: Synthetic oligonucleotide
  Sense strand starting at position 2853 of SEQ ID NO: 318336
ugccauaauucuugacgcu

SEQ ID NO: 554768 - RNA, 19 nt, Artificial Sequence
  Description of Artificial Sequence: Synthetic oligonucleotide
  Antisense strand to SEQ ID NO: 554767
agcgucaagaauuauggca

SEQ ID NO: 554769 - RNA, 19 nt, Artificial Sequence
  Description of Artificial Sequence: Synthetic oligonucleotide
  Sense strand starting at position 2854 of SEQ ID NO: 318336
gccauaauucuugacgcua

SEQ ID NO: 554770 - RNA, 19 nt, Artificial Sequence
  Description of Artificial Sequence: Synthetic oligonucleotide
  Antisense strand to SEQ ID NO: 554769
uagcgucaagaauuauggc

SEQ ID NO: 554771 - RNA, 19 nt, Artificial Sequence
  Description of Artificial Sequence: Synthetic oligonucleotide
  Sense strand starting at position 2883 of SEQ ID NO: 318336
aucuuuacguuccagacaa

SEQ ID NO: 554772 - RNA, 19 nt, Artificial Sequence
  Description of Artificial Sequence: Synthetic oligonucleotide
  Antisense strand to SEQ ID NO: 554771
uugucuggaacguaaagau

SEQ ID NO: 554773 - RNA, 19 nt, Artificial Sequence
  Description of Artificial Sequence: Synthetic oligonucleotide
  Sense strand starting at position 3064 of SEQ ID NO: 318336
caaagucauugcugauguu

SEQ ID NO: 554774 - RNA, 19 nt, Artificial Sequence
  Description of Artificial Sequence: Synthetic oligonucleotide
  Antisense strand to SEQ ID NO: 554773
aacaucagcaaugacuuug

SEQ ID NO: 554775 - RNA, 19 nt, Artificial Sequence
  Description of Artificial Sequence: Synthetic oligonucleotide
  Sense strand starting at position 3065 of SEQ ID NO: 318336
aaagucauugcugauguuu

SEQ ID NO: 554776 - RNA, 19 nt, Artificial Sequence
  Description of Artificial Sequence: Synthetic oligonucleotide
  Antisense strand to SEQ ID NO: 554775
aaacaucagcaaugacuuu

SEQ ID NO: 554777 - RNA, 19 nt, Artificial Sequence
  Description of Artificial Sequence: Synthetic oligonucleotide
  Sense strand starting at position 3067 of SEQ ID NO: 318336
agucauugcugauguuuga

SEQ ID NO: 554778 - RNA, 19 nt, Artificial Sequence
  Description of Artificial Sequence: Synthetic oligonucleotide
  Antisense strand to SEQ ID NO: 554777
ucaaacaucagcaaugacu

SEQ ID NO: 554779 - RNA, 19 nt, Artificial Sequence
  Description of Artificial Sequence: Synthetic oligonucleotide
  Sense strand starting at position 3071 of SEQ ID NO: 318336
auugcugauguuugaauga

SEQ ID NO: 554780 - RNA, 19 nt, Artificial Sequence
  Description of Artificial Sequence: Synthetic oligonucleotide
  Antisense strand to SEQ ID NO: 554779
ucauucaaacaucagcaau

SEQ ID NO: 554781 - RNA, 19 nt, Artificial Sequence
  Description of Artificial Sequence: Synthetic oligonucleotide
  Sense strand starting at position 3112 of SEQ ID NO: 318336
uuacguuugauugguagau

SEQ ID NO: 554782 - RNA, 19 nt, Artificial Sequence
  Description of Artificial Sequence: Synthetic oligonucleotide
  Antisense strand to SEQ ID NO: 554781
aucuaccaaucaaacguaa

SEQ ID NO: 554783 - RNA, 19 nt, Artificial Sequence
  Description of Artificial Sequence: Synthetic oligonucleotide
  Sense strand starting at position 3113 of SEQ ID NO: 318336
uacguuugauugguagauc

SEQ ID NO: 554784 - RNA, 19 nt, Artificial Sequence
  Description of Artificial Sequence: Synthetic oligonucleotide
  Antisense strand to SEQ ID NO: 554783
gaucuaccaaucaaacgua

SEQ ID NO: 554785 - RNA, 19 nt, Artificial Sequence
  Description of Artificial Sequence: Synthetic oligonucleotide
  Sense strand starting at position 3114 of SEQ ID NO: 318336
acguuugauugguagaucu

SEQ ID NO: 554786 - RNA, 19 nt, Artificial Sequence
  Description of Artificial Sequence: Synthetic oligonucleotide
  Antisense strand to SEQ ID NO: 554785
agaucuaccaaucaaacgu

SEQ ID NO: 554787 - RNA, 19 nt, Artificial Sequence
  Description of Artificial Sequence: Synthetic oligonucleotide
  Sense strand starting at position 3121 of SEQ ID NO: 318336
auugguagaucucguaaga

SEQ ID NO: 554788 - RNA, 19 nt, Artificial Sequence
  Description of Artificial Sequence: Synthetic oligonucleotide
  Antisense strand to SEQ ID NO: 554787
ucuuacgagaucuaccaau

SEQ ID NO: 554789 - RNA, 19 nt, Artificial Sequence
  Description of Artificial Sequence: Synthetic oligonucleotide
  Sense strand starting at position 3126 of SEQ ID NO: 318336
uagaucucguaagaucuuu

SEQ ID NO: 554790 - RNA, 19 nt, Artificial Sequence
  Description of Artificial Sequence: Synthetic oligonucleotide
  Antisense strand to SEQ ID NO: 554789
aaagaucuuacgagaucua

SEQ ID NO: 554791 - RNA, 19 nt, Artificial Sequence
  Description of Artificial Sequence: Synthetic oligonucleotide
  Sense strand starting at position 3131 of SEQ ID NO: 318336
cucguaagaucuuuccuac

SEQ ID NO: 554792 - RNA, 19 nt, Artificial Sequence
  Description of Artificial Sequence: Synthetic oligonucleotide
  Antisense strand to SEQ ID NO: 554791
guaggaaagaucuuacgag

SEQ ID NO: 554793 - RNA, 19 nt, Artificial Sequence
  Description of Artificial Sequence: Synthetic oligonucleotide
  Sense strand starting at position 3134 of SEQ ID NO: 318336
guaagaucuuuccuacugu

SEQ ID NO: 554794 - RNA, 19 nt, Artificial Sequence
  Description of Artificial Sequence: Synthetic oligonucleotide
  Antisense strand to SEQ ID NO: 554793
acaguaggaaagaucuuac

SEQ ID NO: 554795 - RNA, 19 nt, Artificial Sequence
  Description of Artificial Sequence: Synthetic oligonucleotide
  Sense strand starting at position 3179 of SEQ ID NO: 318336
cuauuuauuuguuggagaa

SEQ ID NO: 554796 - RNA, 19 nt, Artificial Sequence
  Description of Artificial Sequence: Synthetic oligonucleotide
  Antisense strand to SEQ ID NO: 554795
uucuccaacaaauaaauag

SEQ ID NO: 554797 - RNA, 19 nt, Artificial Sequence
  Description of Artificial Sequence: Synthetic oligonucleotide
  Sense strand starting at position 3273 of SEQ ID NO: 318336
cuaucccaccagugauaua

SEQ ID NO: 554798 - RNA, 19 nt, Artificial Sequence
  Description of Artificial Sequence: Synthetic oligonucleotide
  Antisense strand to SEQ ID NO: 554797
uauaucacuggugggauag

SEQ ID NO: 554799 - RNA, 19 nt, Artificial Sequence
  Description of Artificial Sequence: Synthetic oligonucleotide
  Sense strand starting at position 3297 of SEQ ID NO: 318336
auacuaccuuuauuagagu

SEQ ID NO: 554800 - RNA, 19 nt, Artificial Sequence
  Description of Artificial Sequence: Synthetic oligonucleotide
  Antisense strand to SEQ ID NO: 554799
acucuaauaaagguaguau

SEQ ID NO: 554801 - RNA, 19 nt, Artificial Sequence
  Description of Artificial Sequence: Synthetic oligonucleotide
  Sense strand starting at position 3310 of SEQ ID NO: 318336
uagaguuaccagcacuagu

SEQ ID NO: 554802 - RNA, 19 nt, Artificial Sequence
  Description of Artificial Sequence: Synthetic oligonucleotide
  Antisense strand to SEQ ID NO: 554801
acuagugcugguaacucua

SEQ ID NO: 554803 - RNA, 19 nt, Artificial Sequence
  Description of Artificial Sequence: Synthetic oligonucleotide
  Sense strand starting at position 1989 of SEQ ID NO: 318337
uccguagcauucuggucaa

SEQ ID NO: 554804 - RNA, 19 nt, Artificial Sequence
  Description of Artificial Sequence: Synthetic oligonucleotide
  Antisense strand to SEQ ID NO: 554803
uugaccagaaugcuacgga

SEQ ID NO: 554805 - RNA, 19 nt, Artificial Sequence
  Description of Artificial Sequence: Synthetic oligonucleotide
  Sense strand starting at position 1992 of SEQ ID NO: 318337
guagcauucuggucaauuu

SEQ ID NO: 554806 - RNA, 19 nt, Artificial Sequence
  Description of Artificial Sequence: Synthetic oligonucleotide
  Antisense strand to SEQ ID NO: 554805
aaauugaccagaaugcuac

SEQ ID NO: 554807 - RNA, 19 nt, Artificial Sequence
  Description of Artificial Sequence: Synthetic oligonucleotide
  Sense strand starting at position 2169 of SEQ ID NO: 318337
ucaacucuguguuagauuu

SEQ ID NO: 554808 - RNA, 19 nt, Artificial Sequence
  Description of Artificial Sequence: Synthetic oligonucleotide
  Antisense strand to SEQ ID NO: 554807
aaaucuaacacagaguuga

SEQ ID NO: 554809 - RNA, 19 nt, Artificial Sequence
  Description of Artificial Sequence: Synthetic oligonucleotide
  Sense strand starting at position 2175 of SEQ ID NO: 318337
cuguguuagauuuagcugu

SEQ ID NO: 554810 - RNA, 19 nt, Artificial Sequence
  Description of Artificial Sequence: Synthetic oligonucleotide
  Antisense strand to SEQ ID NO: 554809
acagcuaaaucuaacacag

SEQ ID NO: 554811 - RNA, 19 nt, Artificial Sequence
  Description of Artificial Sequence: Synthetic oligonucleotide
  Sense strand starting at position 2177 of SEQ ID NO: 318337
guguuagauuuagcugugu

SEQ ID NO: 554812 - RNA, 19 nt, Artificial Sequence
  Description of Artificial Sequence: Synthetic oligonucleotide
  Antisense strand to SEQ ID NO: 554811
acacagcuaaaucuaacac

SEQ ID NO: 554813 - RNA, 19 nt, Artificial Sequence
  Description of Artificial Sequence: Synthetic oligonucleotide
  Sense strand starting at position 2179 of SEQ ID NO: 318337
guuagauuuagcuguguua

SEQ ID NO: 554814 - RNA, 19 nt, Artificial Sequence
  Description of Artificial Sequence: Synthetic oligonucleotide
  Antisense strand to SEQ ID NO: 554813
uaacacagcuaaaucuaac

SEQ ID NO: 554815 - RNA, 19 nt, Artificial Sequence
  Description of Artificial Sequence: Synthetic oligonucleotide
  Sense strand starting at position 2181 of SEQ ID NO: 318337
uagauuuagcuguguuagg

SEQ ID NO: 554816 - RNA, 19 nt, Artificial Sequence
  Description of Artificial Sequence: Synthetic oligonucleotide
  Antisense strand to SEQ ID NO: 554815
ccuaacacagcuaaaucua

SEQ ID NO: 554817 - RNA, 19 nt, Artificial Sequence
  Description of Artificial Sequence: Synthetic oligonucleotide
  Sense strand starting at position 2199 of SEQ ID NO: 318337
gccuuucgccucugacaca

SEQ ID NO: 554818 - RNA, 19 nt, Artificial Sequence
  Description of Artificial Sequence: Synthetic oligonucleotide
  Antisense strand to SEQ ID NO: 554817
ugugucagaggcgaaaggc

SEQ ID NO: 554819 - RNA, 19 nt, Artificial Sequence
  Description of Artificial Sequence: Synthetic oligonucleotide
  Sense strand starting at position 2211 of SEQ ID NO: 318337
ugacacaacucuuacgcaa

SEQ ID NO: 554820 - RNA, 19 nt, Artificial Sequence
  Description of Artificial Sequence: Synthetic oligonucleotide
  Antisense strand to SEQ ID NO: 554819
uugcguaagaguuguguca

SEQ ID NO: 554821 - RNA, 19 nt, Artificial Sequence
  Description of Artificial Sequence: Synthetic oligonucleotide
  Sense strand starting at position 2400 of SEQ ID NO: 318337
cucuguaguccagaaccaa

SEQ ID NO: 554822 - RNA, 19 nt, Artificial Sequence
  Description of Artificial Sequence: Synthetic oligonucleotide
  Antisense strand to SEQ ID NO: 554821
uugguucuggacuacagag

SEQ ID NO: 554823 - RNA, 19 nt, Artificial Sequence
  Description of Artificial Sequence: Synthetic oligonucleotide
  Sense strand starting at position 2416 of SEQ ID NO: 318337
caagcauuaggcugucuuu

SEQ ID NO: 554824 - RNA, 19 nt, Artificial Sequence
  Description of Artificial Sequence: Synthetic oligonucleotide
  Antisense strand to SEQ ID NO: 554823
aaagacagccuaaugcuug

SEQ ID NO: 554825 - RNA, 19 nt, Artificial Sequence
  Description of Artificial Sequence: Synthetic oligonucleotide
  Sense strand starting at position 2520 of SEQ ID NO: 318337
ucaucaaugugugaacuac

SEQ ID NO: 554826 - RNA, 19 nt, Artificial Sequence
  Description of Artificial Sequence: Synthetic oligonucleotide
  Antisense strand to SEQ ID NO: 554825
guaguucacacauugauga

SEQ ID NO: 554827 - RNA, 19 nt, Artificial Sequence
  Description of Artificial Sequence: Synthetic oligonucleotide
  Sense strand starting at position 2528 of SEQ ID NO: 318337
gugugaacuacuugagaac

SEQ ID NO: 554828 - RNA, 19 nt, Artificial Sequence
  Description of Artificial Sequence: Synthetic oligonucleotide
  Antisense strand to SEQ ID NO: 554827
guucucaaguaguucacac

SEQ ID NO: 554829 - RNA, 19 nt, Artificial Sequence
  Description of Artificial Sequence: Synthetic oligonucleotide
  Sense strand starting at position 2540 of SEQ ID NO: 318337
ugagaacaacuaugucuua

SEQ ID NO: 554830 - RNA, 19 nt, Artificial Sequence
  Description of Artificial Sequence: Synthetic oligonucleotide
  Antisense strand to SEQ ID NO: 554829
uaagacauaguuguucuca

SEQ ID NO: 554831 - RNA, 19 nt, Artificial Sequence
  Description of Artificial Sequence: Synthetic oligonucleotide
  Sense strand starting at position 2545 of SEQ ID NO: 318337
acaacuaugucuuagucau

SEQ ID NO: 554832 - RNA, 19 nt, Artificial Sequence
  Description of Artificial Sequence: Synthetic oligonucleotide
  Antisense strand to SEQ ID NO: 554831
augacuaagacauaguugu

SEQ ID NO: 554833 - RNA, 19 nt, Artificial Sequence
  Description of Artificial Sequence: Synthetic oligonucleotide
  Sense strand starting at position 2557 of SEQ ID NO: 318337
uagucaucuuugguuggca

SEQ ID NO: 554834 - RNA, 19 nt, Artificial Sequence
  Description of Artificial Sequence: Synthetic oligonucleotide
  Antisense strand to SEQ ID NO: 554833
ugccaaccaaagaugacua

SEQ ID NO: 554835 - RNA, 19 nt, Artificial Sequence
  Description of Artificial Sequence: Synthetic oligonucleotide
  Sense strand starting at position 2558 of SEQ ID NO: 318337
agucaucuuugguuggcaa

SEQ ID NO: 554836 - RNA, 19 nt, Artificial Sequence
  Description of Artificial Sequence: Synthetic oligonucleotide
  Antisense strand to SEQ ID NO: 554835
uugccaaccaaagaugacu

SEQ ID NO: 554837 - RNA, 19 nt, Artificial Sequence
  Description of Artificial Sequence: Synthetic oligonucleotide
  Sense strand starting at position 2559 of SEQ ID NO: 318337
gucaucuuugguuggcaaa

SEQ ID NO: 554838 - RNA, 19 nt, Artificial Sequence
  Description of Artificial Sequence: Synthetic oligonucleotide
  Antisense strand to SEQ ID NO: 554837
uuugccaaccaaagaugac

SEQ ID NO: 554839 - RNA, 19 nt, Artificial Sequence
  Description of Artificial Sequence: Synthetic oligonucleotide
  Sense strand starting at position 2560 of SEQ ID NO: 318337
ucaucuuugguuggcaaau

SEQ ID NO: 554840 - RNA, 19 nt, Artificial Sequence
  Description of Artificial Sequence: Synthetic oligonucleotide
  Antisense strand to SEQ ID NO: 554839
auuugccaaccaaagauga

SEQ ID NO: 554841 - RNA, 19 nt, Artificial Sequence
  Description of Artificial Sequence: Synthetic oligonucleotide
  Sense strand starting at position 2561 of SEQ ID NO: 318337
caucuuugguuggcaaauu

SEQ ID NO: 554842 - RNA, 19 nt, Artificial Sequence
  Description of Artificial Sequence: Synthetic oligonucleotide
  Antisense strand to SEQ ID NO: 554841
aauuugccaaccaaagaug

SEQ ID NO: 554843 - RNA, 19 nt, Artificial Sequence
  Description of Artificial Sequence: Synthetic oligonucleotide
  Sense strand starting at position 2562 of SEQ ID NO: 318337
aucuuugguuggcaaauua

SEQ ID NO: 554844 - RNA, 19 nt, Artificial Sequence
  Description of Artificial Sequence: Synthetic oligonucleotide
  Antisense strand to SEQ ID NO: 554843
uaauuugccaaccaaagau

SEQ ID NO: 554845 - RNA, 19 nt, Artificial Sequence
  Description of Artificial Sequence: Synthetic oligonucleotide
  Sense strand starting at position 2586 of SEQ ID NO: 318337
ucacuaaaugcuggcuaua

SEQ ID NO: 554846 - RNA, 19 nt, Artificial Sequence
  Description of Artificial Sequence: Synthetic oligonucleotide
  Antisense strand to SEQ ID NO: 554845
uauagccagcauuuaguga

SEQ ID NO: 554847 - RNA, 19 nt, Artificial Sequence
  Description of Artificial Sequence: Synthetic oligonucleotide
  Sense strand starting at position 2588 of SEQ ID NO: 318337
acuaaaugcuggcuauauu

SEQ ID NO: 554848 - RNA, 19 nt, Artificial Sequence
  Description of Artificial Sequence: Synthetic oligonucleotide
  Antisense strand to SEQ ID NO: 554847
aauauagccagcauuuagu

SEQ ID NO: 554849 - RNA, 19 nt, Artificial Sequence
  Description of Artificial Sequence: Synthetic oligonucleotide
  Sense strand starting at position 2589 of SEQ ID NO: 318337
cuaaaugcuggcuauauua

SEQ ID NO: 554850 - RNA, 19 nt, Artificial Sequence
  Description of Artificial Sequence: Synthetic oligonucleotide
  Antisense strand to SEQ ID NO: 554849
uaauauagccagcauuuag

SEQ ID NO: 554851 - RNA, 19 nt, Artificial Sequence
  Description of Artificial Sequence: Synthetic oligonucleotide
  Sense strand starting at position 2617 of SEQ ID NO: 318337
uaaauaaacuagugaguag

SEQ ID NO: 554852 - RNA, 19 nt, Artificial Sequence
  Description of Artificial Sequence: Synthetic oligonucleotide
  Antisense strand to SEQ ID NO: 554851
cuacucacuaguuuauuua

SEQ ID NO: 554853 - RNA, 19 nt, Artificial Sequence
  Description of Artificial Sequence: Synthetic oligonucleotide
  Sense strand starting at position 2660 of SEQ ID NO: 318337
uucgaucucugccauuuga

SEQ ID NO: 554854 - RNA, 19 nt, Artificial Sequence
  Description of Artificial Sequence: Synthetic oligonucleotide
  Antisense strand to SEQ ID NO: 554853
ucaaauggcagagaucgaa

SEQ ID NO: 554855 - RNA, 19 nt, Artificial Sequence
  Description of Artificial Sequence: Synthetic oligonucleotide
  Sense strand starting at position 2156 of SEQ ID NO: 318338
ggcgguuauggagguucua

SEQ ID NO: 554856 - RNA, 19 nt, Artificial Sequence
  Description of Artificial Sequence: Synthetic oligonucleotide
  Antisense strand to SEQ ID NO: 554855
uagaaccuccauaaccgcc

SEQ ID NO: 554857 - RNA, 19 nt, Artificial Sequence
  Description of Artificial Sequence: Synthetic oligonucleotide
  Sense strand starting at position 2230 of SEQ ID NO: 318338
guguguacugccuguaucu

SEQ ID NO: 554858 - RNA, 19 nt, Artificial Sequence
  Description of Artificial Sequence: Synthetic oligonucleotide
  Antisense strand to SEQ ID NO: 554857
agauacaggcaguacacac

SEQ ID NO: 554859 - RNA, 19 nt, Artificial Sequence
  Description of Artificial Sequence: Synthetic oligonucleotide
  Sense strand starting at position 2239 of SEQ ID NO: 318338
gccuguaucuaccagauua

SEQ ID NO: 554860 - RNA, 19 nt, Artificial Sequence
  Description of Artificial Sequence: Synthetic oligonucleotide
  Antisense strand to SEQ ID NO: 554859
uaaucugguagauacaggc

SEQ ID NO: 554861 - RNA, 19 nt, Artificial Sequence
  Description of Artificial Sequence: Synthetic oligonucleotide
  Sense strand starting at position 2241 of SEQ ID NO: 318338
cuguaucuaccagauuagu

SEQ ID NO: 554862 - RNA, 19 nt, Artificial Sequence
  Description of Artificial Sequence: Synthetic oligonucleotide
  Antisense strand to SEQ ID NO: 554861
acuaaucugguagauacag

SEQ ID NO: 554863 - RNA, 19 nt, Artificial Sequence
  Description of Artificial Sequence: Synthetic oligonucleotide
  Sense strand starting at position 2287 of SEQ ID NO: 318338
guuacugcauuccuagcaa

SEQ ID NO: 554864 - RNA, 19 nt, Artificial Sequence
  Description of Artificial Sequence: Synthetic oligonucleotide
  Antisense strand to SEQ ID NO: 554863
uugcuaggaaugcaguaac

SEQ ID NO: 554865 - RNA, 19 nt, Artificial Sequence
  Description of Artificial Sequence: Synthetic oligonucleotide
  Sense strand starting at position 2346 of SEQ ID NO: 318338
uuuagucuauugucaagga

SEQ ID NO: 554866 - RNA, 19 nt, Artificial Sequence
  Description of Artificial Sequence: Synthetic oligonucleotide
  Antisense strand to SEQ ID NO: 554865
uccuugacaauagacuaaa

SEQ ID NO: 554867 - RNA, 19 nt, Artificial Sequence
  Description of Artificial Sequence: Synthetic oligonucleotide
  Sense strand starting at position 2347 of SEQ ID NO: 318338
uuagucuauugucaaggaa

SEQ ID NO: 554868 - RNA, 19 nt, Artificial Sequence
  Description of Artificial Sequence: Synthetic oligonucleotide
  Antisense strand to SEQ ID NO: 554867
uuccuugacaauagacuaa

SEQ ID NO: 554869 - RNA, 19 nt, Artificial Sequence
  Description of Artificial Sequence: Synthetic oligonucleotide
  Sense strand starting at position 2350 of SEQ ID NO: 318338
gucuauugucaaggaaaua

SEQ ID NO: 554870 - RNA, 19 nt, Artificial Sequence
  Description of Artificial Sequence: Synthetic oligonucleotide
  Antisense strand to SEQ ID NO: 554869
uauuuccuugacaauagac

SEQ ID NO: 554871 - RNA, 19 nt, Artificial Sequence
  Description of Artificial Sequence: Synthetic oligonucleotide
  Sense strand starting at position 2413 of SEQ ID NO: 318338
cuuuaaaugugccuaaaug

SEQ ID NO: 554872 - RNA, 19 nt, Artificial Sequence
  Description of Artificial Sequence: Synthetic oligonucleotide
  Antisense strand to SEQ ID NO: 554871
cauuuaggcacauuuaaag

SEQ ID NO: 554873 - RNA, 19 nt, Artificial Sequence
  Description of Artificial Sequence: Synthetic oligonucleotide
  Sense strand starting at position 2414 of SEQ ID NO: 318338
uuuaaaugugccuaaaugu

SEQ ID NO: 554874 - RNA, 19 nt, Artificial Sequence
  Description of Artificial Sequence: Synthetic oligonucleotide
  Antisense strand to SEQ ID NO: 554873
acauuuaggcacauuuaaa

SEQ ID NO: 554875 - RNA, 19 nt, Artificial Sequence
  Description of Artificial Sequence: Synthetic oligonucleotide
  Sense strand starting at position 2421 of SEQ ID NO: 318338
gugccuaaaugucaccaaa

SEQ ID NO: 554876 - RNA, 19 nt, Artificial Sequence
  Description of Artificial Sequence: Synthetic oligonucleotide
  Antisense strand to SEQ ID NO: 554875
uuuggugacauuuaggcac

SEQ ID NO: 554877 - RNA, 19 nt, Artificial Sequence
  Description of Artificial Sequence: Synthetic oligonucleotide
  Sense strand starting at position 2457 of SEQ ID NO: 318338
auccaaguauucccauguu

SEQ ID NO: 554878 - RNA, 19 nt, Artificial Sequence
  Description of Artificial Sequence: Synthetic oligonucleotide
  Antisense strand to SEQ ID NO: 554877
aacaugggaauacuuggau

SEQ ID NO: 554879 - RNA, 19 nt, Artificial Sequence
  Description of Artificial Sequence: Synthetic oligonucleotide
  Sense strand starting at position 2473 of SEQ ID NO: 318338
guuaucugcuuuccaaguu

SEQ ID NO: 554880 - RNA, 19 nt, Artificial Sequence
  Description of Artificial Sequence: Synthetic oligonucleotide
  Antisense strand to SEQ ID NO: 554879
aacuuggaaagcagauaac

SEQ ID NO: 554881 - RNA, 19 nt, Artificial Sequence
  Description of Artificial Sequence: Synthetic oligonucleotide
  Sense strand starting at position 2561 of SEQ ID NO: 318338
guaguaaaguuugaccacu

SEQ ID NO: 554882 - RNA, 19 nt, Artificial Sequence
  Description of Artificial Sequence: Synthetic oligonucleotide
  Antisense strand to SEQ ID NO: 554881
aguggucaaacuuuacuac

SEQ ID NO: 554883 - RNA, 19 nt, Artificial Sequence
  Description of Artificial Sequence: Synthetic oligonucleotide
  Sense strand starting at position 2569 of SEQ ID NO: 318338
guuugaccacuugguaauu

SEQ ID NO: 554884 - RNA, 19 nt, Artificial Sequence
  Description of Artificial Sequence: Synthetic oligonucleotide
  Antisense strand to SEQ ID NO: 554883
aauuaccaaguggucaaac

SEQ ID NO: 554885 - RNA, 19 nt, Artificial Sequence
  Description of Artificial Sequence: Synthetic oligonucleotide
  Sense strand starting at position 2579 of SEQ ID NO: 318338
uugguaauuucccaggcca

SEQ ID NO: 554886 - RNA, 19 nt, Artificial Sequence
  Description of Artificial Sequence: Synthetic oligonucleotide
  Antisense strand to SEQ ID NO: 554885
uggccugggaaauuaccaa

SEQ ID NO: 554887 - RNA, 19 nt, Artificial Sequence
  Description of Artificial Sequence: Synthetic oligonucleotide
  Sense strand starting at position 2742 of SEQ ID NO: 318338
uuugaagagcaugguuuaa

SEQ ID NO: 554888 - RNA, 19 nt, Artificial Sequence
  Description of Artificial Sequence: Synthetic oligonucleotide
  Antisense strand to SEQ ID NO: 554887
uuaaaccaugcucuucaaa

SEQ ID NO: 554889 - RNA, 19 nt, Artificial Sequence
  Description of Artificial Sequence: Synthetic oligonucleotide
  Sense strand starting at position 2790 of SEQ ID NO: 318338
uuugaagugucuuugcauu

SEQ ID NO: 554890 - RNA, 19 nt, Artificial Sequence
  Description of Artificial Sequence: Synthetic oligonucleotide
  Antisense strand to SEQ ID NO: 554889
aaugcaaagacacuucaaa

SEQ ID NO: 554891 - RNA, 19 nt, Artificial Sequence
  Description of Artificial Sequence: Synthetic oligonucleotide
  Sense strand starting at position 2792 of SEQ ID NO: 318338
ugaagugucuuugcauuau

SEQ ID NO: 554892 - RNA, 19 nt, Artificial Sequence
  Description of Artificial Sequence: Synthetic oligonucleotide
  Antisense strand to SEQ ID NO: 554891
auaaugcaaagacacuuca

SEQ ID NO: 554893 - RNA, 19 nt, Artificial Sequence
  Description of Artificial Sequence: Synthetic oligonucleotide
  Sense strand starting at position 3128 of SEQ ID NO: 318338
uuagcaaaggguuacuaau

SEQ ID NO: 554894 - RNA, 19 nt, Artificial Sequence
  Description of Artificial Sequence: Synthetic oligonucleotide
  Antisense strand to SEQ ID NO: 554893
auuaguaacccuuugcuaa

SEQ ID NO: 554895 - RNA, 19 nt, Artificial Sequence
  Description of Artificial Sequence: Synthetic oligonucleotide
  Sense strand starting at position 3130 of SEQ ID NO: 318338
agcaaaggguuacuaauua

SEQ ID NO: 554896 - RNA, 19 nt, Artificial Sequence
  Description of Artificial Sequence: Synthetic oligonucleotide
  Antisense strand to SEQ ID NO: 554895
uaauuaguaacccuuugcu

SEQ ID NO: 554897 - RNA, 19 nt, Artificial Sequence
  Description of Artificial Sequence: Synthetic oligonucleotide
  Sense strand starting at position 3156 of SEQ ID NO: 318338
ucaggcuuagagugacuua

SEQ ID NO: 554898 - RNA, 19 nt, Artificial Sequence
  Description of Artificial Sequence: Synthetic oligonucleotide
  Antisense strand to SEQ ID NO: 554897
uaagucacucuaagccuga

SEQ ID NO: 554899 - RNA, 19 nt, Artificial Sequence
  Description of Artificial Sequence: Synthetic oligonucleotide
  Sense strand starting at position 3159 of SEQ ID NO: 318338
ggcuuagagugacuuacuu

SEQ ID NO: 554900 - RNA, 19 nt, Artificial Sequence
  Description of Artificial Sequence: Synthetic oligonucleotide
  Antisense strand to SEQ ID NO: 554899
aaguaagucacucuaagcc

SEQ ID NO: 554901 - RNA, 19 nt, Artificial Sequence
  Description of Artificial Sequence: Synthetic oligonucleotide
  Sense strand starting at position 3167 of SEQ ID NO: 318338
gugacuuacuuaucuuuac

SEQ ID NO: 554902 - RNA, 19 nt, Artificial Sequence
  Description of Artificial Sequence: Synthetic oligonucleotide
  Antisense strand to SEQ ID NO: 554901
guaaagauaaguaagucac

SEQ ID NO: 554903 - RNA, 19 nt, Artificial Sequence
  Description of Artificial Sequence: Synthetic oligonucleotide
  Sense strand starting at position 3192 of SEQ ID NO: 318338
guuagagaagcaugcuauc

SEQ ID NO: 554904 - RNA, 19 nt, Artificial Sequence
  Description of Artificial Sequence: Synthetic oligonucleotide
  Antisense strand to SEQ ID NO: 554903
gauagcaugcuucucuaac

SEQ ID NO: 554905 - RNA, 19 nt, Artificial Sequence
  Description of Artificial Sequence: Synthetic oligonucleotide
  Sense strand starting at position 3198 of SEQ ID NO: 318338
gaagcaugcuaucuguacu

SEQ ID NO: 554906 - RNA, 19 nt, Artificial Sequence
  Description of Artificial Sequence: Synthetic oligonucleotide
  Antisense strand to SEQ ID NO: 554905
aguacagauagcaugcuuc

SEQ ID NO: 554907 - RNA, 19 nt, Artificial Sequence
  Description of Artificial Sequence: Synthetic oligonucleotide
  Sense strand starting at position 3201 of SEQ ID NO: 318338
gcaugcuaucuguacucca

SEQ ID NO: 554908 - RNA, 19 nt, Artificial Sequence
  Description of Artificial Sequence: Synthetic oligonucleotide
  Antisense strand to SEQ ID NO: 554907
uggaguacagauagcaugc

SEQ ID NO: 554909 - RNA, 19 nt, Artificial Sequence
  Description of Artificial Sequence: Synthetic oligonucleotide
  Sense strand starting at position 3214 of SEQ ID NO: 318338
acuccagagucugauaauu

SEQ ID NO: 554910 - RNA, 19 nt, Artificial Sequence
  Description of Artificial Sequence: Synthetic oligonucleotide
  Antisense strand to SEQ ID NO: 554909
aauuaucagacucuggagu

SEQ ID NO: 554911 - RNA, 19 nt, Artificial Sequence
  Description of Artificial Sequence: Synthetic oligonucleotide
  Sense strand starting at position 3338 of SEQ ID NO: 318338
agagaacuuuaguucuuaa

SEQ ID NO: 554912 - RNA, 19 nt, Artificial Sequence
  Description of Artificial Sequence: Synthetic oligonucleotide
  Antisense strand to SEQ ID NO: 554911
uuaagaacuaaaguucucu

SEQ ID NO: 554913 - RNA, 19 nt, Artificial Sequence
  Description of Artificial Sequence: Synthetic oligonucleotide
  Sense strand starting at position 3438 of SEQ ID NO: 318338
ucaauauugcaaggaagua

SEQ ID NO: 554914 - RNA, 19 nt, Artificial Sequence
  Description of Artificial Sequence: Synthetic oligonucleotide
  Antisense strand to SEQ ID NO: 554913
uacuuccuugcaauauuga

SEQ ID NO: 554915 - RNA, 19 nt, Artificial Sequence
  Description of Artificial Sequence: Synthetic oligonucleotide
  Sense strand starting at position 3450 of SEQ ID NO: 318338
ggaaguaacucuuuaacag

SEQ ID NO: 554916 - RNA, 19 nt, Artificial Sequence
  Description of Artificial Sequence: Synthetic oligonucleotide
  Antisense strand to SEQ ID NO: 554915
cuguuaaagaguuacuucc

SEQ ID NO: 554917 - RNA, 19 nt, Artificial Sequence
  Description of Artificial Sequence: Synthetic oligonucleotide
  Sense strand starting at position 3454 of SEQ ID NO: 318338
guaacucuuuaacagagaa

SEQ ID NO: 554918 - RNA, 19 nt, Artificial Sequence
  Description of Artificial Sequence: Synthetic oligonucleotide
  Antisense strand to SEQ ID NO: 554917
uucucuguuaaagaguuac

SEQ ID NO: 554919 - RNA, 19 nt, Artificial Sequence
  Description of Artificial Sequence: Synthetic oligonucleotide
  Sense strand starting at position 3518 of SEQ ID NO: 318338
aagaaauugugagcuaaug

SEQ ID NO: 554920 - RNA, 19 nt, Artificial Sequence
  Description of Artificial Sequence: Synthetic oligonucleotide
  Antisense strand to SEQ ID NO: 554919
cauuagcucacaauuucuu

SEQ ID NO: 554921 - RNA, 19 nt, Artificial Sequence
  Description of Artificial Sequence: Synthetic oligonucleotide
  Sense strand starting at position 3524 of SEQ ID NO: 318338
uugugagcuaaugagguaa

SEQ ID NO: 554922 - RNA, 19 nt, Artificial Sequence
  Description of Artificial Sequence: Synthetic oligonucleotide
  Antisense strand to SEQ ID NO: 554921
uuaccucauuagcucacaa

SEQ ID NO: 554923 - RNA, 19 nt, Artificial Sequence
  Description of Artificial Sequence: Synthetic oligonucleotide
  Sense strand starting at position 3526 of SEQ ID NO: 318338
gugagcuaaugagguaaau

SEQ ID NO: 554924 - RNA, 19 nt, Artificial Sequence
  Description of Artificial Sequence: Synthetic oligonucleotide
  Antisense strand to SEQ ID NO: 554923
auuuaccucauuagcucac

SEQ ID NO: 554925 - RNA, 19 nt, Artificial Sequence
  Description of Artificial Sequence: Synthetic oligonucleotide
  Sense strand starting at position 3566 of SEQ ID NO: 318338
uaaguaaaccuguagagcu

SEQ ID NO: 554926 - RNA, 19 nt, Artificial Sequence
  Description of Artificial Sequence: Synthetic oligonucleotide
  Antisense strand to SEQ ID NO: 554925
agcucuacagguuuacuua

SEQ ID NO: 554927 - RNA, 19 nt, Artificial Sequence
  Description of Artificial Sequence: Synthetic oligonucleotide
  Sense strand starting at position 3882 of SEQ ID NO: 318338
caaagcuguuucuugaguu

SEQ ID NO: 554928 - RNA, 19 nt, Artificial Sequence
  Description of Artificial Sequence: Synthetic oligonucleotide
  Antisense strand to SEQ ID NO: 554927
aacucaagaaacagcuuug

SEQ ID NO: 554929 - RNA, 19 nt, Artificial Sequence
  Description of Artificial Sequence: Synthetic oligonucleotide
  Sense strand starting at position 3883 of SEQ ID NO: 318338
aaagcuguuucuugaguua

SEQ ID NO: 554930 - RNA, 19 nt, Artificial Sequence
  Description of Artificial Sequence: Synthetic oligonucleotide
  Antisense strand to SEQ ID NO: 554929
uaacucaagaaacagcuuu

SEQ ID NO: 554931 - RNA, 19 nt, Artificial Sequence
  Description of Artificial Sequence: Synthetic oligonucleotide
  Sense strand starting at position 3886 of SEQ ID NO: 318338
gcuguuucuugaguuaaag

SEQ ID NO: 554932 - RNA, 19 nt, Artificial Sequence
  Description of Artificial Sequence: Synthetic oligonucleotide
  Antisense strand to SEQ ID NO: 554931
cuuuaacucaagaaacagc

SEQ ID NO: 554933 - RNA, 19 nt, Artificial Sequence
  Description of Artificial Sequence: Synthetic oligonucleotide
  Sense strand starting at position 2000 of SEQ ID NO: 318339
auuguagucugguuacaga

SEQ ID NO: 554934 - RNA, 19 nt, Artificial Sequence
  Description of Artificial Sequence: Synthetic oligonucleotide
  Antisense strand to SEQ ID NO: 554933
ucuguaaccagacuacaau

SEQ ID NO: 554935 - RNA, 19 nt, Artificial Sequence
  Description of Artificial Sequence: Synthetic oligonucleotide
  Sense strand starting at position 2003 of SEQ ID NO: 318339
guagucugguuacagaauu

SEQ ID NO: 554936 - RNA, 19 nt, Artificial Sequence
  Description of Artificial Sequence: Synthetic oligonucleotide
  Antisense strand to SEQ ID NO: 554935
aauucuguaaccagacuac

SEQ ID NO: 554937 - RNA, 19 nt, Artificial Sequence
  Description of Artificial Sequence: Synthetic oligonucleotide
  Sense strand starting at position 2038 of SEQ ID NO: 318339
ggacacguuguguguuuca

SEQ ID NO: 554938 - RNA, 19 nt, Artificial Sequence
  Description of Artificial Sequence: Synthetic oligonucleotide
  Antisense strand to SEQ ID NO: 554937
ugaaacacacaacgugucc

SEQ ID NO: 554939 - RNA, 19 nt, Artificial Sequence
  Description of Artificial Sequence: Synthetic oligonucleotide
  Sense strand starting at position 2111 of SEQ ID NO: 318339
uaaauucuggagugagcuu

SEQ ID NO: 554940 - RNA, 19 nt, Artificial Sequence
  Description of Artificial Sequence: Synthetic oligonucleotide
  Antisense strand to SEQ ID NO: 554939
aagcucacuccagaauuua

SEQ ID NO: 554941 - RNA, 19 nt, Artificial Sequence
  Description of Artificial Sequence: Synthetic oligonucleotide
  Sense strand starting at position 2166 of SEQ ID NO: 318339
aguugaagcccugagaauc

SEQ ID NO: 554942 - RNA, 19 nt, Artificial Sequence
  Description of Artificial Sequence: Synthetic oligonucleotide
  Antisense strand to SEQ ID NO: 554941
gauucucagggcuucaacu

SEQ ID NO: 554943 - RNA, 19 nt, Artificial Sequence
  Description of Artificial Sequence: Synthetic oligonucleotide
  Sense strand starting at position 2174 of SEQ ID NO: 318339
cccugagaauccggauuga

SEQ ID NO: 554944 - RNA, 19 nt, Artificial Sequence
  Description of Artificial Sequence: Synthetic oligonucleotide
  Antisense strand to SEQ ID NO: 554943
ucaauccggauucucaggg

SEQ ID NO: 554945 - RNA, 19 nt, Artificial Sequence
  Description of Artificial Sequence: Synthetic oligonucleotide
  Sense strand starting at position 2232 of SEQ ID NO: 318339
cgcucagaguccuaagaag

SEQ ID NO: 554946 - RNA, 19 nt, Artificial Sequence
  Description of Artificial Sequence: Synthetic oligonucleotide
  Antisense strand to SEQ ID NO: 554945
cuucuuaggacucugagcg

SEQ ID NO: 554947 - RNA, 19 nt, Artificial Sequence
  Description of Artificial Sequence: Synthetic oligonucleotide
  Sense strand starting at position 2283 of SEQ ID NO: 318339
guaaacuauucuguuggau

SEQ ID NO: 554948 - RNA, 19 nt, Artificial Sequence
  Description of Artificial Sequence: Synthetic oligonucleotide
  Antisense strand to SEQ ID NO: 554947
auccaacagaauaguuuac

SEQ ID NO: 554949 - RNA, 19 nt, Artificial Sequence
  Description of Artificial Sequence: Synthetic oligonucleotide
  Sense strand starting at position 2287 of SEQ ID NO: 318339
acuauucuguuggauuauu

SEQ ID NO: 554950 - RNA, 19 nt, Artificial Sequence
  Description of Artificial Sequence: Synthetic oligonucleotide
  Antisense strand to SEQ ID NO: 554949
aauaauccaacagaauagu

SEQ ID NO: 554951 - RNA, 19 nt, Artificial Sequence
  Description of Artificial Sequence: Synthetic oligonucleotide
  Sense strand starting at position 2311 of SEQ ID NO: 318339
uuacauagauucuuugguu

SEQ ID NO: 554952 - RNA, 19 nt, Artificial Sequence
  Description of Artificial Sequence: Synthetic oligonucleotide
  Antisense strand to SEQ ID NO: 554951
aaccaaagaaucuauguaa

SEQ ID NO: 554953 - RNA, 19 nt, Artificial Sequence
  Description of Artificial Sequence: Synthetic oligonucleotide
  Sense strand starting at position 2381 of SEQ ID NO: 318339
gugugauaaaguggaguga

SEQ ID NO: 554954 - RNA, 19 nt, Artificial Sequence
  Description of Artificial Sequence: Synthetic oligonucleotide
  Antisense strand to SEQ ID NO: 554953
ucacuccacuuuaucacac

SEQ ID NO: 554955 - RNA, 19 nt, Artificial Sequence
  Description of Artificial Sequence: Synthetic oligonucleotide
  Sense strand starting at position 2416 of SEQ ID NO: 318339
ucaagauaauguuugguua

SEQ ID NO: 554956 - RNA, 19 nt, Artificial Sequence
  Description of Artificial Sequence: Synthetic oligonucleotide
  Antisense strand to SEQ ID NO: 554955
uaaccaaacauuaucuuga

SEQ ID NO: 554957 - RNA, 19 nt, Artificial Sequence
  Description of Artificial Sequence: Synthetic oligonucleotide
  Sense strand starting at position 2417 of SEQ ID NO: 318339
caagauaauguuugguuaa

SEQ ID NO: 554958 - RNA, 19 nt, Artificial Sequence
  Description of Artificial Sequence: Synthetic oligonucleotide
  Antisense strand to SEQ ID NO: 554957
uuaaccaaacauuaucuug

SEQ ID NO: 554959 - RNA, 19 nt, Artificial Sequence
  Description of Artificial Sequence: Synthetic oligonucleotide
  Sense strand starting at position 2506 of SEQ ID NO: 318339
uaggucauauuagugucua

SEQ ID NO: 554960 - RNA, 19 nt, Artificial Sequence
  Description of Artificial Sequence: Synthetic oligonucleotide
  Antisense strand to SEQ ID NO: 554959
uagacacuaauaugaccua

SEQ ID NO: 554961 - RNA, 19 nt, Artificial Sequence
  Description of Artificial Sequence: Synthetic oligonucleotide
  Sense strand starting at position 2510 of SEQ ID NO: 318339
ucauauuagugucuaggua

SEQ ID NO: 554962 - RNA, 19 nt, Artificial Sequence
  Description of Artificial Sequence: Synthetic oligonucleotide
  Antisense strand to SEQ ID NO: 554961
uaccuagacacuaauauga

SEQ ID NO: 554963 - RNA, 19 nt, Artificial Sequence
  Description of Artificial Sequence: Synthetic oligonucleotide
  Sense strand starting at position 2511 of SEQ ID NO: 318339
cauauuagugucuagguaa

SEQ ID NO: 554964 - RNA, 19 nt, Artificial Sequence
  Description of Artificial Sequence: Synthetic oligonucleotide
  Antisense strand to SEQ ID NO: 554963
uuaccuagacacuaauaug

SEQ ID NO: 554965 - RNA, 19 nt, Artificial Sequence
  Description of Artificial Sequence: Synthetic oligonucleotide
  Sense strand starting at position 2514 of SEQ ID NO: 318339
auuagugucuagguaaauu

SEQ ID NO: 554966 - RNA, 19 nt, Artificial Sequence
  Description of Artificial Sequence: Synthetic oligonucleotide
  Antisense strand to SEQ ID NO: 554965
aauuuaccuagacacuaau

SEQ ID NO: 554967 - RNA, 19 nt, Artificial Sequence
  Description of Artificial Sequence: Synthetic oligonucleotide
  Sense strand starting at position 2674 of SEQ ID NO: 318339
uuauuuagcuuaggauugu

SEQ ID NO: 554968 - RNA, 19 nt, Artificial Sequence
  Description of Artificial Sequence: Synthetic oligonucleotide
  Antisense strand to SEQ ID NO: 554967
acaauccuaagcuaaauaa

SEQ ID NO: 554969 - RNA, 19 nt, Artificial Sequence
  Description of Artificial Sequence: Synthetic oligonucleotide
  Sense strand starting at position 2678 of SEQ ID NO: 318339
uuagcuuaggauuguguaa

SEQ ID NO: 554970 - RNA, 19 nt, Artificial Sequence
  Description of Artificial Sequence: Synthetic oligonucleotide
  Antisense strand to SEQ ID NO: 554969
uuacacaauccuaagcuaa

SEQ ID NO: 554971 - RNA, 19 nt, Artificial Sequence
  Description of Artificial Sequence: Synthetic oligonucleotide
  Sense strand starting at position 2685 of SEQ ID NO: 318339
aggauuguguaagagguuu

SEQ ID NO: 554972 - RNA, 19 nt, Artificial Sequence
  Description of Artificial Sequence: Synthetic oligonucleotide
  Antisense strand to SEQ ID NO: 554971
aaaccucuuacacaauccu

SEQ ID NO: 554973 - RNA, 19 nt, Artificial Sequence
  Description of Artificial Sequence: Synthetic oligonucleotide
  Sense strand starting at position 2708 of SEQ ID NO: 318339
aguacucuucuagaauagu

SEQ ID NO: 554974 - RNA, 19 nt, Artificial Sequence
  Description of Artificial Sequence: Synthetic oligonucleotide
  Antisense strand to SEQ ID NO: 554973
acuauucuagaagaguacu

SEQ ID NO: 554975 - RNA, 19 nt, Artificial Sequence
  Description of Artificial Sequence: Synthetic oligonucleotide
  Sense strand starting at position 2766 of SEQ ID NO: 318339
uuuaucuuacagggauaca

SEQ ID NO: 554976 - RNA, 19 nt, Artificial Sequence
  Description of Artificial Sequence: Synthetic oligonucleotide
  Antisense strand to SEQ ID NO: 554975
uguaucccuguaagauaaa

SEQ ID NO: 554977 - RNA, 19 nt, Artificial Sequence
  Description of Artificial Sequence: Synthetic oligonucleotide
  Sense strand starting at position 2801 of SEQ ID NO: 318339
uuaaaugauuaagcaggua

SEQ ID NO: 554978 - RNA, 19 nt, Artificial Sequence
  Description of Artificial Sequence: Synthetic oligonucleotide
  Antisense strand to SEQ ID NO: 554977
uaccugcuuaaucauuuaa

SEQ ID NO: 554979 - RNA, 19 nt, Artificial Sequence
  Description of Artificial Sequence: Synthetic oligonucleotide
  Sense strand starting at position 2860 of SEQ ID NO: 318339
aacuguuugcauuguaaug

SEQ ID NO: 554980 - RNA, 19 nt, Artificial Sequence
  Description of Artificial Sequence: Synthetic oligonucleotide
  Antisense strand to SEQ ID NO: 554979
cauuacaaugcaaacaguu

SEQ ID NO: 554981 - RNA, 19 nt, Artificial Sequence
  Description of Artificial Sequence: Synthetic oligonucleotide
  Sense strand starting at position 2928 of SEQ ID NO: 318339
guuagauguagugauauag

SEQ ID NO: 554982 - RNA, 19 nt, Artificial Sequence
  Description of Artificial Sequence: Synthetic oligonucleotide
  Antisense strand to SEQ ID NO: 554981
cuauaucacuacaucuaac

SEQ ID NO: 554983 - RNA, 19 nt, Artificial Sequence
  Description of Artificial Sequence: Synthetic oligonucleotide
  Sense strand starting at position 2932 of SEQ ID NO: 318339
gauguagugauauagguuu

SEQ ID NO: 554984 - RNA, 19 nt, Artificial Sequence
  Description of Artificial Sequence: Synthetic oligonucleotide
  Antisense strand to SEQ ID NO: 554983
aaaccuauaucacuacauc

SEQ ID NO: 554985 - RNA, 19 nt, Artificial Sequence
  Description of Artificial Sequence: Synthetic oligonucleotide
  Sense strand starting at position 2955 of SEQ ID NO: 318339
caaguaaguguuuauguca

SEQ ID NO: 554986 - RNA, 19 nt, Artificial Sequence
  Description of Artificial Sequence: Synthetic oligonucleotide
  Antisense strand to SEQ ID NO: 554985
ugacauaaacacuuacuug

SEQ ID NO: 554987 - RNA, 19 nt, Artificial Sequence
  Description of Artificial Sequence: Synthetic oligonucleotide
  Sense strand starting at position 2958 of SEQ ID NO: 318339
guaaguguuuaugucaaau

SEQ ID NO: 554988 - RNA, 19 nt, Artificial Sequence
  Description of Artificial Sequence: Synthetic oligonucleotide
  Antisense strand to SEQ ID NO: 554987
auuugacauaaacacuuac

SEQ ID NO: 554989 - RNA, 19 nt, Artificial Sequence
  Description of Artificial Sequence: Synthetic oligonucleotide
  Sense strand starting at position 3154 of SEQ ID NO: 318339
acaggauguucagaagugu

SEQ ID NO: 554990 - RNA, 19 nt, Artificial Sequence
  Description of Artificial Sequence: Synthetic oligonucleotide
  Antisense strand to SEQ ID NO: 554989
acacuucugaacauccugu

SEQ ID NO: 554991 - RNA, 19 nt, Artificial Sequence
  Description of Artificial Sequence: Synthetic oligonucleotide
  Sense strand starting at position 3165 of SEQ ID NO: 318339
agaaguguuuaugucacua

SEQ ID NO: 554992 - RNA, 19 nt, Artificial Sequence
  Description of Artificial Sequence: Synthetic oligonucleotide
  Antisense strand to SEQ ID NO: 554991
uagugacauaaacacuucu

SEQ ID NO: 554993 - RNA, 19 nt, Artificial Sequence
  Description of Artificial Sequence: Synthetic oligonucleotide
  Sense strand starting at position 3267 of SEQ ID NO: 318339
gugcaaaggcaauaguauu

SEQ ID NO: 554994 - RNA, 19 nt, Artificial Sequence
  Description of Artificial Sequence: Synthetic oligonucleotide
  Antisense strand to SEQ ID NO: 554993
aauacuauugccuuugcac

SEQ ID NO: 554995 - RNA, 19 nt, Artificial Sequence
  Description of Artificial Sequence: Synthetic oligonucleotide
  Sense strand starting at position 3447 of SEQ ID NO: 318339
uuuaaauguucuguagcga

SEQ ID NO: 554996 - RNA, 19 nt, Artificial Sequence
  Description of Artificial Sequence: Synthetic oligonucleotide
  Antisense strand to SEQ ID NO: 554995
ucgcuacagaacauuuaaa

SEQ ID NO: 554997 - RNA, 19 nt, Artificial Sequence
  Description of Artificial Sequence: Synthetic oligonucleotide
  Sense strand starting at position 3448 of SEQ ID NO: 318339
uuaaauguucuguagcgau

SEQ ID NO: 554998 - RNA, 19 nt, Artificial Sequence
  Description of Artificial Sequence: Synthetic oligonucleotide
  Antisense strand to SEQ ID NO: 554997
aucgcuacagaacauuuaa

SEQ ID NO: 554999 - RNA, 19 nt, Artificial Sequence
  Description of Artificial Sequence: Synthetic oligonucleotide
  Sense strand starting at position 3499 of SEQ ID NO: 318339
aauuccugcgcucaagaga

SEQ ID NO: 555000 - RNA, 19 nt, Artificial Sequence
  Description of Artificial Sequence: Synthetic oligonucleotide
  Antisense strand to SEQ ID NO: 554999
ucucuugagcgcaggaauu

SEQ ID NO: 555001 - RNA, 19 nt, Artificial Sequence
  Description of Artificial Sequence: Synthetic oligonucleotide
  Sense strand starting at position 3823 of SEQ ID NO: 318339
aagugauacuuuccgauuc

SEQ ID NO: 555002 - RNA, 19 nt, Artificial Sequence
  Description of Artificial Sequence: Synthetic oligonucleotide
  Antisense strand to SEQ ID NO: 555001
gaaucggaaaguaucacuu

SEQ ID NO: 555003 - RNA, 19 nt, Artificial Sequence
  Description of Artificial Sequence: Synthetic oligonucleotide
  Sense strand starting at position 3847 of SEQ ID NO: 318339
aucaaagugcugugauuau

SEQ ID NO: 555004 - RNA, 19 nt, Artificial Sequence
  Description of Artificial Sequence: Synthetic oligonucleotide
  Antisense strand to SEQ ID NO: 555003
auaaucacagcacuuugau

SEQ ID NO: 555005 - RNA, 19 nt, Artificial Sequence
  Description of Artificial Sequence: Synthetic oligonucleotide
  Sense strand starting at position 3878 of SEQ ID NO: 318339
cugggccugucuucugaau

SEQ ID NO: 555006 - RNA, 19 nt, Artificial Sequence
  Description of Artificial Sequence: Synthetic oligonucleotide
  Antisense strand to SEQ ID NO: 555005
auucagaagacaggcccag

SEQ ID NO: 555007 - RNA, 19 nt, Artificial Sequence
  Description of Artificial Sequence: Synthetic oligonucleotide
  Sense strand starting at position 3938 of SEQ ID NO: 318339
ucacuaagucuucgcaaau

SEQ ID NO: 555008 - RNA, 19 nt, Artificial Sequence
  Description of Artificial Sequence: Synthetic oligonucleotide
  Antisense strand to SEQ ID NO: 555007
auuugcgaagacuuaguga

SEQ ID NO: 555009 - RNA, 19 nt, Artificial Sequence
  Description of Artificial Sequence: Synthetic oligonucleotide
  Sense strand starting at position 3947 of SEQ ID NO: 318339
cuucgcaaauuugaauaga

SEQ ID NO: 555010 - RNA, 19 nt, Artificial Sequence
  Description of Artificial Sequence: Synthetic oligonucleotide
  Antisense strand to SEQ ID NO: 555009
ucuauucaaauuugcgaag

SEQ ID NO: 555011 - RNA, 19 nt, Artificial Sequence
  Description of Artificial Sequence: Synthetic oligonucleotide
  Sense strand starting at position 3965 of SEQ ID NO: 318339
auagguuacuuguuuguuu

SEQ ID NO: 555012 - RNA, 19 nt, Artificial Sequence
  Description of Artificial Sequence: Synthetic oligonucleotide
  Antisense strand to SEQ ID NO: 555011
aaacaaacaaguaaccuau

SEQ ID NO: 555013 - RNA, 19 nt, Artificial Sequence
  Description of Artificial Sequence: Synthetic oligonucleotide
  Sense strand starting at position 2001 of SEQ ID NO: 318340
uuauuauugcaacgacuaa

SEQ ID NO: 555014 - RNA, 19 nt, Artificial Sequence
  Description of Artificial Sequence: Synthetic oligonucleotide
  Antisense strand to SEQ ID NO: 555013
uuagucguugcaauaauaa

SEQ ID NO: 555015 - RNA, 19 nt, Artificial Sequence
  Description of Artificial Sequence: Synthetic oligonucleotide
  Sense strand starting at position 2040 of SEQ ID NO: 318340
uacgcucaccuuugugaau

SEQ ID NO: 555016 - RNA, 19 nt, Artificial Sequence
  Description of Artificial Sequence: Synthetic oligonucleotide
  Antisense strand to SEQ ID NO: 555015
auucacaaaggugagcgua

SEQ ID NO: 555017 - RNA, 19 nt, Artificial Sequence
  Description of Artificial Sequence: Synthetic oligonucleotide
  Sense strand starting at position 2042 of SEQ ID NO: 318340
cgcucaccuuugugaauca

SEQ ID NO: 555018 - RNA, 19 nt, Artificial Sequence
  Description of Artificial Sequence: Synthetic oligonucleotide
  Antisense strand to SEQ ID NO: 555017
ugauucacaaaggugagcg

SEQ ID NO: 555019 - RNA, 19 nt, Artificial Sequence
  Description of Artificial Sequence: Synthetic oligonucleotide
  Sense strand starting at position 2049 of SEQ ID NO: 318340
cuuugugaaucacacguau

SEQ ID NO: 555020 - RNA, 19 nt, Artificial Sequence
  Description of Artificial Sequence: Synthetic oligonucleotide
  Antisense strand to SEQ ID NO: 555019
auacgugugauucacaaag

SEQ ID NO: 555021 - RNA, 19 nt, Artificial Sequence
  Description of Artificial Sequence: Synthetic oligonucleotide
  Sense strand starting at position 2099 of SEQ ID NO: 318340
cuuacauuaugugacguua

SEQ ID NO: 555022 - RNA, 19 nt, Artificial Sequence
  Description of Artificial Sequence: Synthetic oligonucleotide
  Antisense strand to SEQ ID NO: 555021
uaacgucacauaauguaag

SEQ ID NO: 555023 - RNA, 19 nt, Artificial Sequence
  Description of Artificial Sequence: Synthetic oligonucleotide
  Sense strand starting at position 2101 of SEQ ID NO: 318340
uacauuaugugacguuaaa

SEQ ID NO: 555024 - RNA, 19 nt, Artificial Sequence
  Description of Artificial Sequence: Synthetic oligonucleotide
  Antisense strand to SEQ ID NO: 555023
uuuaacgucacauaaugua

SEQ ID NO: 555025 - RNA, 19 nt, Artificial Sequence
  Description of Artificial Sequence: Synthetic oligonucleotide
  Sense strand starting at position 2136 of SEQ ID NO: 318340
cugcgaaaggaguaauuau

SEQ ID NO: 555026 - RNA, 19 nt, Artificial Sequence
  Description of Artificial Sequence: Synthetic oligonucleotide
  Antisense strand to SEQ ID NO: 555025
auaauuacuccuuucgcag

SEQ ID NO: 555027 - RNA, 19 nt, Artificial Sequence
  Description of Artificial Sequence: Synthetic oligonucleotide
  Sense strand starting at position 2216 of SEQ ID NO: 318340
gguuguaguugguuccaau

SEQ ID NO: 555028 - RNA, 19 nt, Artificial Sequence
  Description of Artificial Sequence: Synthetic oligonucleotide
  Antisense strand to SEQ ID NO: 555027
auuggaaccaacuacaacc

SEQ ID NO: 555029 - RNA, 19 nt, Artificial Sequence
  Description of Artificial Sequence: Synthetic oligonucleotide
  Sense strand starting at position 2219 of SEQ ID NO: 318340
uguaguugguuccaauuga

SEQ ID NO: 555030 - RNA, 19 nt, Artificial Sequence
  Description of Artificial Sequence: Synthetic oligonucleotide
  Antisense strand to SEQ ID NO: 555029
ucaauuggaaccaacuaca

SEQ ID NO: 555031 - RNA, 19 nt, Artificial Sequence
  Description of Artificial Sequence: Synthetic oligonucleotide
  Sense strand starting at position 2255 of SEQ ID NO: 318340
gaacgacauuucuggaagu

SEQ ID NO: 555032 - RNA, 19 nt, Artificial Sequence
  Description of Artificial Sequence: Synthetic oligonucleotide
  Antisense strand to SEQ ID NO: 555031
acuuccagaaaugucguuc

SEQ ID NO: 555033 - RNA, 19 nt, Artificial Sequence
  Description of Artificial Sequence: Synthetic oligonucleotide
  Sense strand starting at position 2278 of SEQ ID NO: 318340
auaauacggucccgauaaa

SEQ ID NO: 555034 - RNA, 19 nt, Artificial Sequence
  Description of Artificial Sequence: Synthetic oligonucleotide
  Antisense strand to SEQ ID NO: 555033
uuuaucgggaccguauuau

SEQ ID NO: 555035 - RNA, 19 nt, Artificial Sequence
  Description of Artificial Sequence: Synthetic oligonucleotide
  Sense strand starting at position 2327 of SEQ ID NO: 318340
uuacaagguuccuuuauug

SEQ ID NO: 555036 - RNA, 19 nt, Artificial Sequence
  Description of Artificial Sequence: Synthetic oligonucleotide
  Antisense strand to SEQ ID NO: 555035
caauaaaggaaccuuguaa

SEQ ID NO: 555037 - RNA, 19 nt, Artificial Sequence
  Description of Artificial Sequence: Synthetic oligonucleotide
  Sense strand starting at position 2331 of SEQ ID NO: 318340
aagguuccuuuauugagua

SEQ ID NO: 555038 - RNA, 19 nt, Artificial Sequence
  Description of Artificial Sequence: Synthetic oligonucleotide
  Antisense strand to SEQ ID NO: 555037
uacucaauaaaggaaccuu

SEQ ID NO: 555039 - RNA, 19 nt, Artificial Sequence
  Description of Artificial Sequence: Synthetic oligonucleotide
  Sense strand starting at position 2332 of SEQ ID NO: 318340
agguuccuuuauugaguaa

SEQ ID NO: 555040 - RNA, 19 nt, Artificial Sequence
  Description of Artificial Sequence: Synthetic oligonucleotide
  Antisense strand to SEQ ID NO: 555039
uuacucaauaaaggaaccu

SEQ ID NO: 555041 - RNA, 19 nt, Artificial Sequence
  Description of Artificial Sequence: Synthetic oligonucleotide
  Sense strand starting at position 2335 of SEQ ID NO: 318340
uuccuuuauugaguaaaug

SEQ ID NO: 555042 - RNA, 19 nt, Artificial Sequence
  Description of Artificial Sequence: Synthetic oligonucleotide
  Antisense strand to SEQ ID NO: 555041
cauuuacucaauaaaggaa

SEQ ID NO: 555043 - RNA, 19 nt, Artificial Sequence
  Description of Artificial Sequence: Synthetic oligonucleotide
  Sense strand starting at position 2474 of SEQ ID NO: 318340
accggagauuacccaugua

SEQ ID NO: 555044 - RNA, 19 nt, Artificial Sequence
  Description of Artificial Sequence: Synthetic oligonucleotide
  Antisense strand to SEQ ID NO: 555043
uacauggguaaucuccggu

SEQ ID NO: 555045 - RNA, 19 nt, Artificial Sequence
  Description of Artificial Sequence: Synthetic oligonucleotide
  Sense strand starting at position 2477 of SEQ ID NO: 318340
ggagauuacccauguaguu

SEQ ID NO: 555046 - RNA, 19 nt, Artificial Sequence
  Description of Artificial Sequence: Synthetic oligonucleotide
  Antisense strand to SEQ ID NO: 555045
aacuacauggguaaucucc

SEQ ID NO: 555047 - RNA, 19 nt, Artificial Sequence
  Description of Artificial Sequence: Synthetic oligonucleotide
  Sense strand starting at position 2486 of SEQ ID NO: 318340
ccauguaguuugcuuuaaa

SEQ ID NO: 555048 - RNA, 19 nt, Artificial Sequence
  Description of Artificial Sequence: Synthetic oligonucleotide
  Antisense strand to SEQ ID NO: 555047
uuuaaagcaaacuacaugg

SEQ ID NO: 555049 - RNA, 19 nt, Artificial Sequence
  Description of Artificial Sequence: Synthetic oligonucleotide
  Sense strand starting at position 2507 of SEQ ID NO: 318340
gucuuugaauaguaggaag

SEQ ID NO: 555050 - RNA, 19 nt, Artificial Sequence
  Description of Artificial Sequence: Synthetic oligonucleotide
  Antisense strand to SEQ ID NO: 555049
cuuccuacuauucaaagac

SEQ ID NO: 555051 - RNA, 19 nt, Artificial Sequence
  Description of Artificial Sequence: Synthetic oligonucleotide
  Sense strand starting at position 2510 of SEQ ID NO: 318340
uuugaauaguaggaagacu

SEQ ID NO: 555052 - RNA, 19 nt, Artificial Sequence
  Description of Artificial Sequence: Synthetic oligonucleotide
  Antisense strand to SEQ ID NO: 555051
agucuuccuacuauucaaa

SEQ ID NO: 555053 - RNA, 19 nt, Artificial Sequence
  Description of Artificial Sequence: Synthetic oligonucleotide
  Sense strand starting at position 2052 of SEQ ID NO: 318341
cgcucagaguccuaaccaa

SEQ ID NO: 555054 - RNA, 19 nt, Artificial Sequence
  Description of Artificial Sequence: Synthetic oligonucleotide
  Antisense strand to SEQ ID NO: 555053
uugguuaggacucugagcg

SEQ ID NO: 555055 - RNA, 19 nt, Artificial Sequence
  Description of Artificial Sequence: Synthetic oligonucleotide
  Sense strand starting at position 2153 of SEQ ID NO: 318341
auggaaaucuaccguauuc

SEQ ID NO: 555056 - RNA, 19 nt, Artificial Sequence
  Description of Artificial Sequence: Synthetic oligonucleotide
  Antisense strand to SEQ ID NO: 555055
gaauacgguagauuuccau

SEQ ID NO: 555057 - RNA, 19 nt, Artificial Sequence
  Description of Artificial Sequence: Synthetic oligonucleotide
  Sense strand starting at position 2164 of SEQ ID NO: 318341
ccguauucgcuuuaauaga

SEQ ID NO: 555058 - RNA, 19 nt, Artificial Sequence
  Description of Artificial Sequence: Synthetic oligonucleotide
  Antisense strand to SEQ ID NO: 555057
ucuauuaaagcgaauacgg

SEQ ID NO: 555059 - RNA, 19 nt, Artificial Sequence
  Description of Artificial Sequence: Synthetic oligonucleotide
  Sense strand starting at position 2179 of SEQ ID NO: 318341
uagaaacuuuagugagcuu

SEQ ID NO: 555060 - RNA, 19 nt, Artificial Sequence
  Description of Artificial Sequence: Synthetic oligonucleotide
  Antisense strand to SEQ ID NO: 555059
aagcucacuaaaguuucua

SEQ ID NO: 555061 - RNA, 19 nt, Artificial Sequence
  Description of Artificial Sequence: Synthetic oligonucleotide
  Sense strand starting at position 2248 of SEQ ID NO: 318341
auuggaaguuucuauaaac

SEQ ID NO: 555062 - RNA, 19 nt, Artificial Sequence
  Description of Artificial Sequence: Synthetic oligonucleotide
  Antisense strand to SEQ ID NO: 555061
guuuauagaaacuuccaau

SEQ ID NO: 555063 - RNA, 19 nt, Artificial Sequence
  Description of Artificial Sequence: Synthetic oligonucleotide
  Sense strand starting at position 2280 of SEQ ID NO: 318341
uuauaauguuagugcaucu

SEQ ID NO: 555064 - RNA, 19 nt, Artificial Sequence
  Description of Artificial Sequence: Synthetic oligonucleotide
  Antisense strand to SEQ ID NO: 555063
agaugcacuaacauuauaa

SEQ ID NO: 555065 - RNA, 19 nt, Artificial Sequence
  Description of Artificial Sequence: Synthetic oligonucleotide
  Sense strand starting at position 2289 of SEQ ID NO: 318341
uagugcaucugcuuugaga

SEQ ID NO: 555066 - RNA, 19 nt, Artificial Sequence
  Description of Artificial Sequence: Synthetic oligonucleotide
  Antisense strand to SEQ ID NO: 555065
ucucaaagcagaugcacua

SEQ ID NO: 555067 - RNA, 19 nt, Artificial Sequence
  Description of Artificial Sequence: Synthetic oligonucleotide
  Sense strand starting at position 2291 of SEQ ID NO: 318341
gugcaucugcuuugagauu

SEQ ID NO: 555068 - RNA, 19 nt, Artificial Sequence
  Description of Artificial Sequence: Synthetic oligonucleotide
  Antisense strand to SEQ ID NO: 555067
aaucucaaagcagaugcac

SEQ ID NO: 555069 - RNA, 19 nt, Artificial Sequence
  Description of Artificial Sequence: Synthetic oligonucleotide
  Sense strand starting at position 2292 of SEQ ID NO: 318341
ugcaucugcuuugagauua

SEQ ID NO: 555070 - RNA, 19 nt, Artificial Sequence
  Description of Artificial Sequence: Synthetic oligonucleotide
  Antisense strand to SEQ ID NO: 555069
uaaucucaaagcagaugca

SEQ ID NO: 555071 - RNA, 19 nt, Artificial Sequence
  Description of Artificial Sequence: Synthetic oligonucleotide
  Sense strand starting at position 2297 of SEQ ID NO: 318341
cugcuuugagauuacuguu

SEQ ID NO: 555072 - RNA, 19 nt, Artificial Sequence
  Description of Artificial Sequence: Synthetic oligonucleotide
  Antisense strand to SEQ ID NO: 555071
aacaguaaucucaaagcag

SEQ ID NO: 555073 - RNA, 19 nt, Artificial Sequence
  Description of Artificial Sequence: Synthetic oligonucleotide
  Sense strand starting at position 2335 of SEQ ID NO: 318341
ggagaugucucccuaggag

SEQ ID NO: 555074 - RNA, 19 nt, Artificial Sequence
  Description of Artificial Sequence: Synthetic oligonucleotide
  Antisense strand to SEQ ID NO: 555073
cuccuagggagacaucucc

SEQ ID NO: 555075 - RNA, 19 nt, Artificial Sequence
  Description of Artificial Sequence: Synthetic oligonucleotide
  Sense strand starting at position 2338 of SEQ ID NO: 318341
gaugucucccuaggaguuu

SEQ ID NO: 555076 - RNA, 19 nt, Artificial Sequence
  Description of Artificial Sequence: Synthetic oligonucleotide
  Antisense strand to SEQ ID NO: 555075
aaacuccuagggagacauc

SEQ ID NO: 555077 - RNA, 19 nt, Artificial Sequence
  Description of Artificial Sequence: Synthetic oligonucleotide
  Sense strand starting at position 2437 of SEQ ID NO: 318341
uuccuugaaugauccugaa

SEQ ID NO: 555078 - RNA, 19 nt, Artificial Sequence
  Description of Artificial Sequence: Synthetic oligonucleotide
  Antisense strand to SEQ ID NO: 555077
uucaggaucauucaaggaa

SEQ ID NO: 555079 - RNA, 19 nt, Artificial Sequence
  Description of Artificial Sequence: Synthetic oligonucleotide
  Sense strand starting at position 2440 of SEQ ID NO: 318341
cuugaaugauccugaaugg

SEQ ID NO: 555080 - RNA, 19 nt, Artificial Sequence
  Description of Artificial Sequence: Synthetic oligonucleotide
  Antisense strand to SEQ ID NO: 555079
ccauucaggaucauucaag

SEQ ID NO: 555081 - RNA, 19 nt, Artificial Sequence
  Description of Artificial Sequence: Synthetic oligonucleotide
  Sense strand starting at position 2460 of SEQ ID NO: 318341
aggauuacuuuaccagguu

SEQ ID NO: 555082 - RNA, 19 nt, Artificial Sequence
  Description of Artificial Sequence: Synthetic oligonucleotide
  Antisense strand to SEQ ID NO: 555081
aaccugguaaaguaauccu

SEQ ID NO: 555083 - RNA, 19 nt, Artificial Sequence
  Description of Artificial Sequence: Synthetic oligonucleotide
  Sense strand starting at position 2472 of SEQ ID NO: 318341
ccagguuguugacauguaa

SEQ ID NO: 555084 - RNA, 19 nt, Artificial Sequence
  Description of Artificial Sequence: Synthetic oligonucleotide
  Antisense strand to SEQ ID NO: 555083
uuacaugucaacaaccugg

SEQ ID NO: 555085 - RNA, 19 nt, Artificial Sequence
  Description of Artificial Sequence: Synthetic oligonucleotide
  Sense strand starting at position 2479 of SEQ ID NO: 318341
guugacauguaacgcuuaa

SEQ ID NO: 555086 - RNA, 19 nt, Artificial Sequence
  Description of Artificial Sequence: Synthetic oligonucleotide
  Antisense strand to SEQ ID NO: 555085
uuaagcguuacaugucaac

SEQ ID NO: 555087 - RNA, 19 nt, Artificial Sequence
  Description of Artificial Sequence: Synthetic oligonucleotide
  Sense strand starting at position 2630 of SEQ ID NO: 318341
acuugcauugacuggaaau

SEQ ID NO: 555088 - RNA, 19 nt, Artificial Sequence
  Description of Artificial Sequence: Synthetic oligonucleotide
  Antisense strand to SEQ ID NO: 555087
auuuccagucaaugcaagu

SEQ ID NO: 555089 - RNA, 19 nt, Artificial Sequence
  Description of Artificial Sequence: Synthetic oligonucleotide
  Sense strand starting at position 2763 of SEQ ID NO: 318341
cuggguaacugaccuaauu

SEQ ID NO: 555090 - RNA, 19 nt, Artificial Sequence
  Description of Artificial Sequence: Synthetic oligonucleotide
  Antisense strand to SEQ ID NO: 555089
aauuaggucaguuacccag

SEQ ID NO: 555091 - RNA, 19 nt, Artificial Sequence
  Description of Artificial Sequence: Synthetic oligonucleotide
  Sense strand starting at position 2765 of SEQ ID NO: 318341
ggguaacugaccuaauugu

SEQ ID NO: 555092 - RNA, 19 nt, Artificial Sequence
  Description of Artificial Sequence: Synthetic oligonucleotide
  Antisense strand to SEQ ID NO: 555091
acaauuaggucaguuaccc

SEQ ID NO: 555093 - RNA, 19 nt, Artificial Sequence
  Description of Artificial Sequence: Synthetic oligonucleotide
  Sense strand starting at position 2781 of SEQ ID NO: 318341
uguaauuacugagaauuac

SEQ ID NO: 555094 - RNA, 19 nt, Artificial Sequence
  Description of Artificial Sequence: Synthetic oligonucleotide
  Antisense strand to SEQ ID NO: 555093
guaauucucaguaauuaca

SEQ ID NO: 555095 - RNA, 19 nt, Artificial Sequence
  Description of Artificial Sequence: Synthetic oligonucleotide
  Sense strand starting at position 2787 of SEQ ID NO: 318341
uacugagaauuacugguaa

SEQ ID NO: 555096 - RNA, 19 nt, Artificial Sequence
  Description of Artificial Sequence: Synthetic oligonucleotide
  Antisense strand to SEQ ID NO: 555095
uuaccaguaauucucagua

SEQ ID NO: 555097 - RNA, 19 nt, Artificial Sequence
  Description of Artificial Sequence: Synthetic oligonucleotide
  Sense strand starting at position 2791 of SEQ ID NO: 318341
gagaauuacugguaauacu

SEQ ID NO: 555098 - RNA, 19 nt, Artificial Sequence
  Description of Artificial Sequence: Synthetic oligonucleotide
  Antisense strand to SEQ ID NO: 555097
aguauuaccaguaauucuc

SEQ ID NO: 555099 - RNA, 19 nt, Artificial Sequence
  Description of Artificial Sequence: Synthetic oligonucleotide
  Sense strand starting at position 2850 of SEQ ID NO: 318341
agaaauaacuggcuacgua

SEQ ID NO: 555100 - RNA, 19 nt, Artificial Sequence
  Description of Artificial Sequence: Synthetic oligonucleotide
  Antisense strand to SEQ ID NO: 555099
uacguagccaguuauuucu

SEQ ID NO: 555101 - RNA, 19 nt, Artificial Sequence
  Description of Artificial Sequence: Synthetic oligonucleotide
  Sense strand starting at position 2864 of SEQ ID NO: 318341
acguacuuucaugagcgua

SEQ ID NO: 555102 - RNA, 19 nt, Artificial Sequence
  Description of Artificial Sequence: Synthetic oligonucleotide
  Antisense strand to SEQ ID NO: 555101
uacgcucaugaaaguacgu

SEQ ID NO: 555103 - RNA, 19 nt, Artificial Sequence
  Description of Artificial Sequence: Synthetic oligonucleotide
  Sense strand starting at position 2950 of SEQ ID NO: 318341
uauauagguagcugugaga

SEQ ID NO: 555104 - RNA, 19 nt, Artificial Sequence
  Description of Artificial Sequence: Synthetic oligonucleotide
  Antisense strand to SEQ ID NO: 555103
ucucacagcuaccuauaua

SEQ ID NO: 555105 - RNA, 19 nt, Artificial Sequence
  Description of Artificial Sequence: Synthetic oligonucleotide
  Sense strand starting at position 2986 of SEQ ID NO: 318341
uugaguuuacuugaauuac

SEQ ID NO: 555106 - RNA, 19 nt, Artificial Sequence
  Description of Artificial Sequence: Synthetic oligonucleotide
  Antisense strand to SEQ ID NO: 555105
guaauucaaguaaacucaa

SEQ ID NO: 555107 - RNA, 19 nt, Artificial Sequence
  Description of Artificial Sequence: Synthetic oligonucleotide
  Sense strand starting at position 3135 of SEQ ID NO: 318341
ggauuacuguagcccaaga

SEQ ID NO: 555108 - RNA, 19 nt, Artificial Sequence
  Description of Artificial Sequence: Synthetic oligonucleotide
  Antisense strand to SEQ ID NO: 555107
ucuugggcuacaguaaucc

SEQ ID NO: 555109 - RNA, 19 nt, Artificial Sequence
  Description of Artificial Sequence: Synthetic oligonucleotide
  Sense strand starting at position 3137 of SEQ ID NO: 318341
auuacuguagcccaagagu

SEQ ID NO: 555110 - RNA, 19 nt, Artificial Sequence
  Description of Artificial Sequence: Synthetic oligonucleotide
  Antisense strand to SEQ ID NO: 555109
acucuugggcuacaguaau

SEQ ID NO: 555111 - RNA, 19 nt, Artificial Sequence
  Description of Artificial Sequence: Synthetic oligonucleotide
  Sense strand starting at position 3815 of SEQ ID NO: 318341
aaauauuaagagugggcaa

SEQ ID NO: 555112 - RNA, 19 nt, Artificial Sequence
  Description of Artificial Sequence: Synthetic oligonucleotide
  Antisense strand to SEQ ID NO: 555111
uugcccacucuuaauauuu

SEQ ID NO: 555113 - RNA, 19 nt, Artificial Sequence
  Description of Artificial Sequence: Synthetic oligonucleotide
  Sense strand starting at position 3935 of SEQ ID NO: 318341
uuggaacucacgugaguag

SEQ ID NO: 555114 - RNA, 19 nt, Artificial Sequence
  Description of Artificial Sequence: Synthetic oligonucleotide
  Antisense strand to SEQ ID NO: 555113
cuacucacgugaguuccaa

SEQ ID NO: 555115 - RNA, 19 nt, Artificial Sequence
  Description of Artificial Sequence: Synthetic oligonucleotide
  Sense strand starting at position 3956 of SEQ ID NO: 318341
gcaacagaguuagagcuua

SEQ ID NO: 555116 - RNA, 19 nt, Artificial Sequence
  Description of Artificial Sequence: Synthetic oligonucleotide
  Antisense strand to SEQ ID NO: 555115
uaagcucuaacucuguugc

SEQ ID NO: 555117 - RNA, 19 nt, Artificial Sequence
  Description of Artificial Sequence: Synthetic oligonucleotide
  Sense strand starting at position 3961 of SEQ ID NO: 318341
agaguuagagcuuaucuug

SEQ ID NO: 555118 - RNA, 19 nt, Artificial Sequence
  Description of Artificial Sequence: Synthetic oligonucleotide
  Antisense strand to SEQ ID NO: 555117
caagauaagcucuaacucu

SEQ ID NO: 555119 - RNA, 19 nt, Artificial Sequence
  Description of Artificial Sequence: Synthetic oligonucleotide
  Sense strand starting at position 3964 of SEQ ID NO: 318341
guuagagcuuaucuuguua

SEQ ID NO: 555120 - RNA, 19 nt, Artificial Sequence
  Description of Artificial Sequence: Synthetic oligonucleotide
  Antisense strand to SEQ ID NO: 555119
uaacaagauaagcucuaac

SEQ ID NO: 555121 - RNA, 19 nt, Artificial Sequence
  Description of Artificial Sequence: Synthetic oligonucleotide
  Sense strand starting at position 1986 of SEQ ID NO: 318342
gccguauugcuggauugga

SEQ ID NO: 555122 - RNA, 19 nt, Artificial Sequence
  Description of Artificial Sequence: Synthetic oligonucleotide
  Antisense strand to SEQ ID NO: 555121
uccaauccagcaauacggc

SEQ ID NO: 555123 - RNA, 19 nt, Artificial Sequence
  Description of Artificial Sequence: Synthetic oligonucleotide
  Sense strand starting at position 2044 of SEQ ID NO: 318342
cgcucagaggccuaaauaa

SEQ ID NO: 555124 - RNA, 19 nt, Artificial Sequence
  Description of Artificial Sequence: Synthetic oligonucleotide
  Antisense strand to SEQ ID NO: 555123
uuauuuaggccucugagcg

SEQ ID NO: 555125 - RNA, 19 nt, Artificial Sequence
  Description of Artificial Sequence: Synthetic oligonucleotide
  Sense strand starting at position 2100 of SEQ ID NO: 318342
guuuguuugccuuuguuga

SEQ ID NO: 555126 - RNA, 19 nt, Artificial Sequence
  Description of Artificial Sequence: Synthetic oligonucleotide
  Antisense strand to SEQ ID NO: 555125
ucaacaaaggcaaacaaac

SEQ ID NO: 555127 - RNA, 19 nt, Artificial Sequence
  Description of Artificial Sequence: Synthetic oligonucleotide
  Sense strand starting at position 2147 of SEQ ID NO: 318342
gcucuaagauacccuagaa

SEQ ID NO: 555128 - RNA, 19 nt, Artificial Sequence
  Description of Artificial Sequence: Synthetic oligonucleotide
  Antisense strand to SEQ ID NO: 555127
uucuaggguaucuuagagc

SEQ ID NO: 555129 - RNA, 19 nt, Artificial Sequence
  Description of Artificial Sequence: Synthetic oligonucleotide
  Sense strand starting at position 2232 of SEQ ID NO: 318342
ugauaauaguugcuaggaa

SEQ ID NO: 555130 - RNA, 19 nt, Artificial Sequence
  Description of Artificial Sequence: Synthetic oligonucleotide
  Antisense strand to SEQ ID NO: 555129
uuccuagcaacuauuauca

SEQ ID NO: 555131 - RNA, 19 nt, Artificial Sequence
  Description of Artificial Sequence: Synthetic oligonucleotide
  Sense strand starting at position 2251 of SEQ ID NO: 318342
aguauuauugacugcucaa

SEQ ID NO: 555132 - RNA, 19 nt, Artificial Sequence
  Description of Artificial Sequence: Synthetic oligonucleotide
  Antisense strand to SEQ ID NO: 555131
uugagcagucaauaauacu

SEQ ID NO: 555133 - RNA, 19 nt, Artificial Sequence
  Description of Artificial Sequence: Synthetic oligonucleotide
  Sense strand starting at position 2258 of SEQ ID NO: 318342
uugacugcucaaggcauua

SEQ ID NO: 555134 - RNA, 19 nt, Artificial Sequence
  Description of Artificial Sequence: Synthetic oligonucleotide
  Antisense strand to SEQ ID NO: 555133
uaaugccuugagcagucaa

SEQ ID NO: 555135 - RNA, 19 nt, Artificial Sequence
  Description of Artificial Sequence: Synthetic oligonucleotide
  Sense strand starting at position 2263 of SEQ ID NO: 318342
ugcucaaggcauuaaucaa

SEQ ID NO: 555136 - RNA, 19 nt, Artificial Sequence
  Description of Artificial Sequence: Synthetic oligonucleotide
  Antisense strand to SEQ ID NO: 555135
uugauuaaugccuugagca

SEQ ID NO: 555137 - RNA, 19 nt, Artificial Sequence
  Description of Artificial Sequence: Synthetic oligonucleotide
  Sense strand starting at position 2318 of SEQ ID NO: 318342
cuuauuguauaaucagaag

SEQ ID NO: 555138 - RNA, 19 nt, Artificial Sequence
  Description of Artificial Sequence: Synthetic oligonucleotide
  Antisense strand to SEQ ID NO: 555137
cuucugauuauacaauaag

SEQ ID NO: 555139 - RNA, 19 nt, Artificial Sequence
  Description of Artificial Sequence: Synthetic oligonucleotide
  Sense strand starting at position 2402 of SEQ ID NO: 318342
gguugauggcuuugcauuu

SEQ ID NO: 555140 - RNA, 19 nt, Artificial Sequence
  Description of Artificial Sequence: Synthetic oligonucleotide
  Antisense strand to SEQ ID NO: 555139
aaaugcaaagccaucaacc

SEQ ID NO: 555141 - RNA, 19 nt, Artificial Sequence
  Description of Artificial Sequence: Synthetic oligonucleotide
  Sense strand starting at position 2403 of SEQ ID NO: 318342
guugauggcuuugcauuua

SEQ ID NO: 555142 - RNA, 19 nt, Artificial Sequence
  Description of Artificial Sequence: Synthetic oligonucleotide
  Antisense strand to SEQ ID NO: 555141
uaaaugcaaagccaucaac

SEQ ID NO: 555143 - RNA, 19 nt, Artificial Sequence
  Description of Artificial Sequence: Synthetic oligonucleotide
  Sense strand starting at position 2459 of SEQ ID NO: 318342
cacuuaauuggguacaugu

SEQ ID NO: 555144 - RNA, 19 nt, Artificial Sequence
  Description of Artificial Sequence: Synthetic oligonucleotide
  Antisense strand to SEQ ID NO: 555143
acauguacccaauuaagug

SEQ ID NO: 555145 - RNA, 19 nt, Artificial Sequence
  Description of Artificial Sequence: Synthetic oligonucleotide
  Sense strand starting at position 2497 of SEQ ID NO: 318342
ugcagcuggagcuagaaau

SEQ ID NO: 555146 - RNA, 19 nt, Artificial Sequence
  Description of Artificial Sequence: Synthetic oligonucleotide
  Antisense strand to SEQ ID NO: 555145
auuucuagcuccagcugca

SEQ ID NO: 555147 - RNA, 19 nt, Artificial Sequence
  Description of Artificial Sequence: Synthetic oligonucleotide
  Sense strand starting at position 2541 of SEQ ID NO: 318342
ggucucaagcgugaagguu

SEQ ID NO: 555148 - RNA, 19 nt, Artificial Sequence
  Description of Artificial Sequence: Synthetic oligonucleotide
  Antisense strand to SEQ ID NO: 555147
aaccuucacgcuugagacc

SEQ ID NO: 555149 - RNA, 19 nt, Artificial Sequence
  Description of Artificial Sequence: Synthetic oligonucleotide
  Sense strand starting at position 2581 of SEQ ID NO: 318342
aagagaguauaauagagua

SEQ ID NO: 555150 - RNA, 19 nt, Artificial Sequence
  Description of Artificial Sequence: Synthetic oligonucleotide
  Antisense strand to SEQ ID NO: 555149
uacucuauuauacucucuu

SEQ ID NO: 555151 - RNA, 19 nt, Artificial Sequence
  Description of Artificial Sequence: Synthetic oligonucleotide
  Sense strand starting at position 2600 of SEQ ID NO: 318342
ugguaacugcugugauaug

SEQ ID NO: 555152 - RNA, 19 nt, Artificial Sequence
  Description of Artificial Sequence: Synthetic oligonucleotide
  Antisense strand to SEQ ID NO: 555151
cauaucacagcaguuacca

SEQ ID NO: 555153 - RNA, 19 nt, Artificial Sequence
  Description of Artificial Sequence: Synthetic oligonucleotide
  Sense strand starting at position 2605 of SEQ ID NO: 318342
acugcugugauaugaggua

SEQ ID NO: 555154 - RNA, 19 nt, Artificial Sequence
  Description of Artificial Sequence: Synthetic oligonucleotide
  Antisense strand to SEQ ID NO: 555153
uaccucauaucacagcagu

SEQ ID NO: 555155 - RNA, 19 nt, Artificial Sequence
  Description of Artificial Sequence: Synthetic oligonucleotide
  Sense strand starting at position 2621 of SEQ ID NO: 318342
guaggaaacacugggugau

SEQ ID NO: 555156 - RNA, 19 nt, Artificial Sequence
  Description of Artificial Sequence: Synthetic oligonucleotide
  Antisense strand to SEQ ID NO: 555155
aucacccaguguuuccuac

SEQ ID NO: 555157 - RNA, 19 nt, Artificial Sequence
  Description of Artificial Sequence: Synthetic oligonucleotide
  Sense strand starting at position 2753 of SEQ ID NO: 318342
agaaguguucuagaaccuc

SEQ ID NO: 555158 - RNA, 19 nt, Artificial Sequence
  Description of Artificial Sequence: Synthetic oligonucleotide
  Antisense strand to SEQ ID NO: 555157
gagguucuagaacacuucu

SEQ ID NO: 555159 - RNA, 19 nt, Artificial Sequence
  Description of Artificial Sequence: Synthetic oligonucleotide
  Sense strand starting at position 2772 of SEQ ID NO: 318342
ugaacaaaugcuugaaggu

SEQ ID NO: 555160 - RNA, 19 nt, Artificial Sequence
  Description of Artificial Sequence: Synthetic oligonucleotide
  Antisense strand to SEQ ID NO: 555159
accuucaagcauuuguuca

SEQ ID NO: 555161 - RNA, 19 nt, Artificial Sequence
  Description of Artificial Sequence: Synthetic oligonucleotide
  Sense strand starting at position 2824 of SEQ ID NO: 318342
gcaggucuauuugauaaag

SEQ ID NO: 555162 - RNA, 19 nt, Artificial Sequence
  Description of Artificial Sequence: Synthetic oligonucleotide
  Antisense strand to SEQ ID NO: 555161
cuuuaucaaauagaccugc

SEQ ID NO: 555163 - RNA, 19 nt, Artificial Sequence
  Description of Artificial Sequence: Synthetic oligonucleotide
  Sense strand starting at position 2826 of SEQ ID NO: 318342
aggucuauuugauaaagcu

SEQ ID NO: 555164 - RNA, 19 nt, Artificial Sequence
  Description of Artificial Sequence: Synthetic oligonucleotide
  Antisense strand to SEQ ID NO: 555163
agcuuuaucaaauagaccu

SEQ ID NO: 555165 - RNA, 19 nt, Artificial Sequence
  Description of Artificial Sequence: Synthetic oligonucleotide
  Sense strand starting at position 2891 of SEQ ID NO: 318342
auuguuugagguugucaag

SEQ ID NO: 555166 - RNA, 19 nt, Artificial Sequence
  Description of Artificial Sequence: Synthetic oligonucleotide
  Antisense strand to SEQ ID NO: 555165
cuugacaaccucaaacaau

SEQ ID NO: 555167 - RNA, 19 nt, Artificial Sequence
  Description of Artificial Sequence: Synthetic oligonucleotide
  Sense strand starting at position 2955 of SEQ ID NO: 318342
guggaugucuucuuacucu

SEQ ID NO: 555168 - RNA, 19 nt, Artificial Sequence
  Description of Artificial Sequence: Synthetic oligonucleotide
  Antisense strand to SEQ ID NO: 555167
agaguaagaagacauccac

SEQ ID NO: 555169 - RNA, 19 nt, Artificial Sequence
  Description of Artificial Sequence: Synthetic oligonucleotide
  Sense strand starting at position 3006 of SEQ ID NO: 318342
gcauacaauucugugacau

SEQ ID NO: 555170 - RNA, 19 nt, Artificial Sequence
  Description of Artificial Sequence: Synthetic oligonucleotide
  Antisense strand to SEQ ID NO: 555169
augucacagaauuguaugc

SEQ ID NO: 555171 - RNA, 19 nt, Artificial Sequence
  Description of Artificial Sequence: Synthetic oligonucleotide
  Sense strand starting at position 3040 of SEQ ID NO: 318342
uacauucuggugugaccau

SEQ ID NO: 555172 - RNA, 19 nt, Artificial Sequence
  Description of Artificial Sequence: Synthetic oligonucleotide
  Antisense strand to SEQ ID NO: 555171
auggucacaccagaaugua

SEQ ID NO: 555173 - RNA, 19 nt, Artificial Sequence
  Description of Artificial Sequence: Synthetic oligonucleotide
  Sense strand starting at position 3187 of SEQ ID NO: 318342
uugacuaaucuaggaacuu

SEQ ID NO: 555174 - RNA, 19 nt, Artificial Sequence
  Description of Artificial Sequence: Synthetic oligonucleotide
  Antisense strand to SEQ ID NO: 555173
aaguuccuagauuagucaa

SEQ ID NO: 555175 - RNA, 19 nt, Artificial Sequence
  Description of Artificial Sequence: Synthetic oligonucleotide
  Sense strand starting at position 3258 of SEQ ID NO: 318342
uugauaucaugucuuugaa

SEQ ID NO: 555176 - RNA, 19 nt, Artificial Sequence
  Description of Artificial Sequence: Synthetic oligonucleotide
  Antisense strand to SEQ ID NO: 555175
uucaaagacaugauaucaa

SEQ ID NO: 555177 - RNA, 19 nt, Artificial Sequence
  Description of Artificial Sequence: Synthetic oligonucleotide
  Sense strand starting at position 3260 of SEQ ID NO: 318342
gauaucaugucuuugaagu

SEQ ID NO: 555178 - RNA, 19 nt, Artificial Sequence
  Description of Artificial Sequence: Synthetic oligonucleotide
  Antisense strand to SEQ ID NO: 555177
acuucaaagacaugauauc

SEQ ID NO: 555179 - RNA, 19 nt, Artificial Sequence
  Description of Artificial Sequence: Synthetic oligonucleotide
  Sense strand starting at position 3261 of SEQ ID NO: 318342
auaucaugucuuugaaguu

SEQ ID NO: 555180 - RNA, 19 nt, Artificial Sequence
  Description of Artificial Sequence: Synthetic oligonucleotide
  Antisense strand to SEQ ID NO: 555179
aacuucaaagacaugauau

SEQ ID NO: 555181 - RNA, 19 nt, Artificial Sequence
  Description of Artificial Sequence: Synthetic oligonucleotide
  Sense strand starting at position 3274 of SEQ ID NO: 318342
gaaguucguccauauugua

SEQ ID NO: 555182 - RNA, 19 nt, Artificial Sequence
  Description of Artificial Sequence: Synthetic oligonucleotide
  Antisense strand to SEQ ID NO: 555181
uacaauauggacgaacuuc

SEQ ID NO: 555183 - RNA, 19 nt, Artificial Sequence
  Description of Artificial Sequence: Synthetic oligonucleotide
  Sense strand starting at position 3661 of SEQ ID NO: 318342
uucuaaugaauguggagua

SEQ ID NO: 555184 - RNA, 19 nt, Artificial Sequence
  Description of Artificial Sequence: Synthetic oligonucleotide
  Antisense strand to SEQ ID NO: 555183
uacuccacauucauuagaa

SEQ ID NO: 555185 - RNA, 19 nt, Artificial Sequence
  Description of Artificial Sequence: Synthetic oligonucleotide
  Sense strand starting at position 3807 of SEQ ID NO: 318342
acauccaauuguuugggau

SEQ ID NO: 555186 - RNA, 19 nt, Artificial Sequence
  Description of Artificial Sequence: Synthetic oligonucleotide
  Antisense strand to SEQ ID NO: 555185
aucccaaacaauuggaugu

SEQ ID NO: 555187 - RNA, 19 nt, Artificial Sequence
  Description of Artificial Sequence: Synthetic oligonucleotide
  Sense strand starting at position 3808 of SEQ ID NO: 318342
cauccaauuguuugggauu

SEQ ID NO: 555188 - RNA, 19 nt, Artificial Sequence
  Description of Artificial Sequence: Synthetic oligonucleotide
  Antisense strand to SEQ ID NO: 555187
aaucccaaacaauuggaug

SEQ ID NO: 555189 - RNA, 19 nt, Artificial Sequence
  Description of Artificial Sequence: Synthetic oligonucleotide
  Sense strand starting at position 3820 of SEQ ID NO: 318342
ugggauucuuuguuguuga

SEQ ID NO: 555190 - RNA, 19 nt, Artificial Sequence
  Description of Artificial Sequence: Synthetic oligonucleotide
  Antisense strand to SEQ ID NO: 555189
ucaacaacaaagaauccca

SEQ ID NO: 555191 - RNA, 19 nt, Artificial Sequence
  Description of Artificial Sequence: Synthetic oligonucleotide
  Sense strand starting at position 3828 of SEQ ID NO: 318342
uuuguuguugaguucgagu

SEQ ID NO: 555192 - RNA, 19 nt, Artificial Sequence
  Description of Artificial Sequence: Synthetic oligonucleotide
  Antisense strand to SEQ ID NO: 555191
acucgaacucaacaacaaa

SEQ ID NO: 555193 - RNA, 19 nt, Artificial Sequence
  Description of Artificial Sequence: Synthetic oligonucleotide
  Sense strand starting at position 3839 of SEQ ID NO: 318342
guucgaguucuuuauucug

SEQ ID NO: 555194 - RNA, 19 nt, Artificial Sequence
  Description of Artificial Sequence: Synthetic oligonucleotide
  Antisense strand to SEQ ID NO: 555193
cagaauaaagaacucgaac

SEQ ID NO: 555195 - RNA, 19 nt, Artificial Sequence
  Description of Artificial Sequence: Synthetic oligonucleotide
  Sense strand starting at position 3841 of SEQ ID NO: 318342
ucgaguucuuuauucugga

SEQ ID NO: 555196 - RNA, 19 nt, Artificial Sequence
  Description of Artificial Sequence: Synthetic oligonucleotide
  Antisense strand to SEQ ID NO: 555195
uccagaauaaagaacucga

SEQ ID NO: 555197 - RNA, 19 nt, Artificial Sequence
  Description of Artificial Sequence: Synthetic oligonucleotide
  Sense strand starting at position 3842 of SEQ ID NO: 318342
cgaguucuuuauucuggau

SEQ ID NO: 555198 - RNA, 19 nt, Artificial Sequence
  Description of Artificial Sequence: Synthetic oligonucleotide
  Antisense strand to SEQ ID NO: 555197
auccagaauaaagaacucg

SEQ ID NO: 555199 - RNA, 19 nt, Artificial Sequence
  Description of Artificial Sequence: Synthetic oligonucleotide
  Sense strand starting at position 3960 of SEQ ID NO: 318342
ugugauaaaguccaguaua

SEQ ID NO: 555200 - RNA, 19 nt, Artificial Sequence
  Description of Artificial Sequence: Synthetic oligonucleotide
  Antisense strand to SEQ ID NO: 555199
uauacuggacuuuaucaca

SEQ ID NO: 555201 - RNA, 19 nt, Artificial Sequence
  Description of Artificial Sequence: Synthetic oligonucleotide
  Sense strand starting at position 1989 of SEQ ID NO: 318343
ggcaauuggucauuuccuu

SEQ ID NO: 555202 - RNA, 19 nt, Artificial Sequence
  Description of Artificial Sequence: Synthetic oligonucleotide
  Antisense strand to SEQ ID NO: 555201
aaggaaaugaccaauugcc

SEQ ID NO: 555203 - RNA, 19 nt, Artificial Sequence
  Description of Artificial Sequence: Synthetic oligonucleotide
  Sense strand starting at position 2013 of SEQ ID NO: 318343
ugaaucgcuuucucugaau

SEQ ID NO: 555204 - RNA, 19 nt, Artificial Sequence
  Description of Artificial Sequence: Synthetic oligonucleotide
  Antisense strand to SEQ ID NO: 555203
auucagagaaagcgauuca

SEQ ID NO: 555205 - RNA, 19 nt, Artificial Sequence
  Description of Artificial Sequence: Synthetic oligonucleotide
  Sense strand starting at position 2121 of SEQ ID NO: 318343
uugacuaagaggugagguu

SEQ ID NO: 555206 - RNA, 19 nt, Artificial Sequence
  Description of Artificial Sequence: Synthetic oligonucleotide
  Antisense strand to SEQ ID NO: 555205
aaccucaccucuuagucaa

SEQ ID NO: 555207 - RNA, 19 nt, Artificial Sequence
  Description of Artificial Sequence: Synthetic oligonucleotide
  Sense strand starting at position 2151 of SEQ ID NO: 318343
cggaucuucugagucugau

SEQ ID NO: 555208 - RNA, 19 nt, Artificial Sequence
  Description of Artificial Sequence: Synthetic oligonucleotide
  Antisense strand to SEQ ID NO: 555207
aucagacucagaagauccg

SEQ ID NO: 555209 - RNA, 19 nt, Artificial Sequence
  Description of Artificial Sequence: Synthetic oligonucleotide
  Sense strand starting at position 2163 of SEQ ID NO: 318343
gucugauuugcugguucuu

SEQ ID NO: 555210 - RNA, 19 nt, Artificial Sequence
  Description of Artificial Sequence: Synthetic oligonucleotide
  Antisense strand to SEQ ID NO: 555209
aagaaccagcaaaucagac

SEQ ID NO: 555211 - RNA, 19 nt, Artificial Sequence
  Description of Artificial Sequence: Synthetic oligonucleotide
  Sense strand starting at position 2223 of SEQ ID NO: 318343
ugcguucuccuucuugagu

SEQ ID NO: 555212 - RNA, 19 nt, Artificial Sequence
  Description of Artificial Sequence: Synthetic oligonucleotide
  Antisense strand to SEQ ID NO: 555211
acucaagaaggagaacgca

SEQ ID NO: 555213 - RNA, 19 nt, Artificial Sequence
  Description of Artificial Sequence: Synthetic oligonucleotide
  Sense strand starting at position 2229 of SEQ ID NO: 318343
cuccuucuugaguggucaa

SEQ ID NO: 555214 - RNA, 19 nt, Artificial Sequence
  Description of Artificial Sequence: Synthetic oligonucleotide
  Antisense strand to SEQ ID NO: 555213
uugaccacucaagaaggag

SEQ ID NO: 555215 - RNA, 19 nt, Artificial Sequence
  Description of Artificial Sequence: Synthetic oligonucleotide
  Sense strand starting at position 2232 of SEQ ID NO: 318343
cuucuugaguggucaacag

SEQ ID NO: 555216 - RNA, 19 nt, Artificial Sequence
  Description of Artificial Sequence: Synthetic oligonucleotide
  Antisense strand to SEQ ID NO: 555215
cuguugaccacucaagaag

SEQ ID NO: 555217 - RNA, 19 nt, Artificial Sequence
  Description of Artificial Sequence: Synthetic oligonucleotide
  Sense strand starting at position 2320 of SEQ ID NO: 318343
cugaaauccuucuugucag

SEQ ID NO: 555218 - RNA, 19 nt, Artificial Sequence
  Description of Artificial Sequence: Synthetic oligonucleotide
  Antisense strand to SEQ ID NO: 555217
cugacaagaaggauuucag

SEQ ID NO: 555219 - RNA, 19 nt, Artificial Sequence
  Description of Artificial Sequence: Synthetic oligonucleotide
  Sense strand starting at position 2349 of SEQ ID NO: 318343
acuaguguugauugaacau

SEQ ID NO: 555220 - RNA, 19 nt, Artificial Sequence
  Description of Artificial Sequence: Synthetic oligonucleotide
  Antisense strand to SEQ ID NO: 555219
auguucaaucaacacuagu

SEQ ID NO: 555221 - RNA, 19 nt, Artificial Sequence
  Description of Artificial Sequence: Synthetic oligonucleotide
  Sense strand starting at position 2401 of SEQ ID NO: 318343
caaguuaucuuucuuggga

SEQ ID NO: 555222 - RNA, 19 nt, Artificial Sequence
  Description of Artificial Sequence: Synthetic oligonucleotide
  Antisense strand to SEQ ID NO: 555221
ucccaagaaagauaacuug

SEQ ID NO: 555223 - RNA, 19 nt, Artificial Sequence
  Description of Artificial Sequence: Synthetic oligonucleotide
  Sense strand starting at position 2402 of SEQ ID NO: 318343
aaguuaucuuucuugggaa

SEQ ID NO: 555224 - RNA, 19 nt, Artificial Sequence
  Description of Artificial Sequence: Synthetic oligonucleotide
  Antisense strand to SEQ ID NO: 555223
uucccaagaaagauaacuu

SEQ ID NO: 555225 - RNA, 19 nt, Artificial Sequence
  Description of Artificial Sequence: Synthetic oligonucleotide
  Sense strand starting at position 2404 of SEQ ID NO: 318343
guuaucuuucuugggaauc

SEQ ID NO: 555226 - RNA, 19 nt, Artificial Sequence
  Description of Artificial Sequence: Synthetic oligonucleotide
  Antisense strand to SEQ ID NO: 555225
gauucccaagaaagauaac

SEQ ID NO: 555227 - RNA, 19 nt, Artificial Sequence
  Description of Artificial Sequence: Synthetic oligonucleotide
  Sense strand starting at position 2582 of SEQ ID NO: 318343
ccuugauaauguguuuauu

SEQ ID NO: 555228 - RNA, 19 nt, Artificial Sequence
  Description of Artificial Sequence: Synthetic oligonucleotide
  Antisense strand to SEQ ID NO: 555227
aauaaacacauuaucaagg

SEQ ID NO: 555229 - RNA, 19 nt, Artificial Sequence
  Description of Artificial Sequence: Synthetic oligonucleotide
  Sense strand starting at position 2622 of SEQ ID NO: 318343
aggguuauuugauaagaua

SEQ ID NO: 555230 - RNA, 19 nt, Artificial Sequence
  Description of Artificial Sequence: Synthetic oligonucleotide
  Antisense strand to SEQ ID NO: 555229
uaucuuaucaaauaacccu

SEQ ID NO: 555231 - RNA, 19 nt, Artificial Sequence
  Description of Artificial Sequence: Synthetic oligonucleotide
  Sense strand starting at position 2762 of SEQ ID NO: 318343
uguucuuggugaccugaua

SEQ ID NO: 555232 - RNA, 19 nt, Artificial Sequence
  Description of Artificial Sequence: Synthetic oligonucleotide
  Antisense strand to SEQ ID NO: 555231
uaucaggucaccaagaaca

SEQ ID NO: 555233 - RNA, 19 nt, Artificial Sequence
  Description of Artificial Sequence: Synthetic oligonucleotide
  Sense strand starting at position 2770 of SEQ ID NO: 318343
gugaccugauaacuuaguu

SEQ ID NO: 555234 - RNA, 19 nt, Artificial Sequence
  Description of Artificial Sequence: Synthetic oligonucleotide
  Antisense strand to SEQ ID NO: 555233
aacuaaguuaucaggucac

SEQ ID NO: 555235 - RNA, 19 nt, Artificial Sequence
  Description of Artificial Sequence: Synthetic oligonucleotide
  Sense strand starting at position 2774 of SEQ ID NO: 318343
ccugauaacuuaguuucga

SEQ ID NO: 555236 - RNA, 19 nt, Artificial Sequence
  Description of Artificial Sequence: Synthetic oligonucleotide
  Antisense strand to SEQ ID NO: 555235
ucgaaacuaaguuaucagg

SEQ ID NO: 555237 - RNA, 19 nt, Artificial Sequence
  Description of Artificial Sequence: Synthetic oligonucleotide
  Sense strand starting at position 2775 of SEQ ID NO: 318343
cugauaacuuaguuucgau

SEQ ID NO: 555238 - RNA, 19 nt, Artificial Sequence
  Description of Artificial Sequence: Synthetic oligonucleotide
  Antisense strand to SEQ ID NO: 555237
aucgaaacuaaguuaucag

SEQ ID NO: 555239 - RNA, 19 nt, Artificial Sequence
  Description of Artificial Sequence: Synthetic oligonucleotide
  Sense strand starting at position 2835 of SEQ ID NO: 318343
ggcaucagacaauauguuu

SEQ ID NO: 555240 - RNA, 19 nt, Artificial Sequence
  Description of Artificial Sequence: Synthetic oligonucleotide
  Antisense strand to SEQ ID NO: 555239
aaacauauugucugaugcc

SEQ ID NO: 555241 - RNA, 19 nt, Artificial Sequence
  Description of Artificial Sequence: Synthetic oligonucleotide
  Sense strand starting at position 2924 of SEQ ID NO: 318343
agggaauugcaguguacug

SEQ ID NO: 555242 - RNA, 19 nt, Artificial Sequence
  Description of Artificial Sequence: Synthetic oligonucleotide
  Antisense strand to SEQ ID NO: 555241
caguacacugcaauucccu

SEQ ID NO: 555243 - RNA, 19 nt, Artificial Sequence
  Description of Artificial Sequence: Synthetic oligonucleotide
  Sense strand starting at position 3013 of SEQ ID NO: 318343
acgcuuucccaggaaacau

SEQ ID NO: 555244 - RNA, 19 nt, Artificial Sequence
  Description of Artificial Sequence: Synthetic oligonucleotide
  Antisense strand to SEQ ID NO: 555243
auguuuccugggaaagcgu

SEQ ID NO: 555245 - RNA, 19 nt, Artificial Sequence
  Description of Artificial Sequence: Synthetic oligonucleotide
  Sense strand starting at position 3079 of SEQ ID NO: 318343
ugacaaugccuagguguga

SEQ ID NO: 555246 - RNA, 19 nt, Artificial Sequence
  Description of Artificial Sequence: Synthetic oligonucleotide
  Antisense strand to SEQ ID NO: 555245
ucacaccuaggcauuguca

SEQ ID NO: 555247 - RNA, 19 nt, Artificial Sequence
  Description of Artificial Sequence: Synthetic oligonucleotide
  Sense strand starting at position 3126 of SEQ ID NO: 318343
gaaagaaguuuccuuuguu

SEQ ID NO: 555248 - RNA, 19 nt, Artificial Sequence
  Description of Artificial Sequence: Synthetic oligonucleotide
  Antisense strand to SEQ ID NO: 555247
aacaaaggaaacuucuuuc

SEQ ID NO: 555249 - RNA, 19 nt, Artificial Sequence
  Description of Artificial Sequence: Synthetic oligonucleotide
  Sense strand starting at position 3129 of SEQ ID NO: 318343
agaaguuuccuuuguuuaa

SEQ ID NO: 555250 - RNA, 19 nt, Artificial Sequence
  Description of Artificial Sequence: Synthetic oligonucleotide
  Antisense strand to SEQ ID NO: 555249
uuaaacaaaggaaacuucu

SEQ ID NO: 555251 - RNA, 19 nt, Artificial Sequence
  Description of Artificial Sequence: Synthetic oligonucleotide
  Sense strand starting at position 3133 of SEQ ID NO: 318343
guuuccuuuguuuaaaucu

SEQ ID NO: 555252 - RNA, 19 nt, Artificial Sequence
  Description of Artificial Sequence: Synthetic oligonucleotide
  Antisense strand to SEQ ID NO: 555251
agauuuaaacaaaggaaac

SEQ ID NO: 555253 - RNA, 19 nt, Artificial Sequence
  Description of Artificial Sequence: Synthetic oligonucleotide
  Sense strand starting at position 3141 of SEQ ID NO: 318343
uguuuaaaucuagacugua

SEQ ID NO: 555254 - RNA, 19 nt, Artificial Sequence
  Description of Artificial Sequence: Synthetic oligonucleotide
  Antisense strand to SEQ ID NO: 555253
uacagucuagauuuaaaca

SEQ ID NO: 555255 - RNA, 19 nt, Artificial Sequence
  Description of Artificial Sequence: Synthetic oligonucleotide
  Sense strand starting at position 3515 of SEQ ID NO: 318343
aucacagcacuuugagaaa

SEQ ID NO: 555256 - RNA, 19 nt, Artificial Sequence
  Description of Artificial Sequence: Synthetic oligonucleotide
  Antisense strand to SEQ ID NO: 555255
uuucucaaagugcugugau

SEQ ID NO: 555257 - RNA, 19 nt, Artificial Sequence
  Description of Artificial Sequence: Synthetic oligonucleotide
  Sense strand starting at position 3555 of SEQ ID NO: 318343
gcucaauugguacaugaua

SEQ ID NO: 555258 - RNA, 19 nt, Artificial Sequence
  Description of Artificial Sequence: Synthetic oligonucleotide
  Antisense strand to SEQ ID NO: 555257
uaucauguaccaauugagc

SEQ ID NO: 555259 - RNA, 19 nt, Artificial Sequence
  Description of Artificial Sequence: Synthetic oligonucleotide
  Sense strand starting at position 3611 of SEQ ID NO: 318343
agaacauuagugugcuuau

SEQ ID NO: 555260 - RNA, 19 nt, Artificial Sequence
  Description of Artificial Sequence: Synthetic oligonucleotide
  Antisense strand to SEQ ID NO: 555259
auaagcacacuaauguucu

SEQ ID NO: 555261 - RNA, 19 nt, Artificial Sequence
  Description of Artificial Sequence: Synthetic oligonucleotide
  Sense strand starting at position 3612 of SEQ ID NO: 318343
gaacauuagugugcuuauu

SEQ ID NO: 555262 - RNA, 19 nt, Artificial Sequence
  Description of Artificial Sequence: Synthetic oligonucleotide
  Antisense strand to SEQ ID NO: 555261
aauaagcacacuaauguuc

SEQ ID NO: 555263 - RNA, 19 nt, Artificial Sequence
  Description of Artificial Sequence: Synthetic oligonucleotide
  Sense strand starting at position 3749 of SEQ ID NO: 318343
cagcuauugugaguagaaa

SEQ ID NO: 555264 - RNA, 19 nt, Artificial Sequence
  Description of Artificial Sequence: Synthetic oligonucleotide
  Antisense strand to SEQ ID NO: 555263
uuucuacucacaauagcug

SEQ ID NO: 555265 - RNA, 19 nt, Artificial Sequence
  Description of Artificial Sequence: Synthetic oligonucleotide
  Sense strand starting at position 3750 of SEQ ID NO: 318343
agcuauugugaguagaaac

SEQ ID NO: 555266 - RNA, 19 nt, Artificial Sequence
  Description of Artificial Sequence: Synthetic oligonucleotide
  Antisense strand to SEQ ID NO: 555265
guuucuacucacaauagcu

SEQ ID NO: 555267 - RNA, 19 nt, Artificial Sequence
  Description of Artificial Sequence: Synthetic oligonucleotide
  Sense strand starting at position 3762 of SEQ ID NO: 318343
uagaaaccuugagaagaga

SEQ ID NO: 555268 - RNA, 19 nt, Artificial Sequence
  Description of Artificial Sequence: Synthetic oligonucleotide
  Antisense strand to SEQ ID NO: 555267
ucucuucucaagguuucua

SEQ ID NO: 555269 - RNA, 19 nt, Artificial Sequence
  Description of Artificial Sequence: Synthetic oligonucleotide
  Sense strand starting at position 3784 of SEQ ID NO: 318343
guauaaagaaguugguucu

SEQ ID NO: 555270 - RNA, 19 nt, Artificial Sequence
  Description of Artificial Sequence: Synthetic oligonucleotide
  Antisense strand to SEQ ID NO: 555269
agaaccaacuucuuuauac

SEQ ID NO: 555271 - RNA, 19 nt, Artificial Sequence
  Description of Artificial Sequence: Synthetic oligonucleotide
  Sense strand starting at position 3802 of SEQ ID NO: 318343
ugggcaauuguaugauaug

SEQ ID NO: 555272 - RNA, 19 nt, Artificial Sequence
  Description of Artificial Sequence: Synthetic oligonucleotide
  Antisense strand to SEQ ID NO: 555271
cauaucauacaauugccca

SEQ ID NO: 555273 - RNA, 19 nt, Artificial Sequence
  Description of Artificial Sequence: Synthetic oligonucleotide
  Sense strand starting at position 3892 of SEQ ID NO: 318343
augguucccacguaugaga

SEQ ID NO: 555274 - RNA, 19 nt, Artificial Sequence
  Description of Artificial Sequence: Synthetic oligonucleotide
  Antisense strand to SEQ ID NO: 555273
ucucauacgugggaaccau

SEQ ID NO: 555275 - RNA, 19 nt, Artificial Sequence
  Description of Artificial Sequence: Synthetic oligonucleotide
  Sense strand starting at position 3894 of SEQ ID NO: 318343
gguucccacguaugagaaa

SEQ ID NO: 555276 - RNA, 19 nt, Artificial Sequence
  Description of Artificial Sequence: Synthetic oligonucleotide
  Antisense strand to SEQ ID NO: 555275
uuucucauacgugggaacc

SEQ ID NO: 555277 - RNA, 19 nt, Artificial Sequence
  Description of Artificial Sequence: Synthetic oligonucleotide
  Sense strand starting at position 3925 of SEQ ID NO: 318343
ggagaaaccuguuuauuac

SEQ ID NO: 555278 - RNA, 19 nt, Artificial Sequence
  Description of Artificial Sequence: Synthetic oligonucleotide
  Antisense strand to SEQ ID NO: 555277
guaauaaacagguuucucc

SEQ ID NO: 555279 - RNA, 19 nt, Artificial Sequence
  Description of Artificial Sequence: Synthetic oligonucleotide
  Sense strand starting at position 3969 of SEQ ID NO: 318343
gaugauaagucagucacuu

SEQ ID NO: 555280 - RNA, 19 nt, Artificial Sequence
  Description of Artificial Sequence: Synthetic oligonucleotide
  Antisense strand to SEQ ID NO: 555279
aagugacugacuuaucauc

SEQ ID NO: 555281 - RNA, 19 nt, Artificial Sequence
  Description of Artificial Sequence: Synthetic oligonucleotide
  Sense strand starting at position 1988 of SEQ ID NO: 318344
cagaaaucuugugauucug

SEQ ID NO: 555282 - RNA, 19 nt, Artificial Sequence
  Description of Artificial Sequence: Synthetic oligonucleotide
  Antisense strand to SEQ ID NO: 555281
cagaaucacaagauuucug

SEQ ID NO: 555283 - RNA, 19 nt, Artificial Sequence
  Description of Artificial Sequence: Synthetic oligonucleotide
  Sense strand starting at position 1990 of SEQ ID NO: 318344
gaaaucuugugauucugau

SEQ ID NO: 555284 - RNA, 19 nt, Artificial Sequence
  Description of Artificial Sequence: Synthetic oligonucleotide
  Antisense strand to SEQ ID NO: 555283
aucagaaucacaagauuuc

SEQ ID NO: 555285 - RNA, 19 nt, Artificial Sequence
  Description of Artificial Sequence: Synthetic oligonucleotide
  Sense strand starting at position 1994 of SEQ ID NO: 318344
ucuugugauucugauuaaa

SEQ ID NO: 555286 - RNA, 19 nt, Artificial Sequence
  Description of Artificial Sequence: Synthetic oligonucleotide
  Antisense strand to SEQ ID NO: 555285
uuuaaucagaaucacaaga

SEQ ID NO: 555287 - RNA, 19 nt, Artificial Sequence
  Description of Artificial Sequence: Synthetic oligonucleotide
  Sense strand starting at position 2005 of SEQ ID NO: 318344
ugauuaaauuucugguuug

SEQ ID NO: 555288 - RNA, 19 nt, Artificial Sequence
  Description of Artificial Sequence: Synthetic oligonucleotide
  Antisense strand to SEQ ID NO: 555287
caaaccagaaauuuaauca

SEQ ID NO: 555289 - RNA, 19 nt, Artificial Sequence
  Description of Artificial Sequence: Synthetic oligonucleotide
  Sense strand starting at position 2006 of SEQ ID NO: 318344
gauuaaauuucugguuugu

SEQ ID NO: 555290 - RNA, 19 nt, Artificial Sequence
  Description of Artificial Sequence: Synthetic oligonucleotide
  Antisense strand to SEQ ID NO: 555289
acaaaccagaaauuuaauc

SEQ ID NO: 555291 - RNA, 19 nt, Artificial Sequence
  Description of Artificial Sequence: Synthetic oligonucleotide
  Sense strand starting at position 2008 of SEQ ID NO: 318344
uuaaauuucugguuugucu

SEQ ID NO: 555292 - RNA, 19 nt, Artificial Sequence
  Description of Artificial Sequence: Synthetic oligonucleotide
  Antisense strand to SEQ ID NO: 555291
agacaaaccagaaauuuaa

SEQ ID NO: 555293 - RNA, 19 nt, Artificial Sequence
  Description of Artificial Sequence: Synthetic oligonucleotide
  Sense strand starting at position 2075 of SEQ ID NO: 318344
ugcaauuuauucuugguua

SEQ ID NO: 555294 - RNA, 19 nt, Artificial Sequence
  Description of Artificial Sequence: Synthetic oligonucleotide
  Antisense strand to SEQ ID NO: 555293
uaaccaagaauaaauugca

SEQ ID NO: 555295 - RNA, 19 nt, Artificial Sequence
  Description of Artificial Sequence: Synthetic oligonucleotide
  Sense strand starting at position 2076 of SEQ ID NO: 318344
gcaauuuauucuugguuaa

SEQ ID NO: 555296 - RNA, 19 nt, Artificial Sequence
  Description of Artificial Sequence: Synthetic oligonucleotide
  Antisense strand to SEQ ID NO: 555295
uuaaccaagaauaaauugc

SEQ ID NO: 555297 - RNA, 19 nt, Artificial Sequence
  Description of Artificial Sequence: Synthetic oligonucleotide
  Sense strand starting at position 2191 of SEQ ID NO: 318344
auccaagucuuccuguaca

SEQ ID NO: 555298 - RNA, 19 nt, Artificial Sequence
  Description of Artificial Sequence: Synthetic oligonucleotide
  Antisense strand to SEQ ID NO: 555297
uguacaggaagacuuggau

SEQ ID NO: 555299 - RNA, 19 nt, Artificial Sequence
  Description of Artificial Sequence: Synthetic oligonucleotide
  Sense strand starting at position 2196 of SEQ ID NO: 318344
agucuuccuguacaauaaa

SEQ ID NO: 555300 - RNA, 19 nt, Artificial Sequence
  Description of Artificial Sequence: Synthetic oligonucleotide
  Antisense strand to SEQ ID NO: 555299
uuuauuguacaggaagacu

SEQ ID NO: 555301 - RNA, 19 nt, Artificial Sequence
  Description of Artificial Sequence: Synthetic oligonucleotide
  Sense strand starting at position 2326 of SEQ ID NO: 318344
uagcguauugugugaggga

SEQ ID NO: 555302 - RNA, 19 nt, Artificial Sequence
  Description of Artificial Sequence: Synthetic oligonucleotide
  Antisense strand to SEQ ID NO: 555301
ucccucacacaauacgcua

SEQ ID NO: 555303 - RNA, 19 nt, Artificial Sequence
  Description of Artificial Sequence: Synthetic oligonucleotide
  Sense strand starting at position 2328 of SEQ ID NO: 318344
gcguauugugugagggaca

SEQ ID NO: 555304 - RNA, 19 nt, Artificial Sequence
  Description of Artificial Sequence: Synthetic oligonucleotide
  Antisense strand to SEQ ID NO: 555303
ugucccucacacaauacgc

SEQ ID NO: 555305 - RNA, 19 nt, Artificial Sequence
  Description of Artificial Sequence: Synthetic oligonucleotide
  Sense strand starting at position 2333 of SEQ ID NO: 318344
uugugugagggacauaauu

SEQ ID NO: 555306 - RNA, 19 nt, Artificial Sequence
  Description of Artificial Sequence: Synthetic oligonucleotide
  Antisense strand to SEQ ID NO: 555305
aauuaugucccucacacaa

SEQ ID NO: 555307 - RNA, 19 nt, Artificial Sequence
  Description of Artificial Sequence: Synthetic oligonucleotide
  Sense strand starting at position 2434 of SEQ ID NO: 318344
uggcuuuagucccaauuua

SEQ ID NO: 555308 - RNA, 19 nt, Artificial Sequence
  Description of Artificial Sequence: Synthetic oligonucleotide
  Antisense strand to SEQ ID NO: 555307
uaaauugggacuaaagcca

SEQ ID NO: 555309 - RNA, 19 nt, Artificial Sequence
  Description of Artificial Sequence: Synthetic oligonucleotide
  Sense strand starting at position 2542 of SEQ ID NO: 318344
gaguuagccuuacccugua

SEQ ID NO: 555310 - RNA, 19 nt, Artificial Sequence
  Description of Artificial Sequence: Synthetic oligonucleotide
  Antisense strand to SEQ ID NO: 555309
uacaggguaaggcuaacuc

SEQ ID NO: 555311 - RNA, 19 nt, Artificial Sequence
  Description of Artificial Sequence: Synthetic oligonucleotide
  Sense strand starting at position 2581 of SEQ ID NO: 318344
gauaauagguuugggaaga

SEQ ID NO: 555312 - RNA, 19 nt, Artificial Sequence
  Description of Artificial Sequence: Synthetic oligonucleotide
  Antisense strand to SEQ ID NO: 555311
ucuucccaaaccuauuauc

SEQ ID NO: 555313 - RNA, 19 nt, Artificial Sequence
  Description of Artificial Sequence: Synthetic oligonucleotide
  Sense strand starting at position 2625 of SEQ ID NO: 318344
aguagauucuuggccacaa

SEQ ID NO: 555314 - RNA, 19 nt, Artificial Sequence
  Description of Artificial Sequence: Synthetic oligonucleotide
  Antisense strand to SEQ ID NO: 555313
uuguggccaagaaucuacu

SEQ ID NO: 555315 - RNA, 19 nt, Artificial Sequence
  Description of Artificial Sequence: Synthetic oligonucleotide
  Sense strand starting at position 2626 of SEQ ID NO: 318344
guagauucuuggccacaag

SEQ ID NO: 555316 - RNA, 19 nt, Artificial Sequence
  Description of Artificial Sequence: Synthetic oligonucleotide
  Antisense strand to SEQ ID NO: 555315
cuuguggccaagaaucuac

SEQ ID NO: 555317 - RNA, 19 nt, Artificial Sequence
  Description of Artificial Sequence: Synthetic oligonucleotide
  Sense strand starting at position 2636 of SEQ ID NO: 318344
ggccacaagcuaugcauau

SEQ ID NO: 555318 - RNA, 19 nt, Artificial Sequence
  Description of Artificial Sequence: Synthetic oligonucleotide
  Antisense strand to SEQ ID NO: 555317
auaugcauagcuuguggcc

SEQ ID NO: 555319 - RNA, 19 nt, Artificial Sequence
  Description of Artificial Sequence: Synthetic oligonucleotide
  Sense strand starting at position 2640 of SEQ ID NO: 318344
acaagcuaugcauaugacu

SEQ ID NO: 555320 - RNA, 19 nt, Artificial Sequence
  Description of Artificial Sequence: Synthetic oligonucleotide
  Antisense strand to SEQ ID NO: 555319
agucauaugcauagcuugu

SEQ ID NO: 555321 - RNA, 19 nt, Artificial Sequence
  Description of Artificial Sequence: Synthetic oligonucleotide
  Sense strand starting at position 2777 of SEQ ID NO: 318344
gguaaauaacucugaucuu

SEQ ID NO: 555322 - RNA, 19 nt, Artificial Sequence
  Description of Artificial Sequence: Synthetic oligonucleotide
  Antisense strand to SEQ ID NO: 555321
aagaucagaguuauuuacc

SEQ ID NO: 555323 - RNA, 19 nt, Artificial Sequence
  Description of Artificial Sequence: Synthetic oligonucleotide
  Sense strand starting at position 2966 of SEQ ID NO: 318344
cauggauuaucauugcaug

SEQ ID NO: 555324 - RNA, 19 nt, Artificial Sequence
  Description of Artificial Sequence: Synthetic oligonucleotide
  Antisense strand to SEQ ID NO: 555323
caugcaaugauaauccaug

SEQ ID NO: 555325 - RNA, 19 nt, Artificial Sequence
  Description of Artificial Sequence: Synthetic oligonucleotide
  Sense strand starting at position 2967 of SEQ ID NO: 318344
auggauuaucauugcaugu

SEQ ID NO: 555326 - RNA, 19 nt, Artificial Sequence
  Description of Artificial Sequence: Synthetic oligonucleotide
  Antisense strand to SEQ ID NO: 555325
acaugcaaugauaauccau

SEQ ID NO: 555327 - RNA, 19 nt, Artificial Sequence
  Description of Artificial Sequence: Synthetic oligonucleotide
  Sense strand starting at position 2986 of SEQ ID NO: 318344
gccaucgcuuucuuucuua

SEQ ID NO: 555328 - RNA, 19 nt, Artificial Sequence
  Description of Artificial Sequence: Synthetic oligonucleotide
  Antisense strand to SEQ ID NO: 555327
uaagaaagaaagcgauggc

SEQ ID NO: 555329 - RNA, 19 nt, Artificial Sequence
  Description of Artificial Sequence: Synthetic oligonucleotide
  Sense strand starting at position 2989 of SEQ ID NO: 318344
aucgcuuucuuucuuauga

SEQ ID NO: 555330 - RNA, 19 nt, Artificial Sequence
  Description of Artificial Sequence: Synthetic oligonucleotide
  Antisense strand to SEQ ID NO: 555329
ucauaagaaagaaagcgau

SEQ ID NO: 555331 - RNA, 19 nt, Artificial Sequence
  Description of Artificial Sequence: Synthetic oligonucleotide
  Sense strand starting at position 2990 of SEQ ID NO: 318344
ucgcuuucuuucuuaugaa

SEQ ID NO: 555332 - RNA, 19 nt, Artificial Sequence
  Description of Artificial Sequence: Synthetic oligonucleotide
  Antisense strand to SEQ ID NO: 555331
uucauaagaaagaaagcga

SEQ ID NO: 555333 - RNA, 19 nt, Artificial Sequence
  Description of Artificial Sequence: Synthetic oligonucleotide
  Sense strand starting at position 3049 of SEQ ID NO: 318344
agcaguacaucaguucuua

SEQ ID NO: 555334 - RNA, 19 nt, Artificial Sequence
  Description of Artificial Sequence: Synthetic oligonucleotide
  Antisense strand to SEQ ID NO: 555333
uaagaacugauguacugcu

SEQ ID NO: 555335 - RNA, 19 nt, Artificial Sequence
  Description of Artificial Sequence: Synthetic oligonucleotide
  Sense strand starting at position 3053 of SEQ ID NO: 318344
guacaucaguucuuaagcu

SEQ ID NO: 555336 - RNA, 19 nt, Artificial Sequence
  Description of Artificial Sequence: Synthetic oligonucleotide
  Antisense strand to SEQ ID NO: 555335
agcuuaagaacugauguac

SEQ ID NO: 555337 - RNA, 19 nt, Artificial Sequence
  Description of Artificial Sequence: Synthetic oligonucleotide
  Sense strand starting at position 3116 of SEQ ID NO: 318344
gggcauuagcuauacagaa

SEQ ID NO: 555338 - RNA, 19 nt, Artificial Sequence
  Description of Artificial Sequence: Synthetic oligonucleotide
  Antisense strand to SEQ ID NO: 555337
uucuguauagcuaaugccc

SEQ ID NO: 555339 - RNA, 19 nt, Artificial Sequence
  Description of Artificial Sequence: Synthetic oligonucleotide
  Sense strand starting at position 3145 of SEQ ID NO: 318344
cucagacuuugagagagua

SEQ ID NO: 555340 - RNA, 19 nt, Artificial Sequence
  Description of Artificial Sequence: Synthetic oligonucleotide
  Antisense strand to SEQ ID NO: 555339
uacucucucaaagucugag

SEQ ID NO: 555341 - RNA, 19 nt, Artificial Sequence
  Description of Artificial Sequence: Synthetic oligonucleotide
  Sense strand starting at position 3197 of SEQ ID NO: 318344
gcacaaacugcggaugauu

SEQ ID NO: 555342 - RNA, 19 nt, Artificial Sequence
  Description of Artificial Sequence: Synthetic oligonucleotide
  Antisense strand to SEQ ID NO: 555341
aaucauccgcaguuugugc

SEQ ID NO: 555343 - RNA, 19 nt, Artificial Sequence
  Description of Artificial Sequence: Synthetic oligonucleotide
  Sense strand starting at position 3237 of SEQ ID NO: 318344
ggaaauaaauuugacagua

SEQ ID NO: 555344 - RNA, 19 nt, Artificial Sequence
  Description of Artificial Sequence: Synthetic oligonucleotide
  Antisense strand to SEQ ID NO: 555343
uacugucaaauuuauuucc

SEQ ID NO: 555345 - RNA, 19 nt, Artificial Sequence
  Description of Artificial Sequence: Synthetic oligonucleotide
  Sense strand starting at position 3456 of SEQ ID NO: 318344
auuauagagugggaauaau

SEQ ID NO: 555346 - RNA, 19 nt, Artificial Sequence
  Description of Artificial Sequence: Synthetic oligonucleotide
  Antisense strand to SEQ ID NO: 555345
auuauucccacucuauaau

SEQ ID NO: 555347 - RNA, 19 nt, Artificial Sequence
  Description of Artificial Sequence: Synthetic oligonucleotide
  Sense strand starting at position 3465 of SEQ ID NO: 318344
ugggaauaauauugacuca

SEQ ID NO: 555348 - RNA, 19 nt, Artificial Sequence
  Description of Artificial Sequence: Synthetic oligonucleotide
  Antisense strand to SEQ ID NO: 555347
ugagucaauauuauuccca

SEQ ID NO: 555349 - RNA, 19 nt, Artificial Sequence
  Description of Artificial Sequence: Synthetic oligonucleotide
  Sense strand starting at position 3520 of SEQ ID NO: 318344
gcuacuugugaugagacaa

SEQ ID NO: 555350 - RNA, 19 nt, Artificial Sequence
  Description of Artificial Sequence: Synthetic oligonucleotide
  Antisense strand to SEQ ID NO: 555349
uugucucaucacaaguagc

SEQ ID NO: 555351 - RNA, 19 nt, Artificial Sequence
  Description of Artificial Sequence: Synthetic oligonucleotide
  Sense strand starting at position 3532 of SEQ ID NO: 318344
gagacaaaguguuaagagu

SEQ ID NO: 555352 - RNA, 19 nt, Artificial Sequence
  Description of Artificial Sequence: Synthetic oligonucleotide
  Antisense strand to SEQ ID NO: 555351
acucuuaacacuuugucuc

SEQ ID NO: 555353 - RNA, 19 nt, Artificial Sequence
  Description of Artificial Sequence: Synthetic oligonucleotide
  Sense strand starting at position 3606 of SEQ ID NO: 318344
gaauguaauugaugaagau

SEQ ID NO: 555354 - RNA, 19 nt, Artificial Sequence
  Description of Artificial Sequence: Synthetic oligonucleotide
  Antisense strand to SEQ ID NO: 555353
aucuucaucaauuacauuc

SEQ ID NO: 555355 - RNA, 19 nt, Artificial Sequence
  Description of Artificial Sequence: Synthetic oligonucleotide
  Sense strand starting at position 3690 of SEQ ID NO: 318344
acuuuaacuugggugggaa

SEQ ID NO: 555356 - RNA, 19 nt, Artificial Sequence
  Description of Artificial Sequence: Synthetic oligonucleotide
  Antisense strand to SEQ ID NO: 555355
uucccacccaaguuaaagu

SEQ ID NO: 555357 - RNA, 19 nt, Artificial Sequence
  Description of Artificial Sequence: Synthetic oligonucleotide
  Sense strand starting at position 3789 of SEQ ID NO: 318344
ugcuauuacuaaguguuaa

SEQ ID NO: 555358 - RNA, 19 nt, Artificial Sequence
  Description of Artificial Sequence: Synthetic oligonucleotide
  Antisense strand to SEQ ID NO: 555357
uuaacacuuaguaauagca

SEQ ID NO: 555359 - RNA, 19 nt, Artificial Sequence
  Description of Artificial Sequence: Synthetic oligonucleotide
  Sense strand starting at position 3819 of SEQ ID NO: 318344
caggucucuuuagcaagau

SEQ ID NO: 555360 - RNA, 19 nt, Artificial Sequence
  Description of Artificial Sequence: Synthetic oligonucleotide
  Antisense strand to SEQ ID NO: 555359
aucuugcuaaagagaccug

SEQ ID NO: 555361 - RNA, 19 nt, Artificial Sequence
  Description of Artificial Sequence: Synthetic oligonucleotide
  Sense strand starting at position 2042 of SEQ ID NO: 318345
ccugcuguuuccuuauuua

SEQ ID NO: 555362 - RNA, 19 nt, Artificial Sequence
  Description of Artificial Sequence: Synthetic oligonucleotide
  Antisense strand to SEQ ID NO: 555361
uaaauaaggaaacagcagg

SEQ ID NO: 555363 - RNA, 19 nt, Artificial Sequence
  Description of Artificial Sequence: Synthetic oligonucleotide
  Sense strand starting at position 2045 of SEQ ID NO: 318345
gcuguuuccuuauuuaucu

SEQ ID NO: 555364 - RNA, 19 nt, Artificial Sequence
  Description of Artificial Sequence: Synthetic oligonucleotide
  Antisense strand to SEQ ID NO: 555363
agauaaauaaggaaacagc

SEQ ID NO: 555365 - RNA, 19 nt, Artificial Sequence
  Description of Artificial Sequence: Synthetic oligonucleotide
  Sense strand starting at position 2074 of SEQ ID NO: 318345
gguacauauucccugacga

SEQ ID NO: 555366 - RNA, 19 nt, Artificial Sequence
  Description of Artificial Sequence: Synthetic oligonucleotide
  Antisense strand to SEQ ID NO: 555365
ucgucagggaauauguacc

SEQ ID NO: 555367 - RNA, 19 nt, Artificial Sequence
  Description of Artificial Sequence: Synthetic oligonucleotide
  Sense strand starting at position 2075 of SEQ ID NO: 318345
guacauauucccugacgaa

SEQ ID NO: 555368 - RNA, 19 nt, Artificial Sequence
  Description of Artificial Sequence: Synthetic oligonucleotide
  Antisense strand to SEQ ID NO: 555367
uucgucagggaauauguac

SEQ ID NO: 555369 - RNA, 19 nt, Artificial Sequence
  Description of Artificial Sequence: Synthetic oligonucleotide
  Sense strand starting at position 2131 of SEQ ID NO: 318345
cuggucuguguguuuagua

SEQ ID NO: 555370 - RNA, 19 nt, Artificial Sequence
  Description of Artificial Sequence: Synthetic oligonucleotide
  Antisense strand to SEQ ID NO: 555369
uacuaaacacacagaccag

SEQ ID NO: 555371 - RNA, 19 nt, Artificial Sequence
  Description of Artificial Sequence: Synthetic oligonucleotide
  Sense strand starting at position 2257 of SEQ ID NO: 318345
cuccuaaguuuaguuauaa

SEQ ID NO: 555372 - RNA, 19 nt, Artificial Sequence
  Description of Artificial Sequence: Synthetic oligonucleotide
  Antisense strand to SEQ ID NO: 555371
uuauaacuaaacuuaggag

SEQ ID NO: 555373 - RNA, 19 nt, Artificial Sequence
  Description of Artificial Sequence: Synthetic oligonucleotide
  Sense strand starting at position 2292 of SEQ ID NO: 318345
guugccauauccuuaaugu

SEQ ID NO: 555374 - RNA, 19 nt, Artificial Sequence
  Description of Artificial Sequence: Synthetic oligonucleotide
  Antisense strand to SEQ ID NO: 555373
acauuaaggauauggcaac

SEQ ID NO: 555375 - RNA, 19 nt, Artificial Sequence
  Description of Artificial Sequence: Synthetic oligonucleotide
  Sense strand starting at position 2303 of SEQ ID NO: 318345
cuuaauguuuaacugugua

SEQ ID NO: 555376 - RNA, 19 nt, Artificial Sequence
  Description of Artificial Sequence: Synthetic oligonucleotide
  Antisense strand to SEQ ID NO: 555375
uacacaguuaaacauuaag

SEQ ID NO: 555377 - RNA, 19 nt, Artificial Sequence
  Description of Artificial Sequence: Synthetic oligonucleotide
  Sense strand starting at position 2313 of SEQ ID NO: 318345
aacuguguagcguuguuua

SEQ ID NO: 555378 - RNA, 19 nt, Artificial Sequence
  Description of Artificial Sequence: Synthetic oligonucleotide
  Antisense strand to SEQ ID NO: 555377
uaaacaacgcuacacaguu

SEQ ID NO: 555379 - RNA, 19 nt, Artificial Sequence
  Description of Artificial Sequence: Synthetic oligonucleotide
  Sense strand starting at position 2323 of SEQ ID NO: 318345
cguuguuuaugaccguuaa

SEQ ID NO: 555380 - RNA, 19 nt, Artificial Sequence
  Description of Artificial Sequence: Synthetic oligonucleotide
  Antisense strand to SEQ ID NO: 555379
uuaacggucauaaacaacg

SEQ ID NO: 555381 - RNA, 19 nt, Artificial Sequence
  Description of Artificial Sequence: Synthetic oligonucleotide
  Sense strand starting at position 2324 of SEQ ID NO: 318345
guuguuuaugaccguuaau

SEQ ID NO: 555382 - RNA, 19 nt, Artificial Sequence
  Description of Artificial Sequence: Synthetic oligonucleotide
  Antisense strand to SEQ ID NO: 555381
auuaacggucauaaacaac

SEQ ID NO: 555383 - RNA, 19 nt, Artificial Sequence
  Description of Artificial Sequence: Synthetic oligonucleotide
  Sense strand starting at position 2505 of SEQ ID NO: 318345
auucuuaccuuuguaggau

SEQ ID NO: 555384 - RNA, 19 nt, Artificial Sequence
  Description of Artificial Sequence: Synthetic oligonucleotide
  Antisense strand to SEQ ID NO: 555383
auccuacaaagguaagaau

SEQ ID NO: 555385 - RNA, 19 nt, Artificial Sequence
  Description of Artificial Sequence: Synthetic oligonucleotide
  Sense strand starting at position 2560 of SEQ ID NO: 318345
aaacgugcuuauuugcaua

SEQ ID NO: 555386 - RNA, 19 nt, Artificial Sequence
  Description of Artificial Sequence: Synthetic oligonucleotide
  Antisense strand to SEQ ID NO: 555385
uaugcaaauaagcacguuu

SEQ ID NO: 555387 - RNA, 19 nt, Artificial Sequence
  Description of Artificial Sequence: Synthetic oligonucleotide
  Sense strand starting at position 2562 of SEQ ID NO: 318345
acgugcuuauuugcauaua

SEQ ID NO: 555388 - RNA, 19 nt, Artificial Sequence
  Description of Artificial Sequence: Synthetic oligonucleotide
  Antisense strand to SEQ ID NO: 555387
uauaugcaaauaagcacgu

SEQ ID NO: 555389 - RNA, 19 nt, Artificial Sequence
  Description of Artificial Sequence: Synthetic oligonucleotide
  Sense strand starting at position 2630 of SEQ ID NO: 318345
ccuacugauuuauguaagu

SEQ ID NO: 555390 - RNA, 19 nt, Artificial Sequence
  Description of Artificial Sequence: Synthetic oligonucleotide
  Antisense strand to SEQ ID NO: 555389
acuuacauaaaucaguagg

SEQ ID NO: 555391 - RNA, 19 nt, Artificial Sequence
  Description of Artificial Sequence: Synthetic oligonucleotide
  Sense strand starting at position 2655 of SEQ ID NO: 318345
agcugucauaugcagaaga

SEQ ID NO: 555392 - RNA, 19 nt, Artificial Sequence
  Description of Artificial Sequence: Synthetic oligonucleotide
  Antisense strand to SEQ ID NO: 555391
ucuucugcauaugacagcu

SEQ ID NO: 555393 - RNA, 19 nt, Artificial Sequence
  Description of Artificial Sequence: Synthetic oligonucleotide
  Sense strand starting at position 2679 of SEQ ID NO: 318345
agaucuuuguuacuuguga

SEQ ID NO: 555394 - RNA, 19 nt, Artificial Sequence
  Description of Artificial Sequence: Synthetic oligonucleotide
  Antisense strand to SEQ ID NO: 555393
ucacaaguaacaaagaucu

SEQ ID NO: 555395 - RNA, 19 nt, Artificial Sequence
  Description of Artificial Sequence: Synthetic oligonucleotide
  Sense strand starting at position 2695 of SEQ ID NO: 318345
ugaggacuuugagaaaguc

SEQ ID NO: 555396 - RNA, 19 nt, Artificial Sequence
  Description of Artificial Sequence: Synthetic oligonucleotide
  Antisense strand to SEQ ID NO: 555395
gacuuucucaaaguccuca

SEQ ID NO: 555397 - RNA, 19 nt, Artificial Sequence
  Description of Artificial Sequence: Synthetic oligonucleotide
  Sense strand starting at position 2703 of SEQ ID NO: 318345
uugagaaagucucuccacu

SEQ ID NO: 555398 - RNA, 19 nt, Artificial Sequence
  Description of Artificial Sequence: Synthetic oligonucleotide
  Antisense strand to SEQ ID NO: 555397
aguggagagacuuucucaa

SEQ ID NO: 555399 - RNA, 19 nt, Artificial Sequence
  Description of Artificial Sequence: Synthetic oligonucleotide
  Sense strand starting at position 2730 of SEQ ID NO: 318345
cagcguuugaguuggguua

SEQ ID NO: 555400 - RNA, 19 nt, Artificial Sequence
  Description of Artificial Sequence: Synthetic oligonucleotide
  Antisense strand to SEQ ID NO: 555399
uaacccaacucaaacgcug

SEQ ID NO: 555401 - RNA, 19 nt, Artificial Sequence
  Description of Artificial Sequence: Synthetic oligonucleotide
  Sense strand starting at position 2731 of SEQ ID NO: 318345
agcguuugaguuggguuaa

SEQ ID NO: 555402 - RNA, 19 nt, Artificial Sequence
  Description of Artificial Sequence: Synthetic oligonucleotide
  Antisense strand to SEQ ID NO: 555401
uuaacccaacucaaacgcu

SEQ ID NO: 555403 - RNA, 19 nt, Artificial Sequence
  Description of Artificial Sequence: Synthetic oligonucleotide
  Sense strand starting at position 2800 of SEQ ID NO: 318345
agugacaaccaguauagua

SEQ ID NO: 555404 - RNA, 19 nt, Artificial Sequence
  Description of Artificial Sequence: Synthetic oligonucleotide
  Antisense strand to SEQ ID NO: 555403
uacuauacugguugucacu

SEQ ID NO: 555405 - RNA, 19 nt, Artificial Sequence
  Description of Artificial Sequence: Synthetic oligonucleotide
  Sense strand starting at position 2868 of SEQ ID NO: 318345
cagauacuugucgagaagu

SEQ ID NO: 555406 - RNA, 19 nt, Artificial Sequence
  Description of Artificial Sequence: Synthetic oligonucleotide
  Antisense strand to SEQ ID NO: 555405
acuucucgacaaguaucug

SEQ ID NO: 555407 - RNA, 19 nt, Artificial Sequence
  Description of Artificial Sequence: Synthetic oligonucleotide
  Sense strand starting at position 2870 of SEQ ID NO: 318345
gauacuugucgagaaguac

SEQ ID NO: 555408 - RNA, 19 nt, Artificial Sequence
  Description of Artificial Sequence: Synthetic oligonucleotide
  Antisense strand to SEQ ID NO: 555407
guacuucucgacaaguauc

SEQ ID NO: 555409 - RNA, 19 nt, Artificial Sequence
  Description of Artificial Sequence: Synthetic oligonucleotide
  Sense strand starting at position 2881 of SEQ ID NO: 318345
agaaguacugagugaccuu

SEQ ID NO: 555410 - RNA, 19 nt, Artificial Sequence
  Description of Artificial Sequence: Synthetic oligonucleotide
  Antisense strand to SEQ ID NO: 555409
aaggucacucaguacuucu

SEQ ID NO: 555411 - RNA, 19 nt, Artificial Sequence
  Description of Artificial Sequence: Synthetic oligonucleotide
  Sense strand starting at position 2893 of SEQ ID NO: 318345
ugaccuuucuauguugaga

SEQ ID NO: 555412 - RNA, 19 nt, Artificial Sequence
  Description of Artificial Sequence: Synthetic oligonucleotide
  Antisense strand to SEQ ID NO: 555411
ucucaacauagaaagguca

SEQ ID NO: 555413 - RNA, 19 nt, Artificial Sequence
  Description of Artificial Sequence: Synthetic oligonucleotide
  Sense strand starting at position 3096 of SEQ ID NO: 318345
augugaacauagguuguaa

SEQ ID NO: 555414 - RNA, 19 nt, Artificial Sequence
  Description of Artificial Sequence: Synthetic oligonucleotide
  Antisense strand to SEQ ID NO: 555413
uuacaaccuauguucacau

SEQ ID NO: 555415 - RNA, 19 nt, Artificial Sequence
  Description of Artificial Sequence: Synthetic oligonucleotide
  Sense strand starting at position 3098 of SEQ ID NO: 318345
gugaacauagguuguaaga

SEQ ID NO: 555416 - RNA, 19 nt, Artificial Sequence
  Description of Artificial Sequence: Synthetic oligonucleotide
  Antisense strand to SEQ ID NO: 555415
ucuuacaaccuauguucac

SEQ ID NO: 555417 - RNA, 19 nt, Artificial Sequence
  Description of Artificial Sequence: Synthetic oligonucleotide
  Sense strand starting at position 3100 of SEQ ID NO: 318345
gaacauagguuguaagauu

SEQ ID NO: 555418 - RNA, 19 nt, Artificial Sequence
  Description of Artificial Sequence: Synthetic oligonucleotide
  Antisense strand to SEQ ID NO: 555417
aaucuuacaaccuauguuc

SEQ ID NO: 555419 - RNA, 19 nt, Artificial Sequence
  Description of Artificial Sequence: Synthetic oligonucleotide
  Sense strand starting at position 3282 of SEQ ID NO: 318345
aguguuggucuucaaguca

SEQ ID NO: 555420 - RNA, 19 nt, Artificial Sequence
  Description of Artificial Sequence: Synthetic oligonucleotide
  Antisense strand to SEQ ID NO: 555419
ugacuugaagaccaacacu

SEQ ID NO: 555421 - RNA, 19 nt, Artificial Sequence
  Description of Artificial Sequence: Synthetic oligonucleotide
  Sense strand starting at position 3314 of SEQ ID NO: 318345
cuacccaugcccugugauu

SEQ ID NO: 555422 - RNA, 19 nt, Artificial Sequence
  Description of Artificial Sequence: Synthetic oligonucleotide
  Antisense strand to SEQ ID NO: 555421
aaucacagggcauggguag

SEQ ID NO: 555423 - RNA, 19 nt, Artificial Sequence
  Description of Artificial Sequence: Synthetic oligonucleotide
  Sense strand starting at position 3316 of SEQ ID NO: 318345
acccaugcccugugauuaa

SEQ ID NO: 555424 - RNA, 19 nt, Artificial Sequence
  Description of Artificial Sequence: Synthetic oligonucleotide
  Antisense strand to SEQ ID NO: 555423
uuaaucacagggcaugggu

SEQ ID NO: 555425 - RNA, 19 nt, Artificial Sequence
  Description of Artificial Sequence: Synthetic oligonucleotide
  Sense strand starting at position 3423 of SEQ ID NO: 318345
uuaugauucuaagaggaag

SEQ ID NO: 555426 - RNA, 19 nt, Artificial Sequence
  Description of Artificial Sequence: Synthetic oligonucleotide
  Antisense strand to SEQ ID NO: 555425
cuuccucuuagaaucauaa

SEQ ID NO: 555427 - RNA, 19 nt, Artificial Sequence
  Description of Artificial Sequence: Synthetic oligonucleotide
  Sense strand starting at position 3474 of SEQ ID NO: 318345
aggugaaacuaauugccua

SEQ ID NO: 555428 - RNA, 19 nt, Artificial Sequence
  Description of Artificial Sequence: Synthetic oligonucleotide
  Antisense strand to SEQ ID NO: 555427
uaggcaauuaguuucaccu

SEQ ID NO: 555429 - RNA, 19 nt, Artificial Sequence
  Description of Artificial Sequence: Synthetic oligonucleotide
  Sense strand starting at position 3572 of SEQ ID NO: 318345
gugauaaagguuugcaauc

SEQ ID NO: 555430 - RNA, 19 nt, Artificial Sequence
  Description of Artificial Sequence: Synthetic oligonucleotide
  Antisense strand to SEQ ID NO: 555429
gauugcaaaccuuuaucac

SEQ ID NO: 555431 - RNA, 19 nt, Artificial Sequence
  Description of Artificial Sequence: Synthetic oligonucleotide
  Sense strand starting at position 3573 of SEQ ID NO: 318345
ugauaaagguuugcaauca

SEQ ID NO: 555432 - RNA, 19 nt, Artificial Sequence
  Description of Artificial Sequence: Synthetic oligonucleotide
  Antisense strand to SEQ ID NO: 555431
ugauugcaaaccuuuauca

SEQ ID NO: 555433 - RNA, 19 nt, Artificial Sequence
  Description of Artificial Sequence: Synthetic oligonucleotide
  Sense strand starting at position 3581 of SEQ ID NO: 318345
guuugcaaucauggguaaa

SEQ ID NO: 555434 - RNA, 19 nt, Artificial Sequence
  Description of Artificial Sequence: Synthetic oligonucleotide
  Antisense strand to SEQ ID NO: 555433
uuuacccaugauugcaaac

SEQ ID NO: 555435 - RNA, 19 nt, Artificial Sequence
  Description of Artificial Sequence: Synthetic oligonucleotide
  Sense strand starting at position 3583 of SEQ ID NO: 318345
uugcaaucauggguaaaua

SEQ ID NO: 555436 - RNA, 19 nt, Artificial Sequence
  Description of Artificial Sequence: Synthetic oligonucleotide
  Antisense strand to SEQ ID NO: 555435
uauuuacccaugauugcaa

SEQ ID NO: 555437 - RNA, 19 nt, Artificial Sequence
  Description of Artificial Sequence: Synthetic oligonucleotide
  Sense strand starting at position 3696 of SEQ ID NO: 318345
agaaauacgcaguggaacu

SEQ ID NO: 555438 - RNA, 19 nt, Artificial Sequence
  Description of Artificial Sequence: Synthetic oligonucleotide
  Antisense strand to SEQ ID NO: 555437
aguuccacugcguauuucu

SEQ ID NO: 555439 - RNA, 19 nt, Artificial Sequence
  Description of Artificial Sequence: Synthetic oligonucleotide
  Sense strand starting at position 3706 of SEQ ID NO: 318345
aguggaacuuccuacccaa

SEQ ID NO: 555440 - RNA, 19 nt, Artificial Sequence
  Description of Artificial Sequence: Synthetic oligonucleotide
  Antisense strand to SEQ ID NO: 555439
uuggguaggaaguuccacu

SEQ ID NO: 555441 - RNA, 19 nt, Artificial Sequence
  Description of Artificial Sequence: Synthetic oligonucleotide
  Sense strand starting at position 1995 of SEQ ID NO: 318346
gcgccauuacuggcuuauu

SEQ ID NO: 555442 - RNA, 19 nt, Artificial Sequence
  Description of Artificial Sequence: Synthetic oligonucleotide
  Antisense strand to SEQ ID NO: 555441
aauaagccaguaauggcgc

SEQ ID NO: 555443 - RNA, 19 nt, Artificial Sequence
  Description of Artificial Sequence: Synthetic oligonucleotide
  Sense strand starting at position 1996 of SEQ ID NO: 318346
cgccauuacuggcuuauua

SEQ ID NO: 555444 - RNA, 19 nt, Artificial Sequence
  Description of Artificial Sequence: Synthetic oligonucleotide
  Antisense strand to SEQ ID NO: 555443
uaauaagccaguaauggcg

SEQ ID NO: 555445 - RNA, 19 nt, Artificial Sequence
  Description of Artificial Sequence: Synthetic oligonucleotide
  Sense strand starting at position 2000 of SEQ ID NO: 318346
auuacuggcuuauuaggaa

SEQ ID NO: 555446 - RNA, 19 nt, Artificial Sequence
  Description of Artificial Sequence: Synthetic oligonucleotide
  Antisense strand to SEQ ID NO: 555445
uuccuaauaagccaguaau

SEQ ID NO: 555447 - RNA, 19 nt, Artificial Sequence
  Description of Artificial Sequence: Synthetic oligonucleotide
  Sense strand starting at position 2012 of SEQ ID NO: 318346
uuaggaacuucucugggau

SEQ ID NO: 555448 - RNA, 19 nt, Artificial Sequence
  Description of Artificial Sequence: Synthetic oligonucleotide
  Antisense strand to SEQ ID NO: 555447
aucccagagaaguuccuaa

SEQ ID NO: 555449 - RNA, 19 nt, Artificial Sequence
  Description of Artificial Sequence: Synthetic oligonucleotide
  Sense strand starting at position 2013 of SEQ ID NO: 318346
uaggaacuucucugggauu

SEQ ID NO: 555450 - RNA, 19 nt, Artificial Sequence
  Description of Artificial Sequence: Synthetic oligonucleotide
  Antisense strand to SEQ ID NO: 555449
aaucccagagaaguuccua

SEQ ID NO: 555451 - RNA, 19 nt, Artificial Sequence
  Description of Artificial Sequence: Synthetic oligonucleotide
  Sense strand starting at position 2014 of SEQ ID NO: 318346
aggaacuucucugggauua

SEQ ID NO: 555452 - RNA, 19 nt, Artificial Sequence
  Description of Artificial Sequence: Synthetic oligonucleotide
  Antisense strand to SEQ ID NO: 555451
uaaucccagagaaguuccu

SEQ ID NO: 555453 - RNA, 19 nt, Artificial Sequence
  Description of Artificial Sequence: Synthetic oligonucleotide
  Sense strand starting at position 2016 of SEQ ID NO: 318346
gaacuucucugggauuaag

SEQ ID NO: 555454 - RNA, 19 nt, Artificial Sequence
  Description of Artificial Sequence: Synthetic oligonucleotide
  Antisense strand to SEQ ID NO: 555453
cuuaaucccagagaaguuc

SEQ ID NO: 555455 - RNA, 19 nt, Artificial Sequence
  Description of Artificial Sequence: Synthetic oligonucleotide
  Sense strand starting at position 2062 of SEQ ID NO: 318346
uugcucuucucagaaauag

SEQ ID NO: 555456 - RNA, 19 nt, Artificial Sequence
  Description of Artificial Sequence: Synthetic oligonucleotide
  Antisense strand to SEQ ID NO: 555455
cuauuucugagaagagcaa

SEQ ID NO: 555457 - RNA, 19 nt, Artificial Sequence
  Description of Artificial Sequence: Synthetic oligonucleotide
  Sense strand starting at position 2072 of SEQ ID NO: 318346
cagaaauagcggugaaggu

SEQ ID NO: 555458 - RNA, 19 nt, Artificial Sequence
  Description of Artificial Sequence: Synthetic oligonucleotide
  Antisense strand to SEQ ID NO: 555457
accuucaccgcuauuucug

SEQ ID NO: 555459 - RNA, 19 nt, Artificial Sequence
  Description of Artificial Sequence: Synthetic oligonucleotide
  Sense strand starting at position 2081 of SEQ ID NO: 318346
cggugaagguccuucaaca

SEQ ID NO: 555460 - RNA, 19 nt, Artificial Sequence
  Description of Artificial Sequence: Synthetic oligonucleotide
  Antisense strand to SEQ ID NO: 555459
uguugaaggaccuucaccg

SEQ ID NO: 555461 - RNA, 19 nt, Artificial Sequence
  Description of Artificial Sequence: Synthetic oligonucleotide
  Sense strand starting at position 2118 of SEQ ID NO: 318346
agcguuucaggucagaauu

SEQ ID NO: 555462 - RNA, 19 nt, Artificial Sequence
  Description of Artificial Sequence: Synthetic oligonucleotide
  Antisense strand to SEQ ID NO: 555461
aauucugaccugaaacgcu

SEQ ID NO: 555463 - RNA, 19 nt, Artificial Sequence
  Description of Artificial Sequence: Synthetic oligonucleotide
  Sense strand starting at position 2168 of SEQ ID NO: 318346
uugcuuuguuguuggagga

SEQ ID NO: 555464 - RNA, 19 nt, Artificial Sequence
  Description of Artificial Sequence: Synthetic oligonucleotide
  Antisense strand to SEQ ID NO: 555463
uccuccaacaacaaagcaa

SEQ ID NO: 555465 - RNA, 19 nt, Artificial Sequence
  Description of Artificial Sequence: Synthetic oligonucleotide
  Sense strand starting at position 2169 of SEQ ID NO: 318346
ugcuuuguuguuggaggau

SEQ ID NO: 555466 - RNA, 19 nt, Artificial Sequence
  Description of Artificial Sequence: Synthetic oligonucleotide
  Antisense strand to SEQ ID NO: 555465
auccuccaacaacaaagca

SEQ ID NO: 555467 - RNA, 19 nt, Artificial Sequence
  Description of Artificial Sequence: Synthetic oligonucleotide
  Sense strand starting at position 2172 of SEQ ID NO: 318346
uuuguuguuggaggaugua

SEQ ID NO: 555468 - RNA, 19 nt, Artificial Sequence
  Description of Artificial Sequence: Synthetic oligonucleotide
  Antisense strand to SEQ ID NO: 555467
uacauccuccaacaacaaa

SEQ ID NO: 555469 - RNA, 19 nt, Artificial Sequence
  Description of Artificial Sequence: Synthetic oligonucleotide
  Sense strand starting at position 2182 of SEQ ID NO: 318346
gaggauguaacuugaguuu

SEQ ID NO: 555470 - RNA, 19 nt, Artificial Sequence
  Description of Artificial Sequence: Synthetic oligonucleotide
  Antisense strand to SEQ ID NO: 555469
aaacucaaguuacauccuc

SEQ ID NO: 555471 - RNA, 19 nt, Artificial Sequence
  Description of Artificial Sequence: Synthetic oligonucleotide
  Sense strand starting at position 2189 of SEQ ID NO: 318346
uaacuugaguuuccguuga

SEQ ID NO: 555472 - RNA, 19 nt, Artificial Sequence
  Description of Artificial Sequence: Synthetic oligonucleotide
  Antisense strand to SEQ ID NO: 555471
ucaacggaaacucaaguua

SEQ ID NO: 555473 - RNA, 19 nt, Artificial Sequence
  Description of Artificial Sequence: Synthetic oligonucleotide
  Sense strand starting at position 2191 of SEQ ID NO: 318346
acuugaguuuccguugauu

SEQ ID NO: 555474 - RNA, 19 nt, Artificial Sequence
  Description of Artificial Sequence: Synthetic oligonucleotide
  Antisense strand to SEQ ID NO: 555473
aaucaacggaaacucaagu

SEQ ID NO: 555475 - RNA, 19 nt, Artificial Sequence
  Description of Artificial Sequence: Synthetic oligonucleotide
  Sense strand starting at position 2236 of SEQ ID NO: 318346
cgcuuagaguccuaacuua

SEQ ID NO: 555476 - RNA, 19 nt, Artificial Sequence
  Description of Artificial Sequence: Synthetic oligonucleotide
  Antisense strand to SEQ ID NO: 555475
uaaguuaggacucuaagcg

SEQ ID NO: 555477 - RNA, 19 nt, Artificial Sequence
  Description of Artificial Sequence: Synthetic oligonucleotide
  Sense strand starting at position 2298 of SEQ ID NO: 318346
ucugcuaaaucugcagaga

SEQ ID NO: 555478 - RNA, 19 nt, Artificial Sequence
  Description of Artificial Sequence: Synthetic oligonucleotide
  Antisense strand to SEQ ID NO: 555477
ucucugcagauuuagcaga

SEQ ID NO: 555479 - RNA, 19 nt, Artificial Sequence
  Description of Artificial Sequence: Synthetic oligonucleotide
  Sense strand starting at position 2299 of SEQ ID NO: 318346
cugcuaaaucugcagagau

SEQ ID NO: 555480 - RNA, 19 nt, Artificial Sequence
  Description of Artificial Sequence: Synthetic oligonucleotide
  Antisense strand to SEQ ID NO: 555479
aucucugcagauuuagcag

SEQ ID NO: 555481 - RNA, 19 nt, Artificial Sequence
  Description of Artificial Sequence: Synthetic oligonucleotide
  Sense strand starting at position 2359 of SEQ ID NO: 318346
agaagaguguaagagauua

SEQ ID NO: 555482 - RNA, 19 nt, Artificial Sequence
  Description of Artificial Sequence: Synthetic oligonucleotide
  Antisense strand to SEQ ID NO: 555481
uaaucucuuacacucuucu

SEQ ID NO: 555483 - RNA, 19 nt, Artificial Sequence
  Description of Artificial Sequence: Synthetic oligonucleotide
  Sense strand starting at position 2389 of SEQ ID NO: 318346
uuuaaauguucucugaagu

SEQ ID NO: 555484 - RNA, 19 nt, Artificial Sequence
  Description of Artificial Sequence: Synthetic oligonucleotide
  Antisense strand to SEQ ID NO: 555483
acuucagagaacauuuaaa

SEQ ID NO: 555485 - RNA, 19 nt, Artificial Sequence
  Description of Artificial Sequence: Synthetic oligonucleotide
  Sense strand starting at position 2390 of SEQ ID NO: 318346
uuaaauguucucugaaguu

SEQ ID NO: 555486 - RNA, 19 nt, Artificial Sequence
  Description of Artificial Sequence: Synthetic oligonucleotide
  Antisense strand to SEQ ID NO: 555485
aacuucagagaacauuuaa

SEQ ID NO: 555487 - RNA, 19 nt, Artificial Sequence
  Description of Artificial Sequence: Synthetic oligonucleotide
  Sense strand starting at position 2805 of SEQ ID NO: 318346
uaggcaacaucuguguaua

SEQ ID NO: 555488 - RNA, 19 nt, Artificial Sequence
  Description of Artificial Sequence: Synthetic oligonucleotide
  Antisense strand to SEQ ID NO: 555487
uauacacagauguugccua

SEQ ID NO: 555489 - RNA, 19 nt, Artificial Sequence
  Description of Artificial Sequence: Synthetic oligonucleotide
  Sense strand starting at position 2806 of SEQ ID NO: 318346
aggcaacaucuguguauac

SEQ ID NO: 555490 - RNA, 19 nt, Artificial Sequence
  Description of Artificial Sequence: Synthetic oligonucleotide
  Antisense strand to SEQ ID NO: 555489
guauacacagauguugccu

SEQ ID NO: 555491 - RNA, 19 nt, Artificial Sequence
  Description of Artificial Sequence: Synthetic oligonucleotide
  Sense strand starting at position 2807 of SEQ ID NO: 318346
ggcaacaucuguguauacu

SEQ ID NO: 555492 - RNA, 19 nt, Artificial Sequence
  Description of Artificial Sequence: Synthetic oligonucleotide
  Antisense strand to SEQ ID NO: 555491
aguauacacagauguugcc

SEQ ID NO: 555493 - RNA, 19 nt, Artificial Sequence
  Description of Artificial Sequence: Synthetic oligonucleotide
  Sense strand starting at position 2808 of SEQ ID NO: 318346
gcaacaucuguguauacuu

SEQ ID NO: 555494 - RNA, 19 nt, Artificial Sequence
  Description of Artificial Sequence: Synthetic oligonucleotide
  Antisense strand to SEQ ID NO: 555493
aaguauacacagauguugc

SEQ ID NO: 555495 - RNA, 19 nt, Artificial Sequence
  Description of Artificial Sequence: Synthetic oligonucleotide
  Sense strand starting at position 2940 of SEQ ID NO: 318346
accacuuaauugugaggau

SEQ ID NO: 555496 - RNA, 19 nt, Artificial Sequence
  Description of Artificial Sequence: Synthetic oligonucleotide
  Antisense strand to SEQ ID NO: 555495
auccucacaauuaaguggu

SEQ ID NO: 555497 - RNA, 19 nt, Artificial Sequence
  Description of Artificial Sequence: Synthetic oligonucleotide
  Sense strand starting at position 2941 of SEQ ID NO: 318346
ccacuuaauugugaggauu

SEQ ID NO: 555498 - RNA, 19 nt, Artificial Sequence
  Description of Artificial Sequence: Synthetic oligonucleotide
  Antisense strand to SEQ ID NO: 555497
aauccucacaauuaagugg

SEQ ID NO: 555499 - RNA, 19 nt, Artificial Sequence
  Description of Artificial Sequence: Synthetic oligonucleotide
  Sense strand starting at position 2943 of SEQ ID NO: 318346
acuuaauugugaggauuug

SEQ ID NO: 555500 - RNA, 19 nt, Artificial Sequence
  Description of Artificial Sequence: Synthetic oligonucleotide
  Antisense strand to SEQ ID NO: 555499
caaauccucacaauuaagu

SEQ ID NO: 555501 - RNA, 19 nt, Artificial Sequence
  Description of Artificial Sequence: Synthetic oligonucleotide
  Sense strand starting at position 2949 of SEQ ID NO: 318346
uugugaggauuugggucua

SEQ ID NO: 555502 - RNA, 19 nt, Artificial Sequence
  Description of Artificial Sequence: Synthetic oligonucleotide
  Antisense strand to SEQ ID NO: 555501
uagacccaaauccucacaa

SEQ ID NO: 555503 - RNA, 19 nt, Artificial Sequence
  Description of Artificial Sequence: Synthetic oligonucleotide
  Sense strand starting at position 2961 of SEQ ID NO: 318346
gggucuaauucuggauaga

SEQ ID NO: 555504 - RNA, 19 nt, Artificial Sequence
  Description of Artificial Sequence: Synthetic oligonucleotide
  Antisense strand to SEQ ID NO: 555503
ucuauccagaauuagaccc

SEQ ID NO: 555505 - RNA, 19 nt, Artificial Sequence
  Description of Artificial Sequence: Synthetic oligonucleotide
  Sense strand starting at position 2970 of SEQ ID NO: 318346
ucuggauagauaugucuga

SEQ ID NO: 555506 - RNA, 19 nt, Artificial Sequence
  Description of Artificial Sequence: Synthetic oligonucleotide
  Antisense strand to SEQ ID NO: 555505
ucagacauaucuauccaga

SEQ ID NO: 555507 - RNA, 19 nt, Artificial Sequence
  Description of Artificial Sequence: Synthetic oligonucleotide
  Sense strand starting at position 2971 of SEQ ID NO: 318346
cuggauagauaugucugaa

SEQ ID NO: 555508 - RNA, 19 nt, Artificial Sequence
  Description of Artificial Sequence: Synthetic oligonucleotide
  Antisense strand to SEQ ID NO: 555507
uucagacauaucuauccag

SEQ ID NO: 555509 - RNA, 19 nt, Artificial Sequence
  Description of Artificial Sequence: Synthetic oligonucleotide
  Sense strand starting at position 2989 of SEQ ID NO: 318346
aaaugacagugugagauaa

SEQ ID NO: 555510 - RNA, 19 nt, Artificial Sequence
  Description of Artificial Sequence: Synthetic oligonucleotide
  Antisense strand to SEQ ID NO: 555509
uuaucucacacugucauuu

SEQ ID NO: 555511 - RNA, 19 nt, Artificial Sequence
  Description of Artificial Sequence: Synthetic oligonucleotide
  Sense strand starting at position 2991 of SEQ ID NO: 318346
augacagugugagauaaua

SEQ ID NO: 555512 - RNA, 19 nt, Artificial Sequence
  Description of Artificial Sequence: Synthetic oligonucleotide
  Antisense strand to SEQ ID NO: 555511
uauuaucucacacugucau

SEQ ID NO: 555513 - RNA, 19 nt, Artificial Sequence
  Description of Artificial Sequence: Synthetic oligonucleotide
  Sense strand starting at position 2999 of SEQ ID NO: 318346
gugagauaauacuguauua

SEQ ID NO: 555514 - RNA, 19 nt, Artificial Sequence
  Description of Artificial Sequence: Synthetic oligonucleotide
  Antisense strand to SEQ ID NO: 555513
uaauacaguauuaucucac

SEQ ID NO: 555515 - RNA, 19 nt, Artificial Sequence
  Description of Artificial Sequence: Synthetic oligonucleotide
  Sense strand starting at position 3071 of SEQ ID NO: 318346
aaaggaggcuuucuaugaa

SEQ ID NO: 555516 - RNA, 19 nt, Artificial Sequence
  Description of Artificial Sequence: Synthetic oligonucleotide
  Antisense strand to SEQ ID NO: 555515
uucauagaaagccuccuuu

SEQ ID NO: 555517 - RNA, 19 nt, Artificial Sequence
  Description of Artificial Sequence: Synthetic oligonucleotide
  Sense strand starting at position 3074 of SEQ ID NO: 318346
ggaggcuuucuaugaaaga

SEQ ID NO: 555518 - RNA, 19 nt, Artificial Sequence
  Description of Artificial Sequence: Synthetic oligonucleotide
  Antisense strand to SEQ ID NO: 555517
ucuuucauagaaagccucc

SEQ ID NO: 555519 - RNA, 19 nt, Artificial Sequence
  Description of Artificial Sequence: Synthetic oligonucleotide
  Sense strand starting at position 3075 of SEQ ID NO: 318346
gaggcuuucuaugaaagaa

SEQ ID NO: 555520 - RNA, 19 nt, Artificial Sequence
  Description of Artificial Sequence: Synthetic oligonucleotide
  Antisense strand to SEQ ID NO: 555519
uucuuucauagaaagccuc

SEQ ID NO: 555521 - RNA, 19 nt, Artificial Sequence
  Description of Artificial Sequence: Synthetic oligonucleotide
  Sense strand starting at position 2001 of SEQ ID NO: 318347
cguuucucugugcuguaaa

SEQ ID NO: 555522 - RNA, 19 nt, Artificial Sequence
  Description of Artificial Sequence: Synthetic oligonucleotide
  Antisense strand to SEQ ID NO: 555521
uuuacagcacagagaaacg

SEQ ID NO: 555523 - RNA, 19 nt, Artificial Sequence
  Description of Artificial Sequence: Synthetic oligonucleotide
  Sense strand starting at position 2075 of SEQ ID NO: 318347
ggcgcugugaguccuuacu

SEQ ID NO: 555524 - RNA, 19 nt, Artificial Sequence
  Description of Artificial Sequence: Synthetic oligonucleotide
  Antisense strand to SEQ ID NO: 555523
aguaaggacucacagcgcc

SEQ ID NO: 555525 - RNA, 19 nt, Artificial Sequence
  Description of Artificial Sequence: Synthetic oligonucleotide
  Sense strand starting at position 2166 of SEQ ID NO: 318347
cuguuagauuucuuugcuc

SEQ ID NO: 555526 - RNA, 19 nt, Artificial Sequence
  Description of Artificial Sequence: Synthetic oligonucleotide
  Antisense strand to SEQ ID NO: 555525
gagcaaagaaaucuaacag

SEQ ID NO: 555527 - RNA, 19 nt, Artificial Sequence
  Description of Artificial Sequence: Synthetic oligonucleotide
  Sense strand starting at position 2168 of SEQ ID NO: 318347
guuagauuucuuugcucua

SEQ ID NO: 555528 - RNA, 19 nt, Artificial Sequence
  Description of Artificial Sequence: Synthetic oligonucleotide
  Antisense strand to SEQ ID NO: 555527
uagagcaaagaaaucuaac

SEQ ID NO: 555529 - RNA, 19 nt, Artificial Sequence
  Description of Artificial Sequence: Synthetic oligonucleotide
  Sense strand starting at position 2180 of SEQ ID NO: 318347
ugcucuagauaucccugau

SEQ ID NO: 555530 - RNA, 19 nt, Artificial Sequence
  Description of Artificial Sequence: Synthetic oligonucleotide
  Antisense strand to SEQ ID NO: 555529
aucagggauaucuagagca

SEQ ID NO: 555531 - RNA, 19 nt, Artificial Sequence
  Description of Artificial Sequence: Synthetic oligonucleotide
  Sense strand starting at position 2224 of SEQ ID NO: 318347
gaauuaaugcaacaguguu

SEQ ID NO: 555532 - RNA, 19 nt, Artificial Sequence
  Description of Artificial Sequence: Synthetic oligonucleotide
  Antisense strand to SEQ ID NO: 555531
aacacuguugcauuaauuc

SEQ ID NO: 555533 - RNA, 19 nt, Artificial Sequence
  Description of Artificial Sequence: Synthetic oligonucleotide
  Sense strand starting at position 2244 of SEQ ID NO: 318347
auggaccgguguuugauaa

SEQ ID NO: 555534 - RNA, 19 nt, Artificial Sequence
  Description of Artificial Sequence: Synthetic oligonucleotide
  Antisense strand to SEQ ID NO: 555533
uuaucaaacaccgguccau

SEQ ID NO: 555535 - RNA, 19 nt, Artificial Sequence
  Description of Artificial Sequence: Synthetic oligonucleotide
  Sense strand starting at position 2245 of SEQ ID NO: 318347
uggaccgguguuugauaau

SEQ ID NO: 555536 - RNA, 19 nt, Artificial Sequence
  Description of Artificial Sequence: Synthetic oligonucleotide
  Antisense strand to SEQ ID NO: 555535
auuaucaaacaccggucca

SEQ ID NO: 555537 - RNA, 19 nt, Artificial Sequence
  Description of Artificial Sequence: Synthetic oligonucleotide
  Sense strand starting at position 2251 of SEQ ID NO: 318347
gguguuugauaaucuuaga

SEQ ID NO: 555538 - RNA, 19 nt, Artificial Sequence
  Description of Artificial Sequence: Synthetic oligonucleotide
  Antisense strand to SEQ ID NO: 555537
ucuaagauuaucaaacacc

SEQ ID NO: 555539 - RNA, 19 nt, Artificial Sequence
  Description of Artificial Sequence: Synthetic oligonucleotide
  Sense strand starting at position 2331 of SEQ ID NO: 318347
cacguuauugcacauggga

SEQ ID NO: 555540 - RNA, 19 nt, Artificial Sequence
  Description of Artificial Sequence: Synthetic oligonucleotide
  Antisense strand to SEQ ID NO: 555539
ucccaugugcaauaacgug

SEQ ID NO: 555541 - RNA, 19 nt, Artificial Sequence
  Description of Artificial Sequence: Synthetic oligonucleotide
  Sense strand starting at position 2333 of SEQ ID NO: 318347
cguuauugcacaugggaaa

SEQ ID NO: 555542 - RNA, 19 nt, Artificial Sequence
  Description of Artificial Sequence: Synthetic oligonucleotide
  Antisense strand to SEQ ID NO: 555541
uuucccaugugcaauaacg

SEQ ID NO: 555543 - RNA, 19 nt, Artificial Sequence
  Description of Artificial Sequence: Synthetic oligonucleotide
  Sense strand starting at position 2558 of SEQ ID NO: 318347
aaccuuagagacggucuaa

SEQ ID NO: 555544 - RNA, 19 nt, Artificial Sequence
  Description of Artificial Sequence: Synthetic oligonucleotide
  Antisense strand to SEQ ID NO: 555543
uuagaccgucucuaagguu

SEQ ID NO: 555545 - RNA, 19 nt, Artificial Sequence
  Description of Artificial Sequence: Synthetic oligonucleotide
  Sense strand starting at position 2953 of SEQ ID NO: 318347
ugccuuguuccugauuauu

SEQ ID NO: 555546 - RNA, 19 nt, Artificial Sequence
  Description of Artificial Sequence: Synthetic oligonucleotide
  Antisense strand to SEQ ID NO: 555545
aauaaucaggaacaaggca

SEQ ID NO: 555547 - RNA, 19 nt, Artificial Sequence
  Description of Artificial Sequence: Synthetic oligonucleotide
  Sense strand starting at position 2955 of SEQ ID NO: 318347
ccuuguuccugauuauuga

SEQ ID NO: 555548 - RNA, 19 nt, Artificial Sequence
  Description of Artificial Sequence: Synthetic oligonucleotide
  Antisense strand to SEQ ID NO: 555547
ucaauaaucaggaacaagg

SEQ ID NO: 555549 - RNA, 19 nt, Artificial Sequence
  Description of Artificial Sequence: Synthetic oligonucleotide
  Sense strand starting at position 2956 of SEQ ID NO: 318347
cuuguuccugauuauugau

SEQ ID NO: 555550 - RNA, 19 nt, Artificial Sequence
  Description of Artificial Sequence: Synthetic oligonucleotide
  Antisense strand to SEQ ID NO: 555549
aucaauaaucaggaacaag

SEQ ID NO: 555551 - RNA, 19 nt, Artificial Sequence
  Description of Artificial Sequence: Synthetic oligonucleotide
  Sense strand starting at position 2958 of SEQ ID NO: 318347
uguuccugauuauugauua

SEQ ID NO: 555552 - RNA, 19 nt, Artificial Sequence
  Description of Artificial Sequence: Synthetic oligonucleotide
  Antisense strand to SEQ ID NO: 555551
uaaucaauaaucaggaaca

SEQ ID NO: 555553 - RNA, 19 nt, Artificial Sequence
  Description of Artificial Sequence: Synthetic oligonucleotide
  Sense strand starting at position 3038 of SEQ ID NO: 318347
gaaagaaaucguuguuugu

SEQ ID NO: 555554 - RNA, 19 nt, Artificial Sequence
  Description of Artificial Sequence: Synthetic oligonucleotide
  Antisense strand to SEQ ID NO: 555553
acaaacaacgauuucuuuc

SEQ ID NO: 555555 - RNA, 19 nt, Artificial Sequence
  Description of Artificial Sequence: Synthetic oligonucleotide
  Sense strand starting at position 3040 of SEQ ID NO: 318347
aagaaaucguuguuugucu

SEQ ID NO: 555556 - RNA, 19 nt, Artificial Sequence
  Description of Artificial Sequence: Synthetic oligonucleotide
  Antisense strand to SEQ ID NO: 555555
agacaaacaacgauuucuu

SEQ ID NO: 555557 - RNA, 19 nt, Artificial Sequence
  Description of Artificial Sequence: Synthetic oligonucleotide
  Sense strand starting at position 3041 of SEQ ID NO: 318347
agaaaucguuguuugucuu

SEQ ID NO: 555558 - RNA, 19 nt, Artificial Sequence
  Description of Artificial Sequence: Synthetic oligonucleotide
  Antisense strand to SEQ ID NO: 555557
aagacaaacaacgauuucu

SEQ ID NO: 555559 - RNA, 19 nt, Artificial Sequence
  Description of Artificial Sequence: Synthetic oligonucleotide
  Sense strand starting at position 3120 of SEQ ID NO: 318347
auccuacugggcugugaau

SEQ ID NO: 555560 - RNA, 19 nt, Artificial Sequence
  Description of Artificial Sequence: Synthetic oligonucleotide
  Antisense strand to SEQ ID NO: 555559
auucacagcccaguaggau

SEQ ID NO: 555561 - RNA, 19 nt, Artificial Sequence
  Description of Artificial Sequence: Synthetic oligonucleotide
  Sense strand starting at position 3150 of SEQ ID NO: 318347
uggauaauggauuggcuga

SEQ ID NO: 555562 - RNA, 19 nt, Artificial Sequence
  Description of Artificial Sequence: Synthetic oligonucleotide
  Antisense strand to SEQ ID NO: 555561
ucagccaauccauuaucca

SEQ ID NO: 555563 - RNA, 19 nt, Artificial Sequence
  Description of Artificial Sequence: Synthetic oligonucleotide
  Sense strand starting at position 3151 of SEQ ID NO: 318347
ggauaauggauuggcugau

SEQ ID NO: 555564 - RNA, 19 nt, Artificial Sequence
  Description of Artificial Sequence: Synthetic oligonucleotide
  Antisense strand to SEQ ID NO: 555563
aucagccaauccauuaucc

SEQ ID NO: 555565 - RNA, 19 nt, Artificial Sequence
  Description of Artificial Sequence: Synthetic oligonucleotide
  Sense strand starting at position 3152 of SEQ ID NO: 318347
gauaauggauuggcugauu

SEQ ID NO: 555566 - RNA, 19 nt, Artificial Sequence
  Description of Artificial Sequence: Synthetic oligonucleotide
  Antisense strand to SEQ ID NO: 555565
aaucagccaauccauuauc

SEQ ID NO: 555567 - RNA, 19 nt, Artificial Sequence
  Description of Artificial Sequence: Synthetic oligonucleotide
  Sense strand starting at position 3155 of SEQ ID NO: 318347
aauggauuggcugauucuu

SEQ ID NO: 555568 - RNA, 19 nt, Artificial Sequence
  Description of Artificial Sequence: Synthetic oligonucleotide
  Antisense strand to SEQ ID NO: 555567
aagaaucagccaauccauu

SEQ ID NO: 555569 - RNA, 19 nt, Artificial Sequence
  Description of Artificial Sequence: Synthetic oligonucleotide
  Sense strand starting at position 3234 of SEQ ID NO: 318347
ucuauucuaguguaauuga

SEQ ID NO: 555570 - RNA, 19 nt, Artificial Sequence
  Description of Artificial Sequence: Synthetic oligonucleotide
  Antisense strand to SEQ ID NO: 555569
ucaauuacacuagaauaga

SEQ ID NO: 555571 - RNA, 19 nt, Artificial Sequence
  Description of Artificial Sequence: Synthetic oligonucleotide
  Sense strand starting at position 3237 of SEQ ID NO: 318347
auucuaguguaauugagaa

SEQ ID NO: 555572 - RNA, 19 nt, Artificial Sequence
  Description of Artificial Sequence: Synthetic oligonucleotide
  Antisense strand to SEQ ID NO: 555571
uucucaauuacacuagaau

SEQ ID NO: 555573 - RNA, 19 nt, Artificial Sequence
  Description of Artificial Sequence: Synthetic oligonucleotide
  Sense strand starting at position 3467 of SEQ ID NO: 318347
gaaacagucuugguuugua

SEQ ID NO: 555574 - RNA, 19 nt, Artificial Sequence
  Description of Artificial Sequence: Synthetic oligonucleotide
  Antisense strand to SEQ ID NO: 555573
uacaaaccaagacuguuuc

SEQ ID NO: 555575 - RNA, 19 nt, Artificial Sequence
  Description of Artificial Sequence: Synthetic oligonucleotide
  Sense strand starting at position 3470 of SEQ ID NO: 318347
acagucuugguuuguaaau

SEQ ID NO: 555576 - RNA, 19 nt, Artificial Sequence
  Description of Artificial Sequence: Synthetic oligonucleotide
  Antisense strand to SEQ ID NO: 555575
auuuacaaaccaagacugu

SEQ ID NO: 555577 - RNA, 19 nt, Artificial Sequence
  Description of Artificial Sequence: Synthetic oligonucleotide
  Sense strand starting at position 3471 of SEQ ID NO: 318347
cagucuugguuuguaaauu

SEQ ID NO: 555578 - RNA, 19 nt, Artificial Sequence
  Description of Artificial Sequence: Synthetic oligonucleotide
  Antisense strand to SEQ ID NO: 555577
aauuuacaaaccaagacug

SEQ ID NO: 555579 - RNA, 19 nt, Artificial Sequence
  Description of Artificial Sequence: Synthetic oligonucleotide
  Sense strand starting at position 3480 of SEQ ID NO: 318347
uuuguaaauucuucuaggu

SEQ ID NO: 555580 - RNA, 19 nt, Artificial Sequence
  Description of Artificial Sequence: Synthetic oligonucleotide
  Antisense strand to SEQ ID NO: 555579
accuagaagaauuuacaaa

SEQ ID NO: 555581 - RNA, 19 nt, Artificial Sequence
  Description of Artificial Sequence: Synthetic oligonucleotide
  Sense strand starting at position 3490 of SEQ ID NO: 318347
cuucuagguccuggagagu

SEQ ID NO: 555582 - RNA, 19 nt, Artificial Sequence
  Description of Artificial Sequence: Synthetic oligonucleotide
  Antisense strand to SEQ ID NO: 555581
acucuccaggaccuagaag

SEQ ID NO: 555583 - RNA, 19 nt, Artificial Sequence
  Description of Artificial Sequence: Synthetic oligonucleotide
  Sense strand starting at position 3501 of SEQ ID NO: 318347
uggagaguaguugguggaa

SEQ ID NO: 555584 - RNA, 19 nt, Artificial Sequence
  Description of Artificial Sequence: Synthetic oligonucleotide
  Antisense strand to SEQ ID NO: 555583
uuccaccaacuacucucca

SEQ ID NO: 555585 - RNA, 19 nt, Artificial Sequence
  Description of Artificial Sequence: Synthetic oligonucleotide
  Sense strand starting at position 3604 of SEQ ID NO: 318347
guggcauugcuccagaaua

SEQ ID NO: 555586 - RNA, 19 nt, Artificial Sequence
  Description of Artificial Sequence: Synthetic oligonucleotide
  Antisense strand to SEQ ID NO: 555585
uauucuggagcaaugccac

SEQ ID NO: 555587 - RNA, 19 nt, Artificial Sequence
  Description of Artificial Sequence: Synthetic oligonucleotide
  Sense strand starting at position 3606 of SEQ ID NO: 318347
ggcauugcuccagaauaca

SEQ ID NO: 555588 - RNA, 19 nt, Artificial Sequence
  Description of Artificial Sequence: Synthetic oligonucleotide
  Antisense strand to SEQ ID NO: 555587
uguauucuggagcaaugcc

SEQ ID NO: 555589 - RNA, 19 nt, Artificial Sequence
  Description of Artificial Sequence: Synthetic oligonucleotide
  Sense strand starting at position 3667 of SEQ ID NO: 318347
auccauaguuaucuuugca

SEQ ID NO: 555590 - RNA, 19 nt, Artificial Sequence
  Description of Artificial Sequence: Synthetic oligonucleotide
  Antisense strand to SEQ ID NO: 555589
ugcaaagauaacuauggau

SEQ ID NO: 555591 - RNA, 19 nt, Artificial Sequence
  Description of Artificial Sequence: Synthetic oligonucleotide
  Sense strand starting at position 3741 of SEQ ID NO: 318347
uucuguaaacuggaguuaa

SEQ ID NO: 555592 - RNA, 19 nt, Artificial Sequence
  Description of Artificial Sequence: Synthetic oligonucleotide
  Antisense strand to SEQ ID NO: 555591
uuaacuccaguuuacagaa

SEQ ID NO: 555593 - RNA, 19 nt, Artificial Sequence
  Description of Artificial Sequence: Synthetic oligonucleotide
  Sense strand starting at position 3752 of SEQ ID NO: 318347
ggaguuaaauucuauuugu

SEQ ID NO: 555594 - RNA, 19 nt, Artificial Sequence
  Description of Artificial Sequence: Synthetic oligonucleotide
  Antisense strand to SEQ ID NO: 555593
acaaauagaauuuaacucc

SEQ ID NO: 555595 - RNA, 19 nt, Artificial Sequence
  Description of Artificial Sequence: Synthetic oligonucleotide
  Sense strand starting at position 3785 of SEQ ID NO: 318347
gaacuucuuguugaggcaa

SEQ ID NO: 555596 - RNA, 19 nt, Artificial Sequence
  Description of Artificial Sequence: Synthetic oligonucleotide
  Antisense strand to SEQ ID NO: 555595
uugccucaacaagaaguuc

SEQ ID NO: 555597 - RNA, 19 nt, Artificial Sequence
  Description of Artificial Sequence: Synthetic oligonucleotide
  Sense strand starting at position 3800 of SEQ ID NO: 318347
gcaagcaaaguguaugauu

SEQ ID NO: 555598 - RNA, 19 nt, Artificial Sequence
  Description of Artificial Sequence: Synthetic oligonucleotide
  Antisense strand to SEQ ID NO: 555597
aaucauacacuuugcuugc

SEQ ID NO: 555599 - RNA, 19 nt, Artificial Sequence
  Description of Artificial Sequence: Synthetic oligonucleotide
  Sense strand starting at position 3802 of SEQ ID NO: 318347
aagcaaaguguaugauuau

SEQ ID NO: 555600 - RNA, 19 nt, Artificial Sequence
  Description of Artificial Sequence: Synthetic oligonucleotide
  Antisense strand to SEQ ID NO: 555599
auaaucauacacuuugcuu

SEQ ID NO: 555601 - RNA, 19 nt, Artificial Sequence
  Description of Artificial Sequence: Synthetic oligonucleotide
  Sense strand starting at position 2170 of SEQ ID NO: 318348
aaggauaaguaugacuaca

SEQ ID NO: 555602 - RNA, 19 nt, Artificial Sequence
  Description of Artificial Sequence: Synthetic oligonucleotide
  Antisense strand to SEQ ID NO: 555601
uguagucauacuuauccuu

SEQ ID NO: 555603 - RNA, 19 nt, Artificial Sequence
  Description of Artificial Sequence: Synthetic oligonucleotide
  Sense strand starting at position 2254 of SEQ ID NO: 318348
uuugaagacugguaugaua

SEQ ID NO: 555604 - RNA, 19 nt, Artificial Sequence
  Description of Artificial Sequence: Synthetic oligonucleotide
  Antisense strand to SEQ ID NO: 555603
uaucauaccagucuucaaa

SEQ ID NO: 555605 - RNA, 19 nt, Artificial Sequence
  Description of Artificial Sequence: Synthetic oligonucleotide
  Sense strand starting at position 2256 of SEQ ID NO: 318348
ugaagacugguaugauagu

SEQ ID NO: 555606 - RNA, 19 nt, Artificial Sequence
  Description of Artificial Sequence: Synthetic oligonucleotide
  Antisense strand to SEQ ID NO: 555605
acuaucauaccagucuuca

SEQ ID NO: 555607 - RNA, 19 nt, Artificial Sequence
  Description of Artificial Sequence: Synthetic oligonucleotide
  Sense strand starting at position 2257 of SEQ ID NO: 318348
gaagacugguaugauaguu

SEQ ID NO: 555608 - RNA, 19 nt, Artificial Sequence
  Description of Artificial Sequence: Synthetic oligonucleotide
  Antisense strand to SEQ ID NO: 555607
aacuaucauaccagucuuc

SEQ ID NO: 555609 - RNA, 19 nt, Artificial Sequence
  Description of Artificial Sequence: Synthetic oligonucleotide
  Sense strand starting at position 2390 of SEQ ID NO: 318348
ccaguuaaauuagugaaag

SEQ ID NO: 555610 - RNA, 19 nt, Artificial Sequence
  Description of Artificial Sequence: Synthetic oligonucleotide
  Antisense strand to SEQ ID NO: 555609
cuuucacuaauuuaacugg

SEQ ID NO: 555611 - RNA, 19 nt, Artificial Sequence
  Description of Artificial Sequence: Synthetic oligonucleotide
  Sense strand starting at position 2391 of SEQ ID NO: 318348
caguuaaauuagugaaaga

SEQ ID NO: 555612 - RNA, 19 nt, Artificial Sequence
  Description of Artificial Sequence: Synthetic oligonucleotide
  Antisense strand to SEQ ID NO: 555611
ucuuucacuaauuuaacug

SEQ ID NO: 555613 - RNA, 19 nt, Artificial Sequence
  Description of Artificial Sequence: Synthetic oligonucleotide
  Sense strand starting at position 2523 of SEQ ID NO: 318348
gcuggagggagcuaucauu

SEQ ID NO: 555614 - RNA, 19 nt, Artificial Sequence
  Description of Artificial Sequence: Synthetic oligonucleotide
  Antisense strand to SEQ ID NO: 555613
aaugauagcucccuccagc

SEQ ID NO: 555615 - RNA, 19 nt, Artificial Sequence
  Description of Artificial Sequence: Synthetic oligonucleotide
  Sense strand starting at position 2529 of SEQ ID NO: 318348
gggagcuaucauugugcca

SEQ ID NO: 555616 - RNA, 19 nt, Artificial Sequence
  Description of Artificial Sequence: Synthetic oligonucleotide
  Antisense strand to SEQ ID NO: 555615
uggcacaaugauagcuccc

SEQ ID NO: 555617 - RNA, 19 nt, Artificial Sequence
  Description of Artificial Sequence: Synthetic oligonucleotide
  Sense strand starting at position 2616 of SEQ ID NO: 318348
gaaagacguuuccuucuuu

SEQ ID NO: 555618 - RNA, 19 nt, Artificial Sequence
  Description of Artificial Sequence: Synthetic oligonucleotide
  Antisense strand to SEQ ID NO: 555617
aaagaaggaaacgucuuuc

SEQ ID NO: 555619 - RNA, 19 nt, Artificial Sequence
  Description of Artificial Sequence: Synthetic oligonucleotide
  Sense strand starting at position 2641 of SEQ ID NO: 318348
uuuguaaaguggccauuaa

SEQ ID NO: 555620 - RNA, 19 nt, Artificial Sequence
  Description of Artificial Sequence: Synthetic oligonucleotide
  Antisense strand to SEQ ID NO: 555619
uuaauggccacuuuacaaa

SEQ ID NO: 555621 - RNA, 19 nt, Artificial Sequence
  Description of Artificial Sequence: Synthetic oligonucleotide
  Sense strand starting at position 2661 of SEQ ID NO: 318348
ugaagcaguugcuuagaua

SEQ ID NO: 555622 - RNA, 19 nt, Artificial Sequence
  Description of Artificial Sequence: Synthetic oligonucleotide
  Antisense strand to SEQ ID NO: 555621
uaucuaagcaacugcuuca

SEQ ID NO: 555623 - RNA, 19 nt, Artificial Sequence
  Description of Artificial Sequence: Synthetic oligonucleotide
  Sense strand starting at position 2662 of SEQ ID NO: 318348
gaagcaguugcuuagauau

SEQ ID NO: 555624 - RNA, 19 nt, Artificial Sequence
  Description of Artificial Sequence: Synthetic oligonucleotide
  Antisense strand to SEQ ID NO: 555623
auaucuaagcaacugcuuc

SEQ ID NO: 555625 - RNA, 19 nt, Artificial Sequence
  Description of Artificial Sequence: Synthetic oligonucleotide
  Sense strand starting at position 2664 of SEQ ID NO: 318348
agcaguugcuuagauauac

SEQ ID NO: 555626 - RNA, 19 nt, Artificial Sequence
  Description of Artificial Sequence: Synthetic oligonucleotide
  Antisense strand to SEQ ID NO: 555625
guauaucuaagcaacugcu

SEQ ID NO: 555627 - RNA, 19 nt, Artificial Sequence
  Description of Artificial Sequence: Synthetic oligonucleotide
  Sense strand starting at position 2697 of SEQ ID NO: 318348
auauaauguuccuugguau

SEQ ID NO: 555628 - RNA, 19 nt, Artificial Sequence
  Description of Artificial Sequence: Synthetic oligonucleotide
  Antisense strand to SEQ ID NO: 555627
auaccaaggaacauuauau

SEQ ID NO: 555629 - RNA, 19 nt, Artificial Sequence
  Description of Artificial Sequence: Synthetic oligonucleotide
  Sense strand starting at position 2762 of SEQ ID NO: 318348
auauuucuuuccuagaggu

SEQ ID NO: 555630 - RNA, 19 nt, Artificial Sequence
  Description of Artificial Sequence: Synthetic oligonucleotide
  Antisense strand to SEQ ID NO: 555629
accucuaggaaagaaauau

SEQ ID NO: 555631 - RNA, 19 nt, Artificial Sequence
  Description of Artificial Sequence: Synthetic oligonucleotide
  Sense strand starting at position 2766 of SEQ ID NO: 318348
uucuuuccuagagguagga

SEQ ID NO: 555632 - RNA, 19 nt, Artificial Sequence
  Description of Artificial Sequence: Synthetic oligonucleotide
  Antisense strand to SEQ ID NO: 555631
uccuaccucuaggaaagaa

SEQ ID NO: 555633 - RNA, 19 nt, Artificial Sequence
  Description of Artificial Sequence: Synthetic oligonucleotide
  Sense strand starting at position 2791 of SEQ ID NO: 318348
uuagaagaccucuagcuau

SEQ ID NO: 555634 - RNA, 19 nt, Artificial Sequence
  Description of Artificial Sequence: Synthetic oligonucleotide
  Antisense strand to SEQ ID NO: 555633
auagcuagaggucuucuaa

SEQ ID NO: 555635 - RNA, 19 nt, Artificial Sequence
  Description of Artificial Sequence: Synthetic oligonucleotide
  Sense strand starting at position 2811 of SEQ ID NO: 318348
uuaguuuagggcugcagau

SEQ ID NO: 555636 - RNA, 19 nt, Artificial Sequence
  Description of Artificial Sequence: Synthetic oligonucleotide
  Antisense strand to SEQ ID NO: 555635
aucugcagcccuaaacuaa

SEQ ID NO: 555637 - RNA, 19 nt, Artificial Sequence
  Description of Artificial Sequence: Synthetic oligonucleotide
  Sense strand starting at position 2813 of SEQ ID NO: 318348
aguuuagggcugcagauaa

SEQ ID NO: 555638 - RNA, 19 nt, Artificial Sequence
  Description of Artificial Sequence: Synthetic oligonucleotide
  Antisense strand to SEQ ID NO: 555637
uuaucugcagcccuaaacu

SEQ ID NO: 555639 - RNA, 19 nt, Artificial Sequence
  Description of Artificial Sequence: Synthetic oligonucleotide
  Sense strand starting at position 2833 of SEQ ID NO: 318348
gcaguuacacauuauauau

SEQ ID NO: 555640 - RNA, 19 nt, Artificial Sequence
  Description of Artificial Sequence: Synthetic oligonucleotide
  Antisense strand to SEQ ID NO: 555639
auauauaauguguaacugc

SEQ ID NO: 555641 - RNA, 19 nt, Artificial Sequence
  Description of Artificial Sequence: Synthetic oligonucleotide
  Sense strand starting at position 2912 of SEQ ID NO: 318348
auagaaugagcuugaauac

SEQ ID NO: 555642 - RNA, 19 nt, Artificial Sequence
  Description of Artificial Sequence: Synthetic oligonucleotide
  Antisense strand to SEQ ID NO: 555641
guauucaagcucauucuau

SEQ ID NO: 555643 - RNA, 19 nt, Artificial Sequence
  Description of Artificial Sequence: Synthetic oligonucleotide
  Sense strand starting at position 2945 of SEQ ID NO: 318348
acuccuauguuacaaguaa

SEQ ID NO: 555644 - RNA, 19 nt, Artificial Sequence
  Description of Artificial Sequence: Synthetic oligonucleotide
  Antisense strand to SEQ ID NO: 555643
uuacuuguaacauaggagu

SEQ ID NO: 555645 - RNA, 19 nt, Artificial Sequence
  Description of Artificial Sequence: Synthetic oligonucleotide
  Sense strand starting at position 2952 of SEQ ID NO: 318348
uguuacaaguaaggagaau

SEQ ID NO: 555646 - RNA, 19 nt, Artificial Sequence
  Description of Artificial Sequence: Synthetic oligonucleotide
  Antisense strand to SEQ ID NO: 555645
auucuccuuacuuguaaca

SEQ ID NO: 555647 - RNA, 19 nt, Artificial Sequence
  Description of Artificial Sequence: Synthetic oligonucleotide
  Sense strand starting at position 2977 of SEQ ID NO: 318348
uugaucuucuaaugagcau

SEQ ID NO: 555648 - RNA, 19 nt, Artificial Sequence
  Description of Artificial Sequence: Synthetic oligonucleotide
  Antisense strand to SEQ ID NO: 555647
augcucauuagaagaucaa

SEQ ID NO: 555649 - RNA, 19 nt, Artificial Sequence
  Description of Artificial Sequence: Synthetic oligonucleotide
  Sense strand starting at position 2981 of SEQ ID NO: 318348
ucuucuaaugagcauagua

SEQ ID NO: 555650 - RNA, 19 nt, Artificial Sequence
  Description of Artificial Sequence: Synthetic oligonucleotide
  Antisense strand to SEQ ID NO: 555649
uacuaugcucauuagaaga

SEQ ID NO: 555651 - RNA, 19 nt, Artificial Sequence
  Description of Artificial Sequence: Synthetic oligonucleotide
  Sense strand starting at position 2983 of SEQ ID NO: 318348
uucuaaugagcauaguaga

SEQ ID NO: 555652 - RNA, 19 nt, Artificial Sequence
  Description of Artificial Sequence: Synthetic oligonucleotide
  Antisense strand to SEQ ID NO: 555651
ucuacuaugcucauuagaa

SEQ ID NO: 555653 - RNA, 19 nt, Artificial Sequence
  Description of Artificial Sequence: Synthetic oligonucleotide
  Sense strand starting at position 3057 of SEQ ID NO: 318348
cagcguacacugcauauaa

SEQ ID NO: 555654 - RNA, 19 nt, Artificial Sequence
  Description of Artificial Sequence: Synthetic oligonucleotide
  Antisense strand to SEQ ID NO: 555653
uuauaugcaguguacgcug

SEQ ID NO: 555655 - RNA, 19 nt, Artificial Sequence
  Description of Artificial Sequence: Synthetic oligonucleotide
  Sense strand starting at position 3103 of SEQ ID NO: 318348
ccaguugacuccuuauucu

SEQ ID NO: 555656 - RNA, 19 nt, Artificial Sequence
  Description of Artificial Sequence: Synthetic oligonucleotide
  Antisense strand to SEQ ID NO: 555655
agaauaaggagucaacugg

SEQ ID NO: 555657 - RNA, 19 nt, Artificial Sequence
  Description of Artificial Sequence: Synthetic oligonucleotide
  Sense strand starting at position 3106 of SEQ ID NO: 318348
guugacuccuuauucuaag

SEQ ID NO: 555658 - RNA, 19 nt, Artificial Sequence
  Description of Artificial Sequence: Synthetic oligonucleotide
  Antisense strand to SEQ ID NO: 555657
cuuagaauaaggagucaac

SEQ ID NO: 555659 - RNA, 19 nt, Artificial Sequence
  Description of Artificial Sequence: Synthetic oligonucleotide
  Sense strand starting at position 3189 of SEQ ID NO: 318348
ccaguuaaauuaguuaaga

SEQ ID NO: 555660 - RNA, 19 nt, Artificial Sequence
  Description of Artificial Sequence: Synthetic oligonucleotide
  Antisense strand to SEQ ID NO: 555659
ucuuaacuaauuuaacugg

SEQ ID NO: 555661 - RNA, 19 nt, Artificial Sequence
  Description of Artificial Sequence: Synthetic oligonucleotide
  Sense strand starting at position 3223 of SEQ ID NO: 318348
agcuuaaauucuuuggcuu

SEQ ID NO: 555662 - RNA, 19 nt, Artificial Sequence
  Description of Artificial Sequence: Synthetic oligonucleotide
  Antisense strand to SEQ ID NO: 555661
aagccaaagaauuuaagcu

SEQ ID NO: 555663 - RNA, 19 nt, Artificial Sequence
  Description of Artificial Sequence: Synthetic oligonucleotide
  Sense strand starting at position 3224 of SEQ ID NO: 318348
gcuuaaauucuuuggcuuu

SEQ ID NO: 555664 - RNA, 19 nt, Artificial Sequence
  Description of Artificial Sequence: Synthetic oligonucleotide
  Antisense strand to SEQ ID NO: 555663
aaagccaaagaauuuaagc

SEQ ID NO: 555665 - RNA, 19 nt, Artificial Sequence
  Description of Artificial Sequence: Synthetic oligonucleotide
  Sense strand starting at position 3437 of SEQ ID NO: 318348
aauguugggccacacaauu

SEQ ID NO: 555666 - RNA, 19 nt, Artificial Sequence
  Description of Artificial Sequence: Synthetic oligonucleotide
  Antisense strand to SEQ ID NO: 555665
aauuguguggcccaacauu

SEQ ID NO: 555667 - RNA, 19 nt, Artificial Sequence
  Description of Artificial Sequence: Synthetic oligonucleotide
  Sense strand starting at position 3469 of SEQ ID NO: 318348
uccuccuuuguagaaugau

SEQ ID NO: 555668 - RNA, 19 nt, Artificial Sequence
  Description of Artificial Sequence: Synthetic oligonucleotide
  Antisense strand to SEQ ID NO: 555667
aucauucuacaaaggagga

SEQ ID NO: 555669 - RNA, 19 nt, Artificial Sequence
  Description of Artificial Sequence: Synthetic oligonucleotide
  Sense strand starting at position 3472 of SEQ ID NO: 318348
uccuuuguagaaugauaug

SEQ ID NO: 555670 - RNA, 19 nt, Artificial Sequence
  Description of Artificial Sequence: Synthetic oligonucleotide
  Antisense strand to SEQ ID NO: 555669
cauaucauucuacaaagga

SEQ ID NO: 555671 - RNA, 19 nt, Artificial Sequence
  Description of Artificial Sequence: Synthetic oligonucleotide
  Sense strand starting at position 3475 of SEQ ID NO: 318348
uuuguagaaugauaugaca

SEQ ID NO: 555672 - RNA, 19 nt, Artificial Sequence
  Description of Artificial Sequence: Synthetic oligonucleotide
  Antisense strand to SEQ ID NO: 555671
ugucauaucauucuacaaa

SEQ ID NO: 555673 - RNA, 19 nt, Artificial Sequence
  Description of Artificial Sequence: Synthetic oligonucleotide
  Sense strand starting at position 3574 of SEQ ID NO: 318348
ucuugugaauauggagaaa

SEQ ID NO: 555674 - RNA, 19 nt, Artificial Sequence
  Description of Artificial Sequence: Synthetic oligonucleotide
  Antisense strand to SEQ ID NO: 555673
uuucuccauauucacaaga

SEQ ID NO: 555675 - RNA, 19 nt, Artificial Sequence
  Description of Artificial Sequence: Synthetic oligonucleotide
  Sense strand starting at position 3596 of SEQ ID NO: 318348
guaggcaaugagcauuaaa

SEQ ID NO: 555676 - RNA, 19 nt, Artificial Sequence
  Description of Artificial Sequence: Synthetic oligonucleotide
  Antisense strand to SEQ ID NO: 555675
uuuaaugcucauugccuac

SEQ ID NO: 555677 - RNA, 19 nt, Artificial Sequence
  Description of Artificial Sequence: Synthetic oligonucleotide
  Sense strand starting at position 3599 of SEQ ID NO: 318348
ggcaaugagcauuaaauua

SEQ ID NO: 555678 - RNA, 19 nt, Artificial Sequence
  Description of Artificial Sequence: Synthetic oligonucleotide
  Antisense strand to SEQ ID NO: 555677
uaauuuaaugcucauugcc

SEQ ID NO: 555679 - RNA, 19 nt, Artificial Sequence
  Description of Artificial Sequence: Synthetic oligonucleotide
  Sense strand starting at position 2003 of SEQ ID NO: 318349
gcugccucgcuuuggaauu

SEQ ID NO: 555680 - RNA, 19 nt, Artificial Sequence
  Description of Artificial Sequence: Synthetic oligonucleotide
  Antisense strand to SEQ ID NO: 555679
aauuccaaagcgaggcagc

SEQ ID NO: 555681 - RNA, 19 nt, Artificial Sequence
  Description of Artificial Sequence: Synthetic oligonucleotide
  Sense strand starting at position 2100 of SEQ ID NO: 318349
gaagaaagaggcugaguuu

SEQ ID NO: 555682 - RNA, 19 nt, Artificial Sequence
  Description of Artificial Sequence: Synthetic oligonucleotide
  Antisense strand to SEQ ID NO: 555681
aaacucagccucuuucuuc

SEQ ID NO: 555683 - RNA, 19 nt, Artificial Sequence
  Description of Artificial Sequence: Synthetic oligonucleotide
  Sense strand starting at position 2130 of SEQ ID NO: 318349
gggagcagguuugugguau

SEQ ID NO: 555684 - RNA, 19 nt, Artificial Sequence
  Description of Artificial Sequence: Synthetic oligonucleotide
  Antisense strand to SEQ ID NO: 555683
auaccacaaaccugcuccc

SEQ ID NO: 555685 - RNA, 19 nt, Artificial Sequence
  Description of Artificial Sequence: Synthetic oligonucleotide
  Sense strand starting at position 2201 of SEQ ID NO: 318349
uucgcuuagaguugaucaa

SEQ ID NO: 555686 - RNA, 19 nt, Artificial Sequence
  Description of Artificial Sequence: Synthetic oligonucleotide
  Antisense strand to SEQ ID NO: 555685
uugaucaacucuaagcgaa

SEQ ID NO: 555687 - RNA, 19 nt, Artificial Sequence
  Description of Artificial Sequence: Synthetic oligonucleotide
  Sense strand starting at position 2202 of SEQ ID NO: 318349
ucgcuuagaguugaucaac

SEQ ID NO: 555688 - RNA, 19 nt, Artificial Sequence
  Description of Artificial Sequence: Synthetic oligonucleotide
  Antisense strand to SEQ ID NO: 555687
guugaucaacucuaagcga

SEQ ID NO: 555689 - RNA, 19 nt, Artificial Sequence
  Description of Artificial Sequence: Synthetic oligonucleotide
  Sense strand starting at position 2234 of SEQ ID NO: 318349
guccuaagccguuacuaca

SEQ ID NO: 555690 - RNA, 19 nt, Artificial Sequence
  Description of Artificial Sequence: Synthetic oligonucleotide
  Antisense strand to SEQ ID NO: 555689
uguaguaacggcuuaggac

SEQ ID NO: 555691 - RNA, 19 nt, Artificial Sequence
  Description of Artificial Sequence: Synthetic oligonucleotide
  Sense strand starting at position 2253 of SEQ ID NO: 318349
cccacugauguguaacauu

SEQ ID NO: 555692 - RNA, 19 nt, Artificial Sequence
  Description of Artificial Sequence: Synthetic oligonucleotide
  Antisense strand to SEQ ID NO: 555691
aauguuacacaucaguggg

SEQ ID NO: 555693 - RNA, 19 nt, Artificial Sequence
  Description of Artificial Sequence: Synthetic oligonucleotide
  Sense strand starting at position 2256 of SEQ ID NO: 318349
acugauguguaacauuaua

SEQ ID NO: 555694 - RNA, 19 nt, Artificial Sequence
  Description of Artificial Sequence: Synthetic oligonucleotide
  Antisense strand to SEQ ID NO: 555693
uauaauguuacacaucagu

SEQ ID NO: 555695 - RNA, 19 nt, Artificial Sequence
  Description of Artificial Sequence: Synthetic oligonucleotide
  Sense strand starting at position 2261 of SEQ ID NO: 318349
uguguaacauuauaucaga

SEQ ID NO: 555696 - RNA, 19 nt, Artificial Sequence
  Description of Artificial Sequence: Synthetic oligonucleotide
  Antisense strand to SEQ ID NO: 555695
ucugauauaauguuacaca

SEQ ID NO: 555697 - RNA, 19 nt, Artificial Sequence
  Description of Artificial Sequence: Synthetic oligonucleotide
  Sense strand starting at position 2269 of SEQ ID NO: 318349
auuauaucagauggcugau

SEQ ID NO: 555698 - RNA, 19 nt, Artificial Sequence
  Description of Artificial Sequence: Synthetic oligonucleotide
  Antisense strand to SEQ ID NO: 555697
aucagccaucugauauaau

SEQ ID NO: 555699 - RNA, 19 nt, Artificial Sequence
  Description of Artificial Sequence: Synthetic oligonucleotide
  Sense strand starting at position 2272 of SEQ ID NO: 318349
auaucagauggcugauaaa

SEQ ID NO: 555700 - RNA, 19 nt, Artificial Sequence
  Description of Artificial Sequence: Synthetic oligonucleotide
  Antisense strand to SEQ ID NO: 555699
uuuaucagccaucugauau

SEQ ID NO: 555701 - RNA, 19 nt, Artificial Sequence
  Description of Artificial Sequence: Synthetic oligonucleotide
  Sense strand starting at position 2372 of SEQ ID NO: 318349
uuagauaucugaguuguaa

SEQ ID NO: 555702 - RNA, 19 nt, Artificial Sequence
  Description of Artificial Sequence: Synthetic oligonucleotide
  Antisense strand to SEQ ID NO: 555701
uuacaacucagauaucuaa

SEQ ID NO: 555703 - RNA, 19 nt, Artificial Sequence
  Description of Artificial Sequence: Synthetic oligonucleotide
  Sense strand starting at position 2380 of SEQ ID NO: 318349
cugaguuguaaauaaagug

SEQ ID NO: 555704 - RNA, 19 nt, Artificial Sequence
  Description of Artificial Sequence: Synthetic oligonucleotide
  Antisense strand to SEQ ID NO: 555703
cacuuuauuuacaacucag

SEQ ID NO: 555705 - RNA, 19 nt, Artificial Sequence
  Description of Artificial Sequence: Synthetic oligonucleotide
  Sense strand starting at position 2456 of SEQ ID NO: 318349
auucuuauucuugguagaa

SEQ ID NO: 555706 - RNA, 19 nt, Artificial Sequence
  Description of Artificial Sequence: Synthetic oligonucleotide
  Antisense strand to SEQ ID NO: 555705
uucuaccaagaauaagaau

SEQ ID NO: 555707 - RNA, 19 nt, Artificial Sequence
  Description of Artificial Sequence: Synthetic oligonucleotide
  Sense strand starting at position 2457 of SEQ ID NO: 318349
uucuuauucuugguagaac

SEQ ID NO: 555708 - RNA, 19 nt, Artificial Sequence
  Description of Artificial Sequence: Synthetic oligonucleotide
  Antisense strand to SEQ ID NO: 555707
guucuaccaagaauaagaa

SEQ ID NO: 555709 - RNA, 19 nt, Artificial Sequence
  Description of Artificial Sequence: Synthetic oligonucleotide
  Sense strand starting at position 2458 of SEQ ID NO: 318349
ucuuauucuugguagaacu

SEQ ID NO: 555710 - RNA, 19 nt, Artificial Sequence
  Description of Artificial Sequence: Synthetic oligonucleotide
  Antisense strand to SEQ ID NO: 555709
aguucuaccaagaauaaga

SEQ ID NO: 555711 - RNA, 19 nt, Artificial Sequence
  Description of Artificial Sequence: Synthetic oligonucleotide
  Sense strand starting at position 2460 of SEQ ID NO: 318349
uuauucuugguagaacuuu

SEQ ID NO: 555712 - RNA, 19 nt, Artificial Sequence
  Description of Artificial Sequence: Synthetic oligonucleotide
  Antisense strand to SEQ ID NO: 555711
aaaguucuaccaagaauaa

SEQ ID NO: 555713 - RNA, 19 nt, Artificial Sequence
  Description of Artificial Sequence: Synthetic oligonucleotide
  Sense strand starting at position 2468 of SEQ ID NO: 318349
gguagaacuuugcacucua

SEQ ID NO: 555714 - RNA, 19 nt, Artificial Sequence
  Description of Artificial Sequence: Synthetic oligonucleotide
  Antisense strand to SEQ ID NO: 555713
uagagugcaaaguucuacc

SEQ ID NO: 555715 - RNA, 19 nt, Artificial Sequence
  Description of Artificial Sequence: Synthetic oligonucleotide
  Sense strand starting at position 2575 of SEQ ID NO: 318349
ugugcaaucuuguuuggaa

SEQ ID NO: 555716 - RNA, 19 nt, Artificial Sequence
  Description of Artificial Sequence: Synthetic oligonucleotide
  Antisense strand to SEQ ID NO: 555715
uuccaaacaagauugcaca

SEQ ID NO: 555717 - RNA, 19 nt, Artificial Sequence
  Description of Artificial Sequence: Synthetic oligonucleotide
  Sense strand starting at position 2576 of SEQ ID NO: 318349
gugcaaucuuguuuggaag

SEQ ID NO: 555718 - RNA, 19 nt, Artificial Sequence
  Description of Artificial Sequence: Synthetic oligonucleotide
  Antisense strand to SEQ ID NO: 555717
cuuccaaacaagauugcac

SEQ ID NO: 555719 - RNA, 19 nt, Artificial Sequence
  Description of Artificial Sequence: Synthetic oligonucleotide
  Sense strand starting at position 2774 of SEQ ID NO: 318349
cagcaauaguuacagaugu

SEQ ID NO: 555720 - RNA, 19 nt, Artificial Sequence
  Description of Artificial Sequence: Synthetic oligonucleotide
  Antisense strand to SEQ ID NO: 555719
acaucuguaacuauugcug

SEQ ID NO: 555721 - RNA, 19 nt, Artificial Sequence
  Description of Artificial Sequence: Synthetic oligonucleotide
  Sense strand starting at position 2784 of SEQ ID NO: 318349
uacagauguucucgccuaa

SEQ ID NO: 555722 - RNA, 19 nt, Artificial Sequence
  Description of Artificial Sequence: Synthetic oligonucleotide
  Antisense strand to SEQ ID NO: 555721
uuaggcgagaacaucugua

SEQ ID NO: 555723 - RNA, 19 nt, Artificial Sequence
  Description of Artificial Sequence: Synthetic oligonucleotide
  Sense strand starting at position 2788 of SEQ ID NO: 318349
gauguucucgccuaauauu

SEQ ID NO: 555724 - RNA, 19 nt, Artificial Sequence
  Description of Artificial Sequence: Synthetic oligonucleotide
  Antisense strand to SEQ ID NO: 555723
aauauuaggcgagaacauc

SEQ ID NO: 555725 - RNA, 19 nt, Artificial Sequence
  Description of Artificial Sequence: Synthetic oligonucleotide
  Sense strand starting at position 2794 of SEQ ID NO: 318349
cucgccuaauauugcuaaa

SEQ ID NO: 555726 - RNA, 19 nt, Artificial Sequence
  Description of Artificial Sequence: Synthetic oligonucleotide
  Antisense strand to SEQ ID NO: 555725
uuuagcaauauuaggcgag

SEQ ID NO: 555727 - RNA, 19 nt, Artificial Sequence
  Description of Artificial Sequence: Synthetic oligonucleotide
  Sense strand starting at position 2796 of SEQ ID NO: 318349
cgccuaauauugcuaaaua

SEQ ID NO: 555728 - RNA, 19 nt, Artificial Sequence
  Description of Artificial Sequence: Synthetic oligonucleotide
  Antisense strand to SEQ ID NO: 555727
uauuuagcaauauuaggcg

SEQ ID NO: 555729 - RNA, 19 nt, Artificial Sequence
  Description of Artificial Sequence: Synthetic oligonucleotide
  Sense strand starting at position 2807 of SEQ ID NO: 318349
gcuaaauauuaacaggauu

SEQ ID NO: 555730 - RNA, 19 nt, Artificial Sequence
  Description of Artificial Sequence: Synthetic oligonucleotide
  Antisense strand to SEQ ID NO: 555729
aauccuguuaauauuuagc

SEQ ID NO: 555731 - RNA, 19 nt, Artificial Sequence
  Description of Artificial Sequence: Synthetic oligonucleotide
  Sense strand starting at position 2821 of SEQ ID NO: 318349
ggauuaaaguuggaaauuu

SEQ ID NO: 555732 - RNA, 19 nt, Artificial Sequence
  Description of Artificial Sequence: Synthetic oligonucleotide
  Antisense strand to SEQ ID NO: 555731
aaauuuccaacuuuaaucc

SEQ ID NO: 555733 - RNA, 19 nt, Artificial Sequence
  Description of Artificial Sequence: Synthetic oligonucleotide
  Sense strand starting at position 3111 of SEQ ID NO: 318349
gugguauuauaagaaaucu

SEQ ID NO: 555734 - RNA, 19 nt, Artificial Sequence
  Description of Artificial Sequence: Synthetic oligonucleotide
  Antisense strand to SEQ ID NO: 555733
agauuucuuauaauaccac

SEQ ID NO: 555735 - RNA, 19 nt, Artificial Sequence
  Description of Artificial Sequence: Synthetic oligonucleotide
  Sense strand starting at position 3186 of SEQ ID NO: 318349
agacuuauaccauguaaug

SEQ ID NO: 555736 - RNA, 19 nt, Artificial Sequence
  Description of Artificial Sequence: Synthetic oligonucleotide
  Antisense strand to SEQ ID NO: 555735
cauuacaugguauaagucu

SEQ ID NO: 555737 - RNA, 19 nt, Artificial Sequence
  Description of Artificial Sequence: Synthetic oligonucleotide
  Sense strand starting at position 3204 of SEQ ID NO: 318349
gggagcuuuguauguacac

SEQ ID NO: 555738 - RNA, 19 nt, Artificial Sequence
  Description of Artificial Sequence: Synthetic oligonucleotide
  Antisense strand to SEQ ID NO: 555737
guguacauacaaagcuccc

SEQ ID NO: 555739 - RNA, 19 nt, Artificial Sequence
  Description of Artificial Sequence: Synthetic oligonucleotide
  Sense strand starting at position 3205 of SEQ ID NO: 318349
ggagcuuuguauguacaca

SEQ ID NO: 555740 - RNA, 19 nt, Artificial Sequence
  Description of Artificial Sequence: Synthetic oligonucleotide
  Antisense strand to SEQ ID NO: 555739
uguguacauacaaagcucc

SEQ ID NO: 555741 - RNA, 19 nt, Artificial Sequence
  Description of Artificial Sequence: Synthetic oligonucleotide
  Sense strand starting at position 3213 of SEQ ID NO: 318349
guauguacacaagacuagu

SEQ ID NO: 555742 - RNA, 19 nt, Artificial Sequence
  Description of Artificial Sequence: Synthetic oligonucleotide
  Antisense strand to SEQ ID NO: 555741
acuagucuuguguacauac

SEQ ID NO: 555743 - RNA, 19 nt, Artificial Sequence
  Description of Artificial Sequence: Synthetic oligonucleotide
  Sense strand starting at position 3248 of SEQ ID NO: 318349
auggaauaauccuguauuc

SEQ ID NO: 555744 - RNA, 19 nt, Artificial Sequence
  Description of Artificial Sequence: Synthetic oligonucleotide
  Antisense strand to SEQ ID NO: 555743
gaauacaggauuauuccau

SEQ ID NO: 555745 - RNA, 19 nt, Artificial Sequence
  Description of Artificial Sequence: Synthetic oligonucleotide
  Sense strand starting at position 3277 of SEQ ID NO: 318349
cuacaaggauguugagaaa

SEQ ID NO: 555746 - RNA, 19 nt, Artificial Sequence
  Description of Artificial Sequence: Synthetic oligonucleotide
  Antisense strand to SEQ ID NO: 555745
uuucucaacauccuuguag

SEQ ID NO: 555747 - RNA, 19 nt, Artificial Sequence
  Description of Artificial Sequence: Synthetic oligonucleotide
  Sense strand starting at position 3332 of SEQ ID NO: 318349
agacaaauccggugucuuu

SEQ ID NO: 555748 - RNA, 19 nt, Artificial Sequence
  Description of Artificial Sequence: Synthetic oligonucleotide
  Antisense strand to SEQ ID NO: 555747
aaagacaccggauuugucu

SEQ ID NO: 555749 - RNA, 19 nt, Artificial Sequence
  Description of Artificial Sequence: Synthetic oligonucleotide
  Sense strand starting at position 3369 of SEQ ID NO: 318349
augucaggauuccgagcaa

SEQ ID NO: 555750 - RNA, 19 nt, Artificial Sequence
  Description of Artificial Sequence: Synthetic oligonucleotide
  Antisense strand to SEQ ID NO: 555749
uugcucggaauccugacau

SEQ ID NO: 555751 - RNA, 19 nt, Artificial Sequence
  Description of Artificial Sequence: Synthetic oligonucleotide
  Sense strand starting at position 3419 of SEQ ID NO: 318349
uuguaaguuucuucuggua

SEQ ID NO: 555752 - RNA, 19 nt, Artificial Sequence
  Description of Artificial Sequence: Synthetic oligonucleotide
  Antisense strand to SEQ ID NO: 555751
uaccagaagaaacuuacaa

SEQ ID NO: 555753 - RNA, 19 nt, Artificial Sequence
  Description of Artificial Sequence: Synthetic oligonucleotide
  Sense strand starting at position 3421 of SEQ ID NO: 318349
guaaguuucuucugguaau

SEQ ID NO: 555754 - RNA, 19 nt, Artificial Sequence
  Description of Artificial Sequence: Synthetic oligonucleotide
  Antisense strand to SEQ ID NO: 555753
auuaccagaagaaacuuac

SEQ ID NO: 555755 - RNA, 19 nt, Artificial Sequence
  Description of Artificial Sequence: Synthetic oligonucleotide
  Sense strand starting at position 3424 of SEQ ID NO: 318349
aguuucuucugguaauuau

SEQ ID NO: 555756 - RNA, 19 nt, Artificial Sequence
  Description of Artificial Sequence: Synthetic oligonucleotide
  Antisense strand to SEQ ID NO: 555755
auaauuaccagaagaaacu

SEQ ID NO: 555757 - RNA, 19 nt, Artificial Sequence
  Description of Artificial Sequence: Synthetic oligonucleotide
  Sense strand starting at position 2019 of SEQ ID NO: 318350
gagcuucuuuccucuggga

SEQ ID NO: 555758 - RNA, 19 nt, Artificial Sequence
  Description of Artificial Sequence: Synthetic oligonucleotide
  Antisense strand to SEQ ID NO: 555757
ucccagaggaaagaagcuc

SEQ ID NO: 555759 - RNA, 19 nt, Artificial Sequence
  Description of Artificial Sequence: Synthetic oligonucleotide
  Sense strand starting at position 2021 of SEQ ID NO: 318350
gcuucuuuccucugggaug

SEQ ID NO: 555760 - RNA, 19 nt, Artificial Sequence
  Description of Artificial Sequence: Synthetic oligonucleotide
  Antisense strand to SEQ ID NO: 555759
caucccagaggaaagaagc

SEQ ID NO: 555761 - RNA, 19 nt, Artificial Sequence
  Description of Artificial Sequence: Synthetic oligonucleotide
  Sense strand starting at position 2023 of SEQ ID NO: 318350
uucuuuccucugggauguu

SEQ ID NO: 555762 - RNA, 19 nt, Artificial Sequence
  Description of Artificial Sequence: Synthetic oligonucleotide
  Antisense strand to SEQ ID NO: 555761
aacaucccagaggaaagaa

SEQ ID NO: 555763 - RNA, 19 nt, Artificial Sequence
  Description of Artificial Sequence: Synthetic oligonucleotide
  Sense strand starting at position 2065 of SEQ ID NO: 318350
cuggacuucugugauuuga

SEQ ID NO: 555764 - RNA, 19 nt, Artificial Sequence
  Description of Artificial Sequence: Synthetic oligonucleotide
  Antisense strand to SEQ ID NO: 555763
ucaaaucacagaaguccag

SEQ ID NO: 555765 - RNA, 19 nt, Artificial Sequence
  Description of Artificial Sequence: Synthetic oligonucleotide
  Sense strand starting at position 2078 of SEQ ID NO: 318350
auuugagcuuaggacuuau

SEQ ID NO: 555766 - RNA, 19 nt, Artificial Sequence
  Description of Artificial Sequence: Synthetic oligonucleotide
  Antisense strand to SEQ ID NO: 555765
auaaguccuaagcucaaau

SEQ ID NO: 555767 - RNA, 19 nt, Artificial Sequence
  Description of Artificial Sequence: Synthetic oligonucleotide
  Sense strand starting at position 2225 of SEQ ID NO: 318350
cccagagguugucuuggaa

SEQ ID NO: 555768 - RNA, 19 nt, Artificial Sequence
  Description of Artificial Sequence: Synthetic oligonucleotide
  Antisense strand to SEQ ID NO: 555767
uuccaagacaaccucuggg

SEQ ID NO: 555769 - RNA, 19 nt, Artificial Sequence
  Description of Artificial Sequence: Synthetic oligonucleotide
  Sense strand starting at position 2276 of SEQ ID NO: 318350
gcgcaaccucuugaaucua

SEQ ID NO: 555770 - RNA, 19 nt, Artificial Sequence
  Description of Artificial Sequence: Synthetic oligonucleotide
  Antisense strand to SEQ ID NO: 555769
uagauucaagagguugcgc

SEQ ID NO: 555771 - RNA, 19 nt, Artificial Sequence
  Description of Artificial Sequence: Synthetic oligonucleotide
  Sense strand starting at position 2295 of SEQ ID NO: 318350
uguacccugucuuuaauuu

SEQ ID NO: 555772 - RNA, 19 nt, Artificial Sequence
  Description of Artificial Sequence: Synthetic oligonucleotide
  Antisense strand to SEQ ID NO: 555771
aaauuaaagacaggguaca

SEQ ID NO: 555773 - RNA, 19 nt, Artificial Sequence
  Description of Artificial Sequence: Synthetic oligonucleotide
  Sense strand starting at position 2361 of SEQ ID NO: 318350
ucuaguuugucaucaucag

SEQ ID NO: 555774 - RNA, 19 nt, Artificial Sequence
  Description of Artificial Sequence: Synthetic oligonucleotide
  Antisense strand to SEQ ID NO: 555773
cugaugaugacaaacuaga

SEQ ID NO: 555775 - RNA, 19 nt, Artificial Sequence
  Description of Artificial Sequence: Synthetic oligonucleotide
  Sense strand starting at position 2362 of SEQ ID NO: 318350
cuaguuugucaucaucaga

SEQ ID NO: 555776 - RNA, 19 nt, Artificial Sequence
  Description of Artificial Sequence: Synthetic oligonucleotide
  Antisense strand to SEQ ID NO: 555775
ucugaugaugacaaacuag

SEQ ID NO: 555777 - RNA, 19 nt, Artificial Sequence
  Description of Artificial Sequence: Synthetic oligonucleotide
  Sense strand starting at position 2365 of SEQ ID NO: 318350
guuugucaucaucagauaa

SEQ ID NO: 555778 - RNA, 19 nt, Artificial Sequence
  Description of Artificial Sequence: Synthetic oligonucleotide
  Antisense strand to SEQ ID NO: 555777
uuaucugaugaugacaaac

SEQ ID NO: 555779 - RNA, 19 nt, Artificial Sequence
  Description of Artificial Sequence: Synthetic oligonucleotide
  Sense strand starting at position 2504 of SEQ ID NO: 318350
gcaugacugcuguauccaa

SEQ ID NO: 555780 - RNA, 19 nt, Artificial Sequence
  Description of Artificial Sequence: Synthetic oligonucleotide
  Antisense strand to SEQ ID NO: 555779
uuggauacagcagucaugc

SEQ ID NO: 555781 - RNA, 19 nt, Artificial Sequence
  Description of Artificial Sequence: Synthetic oligonucleotide
  Sense strand starting at position 2515 of SEQ ID NO: 318350
guauccaaauaagugaauu

SEQ ID NO: 555782 - RNA, 19 nt, Artificial Sequence
  Description of Artificial Sequence: Synthetic oligonucleotide
  Antisense strand to SEQ ID NO: 555781
aauucacuuauuuggauac

SEQ ID NO: 555783 - RNA, 19 nt, Artificial Sequence
  Description of Artificial Sequence: Synthetic oligonucleotide
  Sense strand starting at position 2592 of SEQ ID NO: 318350
ggaauaagcucccuuaucu

SEQ ID NO: 555784 - RNA, 19 nt, Artificial Sequence
  Description of Artificial Sequence: Synthetic oligonucleotide
  Antisense strand to SEQ ID NO: 555783
agauaagggagcuuauucc

SEQ ID NO: 555785 - RNA, 19 nt, Artificial Sequence
  Description of Artificial Sequence: Synthetic oligonucleotide
  Sense strand starting at position 2742 of SEQ ID NO: 318350
uccaguuaaguaggacaaa

SEQ ID NO: 555786 - RNA, 19 nt, Artificial Sequence
  Description of Artificial Sequence: Synthetic oligonucleotide
  Antisense strand to SEQ ID NO: 555785
uuuguccuacuuaacugga

SEQ ID NO: 555787 - RNA, 19 nt, Artificial Sequence
  Description of Artificial Sequence: Synthetic oligonucleotide
  Sense strand starting at position 2752 of SEQ ID NO: 318350
uaggacaaagucugauauu

SEQ ID NO: 555788 - RNA, 19 nt, Artificial Sequence
  Description of Artificial Sequence: Synthetic oligonucleotide
  Antisense strand to SEQ ID NO: 555787
aauaucagacuuuguccua

SEQ ID NO: 555789 - RNA, 19 nt, Artificial Sequence
  Description of Artificial Sequence: Synthetic oligonucleotide
  Sense strand starting at position 2753 of SEQ ID NO: 318350
aggacaaagucugauauuu

SEQ ID NO: 555790 - RNA, 19 nt, Artificial Sequence
  Description of Artificial Sequence: Synthetic oligonucleotide
  Antisense strand to SEQ ID NO: 555789
aaauaucagacuuuguccu

SEQ ID NO: 555791 - RNA, 19 nt, Artificial Sequence
  Description of Artificial Sequence: Synthetic oligonucleotide
  Sense strand starting at position 2821 of SEQ ID NO: 318350
aguggaaucucauauaaug

SEQ ID NO: 555792 - RNA, 19 nt, Artificial Sequence
  Description of Artificial Sequence: Synthetic oligonucleotide
  Antisense strand to SEQ ID NO: 555791
cauuauaugagauuccacu

SEQ ID NO: 555793 - RNA, 19 nt, Artificial Sequence
  Description of Artificial Sequence: Synthetic oligonucleotide
  Sense strand starting at position 2850 of SEQ ID NO: 318350
uuaugaaaccagugcuucu

SEQ ID NO: 555794 - RNA, 19 nt, Artificial Sequence
  Description of Artificial Sequence: Synthetic oligonucleotide
  Antisense strand to SEQ ID NO: 555793
agaagcacugguuucauaa

SEQ ID NO: 555795 - RNA, 19 nt, Artificial Sequence
  Description of Artificial Sequence: Synthetic oligonucleotide
  Sense strand starting at position 3079 of SEQ ID NO: 318350
gcagcagaaucacuuaacu

SEQ ID NO: 555796 - RNA, 19 nt, Artificial Sequence
  Description of Artificial Sequence: Synthetic oligonucleotide
  Antisense strand to SEQ ID NO: 555795
aguuaagugauucugcugc

SEQ ID NO: 555797 - RNA, 19 nt, Artificial Sequence
  Description of Artificial Sequence: Synthetic oligonucleotide
  Sense strand starting at position 3235 of SEQ ID NO: 318350
acgaguuugacuugaccac

SEQ ID NO: 555798 - RNA, 19 nt, Artificial Sequence
  Description of Artificial Sequence: Synthetic oligonucleotide
  Antisense strand to SEQ ID NO: 555797
guggucaagucaaacucgu

SEQ ID NO: 555799 - RNA, 19 nt, Artificial Sequence
  Description of Artificial Sequence: Synthetic oligonucleotide
  Sense strand starting at position 3236 of SEQ ID NO: 318350
cgaguuugacuugaccacu

SEQ ID NO: 555800 - RNA, 19 nt, Artificial Sequence
  Description of Artificial Sequence: Synthetic oligonucleotide
  Antisense strand to SEQ ID NO: 555799
aguggucaagucaaacucg

SEQ ID NO: 555801 - RNA, 19 nt, Artificial Sequence
  Description of Artificial Sequence: Synthetic oligonucleotide
  Sense strand starting at position 3242 of SEQ ID NO: 318350
ugacuugaccacugguaaa

SEQ ID NO: 555802 - RNA, 19 nt, Artificial Sequence
  Description of Artificial Sequence: Synthetic oligonucleotide
  Antisense strand to SEQ ID NO: 555801
uuuaccaguggucaaguca

SEQ ID NO: 555803 - RNA, 19 nt, Artificial Sequence
  Description of Artificial Sequence: Synthetic oligonucleotide
  Sense strand starting at position 3245 of SEQ ID NO: 318350
cuugaccacugguaaauau

SEQ ID NO: 555804 - RNA, 19 nt, Artificial Sequence
  Description of Artificial Sequence: Synthetic oligonucleotide
  Antisense strand to SEQ ID NO: 555803
auauuuaccaguggucaag

SEQ ID NO: 555805 - RNA, 19 nt, Artificial Sequence
  Description of Artificial Sequence: Synthetic oligonucleotide
  Sense strand starting at position 3300 of SEQ ID NO: 318350
ggaacuuauucuguaguuc

SEQ ID NO: 555806 - RNA, 19 nt, Artificial Sequence
  Description of Artificial Sequence: Synthetic oligonucleotide
  Antisense strand to SEQ ID NO: 555805
gaacuacagaauaaguucc

SEQ ID NO: 555807 - RNA, 19 nt, Artificial Sequence
  Description of Artificial Sequence: Synthetic oligonucleotide
  Sense strand starting at position 3414 of SEQ ID NO: 318350
agugcucacccauacucau

SEQ ID NO: 555808 - RNA, 19 nt, Artificial Sequence
  Description of Artificial Sequence: Synthetic oligonucleotide
  Antisense strand to SEQ ID NO: 555807
augaguaugggugagcacu

SEQ ID NO: 555809 - RNA, 19 nt, Artificial Sequence
  Description of Artificial Sequence: Synthetic oligonucleotide
  Sense strand starting at position 3439 of SEQ ID NO: 318350
uucgaaacagccuauuauc

SEQ ID NO: 555810 - RNA, 19 nt, Artificial Sequence
  Description of Artificial Sequence: Synthetic oligonucleotide
  Antisense strand to SEQ ID NO: 555809
gauaauaggcuguuucgaa

SEQ ID NO: 555811 - RNA, 19 nt, Artificial Sequence
  Description of Artificial Sequence: Synthetic oligonucleotide
  Sense strand starting at position 3553 of SEQ ID NO: 318350
guggauucuugcccauucu

SEQ ID NO: 555812 - RNA, 19 nt, Artificial Sequence
  Description of Artificial Sequence: Synthetic oligonucleotide
  Antisense strand to SEQ ID NO: 555811
agaaugggcaagaauccac

SEQ ID NO: 555813 - RNA, 19 nt, Artificial Sequence
  Description of Artificial Sequence: Synthetic oligonucleotide
  Sense strand starting at position 3554 of SEQ ID NO: 318350
uggauucuugcccauucuu

SEQ ID NO: 555814 - RNA, 19 nt, Artificial Sequence
  Description of Artificial Sequence: Synthetic oligonucleotide
  Antisense strand to SEQ ID NO: 555813
aagaaugggcaagaaucca

SEQ ID NO: 555815 - RNA, 19 nt, Artificial Sequence
  Description of Artificial Sequence: Synthetic oligonucleotide
  Sense strand starting at position 3623 of SEQ ID NO: 318350
uuccauuaccuguacaagu

SEQ ID NO: 555816 - RNA, 19 nt, Artificial Sequence
  Description of Artificial Sequence: Synthetic oligonucleotide
  Antisense strand to SEQ ID NO: 555815
acuuguacagguaauggaa

SEQ ID NO: 555817 - RNA, 19 nt, Artificial Sequence
  Description of Artificial Sequence: Synthetic oligonucleotide
  Sense strand starting at position 3633 of SEQ ID NO: 318350
uguacaaguagguggaauu

SEQ ID NO: 555818 - RNA, 19 nt, Artificial Sequence
  Description of Artificial Sequence: Synthetic oligonucleotide
  Antisense strand to SEQ ID NO: 555817
aauuccaccuacuuguaca

SEQ ID NO: 555819 - RNA, 19 nt, Artificial Sequence
  Description of Artificial Sequence: Synthetic oligonucleotide
  Sense strand starting at position 3643 of SEQ ID NO: 318350
gguggaauuguauggguuc

SEQ ID NO: 555820 - RNA, 19 nt, Artificial Sequence
  Description of Artificial Sequence: Synthetic oligonucleotide
  Antisense strand to SEQ ID NO: 555819
gaacccauacaauuccacc

SEQ ID NO: 555821 - RNA, 19 nt, Artificial Sequence
  Description of Artificial Sequence: Synthetic oligonucleotide
  Sense strand starting at position 3645 of SEQ ID NO: 318350
uggaauuguauggguucca

SEQ ID NO: 555822 - RNA, 19 nt, Artificial Sequence
  Description of Artificial Sequence: Synthetic oligonucleotide
  Antisense strand to SEQ ID NO: 555821
uggaacccauacaauucca

SEQ ID NO: 555823 - RNA, 19 nt, Artificial Sequence
  Description of Artificial Sequence: Synthetic oligonucleotide
  Sense strand starting at position 3646 of SEQ ID NO: 318350
ggaauuguauggguuccau

SEQ ID NO: 555824 - RNA, 19 nt, Artificial Sequence
  Description of Artificial Sequence: Synthetic oligonucleotide
  Antisense strand to SEQ ID NO: 555823
auggaacccauacaauucc

SEQ ID NO: 555825 - RNA, 19 nt, Artificial Sequence
  Description of Artificial Sequence: Synthetic oligonucleotide
  Sense strand starting at position 3660 of SEQ ID NO: 318350
uccauacucucaguguauu

SEQ ID NO: 555826 - RNA, 19 nt, Artificial Sequence
  Description of Artificial Sequence: Synthetic oligonucleotide
  Antisense strand to SEQ ID NO: 555825
aauacacugagaguaugga

SEQ ID NO: 555827 - RNA, 19 nt, Artificial Sequence
  Description of Artificial Sequence: Synthetic oligonucleotide
  Sense strand starting at position 3661 of SEQ ID NO: 318350
ccauacucucaguguauuu

SEQ ID NO: 555828 - RNA, 19 nt, Artificial Sequence
  Description of Artificial Sequence: Synthetic oligonucleotide
  Antisense strand to SEQ ID NO: 555827
aaauacacugagaguaugg

SEQ ID NO: 555829 - RNA, 19 nt, Artificial Sequence
  Description of Artificial Sequence: Synthetic oligonucleotide
  Sense strand starting at position 3720 of SEQ ID NO: 318350
agaaauuaucuuugagcau

SEQ ID NO: 555830 - RNA, 19 nt, Artificial Sequence
  Description of Artificial Sequence: Synthetic oligonucleotide
  Antisense strand to SEQ ID NO: 555829
augcucaaagauaauuucu

SEQ ID NO: 555831 - RNA, 19 nt, Artificial Sequence
  Description of Artificial Sequence: Synthetic oligonucleotide
  Sense strand starting at position 3782 of SEQ ID NO: 318350
cagggaaagugauacuaau

SEQ ID NO: 555832 - RNA, 19 nt, Artificial Sequence
  Description of Artificial Sequence: Synthetic oligonucleotide
  Antisense strand to SEQ ID NO: 555831
auuaguaucacuuucccug

SEQ ID NO: 555833 - RNA, 19 nt, Artificial Sequence
  Description of Artificial Sequence: Synthetic oligonucleotide
  Sense strand starting at position 3871 of SEQ ID NO: 318350
augcuauguugcccaagua

SEQ ID NO: 555834 - RNA, 19 nt, Artificial Sequence
  Description of Artificial Sequence: Synthetic oligonucleotide
  Antisense strand to SEQ ID NO: 555833
uacuugggcaacauagcau

SEQ ID NO: 555835 - RNA, 19 nt, Artificial Sequence
  Description of Artificial Sequence: Synthetic oligonucleotide
  Sense strand starting at position 3945 of SEQ ID NO: 318350
ugugauguauuuccauguu

SEQ ID NO: 555836 - RNA, 19 nt, Artificial Sequence
  Description of Artificial Sequence: Synthetic oligonucleotide
  Antisense strand to SEQ ID NO: 555835
aacauggaaauacaucaca

SEQ ID NO: 555837 - RNA, 19 nt, Artificial Sequence
  Description of Artificial Sequence: Synthetic oligonucleotide
  Sense strand starting at position 2130 of SEQ ID NO: 318351
guugguuugugcaggaagu

SEQ ID NO: 555838 - RNA, 19 nt, Artificial Sequence
  Description of Artificial Sequence: Synthetic oligonucleotide
  Antisense strand to SEQ ID NO: 555837
acuuccugcacaaaccaac

SEQ ID NO: 555839 - RNA, 19 nt, Artificial Sequence
  Description of Artificial Sequence: Synthetic oligonucleotide
  Sense strand starting at position 2131 of SEQ ID NO: 318351
uugguuugugcaggaaguu

SEQ ID NO: 555840 - RNA, 19 nt, Artificial Sequence
  Description of Artificial Sequence: Synthetic oligonucleotide
  Antisense strand to SEQ ID NO: 555839
aacuuccugcacaaaccaa

SEQ ID NO: 555841 - RNA, 19 nt, Artificial Sequence
  Description of Artificial Sequence: Synthetic oligonucleotide
  Sense strand starting at position 2227 of SEQ ID NO: 318351
gcacuaauggcuugucaau

SEQ ID NO: 555842 - RNA, 19 nt, Artificial Sequence
  Description of Artificial Sequence: Synthetic oligonucleotide
  Antisense strand to SEQ ID NO: 555841
auugacaagccauuagugc

SEQ ID NO: 555843 - RNA, 19 nt, Artificial Sequence
  Description of Artificial Sequence: Synthetic oligonucleotide
  Sense strand starting at position 2229 of SEQ ID NO: 318351
acuaauggcuugucaauau

SEQ ID NO: 555844 - RNA, 19 nt, Artificial Sequence
  Description of Artificial Sequence: Synthetic oligonucleotide
  Antisense strand to SEQ ID NO: 555843
auauugacaagccauuagu

SEQ ID NO: 555845 - RNA, 19 nt, Artificial Sequence
  Description of Artificial Sequence: Synthetic oligonucleotide
  Sense strand starting at position 2236 of SEQ ID NO: 318351
gcuugucaauauuugcuaa

SEQ ID NO: 555846 - RNA, 19 nt, Artificial Sequence
  Description of Artificial Sequence: Synthetic oligonucleotide
  Antisense strand to SEQ ID NO: 555845
uuagcaaauauugacaagc

SEQ ID NO: 555847 - RNA, 19 nt, Artificial Sequence
  Description of Artificial Sequence: Synthetic oligonucleotide
  Sense strand starting at position 2240 of SEQ ID NO: 318351
gucaauauuugcuaagaac

SEQ ID NO: 555848 - RNA, 19 nt, Artificial Sequence
  Description of Artificial Sequence: Synthetic oligonucleotide
  Antisense strand to SEQ ID NO: 555847
guucuuagcaaauauugac

SEQ ID NO: 555849 - RNA, 19 nt, Artificial Sequence
  Description of Artificial Sequence: Synthetic oligonucleotide
  Sense strand starting at position 2371 of SEQ ID NO: 318351
ucaucucugcuuuagauga

SEQ ID NO: 555850 - RNA, 19 nt, Artificial Sequence
  Description of Artificial Sequence: Synthetic oligonucleotide
  Antisense strand to SEQ ID NO: 555849
ucaucuaaagcagagauga

SEQ ID NO: 555851 - RNA, 19 nt, Artificial Sequence
  Description of Artificial Sequence: Synthetic oligonucleotide
  Sense strand starting at position 2409 of SEQ ID NO: 318351
ggaaaugaguguuaaaguu

SEQ ID NO: 555852 - RNA, 19 nt, Artificial Sequence
  Description of Artificial Sequence: Synthetic oligonucleotide
  Antisense strand to SEQ ID NO: 555851
aacuuuaacacucauuucc

SEQ ID NO: 555853 - RNA, 19 nt, Artificial Sequence
  Description of Artificial Sequence: Synthetic oligonucleotide
  Sense strand starting at position 2417 of SEQ ID NO: 318351
guguuaaaguuucuuaggu

SEQ ID NO: 555854 - RNA, 19 nt, Artificial Sequence
  Description of Artificial Sequence: Synthetic oligonucleotide
  Antisense strand to SEQ ID NO: 555853
accuaagaaacuuuaacac

SEQ ID NO: 555855 - RNA, 19 nt, Artificial Sequence
  Description of Artificial Sequence: Synthetic oligonucleotide
  Sense strand starting at position 2433 of SEQ ID NO: 318351
gguauccuuccggagauau

SEQ ID NO: 555856 - RNA, 19 nt, Artificial Sequence
  Description of Artificial Sequence: Synthetic oligonucleotide
  Antisense strand to SEQ ID NO: 555855
auaucuccggaaggauacc

SEQ ID NO: 555857 - RNA, 19 nt, Artificial Sequence
  Description of Artificial Sequence: Synthetic oligonucleotide
  Sense strand starting at position 2435 of SEQ ID NO: 318351
uauccuuccggagauaugu

SEQ ID NO: 555858 - RNA, 19 nt, Artificial Sequence
  Description of Artificial Sequence: Synthetic oligonucleotide
  Antisense strand to SEQ ID NO: 555857
acauaucuccggaaggaua

SEQ ID NO: 555859 - RNA, 19 nt, Artificial Sequence
  Description of Artificial Sequence: Synthetic oligonucleotide
  Sense strand starting at position 2444 of SEQ ID NO: 318351
ggagauaugucuuguauag

SEQ ID NO: 555860 - RNA, 19 nt, Artificial Sequence
  Description of Artificial Sequence: Synthetic oligonucleotide
  Antisense strand to SEQ ID NO: 555859
cuauacaagacauaucucc

SEQ ID NO: 555861 - RNA, 19 nt, Artificial Sequence
  Description of Artificial Sequence: Synthetic oligonucleotide
  Sense strand starting at position 2600 of SEQ ID NO: 318351
uucuuauaguuaucuagug

SEQ ID NO: 555862 - RNA, 19 nt, Artificial Sequence
  Description of Artificial Sequence: Synthetic oligonucleotide
  Antisense strand to SEQ ID NO: 555861
cacuagauaacuauaagaa

SEQ ID NO: 555863 - RNA, 19 nt, Artificial Sequence
  Description of Artificial Sequence: Synthetic oligonucleotide
  Sense strand starting at position 2608 of SEQ ID NO: 318351
guuaucuaguggcccauaa

SEQ ID NO: 555864 - RNA, 19 nt, Artificial Sequence
  Description of Artificial Sequence: Synthetic oligonucleotide
  Antisense strand to SEQ ID NO: 555863
uuaugggccacuagauaac

SEQ ID NO: 555865 - RNA, 19 nt, Artificial Sequence
  Description of Artificial Sequence: Synthetic oligonucleotide
  Sense strand starting at position 2612 of SEQ ID NO: 318351
ucuaguggcccauaauaua

SEQ ID NO: 555866 - RNA, 19 nt, Artificial Sequence
  Description of Artificial Sequence: Synthetic oligonucleotide
  Antisense strand to SEQ ID NO: 555865
uauauuaugggccacuaga

SEQ ID NO: 555867 - RNA, 19 nt, Artificial Sequence
  Description of Artificial Sequence: Synthetic oligonucleotide
  Sense strand starting at position 2631 of SEQ ID NO: 318351
guuaucuaguaguccguaa

SEQ ID NO: 555868 - RNA, 19 nt, Artificial Sequence
  Description of Artificial Sequence: Synthetic oligonucleotide
  Antisense strand to SEQ ID NO: 555867
uuacggacuacuagauaac

SEQ ID NO: 555869 - RNA, 19 nt, Artificial Sequence
  Description of Artificial Sequence: Synthetic oligonucleotide
  Sense strand starting at position 2633 of SEQ ID NO: 318351
uaucuaguaguccguaaua

SEQ ID NO: 555870 - RNA, 19 nt, Artificial Sequence
  Description of Artificial Sequence: Synthetic oligonucleotide
  Antisense strand to SEQ ID NO: 555869
uauuacggacuacuagaua

SEQ ID NO: 555871 - RNA, 19 nt, Artificial Sequence
  Description of Artificial Sequence: Synthetic oligonucleotide
  Sense strand starting at position 2635 of SEQ ID NO: 318351
ucuaguaguccguaauaug

SEQ ID NO: 555872 - RNA, 19 nt, Artificial Sequence
  Description of Artificial Sequence: Synthetic oligonucleotide
  Antisense strand to SEQ ID NO: 555871
cauauuacggacuacuaga

SEQ ID NO: 555873 - RNA, 19 nt, Artificial Sequence
  Description of Artificial Sequence: Synthetic oligonucleotide
  Sense strand starting at position 2638 of SEQ ID NO: 318351
aguaguccguaauaugaau

SEQ ID NO: 555874 - RNA, 19 nt, Artificial Sequence
  Description of Artificial Sequence: Synthetic oligonucleotide
  Antisense strand to SEQ ID NO: 555873
auucauauuacggacuacu

SEQ ID NO: 555875 - RNA, 19 nt, Artificial Sequence
  Description of Artificial Sequence: Synthetic oligonucleotide
  Sense strand starting at position 2830 of SEQ ID NO: 318351
ccugaauaugcuugacaca

SEQ ID NO: 555876 - RNA, 19 nt, Artificial Sequence
  Description of Artificial Sequence: Synthetic oligonucleotide
  Antisense strand to SEQ ID NO: 555875
ugugucaagcauauucagg

SEQ ID NO: 555877 - RNA, 19 nt, Artificial Sequence
  Description of Artificial Sequence: Synthetic oligonucleotide
  Sense strand starting at position 2833 of SEQ ID NO: 318351
gaauaugcuugacacaguu

SEQ ID NO: 555878 - RNA, 19 nt, Artificial Sequence
  Description of Artificial Sequence: Synthetic oligonucleotide
  Antisense strand to SEQ ID NO: 555877
aacugugucaagcauauuc

SEQ ID NO: 555879 - RNA, 19 nt, Artificial Sequence
  Description of Artificial Sequence: Synthetic oligonucleotide
  Sense strand starting at position 2916 of SEQ ID NO: 318351
agauguaaguugucucuca

SEQ ID NO: 555880 - RNA, 19 nt, Artificial Sequence
  Description of Artificial Sequence: Synthetic oligonucleotide
  Antisense strand to SEQ ID NO: 555879
ugagagacaacuuacaucu

SEQ ID NO: 555881 - RNA, 19 nt, Artificial Sequence
  Description of Artificial Sequence: Synthetic oligonucleotide
  Sense strand starting at position 2917 of SEQ ID NO: 318351
gauguaaguugucucucaa

SEQ ID NO: 555882 - RNA, 19 nt, Artificial Sequence
  Description of Artificial Sequence: Synthetic oligonucleotide
  Antisense strand to SEQ ID NO: 555881
uugagagacaacuuacauc

SEQ ID NO: 555883 - RNA, 19 nt, Artificial Sequence
  Description of Artificial Sequence: Synthetic oligonucleotide
  Sense strand starting at position 2973 of SEQ ID NO: 318351
agguaacugcaucauauca

SEQ ID NO: 555884 - RNA, 19 nt, Artificial Sequence
  Description of Artificial Sequence: Synthetic oligonucleotide
  Antisense strand to SEQ ID NO: 555883
ugauaugaugcaguuaccu

SEQ ID NO: 555885 - RNA, 19 nt, Artificial Sequence
  Description of Artificial Sequence: Synthetic oligonucleotide
  Sense strand starting at position 2995 of SEQ ID NO: 318351
uccagcuuacucuauguau

SEQ ID NO: 555886 - RNA, 19 nt, Artificial Sequence
  Description of Artificial Sequence: Synthetic oligonucleotide
  Antisense strand to SEQ ID NO: 555885
auacauagaguaagcugga

SEQ ID NO: 555887 - RNA, 19 nt, Artificial Sequence
  Description of Artificial Sequence: Synthetic oligonucleotide
  Sense strand starting at position 3060 of SEQ ID NO: 318351
ucuccuuuguaagucaaau

SEQ ID NO: 555888 - RNA, 19 nt, Artificial Sequence
  Description of Artificial Sequence: Synthetic oligonucleotide
  Antisense strand to SEQ ID NO: 555887
auuugacuuacaaaggaga

SEQ ID NO: 555889 - RNA, 19 nt, Artificial Sequence
  Description of Artificial Sequence: Synthetic oligonucleotide
  Sense strand starting at position 3070 of SEQ ID NO: 318351
aagucaaauugaggcauau

SEQ ID NO: 555890 - RNA, 19 nt, Artificial Sequence
  Description of Artificial Sequence: Synthetic oligonucleotide
  Antisense strand to SEQ ID NO: 555889
auaugccucaauuugacuu

SEQ ID NO: 555891 - RNA, 19 nt, Artificial Sequence
  Description of Artificial Sequence: Synthetic oligonucleotide
  Sense strand starting at position 3081 of SEQ ID NO: 318351
aggcauauuccacagucua

SEQ ID NO: 555892 - RNA, 19 nt, Artificial Sequence
  Description of Artificial Sequence: Synthetic oligonucleotide
  Antisense strand to SEQ ID NO: 555891
uagacuguggaauaugccu

SEQ ID NO: 555893 - RNA, 19 nt, Artificial Sequence
  Description of Artificial Sequence: Synthetic oligonucleotide
  Sense strand starting at position 3269 of SEQ ID NO: 318351
acagaaauaucugaaagca

SEQ ID NO: 555894 - RNA, 19 nt, Artificial Sequence
  Description of Artificial Sequence: Synthetic oligonucleotide
  Antisense strand to SEQ ID NO: 555893
ugcuuucagauauuucugu

SEQ ID NO: 555895 - RNA, 19 nt, Artificial Sequence
  Description of Artificial Sequence: Synthetic oligonucleotide
  Sense strand starting at position 3314 of SEQ ID NO: 318351
cuuacuaagcagcguaaau

SEQ ID NO: 555896 - RNA, 19 nt, Artificial Sequence
  Description of Artificial Sequence: Synthetic oligonucleotide
  Antisense strand to SEQ ID NO: 555895
auuuacgcugcuuaguaag

SEQ ID NO: 555897 - RNA, 19 nt, Artificial Sequence
  Description of Artificial Sequence: Synthetic oligonucleotide
  Sense strand starting at position 3367 of SEQ ID NO: 318351
gaaagaggcucacaugaug

SEQ ID NO: 555898 - RNA, 19 nt, Artificial Sequence
  Description of Artificial Sequence: Synthetic oligonucleotide
  Antisense strand to SEQ ID NO: 555897
caucaugugagccucuuuc

SEQ ID NO: 555899 - RNA, 19 nt, Artificial Sequence
  Description of Artificial Sequence: Synthetic oligonucleotide
  Sense strand starting at position 3427 of SEQ ID NO: 318351
ucaagaaagucucaauagu

SEQ ID NO: 555900 - RNA, 19 nt, Artificial Sequence
  Description of Artificial Sequence: Synthetic oligonucleotide
  Antisense strand to SEQ ID NO: 555899
acuauugagacuuucuuga

SEQ ID NO: 555901 - RNA, 19 nt, Artificial Sequence
  Description of Artificial Sequence: Synthetic oligonucleotide
  Sense strand starting at position 3434 of SEQ ID NO: 318351
agucucaauagugauguca

SEQ ID NO: 555902 - RNA, 19 nt, Artificial Sequence
  Description of Artificial Sequence: Synthetic oligonucleotide
  Antisense strand to SEQ ID NO: 555901
ugacaucacuauugagacu

SEQ ID NO: 555903 - RNA, 19 nt, Artificial Sequence
  Description of Artificial Sequence: Synthetic oligonucleotide
  Sense strand starting at position 3442 of SEQ ID NO: 318351
uagugaugucaugauaagc

SEQ ID NO: 555904 - RNA, 19 nt, Artificial Sequence
  Description of Artificial Sequence: Synthetic oligonucleotide
  Antisense strand to SEQ ID NO: 555903
gcuuaucaugacaucacua

SEQ ID NO: 555905 - RNA, 19 nt, Artificial Sequence
  Description of Artificial Sequence: Synthetic oligonucleotide
  Sense strand starting at position 3505 of SEQ ID NO: 318351
gacugaaauuagcuuggaa

SEQ ID NO: 555906 - RNA, 19 nt, Artificial Sequence
  Description of Artificial Sequence: Synthetic oligonucleotide
  Antisense strand to SEQ ID NO: 555905
uuccaagcuaauuucaguc

SEQ ID NO: 555907 - RNA, 19 nt, Artificial Sequence
  Description of Artificial Sequence: Synthetic oligonucleotide
  Sense strand starting at position 3507 of SEQ ID NO: 318351
cugaaauuagcuuggaaau

SEQ ID NO: 555908 - RNA, 19 nt, Artificial Sequence
  Description of Artificial Sequence: Synthetic oligonucleotide
  Antisense strand to SEQ ID NO: 555907
auuuccaagcuaauuucag

SEQ ID NO: 555909 - RNA, 19 nt, Artificial Sequence
  Description of Artificial Sequence: Synthetic oligonucleotide
  Sense strand starting at position 3508 of SEQ ID NO: 318351
ugaaauuagcuuggaaaua

SEQ ID NO: 555910 - RNA, 19 nt, Artificial Sequence
  Description of Artificial Sequence: Synthetic oligonucleotide
  Antisense strand to SEQ ID NO: 555909
uauuuccaagcuaauuuca

SEQ ID NO: 555911 - RNA, 19 nt, Artificial Sequence
  Description of Artificial Sequence: Synthetic oligonucleotide
  Sense strand starting at position 3528 of SEQ ID NO: 318351
uucucauaaucacaggagu

SEQ ID NO: 555912 - RNA, 19 nt, Artificial Sequence
  Description of Artificial Sequence: Synthetic oligonucleotide
  Antisense strand to SEQ ID NO: 555911
acuccugugauuaugagaa

SEQ ID NO: 555913 - RNA, 19 nt, Artificial Sequence
  Description of Artificial Sequence: Synthetic oligonucleotide
  Sense strand starting at position 3689 of SEQ ID NO: 318351
aauugacguugccuguuau

SEQ ID NO: 555914 - RNA, 19 nt, Artificial Sequence
  Description of Artificial Sequence: Synthetic oligonucleotide
  Antisense strand to SEQ ID NO: 555913
auaacaggcaacgucaauu

SEQ ID NO: 555915 - RNA, 19 nt, Artificial Sequence
  Description of Artificial Sequence: Synthetic oligonucleotide
  Sense strand starting at position 3690 of SEQ ID NO: 318351
auugacguugccuguuaua

SEQ ID NO: 555916 - RNA, 19 nt, Artificial Sequence
  Description of Artificial Sequence: Synthetic oligonucleotide
  Antisense strand to SEQ ID NO: 555915
uauaacaggcaacgucaau

SEQ ID NO: 555917 - RNA, 19 nt, Artificial Sequence
  Description of Artificial Sequence: Synthetic oligonucleotide
  Sense strand starting at position 2011 of SEQ ID NO: 318352
ugcgccuuugccuuucuaa

SEQ ID NO: 555918 - RNA, 19 nt, Artificial Sequence
  Description of Artificial Sequence: Synthetic oligonucleotide
  Antisense strand to SEQ ID NO: 555917
uuagaaaggcaaaggcgca

SEQ ID NO: 555919 - RNA, 19 nt, Artificial Sequence
  Description of Artificial Sequence: Synthetic oligonucleotide
  Sense strand starting at position 2012 of SEQ ID NO: 318352
gcgccuuugccuuucuaaa

SEQ ID NO: 555920 - RNA, 19 nt, Artificial Sequence
  Description of Artificial Sequence: Synthetic oligonucleotide
  Antisense strand to SEQ ID NO: 555919
uuuagaaaggcaaaggcgc

SEQ ID NO: 555921 - RNA, 19 nt, Artificial Sequence
  Description of Artificial Sequence: Synthetic oligonucleotide
  Sense strand starting at position 2022 of SEQ ID NO: 318352
cuuucuaaauccgaggaga

SEQ ID NO: 555922 - RNA, 19 nt, Artificial Sequence
  Description of Artificial Sequence: Synthetic oligonucleotide
  Antisense strand to SEQ ID NO: 555921
ucuccucggauuuagaaag

SEQ ID NO: 555923 - RNA, 19 nt, Artificial Sequence
  Description of Artificial Sequence: Synthetic oligonucleotide
  Sense strand starting at position 2059 of SEQ ID NO: 318352
ccaagaguucuccgagcag

SEQ ID NO: 555924 - RNA, 19 nt, Artificial Sequence
  Description of Artificial Sequence: Synthetic oligonucleotide
  Antisense strand to SEQ ID NO: 555923
cugcucggagaacucuugg

SEQ ID NO: 555925 - RNA, 19 nt, Artificial Sequence
  Description of Artificial Sequence: Synthetic oligonucleotide
  Sense strand starting at position 2101 of SEQ ID NO: 318352
gugcuuggguucucuaaug

SEQ ID NO: 555926 - RNA, 19 nt, Artificial Sequence
  Description of Artificial Sequence: Synthetic oligonucleotide
  Antisense strand to SEQ ID NO: 555925
cauuagagaacccaagcac

SEQ ID NO: 555927 - RNA, 19 nt, Artificial Sequence
  Description of Artificial Sequence: Synthetic oligonucleotide
  Sense strand starting at position 2244 of SEQ ID NO: 318352
ugcaguaauggugacuaaa

SEQ ID NO: 555928 - RNA, 19 nt, Artificial Sequence
  Description of Artificial Sequence: Synthetic oligonucleotide
  Antisense strand to SEQ ID NO: 555927
uuuagucaccauuacugca

SEQ ID NO: 555929 - RNA, 19 nt, Artificial Sequence
  Description of Artificial Sequence: Synthetic oligonucleotide
  Sense strand starting at position 2246 of SEQ ID NO: 318352
caguaauggugacuaaauc

SEQ ID NO: 555930 - RNA, 19 nt, Artificial Sequence
  Description of Artificial Sequence: Synthetic oligonucleotide
  Antisense strand to SEQ ID NO: 555929
gauuuagucaccauuacug

SEQ ID NO: 555931 - RNA, 19 nt, Artificial Sequence
  Description of Artificial Sequence: Synthetic oligonucleotide
  Sense strand starting at position 2254 of SEQ ID NO: 318352
gugacuaaaucagcuccaa

SEQ ID NO: 555932 - RNA, 19 nt, Artificial Sequence
  Description of Artificial Sequence: Synthetic oligonucleotide
  Antisense strand to SEQ ID NO: 555931
uuggagcugauuuagucac

SEQ ID NO: 555933 - RNA, 19 nt, Artificial Sequence
  Description of Artificial Sequence: Synthetic oligonucleotide
  Sense strand starting at position 2313 of SEQ ID NO: 318352
agugauacuuucuucccau

SEQ ID NO: 555934 - RNA, 19 nt, Artificial Sequence
  Description of Artificial Sequence: Synthetic oligonucleotide
  Antisense strand to SEQ ID NO: 555933
augggaagaaaguaucacu

SEQ ID NO: 555935 - RNA, 19 nt, Artificial Sequence
  Description of Artificial Sequence: Synthetic oligonucleotide
  Sense strand starting at position 2314 of SEQ ID NO: 318352
gugauacuuucuucccauu

SEQ ID NO: 555936 - RNA, 19 nt, Artificial Sequence
  Description of Artificial Sequence: Synthetic oligonucleotide
  Antisense strand to SEQ ID NO: 555935
aaugggaagaaaguaucac

SEQ ID NO: 555937 - RNA, 19 nt, Artificial Sequence
  Description of Artificial Sequence: Synthetic oligonucleotide
  Sense strand starting at position 2368 of SEQ ID NO: 318352
cuauaucuuuagucuguua

SEQ ID NO: 555938 - RNA, 19 nt, Artificial Sequence
  Description of Artificial Sequence: Synthetic oligonucleotide
  Antisense strand to SEQ ID NO: 555937
uaacagacuaaagauauag

SEQ ID NO: 555939 - RNA, 19 nt, Artificial Sequence
  Description of Artificial Sequence: Synthetic oligonucleotide
  Sense strand starting at position 2429 of SEQ ID NO: 318352
uuacuugucaaagggcaga

SEQ ID NO: 555940 - RNA, 19 nt, Artificial Sequence
  Description of Artificial Sequence: Synthetic oligonucleotide
  Antisense strand to SEQ ID NO: 555939
ucugcccuuugacaaguaa

SEQ ID NO: 555941 - RNA, 19 nt, Artificial Sequence
  Description of Artificial Sequence: Synthetic oligonucleotide
  Sense strand starting at position 2456 of SEQ ID NO: 318352
ugcucaaucccgucacguu

SEQ ID NO: 555942 - RNA, 19 nt, Artificial Sequence
  Description of Artificial Sequence: Synthetic oligonucleotide
  Antisense strand to SEQ ID NO: 555941
aacgugacgggauugagca

SEQ ID NO: 555943 - RNA, 19 nt, Artificial Sequence
  Description of Artificial Sequence: Synthetic oligonucleotide
  Sense strand starting at position 2515 of SEQ ID NO: 318352
cucugcuuacucuaguaga

SEQ ID NO: 555944 - RNA, 19 nt, Artificial Sequence
  Description of Artificial Sequence: Synthetic oligonucleotide
  Antisense strand to SEQ ID NO: 555943
ucuacuagaguaagcagag

SEQ ID NO: 555945 - RNA, 19 nt, Artificial Sequence
  Description of Artificial Sequence: Synthetic oligonucleotide
  Sense strand starting at position 2605 of SEQ ID NO: 318352
guaguauaaagaggcuuga

SEQ ID NO: 555946 - RNA, 19 nt, Artificial Sequence
  Description of Artificial Sequence: Synthetic oligonucleotide
  Antisense strand to SEQ ID NO: 555945
ucaagccucuuuauacuac

SEQ ID NO: 555947 - RNA, 19 nt, Artificial Sequence
  Description of Artificial Sequence: Synthetic oligonucleotide
  Sense strand starting at position 2928 of SEQ ID NO: 318352
gcuagaacaccuggcuuua

SEQ ID NO: 555948 - RNA, 19 nt, Artificial Sequence
  Description of Artificial Sequence: Synthetic oligonucleotide
  Antisense strand to SEQ ID NO: 555947
uaaagccagguguucuagc

SEQ ID NO: 555949 - RNA, 19 nt, Artificial Sequence
  Description of Artificial Sequence: Synthetic oligonucleotide
  Sense strand starting at position 3065 of SEQ ID NO: 318352
auguacuguuucuucucaa

SEQ ID NO: 555950 - RNA, 19 nt, Artificial Sequence
  Description of Artificial Sequence: Synthetic oligonucleotide
  Antisense strand to SEQ ID NO: 555949
uugagaagaaacaguacau

SEQ ID NO: 555951 - RNA, 19 nt, Artificial Sequence
  Description of Artificial Sequence: Synthetic oligonucleotide
  Sense strand starting at position 3066 of SEQ ID NO: 318352
uguacuguuucuucucaag

SEQ ID NO: 555952 - RNA, 19 nt, Artificial Sequence
  Description of Artificial Sequence: Synthetic oligonucleotide
  Antisense strand to SEQ ID NO: 555951
cuugagaagaaacaguaca

SEQ ID NO: 555953 - RNA, 19 nt, Artificial Sequence
  Description of Artificial Sequence: Synthetic oligonucleotide
  Sense strand starting at position 3090 of SEQ ID NO: 318352
uaacaaugaugcguuauua

SEQ ID NO: 555954 - RNA, 19 nt, Artificial Sequence
  Description of Artificial Sequence: Synthetic oligonucleotide
  Antisense strand to SEQ ID NO: 555953
uaauaacgcaucauuguua

SEQ ID NO: 555955 - RNA, 19 nt, Artificial Sequence
  Description of Artificial Sequence: Synthetic oligonucleotide
  Sense strand starting at position 3094 of SEQ ID NO: 318352
aaugaugcguuauuaggau

SEQ ID NO: 555956 - RNA, 19 nt, Artificial Sequence
  Description of Artificial Sequence: Synthetic oligonucleotide
  Antisense strand to SEQ ID NO: 555955
auccuaauaacgcaucauu

SEQ ID NO: 555957 - RNA, 19 nt, Artificial Sequence
  Description of Artificial Sequence: Synthetic oligonucleotide
  Sense strand starting at position 3118 of SEQ ID NO: 318352
agugaauuguaaguccuua

SEQ ID NO: 555958 - RNA, 19 nt, Artificial Sequence
  Description of Artificial Sequence: Synthetic oligonucleotide
  Antisense strand to SEQ ID NO: 555957
uaaggacuuacaauucacu

SEQ ID NO: 555959 - RNA, 19 nt, Artificial Sequence
  Description of Artificial Sequence: Synthetic oligonucleotide
  Sense strand starting at position 3265 of SEQ ID NO: 318352
guuucugacaggugucuua

SEQ ID NO: 555960 - RNA, 19 nt, Artificial Sequence
  Description of Artificial Sequence: Synthetic oligonucleotide
  Antisense strand to SEQ ID NO: 555959
uaagacaccugucagaaac

SEQ ID NO: 555961 - RNA, 19 nt, Artificial Sequence
  Description of Artificial Sequence: Synthetic oligonucleotide
  Sense strand starting at position 3369 of SEQ ID NO: 318352
gcaagugugcagcaauaag

SEQ ID NO: 555962 - RNA, 19 nt, Artificial Sequence
  Description of Artificial Sequence: Synthetic oligonucleotide
  Antisense strand to SEQ ID NO: 555961
cuuauugcugcacacuugc

SEQ ID NO: 555963 - RNA, 19 nt, Artificial Sequence
  Description of Artificial Sequence: Synthetic oligonucleotide
  Sense strand starting at position 3388 of SEQ ID NO: 318352
caaugaguuccacaccgaa

SEQ ID NO: 555964 - RNA, 19 nt, Artificial Sequence
  Description of Artificial Sequence: Synthetic oligonucleotide
  Antisense strand to SEQ ID NO: 555963
uucgguguggaacucauug

SEQ ID NO: 555965 - RNA, 19 nt, Artificial Sequence
  Description of Artificial Sequence: Synthetic oligonucleotide
  Sense strand starting at position 3704 of SEQ ID NO: 318352
uauagucuguuaguaguuu

SEQ ID NO: 555966 - RNA, 19 nt, Artificial Sequence
  Description of Artificial Sequence: Synthetic oligonucleotide
  Antisense strand to SEQ ID NO: 555965
aaacuacuaacagacuaua

SEQ ID NO: 555967 - RNA, 19 nt, Artificial Sequence
  Description of Artificial Sequence: Synthetic oligonucleotide
  Sense strand starting at position 3708 of SEQ ID NO: 318352
gucuguuaguaguuuauag

SEQ ID NO: 555968 - RNA, 19 nt, Artificial Sequence
  Description of Artificial Sequence: Synthetic oligonucleotide
  Antisense strand to SEQ ID NO: 555967
cuauaaacuacuaacagac

SEQ ID NO: 555969 - RNA, 19 nt, Artificial Sequence
  Description of Artificial Sequence: Synthetic oligonucleotide
  Sense strand starting at position 3710 of SEQ ID NO: 318352
cuguuaguaguuuauagag

SEQ ID NO: 555970 - RNA, 19 nt, Artificial Sequence
  Description of Artificial Sequence: Synthetic oligonucleotide
  Antisense strand to SEQ ID NO: 555969
cucuauaaacuacuaacag

SEQ ID NO: 555971 - RNA, 19 nt, Artificial Sequence
  Description of Artificial Sequence: Synthetic oligonucleotide
  Sense strand starting at position 3716 of SEQ ID NO: 318352
guaguuuauagaggguuua

SEQ ID NO: 555972 - RNA, 19 nt, Artificial Sequence
  Description of Artificial Sequence: Synthetic oligonucleotide
  Antisense strand to SEQ ID NO: 555971
uaaacccucuauaaacuac

SEQ ID NO: 555973 - RNA, 19 nt, Artificial Sequence
  Description of Artificial Sequence: Synthetic oligonucleotide
  Sense strand starting at position 3717 of SEQ ID NO: 318352
uaguuuauagaggguuuaa

SEQ ID NO: 555974 - RNA, 19 nt, Artificial Sequence
  Description of Artificial Sequence: Synthetic oligonucleotide
  Antisense strand to SEQ ID NO: 555973
uuaaacccucuauaaacua

SEQ ID NO: 555975 - RNA, 19 nt, Artificial Sequence
  Description of Artificial Sequence: Synthetic oligonucleotide
  Sense strand starting at position 3881 of SEQ ID NO: 318352
gugaauaaugucgacaccu

SEQ ID NO: 555976 - RNA, 19 nt, Artificial Sequence
  Description of Artificial Sequence: Synthetic oligonucleotide
  Antisense strand to SEQ ID NO: 555975
aggugucgacauuauucac

SEQ ID NO: 555977 - RNA, 19 nt, Artificial Sequence
  Description of Artificial Sequence: Synthetic oligonucleotide
  Sense strand starting at position 3883 of SEQ ID NO: 318352
gaauaaugucgacaccuac

SEQ ID NO: 555978 - RNA, 19 nt, Artificial Sequence
  Description of Artificial Sequence: Synthetic oligonucleotide
  Antisense strand to SEQ ID NO: 555977
guaggugucgacauuauuc

SEQ ID NO: 555979 - RNA, 19 nt, Artificial Sequence
  Description of Artificial Sequence: Synthetic oligonucleotide
  Sense strand starting at position 3892 of SEQ ID NO: 318352
cgacaccuacuguauagau

SEQ ID NO: 555980 - RNA, 19 nt, Artificial Sequence
  Description of Artificial Sequence: Synthetic oligonucleotide
  Antisense strand to SEQ ID NO: 555979
aucuauacaguaggugucg

SEQ ID NO: 555981 - RNA, 19 nt, Artificial Sequence
  Description of Artificial Sequence: Synthetic oligonucleotide
  Sense strand starting at position 3901 of SEQ ID NO: 318352
cuguauagauucucuuguu

SEQ ID NO: 555982 - RNA, 19 nt, Artificial Sequence
  Description of Artificial Sequence: Synthetic oligonucleotide
  Antisense strand to SEQ ID NO: 555981
aacaagagaaucuauacag

SEQ ID NO: 555983 - RNA, 19 nt, Artificial Sequence
  Description of Artificial Sequence: Synthetic oligonucleotide
  Sense strand starting at position 3902 of SEQ ID NO: 318352
uguauagauucucuuguua

SEQ ID NO: 555984 - RNA, 19 nt, Artificial Sequence
  Description of Artificial Sequence: Synthetic oligonucleotide
  Antisense strand to SEQ ID NO: 555983
uaacaagagaaucuauaca

SEQ ID NO: 555985 - RNA, 19 nt, Artificial Sequence
  Description of Artificial Sequence: Synthetic oligonucleotide
  Sense strand starting at position 3913 of SEQ ID NO: 318352
ucuuguuacucuuuggaug

SEQ ID NO: 555986 - RNA, 19 nt, Artificial Sequence
  Description of Artificial Sequence: Synthetic oligonucleotide
  Antisense strand to SEQ ID NO: 555985
cauccaaagaguaacaaga

SEQ ID NO: 555987 - RNA, 19 nt, Artificial Sequence
  Description of Artificial Sequence: Synthetic oligonucleotide
  Sense strand starting at position 3935 of SEQ ID NO: 318352
ucacuauucggugaguuug

SEQ ID NO: 555988 - RNA, 19 nt, Artificial Sequence
  Description of Artificial Sequence: Synthetic oligonucleotide
  Antisense strand to SEQ ID NO: 555987
caaacucaccgaauaguga

SEQ ID NO: 555989 - RNA, 19 nt, Artificial Sequence
  Description of Artificial Sequence: Synthetic oligonucleotide
  Sense strand starting at position 3937 of SEQ ID NO: 318352
acuauucggugaguuugua

SEQ ID NO: 555990 - RNA, 19 nt, Artificial Sequence
  Description of Artificial Sequence: Synthetic oligonucleotide
  Antisense strand to SEQ ID NO: 555989
uacaaacucaccgaauagu

SEQ ID NO: 555991 - RNA, 19 nt, Artificial Sequence
  Description of Artificial Sequence: Synthetic oligonucleotide
  Sense strand starting at position 3941 of SEQ ID NO: 318352
uucggugaguuuguacauu

SEQ ID NO: 555992 - RNA, 19 nt, Artificial Sequence
  Description of Artificial Sequence: Synthetic oligonucleotide
  Antisense strand to SEQ ID NO: 555991
aauguacaaacucaccgaa

SEQ ID NO: 555993 - RNA, 19 nt, Artificial Sequence
  Description of Artificial Sequence: Synthetic oligonucleotide
  Sense strand starting at position 3971 of SEQ ID NO: 318352
ucagaauguccaugugugu

SEQ ID NO: 555994 - RNA, 19 nt, Artificial Sequence
  Description of Artificial Sequence: Synthetic oligonucleotide
  Antisense strand to SEQ ID NO: 555993
acacacauggacauucuga

SEQ ID NO: 555995 - RNA, 19 nt, Artificial Sequence
  Description of Artificial Sequence: Synthetic oligonucleotide
  Sense strand starting at position 3977 of SEQ ID NO: 318352
uguccauguguguauguau

SEQ ID NO: 555996 - RNA, 19 nt, Artificial Sequence
  Description of Artificial Sequence: Synthetic oligonucleotide
  Antisense strand to SEQ ID NO: 555995
auacauacacacauggaca

SEQ ID NO: 555997 - RNA, 19 nt, Artificial Sequence
  Description of Artificial Sequence: Synthetic oligonucleotide
  Sense strand starting at position 2298 of SEQ ID NO: 318353
aguuaaccagugcaauaau

SEQ ID NO: 555998 - RNA, 19 nt, Artificial Sequence
  Description of Artificial Sequence: Synthetic oligonucleotide
  Antisense strand to SEQ ID NO: 555997
auuauugcacugguuaacu

SEQ ID NO: 555999 - RNA, 19 nt, Artificial Sequence
  Description of Artificial Sequence: Synthetic oligonucleotide
  Sense strand starting at position 2324 of SEQ ID NO: 318353
gugugccuaacugaaagaa

SEQ ID NO: 556000 - RNA, 19 nt, Artificial Sequence
  Description of Artificial Sequence: Synthetic oligonucleotide
  Antisense strand to SEQ ID NO: 555999
uucuuucaguuaggcacac

SEQ ID NO: 556001 - RNA, 19 nt, Artificial Sequence
  Description of Artificial Sequence: Synthetic oligonucleotide
  Sense strand starting at position 2541 of SEQ ID NO: 318353
cgucucagaguacaguaau

SEQ ID NO: 556002 - RNA, 19 nt, Artificial Sequence
  Description of Artificial Sequence: Synthetic oligonucleotide
  Antisense strand to SEQ ID NO: 556001
auuacuguacucugagacg

SEQ ID NO: 556003 - RNA, 19 nt, Artificial Sequence
  Description of Artificial Sequence: Synthetic oligonucleotide
  Sense strand starting at position 2674 of SEQ ID NO: 318353
cggagaguaucaguaauac

SEQ ID NO: 556004 - RNA, 19 nt, Artificial Sequence
  Description of Artificial Sequence: Synthetic oligonucleotide
  Antisense strand to SEQ ID NO: 556003
guauuacugauacucuccg

SEQ ID NO: 556005 - RNA, 19 nt, Artificial Sequence
  Description of Artificial Sequence: Synthetic oligonucleotide
  Sense strand starting at position 2772 of SEQ ID NO: 318353
caggaauauuaugugauuc

SEQ ID NO: 556006 - RNA, 19 nt, Artificial Sequence
  Description of Artificial Sequence: Synthetic oligonucleotide
  Antisense strand to SEQ ID NO: 556005
gaaucacauaauauuccug

SEQ ID NO: 556007 - RNA, 19 nt, Artificial Sequence
  Description of Artificial Sequence: Synthetic oligonucleotide
  Sense strand starting at position 2786 of SEQ ID NO: 318353
gauucucauuucgaugauc

SEQ ID NO: 556008 - RNA, 19 nt, Artificial Sequence
  Description of Artificial Sequence: Synthetic oligonucleotide
  Antisense strand to SEQ ID NO: 556007
gaucaucgaaaugagaauc

SEQ ID NO: 556009 - RNA, 19 nt, Artificial Sequence
  Description of Artificial Sequence: Synthetic oligonucleotide
  Sense strand starting at position 2921 of SEQ ID NO: 318353
ugagaucugcugcacugaa

SEQ ID NO: 556010 - RNA, 19 nt, Artificial Sequence
  Description of Artificial Sequence: Synthetic oligonucleotide
  Antisense strand to SEQ ID NO: 556009
uucagugcagcagaucuca

SEQ ID NO: 556011 - RNA, 19 nt, Artificial Sequence
  Description of Artificial Sequence: Synthetic oligonucleotide
  Sense strand starting at position 2975 of SEQ ID NO: 318353
cuuggugaccucugaauug

SEQ ID NO: 556012 - RNA, 19 nt, Artificial Sequence
  Description of Artificial Sequence: Synthetic oligonucleotide
  Antisense strand to SEQ ID NO: 556011
caauucagaggucaccaag

SEQ ID NO: 556013 - RNA, 19 nt, Artificial Sequence
  Description of Artificial Sequence: Synthetic oligonucleotide
  Sense strand starting at position 3008 of SEQ ID NO: 318353
uggaaaguuugauugcaau

SEQ ID NO: 556014 - RNA, 19 nt, Artificial Sequence
  Description of Artificial Sequence: Synthetic oligonucleotide
  Antisense strand to SEQ ID NO: 556013
auugcaaucaaacuuucca

SEQ ID NO: 556015 - RNA, 19 nt, Artificial Sequence
  Description of Artificial Sequence: Synthetic oligonucleotide
  Sense strand starting at position 3014 of SEQ ID NO: 318353
guuugauugcaauagcuca

SEQ ID NO: 556016 - RNA, 19 nt, Artificial Sequence
  Description of Artificial Sequence: Synthetic oligonucleotide
  Antisense strand to SEQ ID NO: 556015
ugagcuauugcaaucaaac

SEQ ID NO: 556017 - RNA, 19 nt, Artificial Sequence
  Description of Artificial Sequence: Synthetic oligonucleotide
  Sense strand starting at position 3028 of SEQ ID NO: 318353
gcucacugaguuuagugau

SEQ ID NO: 556018 - RNA, 19 nt, Artificial Sequence
  Description of Artificial Sequence: Synthetic oligonucleotide
  Antisense strand to SEQ ID NO: 556017
aucacuaaacucagugagc

SEQ ID NO: 556019 - RNA, 19 nt, Artificial Sequence
  Description of Artificial Sequence: Synthetic oligonucleotide
  Sense strand starting at position 3034 of SEQ ID NO: 318353
ugaguuuagugauuauguc

SEQ ID NO: 556020 - RNA, 19 nt, Artificial Sequence
  Description of Artificial Sequence: Synthetic oligonucleotide
  Antisense strand to SEQ ID NO: 556019
gacauaaucacuaaacuca

SEQ ID NO: 556021 - RNA, 19 nt, Artificial Sequence
  Description of Artificial Sequence: Synthetic oligonucleotide
  Sense strand starting at position 3035 of SEQ ID NO: 318353
gaguuuagugauuaugucu

SEQ ID NO: 556022 - RNA, 19 nt, Artificial Sequence
  Description of Artificial Sequence: Synthetic oligonucleotide
  Antisense strand to SEQ ID NO: 556021
agacauaaucacuaaacuc

SEQ ID NO: 556023 - RNA, 19 nt, Artificial Sequence
  Description of Artificial Sequence: Synthetic oligonucleotide
  Sense strand starting at position 3121 of SEQ ID NO: 318353
accuuauaaccguaguucu

SEQ ID NO: 556024 - RNA, 19 nt, Artificial Sequence
  Description of Artificial Sequence: Synthetic oligonucleotide
  Antisense strand to SEQ ID NO: 556023
agaacuacgguuauaaggu

SEQ ID NO: 556025 - RNA, 19 nt, Artificial Sequence
  Description of Artificial Sequence: Synthetic oligonucleotide
  Sense strand starting at position 3143 of SEQ ID NO: 318353
auaggaucuucccucagua

SEQ ID NO: 556026 - RNA, 19 nt, Artificial Sequence
  Description of Artificial Sequence: Synthetic oligonucleotide
  Antisense strand to SEQ ID NO: 556025
uacugagggaagauccuau

SEQ ID NO: 556027 - RNA, 19 nt, Artificial Sequence
  Description of Artificial Sequence: Synthetic oligonucleotide
  Sense strand starting at position 3145 of SEQ ID NO: 318353
aggaucuucccucaguaac

SEQ ID NO: 556028 - RNA, 19 nt, Artificial Sequence
  Description of Artificial Sequence: Synthetic oligonucleotide
  Antisense strand to SEQ ID NO: 556027
guuacugagggaagauccu

SEQ ID NO: 556029 - RNA, 19 nt, Artificial Sequence
  Description of Artificial Sequence: Synthetic oligonucleotide
  Sense strand starting at position 3379 of SEQ ID NO: 318353
gacagagucuuguuauauu

SEQ ID NO: 556030 - RNA, 19 nt, Artificial Sequence
  Description of Artificial Sequence: Synthetic oligonucleotide
  Antisense strand to SEQ ID NO: 556029
aauauaacaagacucuguc

SEQ ID NO: 556031 - RNA, 19 nt, Artificial Sequence
  Description of Artificial Sequence: Synthetic oligonucleotide
  Sense strand starting at position 3387 of SEQ ID NO: 318353
cuuguuauauuaucuaggu

SEQ ID NO: 556032 - RNA, 19 nt, Artificial Sequence
  Description of Artificial Sequence: Synthetic oligonucleotide
  Antisense strand to SEQ ID NO: 556031
accuagauaauauaacaag

SEQ ID NO: 556033 - RNA, 19 nt, Artificial Sequence
  Description of Artificial Sequence: Synthetic oligonucleotide
  Sense strand starting at position 3512 of SEQ ID NO: 318353
acucaaaggucucuggaau

SEQ ID NO: 556034 - RNA, 19 nt, Artificial Sequence
  Description of Artificial Sequence: Synthetic oligonucleotide
  Antisense strand to SEQ ID NO: 556033
auuccagagaccuuugagu

SEQ ID NO: 556035 - RNA, 19 nt, Artificial Sequence
  Description of Artificial Sequence: Synthetic oligonucleotide
  Sense strand starting at position 3513 of SEQ ID NO: 318353
cucaaaggucucuggaauc

SEQ ID NO: 556036 - RNA, 19 nt, Artificial Sequence
  Description of Artificial Sequence: Synthetic oligonucleotide
  Antisense strand to SEQ ID NO: 556035
gauuccagagaccuuugag

SEQ ID NO: 556037 - RNA, 19 nt, Artificial Sequence
  Description of Artificial Sequence: Synthetic oligonucleotide
  Sense strand starting at position 3572 of SEQ ID NO: 318353
uugauauacugagcuuuac

SEQ ID NO: 556038 - RNA, 19 nt, Artificial Sequence
  Description of Artificial Sequence: Synthetic oligonucleotide
  Antisense strand to SEQ ID NO: 556037
guaaagcucaguauaucaa

SEQ ID NO: 556039 - RNA, 19 nt, Artificial Sequence
  Description of Artificial Sequence: Synthetic oligonucleotide
  Sense strand starting at position 3614 of SEQ ID NO: 318353
ggaaguaguuaaucccaga

SEQ ID NO: 556040 - RNA, 19 nt, Artificial Sequence
  Description of Artificial Sequence: Synthetic oligonucleotide
  Antisense strand to SEQ ID NO: 556039
ucugggauuaacuacuucc

SEQ ID NO: 556041 - RNA, 19 nt, Artificial Sequence
  Description of Artificial Sequence: Synthetic oligonucleotide
  Sense strand starting at position 3633 of SEQ ID NO: 318353
uuggguuauuuccaacuga

SEQ ID NO: 556042 - RNA, 19 nt, Artificial Sequence
  Description of Artificial Sequence: Synthetic oligonucleotide
  Antisense strand to SEQ ID NO: 556041
ucaguuggaaauaacccaa

SEQ ID NO: 556043 - RNA, 19 nt, Artificial Sequence
  Description of Artificial Sequence: Synthetic oligonucleotide
  Sense strand starting at position 3688 of SEQ ID NO: 318353
ggucuaggaucuguguaca

SEQ ID NO: 556044 - RNA, 19 nt, Artificial Sequence
  Description of Artificial Sequence: Synthetic oligonucleotide
  Antisense strand to SEQ ID NO: 556043
uguacacagauccuagacc

SEQ ID NO: 556045 - RNA, 19 nt, Artificial Sequence
  Description of Artificial Sequence: Synthetic oligonucleotide
  Sense strand starting at position 3691 of SEQ ID NO: 318353
cuaggaucuguguacauaa

SEQ ID NO: 556046 - RNA, 19 nt, Artificial Sequence
  Description of Artificial Sequence: Synthetic oligonucleotide
  Antisense strand to SEQ ID NO: 556045
uuauguacacagauccuag

SEQ ID NO: 556047 - RNA, 19 nt, Artificial Sequence
  Description of Artificial Sequence: Synthetic oligonucleotide
  Sense strand starting at position 3700 of SEQ ID NO: 318353
guguacauaagauggucua

SEQ ID NO: 556048 - RNA, 19 nt, Artificial Sequence
  Description of Artificial Sequence: Synthetic oligonucleotide
  Antisense strand to SEQ ID NO: 556047
uagaccaucuuauguacac

SEQ ID NO: 556049 - RNA, 19 nt, Artificial Sequence
  Description of Artificial Sequence: Synthetic oligonucleotide
  Sense strand starting at position 3701 of SEQ ID NO: 318353
uguacauaagauggucuaa

SEQ ID NO: 556050 - RNA, 19 nt, Artificial Sequence
  Description of Artificial Sequence: Synthetic oligonucleotide
  Antisense strand to SEQ ID NO: 556049
uuagaccaucuuauguaca

SEQ ID NO: 556051 - RNA, 19 nt, Artificial Sequence
  Description of Artificial Sequence: Synthetic oligonucleotide
  Sense strand starting at position 3718 of SEQ ID NO: 318353
aagguuugaguacgugaga

SEQ ID NO: 556052 - RNA, 19 nt, Artificial Sequence
  Description of Artificial Sequence: Synthetic oligonucleotide
  Antisense strand to SEQ ID NO: 556051
ucucacguacucaaaccuu

SEQ ID NO: 556053 - RNA, 19 nt, Artificial Sequence
  Description of Artificial Sequence: Synthetic oligonucleotide
  Sense strand starting at position 3729 of SEQ ID NO: 318353
acgugagacaguugaaaca

SEQ ID NO: 556054 - RNA, 19 nt, Artificial Sequence
  Description of Artificial Sequence: Synthetic oligonucleotide
  Antisense strand to SEQ ID NO: 556053
uguuucaacugucucacgu

SEQ ID NO: 556055 - RNA, 19 nt, Artificial Sequence
  Description of Artificial Sequence: Synthetic oligonucleotide
  Sense strand starting at position 3822 of SEQ ID NO: 318353
acuggaauucucuguuaaa

SEQ ID NO: 556056 - RNA, 19 nt, Artificial Sequence
  Description of Artificial Sequence: Synthetic oligonucleotide
  Antisense strand to SEQ ID NO: 556055
uuuaacagagaauuccagu

SEQ ID NO: 556057 - RNA, 19 nt, Artificial Sequence
  Description of Artificial Sequence: Synthetic oligonucleotide
  Sense strand starting at position 3845 of SEQ ID NO: 318353
guaauugccuaugucacaa

SEQ ID NO: 556058 - RNA, 19 nt, Artificial Sequence
  Description of Artificial Sequence: Synthetic oligonucleotide
  Antisense strand to SEQ ID NO: 556057
uugugacauaggcaauuac

SEQ ID NO: 556059 - RNA, 19 nt, Artificial Sequence
  Description of Artificial Sequence: Synthetic oligonucleotide
  Sense strand starting at position 3918 of SEQ ID NO: 318353
guccgauggccuuuagugu

SEQ ID NO: 556060 - RNA, 19 nt, Artificial Sequence
  Description of Artificial Sequence: Synthetic oligonucleotide
  Antisense strand to SEQ ID NO: 556059
acacuaaaggccaucggac

SEQ ID NO: 556061 - RNA, 19 nt, Artificial Sequence
  Description of Artificial Sequence: Synthetic oligonucleotide
  Sense strand starting at position 3936 of SEQ ID NO: 318353
uggcauuagacuugauguc

SEQ ID NO: 556062 - RNA, 19 nt, Artificial Sequence
  Description of Artificial Sequence: Synthetic oligonucleotide
  Antisense strand to SEQ ID NO: 556061
gacaucaagucuaaugcca

SEQ ID NO: 556063 - RNA, 19 nt, Artificial Sequence
  Description of Artificial Sequence: Synthetic oligonucleotide
  Sense strand starting at position 3937 of SEQ ID NO: 318353
ggcauuagacuugaugucu

SEQ ID NO: 556064 - RNA, 19 nt, Artificial Sequence
  Description of Artificial Sequence: Synthetic oligonucleotide
  Antisense strand to SEQ ID NO: 556063
agacaucaagucuaaugcc

SEQ ID NO: 556065 - RNA, 19 nt, Artificial Sequence
  Description of Artificial Sequence: Synthetic oligonucleotide
  Sense strand starting at position 3943 of SEQ ID NO: 318353
agacuugaugucugucuuu

SEQ ID NO: 556066 - RNA, 19 nt, Artificial Sequence
  Description of Artificial Sequence: Synthetic oligonucleotide
  Antisense strand to SEQ ID NO: 556065
aaagacagacaucaagucu

SEQ ID NO: 556067 - RNA, 19 nt, Artificial Sequence
  Description of Artificial Sequence: Synthetic oligonucleotide
  Sense strand starting at position 3948 of SEQ ID NO: 318353
ugaugucugucuuugauau

SEQ ID NO: 556068 - RNA, 19 nt, Artificial Sequence
  Description of Artificial Sequence: Synthetic oligonucleotide
  Antisense strand to SEQ ID NO: 556067
auaucaaagacagacauca

SEQ ID NO: 556069 - RNA, 19 nt, Artificial Sequence
  Description of Artificial Sequence: Synthetic oligonucleotide
  Sense strand starting at position 3949 of SEQ ID NO: 318353
gaugucugucuuugauaua

SEQ ID NO: 556070 - RNA, 19 nt, Artificial Sequence
  Description of Artificial Sequence: Synthetic oligonucleotide
  Antisense strand to SEQ ID NO: 556069
uauaucaaagacagacauc

SEQ ID NO: 556071 - RNA, 19 nt, Artificial Sequence
  Description of Artificial Sequence: Synthetic oligonucleotide
  Sense strand starting at position 3965 of SEQ ID NO: 318353
auagaucuuagugaagugu

SEQ ID NO: 556072 - RNA, 19 nt, Artificial Sequence
  Description of Artificial Sequence: Synthetic oligonucleotide
  Antisense strand to SEQ ID NO: 556071
acacuucacuaagaucuau

SEQ ID NO: 556073 - RNA, 19 nt, Artificial Sequence
  Description of Artificial Sequence: Synthetic oligonucleotide
  Sense strand starting at position 3969 of SEQ ID NO: 318353
aucuuagugaagugugaua

SEQ ID NO: 556074 - RNA, 19 nt, Artificial Sequence
  Description of Artificial Sequence: Synthetic oligonucleotide
  Antisense strand to SEQ ID NO: 556073
uaucacacuucacuaagau

SEQ ID NO: 556075 - RNA, 19 nt, Artificial Sequence
  Description of Artificial Sequence: Synthetic oligonucleotide
  Sense strand starting at position 3971 of SEQ ID NO: 318353
cuuagugaagugugauaca

SEQ ID NO: 556076 - RNA, 19 nt, Artificial Sequence
  Description of Artificial Sequence: Synthetic oligonucleotide
  Antisense strand to SEQ ID NO: 556075
uguaucacacuucacuaag

SEQ ID NO: 556077 - RNA, 19 nt, Artificial Sequence
  Description of Artificial Sequence: Synthetic oligonucleotide
  Sense strand starting at position 2056 of SEQ ID NO: 318354
accucuguauuguagauuu

SEQ ID NO: 556078 - RNA, 19 nt, Artificial Sequence
  Description of Artificial Sequence: Synthetic oligonucleotide
  Antisense strand to SEQ ID NO: 556077
aaaucuacaauacagaggu

SEQ ID NO: 556079 - RNA, 19 nt, Artificial Sequence
  Description of Artificial Sequence: Synthetic oligonucleotide
  Sense strand starting at position 2293 of SEQ ID NO: 318354
caaguuaaccagugcagua

SEQ ID NO: 556080 - RNA, 19 nt, Artificial Sequence
  Description of Artificial Sequence: Synthetic oligonucleotide
  Antisense strand to SEQ ID NO: 556079
uacugcacugguuaacuug

SEQ ID NO: 556081 - RNA, 19 nt, Artificial Sequence
  Description of Artificial Sequence: Synthetic oligonucleotide
  Sense strand starting at position 2295 of SEQ ID NO: 318354
aguuaaccagugcaguaau

SEQ ID NO: 556082 - RNA, 19 nt, Artificial Sequence
  Description of Artificial Sequence: Synthetic oligonucleotide
  Antisense strand to SEQ ID NO: 556081
auuacugcacugguuaacu

SEQ ID NO: 556083 - RNA, 19 nt, Artificial Sequence
  Description of Artificial Sequence: Synthetic oligonucleotide
  Sense strand starting at position 2319 of SEQ ID NO: 318354
uugugugccuaacuuaaca

SEQ ID NO: 556084 - RNA, 19 nt, Artificial Sequence
  Description of Artificial Sequence: Synthetic oligonucleotide
  Antisense strand to SEQ ID NO: 556083
uguuaaguuaggcacacaa

SEQ ID NO: 556085 - RNA, 19 nt, Artificial Sequence
  Description of Artificial Sequence: Synthetic oligonucleotide
  Sense strand starting at position 2420 of SEQ ID NO: 318354
gaaauaucacguuggguuu

SEQ ID NO: 556086 - RNA, 19 nt, Artificial Sequence
  Description of Artificial Sequence: Synthetic oligonucleotide
  Antisense strand to SEQ ID NO: 556085
aaacccaacgugauauuuc

SEQ ID NO: 556087 - RNA, 19 nt, Artificial Sequence
  Description of Artificial Sequence: Synthetic oligonucleotide
  Sense strand starting at position 2491 of SEQ ID NO: 318354
cuugaacucuuagcuagaa

SEQ ID NO: 556088 - RNA, 19 nt, Artificial Sequence
  Description of Artificial Sequence: Synthetic oligonucleotide
  Antisense strand to SEQ ID NO: 556087
uucuagcuaagaguucaag

SEQ ID NO: 556089 - RNA, 19 nt, Artificial Sequence
  Description of Artificial Sequence: Synthetic oligonucleotide
  Sense strand starting at position 2518 of SEQ ID NO: 318354
ugcccuugucacuggcaau

SEQ ID NO: 556090 - RNA, 19 nt, Artificial Sequence
  Description of Artificial Sequence: Synthetic oligonucleotide
  Antisense strand to SEQ ID NO: 556089
auugccagugacaagggca

SEQ ID NO: 556091 - RNA, 19 nt, Artificial Sequence
  Description of Artificial Sequence: Synthetic oligonucleotide
  Sense strand starting at position 2521 of SEQ ID NO: 318354
ccuugucacuggcaauaua

SEQ ID NO: 556092 - RNA, 19 nt, Artificial Sequence
  Description of Artificial Sequence: Synthetic oligonucleotide
  Antisense strand to SEQ ID NO: 556091
uauauugccagugacaagg

SEQ ID NO: 556093 - RNA, 19 nt, Artificial Sequence
  Description of Artificial Sequence: Synthetic oligonucleotide
  Sense strand starting at position 2524 of SEQ ID NO: 318354
ugucacuggcaauauaaua

SEQ ID NO: 556094 - RNA, 19 nt, Artificial Sequence
  Description of Artificial Sequence: Synthetic oligonucleotide
  Antisense strand to SEQ ID NO: 556093
uauuauauugccagugaca

SEQ ID NO: 556095 - RNA, 19 nt, Artificial Sequence
  Description of Artificial Sequence: Synthetic oligonucleotide
  Sense strand starting at position 2606 of SEQ ID NO: 318354
uuuauuagcuauggaaaca

SEQ ID NO: 556096 - RNA, 19 nt, Artificial Sequence
  Description of Artificial Sequence: Synthetic oligonucleotide
  Antisense strand to SEQ ID NO: 556095
uguuuccauagcuaauaaa

SEQ ID NO: 556097 - RNA, 19 nt, Artificial Sequence
  Description of Artificial Sequence: Synthetic oligonucleotide
  Sense strand starting at position 2688 of SEQ ID NO: 318354
uuacacauauuagggaaau

SEQ ID NO: 556098 - RNA, 19 nt, Artificial Sequence
  Description of Artificial Sequence: Synthetic oligonucleotide
  Antisense strand to SEQ ID NO: 556097
auuucccuaauauguguaa

SEQ ID NO: 556099 - RNA, 19 nt, Artificial Sequence
  Description of Artificial Sequence: Synthetic oligonucleotide
  Sense strand starting at position 2726 of SEQ ID NO: 318354
uuuguaaaguuguggcaau

SEQ ID NO: 556100 - RNA, 19 nt, Artificial Sequence
  Description of Artificial Sequence: Synthetic oligonucleotide
  Antisense strand to SEQ ID NO: 556099
auugccacaacuuuacaaa

SEQ ID NO: 556101 - RNA, 19 nt, Artificial Sequence
  Description of Artificial Sequence: Synthetic oligonucleotide
  Sense strand starting at position 2727 of SEQ ID NO: 318354
uuguaaaguuguggcaauu

SEQ ID NO: 556102 - RNA, 19 nt, Artificial Sequence
  Description of Artificial Sequence: Synthetic oligonucleotide
  Antisense strand to SEQ ID NO: 556101
aauugccacaacuuuacaa

SEQ ID NO: 556103 - RNA, 19 nt, Artificial Sequence
  Description of Artificial Sequence: Synthetic oligonucleotide
  Sense strand starting at position 2845 of SEQ ID NO: 318354
guauacugcccauaugaug

SEQ ID NO: 556104 - RNA, 19 nt, Artificial Sequence
  Description of Artificial Sequence: Synthetic oligonucleotide
  Antisense strand to SEQ ID NO: 556103
caucauaugggcaguauac

SEQ ID NO: 556105 - RNA, 19 nt, Artificial Sequence
  Description of Artificial Sequence: Synthetic oligonucleotide
  Sense strand starting at position 2971 of SEQ ID NO: 318354
gggaaaugcuuaucuauuc

SEQ ID NO: 556106 - RNA, 19 nt, Artificial Sequence
  Description of Artificial Sequence: Synthetic oligonucleotide
  Antisense strand to SEQ ID NO: 556105
gaauagauaagcauuuccc

SEQ ID NO: 556107 - RNA, 19 nt, Artificial Sequence
  Description of Artificial Sequence: Synthetic oligonucleotide
  Sense strand starting at position 2972 of SEQ ID NO: 318354
ggaaaugcuuaucuauucu

SEQ ID NO: 556108 - RNA, 19 nt, Artificial Sequence
  Description of Artificial Sequence: Synthetic oligonucleotide
  Antisense strand to SEQ ID NO: 556107
agaauagauaagcauuucc

SEQ ID NO: 556109 - RNA, 19 nt, Artificial Sequence
  Description of Artificial Sequence: Synthetic oligonucleotide
  Sense strand starting at position 3008 of SEQ ID NO: 318354
gggauauucuaguggauug

SEQ ID NO: 556110 - RNA, 19 nt, Artificial Sequence
  Description of Artificial Sequence: Synthetic oligonucleotide
  Antisense strand to SEQ ID NO: 556109
caauccacuagaauauccc

SEQ ID NO: 556111 - RNA, 19 nt, Artificial Sequence
  Description of Artificial Sequence: Synthetic oligonucleotide
  Sense strand starting at position 3013 of SEQ ID NO: 318354
auucuaguggauugcauua

SEQ ID NO: 556112 - RNA, 19 nt, Artificial Sequence
  Description of Artificial Sequence: Synthetic oligonucleotide
  Antisense strand to SEQ ID NO: 556111
uaaugcaauccacuagaau

SEQ ID NO: 556113 - RNA, 19 nt, Artificial Sequence
  Description of Artificial Sequence: Synthetic oligonucleotide
  Sense strand starting at position 3015 of SEQ ID NO: 318354
ucuaguggauugcauuauu

SEQ ID NO: 556114 - RNA, 19 nt, Artificial Sequence
  Description of Artificial Sequence: Synthetic oligonucleotide
  Antisense strand to SEQ ID NO: 556113
aauaaugcaauccacuaga

SEQ ID NO: 556115 - RNA, 19 nt, Artificial Sequence
  Description of Artificial Sequence: Synthetic oligonucleotide
  Sense strand starting at position 3018 of SEQ ID NO: 318354
aguggauugcauuauuauc

SEQ ID NO: 556116 - RNA, 19 nt, Artificial Sequence
  Description of Artificial Sequence: Synthetic oligonucleotide
  Antisense strand to SEQ ID NO: 556115
gauaauaaugcaauccacu

SEQ ID NO: 556117 - RNA, 19 nt, Artificial Sequence
  Description of Artificial Sequence: Synthetic oligonucleotide
  Sense strand starting at position 3042 of SEQ ID NO: 318354
ugaaaugacuuuggaauug

SEQ ID NO: 556118 - RNA, 19 nt, Artificial Sequence
  Description of Artificial Sequence: Synthetic oligonucleotide
  Antisense strand to SEQ ID NO: 556117
caauuccaaagucauuuca

SEQ ID NO: 556119 - RNA, 19 nt, Artificial Sequence
  Description of Artificial Sequence: Synthetic oligonucleotide
  Sense strand starting at position 3087 of SEQ ID NO: 318354
acauaaauuuguggacauu

SEQ ID NO: 556120 - RNA, 19 nt, Artificial Sequence
  Description of Artificial Sequence: Synthetic oligonucleotide
  Antisense strand to SEQ ID NO: 556119
aauguccacaaauuuaugu

SEQ ID NO: 556121 - RNA, 19 nt, Artificial Sequence
  Description of Artificial Sequence: Synthetic oligonucleotide
  Sense strand starting at position 3097 of SEQ ID NO: 318354
guggacauuggucaaccuu

SEQ ID NO: 556122 - RNA, 19 nt, Artificial Sequence
  Description of Artificial Sequence: Synthetic oligonucleotide
  Antisense strand to SEQ ID NO: 556121
aagguugaccaauguccac

SEQ ID NO: 556123 - RNA, 19 nt, Artificial Sequence
  Description of Artificial Sequence: Synthetic oligonucleotide
  Sense strand starting at position 3121 of SEQ ID NO: 318354
guccauuugucagauuaau

SEQ ID NO: 556124 - RNA, 19 nt, Artificial Sequence
  Description of Artificial Sequence: Synthetic oligonucleotide
  Antisense strand to SEQ ID NO: 556123
auuaaucugacaaauggac

SEQ ID NO: 556125 - RNA, 19 nt, Artificial Sequence
  Description of Artificial Sequence: Synthetic oligonucleotide
  Sense strand starting at position 3192 of SEQ ID NO: 318354
gggcaacuuucauccgagu

SEQ ID NO: 556126 - RNA, 19 nt, Artificial Sequence
  Description of Artificial Sequence: Synthetic oligonucleotide
  Antisense strand to SEQ ID NO: 556125
acucggaugaaaguugccc

SEQ ID NO: 556127 - RNA, 19 nt, Artificial Sequence
  Description of Artificial Sequence: Synthetic oligonucleotide
  Sense strand starting at position 3218 of SEQ ID NO: 318354
auugcaaagugccaauaau

SEQ ID NO: 556128 - RNA, 19 nt, Artificial Sequence
  Description of Artificial Sequence: Synthetic oligonucleotide
  Antisense strand to SEQ ID NO: 556127
auuauuggcacuuugcaau

SEQ ID NO: 556129 - RNA, 19 nt, Artificial Sequence
  Description of Artificial Sequence: Synthetic oligonucleotide
  Sense strand starting at position 3232 of SEQ ID NO: 318354
auaauauguuguccucuca

SEQ ID NO: 556130 - RNA, 19 nt, Artificial Sequence
  Description of Artificial Sequence: Synthetic oligonucleotide
  Antisense strand to SEQ ID NO: 556129
ugagaggacaacauauuau

SEQ ID NO: 556131 - RNA, 19 nt, Artificial Sequence
  Description of Artificial Sequence: Synthetic oligonucleotide
  Sense strand starting at position 3267 of SEQ ID NO: 318354
guacacaaacuaugaaguu

SEQ ID NO: 556132 - RNA, 19 nt, Artificial Sequence
  Description of Artificial Sequence: Synthetic oligonucleotide
  Antisense strand to SEQ ID NO: 556131
aacuucauaguuuguguac

SEQ ID NO: 556133 - RNA, 19 nt, Artificial Sequence
  Description of Artificial Sequence: Synthetic oligonucleotide
  Sense strand starting at position 3368 of SEQ ID NO: 318354
uuuauugggucaucuacuu

SEQ ID NO: 556134 - RNA, 19 nt, Artificial Sequence
  Description of Artificial Sequence: Synthetic oligonucleotide
  Antisense strand to SEQ ID NO: 556133
aaguagaugacccaauaaa

SEQ ID NO: 556135 - RNA, 19 nt, Artificial Sequence
  Description of Artificial Sequence: Synthetic oligonucleotide
  Sense strand starting at position 2309 of SEQ ID NO: 318355
ugaauucggucuccgaaau

SEQ ID NO: 556136 - RNA, 19 nt, Artificial Sequence
  Description of Artificial Sequence: Synthetic oligonucleotide
  Antisense strand to SEQ ID NO: 556135
auuucggagaccgaauuca

SEQ ID NO: 556137 - RNA, 19 nt, Artificial Sequence
  Description of Artificial Sequence: Synthetic oligonucleotide
  Sense strand starting at position 2310 of SEQ ID NO: 318355
gaauucggucuccgaaaug

SEQ ID NO: 556138 - RNA, 19 nt, Artificial Sequence
  Description of Artificial Sequence: Synthetic oligonucleotide
  Antisense strand to SEQ ID NO: 556137
cauuucggagaccgaauuc

SEQ ID NO: 556139 - RNA, 19 nt, Artificial Sequence
  Description of Artificial Sequence: Synthetic oligonucleotide
  Sense strand starting at position 2315 of SEQ ID NO: 318355
cggucuccgaaauguauau

SEQ ID NO: 556140 - RNA, 19 nt, Artificial Sequence
  Description of Artificial Sequence: Synthetic oligonucleotide
  Antisense strand to SEQ ID NO: 556139
auauacauuucggagaccg

SEQ ID NO: 556141 - RNA, 19 nt, Artificial Sequence
  Description of Artificial Sequence: Synthetic oligonucleotide
  Sense strand starting at position 2319 of SEQ ID NO: 318355
cuccgaaauguauauauuc

SEQ ID NO: 556142 - RNA, 19 nt, Artificial Sequence
  Description of Artificial Sequence: Synthetic oligonucleotide
  Antisense strand to SEQ ID NO: 556141
gaauauauacauuucggag

SEQ ID NO: 556143 - RNA, 19 nt, Artificial Sequence
  Description of Artificial Sequence: Synthetic oligonucleotide
  Sense strand starting at position 2392 of SEQ ID NO: 318355
aguagauauuucuaugcuu

SEQ ID NO: 556144 - RNA, 19 nt, Artificial Sequence
  Description of Artificial Sequence: Synthetic oligonucleotide
  Antisense strand to SEQ ID NO: 556143
aagcauagaaauaucuacu

SEQ ID NO: 556145 - RNA, 19 nt, Artificial Sequence
  Description of Artificial Sequence: Synthetic oligonucleotide
  Sense strand starting at position 2395 of SEQ ID NO: 318355
agauauuucuaugcuuugu

SEQ ID NO: 556146 - RNA, 19 nt, Artificial Sequence
  Description of Artificial Sequence: Synthetic oligonucleotide
  Antisense strand to SEQ ID NO: 556145
acaaagcauagaaauaucu

SEQ ID NO: 556147 - RNA, 19 nt, Artificial Sequence
  Description of Artificial Sequence: Synthetic oligonucleotide
  Sense strand starting at position 2399 of SEQ ID NO: 318355
auuucuaugcuuuguguuu

SEQ ID NO: 556148 - RNA, 19 nt, Artificial Sequence
  Description of Artificial Sequence: Synthetic oligonucleotide
  Antisense strand to SEQ ID NO: 556147
aaacacaaagcauagaaau

SEQ ID NO: 556149 - RNA, 19 nt, Artificial Sequence
  Description of Artificial Sequence: Synthetic oligonucleotide
  Sense strand starting at position 2575 of SEQ ID NO: 318355
cgagauauagaaugucaac

SEQ ID NO: 556150 - RNA, 19 nt, Artificial Sequence
  Description of Artificial Sequence: Synthetic oligonucleotide
  Antisense strand to SEQ ID NO: 556149
guugacauucuauaucucg

SEQ ID NO: 556151 - RNA, 19 nt, Artificial Sequence
  Description of Artificial Sequence: Synthetic oligonucleotide
  Sense strand starting at position 2734 of SEQ ID NO: 318355
ucagucaucugucugguga

SEQ ID NO: 556152 - RNA, 19 nt, Artificial Sequence
  Description of Artificial Sequence: Synthetic oligonucleotide
  Antisense strand to SEQ ID NO: 556151
ucaccagacagaugacuga

SEQ ID NO: 556153 - RNA, 19 nt, Artificial Sequence
  Description of Artificial Sequence: Synthetic oligonucleotide
  Sense strand starting at position 2789 of SEQ ID NO: 318355
ugugguaucgaauaguaac

SEQ ID NO: 556154 - RNA, 19 nt, Artificial Sequence
  Description of Artificial Sequence: Synthetic oligonucleotide
  Antisense strand to SEQ ID NO: 556153
guuacuauucgauaccaca

SEQ ID NO: 556155 - RNA, 19 nt, Artificial Sequence
  Description of Artificial Sequence: Synthetic oligonucleotide
  Sense strand starting at position 2899 of SEQ ID NO: 318355
ggcuacuccucagaacaga

SEQ ID NO: 556156 - RNA, 19 nt, Artificial Sequence
  Description of Artificial Sequence: Synthetic oligonucleotide
  Antisense strand to SEQ ID NO: 556155
ucuguucugaggaguagcc

SEQ ID NO: 556157 - RNA, 19 nt, Artificial Sequence
  Description of Artificial Sequence: Synthetic oligonucleotide
  Sense strand starting at position 2930 of SEQ ID NO: 318355
uuucuuguugcaugguuaa

SEQ ID NO: 556158 - RNA, 19 nt, Artificial Sequence
  Description of Artificial Sequence: Synthetic oligonucleotide
  Antisense strand to SEQ ID NO: 556157
uuaaccaugcaacaagaaa

SEQ ID NO: 556159 - RNA, 19 nt, Artificial Sequence
  Description of Artificial Sequence: Synthetic oligonucleotide
  Sense strand starting at position 2958 of SEQ ID NO: 318355
ccugaaguaugcuuuauuu

SEQ ID NO: 556160 - RNA, 19 nt, Artificial Sequence
  Description of Artificial Sequence: Synthetic oligonucleotide
  Antisense strand to SEQ ID NO: 556159
aaauaaagcauacuucagg

SEQ ID NO: 556161 - RNA, 19 nt, Artificial Sequence
  Description of Artificial Sequence: Synthetic oligonucleotide
  Sense strand starting at position 3132 of SEQ ID NO: 318355
cagaaaugccagcagucau

SEQ ID NO: 556162 - RNA, 19 nt, Artificial Sequence
  Description of Artificial Sequence: Synthetic oligonucleotide
  Antisense strand to SEQ ID NO: 556161
augacugcuggcauuucug

SEQ ID NO: 556163 - RNA, 19 nt, Artificial Sequence
  Description of Artificial Sequence: Synthetic oligonucleotide
  Sense strand starting at position 3139 of SEQ ID NO: 318355
gccagcagucaucagugua

SEQ ID NO: 556164 - RNA, 19 nt, Artificial Sequence
  Description of Artificial Sequence: Synthetic oligonucleotide
  Antisense strand to SEQ ID NO: 556163
uacacugaugacugcuggc

SEQ ID NO: 556165 - RNA, 19 nt, Artificial Sequence
  Description of Artificial Sequence: Synthetic oligonucleotide
  Sense strand starting at position 3142 of SEQ ID NO: 318355
agcagucaucaguguaucu

SEQ ID NO: 556166 - RNA, 19 nt, Artificial Sequence
  Description of Artificial Sequence: Synthetic oligonucleotide
  Antisense strand to SEQ ID NO: 556165
agauacacugaugacugcu

SEQ ID NO: 556167 - RNA, 19 nt, Artificial Sequence
  Description of Artificial Sequence: Synthetic oligonucleotide
  Sense strand starting at position 3155 of SEQ ID NO: 318355
guaucuauggaucacaugu

SEQ ID NO: 556168 - RNA, 19 nt, Artificial Sequence
  Description of Artificial Sequence: Synthetic oligonucleotide
  Antisense strand to SEQ ID NO: 556167
acaugugauccauagauac

SEQ ID NO: 556169 - RNA, 19 nt, Artificial Sequence
  Description of Artificial Sequence: Synthetic oligonucleotide
  Sense strand starting at position 3163 of SEQ ID NO: 318355
ggaucacauguuuagcaua

SEQ ID NO: 556170 - RNA, 19 nt, Artificial Sequence
  Description of Artificial Sequence: Synthetic oligonucleotide
  Antisense strand to SEQ ID NO: 556169
uaugcuaaacaugugaucc

SEQ ID NO: 556171 - RNA, 19 nt, Artificial Sequence
  Description of Artificial Sequence: Synthetic oligonucleotide
  Sense strand starting at position 3165 of SEQ ID NO: 318355
aucacauguuuagcauaga

SEQ ID NO: 556172 - RNA, 19 nt, Artificial Sequence
  Description of Artificial Sequence: Synthetic oligonucleotide
  Antisense strand to SEQ ID NO: 556171
ucuaugcuaaacaugugau

SEQ ID NO: 556173 - RNA, 19 nt, Artificial Sequence
  Description of Artificial Sequence: Synthetic oligonucleotide
  Sense strand starting at position 3166 of SEQ ID NO: 318355
ucacauguuuagcauagaa

SEQ ID NO: 556174 - RNA, 19 nt, Artificial Sequence
  Description of Artificial Sequence: Synthetic oligonucleotide
  Antisense strand to SEQ ID NO: 556173
uucuaugcuaaacauguga

SEQ ID NO: 556175 - RNA, 19 nt, Artificial Sequence
  Description of Artificial Sequence: Synthetic oligonucleotide
  Sense strand starting at position 3168 of SEQ ID NO: 318355
acauguuuagcauagaauu

SEQ ID NO: 556176 - RNA, 19 nt, Artificial Sequence
  Description of Artificial Sequence: Synthetic oligonucleotide
  Antisense strand to SEQ ID NO: 556175
aauucuaugcuaaacaugu

SEQ ID NO: 556177 - RNA, 19 nt, Artificial Sequence
  Description of Artificial Sequence: Synthetic oligonucleotide
  Sense strand starting at position 3216 of SEQ ID NO: 318355
ugucuugugaaauguuauu

SEQ ID NO: 556178 - RNA, 19 nt, Artificial Sequence
  Description of Artificial Sequence: Synthetic oligonucleotide
  Antisense strand to SEQ ID NO: 556177
aauaacauuucacaagaca

SEQ ID NO: 556179 - RNA, 19 nt, Artificial Sequence
  Description of Artificial Sequence: Synthetic oligonucleotide
  Sense strand starting at position 3330 of SEQ ID NO: 318355
ccagcaguuccugagaaua

SEQ ID NO: 556180 - RNA, 19 nt, Artificial Sequence
  Description of Artificial Sequence: Synthetic oligonucleotide
  Antisense strand to SEQ ID NO: 556179
uauucucaggaacugcugg

SEQ ID NO: 556181 - RNA, 19 nt, Artificial Sequence
  Description of Artificial Sequence: Synthetic oligonucleotide
  Sense strand starting at position 3477 of SEQ ID NO: 318355
cuuagaaacuucucuugag

SEQ ID NO: 556182 - RNA, 19 nt, Artificial Sequence
  Description of Artificial Sequence: Synthetic oligonucleotide
  Antisense strand to SEQ ID NO: 556181
cucaagagaaguuucuaag

SEQ ID NO: 556183 - RNA, 19 nt, Artificial Sequence
  Description of Artificial Sequence: Synthetic oligonucleotide
  Sense strand starting at position 3484 of SEQ ID NO: 318355
acuucucuugagcaagcau

SEQ ID NO: 556184 - RNA, 19 nt, Artificial Sequence
  Description of Artificial Sequence: Synthetic oligonucleotide
  Antisense strand to SEQ ID NO: 556183
augcuugcucaagagaagu

SEQ ID NO: 556185 - RNA, 19 nt, Artificial Sequence
  Description of Artificial Sequence: Synthetic oligonucleotide
  Sense strand starting at position 3495 of SEQ ID NO: 318355
gcaagcauauacuauagaa

SEQ ID NO: 556186 - RNA, 19 nt, Artificial Sequence
  Description of Artificial Sequence: Synthetic oligonucleotide
  Antisense strand to SEQ ID NO: 556185
uucuauaguauaugcuugc

SEQ ID NO: 556187 - RNA, 19 nt, Artificial Sequence
  Description of Artificial Sequence: Synthetic oligonucleotide
  Sense strand starting at position 3515 of SEQ ID NO: 318355
agaagaauguccuacuauu

SEQ ID NO: 556188 - RNA, 19 nt, Artificial Sequence
  Description of Artificial Sequence: Synthetic oligonucleotide
  Antisense strand to SEQ ID NO: 556187
aauaguaggacauucuucu

SEQ ID NO: 556189 - RNA, 19 nt, Artificial Sequence
  Description of Artificial Sequence: Synthetic oligonucleotide
  Sense strand starting at position 3572 of SEQ ID NO: 318355
cuuugaagauaugagaaua

SEQ ID NO: 556190 - RNA, 19 nt, Artificial Sequence
  Description of Artificial Sequence: Synthetic oligonucleotide
  Antisense strand to SEQ ID NO: 556189
uauucucauaucuucaaag

SEQ ID NO: 556191 - RNA, 19 nt, Artificial Sequence
  Description of Artificial Sequence: Synthetic oligonucleotide
  Sense strand starting at position 3637 of SEQ ID NO: 318355
aggguuuggaaguggauaa

SEQ ID NO: 556192 - RNA, 19 nt, Artificial Sequence
  Description of Artificial Sequence: Synthetic oligonucleotide
  Antisense strand to SEQ ID NO: 556191
uuauccacuuccaaacccu

SEQ ID NO: 556193 - RNA, 19 nt, Artificial Sequence
  Description of Artificial Sequence: Synthetic oligonucleotide
  Sense strand starting at position 3661 of SEQ ID NO: 318355
guuugaaucuucgucagaa

SEQ ID NO: 556194 - RNA, 19 nt, Artificial Sequence
  Description of Artificial Sequence: Synthetic oligonucleotide
  Antisense strand to SEQ ID NO: 556193
uucugacgaagauucaaac

SEQ ID NO: 556195 - RNA, 19 nt, Artificial Sequence
  Description of Artificial Sequence: Synthetic oligonucleotide
  Sense strand starting at position 3662 of SEQ ID NO: 318355
uuugaaucuucgucagaaa

SEQ ID NO: 556196 - RNA, 19 nt, Artificial Sequence
  Description of Artificial Sequence: Synthetic oligonucleotide
  Antisense strand to SEQ ID NO: 556195
uuucugacgaagauucaaa

SEQ ID NO: 556197 - RNA, 19 nt, Artificial Sequence
  Description of Artificial Sequence: Synthetic oligonucleotide
  Sense strand starting at position 3706 of SEQ ID NO: 318355
acacacuugugaucugaaa

SEQ ID NO: 556198 - RNA, 19 nt, Artificial Sequence
  Description of Artificial Sequence: Synthetic oligonucleotide
  Antisense strand to SEQ ID NO: 556197
uuucagaucacaagugugu

SEQ ID NO: 556199 - RNA, 19 nt, Artificial Sequence
  Description of Artificial Sequence: Synthetic oligonucleotide
  Sense strand starting at position 3775 of SEQ ID NO: 318355
gcaauaaaucugggcuuuc

SEQ ID NO: 556200 - RNA, 19 nt, Artificial Sequence
  Description of Artificial Sequence: Synthetic oligonucleotide
  Antisense strand to SEQ ID NO: 556199
gaaagcccagauuuauugc

SEQ ID NO: 556201 - RNA, 19 nt, Artificial Sequence
  Description of Artificial Sequence: Synthetic oligonucleotide
  Sense strand starting at position 3796 of SEQ ID NO: 318355
cuguuucucuaagaagaau

SEQ ID NO: 556202 - RNA, 19 nt, Artificial Sequence
  Description of Artificial Sequence: Synthetic oligonucleotide
  Antisense strand to SEQ ID NO: 556201
auucuucuuagagaaacag

SEQ ID NO: 556203 - RNA, 19 nt, Artificial Sequence
  Description of Artificial Sequence: Synthetic oligonucleotide
  Sense strand starting at position 3860 of SEQ ID NO: 318355
ugaauaaaugaucguagga

SEQ ID NO: 556204 - RNA, 19 nt, Artificial Sequence
  Description of Artificial Sequence: Synthetic oligonucleotide
  Antisense strand to SEQ ID NO: 556203
uccuacgaucauuuauuca

SEQ ID NO: 556205 - RNA, 19 nt, Artificial Sequence
  Description of Artificial Sequence: Synthetic oligonucleotide
  Sense strand starting at position 3862 of SEQ ID NO: 318355
aauaaaugaucguaggagu

SEQ ID NO: 556206 - RNA, 19 nt, Artificial Sequence
  Description of Artificial Sequence: Synthetic oligonucleotide
  Antisense strand to SEQ ID NO: 556205
acuccuacgaucauuuauu

SEQ ID NO: 556207 - RNA, 19 nt, Artificial Sequence
  Description of Artificial Sequence: Synthetic oligonucleotide
  Sense strand starting at position 3865 of SEQ ID NO: 318355
aaaugaucguaggaguaag

SEQ ID NO: 556208 - RNA, 19 nt, Artificial Sequence
  Description of Artificial Sequence: Synthetic oligonucleotide
  Antisense strand to SEQ ID NO: 556207
cuuacuccuacgaucauuu

SEQ ID NO: 556209 - RNA, 19 nt, Artificial Sequence
  Description of Artificial Sequence: Synthetic oligonucleotide
  Sense strand starting at position 3879 of SEQ ID NO: 318355
guaagaauuugcuggguga

SEQ ID NO: 556210 - RNA, 19 nt, Artificial Sequence
  Description of Artificial Sequence: Synthetic oligonucleotide
  Antisense strand to SEQ ID NO: 556209
ucacccagcaaauucuuac

SEQ ID NO: 556211 - RNA, 19 nt, Artificial Sequence
  Description of Artificial Sequence: Synthetic oligonucleotide
  Sense strand starting at position 3912 of SEQ ID NO: 318355
cacccagugcuuugggaaa

SEQ ID NO: 556212 - RNA, 19 nt, Artificial Sequence
  Description of Artificial Sequence: Synthetic oligonucleotide
  Antisense strand to SEQ ID NO: 556211
uuucccaaagcacugggug

SEQ ID NO: 556213 - RNA, 19 nt, Artificial Sequence
  Description of Artificial Sequence: Synthetic oligonucleotide
  Sense strand starting at position 3936 of SEQ ID NO: 318355
gcaggaagaucguuugaga

SEQ ID NO: 556214 - RNA, 19 nt, Artificial Sequence
  Description of Artificial Sequence: Synthetic oligonucleotide
  Antisense strand to SEQ ID NO: 556213
ucucaaacgaucuuccugc

SEQ ID NO: 556215 - RNA, 19 nt, Artificial Sequence
  Description of Artificial Sequence: Synthetic oligonucleotide
  Sense strand starting at position 2425 of SEQ ID NO: 318356
aguaauuaucuaugaagcu

SEQ ID NO: 556216 - RNA, 19 nt, Artificial Sequence
  Description of Artificial Sequence: Synthetic oligonucleotide
  Antisense strand to SEQ ID NO: 556215
agcuucauagauaauuacu

SEQ ID NO: 556217 - RNA, 19 nt, Artificial Sequence
  Description of Artificial Sequence: Synthetic oligonucleotide
  Sense strand starting at position 2432 of SEQ ID NO: 318356
aucuaugaagcuggaagua

SEQ ID NO: 556218 - RNA, 19 nt, Artificial Sequence
  Description of Artificial Sequence: Synthetic oligonucleotide
  Antisense strand to SEQ ID NO: 556217
uacuuccagcuucauagau

SEQ ID NO: 556219 - RNA, 19 nt, Artificial Sequence
  Description of Artificial Sequence: Synthetic oligonucleotide
  Sense strand starting at position 2551 of SEQ ID NO: 318356
uugcccuagucauuaccau

SEQ ID NO: 556220 - RNA, 19 nt, Artificial Sequence
  Description of Artificial Sequence: Synthetic oligonucleotide
  Antisense strand to SEQ ID NO: 556219
augguaaugacuagggcaa

SEQ ID NO: 556221 - RNA, 19 nt, Artificial Sequence
  Description of Artificial Sequence: Synthetic oligonucleotide
  Sense strand starting at position 2630 of SEQ ID NO: 318356
cuacaaugucaagagcagu

SEQ ID NO: 556222 - RNA, 19 nt, Artificial Sequence
  Description of Artificial Sequence: Synthetic oligonucleotide
  Antisense strand to SEQ ID NO: 556221
acugcucuugacauuguag

SEQ ID NO: 556223 - RNA, 19 nt, Artificial Sequence
  Description of Artificial Sequence: Synthetic oligonucleotide
  Sense strand starting at position 2782 of SEQ ID NO: 318356
uaaagagugugcuuuccuu

SEQ ID NO: 556224 - RNA, 19 nt, Artificial Sequence
  Description of Artificial Sequence: Synthetic oligonucleotide
  Antisense strand to SEQ ID NO: 556223
aaggaaagcacacucuuua

SEQ ID NO: 556225 - RNA, 19 nt, Artificial Sequence
  Description of Artificial Sequence: Synthetic oligonucleotide
  Sense strand starting at position 2822 of SEQ ID NO: 318356
aauguugacugaccugaaa

SEQ ID NO: 556226 - RNA, 19 nt, Artificial Sequence
  Description of Artificial Sequence: Synthetic oligonucleotide
  Antisense strand to SEQ ID NO: 556225
uuucaggucagucaacauu

SEQ ID NO: 556227 - RNA, 19 nt, Artificial Sequence
  Description of Artificial Sequence: Synthetic oligonucleotide
  Sense strand starting at position 2853 of SEQ ID NO: 318356
uuauaagggucuugagaaa

SEQ ID NO: 556228 - RNA, 19 nt, Artificial Sequence
  Description of Artificial Sequence: Synthetic oligonucleotide
  Antisense strand to SEQ ID NO: 556227
uuucucaagacccuuauaa

SEQ ID NO: 556229 - RNA, 19 nt, Artificial Sequence
  Description of Artificial Sequence: Synthetic oligonucleotide
  Sense strand starting at position 2865 of SEQ ID NO: 318356
ugagaaacuucggaaugcu

SEQ ID NO: 556230 - RNA, 19 nt, Artificial Sequence
  Description of Artificial Sequence: Synthetic oligonucleotide
  Antisense strand to SEQ ID NO: 556229
agcauuccgaaguuucuca

SEQ ID NO: 556231 - RNA, 19 nt, Artificial Sequence
  Description of Artificial Sequence: Synthetic oligonucleotide
  Sense strand starting at position 2934 of SEQ ID NO: 318356
agaucuaccuaauacguca

SEQ ID NO: 556232 - RNA, 19 nt, Artificial Sequence
  Description of Artificial Sequence: Synthetic oligonucleotide
  Antisense strand to SEQ ID NO: 556231
ugacguauuagguagaucu

SEQ ID NO: 556233 - RNA, 19 nt, Artificial Sequence
  Description of Artificial Sequence: Synthetic oligonucleotide
  Sense strand starting at position 3050 of SEQ ID NO: 318356
ugugguugguguuuauauu

SEQ ID NO: 556234 - RNA, 19 nt, Artificial Sequence
  Description of Artificial Sequence: Synthetic oligonucleotide
  Antisense strand to SEQ ID NO: 556233
aauauaaacaccaaccaca

SEQ ID NO: 556235 - RNA, 19 nt, Artificial Sequence
  Description of Artificial Sequence: Synthetic oligonucleotide
  Sense strand starting at position 3056 of SEQ ID NO: 318356
ugguguuuauauucugauc

SEQ ID NO: 556236 - RNA, 19 nt, Artificial Sequence
  Description of Artificial Sequence: Synthetic oligonucleotide
  Antisense strand to SEQ ID NO: 556235
gaucagaauauaaacacca

SEQ ID NO: 556237 - RNA, 19 nt, Artificial Sequence
  Description of Artificial Sequence: Synthetic oligonucleotide
  Sense strand starting at position 3061 of SEQ ID NO: 318356
uuuauauucugaucugcag

SEQ ID NO: 556238 - RNA, 19 nt, Artificial Sequence
  Description of Artificial Sequence: Synthetic oligonucleotide
  Antisense strand to SEQ ID NO: 556237
cugcagaucagaauauaaa

SEQ ID NO: 556239 - RNA, 19 nt, Artificial Sequence
  Description of Artificial Sequence: Synthetic oligonucleotide
  Sense strand starting at position 3064 of SEQ ID NO: 318356
auauucugaucugcagaaa

SEQ ID NO: 556240 - RNA, 19 nt, Artificial Sequence
  Description of Artificial Sequence: Synthetic oligonucleotide
  Antisense strand to SEQ ID NO: 556239
uuucugcagaucagaauau

SEQ ID NO: 556241 - RNA, 19 nt, Artificial Sequence
  Description of Artificial Sequence: Synthetic oligonucleotide
  Sense strand starting at position 3083 of SEQ ID NO: 318356
uggcauuucuuucuugacu

SEQ ID NO: 556242 - RNA, 19 nt, Artificial Sequence
  Description of Artificial Sequence: Synthetic oligonucleotide
  Antisense strand to SEQ ID NO: 556241
agucaagaaagaaaugcca

SEQ ID NO: 556243 - RNA, 19 nt, Artificial Sequence
  Description of Artificial Sequence: Synthetic oligonucleotide
  Sense strand starting at position 3143 of SEQ ID NO: 318356
ucagguguuugccuccuua

SEQ ID NO: 556244 - RNA, 19 nt, Artificial Sequence
  Description of Artificial Sequence: Synthetic oligonucleotide
  Antisense strand to SEQ ID NO: 556243
uaaggaggcaaacaccuga

SEQ ID NO: 556245 - RNA, 19 nt, Artificial Sequence
  Description of Artificial Sequence: Synthetic oligonucleotide
  Sense strand starting at position 3147 of SEQ ID NO: 318356
guguuugccuccuuauaca

SEQ ID NO: 556246 - RNA, 19 nt, Artificial Sequence
  Description of Artificial Sequence: Synthetic oligonucleotide
  Antisense strand to SEQ ID NO: 556245
uguauaaggaggcaaacac

SEQ ID NO: 556247 - RNA, 19 nt, Artificial Sequence
  Description of Artificial Sequence: Synthetic oligonucleotide
  Sense strand starting at position 3177 of SEQ ID NO: 318356
cugaaauagcuuugucaua

SEQ ID NO: 556248 - RNA, 19 nt, Artificial Sequence
  Description of Artificial Sequence: Synthetic oligonucleotide
  Antisense strand to SEQ ID NO: 556247
uaugacaaagcuauuucag

SEQ ID NO: 556249 - RNA, 19 nt, Artificial Sequence
  Description of Artificial Sequence: Synthetic oligonucleotide
  Sense strand starting at position 3178 of SEQ ID NO: 318356
ugaaauagcuuugucauau

SEQ ID NO: 556250 - RNA, 19 nt, Artificial Sequence
  Description of Artificial Sequence: Synthetic oligonucleotide
  Antisense strand to SEQ ID NO: 556249
auaugacaaagcuauuuca

SEQ ID NO: 556251 - RNA, 19 nt, Artificial Sequence
  Description of Artificial Sequence: Synthetic oligonucleotide
  Sense strand starting at position 3204 of SEQ ID NO: 318356
gcuccuguucucgggaaca

SEQ ID NO: 556252 - RNA, 19 nt, Artificial Sequence
  Description of Artificial Sequence: Synthetic oligonucleotide
  Antisense strand to SEQ ID NO: 556251
uguucccgagaacaggagc

SEQ ID NO: 556253 - RNA, 19 nt, Artificial Sequence
  Description of Artificial Sequence: Synthetic oligonucleotide
  Sense strand starting at position 3206 of SEQ ID NO: 318356
uccuguucucgggaacaug

SEQ ID NO: 556254 - RNA, 19 nt, Artificial Sequence
  Description of Artificial Sequence: Synthetic oligonucleotide
  Antisense strand to SEQ ID NO: 556253
cauguucccgagaacagga

SEQ ID NO: 556255 - RNA, 19 nt, Artificial Sequence
  Description of Artificial Sequence: Synthetic oligonucleotide
  Sense strand starting at position 3331 of SEQ ID NO: 318356
ucuauagccuccucaggau

SEQ ID NO: 556256 - RNA, 19 nt, Artificial Sequence
  Description of Artificial Sequence: Synthetic oligonucleotide
  Antisense strand to SEQ ID NO: 556255
auccugaggaggcuauaga

SEQ ID NO: 556257 - RNA, 19 nt, Artificial Sequence
  Description of Artificial Sequence: Synthetic oligonucleotide
  Sense strand starting at position 3351 of SEQ ID NO: 318356
ccuauugagcaaugaaagu

SEQ ID NO: 556258 - RNA, 19 nt, Artificial Sequence
  Description of Artificial Sequence: Synthetic oligonucleotide
  Antisense strand to SEQ ID NO: 556257
acuuucauugcucaauagg

SEQ ID NO: 556259 - RNA, 19 nt, Artificial Sequence
  Description of Artificial Sequence: Synthetic oligonucleotide
  Sense strand starting at position 3390 of SEQ ID NO: 318356
uccacauagcagugugaaa

SEQ ID NO: 556260 - RNA, 19 nt, Artificial Sequence
  Description of Artificial Sequence: Synthetic oligonucleotide
  Antisense strand to SEQ ID NO: 556259
uuucacacugcuaugugga

SEQ ID NO: 556261 - RNA, 19 nt, Artificial Sequence
  Description of Artificial Sequence: Synthetic oligonucleotide
  Sense strand starting at position 3392 of SEQ ID NO: 318356
cacauagcagugugaaauu

SEQ ID NO: 556262 - RNA, 19 nt, Artificial Sequence
  Description of Artificial Sequence: Synthetic oligonucleotide
  Antisense strand to SEQ ID NO: 556261
aauuucacacugcuaugug

SEQ ID NO: 556263 - RNA, 19 nt, Artificial Sequence
  Description of Artificial Sequence: Synthetic oligonucleotide
  Sense strand starting at position 3408 of SEQ ID NO: 318356
auuagagaauuguaugcaa

SEQ ID NO: 556264 - RNA, 19 nt, Artificial Sequence
  Description of Artificial Sequence: Synthetic oligonucleotide
  Antisense strand to SEQ ID NO: 556263
uugcauacaauucucuaau

SEQ ID NO: 556265 - RNA, 19 nt, Artificial Sequence
  Description of Artificial Sequence: Synthetic oligonucleotide
  Sense strand starting at position 3429 of SEQ ID NO: 318356
aggauacugcaguguuauc

SEQ ID NO: 556266 - RNA, 19 nt, Artificial Sequence
  Description of Artificial Sequence: Synthetic oligonucleotide
  Antisense strand to SEQ ID NO: 556265
gauaacacugcaguauccu

SEQ ID NO: 556267 - RNA, 19 nt, Artificial Sequence
  Description of Artificial Sequence: Synthetic oligonucleotide
  Sense strand starting at position 3601 of SEQ ID NO: 318356
gcccuucuccuugggaaga

SEQ ID NO: 556268 - RNA, 19 nt, Artificial Sequence
  Description of Artificial Sequence: Synthetic oligonucleotide
  Antisense strand to SEQ ID NO: 556267
ucuucccaaggagaagggc

SEQ ID NO: 556269 - RNA, 19 nt, Artificial Sequence
  Description of Artificial Sequence: Synthetic oligonucleotide
  Sense strand starting at position 3615 of SEQ ID NO: 318356
gaagaacugcauugaguau

SEQ ID NO: 556270 - RNA, 19 nt, Artificial Sequence
  Description of Artificial Sequence: Synthetic oligonucleotide
  Antisense strand to SEQ ID NO: 556269
auacucaaugcaguucuuc

SEQ ID NO: 556271 - RNA, 19 nt, Artificial Sequence
  Description of Artificial Sequence: Synthetic oligonucleotide
  Sense strand starting at position 3622 of SEQ ID NO: 318356
ugcauugaguauucuugga

SEQ ID NO: 556272 - RNA, 19 nt, Artificial Sequence
  Description of Artificial Sequence: Synthetic oligonucleotide
  Antisense strand to SEQ ID NO: 556271
uccaagaauacucaaugca

SEQ ID NO: 556273 - RNA, 19 nt, Artificial Sequence
  Description of Artificial Sequence: Synthetic oligonucleotide
  Sense strand starting at position 3624 of SEQ ID NO: 318356
cauugaguauucuuggauu

SEQ ID NO: 556274 - RNA, 19 nt, Artificial Sequence
  Description of Artificial Sequence: Synthetic oligonucleotide
  Antisense strand to SEQ ID NO: 556273
aauccaagaauacucaaug

SEQ ID NO: 556275 - RNA, 19 nt, Artificial Sequence
  Description of Artificial Sequence: Synthetic oligonucleotide
  Sense strand starting at position 3636 of SEQ ID NO: 318356
uuggauuuggguuguguuu

SEQ ID NO: 556276 - RNA, 19 nt, Artificial Sequence
  Description of Artificial Sequence: Synthetic oligonucleotide
  Antisense strand to SEQ ID NO: 556275
aaacacaacccaaauccaa

SEQ ID NO: 556277 - RNA, 19 nt, Artificial Sequence
  Description of Artificial Sequence: Synthetic oligonucleotide
  Sense strand starting at position 3645 of SEQ ID NO: 318356
gguuguguuuccagaggug

SEQ ID NO: 556278 - RNA, 19 nt, Artificial Sequence
  Description of Artificial Sequence: Synthetic oligonucleotide
  Antisense strand to SEQ ID NO: 556277
caccucuggaaacacaacc

SEQ ID NO: 556279 - RNA, 19 nt, Artificial Sequence
  Description of Artificial Sequence: Synthetic oligonucleotide
  Sense strand starting at position 3648 of SEQ ID NO: 318356
uguguuuccagaggugauu

SEQ ID NO: 556280 - RNA, 19 nt, Artificial Sequence
  Description of Artificial Sequence: Synthetic oligonucleotide
  Antisense strand to SEQ ID NO: 556279
aaucaccucuggaaacaca

SEQ ID NO: 556281 - RNA, 19 nt, Artificial Sequence
  Description of Artificial Sequence: Synthetic oligonucleotide
  Sense strand starting at position 3661 of SEQ ID NO: 318356
gugauuucuuucugauacu

SEQ ID NO: 556282 - RNA, 19 nt, Artificial Sequence
  Description of Artificial Sequence: Synthetic oligonucleotide
  Antisense strand to SEQ ID NO: 556281
aguaucagaaagaaaucac

SEQ ID NO: 556283 - RNA, 19 nt, Artificial Sequence
  Description of Artificial Sequence: Synthetic oligonucleotide
  Sense strand starting at position 3707 of SEQ ID NO: 318356
gaacaagaggguugcuuaa

SEQ ID NO: 556284 - RNA, 19 nt, Artificial Sequence
  Description of Artificial Sequence: Synthetic oligonucleotide
  Antisense strand to SEQ ID NO: 556283
uuaagcaacccucuuguuc

SEQ ID NO: 556285 - RNA, 19 nt, Artificial Sequence
  Description of Artificial Sequence: Synthetic oligonucleotide
  Sense strand starting at position 3774 of SEQ ID NO: 318356
caggcacuucuguauggaa

SEQ ID NO: 556286 - RNA, 19 nt, Artificial Sequence
  Description of Artificial Sequence: Synthetic oligonucleotide
  Antisense strand to SEQ ID NO: 556285
uuccauacagaagugccug

SEQ ID NO: 556287 - RNA, 19 nt, Artificial Sequence
  Description of Artificial Sequence: Synthetic oligonucleotide
  Sense strand starting at position 3776 of SEQ ID NO: 318356
ggcacuucuguauggaagu

SEQ ID NO: 556288 - RNA, 19 nt, Artificial Sequence
  Description of Artificial Sequence: Synthetic oligonucleotide
  Antisense strand to SEQ ID NO: 556287
acuuccauacagaagugcc

SEQ ID NO: 556289 - RNA, 19 nt, Artificial Sequence
  Description of Artificial Sequence: Synthetic oligonucleotide
  Sense strand starting at position 3787 of SEQ ID NO: 318356
auggaagucugucuuagga

SEQ ID NO: 556290 - RNA, 19 nt, Artificial Sequence
  Description of Artificial Sequence: Synthetic oligonucleotide
  Antisense strand to SEQ ID NO: 556289
uccuaagacagacuuccau

SEQ ID NO: 556291 - RNA, 19 nt, Artificial Sequence
  Description of Artificial Sequence: Synthetic oligonucleotide
  Sense strand starting at position 3789 of SEQ ID NO: 318356
ggaagucugucuuaggaau

SEQ ID NO: 556292 - RNA, 19 nt, Artificial Sequence
  Description of Artificial Sequence: Synthetic oligonucleotide
  Antisense strand to SEQ ID NO: 556291
auuccuaagacagacuucc

SEQ ID NO: 556293 - RNA, 19 nt, Artificial Sequence
  Description of Artificial Sequence: Synthetic oligonucleotide
  Sense strand starting at position 3878 of SEQ ID NO: 318356
auauauaggccuugauuga

SEQ ID NO: 556294 - RNA, 19 nt, Artificial Sequence
  Description of Artificial Sequence: Synthetic oligonucleotide
  Antisense strand to SEQ ID NO: 556293
ucaaucaaggccuauauau

SEQ ID NO: 556295 - RNA, 19 nt, Artificial Sequence
  Description of Artificial Sequence: Synthetic oligonucleotide
  Sense strand starting at position 2379 of SEQ ID NO: 318357
aguaauuaucuaugaagcu

SEQ ID NO: 556296 - RNA, 19 nt, Artificial Sequence
  Description of Artificial Sequence: Synthetic oligonucleotide
  Antisense strand to SEQ ID NO: 556295
agcuucauagauaauuacu

SEQ ID NO: 556297 - RNA, 19 nt, Artificial Sequence
  Description of Artificial Sequence: Synthetic oligonucleotide
  Sense strand starting at position 2386 of SEQ ID NO: 318357
aucuaugaagcuggaagua

SEQ ID NO: 556298 - RNA, 19 nt, Artificial Sequence
  Description of Artificial Sequence: Synthetic oligonucleotide
  Antisense strand to SEQ ID NO: 556297
uacuuccagcuucauagau

SEQ ID NO: 556299 - RNA, 19 nt, Artificial Sequence
  Description of Artificial Sequence: Synthetic oligonucleotide
  Sense strand starting at position 2505 of SEQ ID NO: 318357
uugcccuagucauuaccau

SEQ ID NO: 556300 - RNA, 19 nt, Artificial Sequence
  Description of Artificial Sequence: Synthetic oligonucleotide
  Antisense strand to SEQ ID NO: 556299
augguaaugacuagggcaa

SEQ ID NO: 556301 - RNA, 19 nt, Artificial Sequence
  Description of Artificial Sequence: Synthetic oligonucleotide
  Sense strand starting at position 2584 of SEQ ID NO: 318357
cuacaaugucaagagcagu

SEQ ID NO: 556302 - RNA, 19 nt, Artificial Sequence
  Description of Artificial Sequence: Synthetic oligonucleotide
  Antisense strand to SEQ ID NO: 556301
acugcucuugacauuguag

SEQ ID NO: 556303 - RNA, 19 nt, Artificial Sequence
  Description of Artificial Sequence: Synthetic oligonucleotide
  Sense strand starting at position 2736 of SEQ ID NO: 318357
uaaagagugugcuuuccuu

SEQ ID NO: 556304 - RNA, 19 nt, Artificial Sequence
  Description of Artificial Sequence: Synthetic oligonucleotide
  Antisense strand to SEQ ID NO: 556303
aaggaaagcacacucuuua

SEQ ID NO: 556305 - RNA, 19 nt, Artificial Sequence
  Description of Artificial Sequence: Synthetic oligonucleotide
  Sense strand starting at position 2776 of SEQ ID NO: 318357
aauguugacugaccugaaa

SEQ ID NO: 556306 - RNA, 19 nt, Artificial Sequence
  Description of Artificial Sequence: Synthetic oligonucleotide
  Antisense strand to SEQ ID NO: 556305
uuucaggucagucaacauu

SEQ ID NO: 556307 - RNA, 19 nt, Artificial Sequence
  Description of Artificial Sequence: Synthetic oligonucleotide
  Sense strand starting at position 2807 of SEQ ID NO: 318357
uuauaagggucuugagaaa

SEQ ID NO: 556308 - RNA, 19 nt, Artificial Sequence
  Description of Artificial Sequence: Synthetic oligonucleotide
  Antisense strand to SEQ ID NO: 556307
uuucucaagacccuuauaa

SEQ ID NO: 556309 - RNA, 19 nt, Artificial Sequence
  Description of Artificial Sequence: Synthetic oligonucleotide
  Sense strand starting at position 2819 of SEQ ID NO: 318357
ugagaaacuucggaaugcu

SEQ ID NO: 556310 - RNA, 19 nt, Artificial Sequence
  Description of Artificial Sequence: Synthetic oligonucleotide
  Antisense strand to SEQ ID NO: 556309
agcauuccgaaguuucuca

SEQ ID NO: 556311 - RNA, 19 nt, Artificial Sequence
  Description of Artificial Sequence: Synthetic oligonucleotide
  Sense strand starting at position 2888 of SEQ ID NO: 318357
agaucuaccuaauacguca

SEQ ID NO: 556312 - RNA, 19 nt, Artificial Sequence
  Description of Artificial Sequence: Synthetic oligonucleotide
  Antisense strand to SEQ ID NO: 556311
ugacguauuagguagaucu

SEQ ID NO: 556313 - RNA, 19 nt, Artificial Sequence
  Description of Artificial Sequence: Synthetic oligonucleotide
  Sense strand starting at position 3004 of SEQ ID NO: 318357
ugugguugguguuuauauu

SEQ ID NO: 556314 - RNA, 19 nt, Artificial Sequence
  Description of Artificial Sequence: Synthetic oligonucleotide
  Antisense strand to SEQ ID NO: 556313
aauauaaacaccaaccaca

SEQ ID NO: 556315 - RNA, 19 nt, Artificial Sequence
  Description of Artificial Sequence: Synthetic oligonucleotide
  Sense strand starting at position 3010 of SEQ ID NO: 318357
ugguguuuauauucugauc

SEQ ID NO: 556316 - RNA, 19 nt, Artificial Sequence
  Description of Artificial Sequence: Synthetic oligonucleotide
  Antisense strand to SEQ ID NO: 556315
gaucagaauauaaacacca

SEQ ID NO: 556317 - RNA, 19 nt, Artificial Sequence
  Description of Artificial Sequence: Synthetic oligonucleotide
  Sense strand starting at position 3015 of SEQ ID NO: 318357
uuuauauucugaucugcag

SEQ ID NO: 556318 - RNA, 19 nt, Artificial Sequence
  Description of Artificial Sequence: Synthetic oligonucleotide
  Antisense strand to SEQ ID NO: 556317
cugcagaucagaauauaaa

SEQ ID NO: 556319 - RNA, 19 nt, Artificial Sequence
  Description of Artificial Sequence: Synthetic oligonucleotide
  Sense strand starting at position 3018 of SEQ ID NO: 318357
auauucugaucugcagaaa

SEQ ID NO: 556320 - RNA, 19 nt, Artificial Sequence
  Description of Artificial Sequence: Synthetic oligonucleotide
  Antisense strand to SEQ ID NO: 556319
uuucugcagaucagaauau

SEQ ID NO: 556321 - RNA, 19 nt, Artificial Sequence
  Description of Artificial Sequence: Synthetic oligonucleotide
  Sense strand starting at position 3037 of SEQ ID NO: 318357
uggcauuucuuucuugacu

SEQ ID NO: 556322 - RNA, 19 nt, Artificial Sequence
  Description of Artificial Sequence: Synthetic oligonucleotide
  Antisense strand to SEQ ID NO: 556321
agucaagaaagaaaugcca

SEQ ID NO: 556323 - RNA, 19 nt, Artificial Sequence
  Description of Artificial Sequence: Synthetic oligonucleotide
  Sense strand starting at position 3097 of SEQ ID NO: 318357
ucagguguuugccuccuua

SEQ ID NO: 556324 - RNA, 19 nt, Artificial Sequence
  Description of Artificial Sequence: Synthetic oligonucleotide
  Antisense strand to SEQ ID NO: 556323
uaaggaggcaaacaccuga

SEQ ID NO: 556325 - RNA, 19 nt, Artificial Sequence
  Description of Artificial Sequence: Synthetic oligonucleotide
  Sense strand starting at position 3101 of SEQ ID NO: 318357
guguuugccuccuuauaca

SEQ ID NO: 556326 - RNA, 19 nt, Artificial Sequence
  Description of Artificial Sequence: Synthetic oligonucleotide
  Antisense strand to SEQ ID NO: 556325
uguauaaggaggcaaacac

SEQ ID NO: 556327 - RNA, 19 nt, Artificial Sequence
  Description of Artificial Sequence: Synthetic oligonucleotide
  Sense strand starting at position 3131 of SEQ ID NO: 318357
cugaaauagcuuugucaua

SEQ ID NO: 556328 - RNA, 19 nt, Artificial Sequence
  Description of Artificial Sequence: Synthetic oligonucleotide
  Antisense strand to SEQ ID NO: 556327
uaugacaaagcuauuucag

SEQ ID NO: 556329 - RNA, 19 nt, Artificial Sequence
  Description of Artificial Sequence: Synthetic oligonucleotide
  Sense strand starting at position 3132 of SEQ ID NO: 318357
ugaaauagcuuugucauau

SEQ ID NO: 556330 - RNA, 19 nt, Artificial Sequence
  Description of Artificial Sequence: Synthetic oligonucleotide
  Antisense strand to SEQ ID NO: 556329
auaugacaaagcuauuuca

SEQ ID NO: 556331 - RNA, 19 nt, Artificial Sequence
  Description of Artificial Sequence: Synthetic oligonucleotide
  Sense strand starting at position 3158 of SEQ ID NO: 318357
gcuccuguucucgggaaca

SEQ ID NO: 556332 - RNA, 19 nt, Artificial Sequence
  Description of Artificial Sequence: Synthetic oligonucleotide
  Antisense strand to SEQ ID NO: 556331
uguucccgagaacaggagc

SEQ ID NO: 556333 - RNA, 19 nt, Artificial Sequence
  Description of Artificial Sequence: Synthetic oligonucleotide
  Sense strand starting at position 3160 of SEQ ID NO: 318357
uccuguucucgggaacaug

SEQ ID NO: 556334 - RNA, 19 nt, Artificial Sequence
  Description of Artificial Sequence: Synthetic oligonucleotide
  Antisense strand to SEQ ID NO: 556333
cauguucccgagaacagga

SEQ ID NO: 556335 - RNA, 19 nt, Artificial Sequence
  Description of Artificial Sequence: Synthetic oligonucleotide
  Sense strand starting at position 3285 of SEQ ID NO: 318357
ucuauagccuccucaggau

SEQ ID NO: 556336 - RNA, 19 nt, Artificial Sequence
  Description of Artificial Sequence: Synthetic oligonucleotide
  Antisense strand to SEQ ID NO: 556335
auccugaggaggcuauaga

SEQ ID NO: 556337 - RNA, 19 nt, Artificial Sequence
  Description of Artificial Sequence: Synthetic oligonucleotide
  Sense strand starting at position 3305 of SEQ ID NO: 318357
ccuauugagcaaugaaagu

SEQ ID NO: 556338 - RNA, 19 nt, Artificial Sequence
  Description of Artificial Sequence: Synthetic oligonucleotide
  Antisense strand to SEQ ID NO: 556337
acuuucauugcucaauagg

SEQ ID NO: 556339 - RNA, 19 nt, Artificial Sequence
  Description of Artificial Sequence: Synthetic oligonucleotide
  Sense strand starting at position 3344 of SEQ ID NO: 318357
uccacauagcagugugaaa

SEQ ID NO: 556340 - RNA, 19 nt, Artificial Sequence
  Description of Artificial Sequence: Synthetic oligonucleotide
  Antisense strand to SEQ ID NO: 556339
uuucacacugcuaugugga

SEQ ID NO: 556341 - RNA, 19 nt, Artificial Sequence
  Description of Artificial Sequence: Synthetic oligonucleotide
  Sense strand starting at position 3346 of SEQ ID NO: 318357
cacauagcagugugaaauu

SEQ ID NO: 556342 - RNA, 19 nt, Artificial Sequence
  Description of Artificial Sequence: Synthetic oligonucleotide
  Antisense strand to SEQ ID NO: 556341
aauuucacacugcuaugug

SEQ ID NO: 556343 - RNA, 19 nt, Artificial Sequence
  Description of Artificial Sequence: Synthetic oligonucleotide
  Sense strand starting at position 3362 of SEQ ID NO: 318357
auuagagaauuguaugcaa

SEQ ID NO: 556344 - RNA, 19 nt, Artificial Sequence
  Description of Artificial Sequence: Synthetic oligonucleotide
  Antisense strand to SEQ ID NO: 556343
uugcauacaauucucuaau

SEQ ID NO: 556345 - RNA, 19 nt, Artificial Sequence
  Description of Artificial Sequence: Synthetic oligonucleotide
  Sense strand starting at position 3383 of SEQ ID NO: 318357
aggauacugcaguguuauc

SEQ ID NO: 556346 - RNA, 19 nt, Artificial Sequence
  Description of Artificial Sequence: Synthetic oligonucleotide
  Antisense strand to SEQ ID NO: 556345
gauaacacugcaguauccu

SEQ ID NO: 556347 - RNA, 19 nt, Artificial Sequence
  Description of Artificial Sequence: Synthetic oligonucleotide
  Sense strand starting at position 3555 of SEQ ID NO: 318357
gcccuucuccuugggaaga

SEQ ID NO: 556348 - RNA, 19 nt, Artificial Sequence
  Description of Artificial Sequence: Synthetic oligonucleotide
  Antisense strand to SEQ ID NO: 556347
ucuucccaaggagaagggc

SEQ ID NO: 556349 - RNA, 19 nt, Artificial Sequence
  Description of Artificial Sequence: Synthetic oligonucleotide
  Sense strand starting at position 3569 of SEQ ID NO: 318357
gaagaacugcauugaguau

SEQ ID NO: 556350 - RNA, 19 nt, Artificial Sequence
  Description of Artificial Sequence: Synthetic oligonucleotide
  Antisense strand to SEQ ID NO: 556349
auacucaaugcaguucuuc

SEQ ID NO: 556351 - RNA, 19 nt, Artificial Sequence
  Description of Artificial Sequence: Synthetic oligonucleotide
  Sense strand starting at position 3576 of SEQ ID NO: 318357
ugcauugaguauucuugga

SEQ ID NO: 556352 - RNA, 19 nt, Artificial Sequence
  Description of Artificial Sequence: Synthetic oligonucleotide
  Antisense strand to SEQ ID NO: 556351
uccaagaauacucaaugca

SEQ ID NO: 556353 - RNA, 19 nt, Artificial Sequence
  Description of Artificial Sequence: Synthetic oligonucleotide
  Sense strand starting at position 3578 of SEQ ID NO: 318357
cauugaguauucuuggauu

SEQ ID NO: 556354 - RNA, 19 nt, Artificial Sequence
  Description of Artificial Sequence: Synthetic oligonucleotide
  Antisense strand to SEQ ID NO: 556353
aauccaagaauacucaaug

SEQ ID NO: 556355 - RNA, 19 nt, Artificial Sequence
  Description of Artificial Sequence: Synthetic oligonucleotide
  Sense strand starting at position 3590 of SEQ ID NO: 318357
uuggauuuggguuguguuu

SEQ ID NO: 556356 - RNA, 19 nt, Artificial Sequence
  Description of Artificial Sequence: Synthetic oligonucleotide
  Antisense strand to SEQ ID NO: 556355
aaacacaacccaaauccaa

SEQ ID NO: 556357 - RNA, 19 nt, Artificial Sequence
  Description of Artificial Sequence: Synthetic oligonucleotide
  Sense strand starting at position 3599 of SEQ ID NO: 318357
gguuguguuuccagaggug

SEQ ID NO: 556358 - RNA, 19 nt, Artificial Sequence
  Description of Artificial Sequence: Synthetic oligonucleotide
  Antisense strand to SEQ ID NO: 556357
caccucuggaaacacaacc

SEQ ID NO: 556359 - RNA, 19 nt, Artificial Sequence
  Description of Artificial Sequence: Synthetic oligonucleotide
  Sense strand starting at position 3602 of SEQ ID NO: 318357
uguguuuccagaggugauu

SEQ ID NO: 556360 - RNA, 19 nt, Artificial Sequence
  Description of Artificial Sequence: Synthetic oligonucleotide
  Antisense strand to SEQ ID NO: 556359
aaucaccucuggaaacaca

SEQ ID NO: 556361 - RNA, 19 nt, Artificial Sequence
  Description of Artificial Sequence: Synthetic oligonucleotide
  Sense strand starting at position 3615 of SEQ ID NO: 318357
gugauuucuuucugauacu

SEQ ID NO: 556362 - RNA, 19 nt, Artificial Sequence
  Description of Artificial Sequence: Synthetic oligonucleotide
  Antisense strand to SEQ ID NO: 556361
aguaucagaaagaaaucac

SEQ ID NO: 556363 - RNA, 19 nt, Artificial Sequence
  Description of Artificial Sequence: Synthetic oligonucleotide
  Sense strand starting at position 3661 of SEQ ID NO: 318357
gaacaagaggguugcuuaa

SEQ ID NO: 556364 - RNA, 19 nt, Artificial Sequence
  Description of Artificial Sequence: Synthetic oligonucleotide
  Antisense strand to SEQ ID NO: 556363
uuaagcaacccucuuguuc

SEQ ID NO: 556365 - RNA, 19 nt, Artificial Sequence
  Description of Artificial Sequence: Synthetic oligonucleotide
  Sense strand starting at position 3728 of SEQ ID NO: 318357
caggcacuucuguauggaa

SEQ ID NO: 556366 - RNA, 19 nt, Artificial Sequence
  Description of Artificial Sequence: Synthetic oligonucleotide
  Antisense strand to SEQ ID NO: 556365
uuccauacagaagugccug

SEQ ID NO: 556367 - RNA, 19 nt, Artificial Sequence
  Description of Artificial Sequence: Synthetic oligonucleotide
  Sense strand starting at position 3730 of SEQ ID NO: 318357
ggcacuucuguauggaagu

SEQ ID NO: 556368 - RNA, 19 nt, Artificial Sequence
  Description of Artificial Sequence: Synthetic oligonucleotide
  Antisense strand to SEQ ID NO: 556367
acuuccauacagaagugcc

SEQ ID NO: 556369 - RNA, 19 nt, Artificial Sequence
  Description of Artificial Sequence: Synthetic oligonucleotide
  Sense strand starting at position 3741 of SEQ ID NO: 318357
auggaagucugucuuagga

SEQ ID NO: 556370 - RNA, 19 nt, Artificial Sequence
  Description of Artificial Sequence: Synthetic oligonucleotide
  Antisense strand to SEQ ID NO: 556369
uccuaagacagacuuccau

SEQ ID NO: 556371 - RNA, 19 nt, Artificial Sequence
  Description of Artificial Sequence: Synthetic oligonucleotide
  Sense strand starting at position 3743 of SEQ ID NO: 318357
ggaagucugucuuaggaau

SEQ ID NO: 556372 - RNA, 19 nt, Artificial Sequence
  Description of Artificial Sequence: Synthetic oligonucleotide
  Antisense strand to SEQ ID NO: 556371
auuccuaagacagacuucc

SEQ ID NO: 556373 - RNA, 19 nt, Artificial Sequence
  Description of Artificial Sequence: Synthetic oligonucleotide
  Sense strand starting at position 3832 of SEQ ID NO: 318357
auauauaggccuugauuga

SEQ ID NO: 556374 - RNA, 19 nt, Artificial Sequence
  Description of Artificial Sequence: Synthetic oligonucleotide
  Antisense strand to SEQ ID NO: 556373
ucaaucaaggccuauauau

SEQ ID NO: 556375 - RNA, 19 nt, Artificial Sequence
  Description of Artificial Sequence: Synthetic oligonucleotide
  Sense strand starting at position 2124 of SEQ ID NO: 318358
ccaauaacugcacgaagaa

SEQ ID NO: 556376 - RNA, 19 nt, Artificial Sequence
  Description of Artificial Sequence: Synthetic oligonucleotide
  Antisense strand to SEQ ID NO: 556375
uucuucgugcaguuauugg

SEQ ID NO: 556377 - RNA, 19 nt, Artificial Sequence
  Description of Artificial Sequence: Synthetic oligonucleotide
  Sense strand starting at position 2240 of SEQ ID NO: 318358
ccaguaucggugcauagga

SEQ ID NO: 556378 - RNA, 19 nt, Artificial Sequence
  Description of Artificial Sequence: Synthetic oligonucleotide
  Antisense strand to SEQ ID NO: 556377
uccuaugcaccgauacugg

SEQ ID NO: 556379 - RNA, 19 nt, Artificial Sequence
  Description of Artificial Sequence: Synthetic oligonucleotide
  Sense strand starting at position 2242 of SEQ ID NO: 318358
aguaucggugcauaggaaa

SEQ ID NO: 556380 - RNA, 19 nt, Artificial Sequence
  Description of Artificial Sequence: Synthetic oligonucleotide
  Antisense strand to SEQ ID NO: 556379
uuuccuaugcaccgauacu

SEQ ID NO: 556381 - RNA, 19 nt, Artificial Sequence
  Description of Artificial Sequence: Synthetic oligonucleotide
  Sense strand starting at position 2293 of SEQ ID NO: 318358
gaggcuagccguucugcaa

SEQ ID NO: 556382 - RNA, 19 nt, Artificial Sequence
  Description of Artificial Sequence: Synthetic oligonucleotide
  Antisense strand to SEQ ID NO: 556381
uugcagaacggcuagccuc

SEQ ID NO: 556383 - RNA, 19 nt, Artificial Sequence
  Description of Artificial Sequence: Synthetic oligonucleotide
  Sense strand starting at position 2422 of SEQ ID NO: 318358
acaaaucuggcuuguugga

SEQ ID NO: 556384 - RNA, 19 nt, Artificial Sequence
  Description of Artificial Sequence: Synthetic oligonucleotide
  Antisense strand to SEQ ID NO: 556383
uccaacaagccagauuugu

SEQ ID NO: 556385 - RNA, 19 nt, Artificial Sequence
  Description of Artificial Sequence: Synthetic oligonucleotide
  Sense strand starting at position 2446 of SEQ ID NO: 318358
gacaauuagccggacccua

SEQ ID NO: 556386 - RNA, 19 nt, Artificial Sequence
  Description of Artificial Sequence: Synthetic oligonucleotide
  Antisense strand to SEQ ID NO: 556385
uaggguccggcuaauuguc

SEQ ID NO: 556387 - RNA, 19 nt, Artificial Sequence
  Description of Artificial Sequence: Synthetic oligonucleotide
  Sense strand starting at position 2479 of SEQ ID NO: 318358
uuuagcauuuccguggaga

SEQ ID NO: 556388 - RNA, 19 nt, Artificial Sequence
  Description of Artificial Sequence: Synthetic oligonucleotide
  Antisense strand to SEQ ID NO: 556387
ucuccacggaaaugcuaaa

SEQ ID NO: 556389 - RNA, 19 nt, Artificial Sequence
  Description of Artificial Sequence: Synthetic oligonucleotide
  Sense strand starting at position 2480 of SEQ ID NO: 318358
uuagcauuuccguggagac

SEQ ID NO: 556390 - RNA, 19 nt, Artificial Sequence
  Description of Artificial Sequence: Synthetic oligonucleotide
  Antisense strand to SEQ ID NO: 556389
gucuccacggaaaugcuaa

SEQ ID NO: 556391 - RNA, 19 nt, Artificial Sequence
  Description of Artificial Sequence: Synthetic oligonucleotide
  Sense strand starting at position 2534 of SEQ ID NO: 318358
auuagcauucccugucacu

SEQ ID NO: 556392 - RNA, 19 nt, Artificial Sequence
  Description of Artificial Sequence: Synthetic oligonucleotide
  Antisense strand to SEQ ID NO: 556391
agugacagggaaugcuaau

SEQ ID NO: 556393 - RNA, 19 nt, Artificial Sequence
  Description of Artificial Sequence: Synthetic oligonucleotide
  Sense strand starting at position 2574 of SEQ ID NO: 318358
aucaaauuagcaggaguua

SEQ ID NO: 556394 - RNA, 19 nt, Artificial Sequence
  Description of Artificial Sequence: Synthetic oligonucleotide
  Antisense strand to SEQ ID NO: 556393
uaacuccugcuaauuugau

SEQ ID NO: 556395 - RNA, 19 nt, Artificial Sequence
  Description of Artificial Sequence: Synthetic oligonucleotide
  Sense strand starting at position 2586 of SEQ ID NO: 318358
ggaguuacaaucuauuggu

SEQ ID NO: 556396 - RNA, 19 nt, Artificial Sequence
  Description of Artificial Sequence: Synthetic oligonucleotide
  Antisense strand to SEQ ID NO: 556395
accaauagauuguaacucc

SEQ ID NO: 556397 - RNA, 19 nt, Artificial Sequence
  Description of Artificial Sequence: Synthetic oligonucleotide
  Sense strand starting at position 2600 of SEQ ID NO: 318358
uugguuuaacucuggcuua

SEQ ID NO: 556398 - RNA, 19 nt, Artificial Sequence
  Description of Artificial Sequence: Synthetic oligonucleotide
  Antisense strand to SEQ ID NO: 556397
uaagccagaguuaaaccaa

SEQ ID NO: 556399 - RNA, 19 nt, Artificial Sequence
  Description of Artificial Sequence: Synthetic oligonucleotide
  Sense strand starting at position 2603 of SEQ ID NO: 318358
guuuaacucuggcuuauaa

SEQ ID NO: 556400 - RNA, 19 nt, Artificial Sequence
  Description of Artificial Sequence: Synthetic oligonucleotide
  Antisense strand to SEQ ID NO: 556399
uuauaagccagaguuaaac

SEQ ID NO: 556401 - RNA, 19 nt, Artificial Sequence
  Description of Artificial Sequence: Synthetic oligonucleotide
  Sense strand starting at position 2664 of SEQ ID NO: 318358
augucauuguuagcucuca

SEQ ID NO: 556402 - RNA, 19 nt, Artificial Sequence
  Description of Artificial Sequence: Synthetic oligonucleotide
  Antisense strand to SEQ ID NO: 556401
ugagagcuaacaaugacau

SEQ ID NO: 556403 - RNA, 19 nt, Artificial Sequence
  Description of Artificial Sequence: Synthetic oligonucleotide
  Sense strand starting at position 2665 of SEQ ID NO: 318358
ugucauuguuagcucucau

SEQ ID NO: 556404 - RNA, 19 nt, Artificial Sequence
  Description of Artificial Sequence: Synthetic oligonucleotide
  Antisense strand to SEQ ID NO: 556403
augagagcuaacaaugaca

SEQ ID NO: 556405 - RNA, 19 nt, Artificial Sequence
  Description of Artificial Sequence: Synthetic oligonucleotide
  Sense strand starting at position 2765 of SEQ ID NO: 318358
ucucuaucguuucccuuua

SEQ ID NO: 556406 - RNA, 19 nt, Artificial Sequence
  Description of Artificial Sequence: Synthetic oligonucleotide
  Antisense strand to SEQ ID NO: 556405
uaaagggaaacgauagaga

SEQ ID NO: 556407 - RNA, 19 nt, Artificial Sequence
  Description of Artificial Sequence: Synthetic oligonucleotide
  Sense strand starting at position 2770 of SEQ ID NO: 318358
aucguuucccuuuacuuga

SEQ ID NO: 556408 - RNA, 19 nt, Artificial Sequence
  Description of Artificial Sequence: Synthetic oligonucleotide
  Antisense strand to SEQ ID NO: 556407
ucaaguaaagggaaacgau

SEQ ID NO: 556409 - RNA, 19 nt, Artificial Sequence
  Description of Artificial Sequence: Synthetic oligonucleotide
  Sense strand starting at position 2801 of SEQ ID NO: 318358
ccaagaucuuggguaccau

SEQ ID NO: 556410 - RNA, 19 nt, Artificial Sequence
  Description of Artificial Sequence: Synthetic oligonucleotide
  Antisense strand to SEQ ID NO: 556409
augguacccaagaucuugg

SEQ ID NO: 556411 - RNA, 19 nt, Artificial Sequence
  Description of Artificial Sequence: Synthetic oligonucleotide
  Sense strand starting at position 2932 of SEQ ID NO: 318358
gcagcaaagcuccacaaau

SEQ ID NO: 556412 - RNA, 19 nt, Artificial Sequence
  Description of Artificial Sequence: Synthetic oligonucleotide
  Antisense strand to SEQ ID NO: 556411
auuuguggagcuuugcugc

SEQ ID NO: 556413 - RNA, 19 nt, Artificial Sequence
  Description of Artificial Sequence: Synthetic oligonucleotide
  Sense strand starting at position 3007 of SEQ ID NO: 318358
uuagaauuguugucaccaa

SEQ ID NO: 556414 - RNA, 19 nt, Artificial Sequence
  Description of Artificial Sequence: Synthetic oligonucleotide
  Antisense strand to SEQ ID NO: 556413
uuggugacaacaauucuaa

SEQ ID NO: 556415 - RNA, 19 nt, Artificial Sequence
  Description of Artificial Sequence: Synthetic oligonucleotide
  Sense strand starting at position 3038 of SEQ ID NO: 318358
ugauuaggauagugaauaa

SEQ ID NO: 556416 - RNA, 19 nt, Artificial Sequence
  Description of Artificial Sequence: Synthetic oligonucleotide
  Antisense strand to SEQ ID NO: 556415
uuauucacuauccuaauca

SEQ ID NO: 556417 - RNA, 19 nt, Artificial Sequence
  Description of Artificial Sequence: Synthetic oligonucleotide
  Sense strand starting at position 3057 of SEQ ID NO: 318358
aagaguccacugugauaua

SEQ ID NO: 556418 - RNA, 19 nt, Artificial Sequence
  Description of Artificial Sequence: Synthetic oligonucleotide
  Antisense strand to SEQ ID NO: 556417
uauaucacaguggacucuu

SEQ ID NO: 556419 - RNA, 19 nt, Artificial Sequence
  Description of Artificial Sequence: Synthetic oligonucleotide
  Sense strand starting at position 3085 of SEQ ID NO: 318358
ugagauguauauccuugaa

SEQ ID NO: 556420 - RNA, 19 nt, Artificial Sequence
  Description of Artificial Sequence: Synthetic oligonucleotide
  Antisense strand to SEQ ID NO: 556419
uucaaggauauacaucuca

SEQ ID NO: 556421 - RNA, 19 nt, Artificial Sequence
  Description of Artificial Sequence: Synthetic oligonucleotide
  Sense strand starting at position 3087 of SEQ ID NO: 318358
agauguauauccuugaaca

SEQ ID NO: 556422 - RNA, 19 nt, Artificial Sequence
  Description of Artificial Sequence: Synthetic oligonucleotide
  Antisense strand to SEQ ID NO: 556421
uguucaaggauauacaucu

SEQ ID NO: 556423 - RNA, 19 nt, Artificial Sequence
  Description of Artificial Sequence: Synthetic oligonucleotide
  Sense strand starting at position 3210 of SEQ ID NO: 318358
uuagauguaaaguguuaga

SEQ ID NO: 556424 - RNA, 19 nt, Artificial Sequence
  Description of Artificial Sequence: Synthetic oligonucleotide
  Antisense strand to SEQ ID NO: 556423
ucuaacacuuuacaucuaa

SEQ ID NO: 556425 - RNA, 19 nt, Artificial Sequence
  Description of Artificial Sequence: Synthetic oligonucleotide
  Sense strand starting at position 3221 of SEQ ID NO: 318358
guguuagagccucauacua

SEQ ID NO: 556426 - RNA, 19 nt, Artificial Sequence
  Description of Artificial Sequence: Synthetic oligonucleotide
  Antisense strand to SEQ ID NO: 556425
uaguaugaggcucuaacac

SEQ ID NO: 556427 - RNA, 19 nt, Artificial Sequence
  Description of Artificial Sequence: Synthetic oligonucleotide
  Sense strand starting at position 3229 of SEQ ID NO: 318358
gccucauacuauuucugua

SEQ ID NO: 556428 - RNA, 19 nt, Artificial Sequence
  Description of Artificial Sequence: Synthetic oligonucleotide
  Antisense strand to SEQ ID NO: 556427
uacagaaauaguaugaggc

SEQ ID NO: 556429 - RNA, 19 nt, Artificial Sequence
  Description of Artificial Sequence: Synthetic oligonucleotide
  Sense strand starting at position 3247 of SEQ ID NO: 318358
auauuugucuuggacauca

SEQ ID NO: 556430 - RNA, 19 nt, Artificial Sequence
  Description of Artificial Sequence: Synthetic oligonucleotide
  Antisense strand to SEQ ID NO: 556429
ugauguccaagacaaauau

SEQ ID NO: 556431 - RNA, 19 nt, Artificial Sequence
  Description of Artificial Sequence: Synthetic oligonucleotide
  Sense strand starting at position 3331 of SEQ ID NO: 318358
auagguuagguagguagaa

SEQ ID NO: 556432 - RNA, 19 nt, Artificial Sequence
  Description of Artificial Sequence: Synthetic oligonucleotide
  Antisense strand to SEQ ID NO: 556431
uucuaccuaccuaaccuau

SEQ ID NO: 556433 - RNA, 19 nt, Artificial Sequence
  Description of Artificial Sequence: Synthetic oligonucleotide
  Sense strand starting at position 3332 of SEQ ID NO: 318358
uagguuagguagguagaaa

SEQ ID NO: 556434 - RNA, 19 nt, Artificial Sequence
  Description of Artificial Sequence: Synthetic oligonucleotide
  Antisense strand to SEQ ID NO: 556433
uuucuaccuaccuaaccua

SEQ ID NO: 556435 - RNA, 19 nt, Artificial Sequence
  Description of Artificial Sequence: Synthetic oligonucleotide
  Sense strand starting at position 3365 of SEQ ID NO: 318358
auaggauauuuccggaaga

SEQ ID NO: 556436 - RNA, 19 nt, Artificial Sequence
  Description of Artificial Sequence: Synthetic oligonucleotide
  Antisense strand to SEQ ID NO: 556435
ucuuccggaaauauccuau

SEQ ID NO: 556437 - RNA, 19 nt, Artificial Sequence
  Description of Artificial Sequence: Synthetic oligonucleotide
  Sense strand starting at position 3366 of SEQ ID NO: 318358
uaggauauuuccggaagag

SEQ ID NO: 556438 - RNA, 19 nt, Artificial Sequence
  Description of Artificial Sequence: Synthetic oligonucleotide
  Antisense strand to SEQ ID NO: 556437
cucuuccggaaauauccua

SEQ ID NO: 556439 - RNA, 19 nt, Artificial Sequence
  Description of Artificial Sequence: Synthetic oligonucleotide
  Sense strand starting at position 3391 of SEQ ID NO: 318358
agccauaugugaccuauau

SEQ ID NO: 556440 - RNA, 19 nt, Artificial Sequence
  Description of Artificial Sequence: Synthetic oligonucleotide
  Antisense strand to SEQ ID NO: 556439
auauaggucacauauggcu

SEQ ID NO: 556441 - RNA, 19 nt, Artificial Sequence
  Description of Artificial Sequence: Synthetic oligonucleotide
  Sense strand starting at position 3493 of SEQ ID NO: 318358
agggcugauaggcauuaga

SEQ ID NO: 556442 - RNA, 19 nt, Artificial Sequence
  Description of Artificial Sequence: Synthetic oligonucleotide
  Antisense strand to SEQ ID NO: 556441
ucuaaugccuaucagcccu

SEQ ID NO: 556443 - RNA, 19 nt, Artificial Sequence
  Description of Artificial Sequence: Synthetic oligonucleotide
  Sense strand starting at position 3577 of SEQ ID NO: 318358
ggaccaauggucuaggcau

SEQ ID NO: 556444 - RNA, 19 nt, Artificial Sequence
  Description of Artificial Sequence: Synthetic oligonucleotide
  Antisense strand to SEQ ID NO: 556443
augccuagaccauuggucc

SEQ ID NO: 556445 - RNA, 19 nt, Artificial Sequence
  Description of Artificial Sequence: Synthetic oligonucleotide
  Sense strand starting at position 3700 of SEQ ID NO: 318358
uuugacaagcacugaucua

SEQ ID NO: 556446 - RNA, 19 nt, Artificial Sequence
  Description of Artificial Sequence: Synthetic oligonucleotide
  Antisense strand to SEQ ID NO: 556445
uagaucagugcuugucaaa

SEQ ID NO: 556447 - RNA, 19 nt, Artificial Sequence
  Description of Artificial Sequence: Synthetic oligonucleotide
  Sense strand starting at position 3710 of SEQ ID NO: 318358
acugaucuaguggguuauu

SEQ ID NO: 556448 - RNA, 19 nt, Artificial Sequence
  Description of Artificial Sequence: Synthetic oligonucleotide
  Antisense strand to SEQ ID NO: 556447
aauaacccacuagaucagu

SEQ ID NO: 556449 - RNA, 19 nt, Artificial Sequence
  Description of Artificial Sequence: Synthetic oligonucleotide
  Sense strand starting at position 3731 of SEQ ID NO: 318358
gagauacacugguuuauca

SEQ ID NO: 556450 - RNA, 19 nt, Artificial Sequence
  Description of Artificial Sequence: Synthetic oligonucleotide
  Antisense strand to SEQ ID NO: 556449
ugauaaaccaguguaucuc

SEQ ID NO: 556451 - RNA, 19 nt, Artificial Sequence
  Description of Artificial Sequence: Synthetic oligonucleotide
  Sense strand starting at position 3733 of SEQ ID NO: 318358
gauacacugguuuaucagu

SEQ ID NO: 556452 - RNA, 19 nt, Artificial Sequence
  Description of Artificial Sequence: Synthetic oligonucleotide
  Antisense strand to SEQ ID NO: 556451
acugauaaaccaguguauc

SEQ ID NO: 556453 - RNA, 19 nt, Artificial Sequence
  Description of Artificial Sequence: Synthetic oligonucleotide
  Sense strand starting at position 3857 of SEQ ID NO: 318358
gauaauaaggccuguaguu

SEQ ID NO: 556454 - RNA, 19 nt, Artificial Sequence
  Description of Artificial Sequence: Synthetic oligonucleotide
  Antisense strand to SEQ ID NO: 556453
aacuacaggccuuauuauc

SEQ ID NO: 556455 - RNA, 19 nt, Artificial Sequence
  Description of Artificial Sequence: Synthetic oligonucleotide
  Sense strand starting at position 2166 of SEQ ID NO: 318359
gguagauuugucugccuuu

SEQ ID NO: 556456 - RNA, 19 nt, Artificial Sequence
  Description of Artificial Sequence: Synthetic oligonucleotide
  Antisense strand to SEQ ID NO: 556455
aaaggcagacaaaucuacc

SEQ ID NO: 556457 - RNA, 19 nt, Artificial Sequence
  Description of Artificial Sequence: Synthetic oligonucleotide
  Sense strand starting at position 2167 of SEQ ID NO: 318359
guagauuugucugccuuuc

SEQ ID NO: 556458 - RNA, 19 nt, Artificial Sequence
  Description of Artificial Sequence: Synthetic oligonucleotide
  Antisense strand to SEQ ID NO: 556457
gaaaggcagacaaaucuac

SEQ ID NO: 556459 - RNA, 19 nt, Artificial Sequence
  Description of Artificial Sequence: Synthetic oligonucleotide
  Sense strand starting at position 2259 of SEQ ID NO: 318359
gguuaaugcgucgcagcau

SEQ ID NO: 556460 - RNA, 19 nt, Artificial Sequence
  Description of Artificial Sequence: Synthetic oligonucleotide
  Antisense strand to SEQ ID NO: 556459
augcugcgacgcauuaacc

SEQ ID NO: 556461 - RNA, 19 nt, Artificial Sequence
  Description of Artificial Sequence: Synthetic oligonucleotide
  Sense strand starting at position 2520 of SEQ ID NO: 318359
gagaguagccauuggagag

SEQ ID NO: 556462 - RNA, 19 nt, Artificial Sequence
  Description of Artificial Sequence: Synthetic oligonucleotide
  Antisense strand to SEQ ID NO: 556461
cucuccaauggcuacucuc

SEQ ID NO: 556463 - RNA, 19 nt, Artificial Sequence
  Description of Artificial Sequence: Synthetic oligonucleotide
  Sense strand starting at position 2521 of SEQ ID NO: 318359
agaguagccauuggagagu

SEQ ID NO: 556464 - RNA, 19 nt, Artificial Sequence
  Description of Artificial Sequence: Synthetic oligonucleotide
  Antisense strand to SEQ ID NO: 556463
acucuccaauggcuacucu

SEQ ID NO: 556465 - RNA, 19 nt, Artificial Sequence
  Description of Artificial Sequence: Synthetic oligonucleotide
  Sense strand starting at position 2530 of SEQ ID NO: 318359
auuggagaguggucacuuu

SEQ ID NO: 556466 - RNA, 19 nt, Artificial Sequence
  Description of Artificial Sequence: Synthetic oligonucleotide
  Antisense strand to SEQ ID NO: 556465
aaagugaccacucuccaau

SEQ ID NO: 556467 - RNA, 19 nt, Artificial Sequence
  Description of Artificial Sequence: Synthetic oligonucleotide
  Sense strand starting at position 2553 of SEQ ID NO: 318359
aagccaguguugucaucaa

SEQ ID NO: 556468 - RNA, 19 nt, Artificial Sequence
  Description of Artificial Sequence: Synthetic oligonucleotide
  Antisense strand to SEQ ID NO: 556467
uugaugacaacacuggcuu

SEQ ID NO: 556469 - RNA, 19 nt, Artificial Sequence
  Description of Artificial Sequence: Synthetic oligonucleotide
  Sense strand starting at position 2564 of SEQ ID NO: 318359
gucaucaaccaguauucua

SEQ ID NO: 556470 - RNA, 19 nt, Artificial Sequence
  Description of Artificial Sequence: Synthetic oligonucleotide
  Antisense strand to SEQ ID NO: 556469
uagaauacugguugaugac

SEQ ID NO: 556471 - RNA, 19 nt, Artificial Sequence
  Description of Artificial Sequence: Synthetic oligonucleotide
  Sense strand starting at position 2597 of SEQ ID NO: 318359
gucucagucugauuguauu

SEQ ID NO: 556472 - RNA, 19 nt, Artificial Sequence
  Description of Artificial Sequence: Synthetic oligonucleotide
  Antisense strand to SEQ ID NO: 556471
aauacaaucagacugagac

SEQ ID NO: 556473 - RNA, 19 nt, Artificial Sequence
  Description of Artificial Sequence: Synthetic oligonucleotide
  Sense strand starting at position 2604 of SEQ ID NO: 318359
ucugauuguauuggagcaa

SEQ ID NO: 556474 - RNA, 19 nt, Artificial Sequence
  Description of Artificial Sequence: Synthetic oligonucleotide
  Antisense strand to SEQ ID NO: 556473
uugcuccaauacaaucaga

SEQ ID NO: 556475 - RNA, 19 nt, Artificial Sequence
  Description of Artificial Sequence: Synthetic oligonucleotide
  Sense strand starting at position 2657 of SEQ ID NO: 318359
ucugcccuucugcagaaua

SEQ ID NO: 556476 - RNA, 19 nt, Artificial Sequence
  Description of Artificial Sequence: Synthetic oligonucleotide
  Antisense strand to SEQ ID NO: 556475
uauucugcagaagggcaga

SEQ ID NO: 556477 - RNA, 19 nt, Artificial Sequence
  Description of Artificial Sequence: Synthetic oligonucleotide
  Sense strand starting at position 2685 of SEQ ID NO: 318359
ggauccaucucuuugcaga

SEQ ID NO: 556478 - RNA, 19 nt, Artificial Sequence
  Description of Artificial Sequence: Synthetic oligonucleotide
  Antisense strand to SEQ ID NO: 556477
ucugcaaagagauggaucc

SEQ ID NO: 556479 - RNA, 19 nt, Artificial Sequence
  Description of Artificial Sequence: Synthetic oligonucleotide
  Sense strand starting at position 2706 of SEQ ID NO: 318359
aggcuuacacauuaacgua

SEQ ID NO: 556480 - RNA, 19 nt, Artificial Sequence
  Description of Artificial Sequence: Synthetic oligonucleotide
  Antisense strand to SEQ ID NO: 556479
uacguuaauguguaagccu

SEQ ID NO: 556481 - RNA, 19 nt, Artificial Sequence
  Description of Artificial Sequence: Synthetic oligonucleotide
  Sense strand starting at position 2714 of SEQ ID NO: 318359
acauuaacguagccaauua

SEQ ID NO: 556482 - RNA, 19 nt, Artificial Sequence
  Description of Artificial Sequence: Synthetic oligonucleotide
  Antisense strand to SEQ ID NO: 556481
uaauuggcuacguuaaugu

SEQ ID NO: 556483 - RNA, 19 nt, Artificial Sequence
  Description of Artificial Sequence: Synthetic oligonucleotide
  Sense strand starting at position 2739 of SEQ ID NO: 318359
ugcaguacauguucucauu

SEQ ID NO: 556484 - RNA, 19 nt, Artificial Sequence
  Description of Artificial Sequence: Synthetic oligonucleotide
  Antisense strand to SEQ ID NO: 556483
aaugagaacauguacugca

SEQ ID NO: 556485 - RNA, 19 nt, Artificial Sequence
  Description of Artificial Sequence: Synthetic oligonucleotide
  Sense strand starting at position 2745 of SEQ ID NO: 318359
acauguucucauuguaaca

SEQ ID NO: 556486 - RNA, 19 nt, Artificial Sequence
  Description of Artificial Sequence: Synthetic oligonucleotide
  Antisense strand to SEQ ID NO: 556485
uguuacaaugagaacaugu

SEQ ID NO: 556487 - RNA, 19 nt, Artificial Sequence
  Description of Artificial Sequence: Synthetic oligonucleotide
  Sense strand starting at position 2795 of SEQ ID NO: 318359
ucagacauuugcuagugau

SEQ ID NO: 556488 - RNA, 19 nt, Artificial Sequence
  Description of Artificial Sequence: Synthetic oligonucleotide
  Antisense strand to SEQ ID NO: 556487
aucacuagcaaaugucuga

SEQ ID NO: 556489 - RNA, 19 nt, Artificial Sequence
  Description of Artificial Sequence: Synthetic oligonucleotide
  Sense strand starting at position 2801 of SEQ ID NO: 318359
auuugcuagugauacacua

SEQ ID NO: 556490 - RNA, 19 nt, Artificial Sequence
  Description of Artificial Sequence: Synthetic oligonucleotide
  Antisense strand to SEQ ID NO: 556489
uaguguaucacuagcaaau

SEQ ID NO: 556491 - RNA, 19 nt, Artificial Sequence
  Description of Artificial Sequence: Synthetic oligonucleotide
  Sense strand starting at position 2943 of SEQ ID NO: 318359
aucucuuuaccuggcagaa

SEQ ID NO: 556492 - RNA, 19 nt, Artificial Sequence
  Description of Artificial Sequence: Synthetic oligonucleotide
  Antisense strand to SEQ ID NO: 556491
uucugccagguaaagagau

SEQ ID NO: 556493 - RNA, 19 nt, Artificial Sequence
  Description of Artificial Sequence: Synthetic oligonucleotide
  Sense strand starting at position 2979 of SEQ ID NO: 318359
uuaauagcuuccuugaaug

SEQ ID NO: 556494 - RNA, 19 nt, Artificial Sequence
  Description of Artificial Sequence: Synthetic oligonucleotide
  Antisense strand to SEQ ID NO: 556493
cauucaaggaagcuauuaa

SEQ ID NO: 556495 - RNA, 19 nt, Artificial Sequence
  Description of Artificial Sequence: Synthetic oligonucleotide
  Sense strand starting at position 2984 of SEQ ID NO: 318359
agcuuccuugaaugauuga

SEQ ID NO: 556496 - RNA, 19 nt, Artificial Sequence
  Description of Artificial Sequence: Synthetic oligonucleotide
  Antisense strand to SEQ ID NO: 556495
ucaaucauucaaggaagcu

SEQ ID NO: 556497 - RNA, 19 nt, Artificial Sequence
  Description of Artificial Sequence: Synthetic oligonucleotide
  Sense strand starting at position 2987 of SEQ ID NO: 318359
uuccuugaaugauugagau

SEQ ID NO: 556498 - RNA, 19 nt, Artificial Sequence
  Description of Artificial Sequence: Synthetic oligonucleotide
  Antisense strand to SEQ ID NO: 556497
aucucaaucauucaaggaa

SEQ ID NO: 556499 - RNA, 19 nt, Artificial Sequence
  Description of Artificial Sequence: Synthetic oligonucleotide
  Sense strand starting at position 3015 of SEQ ID NO: 318359
acagcauugugccuacaaa

SEQ ID NO: 556500 - RNA, 19 nt, Artificial Sequence
  Description of Artificial Sequence: Synthetic oligonucleotide
  Antisense strand to SEQ ID NO: 556499
uuuguaggcacaaugcugu

SEQ ID NO: 556501 - RNA, 19 nt, Artificial Sequence
  Description of Artificial Sequence: Synthetic oligonucleotide
  Sense strand starting at position 3047 of SEQ ID NO: 318359
acaccaagguauucuugau

SEQ ID NO: 556502 - RNA, 19 nt, Artificial Sequence
  Description of Artificial Sequence: Synthetic oligonucleotide
  Antisense strand to SEQ ID NO: 556501
aucaagaauaccuuggugu

SEQ ID NO: 556503 - RNA, 19 nt, Artificial Sequence
  Description of Artificial Sequence: Synthetic oligonucleotide
  Sense strand starting at position 3071 of SEQ ID NO: 318359
guuaauuaccaacgaagac

SEQ ID NO: 556504 - RNA, 19 nt, Artificial Sequence
  Description of Artificial Sequence: Synthetic oligonucleotide
  Antisense strand to SEQ ID NO: 556503
gucuucguugguaauuaac

SEQ ID NO: 556505 - RNA, 19 nt, Artificial Sequence
  Description of Artificial Sequence: Synthetic oligonucleotide
  Sense strand starting at position 3252 of SEQ ID NO: 318359
ccugcaaucugagugggaa

SEQ ID NO: 556506 - RNA, 19 nt, Artificial Sequence
  Description of Artificial Sequence: Synthetic oligonucleotide
  Antisense strand to SEQ ID NO: 556505
uucccacucagauugcagg

SEQ ID NO: 556507 - RNA, 19 nt, Artificial Sequence
  Description of Artificial Sequence: Synthetic oligonucleotide
  Sense strand starting at position 3255 of SEQ ID NO: 318359
gcaaucugagugggaaaca

SEQ ID NO: 556508 - RNA, 19 nt, Artificial Sequence
  Description of Artificial Sequence: Synthetic oligonucleotide
  Antisense strand to SEQ ID NO: 556507
uguuucccacucagauugc

SEQ ID NO: 556509 - RNA, 19 nt, Artificial Sequence
  Description of Artificial Sequence: Synthetic oligonucleotide
  Sense strand starting at position 3339 of SEQ ID NO: 318359
aguccuuaccuagguuaca

SEQ ID NO: 556510 - RNA, 19 nt, Artificial Sequence
  Description of Artificial Sequence: Synthetic oligonucleotide
  Antisense strand to SEQ ID NO: 556509
uguaaccuagguaaggacu

SEQ ID NO: 556511 - RNA, 19 nt, Artificial Sequence
  Description of Artificial Sequence: Synthetic oligonucleotide
  Sense strand starting at position 3417 of SEQ ID NO: 318359
agccucgauccucaggaau

SEQ ID NO: 556512 - RNA, 19 nt, Artificial Sequence
  Description of Artificial Sequence: Synthetic oligonucleotide
  Antisense strand to SEQ ID NO: 556511
auuccugaggaucgaggcu

SEQ ID NO: 556513 - RNA, 19 nt, Artificial Sequence
  Description of Artificial Sequence: Synthetic oligonucleotide
  Sense strand starting at position 3420 of SEQ ID NO: 318359
cucgauccucaggaauauc

SEQ ID NO: 556514 - RNA, 19 nt, Artificial Sequence
  Description of Artificial Sequence: Synthetic oligonucleotide
  Antisense strand to SEQ ID NO: 556513
gauauuccugaggaucgag

SEQ ID NO: 556515 - RNA, 19 nt, Artificial Sequence
  Description of Artificial Sequence: Synthetic oligonucleotide
  Sense strand starting at position 3478 of SEQ ID NO: 318359
agaggaaucuggcuuucug

SEQ ID NO: 556516 - RNA, 19 nt, Artificial Sequence
  Description of Artificial Sequence: Synthetic oligonucleotide
  Antisense strand to SEQ ID NO: 556515
cagaaagccagauuccucu

SEQ ID NO: 556517 - RNA, 19 nt, Artificial Sequence
  Description of Artificial Sequence: Synthetic oligonucleotide
  Sense strand starting at position 3555 of SEQ ID NO: 318359
ugggaaugauggaggugua

SEQ ID NO: 556518 - RNA, 19 nt, Artificial Sequence
  Description of Artificial Sequence: Synthetic oligonucleotide
  Antisense strand to SEQ ID NO: 556517
uacaccuccaucauuccca

SEQ ID NO: 556519 - RNA, 19 nt, Artificial Sequence
  Description of Artificial Sequence: Synthetic oligonucleotide
  Sense strand starting at position 3558 of SEQ ID NO: 318359
gaaugauggagguguaaac

SEQ ID NO: 556520 - RNA, 19 nt, Artificial Sequence
  Description of Artificial Sequence: Synthetic oligonucleotide
  Antisense strand to SEQ ID NO: 556519
guuuacaccuccaucauuc

SEQ ID NO: 556521 - RNA, 19 nt, Artificial Sequence
  Description of Artificial Sequence: Synthetic oligonucleotide
  Sense strand starting at position 3589 of SEQ ID NO: 318359
uuagguguuuaugccagaa

SEQ ID NO: 556522 - RNA, 19 nt, Artificial Sequence
  Description of Artificial Sequence: Synthetic oligonucleotide
  Antisense strand to SEQ ID NO: 556521
uucuggcauaaacaccuaa

SEQ ID NO: 556523 - RNA, 19 nt, Artificial Sequence
  Description of Artificial Sequence: Synthetic oligonucleotide
  Sense strand starting at position 3619 of SEQ ID NO: 318359
ugugaauggcacugucaac

SEQ ID NO: 556524 - RNA, 19 nt, Artificial Sequence
  Description of Artificial Sequence: Synthetic oligonucleotide
  Antisense strand to SEQ ID NO: 556523
guugacagugccauucaca

SEQ ID NO: 556525 - RNA, 19 nt, Artificial Sequence
  Description of Artificial Sequence: Synthetic oligonucleotide
  Sense strand starting at position 3642 of SEQ ID NO: 318359
cagcuuccuuagucaggau

SEQ ID NO: 556526 - RNA, 19 nt, Artificial Sequence
  Description of Artificial Sequence: Synthetic oligonucleotide
  Antisense strand to SEQ ID NO: 556525
auccugacuaaggaagcug

SEQ ID NO: 556527 - RNA, 19 nt, Artificial Sequence
  Description of Artificial Sequence: Synthetic oligonucleotide
  Sense strand starting at position 3666 of SEQ ID NO: 318359
gggaucagccuugacucau

SEQ ID NO: 556528 - RNA, 19 nt, Artificial Sequence
  Description of Artificial Sequence: Synthetic oligonucleotide
  Antisense strand to SEQ ID NO: 556527
augagucaaggcugauccc

SEQ ID NO: 556529 - RNA, 19 nt, Artificial Sequence
  Description of Artificial Sequence: Synthetic oligonucleotide
  Sense strand starting at position 3881 of SEQ ID NO: 318359
acuuaugacugacagaaua

SEQ ID NO: 556530 - RNA, 19 nt, Artificial Sequence
  Description of Artificial Sequence: Synthetic oligonucleotide
  Antisense strand to SEQ ID NO: 556529
uauucugucagucauaagu

SEQ ID NO: 556531 - RNA, 19 nt, Artificial Sequence
  Description of Artificial Sequence: Synthetic oligonucleotide
  Sense strand starting at position 3924 of SEQ ID NO: 318359
augauauaugcauaucagu

SEQ ID NO: 556532 - RNA, 19 nt, Artificial Sequence
  Description of Artificial Sequence: Synthetic oligonucleotide
  Antisense strand to SEQ ID NO: 556531
acugauaugcauauaucau

SEQ ID NO: 556533 - RNA, 19 nt, Artificial Sequence
  Description of Artificial Sequence: Synthetic oligonucleotide
  Sense strand starting at position 3945 of SEQ ID NO: 318359
aaauuucugcagugacugu

SEQ ID NO: 556534 - RNA, 19 nt, Artificial Sequence
  Description of Artificial Sequence: Synthetic oligonucleotide
  Antisense strand to SEQ ID NO: 556533
acagucacugcagaaauuu

SEQ ID NO: 556535 - RNA, 19 nt, Artificial Sequence
  Description of Artificial Sequence: Synthetic oligonucleotide
  Sense strand starting at position 2007 of SEQ ID NO: 318360
agaagucccuuuguggaga

SEQ ID NO: 556536 - RNA, 19 nt, Artificial Sequence
  Description of Artificial Sequence: Synthetic oligonucleotide
  Antisense strand to SEQ ID NO: 556535
ucuccacaaagggacuucu

SEQ ID NO: 556537 - RNA, 19 nt, Artificial Sequence
  Description of Artificial Sequence: Synthetic oligonucleotide
  Sense strand starting at position 2010 of SEQ ID NO: 318360
agucccuuuguggagagua

SEQ ID NO: 556538 - RNA, 19 nt, Artificial Sequence
  Description of Artificial Sequence: Synthetic oligonucleotide
  Antisense strand to SEQ ID NO: 556537
uacucuccacaaagggacu

SEQ ID NO: 556539 - RNA, 19 nt, Artificial Sequence
  Description of Artificial Sequence: Synthetic oligonucleotide
  Sense strand starting at position 2022 of SEQ ID NO: 318360
gagaguaagucugugcugu

SEQ ID NO: 556540 - RNA, 19 nt, Artificial Sequence
  Description of Artificial Sequence: Synthetic oligonucleotide
  Antisense strand to SEQ ID NO: 556539
acagcacagacuuacucuc

SEQ ID NO: 556541 - RNA, 19 nt, Artificial Sequence
  Description of Artificial Sequence: Synthetic oligonucleotide
  Sense strand starting at position 2023 of SEQ ID NO: 318360
agaguaagucugugcuguc

SEQ ID NO: 556542 - RNA, 19 nt, Artificial Sequence
  Description of Artificial Sequence: Synthetic oligonucleotide
  Antisense strand to SEQ ID NO: 556541
gacagcacagacuuacucu

SEQ ID NO: 556543 - RNA, 19 nt, Artificial Sequence
  Description of Artificial Sequence: Synthetic oligonucleotide
  Sense strand starting at position 2033 of SEQ ID NO: 318360
ugugcuguccugucuccaa

SEQ ID NO: 556544 - RNA, 19 nt, Artificial Sequence
  Description of Artificial Sequence: Synthetic oligonucleotide
  Antisense strand to SEQ ID NO: 556543
uuggagacaggacagcaca

SEQ ID NO: 556545 - RNA, 19 nt, Artificial Sequence
  Description of Artificial Sequence: Synthetic oligonucleotide
  Sense strand starting at position 2037 of SEQ ID NO: 318360
cuguccugucuccaaggua

SEQ ID NO: 556546 - RNA, 19 nt, Artificial Sequence
  Description of Artificial Sequence: Synthetic oligonucleotide
  Antisense strand to SEQ ID NO: 556545
uaccuuggagacaggacag

SEQ ID NO: 556547 - RNA, 19 nt, Artificial Sequence
  Description of Artificial Sequence: Synthetic oligonucleotide
  Sense strand starting at position 2141 of SEQ ID NO: 318360
agcaguucuuagucaccga

SEQ ID NO: 556548 - RNA, 19 nt, Artificial Sequence
  Description of Artificial Sequence: Synthetic oligonucleotide
  Antisense strand to SEQ ID NO: 556547
ucggugacuaagaacugcu

SEQ ID NO: 556549 - RNA, 19 nt, Artificial Sequence
  Description of Artificial Sequence: Synthetic oligonucleotide
  Sense strand starting at position 2188 of SEQ ID NO: 318360
gcugaauuugaguggagcu

SEQ ID NO: 556550 - RNA, 19 nt, Artificial Sequence
  Description of Artificial Sequence: Synthetic oligonucleotide
  Antisense strand to SEQ ID NO: 556549
agcuccacucaaauucagc

SEQ ID NO: 556551 - RNA, 19 nt, Artificial Sequence
  Description of Artificial Sequence: Synthetic oligonucleotide
  Sense strand starting at position 2260 of SEQ ID NO: 318360
cugagucugauuggccaaa

SEQ ID NO: 556552 - RNA, 19 nt, Artificial Sequence
  Description of Artificial Sequence: Synthetic oligonucleotide
  Antisense strand to SEQ ID NO: 556551
uuuggccaaucagacucag

SEQ ID NO: 556553 - RNA, 19 nt, Artificial Sequence
  Description of Artificial Sequence: Synthetic oligonucleotide
  Sense strand starting at position 2279 of SEQ ID NO: 318360
aagucugugugcucucaac

SEQ ID NO: 556554 - RNA, 19 nt, Artificial Sequence
  Description of Artificial Sequence: Synthetic oligonucleotide
  Antisense strand to SEQ ID NO: 556553
guugagagcacacagacuu

SEQ ID NO: 556555 - RNA, 19 nt, Artificial Sequence
  Description of Artificial Sequence: Synthetic oligonucleotide
  Sense strand starting at position 2341 of SEQ ID NO: 318360
gcugcaaaucugugucaca

SEQ ID NO: 556556 - RNA, 19 nt, Artificial Sequence
  Description of Artificial Sequence: Synthetic oligonucleotide
  Antisense strand to SEQ ID NO: 556555
ugugacacagauuugcagc

SEQ ID NO: 556557 - RNA, 19 nt, Artificial Sequence
  Description of Artificial Sequence: Synthetic oligonucleotide
  Sense strand starting at position 2344 of SEQ ID NO: 318360
gcaaaucugugucacagaa

SEQ ID NO: 556558 - RNA, 19 nt, Artificial Sequence
  Description of Artificial Sequence: Synthetic oligonucleotide
  Antisense strand to SEQ ID NO: 556557
uucugugacacagauuugc

SEQ ID NO: 556559 - RNA, 19 nt, Artificial Sequence
  Description of Artificial Sequence: Synthetic oligonucleotide
  Sense strand starting at position 2423 of SEQ ID NO: 318360
uuugacagcucagauggua

SEQ ID NO: 556560 - RNA, 19 nt, Artificial Sequence
  Description of Artificial Sequence: Synthetic oligonucleotide
  Antisense strand to SEQ ID NO: 556559
uaccaucugagcugucaaa

SEQ ID NO: 556561 - RNA, 19 nt, Artificial Sequence
  Description of Artificial Sequence: Synthetic oligonucleotide
  Sense strand starting at position 2476 of SEQ ID NO: 318360
cagcguucugucccagcaa

SEQ ID NO: 556562 - RNA, 19 nt, Artificial Sequence
  Description of Artificial Sequence: Synthetic oligonucleotide
  Antisense strand to SEQ ID NO: 556561
uugcugggacagaacgcug

SEQ ID NO: 556563 - RNA, 19 nt, Artificial Sequence
  Description of Artificial Sequence: Synthetic oligonucleotide
  Sense strand starting at position 2562 of SEQ ID NO: 318360
aggcaaagcccauguauuc

SEQ ID NO: 556564 - RNA, 19 nt, Artificial Sequence
  Description of Artificial Sequence: Synthetic oligonucleotide
  Antisense strand to SEQ ID NO: 556563
gaauacaugggcuuugccu

SEQ ID NO: 556565 - RNA, 19 nt, Artificial Sequence
  Description of Artificial Sequence: Synthetic oligonucleotide
  Sense strand starting at position 2603 of SEQ ID NO: 318360
gaaugcugcuaaggugaga

SEQ ID NO: 556566 - RNA, 19 nt, Artificial Sequence
  Description of Artificial Sequence: Synthetic oligonucleotide
  Antisense strand to SEQ ID NO: 556565
ucucaccuuagcagcauuc

SEQ ID NO: 556567 - RNA, 19 nt, Artificial Sequence
  Description of Artificial Sequence: Synthetic oligonucleotide
  Sense strand starting at position 2630 of SEQ ID NO: 318360
uaguaagaaccuuguaaag

SEQ ID NO: 556568 - RNA, 19 nt, Artificial Sequence
  Description of Artificial Sequence: Synthetic oligonucleotide
  Antisense strand to SEQ ID NO: 556567
cuuuacaagguucuuacua

SEQ ID NO: 556569 - RNA, 19 nt, Artificial Sequence
  Description of Artificial Sequence: Synthetic oligonucleotide
  Sense strand starting at position 2632 of SEQ ID NO: 318360
guaagaaccuuguaaaguc

SEQ ID NO: 556570 - RNA, 19 nt, Artificial Sequence
  Description of Artificial Sequence: Synthetic oligonucleotide
  Antisense strand to SEQ ID NO: 556569
gacuuuacaagguucuuac

SEQ ID NO: 556571 - RNA, 19 nt, Artificial Sequence
  Description of Artificial Sequence: Synthetic oligonucleotide
  Sense strand starting at position 2664 of SEQ ID NO: 318360
ccagcaaugcuuugcggaa

SEQ ID NO: 556572 - RNA, 19 nt, Artificial Sequence
  Description of Artificial Sequence: Synthetic oligonucleotide
  Antisense strand to SEQ ID NO: 556571
uuccgcaaagcauugcugg

SEQ ID NO: 556573 - RNA, 19 nt, Artificial Sequence
  Description of Artificial Sequence: Synthetic oligonucleotide
  Sense strand starting at position 2665 of SEQ ID NO: 318360
cagcaaugcuuugcggaaa

SEQ ID NO: 556574 - RNA, 19 nt, Artificial Sequence
  Description of Artificial Sequence: Synthetic oligonucleotide
  Antisense strand to SEQ ID NO: 556573
uuuccgcaaagcauugcug

SEQ ID NO: 556575 - RNA, 19 nt, Artificial Sequence
  Description of Artificial Sequence: Synthetic oligonucleotide
  Sense strand starting at position 2668 of SEQ ID NO: 318360
caaugcuuugcggaaaucu

SEQ ID NO: 556576 - RNA, 19 nt, Artificial Sequence
  Description of Artificial Sequence: Synthetic oligonucleotide
  Antisense strand to SEQ ID NO: 556575
agauuuccgcaaagcauug

SEQ ID NO: 556577 - RNA, 19 nt, Artificial Sequence
  Description of Artificial Sequence: Synthetic oligonucleotide
  Sense strand starting at position 2683 of SEQ ID NO: 318360
aucucaaugucagcugaca

SEQ ID NO: 556578 - RNA, 19 nt, Artificial Sequence
  Description of Artificial Sequence: Synthetic oligonucleotide
  Antisense strand to SEQ ID NO: 556577
ugucagcugacauugagau

SEQ ID NO: 556579 - RNA, 19 nt, Artificial Sequence
  Description of Artificial Sequence: Synthetic oligonucleotide
  Sense strand starting at position 2739 of SEQ ID NO: 318360
uggaaugaguguuacaguu

SEQ ID NO: 556580 - RNA, 19 nt, Artificial Sequence
  Description of Artificial Sequence: Synthetic oligonucleotide
  Antisense strand to SEQ ID NO: 556579
aacuguaacacucauucca

SEQ ID NO: 556581 - RNA, 19 nt, Artificial Sequence
  Description of Artificial Sequence: Synthetic oligonucleotide
  Sense strand starting at position 2894 of SEQ ID NO: 318360
ggcuguuucuaugaaucag

SEQ ID NO: 556582 - RNA, 19 nt, Artificial Sequence
  Description of Artificial Sequence: Synthetic oligonucleotide
  Antisense strand to SEQ ID NO: 556581
cugauucauagaaacagcc

SEQ ID NO: 556583 - RNA, 19 nt, Artificial Sequence
  Description of Artificial Sequence: Synthetic oligonucleotide
  Sense strand starting at position 3021 of SEQ ID NO: 318360
ccaguagggacuugauaug

SEQ ID NO: 556584 - RNA, 19 nt, Artificial Sequence
  Description of Artificial Sequence: Synthetic oligonucleotide
  Antisense strand to SEQ ID NO: 556583
cauaucaagucccuacugg

SEQ ID NO: 556585 - RNA, 19 nt, Artificial Sequence
  Description of Artificial Sequence: Synthetic oligonucleotide
  Sense strand starting at position 3033 of SEQ ID NO: 318360
ugauaugaguccuaagacc

SEQ ID NO: 556586 - RNA, 19 nt, Artificial Sequence
  Description of Artificial Sequence: Synthetic oligonucleotide
  Antisense strand to SEQ ID NO: 556585
ggucuuaggacucauauca

SEQ ID NO: 556587 - RNA, 19 nt, Artificial Sequence
  Description of Artificial Sequence: Synthetic oligonucleotide
  Sense strand starting at position 3079 of SEQ ID NO: 318360
ugaugcgugccucucuauu

SEQ ID NO: 556588 - RNA, 19 nt, Artificial Sequence
  Description of Artificial Sequence: Synthetic oligonucleotide
  Antisense strand to SEQ ID NO: 556587
aauagagaggcacgcauca

SEQ ID NO: 556589 - RNA, 19 nt, Artificial Sequence
  Description of Artificial Sequence: Synthetic oligonucleotide
  Sense strand starting at position 3085 of SEQ ID NO: 318360
gugccucucuauuccuuua

SEQ ID NO: 556590 - RNA, 19 nt, Artificial Sequence
  Description of Artificial Sequence: Synthetic oligonucleotide
  Antisense strand to SEQ ID NO: 556589
uaaaggaauagagaggcac

SEQ ID NO: 556591 - RNA, 19 nt, Artificial Sequence
  Description of Artificial Sequence: Synthetic oligonucleotide
  Sense strand starting at position 3161 of SEQ ID NO: 318360
acuagauacugggagacaa

SEQ ID NO: 556592 - RNA, 19 nt, Artificial Sequence
  Description of Artificial Sequence: Synthetic oligonucleotide
  Antisense strand to SEQ ID NO: 556591
uugucucccaguaucuagu

SEQ ID NO: 556593 - RNA, 19 nt, Artificial Sequence
  Description of Artificial Sequence: Synthetic oligonucleotide
  Sense strand starting at position 3192 of SEQ ID NO: 318360
cccucaaucccuugggaaa

SEQ ID NO: 556594 - RNA, 19 nt, Artificial Sequence
  Description of Artificial Sequence: Synthetic oligonucleotide
  Antisense strand to SEQ ID NO: 556593
uuucccaagggauugaggg

SEQ ID NO: 556595 - RNA, 19 nt, Artificial Sequence
  Description of Artificial Sequence: Synthetic oligonucleotide
  Sense strand starting at position 3193 of SEQ ID NO: 318360
ccucaaucccuugggaaau

SEQ ID NO: 556596 - RNA, 19 nt, Artificial Sequence
  Description of Artificial Sequence: Synthetic oligonucleotide
  Antisense strand to SEQ ID NO: 556595
auuucccaagggauugagg

SEQ ID NO: 556597 - RNA, 19 nt, Artificial Sequence
  Description of Artificial Sequence: Synthetic oligonucleotide
  Sense strand starting at position 3194 of SEQ ID NO: 318360
cucaaucccuugggaaaug

SEQ ID NO: 556598 - RNA, 19 nt, Artificial Sequence
  Description of Artificial Sequence: Synthetic oligonucleotide
  Antisense strand to SEQ ID NO: 556597
cauuucccaagggauugag

SEQ ID NO: 556599 - RNA, 19 nt, Artificial Sequence
  Description of Artificial Sequence: Synthetic oligonucleotide
  Sense strand starting at position 3213 of SEQ ID NO: 318360
guaaccuagaguuaaggua

SEQ ID NO: 556600 - RNA, 19 nt, Artificial Sequence
  Description of Artificial Sequence: Synthetic oligonucleotide
  Antisense strand to SEQ ID NO: 556599
uaccuuaacucuagguuac

SEQ ID NO: 556601 - RNA, 19 nt, Artificial Sequence
  Description of Artificial Sequence: Synthetic oligonucleotide
  Sense strand starting at position 3275 of SEQ ID NO: 318360
gccaccuuuguccaaguga

SEQ ID NO: 556602 - RNA, 19 nt, Artificial Sequence
  Description of Artificial Sequence: Synthetic oligonucleotide
  Antisense strand to SEQ ID NO: 556601
ucacuuggacaaagguggc

SEQ ID NO: 556603 - RNA, 19 nt, Artificial Sequence
  Description of Artificial Sequence: Synthetic oligonucleotide
  Sense strand starting at position 3369 of SEQ ID NO: 318360
cuggcucuugaucaccaau

SEQ ID NO: 556604 - RNA, 19 nt, Artificial Sequence
  Description of Artificial Sequence: Synthetic oligonucleotide
  Antisense strand to SEQ ID NO: 556603
auuggugaucaagagccag

SEQ ID NO: 556605 - RNA, 19 nt, Artificial Sequence
  Description of Artificial Sequence: Synthetic oligonucleotide
  Sense strand starting at position 3371 of SEQ ID NO: 318360
ggcucuugaucaccaauua

SEQ ID NO: 556606 - RNA, 19 nt, Artificial Sequence
  Description of Artificial Sequence: Synthetic oligonucleotide
  Antisense strand to SEQ ID NO: 556605
uaauuggugaucaagagcc

SEQ ID NO: 556607 - RNA, 19 nt, Artificial Sequence
  Description of Artificial Sequence: Synthetic oligonucleotide
  Sense strand starting at position 3430 of SEQ ID NO: 318360
augcuaaacugugacaacu

SEQ ID NO: 556608 - RNA, 19 nt, Artificial Sequence
  Description of Artificial Sequence: Synthetic oligonucleotide
  Antisense strand to SEQ ID NO: 556607
aguugucacaguuuagcau

SEQ ID NO: 556609 - RNA, 19 nt, Artificial Sequence
  Description of Artificial Sequence: Synthetic oligonucleotide
  Sense strand starting at position 3438 of SEQ ID NO: 318360
cugugacaacucugguuaa

SEQ ID NO: 556610 - RNA, 19 nt, Artificial Sequence
  Description of Artificial Sequence: Synthetic oligonucleotide
  Antisense strand to SEQ ID NO: 556609
uuaaccagaguugucacag

SEQ ID NO: 556611 - RNA, 19 nt, Artificial Sequence
  Description of Artificial Sequence: Synthetic oligonucleotide
  Sense strand starting at position 3439 of SEQ ID NO: 318360
ugugacaacucugguuaau

SEQ ID NO: 556612 - RNA, 19 nt, Artificial Sequence
  Description of Artificial Sequence: Synthetic oligonucleotide
  Antisense strand to SEQ ID NO: 556611
auuaaccagaguugucaca

SEQ ID NO: 556613 - RNA, 19 nt, Artificial Sequence
  Description of Artificial Sequence: Synthetic oligonucleotide
  Sense strand starting at position 3441 of SEQ ID NO: 318360
ugacaacucugguuaauuc

SEQ ID NO: 556614 - RNA, 19 nt, Artificial Sequence
  Description of Artificial Sequence: Synthetic oligonucleotide
  Antisense strand to SEQ ID NO: 556613
gaauuaaccagaguuguca

SEQ ID NO: 556615 - RNA, 19 nt, Artificial Sequence
  Description of Artificial Sequence: Synthetic oligonucleotide
  Sense strand starting at position 223 of SEQ ID NO: 318361
gauucuugauuacuugaga

SEQ ID NO: 556616 - RNA, 19 nt, Artificial Sequence
  Description of Artificial Sequence: Synthetic oligonucleotide
  Antisense strand to SEQ ID NO: 556615
ucucaaguaaucaagaauc

SEQ ID NO: 556617 - RNA, 19 nt, Artificial Sequence
  Description of Artificial Sequence: Synthetic oligonucleotide
  Sense strand starting at position 224 of SEQ ID NO: 318361
auucuugauuacuugagag

SEQ ID NO: 556618 - RNA, 19 nt, Artificial Sequence
  Description of Artificial Sequence: Synthetic oligonucleotide
  Antisense strand to SEQ ID NO: 556617
cucucaaguaaucaagaau

SEQ ID NO: 556619 - RNA, 19 nt, Artificial Sequence
  Description of Artificial Sequence: Synthetic oligonucleotide
  Sense strand starting at position 393 of SEQ ID NO: 318361
gguuuauaaaguugagaau

SEQ ID NO: 556620 - RNA, 19 nt, Artificial Sequence
  Description of Artificial Sequence: Synthetic oligonucleotide
  Antisense strand to SEQ ID NO: 556619
auucucaacuuuauaaacc

SEQ ID NO: 556621 - RNA, 19 nt, Artificial Sequence
  Description of Artificial Sequence: Synthetic oligonucleotide
  Sense strand starting at position 408 of SEQ ID NO: 318361
gaaugaagccucuagcaag

SEQ ID NO: 556622 - RNA, 19 nt, Artificial Sequence
  Description of Artificial Sequence: Synthetic oligonucleotide
  Antisense strand to SEQ ID NO: 556621
cuugcuagaggcuucauuc

SEQ ID NO: 556623 - RNA, 19 nt, Artificial Sequence
  Description of Artificial Sequence: Synthetic oligonucleotide
  Sense strand starting at position 444 of SEQ ID NO: 318361
gaggguucggucuacagaa

SEQ ID NO: 556624 - RNA, 19 nt, Artificial Sequence
  Description of Artificial Sequence: Synthetic oligonucleotide
  Antisense strand to SEQ ID NO: 556623
uucuguagaccgaacccuc

SEQ ID NO: 556625 - RNA, 19 nt, Artificial Sequence
  Description of Artificial Sequence: Synthetic oligonucleotide
  Sense strand starting at position 885 of SEQ ID NO: 318361
aguuaugaagcuuggacuu

SEQ ID NO: 556626 - RNA, 19 nt, Artificial Sequence
  Description of Artificial Sequence: Synthetic oligonucleotide
  Antisense strand to SEQ ID NO: 556625
aaguccaagcuucauaacu

SEQ ID NO: 556627 - RNA, 19 nt, Artificial Sequence
  Description of Artificial Sequence: Synthetic oligonucleotide
  Sense strand starting at position 892 of SEQ ID NO: 318361
aagcuuggacuuuauaagu

SEQ ID NO: 556628 - RNA, 19 nt, Artificial Sequence
  Description of Artificial Sequence: Synthetic oligonucleotide
  Antisense strand to SEQ ID NO: 556627
acuuauaaaguccaagcuu

SEQ ID NO: 556629 - RNA, 19 nt, Artificial Sequence
  Description of Artificial Sequence: Synthetic oligonucleotide
  Sense strand starting at position 901 of SEQ ID NO: 318361
cuuuauaaguucccaguga

SEQ ID NO: 556630 - RNA, 19 nt, Artificial Sequence
  Description of Artificial Sequence: Synthetic oligonucleotide
  Antisense strand to SEQ ID NO: 556629
ucacugggaacuuauaaag

SEQ ID NO: 556631 - RNA, 19 nt, Artificial Sequence
  Description of Artificial Sequence: Synthetic oligonucleotide
  Sense strand starting at position 1237 of SEQ ID NO: 318361
ugguaagagcuugagugua

SEQ ID NO: 556632 - RNA, 19 nt, Artificial Sequence
  Description of Artificial Sequence: Synthetic oligonucleotide
  Antisense strand to SEQ ID NO: 556631
uacacucaagcucuuacca

SEQ ID NO: 556633 - RNA, 19 nt, Artificial Sequence
  Description of Artificial Sequence: Synthetic oligonucleotide
  Sense strand starting at position 1242 of SEQ ID NO: 318361
agagcuugaguguaucuca

SEQ ID NO: 556634 - RNA, 19 nt, Artificial Sequence
  Description of Artificial Sequence: Synthetic oligonucleotide
  Antisense strand to SEQ ID NO: 556633
ugagauacacucaagcucu

SEQ ID NO: 556635 - RNA, 19 nt, Artificial Sequence
  Description of Artificial Sequence: Synthetic oligonucleotide
  Sense strand starting at position 1549 of SEQ ID NO: 318361
cccagaaaguuucuugaaa

SEQ ID NO: 556636 - RNA, 19 nt, Artificial Sequence
  Description of Artificial Sequence: Synthetic oligonucleotide
  Antisense strand to SEQ ID NO: 556635
uuucaagaaacuuucuggg

SEQ ID NO: 556637 - RNA, 19 nt, Artificial Sequence
  Description of Artificial Sequence: Synthetic oligonucleotide
  Sense strand starting at position 1550 of SEQ ID NO: 318361
ccagaaaguuucuugaaag

SEQ ID NO: 556638 - RNA, 19 nt, Artificial Sequence
  Description of Artificial Sequence: Synthetic oligonucleotide
  Antisense strand to SEQ ID NO: 556637
cuuucaagaaacuuucugg

SEQ ID NO: 556639 - RNA, 19 nt, Artificial Sequence
  Description of Artificial Sequence: Synthetic oligonucleotide
  Sense strand starting at position 1557 of SEQ ID NO: 318361
guuucuugaaaguggaaac

SEQ ID NO: 556640 - RNA, 19 nt, Artificial Sequence
  Description of Artificial Sequence: Synthetic oligonucleotide
  Antisense strand to SEQ ID NO: 556639
guuuccacuuucaagaaac

SEQ ID NO: 556641 - RNA, 19 nt, Artificial Sequence
  Description of Artificial Sequence: Synthetic oligonucleotide
  Sense strand starting at position 1880 of SEQ ID NO: 318361
gguugcucugcgaagagcu

SEQ ID NO: 556642 - RNA, 19 nt, Artificial Sequence
  Description of Artificial Sequence: Synthetic oligonucleotide
  Antisense strand to SEQ ID NO: 556641
agcucuucgcagagcaacc

SEQ ID NO: 556643 - RNA, 19 nt, Artificial Sequence
  Description of Artificial Sequence: Synthetic oligonucleotide
  Sense strand starting at position 1988 of SEQ ID NO: 318361
ccagaauggaaaugagugu

SEQ ID NO: 556644 - RNA, 19 nt, Artificial Sequence
  Description of Artificial Sequence: Synthetic oligonucleotide
  Antisense strand to SEQ ID NO: 556643
acacucauuuccauucugg

SEQ ID NO: 556645 - RNA, 19 nt, Artificial Sequence
  Description of Artificial Sequence: Synthetic oligonucleotide
  Sense strand starting at position 1992 of SEQ ID NO: 318361
aauggaaaugaguguuuac

SEQ ID NO: 556646 - RNA, 19 nt, Artificial Sequence
  Description of Artificial Sequence: Synthetic oligonucleotide
  Antisense strand to SEQ ID NO: 556645
guaaacacucauuuccauu

SEQ ID NO: 556647 - RNA, 19 nt, Artificial Sequence
  Description of Artificial Sequence: Synthetic oligonucleotide
  Sense strand starting at position 2009 of SEQ ID NO: 318361
acacgucaaaucgacgaaa

SEQ ID NO: 556648 - RNA, 19 nt, Artificial Sequence
  Description of Artificial Sequence: Synthetic oligonucleotide
  Antisense strand to SEQ ID NO: 556647
uuucgucgauuugacgugu

SEQ ID NO: 556649 - RNA, 19 nt, Artificial Sequence
  Description of Artificial Sequence: Synthetic oligonucleotide
  Sense strand starting at position 2042 of SEQ ID NO: 318361
ucagaucuaccuggacuaa

SEQ ID NO: 556650 - RNA, 19 nt, Artificial Sequence
  Description of Artificial Sequence: Synthetic oligonucleotide
  Antisense strand to SEQ ID NO: 556649
uuaguccagguagaucuga

SEQ ID NO: 556651 - RNA, 19 nt, Artificial Sequence
  Description of Artificial Sequence: Synthetic oligonucleotide
  Sense strand starting at position 2057 of SEQ ID NO: 318361
cuaagauccgaaugguauu

SEQ ID NO: 556652 - RNA, 19 nt, Artificial Sequence
  Description of Artificial Sequence: Synthetic oligonucleotide
  Antisense strand to SEQ ID NO: 556651
aauaccauucggaucuuag

SEQ ID NO: 556653 - RNA, 19 nt, Artificial Sequence
  Description of Artificial Sequence: Synthetic oligonucleotide
  Sense strand starting at position 2136 of SEQ ID NO: 318361
guuugcugggaucaguuaa

SEQ ID NO: 556654 - RNA, 19 nt, Artificial Sequence
  Description of Artificial Sequence: Synthetic oligonucleotide
  Antisense strand to SEQ ID NO: 556653
uuaacugaucccagcaaac

SEQ ID NO: 556655 - RNA, 19 nt, Artificial Sequence
  Description of Artificial Sequence: Synthetic oligonucleotide
  Sense strand starting at position 2177 of SEQ ID NO: 318361
aauucuguaccgugagaaa

SEQ ID NO: 556656 - RNA, 19 nt, Artificial Sequence
  Description of Artificial Sequence: Synthetic oligonucleotide
  Antisense strand to SEQ ID NO: 556655
uuucucacgguacagaauu

SEQ ID NO: 556657 - RNA, 19 nt, Artificial Sequence
  Description of Artificial Sequence: Synthetic oligonucleotide
  Sense strand starting at position 2335 of SEQ ID NO: 318361
gcuauaggauucuuauaau

SEQ ID NO: 556658 - RNA, 19 nt, Artificial Sequence
  Description of Artificial Sequence: Synthetic oligonucleotide
  Antisense strand to SEQ ID NO: 556657
auuauaagaauccuauagc

SEQ ID NO: 556659 - RNA, 19 nt, Artificial Sequence
  Description of Artificial Sequence: Synthetic oligonucleotide
  Sense strand starting at position 2462 of SEQ ID NO: 318361
uguucuaaauugucugaga

SEQ ID NO: 556660 - RNA, 19 nt, Artificial Sequence
  Description of Artificial Sequence: Synthetic oligonucleotide
  Antisense strand to SEQ ID NO: 556659
ucucagacaauuuagaaca

SEQ ID NO: 556661 - RNA, 19 nt, Artificial Sequence
  Description of Artificial Sequence: Synthetic oligonucleotide
  Sense strand starting at position 2463 of SEQ ID NO: 318361
guucuaaauugucugagaa

SEQ ID NO: 556662 - RNA, 19 nt, Artificial Sequence
  Description of Artificial Sequence: Synthetic oligonucleotide
  Antisense strand to SEQ ID NO: 556661
uucucagacaauuuagaac

SEQ ID NO: 556663 - RNA, 19 nt, Artificial Sequence
  Description of Artificial Sequence: Synthetic oligonucleotide
  Sense strand starting at position 2577 of SEQ ID NO: 318361
guuucucaaccucaguaaa

SEQ ID NO: 556664 - RNA, 19 nt, Artificial Sequence
  Description of Artificial Sequence: Synthetic oligonucleotide
  Antisense strand to SEQ ID NO: 556663
uuuacugagguugagaaac

SEQ ID NO: 556665 - RNA, 19 nt, Artificial Sequence
  Description of Artificial Sequence: Synthetic oligonucleotide
  Sense strand starting at position 2608 of SEQ ID NO: 318361
guuauacuccgauauugca

SEQ ID NO: 556666 - RNA, 19 nt, Artificial Sequence
  Description of Artificial Sequence: Synthetic oligonucleotide
  Antisense strand to SEQ ID NO: 556665
ugcaauaucggaguauaac

SEQ ID NO: 556667 - RNA, 19 nt, Artificial Sequence
  Description of Artificial Sequence: Synthetic oligonucleotide
  Sense strand starting at position 2867 of SEQ ID NO: 318361
caaugccucuuuguggaaa

SEQ ID NO: 556668 - RNA, 19 nt, Artificial Sequence
  Description of Artificial Sequence: Synthetic oligonucleotide
  Antisense strand to SEQ ID NO: 556667
uuuccacaaagaggcauug

SEQ ID NO: 556669 - RNA, 19 nt, Artificial Sequence
  Description of Artificial Sequence: Synthetic oligonucleotide
  Sense strand starting at position 3013 of SEQ ID NO: 318361
gauaccagugccuaguauu

SEQ ID NO: 556670 - RNA, 19 nt, Artificial Sequence
  Description of Artificial Sequence: Synthetic oligonucleotide
  Antisense strand to SEQ ID NO: 556669
aauacuaggcacugguauc

SEQ ID NO: 556671 - RNA, 19 nt, Artificial Sequence
  Description of Artificial Sequence: Synthetic oligonucleotide
  Sense strand starting at position 3379 of SEQ ID NO: 318361
gcgcgaucuaugcuguaga

SEQ ID NO: 556672 - RNA, 19 nt, Artificial Sequence
  Description of Artificial Sequence: Synthetic oligonucleotide
  Antisense strand to SEQ ID NO: 556671
ucuacagcauagaucgcgc

SEQ ID NO: 556673 - RNA, 19 nt, Artificial Sequence
  Description of Artificial Sequence: Synthetic oligonucleotide
  Sense strand starting at position 3382 of SEQ ID NO: 318361
cgaucuaugcuguagaaau

SEQ ID NO: 556674 - RNA, 19 nt, Artificial Sequence
  Description of Artificial Sequence: Synthetic oligonucleotide
  Antisense strand to SEQ ID NO: 556673
auuucuacagcauagaucg

SEQ ID NO: 556675 - RNA, 19 nt, Artificial Sequence
  Description of Artificial Sequence: Synthetic oligonucleotide
  Sense strand starting at position 3457 of SEQ ID NO: 318361
aagagauguuccuuacaag

SEQ ID NO: 556676 - RNA, 19 nt, Artificial Sequence
  Description of Artificial Sequence: Synthetic oligonucleotide
  Antisense strand to SEQ ID NO: 556675
cuuguaaggaacaucucuu

SEQ ID NO: 556677 - RNA, 19 nt, Artificial Sequence
  Description of Artificial Sequence: Synthetic oligonucleotide
  Sense strand starting at position 3545 of SEQ ID NO: 318361
ugcagaaaugugcacuaca

SEQ ID NO: 556678 - RNA, 19 nt, Artificial Sequence
  Description of Artificial Sequence: Synthetic oligonucleotide
  Antisense strand to SEQ ID NO: 556677
uguagugcacauuucugca

SEQ ID NO: 556679 - RNA, 19 nt, Artificial Sequence
  Description of Artificial Sequence: Synthetic oligonucleotide
  Sense strand starting at position 3609 of SEQ ID NO: 318361
guuaauaagccaugugaca

SEQ ID NO: 556680 - RNA, 19 nt, Artificial Sequence
  Description of Artificial Sequence: Synthetic oligonucleotide
  Antisense strand to SEQ ID NO: 556679
ugucacauggcuuauuaac

SEQ ID NO: 556681 - RNA, 19 nt, Artificial Sequence
  Description of Artificial Sequence: Synthetic oligonucleotide
  Sense strand starting at position 3620 of SEQ ID NO: 318361
augugacaugguuaagugu

SEQ ID NO: 556682 - RNA, 19 nt, Artificial Sequence
  Description of Artificial Sequence: Synthetic oligonucleotide
  Antisense strand to SEQ ID NO: 556681
acacuuaaccaugucacau

SEQ ID NO: 556683 - RNA, 19 nt, Artificial Sequence
  Description of Artificial Sequence: Synthetic oligonucleotide
  Sense strand starting at position 3692 of SEQ ID NO: 318361
cuuuguugucuguucugua

SEQ ID NO: 556684 - RNA, 19 nt, Artificial Sequence
  Description of Artificial Sequence: Synthetic oligonucleotide
  Antisense strand to SEQ ID NO: 556683
uacagaacagacaacaaag

SEQ ID NO: 556685 - RNA, 19 nt, Artificial Sequence
  Description of Artificial Sequence: Synthetic oligonucleotide
  Sense strand starting at position 3705 of SEQ ID NO: 318361
ucuguaaauccacaugugu

SEQ ID NO: 556686 - RNA, 19 nt, Artificial Sequence
  Description of Artificial Sequence: Synthetic oligonucleotide
  Antisense strand to SEQ ID NO: 556685
acacauguggauuuacaga

SEQ ID NO: 556687 - RNA, 19 nt, Artificial Sequence
  Description of Artificial Sequence: Synthetic oligonucleotide
  Sense strand starting at position 3724 of SEQ ID NO: 318361
gaauguugauggcugggua

SEQ ID NO: 556688 - RNA, 19 nt, Artificial Sequence
  Description of Artificial Sequence: Synthetic oligonucleotide
  Antisense strand to SEQ ID NO: 556687
uacccagccaucaacauuc

SEQ ID NO: 556689 - RNA, 19 nt, Artificial Sequence
  Description of Artificial Sequence: Synthetic oligonucleotide
  Sense strand starting at position 3725 of SEQ ID NO: 318361
aauguugauggcuggguaa

SEQ ID NO: 556690 - RNA, 19 nt, Artificial Sequence
  Description of Artificial Sequence: Synthetic oligonucleotide
  Antisense strand to SEQ ID NO: 556689
uuacccagccaucaacauu

SEQ ID NO: 556691 - RNA, 19 nt, Artificial Sequence
  Description of Artificial Sequence: Synthetic oligonucleotide
  Sense strand starting at position 3929 of SEQ ID NO: 318361
aguaaaucaguuuggcaga

SEQ ID NO: 556692 - RNA, 19 nt, Artificial Sequence
  Description of Artificial Sequence: Synthetic oligonucleotide
  Antisense strand to SEQ ID NO: 556691
ucugccaaacugauuuacu

SEQ ID NO: 556693 - RNA, 19 nt, Artificial Sequence
  Description of Artificial Sequence: Synthetic oligonucleotide
  Sense strand starting at position 3931 of SEQ ID NO: 318361
uaaaucaguuuggcagagu

SEQ ID NO: 556694 - RNA, 19 nt, Artificial Sequence
  Description of Artificial Sequence: Synthetic oligonucleotide
  Antisense strand to SEQ ID NO: 556693
acucugccaaacugauuua

SEQ ID NO: 556695 - RNA, 19 nt, Artificial Sequence
  Description of Artificial Sequence: Synthetic oligonucleotide
  Sense strand starting at position 27 of SEQ ID NO: 318362
uacuucuccggguaucuau

SEQ ID NO: 556696 - RNA, 19 nt, Artificial Sequence
  Description of Artificial Sequence: Synthetic oligonucleotide
  Antisense strand to SEQ ID NO: 556695
auagauacccggagaagua

SEQ ID NO: 556697 - RNA, 19 nt, Artificial Sequence
  Description of Artificial Sequence: Synthetic oligonucleotide
  Sense strand starting at position 35 of SEQ ID NO: 318362
cggguaucuauugacaucu

SEQ ID NO: 556698 - RNA, 19 nt, Artificial Sequence
  Description of Artificial Sequence: Synthetic oligonucleotide
  Antisense strand to SEQ ID NO: 556697
agaugucaauagauacccg

SEQ ID NO: 556699 - RNA, 19 nt, Artificial Sequence
  Description of Artificial Sequence: Synthetic oligonucleotide
  Sense strand starting at position 191 of SEQ ID NO: 318362
acagaagaaacguguucuu

SEQ ID NO: 556700 - RNA, 19 nt, Artificial Sequence
  Description of Artificial Sequence: Synthetic oligonucleotide
  Antisense strand to SEQ ID NO: 556699
aagaacacguuucuucugu

SEQ ID NO: 556701 - RNA, 19 nt, Artificial Sequence
  Description of Artificial Sequence: Synthetic oligonucleotide
  Sense strand starting at position 194 of SEQ ID NO: 318362
gaagaaacguguucuuuaa

SEQ ID NO: 556702 - RNA, 19 nt, Artificial Sequence
  Description of Artificial Sequence: Synthetic oligonucleotide
  Antisense strand to SEQ ID NO: 556701
uuaaagaacacguuucuuc

SEQ ID NO: 556703 - RNA, 19 nt, Artificial Sequence
  Description of Artificial Sequence: Synthetic oligonucleotide
  Sense strand starting at position 198 of SEQ ID NO: 318362
aaacguguucuuuaaauug

SEQ ID NO: 556704 - RNA, 19 nt, Artificial Sequence
  Description of Artificial Sequence: Synthetic oligonucleotide
  Antisense strand to SEQ ID NO: 556703
caauuuaaagaacacguuu

SEQ ID NO: 556705 - RNA, 19 nt, Artificial Sequence
  Description of Artificial Sequence: Synthetic oligonucleotide
  Sense strand starting at position 209 of SEQ ID NO: 318362
uuaaauuggugauucucau

SEQ ID NO: 556706 - RNA, 19 nt, Artificial Sequence
  Description of Artificial Sequence: Synthetic oligonucleotide
  Antisense strand to SEQ ID NO: 556705
augagaaucaccaauuuaa

SEQ ID NO: 556707 - RNA, 19 nt, Artificial Sequence
  Description of Artificial Sequence: Synthetic oligonucleotide
  Sense strand starting at position 220 of SEQ ID NO: 318362
auucucaucgcccagagaa

SEQ ID NO: 556708 - RNA, 19 nt, Artificial Sequence
  Description of Artificial Sequence: Synthetic oligonucleotide
  Antisense strand to SEQ ID NO: 556707
uucucugggcgaugagaau

SEQ ID NO: 556709 - RNA, 19 nt, Artificial Sequence
  Description of Artificial Sequence: Synthetic oligonucleotide
  Sense strand starting at position 222 of SEQ ID NO: 318362
ucucaucgcccagagaauu

SEQ ID NO: 556710 - RNA, 19 nt, Artificial Sequence
  Description of Artificial Sequence: Synthetic oligonucleotide
  Antisense strand to SEQ ID NO: 556709
aauucucugggcgaugaga

SEQ ID NO: 556711 - RNA, 19 nt, Artificial Sequence
  Description of Artificial Sequence: Synthetic oligonucleotide
  Sense strand starting at position 273 of SEQ ID NO: 318362
ccugaaucucagugaaucu

SEQ ID NO: 556712 - RNA, 19 nt, Artificial Sequence
  Description of Artificial Sequence: Synthetic oligonucleotide
  Antisense strand to SEQ ID NO: 556711
agauucacugagauucagg

SEQ ID NO: 556713 - RNA, 19 nt, Artificial Sequence
  Description of Artificial Sequence: Synthetic oligonucleotide
  Sense strand starting at position 285 of SEQ ID NO: 318362
ugaaucuuccuauaagcug

SEQ ID NO: 556714 - RNA, 19 nt, Artificial Sequence
  Description of Artificial Sequence: Synthetic oligonucleotide
  Antisense strand to SEQ ID NO: 556713
cagcuuauaggaagauuca

SEQ ID NO: 556715 - RNA, 19 nt, Artificial Sequence
  Description of Artificial Sequence: Synthetic oligonucleotide
  Sense strand starting at position 427 of SEQ ID NO: 318362
gcaauaagguacccaauau

SEQ ID NO: 556716 - RNA, 19 nt, Artificial Sequence
  Description of Artificial Sequence: Synthetic oligonucleotide
  Antisense strand to SEQ ID NO: 556715
auauuggguaccuuauugc

SEQ ID NO: 556717 - RNA, 19 nt, Artificial Sequence
  Description of Artificial Sequence: Synthetic oligonucleotide
  Sense strand starting at position 785 of SEQ ID NO: 318362
cauugaauggucuagguuu

SEQ ID NO: 556718 - RNA, 19 nt, Artificial Sequence
  Description of Artificial Sequence: Synthetic oligonucleotide
  Antisense strand to SEQ ID NO: 556717
aaaccuagaccauucaaug

SEQ ID NO: 556719 - RNA, 19 nt, Artificial Sequence
  Description of Artificial Sequence: Synthetic oligonucleotide
  Sense strand starting at position 805 of SEQ ID NO: 318362
gaugcaugccuagagcuaa

SEQ ID NO: 556720 - RNA, 19 nt, Artificial Sequence
  Description of Artificial Sequence: Synthetic oligonucleotide
  Antisense strand to SEQ ID NO: 556719
uuagcucuaggcaugcauc

SEQ ID NO: 556721 - RNA, 19 nt, Artificial Sequence
  Description of Artificial Sequence: Synthetic oligonucleotide
  Sense strand starting at position 962 of SEQ ID NO: 318362
auacaugauuuguaugaug

SEQ ID NO: 556722 - RNA, 19 nt, Artificial Sequence
  Description of Artificial Sequence: Synthetic oligonucleotide
  Antisense strand to SEQ ID NO: 556721
caucauacaaaucauguau

SEQ ID NO: 556723 - RNA, 19 nt, Artificial Sequence
  Description of Artificial Sequence: Synthetic oligonucleotide
  Sense strand starting at position 971 of SEQ ID NO: 318362
uuguaugauguccacagua

SEQ ID NO: 556724 - RNA, 19 nt, Artificial Sequence
  Description of Artificial Sequence: Synthetic oligonucleotide
  Antisense strand to SEQ ID NO: 556723
uacuguggacaucauacaa

SEQ ID NO: 556725 - RNA, 19 nt, Artificial Sequence
  Description of Artificial Sequence: Synthetic oligonucleotide
  Sense strand starting at position 1055 of SEQ ID NO: 318362
gugcaauucccagacuuac

SEQ ID NO: 556726 - RNA, 19 nt, Artificial Sequence
  Description of Artificial Sequence: Synthetic oligonucleotide
  Antisense strand to SEQ ID NO: 556725
guaagucugggaauugcac

SEQ ID NO: 556727 - RNA, 19 nt, Artificial Sequence
  Description of Artificial Sequence: Synthetic oligonucleotide
  Sense strand starting at position 1345 of SEQ ID NO: 318362
gauucuugauuacuugaga

SEQ ID NO: 556728 - RNA, 19 nt, Artificial Sequence
  Description of Artificial Sequence: Synthetic oligonucleotide
  Antisense strand to SEQ ID NO: 556727
ucucaaguaaucaagaauc

SEQ ID NO: 556729 - RNA, 19 nt, Artificial Sequence
  Description of Artificial Sequence: Synthetic oligonucleotide
  Sense strand starting at position 1346 of SEQ ID NO: 318362
auucuugauuacuugagag

SEQ ID NO: 556730 - RNA, 19 nt, Artificial Sequence
  Description of Artificial Sequence: Synthetic oligonucleotide
  Antisense strand to SEQ ID NO: 556729
cucucaaguaaucaagaau

SEQ ID NO: 556731 - RNA, 19 nt, Artificial Sequence
  Description of Artificial Sequence: Synthetic oligonucleotide
  Sense strand starting at position 1515 of SEQ ID NO: 318362
gguuuauaaaguugagaau

SEQ ID NO: 556732 - RNA, 19 nt, Artificial Sequence
  Description of Artificial Sequence: Synthetic oligonucleotide
  Antisense strand to SEQ ID NO: 556731
auucucaacuuuauaaacc

SEQ ID NO: 556733 - RNA, 19 nt, Artificial Sequence
  Description of Artificial Sequence: Synthetic oligonucleotide
  Sense strand starting at position 1530 of SEQ ID NO: 318362
gaaugaagccucuagcaag

SEQ ID NO: 556734 - RNA, 19 nt, Artificial Sequence
  Description of Artificial Sequence: Synthetic oligonucleotide
  Antisense strand to SEQ ID NO: 556733
cuugcuagaggcuucauuc

SEQ ID NO: 556735 - RNA, 19 nt, Artificial Sequence
  Description of Artificial Sequence: Synthetic oligonucleotide
  Sense strand starting at position 1566 of SEQ ID NO: 318362
gaggguucggucuacagaa

SEQ ID NO: 556736 - RNA, 19 nt, Artificial Sequence
  Description of Artificial Sequence: Synthetic oligonucleotide
  Antisense strand to SEQ ID NO: 556735
uucuguagaccgaacccuc

SEQ ID NO: 556737 - RNA, 19 nt, Artificial Sequence
  Description of Artificial Sequence: Synthetic oligonucleotide
  Sense strand starting at position 2007 of SEQ ID NO: 318362
aguuaugaagcuuggacuu

SEQ ID NO: 556738 - RNA, 19 nt, Artificial Sequence
  Description of Artificial Sequence: Synthetic oligonucleotide
  Antisense strand to SEQ ID NO: 556737
aaguccaagcuucauaacu

SEQ ID NO: 556739 - RNA, 19 nt, Artificial Sequence
  Description of Artificial Sequence: Synthetic oligonucleotide
  Sense strand starting at position 2014 of SEQ ID NO: 318362
aagcuuggacuuuauaagu

SEQ ID NO: 556740 - RNA, 19 nt, Artificial Sequence
  Description of Artificial Sequence: Synthetic oligonucleotide
  Antisense strand to SEQ ID NO: 556739
acuuauaaaguccaagcuu

SEQ ID NO: 556741 - RNA, 19 nt, Artificial Sequence
  Description of Artificial Sequence: Synthetic oligonucleotide
  Sense strand starting at position 2359 of SEQ ID NO: 318362
ugguaagagcuugagugua

SEQ ID NO: 556742 - RNA, 19 nt, Artificial Sequence
  Description of Artificial Sequence: Synthetic oligonucleotide
  Antisense strand to SEQ ID NO: 556741
uacacucaagcucuuacca

SEQ ID NO: 556743 - RNA, 19 nt, Artificial Sequence
  Description of Artificial Sequence: Synthetic oligonucleotide
  Sense strand starting at position 2364 of SEQ ID NO: 318362
agagcuugaguguaucuca

SEQ ID NO: 556744 - RNA, 19 nt, Artificial Sequence
  Description of Artificial Sequence: Synthetic oligonucleotide
  Antisense strand to SEQ ID NO: 556743
ugagauacacucaagcucu

SEQ ID NO: 556745 - RNA, 19 nt, Artificial Sequence
  Description of Artificial Sequence: Synthetic oligonucleotide
  Sense strand starting at position 2671 of SEQ ID NO: 318362
cccagaaaguuucuugaaa

SEQ ID NO: 556746 - RNA, 19 nt, Artificial Sequence
  Description of Artificial Sequence: Synthetic oligonucleotide
  Antisense strand to SEQ ID NO: 556745
uuucaagaaacuuucuggg

SEQ ID NO: 556747 - RNA, 19 nt, Artificial Sequence
  Description of Artificial Sequence: Synthetic oligonucleotide
  Sense strand starting at position 2672 of SEQ ID NO: 318362
ccagaaaguuucuugaaag

SEQ ID NO: 556748 - RNA, 19 nt, Artificial Sequence
  Description of Artificial Sequence: Synthetic oligonucleotide
  Antisense strand to SEQ ID NO: 556747
cuuucaagaaacuuucugg

SEQ ID NO: 556749 - RNA, 19 nt, Artificial Sequence
  Description of Artificial Sequence: Synthetic oligonucleotide
  Sense strand starting at position 2679 of SEQ ID NO: 318362
guuucuugaaaguggaaac

SEQ ID NO: 556750 - RNA, 19 nt, Artificial Sequence
  Description of Artificial Sequence: Synthetic oligonucleotide
  Antisense strand to SEQ ID NO: 556749
guuuccacuuucaagaaac

SEQ ID NO: 556751 - RNA, 19 nt, Artificial Sequence
  Description of Artificial Sequence: Synthetic oligonucleotide
  Sense strand starting at position 3002 of SEQ ID NO: 318362
gguugcucugcgaagagcu

SEQ ID NO: 556752 - RNA, 19 nt, Artificial Sequence
  Description of Artificial Sequence: Synthetic oligonucleotide
  Antisense strand to SEQ ID NO: 556751
agcucuucgcagagcaacc

SEQ ID NO: 556753 - RNA, 19 nt, Artificial Sequence
  Description of Artificial Sequence: Synthetic oligonucleotide
  Sense strand starting at position 3110 of SEQ ID NO: 318362
ccagaauggaaaugagugu

SEQ ID NO: 556754 - RNA, 19 nt, Artificial Sequence
  Description of Artificial Sequence: Synthetic oligonucleotide
  Antisense strand to SEQ ID NO: 556753
acacucauuuccauucugg

SEQ ID NO: 556755 - RNA, 19 nt, Artificial Sequence
  Description of Artificial Sequence: Synthetic oligonucleotide
  Sense strand starting at position 3114 of SEQ ID NO: 318362
aauggaaaugaguguuuac

SEQ ID NO: 556756 - RNA, 19 nt, Artificial Sequence
  Description of Artificial Sequence: Synthetic oligonucleotide
  Antisense strand to SEQ ID NO: 556755
guaaacacucauuuccauu

SEQ ID NO: 556757 - RNA, 19 nt, Artificial Sequence
  Description of Artificial Sequence: Synthetic oligonucleotide
  Sense strand starting at position 3131 of SEQ ID NO: 318362
acacgucaaaucgacgaaa

SEQ ID NO: 556758 - RNA, 19 nt, Artificial Sequence
  Description of Artificial Sequence: Synthetic oligonucleotide
  Antisense strand to SEQ ID NO: 556757
uuucgucgauuugacgugu

SEQ ID NO: 556759 - RNA, 19 nt, Artificial Sequence
  Description of Artificial Sequence: Synthetic oligonucleotide
  Sense strand starting at position 3164 of SEQ ID NO: 318362
ucagaucuaccuggacuaa

SEQ ID NO: 556760 - RNA, 19 nt, Artificial Sequence
  Description of Artificial Sequence: Synthetic oligonucleotide
  Antisense strand to SEQ ID NO: 556759
uuaguccagguagaucuga

SEQ ID NO: 556761 - RNA, 19 nt, Artificial Sequence
  Description of Artificial Sequence: Synthetic oligonucleotide
  Sense strand starting at position 3179 of SEQ ID NO: 318362
cuaagauccgaaugguauu

SEQ ID NO: 556762 - RNA, 19 nt, Artificial Sequence
  Description of Artificial Sequence: Synthetic oligonucleotide
  Antisense strand to SEQ ID NO: 556761
aauaccauucggaucuuag

SEQ ID NO: 556763 - RNA, 19 nt, Artificial Sequence
  Description of Artificial Sequence: Synthetic oligonucleotide
  Sense strand starting at position 3258 of SEQ ID NO: 318362
guuugcugggaucaguuaa

SEQ ID NO: 556764 - RNA, 19 nt, Artificial Sequence
  Description of Artificial Sequence: Synthetic oligonucleotide
  Antisense strand to SEQ ID NO: 556763
uuaacugaucccagcaaac

SEQ ID NO: 556765 - RNA, 19 nt, Artificial Sequence
  Description of Artificial Sequence: Synthetic oligonucleotide
  Sense strand starting at position 3299 of SEQ ID NO: 318362
aauucuguaccgugagaaa

SEQ ID NO: 556766 - RNA, 19 nt, Artificial Sequence
  Description of Artificial Sequence: Synthetic oligonucleotide
  Antisense strand to SEQ ID NO: 556765
uuucucacgguacagaauu

SEQ ID NO: 556767 - RNA, 19 nt, Artificial Sequence
  Description of Artificial Sequence: Synthetic oligonucleotide
  Sense strand starting at position 3457 of SEQ ID NO: 318362
gcuauaggauucuuauaau

SEQ ID NO: 556768 - RNA, 19 nt, Artificial Sequence
  Description of Artificial Sequence: Synthetic oligonucleotide
  Antisense strand to SEQ ID NO: 556767
auuauaagaauccuauagc

SEQ ID NO: 556769 - RNA, 19 nt, Artificial Sequence
  Description of Artificial Sequence: Synthetic oligonucleotide
  Sense strand starting at position 3584 of SEQ ID NO: 318362
uguucuaaauugucugaga

SEQ ID NO: 556770 - RNA, 19 nt, Artificial Sequence
  Description of Artificial Sequence: Synthetic oligonucleotide
  Antisense strand to SEQ ID NO: 556769
ucucagacaauuuagaaca

SEQ ID NO: 556771 - RNA, 19 nt, Artificial Sequence
  Description of Artificial Sequence: Synthetic oligonucleotide
  Sense strand starting at position 3585 of SEQ ID NO: 318362
guucuaaauugucugagaa

SEQ ID NO: 556772 - RNA, 19 nt, Artificial Sequence
  Description of Artificial Sequence: Synthetic oligonucleotide
  Antisense strand to SEQ ID NO: 556771
uucucagacaauuuagaac

SEQ ID NO: 556773 - RNA, 19 nt, Artificial Sequence
  Description of Artificial Sequence: Synthetic oligonucleotide
  Sense strand starting at position 3699 of SEQ ID NO: 318362
guuucucaaccucaguaaa

SEQ ID NO: 556774 - RNA, 19 nt, Artificial Sequence
  Description of Artificial Sequence: Synthetic oligonucleotide
  Antisense strand to SEQ ID NO: 556773
uuuacugagguugagaaac

SEQ ID NO: 556775 - RNA, 19 nt, Artificial Sequence
  Description of Artificial Sequence: Synthetic oligonucleotide
  Sense strand starting at position 52 of SEQ ID NO: 318363
gaacuauauggguggguuu

SEQ ID NO: 556776 - RNA, 19 nt, Artificial Sequence
  Description of Artificial Sequence: Synthetic oligonucleotide
  Antisense strand to SEQ ID NO: 556775
aaacccacccauauaguuc

SEQ ID NO: 556777 - RNA, 19 nt, Artificial Sequence
  Description of Artificial Sequence: Synthetic oligonucleotide
  Sense strand starting at position 53 of SEQ ID NO: 318363
aacuauauggguggguuua

SEQ ID NO: 556778 - RNA, 19 nt, Artificial Sequence
  Description of Artificial Sequence: Synthetic oligonucleotide
  Antisense strand to SEQ ID NO: 556777
uaaacccacccauauaguu

SEQ ID NO: 556779 - RNA, 19 nt, Artificial Sequence
  Description of Artificial Sequence: Synthetic oligonucleotide
  Sense strand starting at position 55 of SEQ ID NO: 318363
cuauauggguggguuuaga

SEQ ID NO: 556780 - RNA, 19 nt, Artificial Sequence
  Description of Artificial Sequence: Synthetic oligonucleotide
  Antisense strand to SEQ ID NO: 556779
ucuaaacccacccauauag

SEQ ID NO: 556781 - RNA, 19 nt, Artificial Sequence
  Description of Artificial Sequence: Synthetic oligonucleotide
  Sense strand starting at position 150 of SEQ ID NO: 318363
cgcauucuuguugugggua

SEQ ID NO: 556782 - RNA, 19 nt, Artificial Sequence
  Description of Artificial Sequence: Synthetic oligonucleotide
  Antisense strand to SEQ ID NO: 556781
uacccacaacaagaaugcg

SEQ ID NO: 556783 - RNA, 19 nt, Artificial Sequence
  Description of Artificial Sequence: Synthetic oligonucleotide
  Sense strand starting at position 597 of SEQ ID NO: 318363
cuacucuagccucaggauu

SEQ ID NO: 556784 - RNA, 19 nt, Artificial Sequence
  Description of Artificial Sequence: Synthetic oligonucleotide
  Antisense strand to SEQ ID NO: 556783
aauccugaggcuagaguag

SEQ ID NO: 556785 - RNA, 19 nt, Artificial Sequence
  Description of Artificial Sequence: Synthetic oligonucleotide
  Sense strand starting at position 701 of SEQ ID NO: 318363
gugguucugcuacacaaga

SEQ ID NO: 556786 - RNA, 19 nt, Artificial Sequence
  Description of Artificial Sequence: Synthetic oligonucleotide
  Antisense strand to SEQ ID NO: 556785
ucuuguguagcagaaccac

SEQ ID NO: 556787 - RNA, 19 nt, Artificial Sequence
  Description of Artificial Sequence: Synthetic oligonucleotide
  Sense strand starting at position 816 of SEQ ID NO: 318363
ggaauagagucuuuguccu

SEQ ID NO: 556788 - RNA, 19 nt, Artificial Sequence
  Description of Artificial Sequence: Synthetic oligonucleotide
  Antisense strand to SEQ ID NO: 556787
aggacaaagacucuauucc

SEQ ID NO: 556789 - RNA, 19 nt, Artificial Sequence
  Description of Artificial Sequence: Synthetic oligonucleotide
  Sense strand starting at position 865 of SEQ ID NO: 318363
gggaauaucacgugugagg

SEQ ID NO: 556790 - RNA, 19 nt, Artificial Sequence
  Description of Artificial Sequence: Synthetic oligonucleotide
  Antisense strand to SEQ ID NO: 556789
ccucacacgugauauuccc

SEQ ID NO: 556791 - RNA, 19 nt, Artificial Sequence
  Description of Artificial Sequence: Synthetic oligonucleotide
  Sense strand starting at position 867 of SEQ ID NO: 318363
gaauaucacgugugaggga

SEQ ID NO: 556792 - RNA, 19 nt, Artificial Sequence
  Description of Artificial Sequence: Synthetic oligonucleotide
  Antisense strand to SEQ ID NO: 556791
ucccucacacgugauauuc

SEQ ID NO: 556793 - RNA, 19 nt, Artificial Sequence
  Description of Artificial Sequence: Synthetic oligonucleotide
  Sense strand starting at position 897 of SEQ ID NO: 318363
ucacgagucauguaguuaa

SEQ ID NO: 556794 - RNA, 19 nt, Artificial Sequence
  Description of Artificial Sequence: Synthetic oligonucleotide
  Antisense strand to SEQ ID NO: 556793
uuaacuacaugacucguga

SEQ ID NO: 556795 - RNA, 19 nt, Artificial Sequence
  Description of Artificial Sequence: Synthetic oligonucleotide
  Sense strand starting at position 920 of SEQ ID NO: 318363
acaguuguugagggaggaa

SEQ ID NO: 556796 - RNA, 19 nt, Artificial Sequence
  Description of Artificial Sequence: Synthetic oligonucleotide
  Antisense strand to SEQ ID NO: 556795
uuccucccucaacaacugu

SEQ ID NO: 556797 - RNA, 19 nt, Artificial Sequence
  Description of Artificial Sequence: Synthetic oligonucleotide
  Sense strand starting at position 963 of SEQ ID NO: 318363
augacacucuagucaauga

SEQ ID NO: 556798 - RNA, 19 nt, Artificial Sequence
  Description of Artificial Sequence: Synthetic oligonucleotide
  Antisense strand to SEQ ID NO: 556797
ucauugacuagagugucau

SEQ ID NO: 556799 - RNA, 19 nt, Artificial Sequence
  Description of Artificial Sequence: Synthetic oligonucleotide
  Sense strand starting at position 973 of SEQ ID NO: 318363
agucaaugauaugcacgau

SEQ ID NO: 556800 - RNA, 19 nt, Artificial Sequence
  Description of Artificial Sequence: Synthetic oligonucleotide
  Antisense strand to SEQ ID NO: 556799
aucgugcauaucauugacu

SEQ ID NO: 556801 - RNA, 19 nt, Artificial Sequence
  Description of Artificial Sequence: Synthetic oligonucleotide
  Sense strand starting at position 1020 of SEQ ID NO: 318363
ugcaauuuauuuggagaug

SEQ ID NO: 556802 - RNA, 19 nt, Artificial Sequence
  Description of Artificial Sequence: Synthetic oligonucleotide
  Antisense strand to SEQ ID NO: 556801
caucuccaaauaaauugca

SEQ ID NO: 556803 - RNA, 19 nt, Artificial Sequence
  Description of Artificial Sequence: Synthetic oligonucleotide
  Sense strand starting at position 1060 of SEQ ID NO: 318363
cguggaugucuagaacagu

SEQ ID NO: 556804 - RNA, 19 nt, Artificial Sequence
  Description of Artificial Sequence: Synthetic oligonucleotide
  Antisense strand to SEQ ID NO: 556803
acuguucuagacauccacg

SEQ ID NO: 556805 - RNA, 19 nt, Artificial Sequence
  Description of Artificial Sequence: Synthetic oligonucleotide
  Sense strand starting at position 1081 of SEQ ID NO: 318363
gugauaguuaugugacaca

SEQ ID NO: 556806 - RNA, 19 nt, Artificial Sequence
  Description of Artificial Sequence: Synthetic oligonucleotide
  Antisense strand to SEQ ID NO: 556805
ugugucacauaacuaucac

SEQ ID NO: 556807 - RNA, 19 nt, Artificial Sequence
  Description of Artificial Sequence: Synthetic oligonucleotide
  Sense strand starting at position 1101 of SEQ ID NO: 318363
caaguauagcagcaguuaa

SEQ ID NO: 556808 - RNA, 19 nt, Artificial Sequence
  Description of Artificial Sequence: Synthetic oligonucleotide
  Antisense strand to SEQ ID NO: 556807
uuaacugcugcuauacuug

SEQ ID NO: 556809 - RNA, 19 nt, Artificial Sequence
  Description of Artificial Sequence: Synthetic oligonucleotide
  Sense strand starting at position 1113 of SEQ ID NO: 318363
caguuaauggcagaaugua

SEQ ID NO: 556810 - RNA, 19 nt, Artificial Sequence
  Description of Artificial Sequence: Synthetic oligonucleotide
  Antisense strand to SEQ ID NO: 556809
uacauucugccauuaacug

SEQ ID NO: 556811 - RNA, 19 nt, Artificial Sequence
  Description of Artificial Sequence: Synthetic oligonucleotide
  Sense strand starting at position 1279 of SEQ ID NO: 318363
uaguguucugucucugcca

SEQ ID NO: 556812 - RNA, 19 nt, Artificial Sequence
  Description of Artificial Sequence: Synthetic oligonucleotide
  Antisense strand to SEQ ID NO: 556811
uggcagagacagaacacua

SEQ ID NO: 556813 - RNA, 19 nt, Artificial Sequence
  Description of Artificial Sequence: Synthetic oligonucleotide
  Sense strand starting at position 2288 of SEQ ID NO: 318363
uuugaagaccucgguuaug

SEQ ID NO: 556814 - RNA, 19 nt, Artificial Sequence
  Description of Artificial Sequence: Synthetic oligonucleotide
  Antisense strand to SEQ ID NO: 556813
cauaaccgaggucuucaaa

SEQ ID NO: 556815 - RNA, 19 nt, Artificial Sequence
  Description of Artificial Sequence: Synthetic oligonucleotide
  Sense strand starting at position 2316 of SEQ ID NO: 318363
ugcguuauuagcucuguau

SEQ ID NO: 556816 - RNA, 19 nt, Artificial Sequence
  Description of Artificial Sequence: Synthetic oligonucleotide
  Antisense strand to SEQ ID NO: 556815
auacagagcuaauaacgca

SEQ ID NO: 556817 - RNA, 19 nt, Artificial Sequence
  Description of Artificial Sequence: Synthetic oligonucleotide
  Sense strand starting at position 2317 of SEQ ID NO: 318363
gcguuauuagcucuguauc

SEQ ID NO: 556818 - RNA, 19 nt, Artificial Sequence
  Description of Artificial Sequence: Synthetic oligonucleotide
  Antisense strand to SEQ ID NO: 556817
gauacagagcuaauaacgc

SEQ ID NO: 556819 - RNA, 19 nt, Artificial Sequence
  Description of Artificial Sequence: Synthetic oligonucleotide
  Sense strand starting at position 2344 of SEQ ID NO: 318363
gucuguuuccucuauuaua

SEQ ID NO: 556820 - RNA, 19 nt, Artificial Sequence
  Description of Artificial Sequence: Synthetic oligonucleotide
  Antisense strand to SEQ ID NO: 556819
uauaauagaggaaacagac

SEQ ID NO: 556821 - RNA, 19 nt, Artificial Sequence
  Description of Artificial Sequence: Synthetic oligonucleotide
  Sense strand starting at position 2395 of SEQ ID NO: 318363
ggugguuguaaccaucuua

SEQ ID NO: 556822 - RNA, 19 nt, Artificial Sequence
  Description of Artificial Sequence: Synthetic oligonucleotide
  Antisense strand to SEQ ID NO: 556821
uaagaugguuacaaccacc

SEQ ID NO: 556823 - RNA, 19 nt, Artificial Sequence
  Description of Artificial Sequence: Synthetic oligonucleotide
  Sense strand starting at position 2452 of SEQ ID NO: 318363
ggaaauugcugaccaagca

SEQ ID NO: 556824 - RNA, 19 nt, Artificial Sequence
  Description of Artificial Sequence: Synthetic oligonucleotide
  Antisense strand to SEQ ID NO: 556823
ugcuuggucagcaauuucc

SEQ ID NO: 556825 - RNA, 19 nt, Artificial Sequence
  Description of Artificial Sequence: Synthetic oligonucleotide
  Sense strand starting at position 2538 of SEQ ID NO: 318363
uguuauuuauguguuugca

SEQ ID NO: 556826 - RNA, 19 nt, Artificial Sequence
  Description of Artificial Sequence: Synthetic oligonucleotide
  Antisense strand to SEQ ID NO: 556825
ugcaaacacauaaauaaca

SEQ ID NO: 556827 - RNA, 19 nt, Artificial Sequence
  Description of Artificial Sequence: Synthetic oligonucleotide
  Sense strand starting at position 2540 of SEQ ID NO: 318363
uuauuuauguguuugcagu

SEQ ID NO: 556828 - RNA, 19 nt, Artificial Sequence
  Description of Artificial Sequence: Synthetic oligonucleotide
  Antisense strand to SEQ ID NO: 556827
acugcaaacacauaaauaa

SEQ ID NO: 556829 - RNA, 19 nt, Artificial Sequence
  Description of Artificial Sequence: Synthetic oligonucleotide
  Sense strand starting at position 2541 of SEQ ID NO: 318363
uauuuauguguuugcaguu

SEQ ID NO: 556830 - RNA, 19 nt, Artificial Sequence
  Description of Artificial Sequence: Synthetic oligonucleotide
  Antisense strand to SEQ ID NO: 556829
aacugcaaacacauaaaua

SEQ ID NO: 556831 - RNA, 19 nt, Artificial Sequence
  Description of Artificial Sequence: Synthetic oligonucleotide
  Sense strand starting at position 2542 of SEQ ID NO: 318363
auuuauguguuugcaguuu

SEQ ID NO: 556832 - RNA, 19 nt, Artificial Sequence
  Description of Artificial Sequence: Synthetic oligonucleotide
  Antisense strand to SEQ ID NO: 556831
aaacugcaaacacauaaau

SEQ ID NO: 556833 - RNA, 19 nt, Artificial Sequence
  Description of Artificial Sequence: Synthetic oligonucleotide
  Sense strand starting at position 2729 of SEQ ID NO: 318363
acagacuuccucuggcaga

SEQ ID NO: 556834 - RNA, 19 nt, Artificial Sequence
  Description of Artificial Sequence: Synthetic oligonucleotide
  Antisense strand to SEQ ID NO: 556833
ucugccagaggaagucugu

SEQ ID NO: 556835 - RNA, 19 nt, Artificial Sequence
  Description of Artificial Sequence: Synthetic oligonucleotide
  Sense strand starting at position 2751 of SEQ ID NO: 318363
uaaaguuagggaugaguuu

SEQ ID NO: 556836 - RNA, 19 nt, Artificial Sequence
  Description of Artificial Sequence: Synthetic oligonucleotide
  Antisense strand to SEQ ID NO: 556835
aaacucaucccuaacuuua

SEQ ID NO: 556837 - RNA, 19 nt, Artificial Sequence
  Description of Artificial Sequence: Synthetic oligonucleotide
  Sense strand starting at position 3462 of SEQ ID NO: 318363
ggugaaagagcuuauagcu

SEQ ID NO: 556838 - RNA, 19 nt, Artificial Sequence
  Description of Artificial Sequence: Synthetic oligonucleotide
  Antisense strand to SEQ ID NO: 556837
agcuauaagcucuuucacc

SEQ ID NO: 556839 - RNA, 19 nt, Artificial Sequence
  Description of Artificial Sequence: Synthetic oligonucleotide
  Sense strand starting at position 3483 of SEQ ID NO: 318363
gguucuaacucagcacuga

SEQ ID NO: 556840 - RNA, 19 nt, Artificial Sequence
  Description of Artificial Sequence: Synthetic oligonucleotide
  Antisense strand to SEQ ID NO: 556839
ucagugcugaguuagaacc

SEQ ID NO: 556841 - RNA, 19 nt, Artificial Sequence
  Description of Artificial Sequence: Synthetic oligonucleotide
  Sense strand starting at position 3546 of SEQ ID NO: 318363
guagaugaauaaucaugca

SEQ ID NO: 556842 - RNA, 19 nt, Artificial Sequence
  Description of Artificial Sequence: Synthetic oligonucleotide
  Antisense strand to SEQ ID NO: 556841
ugcaugauuauucaucuac

SEQ ID NO: 556843 - RNA, 19 nt, Artificial Sequence
  Description of Artificial Sequence: Synthetic oligonucleotide
  Sense strand starting at position 3815 of SEQ ID NO: 318363
cucuuaaaucuagagcugu

SEQ ID NO: 556844 - RNA, 19 nt, Artificial Sequence
  Description of Artificial Sequence: Synthetic oligonucleotide
  Antisense strand to SEQ ID NO: 556843
acagcucuagauuuaagag

SEQ ID NO: 556845 - RNA, 19 nt, Artificial Sequence
  Description of Artificial Sequence: Synthetic oligonucleotide
  Sense strand starting at position 3877 of SEQ ID NO: 318363
caaugugugcgcucaucaa

SEQ ID NO: 556846 - RNA, 19 nt, Artificial Sequence
  Description of Artificial Sequence: Synthetic oligonucleotide
  Antisense strand to SEQ ID NO: 556845
uugaugagcgcacacauug

SEQ ID NO: 556847 - RNA, 19 nt, Artificial Sequence
  Description of Artificial Sequence: Synthetic oligonucleotide
  Sense strand starting at position 3887 of SEQ ID NO: 318363
gcucaucaacauuguaaga

SEQ ID NO: 556848 - RNA, 19 nt, Artificial Sequence
  Description of Artificial Sequence: Synthetic oligonucleotide
  Antisense strand to SEQ ID NO: 556847
ucuuacaauguugaugagc

SEQ ID NO: 556849 - RNA, 19 nt, Artificial Sequence
  Description of Artificial Sequence: Synthetic oligonucleotide
  Sense strand starting at position 3896 of SEQ ID NO: 318363
cauuguaagagagguucga

SEQ ID NO: 556850 - RNA, 19 nt, Artificial Sequence
  Description of Artificial Sequence: Synthetic oligonucleotide
  Antisense strand to SEQ ID NO: 556849
ucgaaccucucuuacaaug

SEQ ID NO: 556851 - RNA, 19 nt, Artificial Sequence
  Description of Artificial Sequence: Synthetic oligonucleotide
  Sense strand starting at position 3900 of SEQ ID NO: 318363
guaagagagguucgaaaga

SEQ ID NO: 556852 - RNA, 19 nt, Artificial Sequence
  Description of Artificial Sequence: Synthetic oligonucleotide
  Antisense strand to SEQ ID NO: 556851
ucuuucgaaccucucuuac

SEQ ID NO: 556853 - RNA, 19 nt, Artificial Sequence
  Description of Artificial Sequence: Synthetic oligonucleotide
  Sense strand starting at position 3909 of SEQ ID NO: 318363
guucgaaagagcugauaag

SEQ ID NO: 556854 - RNA, 19 nt, Artificial Sequence
  Description of Artificial Sequence: Synthetic oligonucleotide
  Antisense strand to SEQ ID NO: 556853
cuuaucagcucuuucgaac

SEQ ID NO: 556855 - RNA, 19 nt, Artificial Sequence
  Description of Artificial Sequence: Synthetic oligonucleotide
  Sense strand starting at position 178 of SEQ ID NO: 318364
aaauguguccaaugauagc

SEQ ID NO: 556856 - RNA, 19 nt, Artificial Sequence
  Description of Artificial Sequence: Synthetic oligonucleotide
  Antisense strand to SEQ ID NO: 556855
gcuaucauuggacacauuu

SEQ ID NO: 556857 - RNA, 19 nt, Artificial Sequence
  Description of Artificial Sequence: Synthetic oligonucleotide
  Sense strand starting at position 234 of SEQ ID NO: 318364
aacguaauuccagggagcu

SEQ ID NO: 556858 - RNA, 19 nt, Artificial Sequence
  Description of Artificial Sequence: Synthetic oligonucleotide
  Antisense strand to SEQ ID NO: 556857
agcucccuggaauuacguu

SEQ ID NO: 556859 - RNA, 19 nt, Artificial Sequence
  Description of Artificial Sequence: Synthetic oligonucleotide
  Sense strand starting at position 235 of SEQ ID NO: 318364
acguaauuccagggagcuc

SEQ ID NO: 556860 - RNA, 19 nt, Artificial Sequence
  Description of Artificial Sequence: Synthetic oligonucleotide
  Antisense strand to SEQ ID NO: 556859
gagcucccuggaauuacgu

SEQ ID NO: 556861 - RNA, 19 nt, Artificial Sequence
  Description of Artificial Sequence: Synthetic oligonucleotide
  Sense strand starting at position 236 of SEQ ID NO: 318364
cguaauuccagggagcuca

SEQ ID NO: 556862 - RNA, 19 nt, Artificial Sequence
  Description of Artificial Sequence: Synthetic oligonucleotide
  Antisense strand to SEQ ID NO: 556861
ugagcucccuggaauuacg

SEQ ID NO: 556863 - RNA, 19 nt, Artificial Sequence
  Description of Artificial Sequence: Synthetic oligonucleotide
  Sense strand starting at position 270 of SEQ ID NO: 318364
cggauuucccgcugccuga

SEQ ID NO: 556864 - RNA, 19 nt, Artificial Sequence
  Description of Artificial Sequence: Synthetic oligonucleotide
  Antisense strand to SEQ ID NO: 556863
ucaggcagcgggaaauccg

SEQ ID NO: 556865 - RNA, 19 nt, Artificial Sequence
  Description of Artificial Sequence: Synthetic oligonucleotide
  Sense strand starting at position 293 of SEQ ID NO: 318364
ccaguauucgcacacugau

SEQ ID NO: 556866 - RNA, 19 nt, Artificial Sequence
  Description of Artificial Sequence: Synthetic oligonucleotide
  Antisense strand to SEQ ID NO: 556865
aucagugugcgaauacugg

SEQ ID NO: 556867 - RNA, 19 nt, Artificial Sequence
  Description of Artificial Sequence: Synthetic oligonucleotide
  Sense strand starting at position 296 of SEQ ID NO: 318364
guauucgcacacugauaag

SEQ ID NO: 556868 - RNA, 19 nt, Artificial Sequence
  Description of Artificial Sequence: Synthetic oligonucleotide
  Antisense strand to SEQ ID NO: 556867
cuuaucagugugcgaauac

SEQ ID NO: 556869 - RNA, 19 nt, Artificial Sequence
  Description of Artificial Sequence: Synthetic oligonucleotide
  Sense strand starting at position 772 of SEQ ID NO: 318364
ucagaaaguuauccacugu

SEQ ID NO: 556870 - RNA, 19 nt, Artificial Sequence
  Description of Artificial Sequence: Synthetic oligonucleotide
  Antisense strand to SEQ ID NO: 556869
acaguggauaacuuucuga

SEQ ID NO: 556871 - RNA, 19 nt, Artificial Sequence
  Description of Artificial Sequence: Synthetic oligonucleotide
  Sense strand starting at position 778 of SEQ ID NO: 318364
aguuauccacugugaacag

SEQ ID NO: 556872 - RNA, 19 nt, Artificial Sequence
  Description of Artificial Sequence: Synthetic oligonucleotide
  Antisense strand to SEQ ID NO: 556871
cuguucacaguggauaacu

SEQ ID NO: 556873 - RNA, 19 nt, Artificial Sequence
  Description of Artificial Sequence: Synthetic oligonucleotide
  Sense strand starting at position 1232 of SEQ ID NO: 318364
gccaucagucacuacaguu

SEQ ID NO: 556874 - RNA, 19 nt, Artificial Sequence
  Description of Artificial Sequence: Synthetic oligonucleotide
  Antisense strand to SEQ ID NO: 556873
aacuguagugacugauggc

SEQ ID NO: 556875 - RNA, 19 nt, Artificial Sequence
  Description of Artificial Sequence: Synthetic oligonucleotide
  Sense strand starting at position 1250 of SEQ ID NO: 318364
uucggacauucgguggaaa

SEQ ID NO: 556876 - RNA, 19 nt, Artificial Sequence
  Description of Artificial Sequence: Synthetic oligonucleotide
  Antisense strand to SEQ ID NO: 556875
uuuccaccgaauguccgaa

SEQ ID NO: 556877 - RNA, 19 nt, Artificial Sequence
  Description of Artificial Sequence: Synthetic oligonucleotide
  Sense strand starting at position 1422 of SEQ ID NO: 318364
cggcucuugaggcgagaaa

SEQ ID NO: 556878 - RNA, 19 nt, Artificial Sequence
  Description of Artificial Sequence: Synthetic oligonucleotide
  Antisense strand to SEQ ID NO: 556877
uuucucgccucaagagccg

SEQ ID NO: 556879 - RNA, 19 nt, Artificial Sequence
  Description of Artificial Sequence: Synthetic oligonucleotide
  Sense strand starting at position 2175 of SEQ ID NO: 318364
caggaaagcgcuuggagaa

SEQ ID NO: 556880 - RNA, 19 nt, Artificial Sequence
  Description of Artificial Sequence: Synthetic oligonucleotide
  Antisense strand to SEQ ID NO: 556879
uucuccaagcgcuuuccug

SEQ ID NO: 556881 - RNA, 19 nt, Artificial Sequence
  Description of Artificial Sequence: Synthetic oligonucleotide
  Sense strand starting at position 2176 of SEQ ID NO: 318364
aggaaagcgcuuggagaaa

SEQ ID NO: 556882 - RNA, 19 nt, Artificial Sequence
  Description of Artificial Sequence: Synthetic oligonucleotide
  Antisense strand to SEQ ID NO: 556881
uuucuccaagcgcuuuccu

SEQ ID NO: 556883 - RNA, 19 nt, Artificial Sequence
  Description of Artificial Sequence: Synthetic oligonucleotide
  Sense strand starting at position 2252 of SEQ ID NO: 318364
ucaguucuuguauaaauag

SEQ ID NO: 556884 - RNA, 19 nt, Artificial Sequence
  Description of Artificial Sequence: Synthetic oligonucleotide
  Antisense strand to SEQ ID NO: 556883
cuauuuauacaagaacuga

SEQ ID NO: 556885 - RNA, 19 nt, Artificial Sequence
  Description of Artificial Sequence: Synthetic oligonucleotide
  Sense strand starting at position 2289 of SEQ ID NO: 318364
uugcuaacagucggaaacu

SEQ ID NO: 556886 - RNA, 19 nt, Artificial Sequence
  Description of Artificial Sequence: Synthetic oligonucleotide
  Antisense strand to SEQ ID NO: 556885
aguuuccgacuguuagcaa

SEQ ID NO: 556887 - RNA, 19 nt, Artificial Sequence
  Description of Artificial Sequence: Synthetic oligonucleotide
  Sense strand starting at position 2921 of SEQ ID NO: 318364
acacaauucgggugggaaa

SEQ ID NO: 556888 - RNA, 19 nt, Artificial Sequence
  Description of Artificial Sequence: Synthetic oligonucleotide
  Antisense strand to SEQ ID NO: 556887
uuucccacccgaauugugu

SEQ ID NO: 556889 - RNA, 19 nt, Artificial Sequence
  Description of Artificial Sequence: Synthetic oligonucleotide
  Sense strand starting at position 2948 of SEQ ID NO: 318364
gcagcauucucgguugucu

SEQ ID NO: 556890 - RNA, 19 nt, Artificial Sequence
  Description of Artificial Sequence: Synthetic oligonucleotide
  Antisense strand to SEQ ID NO: 556889
agacaaccgagaaugcugc

SEQ ID NO: 556891 - RNA, 19 nt, Artificial Sequence
  Description of Artificial Sequence: Synthetic oligonucleotide
  Sense strand starting at position 3230 of SEQ ID NO: 318364
cugugaucccugggucuuu

SEQ ID NO: 556892 - RNA, 19 nt, Artificial Sequence
  Description of Artificial Sequence: Synthetic oligonucleotide
  Antisense strand to SEQ ID NO: 556891
aaagacccagggaucacag

SEQ ID NO: 556893 - RNA, 19 nt, Artificial Sequence
  Description of Artificial Sequence: Synthetic oligonucleotide
  Sense strand starting at position 3431 of SEQ ID NO: 318364
ucacucaguugucuaccaa

SEQ ID NO: 556894 - RNA, 19 nt, Artificial Sequence
  Description of Artificial Sequence: Synthetic oligonucleotide
  Antisense strand to SEQ ID NO: 556893
uugguagacaacugaguga

SEQ ID NO: 556895 - RNA, 19 nt, Artificial Sequence
  Description of Artificial Sequence: Synthetic oligonucleotide
  Sense strand starting at position 3499 of SEQ ID NO: 318364
cugagacuuucuucccugu

SEQ ID NO: 556896 - RNA, 19 nt, Artificial Sequence
  Description of Artificial Sequence: Synthetic oligonucleotide
  Antisense strand to SEQ ID NO: 556895
acagggaagaaagucucag

SEQ ID NO: 556897 - RNA, 19 nt, Artificial Sequence
  Description of Artificial Sequence: Synthetic oligonucleotide
  Sense strand starting at position 3502 of SEQ ID NO: 318364
agacuuucuucccugugga

SEQ ID NO: 556898 - RNA, 19 nt, Artificial Sequence
  Description of Artificial Sequence: Synthetic oligonucleotide
  Antisense strand to SEQ ID NO: 556897
uccacagggaagaaagucu

SEQ ID NO: 556899 - RNA, 19 nt, Artificial Sequence
  Description of Artificial Sequence: Synthetic oligonucleotide
  Sense strand starting at position 3610 of SEQ ID NO: 318364
cugucucucuuguccacaa

SEQ ID NO: 556900 - RNA, 19 nt, Artificial Sequence
  Description of Artificial Sequence: Synthetic oligonucleotide
  Antisense strand to SEQ ID NO: 556899
uuguggacaagagagacag

SEQ ID NO: 556901 - RNA, 19 nt, Artificial Sequence
  Description of Artificial Sequence: Synthetic oligonucleotide
  Sense strand starting at position 3628 of SEQ ID NO: 318364
aggcauauaccugagaguu

SEQ ID NO: 556902 - RNA, 19 nt, Artificial Sequence
  Description of Artificial Sequence: Synthetic oligonucleotide
  Antisense strand to SEQ ID NO: 556901
aacucucagguauaugccu

SEQ ID NO: 556903 - RNA, 19 nt, Artificial Sequence
  Description of Artificial Sequence: Synthetic oligonucleotide
  Sense strand starting at position 3666 of SEQ ID NO: 318364
uuuagauauucuguggcuu

SEQ ID NO: 556904 - RNA, 19 nt, Artificial Sequence
  Description of Artificial Sequence: Synthetic oligonucleotide
  Antisense strand to SEQ ID NO: 556903
aagccacagaauaucuaaa

SEQ ID NO: 556905 - RNA, 19 nt, Artificial Sequence
  Description of Artificial Sequence: Synthetic oligonucleotide
  Sense strand starting at position 3667 of SEQ ID NO: 318364
uuagauauucuguggcuuu

SEQ ID NO: 556906 - RNA, 19 nt, Artificial Sequence
  Description of Artificial Sequence: Synthetic oligonucleotide
  Antisense strand to SEQ ID NO: 556905
aaagccacagaauaucuaa

SEQ ID NO: 556907 - RNA, 19 nt, Artificial Sequence
  Description of Artificial Sequence: Synthetic oligonucleotide
  Sense strand starting at position 3699 of SEQ ID NO: 318364
uguguuaaucuacaaaccu

SEQ ID NO: 556908 - RNA, 19 nt, Artificial Sequence
  Description of Artificial Sequence: Synthetic oligonucleotide
  Antisense strand to SEQ ID NO: 556907
agguuuguagauuaacaca

SEQ ID NO: 556909 - RNA, 19 nt, Artificial Sequence
  Description of Artificial Sequence: Synthetic oligonucleotide
  Sense strand starting at position 3753 of SEQ ID NO: 318364
ucaagugguuucuaauggu

SEQ ID NO: 556910 - RNA, 19 nt, Artificial Sequence
  Description of Artificial Sequence: Synthetic oligonucleotide
  Antisense strand to SEQ ID NO: 556909
accauuagaaaccacuuga

SEQ ID NO: 556911 - RNA, 19 nt, Artificial Sequence
  Description of Artificial Sequence: Synthetic oligonucleotide
  Sense strand starting at position 3902 of SEQ ID NO: 318364
gugggacauggcugacuau

SEQ ID NO: 556912 - RNA, 19 nt, Artificial Sequence
  Description of Artificial Sequence: Synthetic oligonucleotide
  Antisense strand to SEQ ID NO: 556911
auagucagccaugucccac

SEQ ID NO: 556913 - RNA, 19 nt, Artificial Sequence
  Description of Artificial Sequence: Synthetic oligonucleotide
  Sense strand starting at position 3961 of SEQ ID NO: 318364
ccuuaagucuaaugagaaa

SEQ ID NO: 556914 - RNA, 19 nt, Artificial Sequence
  Description of Artificial Sequence: Synthetic oligonucleotide
  Antisense strand to SEQ ID NO: 556913
uuucucauuagacuuaagg

SEQ ID NO: 556915 - RNA, 19 nt, Artificial Sequence
  Description of Artificial Sequence: Synthetic oligonucleotide
  Sense strand starting at position 69 of SEQ ID NO: 318365
gucaaucagaguuggacaa

SEQ ID NO: 556916 - RNA, 19 nt, Artificial Sequence
  Description of Artificial Sequence: Synthetic oligonucleotide
  Antisense strand to SEQ ID NO: 556915
uuguccaacucugauugac

SEQ ID NO: 556917 - RNA, 19 nt, Artificial Sequence
  Description of Artificial Sequence: Synthetic oligonucleotide
  Sense strand starting at position 252 of SEQ ID NO: 318365
ucagcagcuccugaaaucu

SEQ ID NO: 556918 - RNA, 19 nt, Artificial Sequence
  Description of Artificial Sequence: Synthetic oligonucleotide
  Antisense strand to SEQ ID NO: 556917
agauuucaggagcugcuga

SEQ ID NO: 556919 - RNA, 19 nt, Artificial Sequence
  Description of Artificial Sequence: Synthetic oligonucleotide
  Sense strand starting at position 339 of SEQ ID NO: 318365
gucccuggguuaucaggaa

SEQ ID NO: 556920 - RNA, 19 nt, Artificial Sequence
  Description of Artificial Sequence: Synthetic oligonucleotide
  Antisense strand to SEQ ID NO: 556919
uuccugauaacccagggac

SEQ ID NO: 556921 - RNA, 19 nt, Artificial Sequence
  Description of Artificial Sequence: Synthetic oligonucleotide
  Sense strand starting at position 388 of SEQ ID NO: 318365
ccacgccugaguuaagaau

SEQ ID NO: 556922 - RNA, 19 nt, Artificial Sequence
  Description of Artificial Sequence: Synthetic oligonucleotide
  Antisense strand to SEQ ID NO: 556921
auucuuaacucaggcgugg

SEQ ID NO: 556923 - RNA, 19 nt, Artificial Sequence
  Description of Artificial Sequence: Synthetic oligonucleotide
  Sense strand starting at position 409 of SEQ ID NO: 318365
ggagcugacuccucagaau

SEQ ID NO: 556924 - RNA, 19 nt, Artificial Sequence
  Description of Artificial Sequence: Synthetic oligonucleotide
  Antisense strand to SEQ ID NO: 556923
auucugaggagucagcucc

SEQ ID NO: 556925 - RNA, 19 nt, Artificial Sequence
  Description of Artificial Sequence: Synthetic oligonucleotide
  Sense strand starting at position 418 of SEQ ID NO: 318365
uccucagaauggcuguaau

SEQ ID NO: 556926 - RNA, 19 nt, Artificial Sequence
  Description of Artificial Sequence: Synthetic oligonucleotide
  Antisense strand to SEQ ID NO: 556925
auuacagccauucugagga

SEQ ID NO: 556927 - RNA, 19 nt, Artificial Sequence
  Description of Artificial Sequence: Synthetic oligonucleotide
  Sense strand starting at position 592 of SEQ ID NO: 318365
cgcuuucuuccugggauuu

SEQ ID NO: 556928 - RNA, 19 nt, Artificial Sequence
  Description of Artificial Sequence: Synthetic oligonucleotide
  Antisense strand to SEQ ID NO: 556927
aaaucccaggaagaaagcg

SEQ ID NO: 556929 - RNA, 19 nt, Artificial Sequence
  Description of Artificial Sequence: Synthetic oligonucleotide
  Sense strand starting at position 945 of SEQ ID NO: 318365
gugcuuucgcuggucaaau

SEQ ID NO: 556930 - RNA, 19 nt, Artificial Sequence
  Description of Artificial Sequence: Synthetic oligonucleotide
  Antisense strand to SEQ ID NO: 556929
auuugaccagcgaaagcac

SEQ ID NO: 556931 - RNA, 19 nt, Artificial Sequence
  Description of Artificial Sequence: Synthetic oligonucleotide
  Sense strand starting at position 1277 of SEQ ID NO: 318365
ucuagaauugguggugaua

SEQ ID NO: 556932 - RNA, 19 nt, Artificial Sequence
  Description of Artificial Sequence: Synthetic oligonucleotide
  Antisense strand to SEQ ID NO: 556931
uaucaccaccaauucuaga

SEQ ID NO: 556933 - RNA, 19 nt, Artificial Sequence
  Description of Artificial Sequence: Synthetic oligonucleotide
  Sense strand starting at position 1296 of SEQ ID NO: 318365
agccgacuuagauggagua

SEQ ID NO: 556934 - RNA, 19 nt, Artificial Sequence
  Description of Artificial Sequence: Synthetic oligonucleotide
  Antisense strand to SEQ ID NO: 556933
uacuccaucuaagucggcu

SEQ ID NO: 556935 - RNA, 19 nt, Artificial Sequence
  Description of Artificial Sequence: Synthetic oligonucleotide
  Sense strand starting at position 1298 of SEQ ID NO: 318365
ccgacuuagauggaguauu

SEQ ID NO: 556936 - RNA, 19 nt, Artificial Sequence
  Description of Artificial Sequence: Synthetic oligonucleotide
  Antisense strand to SEQ ID NO: 556935
aauacuccaucuaagucgg

SEQ ID NO: 556937 - RNA, 19 nt, Artificial Sequence
  Description of Artificial Sequence: Synthetic oligonucleotide
  Sense strand starting at position 2110 of SEQ ID NO: 318365
cccgguuucgccagagguu

SEQ ID NO: 556938 - RNA, 19 nt, Artificial Sequence
  Description of Artificial Sequence: Synthetic oligonucleotide
  Antisense strand to SEQ ID NO: 556937
aaccucuggcgaaaccggg

SEQ ID NO: 556939 - RNA, 19 nt, Artificial Sequence
  Description of Artificial Sequence: Synthetic oligonucleotide
  Sense strand starting at position 2182 of SEQ ID NO: 318365
cagggauugucagcaacuc

SEQ ID NO: 556940 - RNA, 19 nt, Artificial Sequence
  Description of Artificial Sequence: Synthetic oligonucleotide
  Antisense strand to SEQ ID NO: 556939
gaguugcugacaaucccug

SEQ ID NO: 556941 - RNA, 19 nt, Artificial Sequence
  Description of Artificial Sequence: Synthetic oligonucleotide
  Sense strand starting at position 2355 of SEQ ID NO: 318365
ucagaccuguccucuugau

SEQ ID NO: 556942 - RNA, 19 nt, Artificial Sequence
  Description of Artificial Sequence: Synthetic oligonucleotide
  Antisense strand to SEQ ID NO: 556941
aucaagaggacaggucuga

SEQ ID NO: 556943 - RNA, 19 nt, Artificial Sequence
  Description of Artificial Sequence: Synthetic oligonucleotide
  Sense strand starting at position 2462 of SEQ ID NO: 318365
cucuuagagaaauggaguu

SEQ ID NO: 556944 - RNA, 19 nt, Artificial Sequence
  Description of Artificial Sequence: Synthetic oligonucleotide
  Antisense strand to SEQ ID NO: 556943
aacuccauuucucuaagag

SEQ ID NO: 556945 - RNA, 19 nt, Artificial Sequence
  Description of Artificial Sequence: Synthetic oligonucleotide
  Sense strand starting at position 2481 of SEQ ID NO: 318365
uggcgauuccuggcugguu

SEQ ID NO: 556946 - RNA, 19 nt, Artificial Sequence
  Description of Artificial Sequence: Synthetic oligonucleotide
  Antisense strand to SEQ ID NO: 556945
aaccagccaggaaucgcca

SEQ ID NO: 556947 - RNA, 19 nt, Artificial Sequence
  Description of Artificial Sequence: Synthetic oligonucleotide
  Sense strand starting at position 2559 of SEQ ID NO: 318365
aggcaaaguugccuggaau

SEQ ID NO: 556948 - RNA, 19 nt, Artificial Sequence
  Description of Artificial Sequence: Synthetic oligonucleotide
  Antisense strand to SEQ ID NO: 556947
auuccaggcaacuuugccu

SEQ ID NO: 556949 - RNA, 19 nt, Artificial Sequence
  Description of Artificial Sequence: Synthetic oligonucleotide
  Sense strand starting at position 2562 of SEQ ID NO: 318365
caaaguugccuggaauauu

SEQ ID NO: 556950 - RNA, 19 nt, Artificial Sequence
  Description of Artificial Sequence: Synthetic oligonucleotide
  Antisense strand to SEQ ID NO: 556949
aauauuccaggcaacuuug

SEQ ID NO: 556951 - RNA, 19 nt, Artificial Sequence
  Description of Artificial Sequence: Synthetic oligonucleotide
  Sense strand starting at position 2602 of SEQ ID NO: 318365
auuggaucugggugaagau

SEQ ID NO: 556952 - RNA, 19 nt, Artificial Sequence
  Description of Artificial Sequence: Synthetic oligonucleotide
  Antisense strand to SEQ ID NO: 556951
aucuucacccagauccaau

SEQ ID NO: 556953 - RNA, 19 nt, Artificial Sequence
  Description of Artificial Sequence: Synthetic oligonucleotide
  Sense strand starting at position 2640 of SEQ ID NO: 318365
agucucuuucccugacaua

SEQ ID NO: 556954 - RNA, 19 nt, Artificial Sequence
  Description of Artificial Sequence: Synthetic oligonucleotide
  Antisense strand to SEQ ID NO: 556953
uaugucagggaaagagacu

SEQ ID NO: 556955 - RNA, 19 nt, Artificial Sequence
  Description of Artificial Sequence: Synthetic oligonucleotide
  Sense strand starting at position 2641 of SEQ ID NO: 318365
gucucuuucccugacauag

SEQ ID NO: 556956 - RNA, 19 nt, Artificial Sequence
  Description of Artificial Sequence: Synthetic oligonucleotide
  Antisense strand to SEQ ID NO: 556955
cuaugucagggaaagagac

SEQ ID NO: 556957 - RNA, 19 nt, Artificial Sequence
  Description of Artificial Sequence: Synthetic oligonucleotide
  Sense strand starting at position 2747 of SEQ ID NO: 318365
ugguccucgcuggaaauca

SEQ ID NO: 556958 - RNA, 19 nt, Artificial Sequence
  Description of Artificial Sequence: Synthetic oligonucleotide
  Antisense strand to SEQ ID NO: 556957
ugauuuccagcgaggacca

SEQ ID NO: 556959 - RNA, 19 nt, Artificial Sequence
  Description of Artificial Sequence: Synthetic oligonucleotide
  Sense strand starting at position 2766 of SEQ ID NO: 318365
aggcgagucguccuuaguu

SEQ ID NO: 556960 - RNA, 19 nt, Artificial Sequence
  Description of Artificial Sequence: Synthetic oligonucleotide
  Antisense strand to SEQ ID NO: 556959
aacuaaggacgacucgccu

SEQ ID NO: 556961 - RNA, 19 nt, Artificial Sequence
  Description of Artificial Sequence: Synthetic oligonucleotide
  Sense strand starting at position 2811 of SEQ ID NO: 318365
cagaguuaagguuaaggca

SEQ ID NO: 556962 - RNA, 19 nt, Artificial Sequence
  Description of Artificial Sequence: Synthetic oligonucleotide
  Antisense strand to SEQ ID NO: 556961
ugccuuaaccuuaacucug

SEQ ID NO: 556963 - RNA, 19 nt, Artificial Sequence
  Description of Artificial Sequence: Synthetic oligonucleotide
  Sense strand starting at position 2973 of SEQ ID NO: 318365
auuagaguccuaugaggca

SEQ ID NO: 556964 - RNA, 19 nt, Artificial Sequence
  Description of Artificial Sequence: Synthetic oligonucleotide
  Antisense strand to SEQ ID NO: 556963
ugccucauaggacucuaau

SEQ ID NO: 556965 - RNA, 19 nt, Artificial Sequence
  Description of Artificial Sequence: Synthetic oligonucleotide
  Sense strand starting at position 3143 of SEQ ID NO: 318365
augcaauuugcuuacuguu

SEQ ID NO: 556966 - RNA, 19 nt, Artificial Sequence
  Description of Artificial Sequence: Synthetic oligonucleotide
  Antisense strand to SEQ ID NO: 556965
aacaguaagcaaauugcau

SEQ ID NO: 556967 - RNA, 19 nt, Artificial Sequence
  Description of Artificial Sequence: Synthetic oligonucleotide
  Sense strand starting at position 3145 of SEQ ID NO: 318365
gcaauuugcuuacuguuaa

SEQ ID NO: 556968 - RNA, 19 nt, Artificial Sequence
  Description of Artificial Sequence: Synthetic oligonucleotide
  Antisense strand to SEQ ID NO: 556967
uuaacaguaagcaaauugc

SEQ ID NO: 556969 - RNA, 19 nt, Artificial Sequence
  Description of Artificial Sequence: Synthetic oligonucleotide
  Sense strand starting at position 3323 of SEQ ID NO: 318365
ucauguaauggaugcuaga

SEQ ID NO: 556970 - RNA, 19 nt, Artificial Sequence
  Description of Artificial Sequence: Synthetic oligonucleotide
  Antisense strand to SEQ ID NO: 556969
ucuagcauccauuacauga

SEQ ID NO: 556971 - RNA, 19 nt, Artificial Sequence
  Description of Artificial Sequence: Synthetic oligonucleotide
  Sense strand starting at position 3408 of SEQ ID NO: 318365
ucuagaugccacugggaaa

SEQ ID NO: 556972 - RNA, 19 nt, Artificial Sequence
  Description of Artificial Sequence: Synthetic oligonucleotide
  Antisense strand to SEQ ID NO: 556971
uuucccaguggcaucuaga

SEQ ID NO: 556973 - RNA, 19 nt, Artificial Sequence
  Description of Artificial Sequence: Synthetic oligonucleotide
  Sense strand starting at position 3453 of SEQ ID NO: 318365
cuuuguuuaucagcaagaa

SEQ ID NO: 556974 - RNA, 19 nt, Artificial Sequence
  Description of Artificial Sequence: Synthetic oligonucleotide
  Antisense strand to SEQ ID NO: 556973
uucuugcugauaaacaaag

SEQ ID NO: 556975 - RNA, 19 nt, Artificial Sequence
  Description of Artificial Sequence: Synthetic oligonucleotide
  Sense strand starting at position 3454 of SEQ ID NO: 318365
uuuguuuaucagcaagaac

SEQ ID NO: 556976 - RNA, 19 nt, Artificial Sequence
  Description of Artificial Sequence: Synthetic oligonucleotide
  Antisense strand to SEQ ID NO: 556975
guucuugcugauaaacaaa

SEQ ID NO: 556977 - RNA, 19 nt, Artificial Sequence
  Description of Artificial Sequence: Synthetic oligonucleotide
  Sense strand starting at position 3457 of SEQ ID NO: 318365
guuuaucagcaagaacagu

SEQ ID NO: 556978 - RNA, 19 nt, Artificial Sequence
  Description of Artificial Sequence: Synthetic oligonucleotide
  Antisense strand to SEQ ID NO: 556977
acuguucuugcugauaaac

SEQ ID NO: 556979 - RNA, 19 nt, Artificial Sequence
  Description of Artificial Sequence: Synthetic oligonucleotide
  Sense strand starting at position 3465 of SEQ ID NO: 318365
gcaagaacaguccacgaaa

SEQ ID NO: 556980 - RNA, 19 nt, Artificial Sequence
  Description of Artificial Sequence: Synthetic oligonucleotide
  Antisense strand to SEQ ID NO: 556979
uuucguggacuguucuugc

SEQ ID NO: 556981 - RNA, 19 nt, Artificial Sequence
  Description of Artificial Sequence: Synthetic oligonucleotide
  Sense strand starting at position 3468 of SEQ ID NO: 318365
agaacaguccacgaaaugu

SEQ ID NO: 556982 - RNA, 19 nt, Artificial Sequence
  Description of Artificial Sequence: Synthetic oligonucleotide
  Antisense strand to SEQ ID NO: 556981
acauuucguggacuguucu

SEQ ID NO: 556983 - RNA, 19 nt, Artificial Sequence
  Description of Artificial Sequence: Synthetic oligonucleotide
  Sense strand starting at position 3584 of SEQ ID NO: 318365
ugcucauauguggacuaua

SEQ ID NO: 556984 - RNA, 19 nt, Artificial Sequence
  Description of Artificial Sequence: Synthetic oligonucleotide
  Antisense strand to SEQ ID NO: 556983
uauaguccacauaugagca

SEQ ID NO: 556985 - RNA, 19 nt, Artificial Sequence
  Description of Artificial Sequence: Synthetic oligonucleotide
  Sense strand starting at position 3613 of SEQ ID NO: 318365
gagaaagguugugucuuaa

SEQ ID NO: 556986 - RNA, 19 nt, Artificial Sequence
  Description of Artificial Sequence: Synthetic oligonucleotide
  Antisense strand to SEQ ID NO: 556985
uuaagacacaaccuuucuc

SEQ ID NO: 556987 - RNA, 19 nt, Artificial Sequence
  Description of Artificial Sequence: Synthetic oligonucleotide
  Sense strand starting at position 3662 of SEQ ID NO: 318365
cuccacuguguaggauuaa

SEQ ID NO: 556988 - RNA, 19 nt, Artificial Sequence
  Description of Artificial Sequence: Synthetic oligonucleotide
  Antisense strand to SEQ ID NO: 556987
uuaauccuacacaguggag

SEQ ID NO: 556989 - RNA, 19 nt, Artificial Sequence
  Description of Artificial Sequence: Synthetic oligonucleotide
  Sense strand starting at position 3735 of SEQ ID NO: 318365
gguggcaguggucaaagua

SEQ ID NO: 556990 - RNA, 19 nt, Artificial Sequence
  Description of Artificial Sequence: Synthetic oligonucleotide
  Antisense strand to SEQ ID NO: 556989
uacuuugaccacugccacc

SEQ ID NO: 556991 - RNA, 19 nt, Artificial Sequence
  Description of Artificial Sequence: Synthetic oligonucleotide
  Sense strand starting at position 3813 of SEQ ID NO: 318365
ggaaguguucugcaguaua

SEQ ID NO: 556992 - RNA, 19 nt, Artificial Sequence
  Description of Artificial Sequence: Synthetic oligonucleotide
  Antisense strand to SEQ ID NO: 556991
uauacugcagaacacuucc

SEQ ID NO: 556993 - RNA, 19 nt, Artificial Sequence
  Description of Artificial Sequence: Synthetic oligonucleotide
  Sense strand starting at position 3935 of SEQ ID NO: 318365
ucaauauaacuguggcaaa

SEQ ID NO: 556994 - RNA, 19 nt, Artificial Sequence
  Description of Artificial Sequence: Synthetic oligonucleotide
  Antisense strand to SEQ ID NO: 556993
uuugccacaguuauauuga

SEQ ID NO: 556995 - RNA, 19 nt, Artificial Sequence
  Description of Artificial Sequence: Synthetic oligonucleotide
  Sense strand starting at position 151 of SEQ ID NO: 318366
gucaguuaggaauguauag

SEQ ID NO: 556996 - RNA, 19 nt, Artificial Sequence
  Description of Artificial Sequence: Synthetic oligonucleotide
  Antisense strand to SEQ ID NO: 556995
cuauacauuccuaacugac

SEQ ID NO: 556997 - RNA, 19 nt, Artificial Sequence
  Description of Artificial Sequence: Synthetic oligonucleotide
  Sense strand starting at position 158 of SEQ ID NO: 318366
aggaauguauagcuaagaa

SEQ ID NO: 556998 - RNA, 19 nt, Artificial Sequence
  Description of Artificial Sequence: Synthetic oligonucleotide
  Antisense strand to SEQ ID NO: 556997
uucuuagcuauacauuccu

SEQ ID NO: 556999 - RNA, 19 nt, Artificial Sequence
  Description of Artificial Sequence: Synthetic oligonucleotide
  Sense strand starting at position 196 of SEQ ID NO: 318366
cgugucuauggcuacagaa

SEQ ID NO: 557000 - RNA, 19 nt, Artificial Sequence
  Description of Artificial Sequence: Synthetic oligonucleotide
  Antisense strand to SEQ ID NO: 556999
uucuguagccauagacacg

SEQ ID NO: 557001 - RNA, 19 nt, Artificial Sequence
  Description of Artificial Sequence: Synthetic oligonucleotide
  Sense strand starting at position 229 of SEQ ID NO: 318366
cucacuauucugggucaau

SEQ ID NO: 557002 - RNA, 19 nt, Artificial Sequence
  Description of Artificial Sequence: Synthetic oligonucleotide
  Antisense strand to SEQ ID NO: 557001
auugacccagaauagugag

SEQ ID NO: 557003 - RNA, 19 nt, Artificial Sequence
  Description of Artificial Sequence: Synthetic oligonucleotide
  Sense strand starting at position 230 of SEQ ID NO: 318366
ucacuauucugggucaaua

SEQ ID NO: 557004 - RNA, 19 nt, Artificial Sequence
  Description of Artificial Sequence: Synthetic oligonucleotide
  Antisense strand to SEQ ID NO: 557003
uauugacccagaauaguga

SEQ ID NO: 557005 - RNA, 19 nt, Artificial Sequence
  Description of Artificial Sequence: Synthetic oligonucleotide
  Sense strand starting at position 279 of SEQ ID NO: 318366
guaaauguguuucuaaagg

SEQ ID NO: 557006 - RNA, 19 nt, Artificial Sequence
  Description of Artificial Sequence: Synthetic oligonucleotide
  Antisense strand to SEQ ID NO: 557005
ccuuuagaaacacauuuac

SEQ ID NO: 557007 - RNA, 19 nt, Artificial Sequence
  Description of Artificial Sequence: Synthetic oligonucleotide
  Sense strand starting at position 284 of SEQ ID NO: 318366
uguguuucuaaaggaaugu

SEQ ID NO: 557008 - RNA, 19 nt, Artificial Sequence
  Description of Artificial Sequence: Synthetic oligonucleotide
  Antisense strand to SEQ ID NO: 557007
acauuccuuuagaaacaca

SEQ ID NO: 557009 - RNA, 19 nt, Artificial Sequence
  Description of Artificial Sequence: Synthetic oligonucleotide
  Sense strand starting at position 285 of SEQ ID NO: 318366
guguuucuaaaggaaugua

SEQ ID NO: 557010 - RNA, 19 nt, Artificial Sequence
  Description of Artificial Sequence: Synthetic oligonucleotide
  Antisense strand to SEQ ID NO: 557009
uacauuccuuuagaaacac

SEQ ID NO: 557011 - RNA, 19 nt, Artificial Sequence
  Description of Artificial Sequence: Synthetic oligonucleotide
  Sense strand starting at position 407 of SEQ ID NO: 318366
auuggugugaucugaaagg

SEQ ID NO: 557012 - RNA, 19 nt, Artificial Sequence
  Description of Artificial Sequence: Synthetic oligonucleotide
  Antisense strand to SEQ ID NO: 557011
ccuuucagaucacaccaau

SEQ ID NO: 557013 - RNA, 19 nt, Artificial Sequence
  Description of Artificial Sequence: Synthetic oligonucleotide
  Sense strand starting at position 469 of SEQ ID NO: 318366
uuguauuuccagugugauc

SEQ ID NO: 557014 - RNA, 19 nt, Artificial Sequence
  Description of Artificial Sequence: Synthetic oligonucleotide
  Antisense strand to SEQ ID NO: 557013
gaucacacuggaaauacaa

SEQ ID NO: 557015 - RNA, 19 nt, Artificial Sequence
  Description of Artificial Sequence: Synthetic oligonucleotide
  Sense strand starting at position 471 of SEQ ID NO: 318366
guauuuccagugugaucua

SEQ ID NO: 557016 - RNA, 19 nt, Artificial Sequence
  Description of Artificial Sequence: Synthetic oligonucleotide
  Antisense strand to SEQ ID NO: 557015
uagaucacacuggaaauac

SEQ ID NO: 557017 - RNA, 19 nt, Artificial Sequence
  Description of Artificial Sequence: Synthetic oligonucleotide
  Sense strand starting at position 474 of SEQ ID NO: 318366
uuuccagugugaucuaaac

SEQ ID NO: 557018 - RNA, 19 nt, Artificial Sequence
  Description of Artificial Sequence: Synthetic oligonucleotide
  Antisense strand to SEQ ID NO: 557017
guuuagaucacacuggaaa

SEQ ID NO: 557019 - RNA, 19 nt, Artificial Sequence
  Description of Artificial Sequence: Synthetic oligonucleotide
  Sense strand starting at position 548 of SEQ ID NO: 318366
guuguuuaggugcaaucaa

SEQ ID NO: 557020 - RNA, 19 nt, Artificial Sequence
  Description of Artificial Sequence: Synthetic oligonucleotide
  Antisense strand to SEQ ID NO: 557019
uugauugcaccuaaacaac

SEQ ID NO: 557021 - RNA, 19 nt, Artificial Sequence
  Description of Artificial Sequence: Synthetic oligonucleotide
  Sense strand starting at position 951 of SEQ ID NO: 318366
accagucuauacucaguau

SEQ ID NO: 557022 - RNA, 19 nt, Artificial Sequence
  Description of Artificial Sequence: Synthetic oligonucleotide
  Antisense strand to SEQ ID NO: 557021
auacugaguauagacuggu

SEQ ID NO: 557023 - RNA, 19 nt, Artificial Sequence
  Description of Artificial Sequence: Synthetic oligonucleotide
  Sense strand starting at position 954 of SEQ ID NO: 318366
agucuauacucaguauuaa

SEQ ID NO: 557024 - RNA, 19 nt, Artificial Sequence
  Description of Artificial Sequence: Synthetic oligonucleotide
  Antisense strand to SEQ ID NO: 557023
uuaauacugaguauagacu

SEQ ID NO: 557025 - RNA, 19 nt, Artificial Sequence
  Description of Artificial Sequence: Synthetic oligonucleotide
  Sense strand starting at position 955 of SEQ ID NO: 318366
gucuauacucaguauuaau

SEQ ID NO: 557026 - RNA, 19 nt, Artificial Sequence
  Description of Artificial Sequence: Synthetic oligonucleotide
  Antisense strand to SEQ ID NO: 557025
auuaauacugaguauagac

SEQ ID NO: 557027 - RNA, 19 nt, Artificial Sequence
  Description of Artificial Sequence: Synthetic oligonucleotide
  Sense strand starting at position 985 of SEQ ID NO: 318366
guguaugcuauagaaggua

SEQ ID NO: 557028 - RNA, 19 nt, Artificial Sequence
  Description of Artificial Sequence: Synthetic oligonucleotide
  Antisense strand to SEQ ID NO: 557027
uaccuucuauagcauacac

SEQ ID NO: 557029 - RNA, 19 nt, Artificial Sequence
  Description of Artificial Sequence: Synthetic oligonucleotide
  Sense strand starting at position 1002 of SEQ ID NO: 318366
uaaugaaaugcugauguuu

SEQ ID NO: 557030 - RNA, 19 nt, Artificial Sequence
  Description of Artificial Sequence: Synthetic oligonucleotide
  Antisense strand to SEQ ID NO: 557029
aaacaucagcauuucauua

SEQ ID NO: 557031 - RNA, 19 nt, Artificial Sequence
  Description of Artificial Sequence: Synthetic oligonucleotide
  Sense strand starting at position 1120 of SEQ ID NO: 318366
ggcuuaauuugaucugcuc

SEQ ID NO: 557032 - RNA, 19 nt, Artificial Sequence
  Description of Artificial Sequence: Synthetic oligonucleotide
  Antisense strand to SEQ ID NO: 557031
gagcagaucaaauuaagcc

SEQ ID NO: 557033 - RNA, 19 nt, Artificial Sequence
  Description of Artificial Sequence: Synthetic oligonucleotide
  Sense strand starting at position 1184 of SEQ ID NO: 318366
ucuguauguguuuaaugua

SEQ ID NO: 557034 - RNA, 19 nt, Artificial Sequence
  Description of Artificial Sequence: Synthetic oligonucleotide
  Antisense strand to SEQ ID NO: 557033
uacauuaaacacauacaga

SEQ ID NO: 557035 - RNA, 19 nt, Artificial Sequence
  Description of Artificial Sequence: Synthetic oligonucleotide
  Sense strand starting at position 1504 of SEQ ID NO: 318366
ugacucaagugcucucuaa

SEQ ID NO: 557036 - RNA, 19 nt, Artificial Sequence
  Description of Artificial Sequence: Synthetic oligonucleotide
  Antisense strand to SEQ ID NO: 557035
uuagagagcacuugaguca

SEQ ID NO: 557037 - RNA, 19 nt, Artificial Sequence
  Description of Artificial Sequence: Synthetic oligonucleotide
  Sense strand starting at position 1508 of SEQ ID NO: 318366
ucaagugcucucuaagcuu

SEQ ID NO: 557038 - RNA, 19 nt, Artificial Sequence
  Description of Artificial Sequence: Synthetic oligonucleotide
  Antisense strand to SEQ ID NO: 557037
aagcuuagagagcacuuga

SEQ ID NO: 557039 - RNA, 19 nt, Artificial Sequence
  Description of Artificial Sequence: Synthetic oligonucleotide
  Sense strand starting at position 2391 of SEQ ID NO: 318366
cgcugaggcaacuagauau

SEQ ID NO: 557040 - RNA, 19 nt, Artificial Sequence
  Description of Artificial Sequence: Synthetic oligonucleotide
  Antisense strand to SEQ ID NO: 557039
auaucuaguugccucagcg

SEQ ID NO: 557041 - RNA, 19 nt, Artificial Sequence
  Description of Artificial Sequence: Synthetic oligonucleotide
  Sense strand starting at position 2441 of SEQ ID NO: 318366
aaucgugugcaggaucauu

SEQ ID NO: 557042 - RNA, 19 nt, Artificial Sequence
  Description of Artificial Sequence: Synthetic oligonucleotide
  Antisense strand to SEQ ID NO: 557041
aaugauccugcacacgauu

SEQ ID NO: 557043 - RNA, 19 nt, Artificial Sequence
  Description of Artificial Sequence: Synthetic oligonucleotide
  Sense strand starting at position 2446 of SEQ ID NO: 318366
ugugcaggaucauuuguua

SEQ ID NO: 557044 - RNA, 19 nt, Artificial Sequence
  Description of Artificial Sequence: Synthetic oligonucleotide
  Antisense strand to SEQ ID NO: 557043
uaacaaaugauccugcaca

SEQ ID NO: 557045 - RNA, 19 nt, Artificial Sequence
  Description of Artificial Sequence: Synthetic oligonucleotide
  Sense strand starting at position 2451 of SEQ ID NO: 318366
aggaucauuuguuaugaag

SEQ ID NO: 557046 - RNA, 19 nt, Artificial Sequence
  Description of Artificial Sequence: Synthetic oligonucleotide
  Antisense strand to SEQ ID NO: 557045
cuucauaacaaaugauccu

SEQ ID NO: 557047 - RNA, 19 nt, Artificial Sequence
  Description of Artificial Sequence: Synthetic oligonucleotide
  Sense strand starting at position 2518 of SEQ ID NO: 318366
acgaucauuuguggaggaa

SEQ ID NO: 557048 - RNA, 19 nt, Artificial Sequence
  Description of Artificial Sequence: Synthetic oligonucleotide
  Antisense strand to SEQ ID NO: 557047
uuccuccacaaaugaucgu

SEQ ID NO: 557049 - RNA, 19 nt, Artificial Sequence
  Description of Artificial Sequence: Synthetic oligonucleotide
  Sense strand starting at position 2562 of SEQ ID NO: 318366
cagagcuaccuuugcagau

SEQ ID NO: 557050 - RNA, 19 nt, Artificial Sequence
  Description of Artificial Sequence: Synthetic oligonucleotide
  Antisense strand to SEQ ID NO: 557049
aucugcaaagguagcucug

SEQ ID NO: 557051 - RNA, 19 nt, Artificial Sequence
  Description of Artificial Sequence: Synthetic oligonucleotide
  Sense strand starting at position 2642 of SEQ ID NO: 318366
ggguuucaggagcacaauu

SEQ ID NO: 557052 - RNA, 19 nt, Artificial Sequence
  Description of Artificial Sequence: Synthetic oligonucleotide
  Antisense strand to SEQ ID NO: 557051
aauugugcuccugaaaccc

SEQ ID NO: 557053 - RNA, 19 nt, Artificial Sequence
  Description of Artificial Sequence: Synthetic oligonucleotide
  Sense strand starting at position 2762 of SEQ ID NO: 318366
aagaauguuccaugguaga

SEQ ID NO: 557054 - RNA, 19 nt, Artificial Sequence
  Description of Artificial Sequence: Synthetic oligonucleotide
  Antisense strand to SEQ ID NO: 557053
ucuaccauggaacauucuu

SEQ ID NO: 557055 - RNA, 19 nt, Artificial Sequence
  Description of Artificial Sequence: Synthetic oligonucleotide
  Sense strand starting at position 2789 of SEQ ID NO: 318366
gacagagaaucuuaggaau

SEQ ID NO: 557056 - RNA, 19 nt, Artificial Sequence
  Description of Artificial Sequence: Synthetic oligonucleotide
  Antisense strand to SEQ ID NO: 557055
auuccuaagauucucuguc

SEQ ID NO: 557057 - RNA, 19 nt, Artificial Sequence
  Description of Artificial Sequence: Synthetic oligonucleotide
  Sense strand starting at position 2801 of SEQ ID NO: 318366
uaggaauccuaagagagaa

SEQ ID NO: 557058 - RNA, 19 nt, Artificial Sequence
  Description of Artificial Sequence: Synthetic oligonucleotide
  Antisense strand to SEQ ID NO: 557057
uucucucuuaggauuccua

SEQ ID NO: 557059 - RNA, 19 nt, Artificial Sequence
  Description of Artificial Sequence: Synthetic oligonucleotide
  Sense strand starting at position 3296 of SEQ ID NO: 318366
uugcuuuauuuagugguga

SEQ ID NO: 557060 - RNA, 19 nt, Artificial Sequence
  Description of Artificial Sequence: Synthetic oligonucleotide
  Antisense strand to SEQ ID NO: 557059
ucaccacuaaauaaagcaa

SEQ ID NO: 557061 - RNA, 19 nt, Artificial Sequence
  Description of Artificial Sequence: Synthetic oligonucleotide
  Sense strand starting at position 3298 of SEQ ID NO: 318366
gcuuuauuuaguggugaca

SEQ ID NO: 557062 - RNA, 19 nt, Artificial Sequence
  Description of Artificial Sequence: Synthetic oligonucleotide
  Antisense strand to SEQ ID NO: 557061
ugucaccacuaaauaaagc

SEQ ID NO: 557063 - RNA, 19 nt, Artificial Sequence
  Description of Artificial Sequence: Synthetic oligonucleotide
  Sense strand starting at position 3357 of SEQ ID NO: 318366
gcuguagauaauugacuga

SEQ ID NO: 557064 - RNA, 19 nt, Artificial Sequence
  Description of Artificial Sequence: Synthetic oligonucleotide
  Antisense strand to SEQ ID NO: 557063
ucagucaauuaucuacagc

SEQ ID NO: 557065 - RNA, 19 nt, Artificial Sequence
  Description of Artificial Sequence: Synthetic oligonucleotide
  Sense strand starting at position 3360 of SEQ ID NO: 318366
guagauaauugacugaauu

SEQ ID NO: 557066 - RNA, 19 nt, Artificial Sequence
  Description of Artificial Sequence: Synthetic oligonucleotide
  Antisense strand to SEQ ID NO: 557065
aauucagucaauuaucuac

SEQ ID NO: 557067 - RNA, 19 nt, Artificial Sequence
  Description of Artificial Sequence: Synthetic oligonucleotide
  Sense strand starting at position 3460 of SEQ ID NO: 318366
aggguuuguucuuugaauu

SEQ ID NO: 557068 - RNA, 19 nt, Artificial Sequence
  Description of Artificial Sequence: Synthetic oligonucleotide
  Antisense strand to SEQ ID NO: 557067
aauucaaagaacaaacccu

SEQ ID NO: 557069 - RNA, 19 nt, Artificial Sequence
  Description of Artificial Sequence: Synthetic oligonucleotide
  Sense strand starting at position 3461 of SEQ ID NO: 318366
ggguuuguucuuugaauug

SEQ ID NO: 557070 - RNA, 19 nt, Artificial Sequence
  Description of Artificial Sequence: Synthetic oligonucleotide
  Antisense strand to SEQ ID NO: 557069
caauucaaagaacaaaccc

SEQ ID NO: 557071 - RNA, 19 nt, Artificial Sequence
  Description of Artificial Sequence: Synthetic oligonucleotide
  Sense strand starting at position 3470 of SEQ ID NO: 318366
cuuugaauuguccaaucug

SEQ ID NO: 557072 - RNA, 19 nt, Artificial Sequence
  Description of Artificial Sequence: Synthetic oligonucleotide
  Antisense strand to SEQ ID NO: 557071
cagauuggacaauucaaag

SEQ ID NO: 557073 - RNA, 19 nt, Artificial Sequence
  Description of Artificial Sequence: Synthetic oligonucleotide
  Sense strand starting at position 3488 of SEQ ID NO: 318366
gugacuagccagggaagaa

SEQ ID NO: 557074 - RNA, 19 nt, Artificial Sequence
  Description of Artificial Sequence: Synthetic oligonucleotide
  Antisense strand to SEQ ID NO: 557073
uucuucccuggcuagucac

SEQ ID NO: 557075 - RNA, 19 nt, Artificial Sequence
  Description of Artificial Sequence: Synthetic oligonucleotide
  Sense strand starting at position 298 of SEQ ID NO: 318367
agaaaugccaucuaggugu

SEQ ID NO: 557076 - RNA, 19 nt, Artificial Sequence
  Description of Artificial Sequence: Synthetic oligonucleotide
  Antisense strand to SEQ ID NO: 557075
acaccuagauggcauuucu

SEQ ID NO: 557077 - RNA, 19 nt, Artificial Sequence
  Description of Artificial Sequence: Synthetic oligonucleotide
  Sense strand starting at position 300 of SEQ ID NO: 318367
aaaugccaucuagguguua

SEQ ID NO: 557078 - RNA, 19 nt, Artificial Sequence
  Description of Artificial Sequence: Synthetic oligonucleotide
  Antisense strand to SEQ ID NO: 557077
uaacaccuagauggcauuu

SEQ ID NO: 557079 - RNA, 19 nt, Artificial Sequence
  Description of Artificial Sequence: Synthetic oligonucleotide
  Sense strand starting at position 301 of SEQ ID NO: 318367
aaugccaucuagguguuaa

SEQ ID NO: 557080 - RNA, 19 nt, Artificial Sequence
  Description of Artificial Sequence: Synthetic oligonucleotide
  Antisense strand to SEQ ID NO: 557079
uuaacaccuagauggcauu

SEQ ID NO: 557081 - RNA, 19 nt, Artificial Sequence
  Description of Artificial Sequence: Synthetic oligonucleotide
  Sense strand starting at position 417 of SEQ ID NO: 318367
uuuccuuugucauugacuu

SEQ ID NO: 557082 - RNA, 19 nt, Artificial Sequence
  Description of Artificial Sequence: Synthetic oligonucleotide
  Antisense strand to SEQ ID NO: 557081
aagucaaugacaaaggaaa

SEQ ID NO: 557083 - RNA, 19 nt, Artificial Sequence
  Description of Artificial Sequence: Synthetic oligonucleotide
  Sense strand starting at position 611 of SEQ ID NO: 318367
gucauacaguuucucaacu

SEQ ID NO: 557084 - RNA, 19 nt, Artificial Sequence
  Description of Artificial Sequence: Synthetic oligonucleotide
  Antisense strand to SEQ ID NO: 557083
aguugagaaacuguaugac

SEQ ID NO: 557085 - RNA, 19 nt, Artificial Sequence
  Description of Artificial Sequence: Synthetic oligonucleotide
  Sense strand starting at position 720 of SEQ ID NO: 318367
accugaaauuaucuaagug

SEQ ID NO: 557086 - RNA, 19 nt, Artificial Sequence
  Description of Artificial Sequence: Synthetic oligonucleotide
  Antisense strand to SEQ ID NO: 557085
cacuuagauaauuucaggu

SEQ ID NO: 557087 - RNA, 19 nt, Artificial Sequence
  Description of Artificial Sequence: Synthetic oligonucleotide
  Sense strand starting at position 724 of SEQ ID NO: 318367
gaaauuaucuaagugugua

SEQ ID NO: 557088 - RNA, 19 nt, Artificial Sequence
  Description of Artificial Sequence: Synthetic oligonucleotide
  Antisense strand to SEQ ID NO: 557087
uacacacuuagauaauuuc

SEQ ID NO: 557089 - RNA, 19 nt, Artificial Sequence
  Description of Artificial Sequence: Synthetic oligonucleotide
  Sense strand starting at position 727 of SEQ ID NO: 318367
auuaucuaaguguguaaca

SEQ ID NO: 557090 - RNA, 19 nt, Artificial Sequence
  Description of Artificial Sequence: Synthetic oligonucleotide
  Antisense strand to SEQ ID NO: 557089
uguuacacacuuagauaau

SEQ ID NO: 557091 - RNA, 19 nt, Artificial Sequence
  Description of Artificial Sequence: Synthetic oligonucleotide
  Sense strand starting at position 728 of SEQ ID NO: 318367
uuaucuaaguguguaacau

SEQ ID NO: 557092 - RNA, 19 nt, Artificial Sequence
  Description of Artificial Sequence: Synthetic oligonucleotide
  Antisense strand to SEQ ID NO: 557091
auguuacacacuuagauaa

SEQ ID NO: 557093 - RNA, 19 nt, Artificial Sequence
  Description of Artificial Sequence: Synthetic oligonucleotide
  Sense strand starting at position 736 of SEQ ID NO: 318367
guguguaacauagacccua

SEQ ID NO: 557094 - RNA, 19 nt, Artificial Sequence
  Description of Artificial Sequence: Synthetic oligonucleotide
  Antisense strand to SEQ ID NO: 557093
uagggucuauguuacacac

SEQ ID NO: 557095 - RNA, 19 nt, Artificial Sequence
  Description of Artificial Sequence: Synthetic oligonucleotide
  Sense strand starting at position 760 of SEQ ID NO: 318367
uggacucacugaucagagu

SEQ ID NO: 557096 - RNA, 19 nt, Artificial Sequence
  Description of Artificial Sequence: Synthetic oligonucleotide
  Antisense strand to SEQ ID NO: 557095
acucugaucagugagucca

SEQ ID NO: 557097 - RNA, 19 nt, Artificial Sequence
  Description of Artificial Sequence: Synthetic oligonucleotide
  Sense strand starting at position 1328 of SEQ ID NO: 318367
uacguacguaugggaauaa

SEQ ID NO: 557098 - RNA, 19 nt, Artificial Sequence
  Description of Artificial Sequence: Synthetic oligonucleotide
  Antisense strand to SEQ ID NO: 557097
uuauucccauacguacgua

SEQ ID NO: 557099 - RNA, 19 nt, Artificial Sequence
  Description of Artificial Sequence: Synthetic oligonucleotide
  Sense strand starting at position 1452 of SEQ ID NO: 318367
ccaggauucuugcccugac

SEQ ID NO: 557100 - RNA, 19 nt, Artificial Sequence
  Description of Artificial Sequence: Synthetic oligonucleotide
  Antisense strand to SEQ ID NO: 557099
gucagggcaagaauccugg

SEQ ID NO: 557101 - RNA, 19 nt, Artificial Sequence
  Description of Artificial Sequence: Synthetic oligonucleotide
  Sense strand starting at position 1453 of SEQ ID NO: 318367
caggauucuugcccugacu

SEQ ID NO: 557102 - RNA, 19 nt, Artificial Sequence
  Description of Artificial Sequence: Synthetic oligonucleotide
  Antisense strand to SEQ ID NO: 557101
agucagggcaagaauccug

SEQ ID NO: 557103 - RNA, 19 nt, Artificial Sequence
  Description of Artificial Sequence: Synthetic oligonucleotide
  Sense strand starting at position 1455 of SEQ ID NO: 318367
ggauucuugcccugacuug

SEQ ID NO: 557104 - RNA, 19 nt, Artificial Sequence
  Description of Artificial Sequence: Synthetic oligonucleotide
  Antisense strand to SEQ ID NO: 557103
caagucagggcaagaaucc

SEQ ID NO: 557105 - RNA, 19 nt, Artificial Sequence
  Description of Artificial Sequence: Synthetic oligonucleotide
  Sense strand starting at position 1471 of SEQ ID NO: 318367
uuggacauuugugggauuu

SEQ ID NO: 557106 - RNA, 19 nt, Artificial Sequence
  Description of Artificial Sequence: Synthetic oligonucleotide
  Antisense strand to SEQ ID NO: 557105
aaaucccacaaauguccaa

SEQ ID NO: 557107 - RNA, 19 nt, Artificial Sequence
  Description of Artificial Sequence: Synthetic oligonucleotide
  Sense strand starting at position 1486 of SEQ ID NO: 318367
auuuaugguuaagggagau

SEQ ID NO: 557108 - RNA, 19 nt, Artificial Sequence
  Description of Artificial Sequence: Synthetic oligonucleotide
  Antisense strand to SEQ ID NO: 557107
aucucccuuaaccauaaau

SEQ ID NO: 557109 - RNA, 19 nt, Artificial Sequence
  Description of Artificial Sequence: Synthetic oligonucleotide
  Sense strand starting at position 1498 of SEQ ID NO: 318367
gggagaucacuuggccaua

SEQ ID NO: 557110 - RNA, 19 nt, Artificial Sequence
  Description of Artificial Sequence: Synthetic oligonucleotide
  Antisense strand to SEQ ID NO: 557109
uauggccaagugaucuccc

SEQ ID NO: 557111 - RNA, 19 nt, Artificial Sequence
  Description of Artificial Sequence: Synthetic oligonucleotide
  Sense strand starting at position 1499 of SEQ ID NO: 318367
ggagaucacuuggccauaa

SEQ ID NO: 557112 - RNA, 19 nt, Artificial Sequence
  Description of Artificial Sequence: Synthetic oligonucleotide
  Antisense strand to SEQ ID NO: 557111
uuauggccaagugaucucc

SEQ ID NO: 557113 - RNA, 19 nt, Artificial Sequence
  Description of Artificial Sequence: Synthetic oligonucleotide
  Sense strand starting at position 1521 of SEQ ID NO: 318367
cccggugaggaaugaugau

SEQ ID NO: 557114 - RNA, 19 nt, Artificial Sequence
  Description of Artificial Sequence: Synthetic oligonucleotide
  Antisense strand to SEQ ID NO: 557113
aucaucauuccucaccggg

SEQ ID NO: 557115 - RNA, 19 nt, Artificial Sequence
  Description of Artificial Sequence: Synthetic oligonucleotide
  Sense strand starting at position 1602 of SEQ ID NO: 318367
ccaccauuucugcgagguc

SEQ ID NO: 557116 - RNA, 19 nt, Artificial Sequence
  Description of Artificial Sequence: Synthetic oligonucleotide
  Antisense strand to SEQ ID NO: 557115
gaccucgcagaaauggugg

SEQ ID NO: 557117 - RNA, 19 nt, Artificial Sequence
  Description of Artificial Sequence: Synthetic oligonucleotide
  Sense strand starting at position 1708 of SEQ ID NO: 318367
gggaauuucucggagagau

SEQ ID NO: 557118 - RNA, 19 nt, Artificial Sequence
  Description of Artificial Sequence: Synthetic oligonucleotide
  Antisense strand to SEQ ID NO: 557117
aucucuccgagaaauuccc

SEQ ID NO: 557119 - RNA, 19 nt, Artificial Sequence
  Description of Artificial Sequence: Synthetic oligonucleotide
  Sense strand starting at position 1964 of SEQ ID NO: 318367
ggaaauguccagggaagca

SEQ ID NO: 557120 - RNA, 19 nt, Artificial Sequence
  Description of Artificial Sequence: Synthetic oligonucleotide
  Antisense strand to SEQ ID NO: 557119
ugcuucccuggacauuucc

SEQ ID NO: 557121 - RNA, 19 nt, Artificial Sequence
  Description of Artificial Sequence: Synthetic oligonucleotide
  Sense strand starting at position 2119 of SEQ ID NO: 318367
ugccaaagaucacugacaa

SEQ ID NO: 557122 - RNA, 19 nt, Artificial Sequence
  Description of Artificial Sequence: Synthetic oligonucleotide
  Antisense strand to SEQ ID NO: 557121
uugucagugaucuuuggca

SEQ ID NO: 557123 - RNA, 19 nt, Artificial Sequence
  Description of Artificial Sequence: Synthetic oligonucleotide
  Sense strand starting at position 2120 of SEQ ID NO: 318367
gccaaagaucacugacaag

SEQ ID NO: 557124 - RNA, 19 nt, Artificial Sequence
  Description of Artificial Sequence: Synthetic oligonucleotide
  Antisense strand to SEQ ID NO: 557123
cuugucagugaucuuuggc

SEQ ID NO: 557125 - RNA, 19 nt, Artificial Sequence
  Description of Artificial Sequence: Synthetic oligonucleotide
  Sense strand starting at position 2183 of SEQ ID NO: 318367
ggcuuuguccgugcuacaa

SEQ ID NO: 557126 - RNA, 19 nt, Artificial Sequence
  Description of Artificial Sequence: Synthetic oligonucleotide
  Antisense strand to SEQ ID NO: 557125
uuguagcacggacaaagcc

SEQ ID NO: 557127 - RNA, 19 nt, Artificial Sequence
  Description of Artificial Sequence: Synthetic oligonucleotide
  Sense strand starting at position 2594 of SEQ ID NO: 318367
cucugucucuaguuagaac

SEQ ID NO: 557128 - RNA, 19 nt, Artificial Sequence
  Description of Artificial Sequence: Synthetic oligonucleotide
  Antisense strand to SEQ ID NO: 557127
guucuaacuagagacagag

SEQ ID NO: 557129 - RNA, 19 nt, Artificial Sequence
  Description of Artificial Sequence: Synthetic oligonucleotide
  Sense strand starting at position 2661 of SEQ ID NO: 318367
guugcaguuguguucuaca

SEQ ID NO: 557130 - RNA, 19 nt, Artificial Sequence
  Description of Artificial Sequence: Synthetic oligonucleotide
  Antisense strand to SEQ ID NO: 557129
uguagaacacaacugcaac

SEQ ID NO: 557131 - RNA, 19 nt, Artificial Sequence
  Description of Artificial Sequence: Synthetic oligonucleotide
  Sense strand starting at position 2666 of SEQ ID NO: 318367
aguuguguucuacaaccuu

SEQ ID NO: 557132 - RNA, 19 nt, Artificial Sequence
  Description of Artificial Sequence: Synthetic oligonucleotide
  Antisense strand to SEQ ID NO: 557131
aagguuguagaacacaacu

SEQ ID NO: 557133 - RNA, 19 nt, Artificial Sequence
  Description of Artificial Sequence: Synthetic oligonucleotide
  Sense strand starting at position 2872 of SEQ ID NO: 318367
uuucgugauuuccuuuauu

SEQ ID NO: 557134 - RNA, 19 nt, Artificial Sequence
  Description of Artificial Sequence: Synthetic oligonucleotide
  Antisense strand to SEQ ID NO: 557133
aauaaaggaaaucacgaaa

SEQ ID NO: 557135 - RNA, 19 nt, Artificial Sequence
  Description of Artificial Sequence: Synthetic oligonucleotide
  Sense strand starting at position 3099 of SEQ ID NO: 318367
ggaaguucccaguagcuua

SEQ ID NO: 557136 - RNA, 19 nt, Artificial Sequence
  Description of Artificial Sequence: Synthetic oligonucleotide
  Antisense strand to SEQ ID NO: 557135
uaagcuacugggaacuucc

SEQ ID NO: 557137 - RNA, 19 nt, Artificial Sequence
  Description of Artificial Sequence: Synthetic oligonucleotide
  Sense strand starting at position 3104 of SEQ ID NO: 318367
uucccaguagcuuagugau

SEQ ID NO: 557138 - RNA, 19 nt, Artificial Sequence
  Description of Artificial Sequence: Synthetic oligonucleotide
  Antisense strand to SEQ ID NO: 557137
aucacuaagcuacugggaa

SEQ ID NO: 557139 - RNA, 19 nt, Artificial Sequence
  Description of Artificial Sequence: Synthetic oligonucleotide
  Sense strand starting at position 3159 of SEQ ID NO: 318367
ucuaacgaucuaggaauau

SEQ ID NO: 557140 - RNA, 19 nt, Artificial Sequence
  Description of Artificial Sequence: Synthetic oligonucleotide
  Antisense strand to SEQ ID NO: 557139
auauuccuagaucguuaga

SEQ ID NO: 557141 - RNA, 19 nt, Artificial Sequence
  Description of Artificial Sequence: Synthetic oligonucleotide
  Sense strand starting at position 3263 of SEQ ID NO: 318367
guuuccuaugauuacuauu

SEQ ID NO: 557142 - RNA, 19 nt, Artificial Sequence
  Description of Artificial Sequence: Synthetic oligonucleotide
  Antisense strand to SEQ ID NO: 557141
aauaguaaucauaggaaac

SEQ ID NO: 557143 - RNA, 19 nt, Artificial Sequence
  Description of Artificial Sequence: Synthetic oligonucleotide
  Sense strand starting at position 3613 of SEQ ID NO: 318367
guguguauugucuauauau

SEQ ID NO: 557144 - RNA, 19 nt, Artificial Sequence
  Description of Artificial Sequence: Synthetic oligonucleotide
  Antisense strand to SEQ ID NO: 557143
auauauagacaauacacac

SEQ ID NO: 557145 - RNA, 19 nt, Artificial Sequence
  Description of Artificial Sequence: Synthetic oligonucleotide
  Sense strand starting at position 3662 of SEQ ID NO: 318367
acugaacggccuuagaagu

SEQ ID NO: 557146 - RNA, 19 nt, Artificial Sequence
  Description of Artificial Sequence: Synthetic oligonucleotide
  Antisense strand to SEQ ID NO: 557145
acuucuaaggccguucagu

SEQ ID NO: 557147 - RNA, 19 nt, Artificial Sequence
  Description of Artificial Sequence: Synthetic oligonucleotide
  Sense strand starting at position 3708 of SEQ ID NO: 318367
ccucaaggagcuuguaacu

SEQ ID NO: 557148 - RNA, 19 nt, Artificial Sequence
  Description of Artificial Sequence: Synthetic oligonucleotide
  Antisense strand to SEQ ID NO: 557147
aguuacaagcuccuugagg

SEQ ID NO: 557149 - RNA, 19 nt, Artificial Sequence
  Description of Artificial Sequence: Synthetic oligonucleotide
  Sense strand starting at position 3730 of SEQ ID NO: 318367
uggaaaggauuggacaaua

SEQ ID NO: 557150 - RNA, 19 nt, Artificial Sequence
  Description of Artificial Sequence: Synthetic oligonucleotide
  Antisense strand to SEQ ID NO: 557149
uauuguccaauccuuucca

SEQ ID NO: 557151 - RNA, 19 nt, Artificial Sequence
  Description of Artificial Sequence: Synthetic oligonucleotide
  Sense strand starting at position 3811 of SEQ ID NO: 318367
aaaugaaaugcguauauga

SEQ ID NO: 557152 - RNA, 19 nt, Artificial Sequence
  Description of Artificial Sequence: Synthetic oligonucleotide
  Antisense strand to SEQ ID NO: 557151
ucauauacgcauuucauuu

SEQ ID NO: 557153 - RNA, 19 nt, Artificial Sequence
  Description of Artificial Sequence: Synthetic oligonucleotide
  Sense strand starting at position 3813 of SEQ ID NO: 318367
augaaaugcguauaugaug

SEQ ID NO: 557154 - RNA, 19 nt, Artificial Sequence
  Description of Artificial Sequence: Synthetic oligonucleotide
  Antisense strand to SEQ ID NO: 557153
caucauauacgcauuucau

SEQ ID NO: 557155 - RNA, 19 nt, Artificial Sequence
  Description of Artificial Sequence: Synthetic oligonucleotide
  Sense strand starting at position 8 of SEQ ID NO: 318368
cagugaaagcagcacauau

SEQ ID NO: 557156 - RNA, 19 nt, Artificial Sequence
  Description of Artificial Sequence: Synthetic oligonucleotide
  Antisense strand to SEQ ID NO: 557155
auaugugcugcuuucacug

SEQ ID NO: 557157 - RNA, 19 nt, Artificial Sequence
  Description of Artificial Sequence: Synthetic oligonucleotide
  Sense strand starting at position 10 of SEQ ID NO: 318368
gugaaagcagcacauauaa

SEQ ID NO: 557158 - RNA, 19 nt, Artificial Sequence
  Description of Artificial Sequence: Synthetic oligonucleotide
  Antisense strand to SEQ ID NO: 557157
uuauaugugcugcuuucac

SEQ ID NO: 557159 - RNA, 19 nt, Artificial Sequence
  Description of Artificial Sequence: Synthetic oligonucleotide
  Sense strand starting at position 33 of SEQ ID NO: 318368
auuaauuauucugugggaa

SEQ ID NO: 557160 - RNA, 19 nt, Artificial Sequence
  Description of Artificial Sequence: Synthetic oligonucleotide
  Antisense strand to SEQ ID NO: 557159
uucccacagaauaauuaau

SEQ ID NO: 557161 - RNA, 19 nt, Artificial Sequence
  Description of Artificial Sequence: Synthetic oligonucleotide
  Sense strand starting at position 34 of SEQ ID NO: 318368
uuaauuauucugugggaaa

SEQ ID NO: 557162 - RNA, 19 nt, Artificial Sequence
  Description of Artificial Sequence: Synthetic oligonucleotide
  Antisense strand to SEQ ID NO: 557161
uuucccacagaauaauuaa

SEQ ID NO: 557163 - RNA, 19 nt, Artificial Sequence
  Description of Artificial Sequence: Synthetic oligonucleotide
  Sense strand starting at position 36 of SEQ ID NO: 318368
aauuauucugugggaaauu

SEQ ID NO: 557164 - RNA, 19 nt, Artificial Sequence
  Description of Artificial Sequence: Synthetic oligonucleotide
  Antisense strand to SEQ ID NO: 557163
aauuucccacagaauaauu

SEQ ID NO: 557165 - RNA, 19 nt, Artificial Sequence
  Description of Artificial Sequence: Synthetic oligonucleotide
  Sense strand starting at position 98 of SEQ ID NO: 318368
caagcuuccgaaggaaacu

SEQ ID NO: 557166 - RNA, 19 nt, Artificial Sequence
  Description of Artificial Sequence: Synthetic oligonucleotide
  Antisense strand to SEQ ID NO: 557165
aguuuccuucggaagcuug

SEQ ID NO: 557167 - RNA, 19 nt, Artificial Sequence
  Description of Artificial Sequence: Synthetic oligonucleotide
  Sense strand starting at position 115 of SEQ ID NO: 318368
cugacucaugauggauauu

SEQ ID NO: 557168 - RNA, 19 nt, Artificial Sequence
  Description of Artificial Sequence: Synthetic oligonucleotide
  Antisense strand to SEQ ID NO: 557167
aauauccaucaugagucag

SEQ ID NO: 557169 - RNA, 19 nt, Artificial Sequence
  Description of Artificial Sequence: Synthetic oligonucleotide
  Sense strand starting at position 125 of SEQ ID NO: 318368
auggauauuugagauguca

SEQ ID NO: 557170 - RNA, 19 nt, Artificial Sequence
  Description of Artificial Sequence: Synthetic oligonucleotide
  Antisense strand to SEQ ID NO: 557169
ugacaucucaaauauccau

SEQ ID NO: 557171 - RNA, 19 nt, Artificial Sequence
  Description of Artificial Sequence: Synthetic oligonucleotide
  Sense strand starting at position 228 of SEQ ID NO: 318368
gcugcuaaugcuuauauuu

SEQ ID NO: 557172 - RNA, 19 nt, Artificial Sequence
  Description of Artificial Sequence: Synthetic oligonucleotide
  Antisense strand to SEQ ID NO: 557171
aaauauaagcauuagcagc

SEQ ID NO: 557173 - RNA, 19 nt, Artificial Sequence
  Description of Artificial Sequence: Synthetic oligonucleotide
  Sense strand starting at position 356 of SEQ ID NO: 318368
uugagaaggcaagguuuau

SEQ ID NO: 557174 - RNA, 19 nt, Artificial Sequence
  Description of Artificial Sequence: Synthetic oligonucleotide
  Antisense strand to SEQ ID NO: 557173
auaaaccuugccuucucaa

SEQ ID NO: 557175 - RNA, 19 nt, Artificial Sequence
  Description of Artificial Sequence: Synthetic oligonucleotide
  Sense strand starting at position 537 of SEQ ID NO: 318368
ccaccauauguuggaaaua

SEQ ID NO: 557176 - RNA, 19 nt, Artificial Sequence
  Description of Artificial Sequence: Synthetic oligonucleotide
  Antisense strand to SEQ ID NO: 557175
uauuuccaacauauggugg

SEQ ID NO: 557177 - RNA, 19 nt, Artificial Sequence
  Description of Artificial Sequence: Synthetic oligonucleotide
  Sense strand starting at position 546 of SEQ ID NO: 318368
guuggaaauaugcacagua

SEQ ID NO: 557178 - RNA, 19 nt, Artificial Sequence
  Description of Artificial Sequence: Synthetic oligonucleotide
  Antisense strand to SEQ ID NO: 557177
uacugugcauauuuccaac

SEQ ID NO: 557179 - RNA, 19 nt, Artificial Sequence
  Description of Artificial Sequence: Synthetic oligonucleotide
  Sense strand starting at position 619 of SEQ ID NO: 318368
gcaugagaaucacauuuaa

SEQ ID NO: 557180 - RNA, 19 nt, Artificial Sequence
  Description of Artificial Sequence: Synthetic oligonucleotide
  Antisense strand to SEQ ID NO: 557179
uuaaaugugauucucaugc

SEQ ID NO: 557181 - RNA, 19 nt, Artificial Sequence
  Description of Artificial Sequence: Synthetic oligonucleotide
  Sense strand starting at position 872 of SEQ ID NO: 318368
aggacauuaucuucuuuag

SEQ ID NO: 557182 - RNA, 19 nt, Artificial Sequence
  Description of Artificial Sequence: Synthetic oligonucleotide
  Antisense strand to SEQ ID NO: 557181
cuaaagaagauaauguccu

SEQ ID NO: 557183 - RNA, 19 nt, Artificial Sequence
  Description of Artificial Sequence: Synthetic oligonucleotide
  Sense strand starting at position 1025 of SEQ ID NO: 318368
ugcugcauuuggucuaaau

SEQ ID NO: 557184 - RNA, 19 nt, Artificial Sequence
  Description of Artificial Sequence: Synthetic oligonucleotide
  Antisense strand to SEQ ID NO: 557183
auuuagaccaaaugcagca

SEQ ID NO: 557185 - RNA, 19 nt, Artificial Sequence
  Description of Artificial Sequence: Synthetic oligonucleotide
  Sense strand starting at position 1257 of SEQ ID NO: 318368
cuuuccaguuauuugguua

SEQ ID NO: 557186 - RNA, 19 nt, Artificial Sequence
  Description of Artificial Sequence: Synthetic oligonucleotide
  Antisense strand to SEQ ID NO: 557185
uaaccaaauaacuggaaag

SEQ ID NO: 557187 - RNA, 19 nt, Artificial Sequence
  Description of Artificial Sequence: Synthetic oligonucleotide
  Sense strand starting at position 1315 of SEQ ID NO: 318368
uagugaagucaugagguca

SEQ ID NO: 557188 - RNA, 19 nt, Artificial Sequence
  Description of Artificial Sequence: Synthetic oligonucleotide
  Antisense strand to SEQ ID NO: 557187
ugaccucaugacuucacua

SEQ ID NO: 557189 - RNA, 19 nt, Artificial Sequence
  Description of Artificial Sequence: Synthetic oligonucleotide
  Sense strand starting at position 1488 of SEQ ID NO: 318368
ugaagaauaauguaguguu

SEQ ID NO: 557190 - RNA, 19 nt, Artificial Sequence
  Description of Artificial Sequence: Synthetic oligonucleotide
  Antisense strand to SEQ ID NO: 557189
aacacuacauuauucuuca

SEQ ID NO: 557191 - RNA, 19 nt, Artificial Sequence
  Description of Artificial Sequence: Synthetic oligonucleotide
  Sense strand starting at position 1555 of SEQ ID NO: 318368
guauuaagccauuagacaa

SEQ ID NO: 557192 - RNA, 19 nt, Artificial Sequence
  Description of Artificial Sequence: Synthetic oligonucleotide
  Antisense strand to SEQ ID NO: 557191
uugucuaauggcuuaauac

SEQ ID NO: 557193 - RNA, 19 nt, Artificial Sequence
  Description of Artificial Sequence: Synthetic oligonucleotide
  Sense strand starting at position 1613 of SEQ ID NO: 318368
uuuguuaaguuugccauuu

SEQ ID NO: 557194 - RNA, 19 nt, Artificial Sequence
  Description of Artificial Sequence: Synthetic oligonucleotide
  Antisense strand to SEQ ID NO: 557193
aaauggcaaacuuaacaaa

SEQ ID NO: 557195 - RNA, 19 nt, Artificial Sequence
  Description of Artificial Sequence: Synthetic oligonucleotide
  Sense strand starting at position 1614 of SEQ ID NO: 318368
uuguuaaguuugccauuua

SEQ ID NO: 557196 - RNA, 19 nt, Artificial Sequence
  Description of Artificial Sequence: Synthetic oligonucleotide
  Antisense strand to SEQ ID NO: 557195
uaaauggcaaacuuaacaa

SEQ ID NO: 557197 - RNA, 19 nt, Artificial Sequence
  Description of Artificial Sequence: Synthetic oligonucleotide
  Sense strand starting at position 1783 of SEQ ID NO: 318368
ggcaaaggcuuauuugcaa

SEQ ID NO: 557198 - RNA, 19 nt, Artificial Sequence
  Description of Artificial Sequence: Synthetic oligonucleotide
  Antisense strand to SEQ ID NO: 557197
uugcaaauaagccuuugcc

SEQ ID NO: 557199 - RNA, 19 nt, Artificial Sequence
  Description of Artificial Sequence: Synthetic oligonucleotide
  Sense strand starting at position 1856 of SEQ ID NO: 318368
ccuguaggacuuugagaaa

SEQ ID NO: 557200 - RNA, 19 nt, Artificial Sequence
  Description of Artificial Sequence: Synthetic oligonucleotide
  Antisense strand to SEQ ID NO: 557199
uuucucaaaguccuacagg

SEQ ID NO: 557201 - RNA, 19 nt, Artificial Sequence
  Description of Artificial Sequence: Synthetic oligonucleotide
  Sense strand starting at position 1874 of SEQ ID NO: 318368
acgcaaucuugauuuggcu

SEQ ID NO: 557202 - RNA, 19 nt, Artificial Sequence
  Description of Artificial Sequence: Synthetic oligonucleotide
  Antisense strand to SEQ ID NO: 557201
agccaaaucaagauugcgu

SEQ ID NO: 557203 - RNA, 19 nt, Artificial Sequence
  Description of Artificial Sequence: Synthetic oligonucleotide
  Sense strand starting at position 2321 of SEQ ID NO: 318368
ugugauugaaguggguaaa

SEQ ID NO: 557204 - RNA, 19 nt, Artificial Sequence
  Description of Artificial Sequence: Synthetic oligonucleotide
  Antisense strand to SEQ ID NO: 557203
uuuacccacuucaaucaca

SEQ ID NO: 557205 - RNA, 19 nt, Artificial Sequence
  Description of Artificial Sequence: Synthetic oligonucleotide
  Sense strand starting at position 2339 of SEQ ID NO: 318368
accuuuauaucagugugaa

SEQ ID NO: 557206 - RNA, 19 nt, Artificial Sequence
  Description of Artificial Sequence: Synthetic oligonucleotide
  Antisense strand to SEQ ID NO: 557205
uucacacugauauaaaggu

SEQ ID NO: 557207 - RNA, 19 nt, Artificial Sequence
  Description of Artificial Sequence: Synthetic oligonucleotide
  Sense strand starting at position 2415 of SEQ ID NO: 318368
augacugggucaucugaca

SEQ ID NO: 557208 - RNA, 19 nt, Artificial Sequence
  Description of Artificial Sequence: Synthetic oligonucleotide
  Antisense strand to SEQ ID NO: 557207
ugucagaugacccagucau

SEQ ID NO: 557209 - RNA, 19 nt, Artificial Sequence
  Description of Artificial Sequence: Synthetic oligonucleotide
  Sense strand starting at position 2505 of SEQ ID NO: 318368
uggauauaauucuuagcca

SEQ ID NO: 557210 - RNA, 19 nt, Artificial Sequence
  Description of Artificial Sequence: Synthetic oligonucleotide
  Antisense strand to SEQ ID NO: 557209
uggcuaagaauuauaucca

SEQ ID NO: 557211 - RNA, 19 nt, Artificial Sequence
  Description of Artificial Sequence: Synthetic oligonucleotide
  Sense strand starting at position 2659 of SEQ ID NO: 318368
caccuuagagagugaauua

SEQ ID NO: 557212 - RNA, 19 nt, Artificial Sequence
  Description of Artificial Sequence: Synthetic oligonucleotide
  Antisense strand to SEQ ID NO: 557211
uaauucacucucuaaggug

SEQ ID NO: 557213 - RNA, 19 nt, Artificial Sequence
  Description of Artificial Sequence: Synthetic oligonucleotide
  Sense strand starting at position 2864 of SEQ ID NO: 318368
aauuguacccaaggaguca

SEQ ID NO: 557214 - RNA, 19 nt, Artificial Sequence
  Description of Artificial Sequence: Synthetic oligonucleotide
  Antisense strand to SEQ ID NO: 557213
ugacuccuuggguacaauu

SEQ ID NO: 557215 - RNA, 19 nt, Artificial Sequence
  Description of Artificial Sequence: Synthetic oligonucleotide
  Sense strand starting at position 2953 of SEQ ID NO: 318368
aucagucuguauccaaaca

SEQ ID NO: 557216 - RNA, 19 nt, Artificial Sequence
  Description of Artificial Sequence: Synthetic oligonucleotide
  Antisense strand to SEQ ID NO: 557215
uguuuggauacagacugau

SEQ ID NO: 557217 - RNA, 19 nt, Artificial Sequence
  Description of Artificial Sequence: Synthetic oligonucleotide
  Sense strand starting at position 3094 of SEQ ID NO: 318368
aagaguugagcucagugaa

SEQ ID NO: 557218 - RNA, 19 nt, Artificial Sequence
  Description of Artificial Sequence: Synthetic oligonucleotide
  Antisense strand to SEQ ID NO: 557217
uucacugagcucaacucuu

SEQ ID NO: 557219 - RNA, 19 nt, Artificial Sequence
  Description of Artificial Sequence: Synthetic oligonucleotide
  Sense strand starting at position 3265 of SEQ ID NO: 318368
uuaagaaugcuacagguuu

SEQ ID NO: 557220 - RNA, 19 nt, Artificial Sequence
  Description of Artificial Sequence: Synthetic oligonucleotide
  Antisense strand to SEQ ID NO: 557219
aaaccuguagcauucuuaa

SEQ ID NO: 557221 - RNA, 19 nt, Artificial Sequence
  Description of Artificial Sequence: Synthetic oligonucleotide
  Sense strand starting at position 3290 of SEQ ID NO: 318368
agcuuuggagacgaguaau

SEQ ID NO: 557222 - RNA, 19 nt, Artificial Sequence
  Description of Artificial Sequence: Synthetic oligonucleotide
  Antisense strand to SEQ ID NO: 557221
auuacucgucuccaaagcu

SEQ ID NO: 557223 - RNA, 19 nt, Artificial Sequence
  Description of Artificial Sequence: Synthetic oligonucleotide
  Sense strand starting at position 3372 of SEQ ID NO: 318368
ugagaacugcccugaacag

SEQ ID NO: 557224 - RNA, 19 nt, Artificial Sequence
  Description of Artificial Sequence: Synthetic oligonucleotide
  Antisense strand to SEQ ID NO: 557223
cuguucagggcaguucuca

SEQ ID NO: 557225 - RNA, 19 nt, Artificial Sequence
  Description of Artificial Sequence: Synthetic oligonucleotide
  Sense strand starting at position 3503 of SEQ ID NO: 318368
ccaaauuucgcaugagcaa

SEQ ID NO: 557226 - RNA, 19 nt, Artificial Sequence
  Description of Artificial Sequence: Synthetic oligonucleotide
  Antisense strand to SEQ ID NO: 557225
uugcucaugcgaaauuugg

SEQ ID NO: 557227 - RNA, 19 nt, Artificial Sequence
  Description of Artificial Sequence: Synthetic oligonucleotide
  Sense strand starting at position 3688 of SEQ ID NO: 318368
agaguuagcacugagcuga

SEQ ID NO: 557228 - RNA, 19 nt, Artificial Sequence
  Description of Artificial Sequence: Synthetic oligonucleotide
  Antisense strand to SEQ ID NO: 557227
ucagcucagugcuaacucu

SEQ ID NO: 557229 - RNA, 19 nt, Artificial Sequence
  Description of Artificial Sequence: Synthetic oligonucleotide
  Sense strand starting at position 3708 of SEQ ID NO: 318368
caacuuggugcuuauuaga

SEQ ID NO: 557230 - RNA, 19 nt, Artificial Sequence
  Description of Artificial Sequence: Synthetic oligonucleotide
  Antisense strand to SEQ ID NO: 557229
ucuaauaagcaccaaguug

SEQ ID NO: 557231 - RNA, 19 nt, Artificial Sequence
  Description of Artificial Sequence: Synthetic oligonucleotide
  Sense strand starting at position 3756 of SEQ ID NO: 318368
guguaagauaacuggugau

SEQ ID NO: 557232 - RNA, 19 nt, Artificial Sequence
  Description of Artificial Sequence: Synthetic oligonucleotide
  Antisense strand to SEQ ID NO: 557231
aucaccaguuaucuuacac

SEQ ID NO: 557233 - RNA, 19 nt, Artificial Sequence
  Description of Artificial Sequence: Synthetic oligonucleotide
  Sense strand starting at position 3963 of SEQ ID NO: 318368
gugaaacagcaucacugau

SEQ ID NO: 557234 - RNA, 19 nt, Artificial Sequence
  Description of Artificial Sequence: Synthetic oligonucleotide
  Antisense strand to SEQ ID NO: 557233
aucagugaugcuguuucac

SEQ ID NO: 557235 - RNA, 19 nt, Artificial Sequence
  Description of Artificial Sequence: Synthetic oligonucleotide
  Sense strand starting at position 82 of SEQ ID NO: 318369
uaauuuauugcacguguua

SEQ ID NO: 557236 - RNA, 19 nt, Artificial Sequence
  Description of Artificial Sequence: Synthetic oligonucleotide
  Antisense strand to SEQ ID NO: 557235
uaacacgugcaauaaauua

SEQ ID NO: 557237 - RNA, 19 nt, Artificial Sequence
  Description of Artificial Sequence: Synthetic oligonucleotide
  Sense strand starting at position 255 of SEQ ID NO: 318369
agcuaaauuccugacgcaa

SEQ ID NO: 557238 - RNA, 19 nt, Artificial Sequence
  Description of Artificial Sequence: Synthetic oligonucleotide
  Antisense strand to SEQ ID NO: 557237
uugcgucaggaauuuagcu

SEQ ID NO: 557239 - RNA, 19 nt, Artificial Sequence
  Description of Artificial Sequence: Synthetic oligonucleotide
  Sense strand starting at position 280 of SEQ ID NO: 318369
ugaguauuuacaugugugu

SEQ ID NO: 557240 - RNA, 19 nt, Artificial Sequence
  Description of Artificial Sequence: Synthetic oligonucleotide
  Antisense strand to SEQ ID NO: 557239
acacacauguaaauacuca

SEQ ID NO: 557241 - RNA, 19 nt, Artificial Sequence
  Description of Artificial Sequence: Synthetic oligonucleotide
  Sense strand starting at position 282 of SEQ ID NO: 318369
aguauuuacauguguguuu

SEQ ID NO: 557242 - RNA, 19 nt, Artificial Sequence
  Description of Artificial Sequence: Synthetic oligonucleotide
  Antisense strand to SEQ ID NO: 557241
aaacacacauguaaauacu

SEQ ID NO: 557243 - RNA, 19 nt, Artificial Sequence
  Description of Artificial Sequence: Synthetic oligonucleotide
  Sense strand starting at position 293 of SEQ ID NO: 318369
guguguuugccugcucaca

SEQ ID NO: 557244 - RNA, 19 nt, Artificial Sequence
  Description of Artificial Sequence: Synthetic oligonucleotide
  Antisense strand to SEQ ID NO: 557243
ugugagcaggcaaacacac

SEQ ID NO: 557245 - RNA, 19 nt, Artificial Sequence
  Description of Artificial Sequence: Synthetic oligonucleotide
  Sense strand starting at position 294 of SEQ ID NO: 318369
uguguuugccugcucacau

SEQ ID NO: 557246 - RNA, 19 nt, Artificial Sequence
  Description of Artificial Sequence: Synthetic oligonucleotide
  Antisense strand to SEQ ID NO: 557245
augugagcaggcaaacaca

SEQ ID NO: 557247 - RNA, 19 nt, Artificial Sequence
  Description of Artificial Sequence: Synthetic oligonucleotide
  Sense strand starting at position 385 of SEQ ID NO: 318369
cccagugugagguaugauu

SEQ ID NO: 557248 - RNA, 19 nt, Artificial Sequence
  Description of Artificial Sequence: Synthetic oligonucleotide
  Antisense strand to SEQ ID NO: 557247
aaucauaccucacacuggg

SEQ ID NO: 557249 - RNA, 19 nt, Artificial Sequence
  Description of Artificial Sequence: Synthetic oligonucleotide
  Sense strand starting at position 559 of SEQ ID NO: 318369
ccauaugcugauuagcaua

SEQ ID NO: 557250 - RNA, 19 nt, Artificial Sequence
  Description of Artificial Sequence: Synthetic oligonucleotide
  Antisense strand to SEQ ID NO: 557249
uaugcuaaucagcauaugg

SEQ ID NO: 557251 - RNA, 19 nt, Artificial Sequence
  Description of Artificial Sequence: Synthetic oligonucleotide
  Sense strand starting at position 564 of SEQ ID NO: 318369
ugcugauuagcauaucaaa

SEQ ID NO: 557252 - RNA, 19 nt, Artificial Sequence
  Description of Artificial Sequence: Synthetic oligonucleotide
  Antisense strand to SEQ ID NO: 557251
uuugauaugcuaaucagca

SEQ ID NO: 557253 - RNA, 19 nt, Artificial Sequence
  Description of Artificial Sequence: Synthetic oligonucleotide
  Sense strand starting at position 1005 of SEQ ID NO: 318369
ucagauaaauuguuacagu

SEQ ID NO: 557254 - RNA, 19 nt, Artificial Sequence
  Description of Artificial Sequence: Synthetic oligonucleotide
  Antisense strand to SEQ ID NO: 557253
acuguaacaauuuaucuga

SEQ ID NO: 557255 - RNA, 19 nt, Artificial Sequence
  Description of Artificial Sequence: Synthetic oligonucleotide
  Sense strand starting at position 1057 of SEQ ID NO: 318369
uugguuaaagcacaugagu

SEQ ID NO: 557256 - RNA, 19 nt, Artificial Sequence
  Description of Artificial Sequence: Synthetic oligonucleotide
  Antisense strand to SEQ ID NO: 557255
acucaugugcuuuaaccaa

SEQ ID NO: 557257 - RNA, 19 nt, Artificial Sequence
  Description of Artificial Sequence: Synthetic oligonucleotide
  Sense strand starting at position 1159 of SEQ ID NO: 318369
caaggaguacgucaaucuu

SEQ ID NO: 557258 - RNA, 19 nt, Artificial Sequence
  Description of Artificial Sequence: Synthetic oligonucleotide
  Antisense strand to SEQ ID NO: 557257
aagauugacguacuccuug

SEQ ID NO: 557259 - RNA, 19 nt, Artificial Sequence
  Description of Artificial Sequence: Synthetic oligonucleotide
  Sense strand starting at position 1227 of SEQ ID NO: 318369
cucugcaguccuuagggaa

SEQ ID NO: 557260 - RNA, 19 nt, Artificial Sequence
  Description of Artificial Sequence: Synthetic oligonucleotide
  Antisense strand to SEQ ID NO: 557259
uucccuaaggacugcagag

SEQ ID NO: 557261 - RNA, 19 nt, Artificial Sequence
  Description of Artificial Sequence: Synthetic oligonucleotide
  Sense strand starting at position 1341 of SEQ ID NO: 318369
acugucuuucugcaaagaa

SEQ ID NO: 557262 - RNA, 19 nt, Artificial Sequence
  Description of Artificial Sequence: Synthetic oligonucleotide
  Antisense strand to SEQ ID NO: 557261
uucuuugcagaaagacagu

SEQ ID NO: 557263 - RNA, 19 nt, Artificial Sequence
  Description of Artificial Sequence: Synthetic oligonucleotide
  Sense strand starting at position 1610 of SEQ ID NO: 318369
gugaaagagucacuugauc

SEQ ID NO: 557264 - RNA, 19 nt, Artificial Sequence
  Description of Artificial Sequence: Synthetic oligonucleotide
  Antisense strand to SEQ ID NO: 557263
gaucaagugacucuuucac

SEQ ID NO: 557265 - RNA, 19 nt, Artificial Sequence
  Description of Artificial Sequence: Synthetic oligonucleotide
  Sense strand starting at position 1615 of SEQ ID NO: 318369
agagucacuugaucucuuu

SEQ ID NO: 557266 - RNA, 19 nt, Artificial Sequence
  Description of Artificial Sequence: Synthetic oligonucleotide
  Antisense strand to SEQ ID NO: 557265
aaagagaucaagugacucu

SEQ ID NO: 557267 - RNA, 19 nt, Artificial Sequence
  Description of Artificial Sequence: Synthetic oligonucleotide
  Sense strand starting at position 1733 of SEQ ID NO: 318369
gagagcugucaaggaaguu

SEQ ID NO: 557268 - RNA, 19 nt, Artificial Sequence
  Description of Artificial Sequence: Synthetic oligonucleotide
  Antisense strand to SEQ ID NO: 557267
aacuuccuugacagcucuc

SEQ ID NO: 557269 - RNA, 19 nt, Artificial Sequence
  Description of Artificial Sequence: Synthetic oligonucleotide
  Sense strand starting at position 1841 of SEQ ID NO: 318369
ggcugauuuaccugcgaaa

SEQ ID NO: 557270 - RNA, 19 nt, Artificial Sequence
  Description of Artificial Sequence: Synthetic oligonucleotide
  Antisense strand to SEQ ID NO: 557269
uuucgcagguaaaucagcc

SEQ ID NO: 557271 - RNA, 19 nt, Artificial Sequence
  Description of Artificial Sequence: Synthetic oligonucleotide
  Sense strand starting at position 1843 of SEQ ID NO: 318369
cugauuuaccugcgaaagu

SEQ ID NO: 557272 - RNA, 19 nt, Artificial Sequence
  Description of Artificial Sequence: Synthetic oligonucleotide
  Antisense strand to SEQ ID NO: 557271
acuuucgcagguaaaucag

SEQ ID NO: 557273 - RNA, 19 nt, Artificial Sequence
  Description of Artificial Sequence: Synthetic oligonucleotide
  Sense strand starting at position 1852 of SEQ ID NO: 318369
cugcgaaaguaauuucugu

SEQ ID NO: 557274 - RNA, 19 nt, Artificial Sequence
  Description of Artificial Sequence: Synthetic oligonucleotide
  Antisense strand to SEQ ID NO: 557273
acagaaauuacuuucgcag

SEQ ID NO: 557275 - RNA, 19 nt, Artificial Sequence
  Description of Artificial Sequence: Synthetic oligonucleotide
  Sense strand starting at position 1857 of SEQ ID NO: 318369
aaaguaauuucuguguguc

SEQ ID NO: 557276 - RNA, 19 nt, Artificial Sequence
  Description of Artificial Sequence: Synthetic oligonucleotide
  Antisense strand to SEQ ID NO: 557275
gacacacagaaauuacuuu

SEQ ID NO: 557277 - RNA, 19 nt, Artificial Sequence
  Description of Artificial Sequence: Synthetic oligonucleotide
  Sense strand starting at position 1928 of SEQ ID NO: 318369
ggcagaaacuauuccucaa

SEQ ID NO: 557278 - RNA, 19 nt, Artificial Sequence
  Description of Artificial Sequence: Synthetic oligonucleotide
  Antisense strand to SEQ ID NO: 557277
uugaggaauaguuucugcc

SEQ ID NO: 557279 - RNA, 19 nt, Artificial Sequence
  Description of Artificial Sequence: Synthetic oligonucleotide
  Sense strand starting at position 1952 of SEQ ID NO: 318369
guaugacgucuguaagaag

SEQ ID NO: 557280 - RNA, 19 nt, Artificial Sequence
  Description of Artificial Sequence: Synthetic oligonucleotide
  Antisense strand to SEQ ID NO: 557279
cuucuuacagacgucauac

SEQ ID NO: 557281 - RNA, 19 nt, Artificial Sequence
  Description of Artificial Sequence: Synthetic oligonucleotide
  Sense strand starting at position 2165 of SEQ ID NO: 318369
ugggaaaugagaugucugu

SEQ ID NO: 557282 - RNA, 19 nt, Artificial Sequence
  Description of Artificial Sequence: Synthetic oligonucleotide
  Antisense strand to SEQ ID NO: 557281
acagacaucucauuuccca

SEQ ID NO: 557283 - RNA, 19 nt, Artificial Sequence
  Description of Artificial Sequence: Synthetic oligonucleotide
  Sense strand starting at position 2183 of SEQ ID NO: 318369
uguuauucuggguaacauu

SEQ ID NO: 557284 - RNA, 19 nt, Artificial Sequence
  Description of Artificial Sequence: Synthetic oligonucleotide
  Antisense strand to SEQ ID NO: 557283
aauguuacccagaauaaca

SEQ ID NO: 557285 - RNA, 19 nt, Artificial Sequence
  Description of Artificial Sequence: Synthetic oligonucleotide
  Sense strand starting at position 2194 of SEQ ID NO: 318369
guaacauuccgugaucacc

SEQ ID NO: 557286 - RNA, 19 nt, Artificial Sequence
  Description of Artificial Sequence: Synthetic oligonucleotide
  Antisense strand to SEQ ID NO: 557285
ggugaucacggaauguuac

SEQ ID NO: 557287 - RNA, 19 nt, Artificial Sequence
  Description of Artificial Sequence: Synthetic oligonucleotide
  Sense strand starting at position 2234 of SEQ ID NO: 318369
gccauuaaguuguuuauuu

SEQ ID NO: 557288 - RNA, 19 nt, Artificial Sequence
  Description of Artificial Sequence: Synthetic oligonucleotide
  Antisense strand to SEQ ID NO: 557287
aaauaaacaacuuaauggc

SEQ ID NO: 557289 - RNA, 19 nt, Artificial Sequence
  Description of Artificial Sequence: Synthetic oligonucleotide
  Sense strand starting at position 2384 of SEQ ID NO: 318369
agcggauguaaugaaaugu

SEQ ID NO: 557290 - RNA, 19 nt, Artificial Sequence
  Description of Artificial Sequence: Synthetic oligonucleotide
  Antisense strand to SEQ ID NO: 557289
acauuucauuacauccgcu

SEQ ID NO: 557291 - RNA, 19 nt, Artificial Sequence
  Description of Artificial Sequence: Synthetic oligonucleotide
  Sense strand starting at position 2414 of SEQ ID NO: 318369
guugguuguagagauguaa

SEQ ID NO: 557292 - RNA, 19 nt, Artificial Sequence
  Description of Artificial Sequence: Synthetic oligonucleotide
  Antisense strand to SEQ ID NO: 557291
uuacaucucuacaaccaac

SEQ ID NO: 557293 - RNA, 19 nt, Artificial Sequence
  Description of Artificial Sequence: Synthetic oligonucleotide
  Sense strand starting at position 2418 of SEQ ID NO: 318369
guuguagagauguaaauua

SEQ ID NO: 557294 - RNA, 19 nt, Artificial Sequence
  Description of Artificial Sequence: Synthetic oligonucleotide
  Antisense strand to SEQ ID NO: 557293
uaauuuacaucucuacaac

SEQ ID NO: 557295 - RNA, 19 nt, Artificial Sequence
  Description of Artificial Sequence: Synthetic oligonucleotide
  Sense strand starting at position 2513 of SEQ ID NO: 318369
uguauuauuccuggacaag

SEQ ID NO: 557296 - RNA, 19 nt, Artificial Sequence
  Description of Artificial Sequence: Synthetic oligonucleotide
  Antisense strand to SEQ ID NO: 557295
cuuguccaggaauaauaca

SEQ ID NO: 557297 - RNA, 19 nt, Artificial Sequence
  Description of Artificial Sequence: Synthetic oligonucleotide
  Sense strand starting at position 2514 of SEQ ID NO: 318369
guauuauuccuggacaagu

SEQ ID NO: 557298 - RNA, 19 nt, Artificial Sequence
  Description of Artificial Sequence: Synthetic oligonucleotide
  Antisense strand to SEQ ID NO: 557297
acuuguccaggaauaauac

SEQ ID NO: 557299 - RNA, 19 nt, Artificial Sequence
  Description of Artificial Sequence: Synthetic oligonucleotide
  Sense strand starting at position 2843 of SEQ ID NO: 318369
gauauauacuccucugggu

SEQ ID NO: 557300 - RNA, 19 nt, Artificial Sequence
  Description of Artificial Sequence: Synthetic oligonucleotide
  Antisense strand to SEQ ID NO: 557299
acccagaggaguauauauc

SEQ ID NO: 557301 - RNA, 19 nt, Artificial Sequence
  Description of Artificial Sequence: Synthetic oligonucleotide
  Sense strand starting at position 2971 of SEQ ID NO: 318369
cuugguguuuauuuagcau

SEQ ID NO: 557302 - RNA, 19 nt, Artificial Sequence
  Description of Artificial Sequence: Synthetic oligonucleotide
  Antisense strand to SEQ ID NO: 557301
augcuaaauaaacaccaag

SEQ ID NO: 557303 - RNA, 19 nt, Artificial Sequence
  Description of Artificial Sequence: Synthetic oligonucleotide
  Sense strand starting at position 3121 of SEQ ID NO: 318369
gugcauuugugacuuaguc

SEQ ID NO: 557304 - RNA, 19 nt, Artificial Sequence
  Description of Artificial Sequence: Synthetic oligonucleotide
  Antisense strand to SEQ ID NO: 557303
gacuaagucacaaaugcac

SEQ ID NO: 557305 - RNA, 19 nt, Artificial Sequence
  Description of Artificial Sequence: Synthetic oligonucleotide
  Sense strand starting at position 3273 of SEQ ID NO: 318369
uaguauauugcuggcauuu

SEQ ID NO: 557306 - RNA, 19 nt, Artificial Sequence
  Description of Artificial Sequence: Synthetic oligonucleotide
  Antisense strand to SEQ ID NO: 557305
aaaugccagcaauauacua

SEQ ID NO: 557307 - RNA, 19 nt, Artificial Sequence
  Description of Artificial Sequence: Synthetic oligonucleotide
  Sense strand starting at position 3486 of SEQ ID NO: 318369
ccauguaaggucuaccaaa

SEQ ID NO: 557308 - RNA, 19 nt, Artificial Sequence
  Description of Artificial Sequence: Synthetic oligonucleotide
  Antisense strand to SEQ ID NO: 557307
uuugguagaccuuacaugg

SEQ ID NO: 557309 - RNA, 19 nt, Artificial Sequence
  Description of Artificial Sequence: Synthetic oligonucleotide
  Sense strand starting at position 3632 of SEQ ID NO: 318369
ugagcuuauuuagccugau

SEQ ID NO: 557310 - RNA, 19 nt, Artificial Sequence
  Description of Artificial Sequence: Synthetic oligonucleotide
  Antisense strand to SEQ ID NO: 557309
aucaggcuaaauaagcuca

SEQ ID NO: 557311 - RNA, 19 nt, Artificial Sequence
  Description of Artificial Sequence: Synthetic oligonucleotide
  Sense strand starting at position 3635 of SEQ ID NO: 318369
gcuuauuuagccugaugcu

SEQ ID NO: 557312 - RNA, 19 nt, Artificial Sequence
  Description of Artificial Sequence: Synthetic oligonucleotide
  Antisense strand to SEQ ID NO: 557311
agcaucaggcuaaauaagc

SEQ ID NO: 557313 - RNA, 19 nt, Artificial Sequence
  Description of Artificial Sequence: Synthetic oligonucleotide
  Sense strand starting at position 3949 of SEQ ID NO: 318369
uuguaagaccauugagauu

SEQ ID NO: 557314 - RNA, 19 nt, Artificial Sequence
  Description of Artificial Sequence: Synthetic oligonucleotide
  Antisense strand to SEQ ID NO: 557313
aaucucaauggucuuacaa

SEQ ID NO: 557315 - RNA, 19 nt, Artificial Sequence
  Description of Artificial Sequence: Synthetic oligonucleotide
  Sense strand starting at position 18 of SEQ ID NO: 318370
gucccaguaagagagcaau

SEQ ID NO: 557316 - RNA, 19 nt, Artificial Sequence
  Description of Artificial Sequence: Synthetic oligonucleotide
  Antisense strand to SEQ ID NO: 557315
auugcucucuuacugggac

SEQ ID NO: 557317 - RNA, 19 nt, Artificial Sequence
  Description of Artificial Sequence: Synthetic oligonucleotide
  Sense strand starting at position 30 of SEQ ID NO: 318370
gagcaauaauuggucauuc

SEQ ID NO: 557318 - RNA, 19 nt, Artificial Sequence
  Description of Artificial Sequence: Synthetic oligonucleotide
  Antisense strand to SEQ ID NO: 557317
gaaugaccaauuauugcuc

SEQ ID NO: 557319 - RNA, 19 nt, Artificial Sequence
  Description of Artificial Sequence: Synthetic oligonucleotide
  Sense strand starting at position 97 of SEQ ID NO: 318370
aauugaucaucagugugga

SEQ ID NO: 557320 - RNA, 19 nt, Artificial Sequence
  Description of Artificial Sequence: Synthetic oligonucleotide
  Antisense strand to SEQ ID NO: 557319
uccacacugaugaucaauu

SEQ ID NO: 557321 - RNA, 19 nt, Artificial Sequence
  Description of Artificial Sequence: Synthetic oligonucleotide
  Sense strand starting at position 100 of SEQ ID NO: 318370
ugaucaucaguguggacau

SEQ ID NO: 557322 - RNA, 19 nt, Artificial Sequence
  Description of Artificial Sequence: Synthetic oligonucleotide
  Antisense strand to SEQ ID NO: 557321
auguccacacugaugauca

SEQ ID NO: 557323 - RNA, 19 nt, Artificial Sequence
  Description of Artificial Sequence: Synthetic oligonucleotide
  Sense strand starting at position 130 of SEQ ID NO: 318370
ugugcauauggguagguua

SEQ ID NO: 557324 - RNA, 19 nt, Artificial Sequence
  Description of Artificial Sequence: Synthetic oligonucleotide
  Antisense strand to SEQ ID NO: 557323
uaaccuacccauaugcaca

SEQ ID NO: 557325 - RNA, 19 nt, Artificial Sequence
  Description of Artificial Sequence: Synthetic oligonucleotide
  Sense strand starting at position 493 of SEQ ID NO: 318370
cagccaucugcauacgaca

SEQ ID NO: 557326 - RNA, 19 nt, Artificial Sequence
  Description of Artificial Sequence: Synthetic oligonucleotide
  Antisense strand to SEQ ID NO: 557325
ugucguaugcagauggcug

SEQ ID NO: 557327 - RNA, 19 nt, Artificial Sequence
  Description of Artificial Sequence: Synthetic oligonucleotide
  Sense strand starting at position 657 of SEQ ID NO: 318370
ggcugaagguuacuucuca

SEQ ID NO: 557328 - RNA, 19 nt, Artificial Sequence
  Description of Artificial Sequence: Synthetic oligonucleotide
  Antisense strand to SEQ ID NO: 557327
ugagaaguaaccuucagcc

SEQ ID NO: 557329 - RNA, 19 nt, Artificial Sequence
  Description of Artificial Sequence: Synthetic oligonucleotide
  Sense strand starting at position 723 of SEQ ID NO: 318370
ggcacagaugccuaguuga

SEQ ID NO: 557330 - RNA, 19 nt, Artificial Sequence
  Description of Artificial Sequence: Synthetic oligonucleotide
  Antisense strand to SEQ ID NO: 557329
ucaacuaggcaucugugcc

SEQ ID NO: 557331 - RNA, 19 nt, Artificial Sequence
  Description of Artificial Sequence: Synthetic oligonucleotide
  Sense strand starting at position 911 of SEQ ID NO: 318370
gaugaauuagggugaaggu

SEQ ID NO: 557332 - RNA, 19 nt, Artificial Sequence
  Description of Artificial Sequence: Synthetic oligonucleotide
  Antisense strand to SEQ ID NO: 557331
accuucacccuaauucauc

SEQ ID NO: 557333 - RNA, 19 nt, Artificial Sequence
  Description of Artificial Sequence: Synthetic oligonucleotide
  Sense strand starting at position 942 of SEQ ID NO: 318370
gaacucuucugaguuugag

SEQ ID NO: 557334 - RNA, 19 nt, Artificial Sequence
  Description of Artificial Sequence: Synthetic oligonucleotide
  Antisense strand to SEQ ID NO: 557333
cucaaacucagaagaguuc

SEQ ID NO: 557335 - RNA, 19 nt, Artificial Sequence
  Description of Artificial Sequence: Synthetic oligonucleotide
  Sense strand starting at position 1085 of SEQ ID NO: 318370
ggcucaguguuacuuagga

SEQ ID NO: 557336 - RNA, 19 nt, Artificial Sequence
  Description of Artificial Sequence: Synthetic oligonucleotide
  Antisense strand to SEQ ID NO: 557335
uccuaaguaacacugagcc

SEQ ID NO: 557337 - RNA, 19 nt, Artificial Sequence
  Description of Artificial Sequence: Synthetic oligonucleotide
  Sense strand starting at position 1108 of SEQ ID NO: 318370
ugugucuugggagauacuu

SEQ ID NO: 557338 - RNA, 19 nt, Artificial Sequence
  Description of Artificial Sequence: Synthetic oligonucleotide
  Antisense strand to SEQ ID NO: 557337
aaguaucucccaagacaca

SEQ ID NO: 557339 - RNA, 19 nt, Artificial Sequence
  Description of Artificial Sequence: Synthetic oligonucleotide
  Sense strand starting at position 1508 of SEQ ID NO: 318370
guccgcuagcgaguucaaa

SEQ ID NO: 557340 - RNA, 19 nt, Artificial Sequence
  Description of Artificial Sequence: Synthetic oligonucleotide
  Antisense strand to SEQ ID NO: 557339
uuugaacucgcuagcggac

SEQ ID NO: 557341 - RNA, 19 nt, Artificial Sequence
  Description of Artificial Sequence: Synthetic oligonucleotide
  Sense strand starting at position 1952 of SEQ ID NO: 318370
cggcacuugaagugaauga

SEQ ID NO: 557342 - RNA, 19 nt, Artificial Sequence
  Description of Artificial Sequence: Synthetic oligonucleotide
  Antisense strand to SEQ ID NO: 557341
ucauucacuucaagugccg

SEQ ID NO: 557343 - RNA, 19 nt, Artificial Sequence
  Description of Artificial Sequence: Synthetic oligonucleotide
  Sense strand starting at position 2058 of SEQ ID NO: 318370
gcagcuuuccgggaacacu

SEQ ID NO: 557344 - RNA, 19 nt, Artificial Sequence
  Description of Artificial Sequence: Synthetic oligonucleotide
  Antisense strand to SEQ ID NO: 557343
aguguucccggaaagcugc

SEQ ID NO: 557345 - RNA, 19 nt, Artificial Sequence
  Description of Artificial Sequence: Synthetic oligonucleotide
  Sense strand starting at position 2252 of SEQ ID NO: 318370
gcgccacucgcuuugaagu

SEQ ID NO: 557346 - RNA, 19 nt, Artificial Sequence
  Description of Artificial Sequence: Synthetic oligonucleotide
  Antisense strand to SEQ ID NO: 557345
acuucaaagcgaguggcgc

SEQ ID NO: 557347 - RNA, 19 nt, Artificial Sequence
  Description of Artificial Sequence: Synthetic oligonucleotide
  Sense strand starting at position 2320 of SEQ ID NO: 318370
gggacugucugugcuagga

SEQ ID NO: 557348 - RNA, 19 nt, Artificial Sequence
  Description of Artificial Sequence: Synthetic oligonucleotide
  Antisense strand to SEQ ID NO: 557347
uccuagcacagacaguccc

SEQ ID NO: 557349 - RNA, 19 nt, Artificial Sequence
  Description of Artificial Sequence: Synthetic oligonucleotide
  Sense strand starting at position 2439 of SEQ ID NO: 318370
cgcaccugucucgcuagaa

SEQ ID NO: 557350 - RNA, 19 nt, Artificial Sequence
  Description of Artificial Sequence: Synthetic oligonucleotide
  Antisense strand to SEQ ID NO: 557349
uucuagcgagacaggugcg

SEQ ID NO: 557351 - RNA, 19 nt, Artificial Sequence
  Description of Artificial Sequence: Synthetic oligonucleotide
  Sense strand starting at position 2575 of SEQ ID NO: 318370
aagguuucugaggguuuaa

SEQ ID NO: 557352 - RNA, 19 nt, Artificial Sequence
  Description of Artificial Sequence: Synthetic oligonucleotide
  Antisense strand to SEQ ID NO: 557351
uuaaacccucagaaaccuu

SEQ ID NO: 557353 - RNA, 19 nt, Artificial Sequence
  Description of Artificial Sequence: Synthetic oligonucleotide
  Sense strand starting at position 2617 of SEQ ID NO: 318370
uuucuaaaggcuuaggauu

SEQ ID NO: 557354 - RNA, 19 nt, Artificial Sequence
  Description of Artificial Sequence: Synthetic oligonucleotide
  Antisense strand to SEQ ID NO: 557353
aauccuaagccuuuagaaa

SEQ ID NO: 557355 - RNA, 19 nt, Artificial Sequence
  Description of Artificial Sequence: Synthetic oligonucleotide
  Sense strand starting at position 2651 of SEQ ID NO: 318370
ggcaggguugugggaauua

SEQ ID NO: 557356 - RNA, 19 nt, Artificial Sequence
  Description of Artificial Sequence: Synthetic oligonucleotide
  Antisense strand to SEQ ID NO: 557355
uaauucccacaacccugcc

SEQ ID NO: 557357 - RNA, 19 nt, Artificial Sequence
  Description of Artificial Sequence: Synthetic oligonucleotide
  Sense strand starting at position 2772 of SEQ ID NO: 318370
gucggaacgcuuuauaauu

SEQ ID NO: 557358 - RNA, 19 nt, Artificial Sequence
  Description of Artificial Sequence: Synthetic oligonucleotide
  Antisense strand to SEQ ID NO: 557357
aauuauaaagcguuccgac

SEQ ID NO: 557359 - RNA, 19 nt, Artificial Sequence
  Description of Artificial Sequence: Synthetic oligonucleotide
  Sense strand starting at position 2822 of SEQ ID NO: 318370
ugccgaauugccuaagagu

SEQ ID NO: 557360 - RNA, 19 nt, Artificial Sequence
  Description of Artificial Sequence: Synthetic oligonucleotide
  Antisense strand to SEQ ID NO: 557359
acucuuaggcaauucggca

SEQ ID NO: 557361 - RNA, 19 nt, Artificial Sequence
  Description of Artificial Sequence: Synthetic oligonucleotide
  Sense strand starting at position 2831 of SEQ ID NO: 318370
gccuaagaguucucuuaaa

SEQ ID NO: 557362 - RNA, 19 nt, Artificial Sequence
  Description of Artificial Sequence: Synthetic oligonucleotide
  Antisense strand to SEQ ID NO: 557361
uuuaagagaacucuuaggc

SEQ ID NO: 557363 - RNA, 19 nt, Artificial Sequence
  Description of Artificial Sequence: Synthetic oligonucleotide
  Sense strand starting at position 2937 of SEQ ID NO: 318370
cuagaugaucuugggccaa

SEQ ID NO: 557364 - RNA, 19 nt, Artificial Sequence
  Description of Artificial Sequence: Synthetic oligonucleotide
  Antisense strand to SEQ ID NO: 557363
uuggcccaagaucaucuag

SEQ ID NO: 557365 - RNA, 19 nt, Artificial Sequence
  Description of Artificial Sequence: Synthetic oligonucleotide
  Sense strand starting at position 2972 of SEQ ID NO: 318370
ggguguuucuacccaccau

SEQ ID NO: 557366 - RNA, 19 nt, Artificial Sequence
  Description of Artificial Sequence: Synthetic oligonucleotide
  Antisense strand to SEQ ID NO: 557365
augguggguagaaacaccc

SEQ ID NO: 557367 - RNA, 19 nt, Artificial Sequence
  Description of Artificial Sequence: Synthetic oligonucleotide
  Sense strand starting at position 2992 of SEQ ID NO: 318370
ugcagaguacacuacaauu

SEQ ID NO: 557368 - RNA, 19 nt, Artificial Sequence
  Description of Artificial Sequence: Synthetic oligonucleotide
  Antisense strand to SEQ ID NO: 557367
aauuguaguguacucugca

SEQ ID NO: 557369 - RNA, 19 nt, Artificial Sequence
  Description of Artificial Sequence: Synthetic oligonucleotide
  Sense strand starting at position 3052 of SEQ ID NO: 318370
gccuguucuguuuacaaag

SEQ ID NO: 557370 - RNA, 19 nt, Artificial Sequence
  Description of Artificial Sequence: Synthetic oligonucleotide
  Antisense strand to SEQ ID NO: 557369
cuuuguaaacagaacaggc

SEQ ID NO: 557371 - RNA, 19 nt, Artificial Sequence
  Description of Artificial Sequence: Synthetic oligonucleotide
  Sense strand starting at position 3106 of SEQ ID NO: 318370
agaucaguugugggagaac

SEQ ID NO: 557372 - RNA, 19 nt, Artificial Sequence
  Description of Artificial Sequence: Synthetic oligonucleotide
  Antisense strand to SEQ ID NO: 557371
guucucccacaacugaucu

SEQ ID NO: 557373 - RNA, 19 nt, Artificial Sequence
  Description of Artificial Sequence: Synthetic oligonucleotide
  Sense strand starting at position 3109 of SEQ ID NO: 318370
ucaguugugggagaacuuu

SEQ ID NO: 557374 - RNA, 19 nt, Artificial Sequence
  Description of Artificial Sequence: Synthetic oligonucleotide
  Antisense strand to SEQ ID NO: 557373
aaaguucucccacaacuga

SEQ ID NO: 557375 - RNA, 19 nt, Artificial Sequence
  Description of Artificial Sequence: Synthetic oligonucleotide
  Sense strand starting at position 3206 of SEQ ID NO: 318370
gucauugucgaguggaaag

SEQ ID NO: 557376 - RNA, 19 nt, Artificial Sequence
  Description of Artificial Sequence: Synthetic oligonucleotide
  Antisense strand to SEQ ID NO: 557375
cuuuccacucgacaaugac

SEQ ID NO: 557377 - RNA, 19 nt, Artificial Sequence
  Description of Artificial Sequence: Synthetic oligonucleotide
  Sense strand starting at position 3208 of SEQ ID NO: 318370
cauugucgaguggaaagaa

SEQ ID NO: 557378 - RNA, 19 nt, Artificial Sequence
  Description of Artificial Sequence: Synthetic oligonucleotide
  Antisense strand to SEQ ID NO: 557377
uucuuuccacucgacaaug

SEQ ID NO: 557379 - RNA, 19 nt, Artificial Sequence
  Description of Artificial Sequence: Synthetic oligonucleotide
  Sense strand starting at position 3223 of SEQ ID NO: 318370
agaagauacugagaaacuu

SEQ ID NO: 557380 - RNA, 19 nt, Artificial Sequence
  Description of Artificial Sequence: Synthetic oligonucleotide
  Antisense strand to SEQ ID NO: 557379
aaguuucucaguaucuucu

SEQ ID NO: 557381 - RNA, 19 nt, Artificial Sequence
  Description of Artificial Sequence: Synthetic oligonucleotide
  Sense strand starting at position 3495 of SEQ ID NO: 318370
cacuuugaguacucuaggu

SEQ ID NO: 557382 - RNA, 19 nt, Artificial Sequence
  Description of Artificial Sequence: Synthetic oligonucleotide
  Antisense strand to SEQ ID NO: 557381
accuagaguacucaaagug

SEQ ID NO: 557383 - RNA, 19 nt, Artificial Sequence
  Description of Artificial Sequence: Synthetic oligonucleotide
  Sense strand starting at position 3497 of SEQ ID NO: 318370
cuuugaguacucuagguua

SEQ ID NO: 557384 - RNA, 19 nt, Artificial Sequence
  Description of Artificial Sequence: Synthetic oligonucleotide
  Antisense strand to SEQ ID NO: 557383
uaaccuagaguacucaaag

SEQ ID NO: 557385 - RNA, 19 nt, Artificial Sequence
  Description of Artificial Sequence: Synthetic oligonucleotide
  Sense strand starting at position 3499 of SEQ ID NO: 318370
uugaguacucuagguuaaa

SEQ ID NO: 557386 - RNA, 19 nt, Artificial Sequence
  Description of Artificial Sequence: Synthetic oligonucleotide
  Antisense strand to SEQ ID NO: 557385
uuuaaccuagaguacucaa

SEQ ID NO: 557387 - RNA, 19 nt, Artificial Sequence
  Description of Artificial Sequence: Synthetic oligonucleotide
  Sense strand starting at position 3595 of SEQ ID NO: 318370
uaaaccuugccaggugaau

SEQ ID NO: 557388 - RNA, 19 nt, Artificial Sequence
  Description of Artificial Sequence: Synthetic oligonucleotide
  Antisense strand to SEQ ID NO: 557387
auucaccuggcaagguuua

SEQ ID NO: 557389 - RNA, 19 nt, Artificial Sequence
  Description of Artificial Sequence: Synthetic oligonucleotide
  Sense strand starting at position 3827 of SEQ ID NO: 318370
cgccuauggcucuaacaca

SEQ ID NO: 557390 - RNA, 19 nt, Artificial Sequence
  Description of Artificial Sequence: Synthetic oligonucleotide
  Antisense strand to SEQ ID NO: 557389
uguguuagagccauaggcg

SEQ ID NO: 557391 - RNA, 19 nt, Artificial Sequence
  Description of Artificial Sequence: Synthetic oligonucleotide
  Sense strand starting at position 3909 of SEQ ID NO: 318370
gugcaucuacuauaugguu

SEQ ID NO: 557392 - RNA, 19 nt, Artificial Sequence
  Description of Artificial Sequence: Synthetic oligonucleotide
  Antisense strand to SEQ ID NO: 557391
aaccauauaguagaugcac

SEQ ID NO: 557393 - RNA, 19 nt, Artificial Sequence
  Description of Artificial Sequence: Synthetic oligonucleotide
  Sense strand starting at position 3966 of SEQ ID NO: 318370
auaggaauguaggaaauuu

SEQ ID NO: 557394 - RNA, 19 nt, Artificial Sequence
  Description of Artificial Sequence: Synthetic oligonucleotide
  Antisense strand to SEQ ID NO: 557393
aaauuuccuacauuccuau

SEQ ID NO: 557395 - RNA, 19 nt, Artificial Sequence
  Description of Artificial Sequence: Synthetic oligonucleotide
  Sense strand starting at position 39 of SEQ ID NO: 318371
gugguauggguccaauagu

SEQ ID NO: 557396 - RNA, 19 nt, Artificial Sequence
  Description of Artificial Sequence: Synthetic oligonucleotide
  Antisense strand to SEQ ID NO: 557395
acuauuggacccauaccac

SEQ ID NO: 557397 - RNA, 19 nt, Artificial Sequence
  Description of Artificial Sequence: Synthetic oligonucleotide
  Sense strand starting at position 128 of SEQ ID NO: 318371
auuacaaguuugguagaua

SEQ ID NO: 557398 - RNA, 19 nt, Artificial Sequence
  Description of Artificial Sequence: Synthetic oligonucleotide
  Antisense strand to SEQ ID NO: 557397
uaucuaccaaacuuguaau

SEQ ID NO: 557399 - RNA, 19 nt, Artificial Sequence
  Description of Artificial Sequence: Synthetic oligonucleotide
  Sense strand starting at position 271 of SEQ ID NO: 318371
acauaaagcuguccaggaa

SEQ ID NO: 557400 - RNA, 19 nt, Artificial Sequence
  Description of Artificial Sequence: Synthetic oligonucleotide
  Antisense strand to SEQ ID NO: 557399
uuccuggacagcuuuaugu

SEQ ID NO: 557401 - RNA, 19 nt, Artificial Sequence
  Description of Artificial Sequence: Synthetic oligonucleotide
  Sense strand starting at position 324 of SEQ ID NO: 318371
auauguagauucuuggcaa

SEQ ID NO: 557402 - RNA, 19 nt, Artificial Sequence
  Description of Artificial Sequence: Synthetic oligonucleotide
  Antisense strand to SEQ ID NO: 557401
uugccaagaaucuacauau

SEQ ID NO: 557403 - RNA, 19 nt, Artificial Sequence
  Description of Artificial Sequence: Synthetic oligonucleotide
  Sense strand starting at position 331 of SEQ ID NO: 318371
gauucuuggcaauauuguu

SEQ ID NO: 557404 - RNA, 19 nt, Artificial Sequence
  Description of Artificial Sequence: Synthetic oligonucleotide
  Antisense strand to SEQ ID NO: 557403
aacaauauugccaagaauc

SEQ ID NO: 557405 - RNA, 19 nt, Artificial Sequence
  Description of Artificial Sequence: Synthetic oligonucleotide
  Sense strand starting at position 441 of SEQ ID NO: 318371
cugaauucuggcggauaau

SEQ ID NO: 557406 - RNA, 19 nt, Artificial Sequence
  Description of Artificial Sequence: Synthetic oligonucleotide
  Antisense strand to SEQ ID NO: 557405
auuauccgccagaauucag

SEQ ID NO: 557407 - RNA, 19 nt, Artificial Sequence
  Description of Artificial Sequence: Synthetic oligonucleotide
  Sense strand starting at position 442 of SEQ ID NO: 318371
ugaauucuggcggauaaug

SEQ ID NO: 557408 - RNA, 19 nt, Artificial Sequence
  Description of Artificial Sequence: Synthetic oligonucleotide
  Antisense strand to SEQ ID NO: 557407
cauuauccgccagaauuca

SEQ ID NO: 557409 - RNA, 19 nt, Artificial Sequence
  Description of Artificial Sequence: Synthetic oligonucleotide
  Sense strand starting at position 810 of SEQ ID NO: 318371
aagcgaguggcucaaauac

SEQ ID NO: 557410 - RNA, 19 nt, Artificial Sequence
  Description of Artificial Sequence: Synthetic oligonucleotide
  Antisense strand to SEQ ID NO: 557409
guauuugagccacucgcuu

SEQ ID NO: 557411 - RNA, 19 nt, Artificial Sequence
  Description of Artificial Sequence: Synthetic oligonucleotide
  Sense strand starting at position 897 of SEQ ID NO: 318371
acaggaucacaaugcuaau

SEQ ID NO: 557412 - RNA, 19 nt, Artificial Sequence
  Description of Artificial Sequence: Synthetic oligonucleotide
  Antisense strand to SEQ ID NO: 557411
auuagcauugugauccugu

SEQ ID NO: 557413 - RNA, 19 nt, Artificial Sequence
  Description of Artificial Sequence: Synthetic oligonucleotide
  Sense strand starting at position 1067 of SEQ ID NO: 318371
ucacuuacauaguuaagua

SEQ ID NO: 557414 - RNA, 19 nt, Artificial Sequence
  Description of Artificial Sequence: Synthetic oligonucleotide
  Antisense strand to SEQ ID NO: 557413
uacuuaacuauguaaguga

SEQ ID NO: 557415 - RNA, 19 nt, Artificial Sequence
  Description of Artificial Sequence: Synthetic oligonucleotide
  Sense strand starting at position 1109 of SEQ ID NO: 318371
gggcuuuauagcuaaaggu

SEQ ID NO: 557416 - RNA, 19 nt, Artificial Sequence
  Description of Artificial Sequence: Synthetic oligonucleotide
  Antisense strand to SEQ ID NO: 557415
accuuuagcuauaaagccc

SEQ ID NO: 557417 - RNA, 19 nt, Artificial Sequence
  Description of Artificial Sequence: Synthetic oligonucleotide
  Sense strand starting at position 1208 of SEQ ID NO: 318371
gcaacauacuaacuggaau

SEQ ID NO: 557418 - RNA, 19 nt, Artificial Sequence
  Description of Artificial Sequence: Synthetic oligonucleotide
  Antisense strand to SEQ ID NO: 557417
auuccaguuaguauguugc

SEQ ID NO: 557419 - RNA, 19 nt, Artificial Sequence
  Description of Artificial Sequence: Synthetic oligonucleotide
  Sense strand starting at position 1336 of SEQ ID NO: 318371
agaacuacugcguaucuaa

SEQ ID NO: 557420 - RNA, 19 nt, Artificial Sequence
  Description of Artificial Sequence: Synthetic oligonucleotide
  Antisense strand to SEQ ID NO: 557419
uuagauacgcaguaguucu

SEQ ID NO: 557421 - RNA, 19 nt, Artificial Sequence
  Description of Artificial Sequence: Synthetic oligonucleotide
  Sense strand starting at position 1421 of SEQ ID NO: 318371
acacguauuucuuccuagu

SEQ ID NO: 557422 - RNA, 19 nt, Artificial Sequence
  Description of Artificial Sequence: Synthetic oligonucleotide
  Antisense strand to SEQ ID NO: 557421
acuaggaagaaauacgugu

SEQ ID NO: 557423 - RNA, 19 nt, Artificial Sequence
  Description of Artificial Sequence: Synthetic oligonucleotide
  Sense strand starting at position 1483 of SEQ ID NO: 318371
uacaguagagucuaagcuu

SEQ ID NO: 557424 - RNA, 19 nt, Artificial Sequence
  Description of Artificial Sequence: Synthetic oligonucleotide
  Antisense strand to SEQ ID NO: 557423
aagcuuagacucuacugua

SEQ ID NO: 557425 - RNA, 19 nt, Artificial Sequence
  Description of Artificial Sequence: Synthetic oligonucleotide
  Sense strand starting at position 1862 of SEQ ID NO: 318371
ccacgugauaaaggaauau

SEQ ID NO: 557426 - RNA, 19 nt, Artificial Sequence
  Description of Artificial Sequence: Synthetic oligonucleotide
  Antisense strand to SEQ ID NO: 557425
auauuccuuuaucacgugg

SEQ ID NO: 557427 - RNA, 19 nt, Artificial Sequence
  Description of Artificial Sequence: Synthetic oligonucleotide
  Sense strand starting at position 1915 of SEQ ID NO: 318371
agcuccagggcuuaaugaa

SEQ ID NO: 557428 - RNA, 19 nt, Artificial Sequence
  Description of Artificial Sequence: Synthetic oligonucleotide
  Antisense strand to SEQ ID NO: 557427
uucauuaagcccuggagcu

SEQ ID NO: 557429 - RNA, 19 nt, Artificial Sequence
  Description of Artificial Sequence: Synthetic oligonucleotide
  Sense strand starting at position 1929 of SEQ ID NO: 318371
augaauaauguaugucaag

SEQ ID NO: 557430 - RNA, 19 nt, Artificial Sequence
  Description of Artificial Sequence: Synthetic oligonucleotide
  Antisense strand to SEQ ID NO: 557429
cuugacauacauuauucau

SEQ ID NO: 557431 - RNA, 19 nt, Artificial Sequence
  Description of Artificial Sequence: Synthetic oligonucleotide
  Sense strand starting at position 1930 of SEQ ID NO: 318371
ugaauaauguaugucaaga

SEQ ID NO: 557432 - RNA, 19 nt, Artificial Sequence
  Description of Artificial Sequence: Synthetic oligonucleotide
  Antisense strand to SEQ ID NO: 557431
ucuugacauacauuauuca

SEQ ID NO: 557433 - RNA, 19 nt, Artificial Sequence
  Description of Artificial Sequence: Synthetic oligonucleotide
  Sense strand starting at position 1935 of SEQ ID NO: 318371
aauguaugucaagaugcuu

SEQ ID NO: 557434 - RNA, 19 nt, Artificial Sequence
  Description of Artificial Sequence: Synthetic oligonucleotide
  Antisense strand to SEQ ID NO: 557433
aagcaucuugacauacauu

SEQ ID NO: 557435 - RNA, 19 nt, Artificial Sequence
  Description of Artificial Sequence: Synthetic oligonucleotide
  Sense strand starting at position 2181 of SEQ ID NO: 318371
gaauaaugguaucccugca

SEQ ID NO: 557436 - RNA, 19 nt, Artificial Sequence
  Description of Artificial Sequence: Synthetic oligonucleotide
  Antisense strand to SEQ ID NO: 557435
ugcagggauaccauuauuc

SEQ ID NO: 557437 - RNA, 19 nt, Artificial Sequence
  Description of Artificial Sequence: Synthetic oligonucleotide
  Sense strand starting at position 2240 of SEQ ID NO: 318371
ucuugcagugaugaauaau

SEQ ID NO: 557438 - RNA, 19 nt, Artificial Sequence
  Description of Artificial Sequence: Synthetic oligonucleotide
  Antisense strand to SEQ ID NO: 557437
auuauucaucacugcaaga

SEQ ID NO: 557439 - RNA, 19 nt, Artificial Sequence
  Description of Artificial Sequence: Synthetic oligonucleotide
  Sense strand starting at position 2448 of SEQ ID NO: 318371
uagaaaugacuguaguucu

SEQ ID NO: 557440 - RNA, 19 nt, Artificial Sequence
  Description of Artificial Sequence: Synthetic oligonucleotide
  Antisense strand to SEQ ID NO: 557439
agaacuacagucauuucua

SEQ ID NO: 557441 - RNA, 19 nt, Artificial Sequence
  Description of Artificial Sequence: Synthetic oligonucleotide
  Sense strand starting at position 2503 of SEQ ID NO: 318371
uacgacuaauguccagaau

SEQ ID NO: 557442 - RNA, 19 nt, Artificial Sequence
  Description of Artificial Sequence: Synthetic oligonucleotide
  Antisense strand to SEQ ID NO: 557441
auucuggacauuagucgua

SEQ ID NO: 557443 - RNA, 19 nt, Artificial Sequence
  Description of Artificial Sequence: Synthetic oligonucleotide
  Sense strand starting at position 2504 of SEQ ID NO: 318371
acgacuaauguccagaauu

SEQ ID NO: 557444 - RNA, 19 nt, Artificial Sequence
  Description of Artificial Sequence: Synthetic oligonucleotide
  Antisense strand to SEQ ID NO: 557443
aauucuggacauuagucgu

SEQ ID NO: 557445 - RNA, 19 nt, Artificial Sequence
  Description of Artificial Sequence: Synthetic oligonucleotide
  Sense strand starting at position 2596 of SEQ ID NO: 318371
uauuguuauguaugacaga

SEQ ID NO: 557446 - RNA, 19 nt, Artificial Sequence
  Description of Artificial Sequence: Synthetic oligonucleotide
  Antisense strand to SEQ ID NO: 557445
ucugucauacauaacaaua

SEQ ID NO: 557447 - RNA, 19 nt, Artificial Sequence
  Description of Artificial Sequence: Synthetic oligonucleotide
  Sense strand starting at position 3129 of SEQ ID NO: 318371
gcucaagaguaaucagaca

SEQ ID NO: 557448 - RNA, 19 nt, Artificial Sequence
  Description of Artificial Sequence: Synthetic oligonucleotide
  Antisense strand to SEQ ID NO: 557447
ugucugauuacucuugagc

SEQ ID NO: 557449 - RNA, 19 nt, Artificial Sequence
  Description of Artificial Sequence: Synthetic oligonucleotide
  Sense strand starting at position 3153 of SEQ ID NO: 318371
cgaggaggguuaaaugaga

SEQ ID NO: 557450 - RNA, 19 nt, Artificial Sequence
  Description of Artificial Sequence: Synthetic oligonucleotide
  Antisense strand to SEQ ID NO: 557449
ucucauuuaacccuccucg

SEQ ID NO: 557451 - RNA, 19 nt, Artificial Sequence
  Description of Artificial Sequence: Synthetic oligonucleotide
  Sense strand starting at position 3202 of SEQ ID NO: 318371
uucuauuugguuuggugua

SEQ ID NO: 557452 - RNA, 19 nt, Artificial Sequence
  Description of Artificial Sequence: Synthetic oligonucleotide
  Antisense strand to SEQ ID NO: 557451
uacaccaaaccaaauagaa

SEQ ID NO: 557453 - RNA, 19 nt, Artificial Sequence
  Description of Artificial Sequence: Synthetic oligonucleotide
  Sense strand starting at position 3220 of SEQ ID NO: 318371
aguauuacccuguaacuuu

SEQ ID NO: 557454 - RNA, 19 nt, Artificial Sequence
  Description of Artificial Sequence: Synthetic oligonucleotide
  Antisense strand to SEQ ID NO: 557453
aaaguuacaggguaauacu

SEQ ID NO: 557455 - RNA, 19 nt, Artificial Sequence
  Description of Artificial Sequence: Synthetic oligonucleotide
  Sense strand starting at position 3247 of SEQ ID NO: 318371
agaggucuugugggugaga

SEQ ID NO: 557456 - RNA, 19 nt, Artificial Sequence
  Description of Artificial Sequence: Synthetic oligonucleotide
  Antisense strand to SEQ ID NO: 557455
ucucacccacaagaccucu

SEQ ID NO: 557457 - RNA, 19 nt, Artificial Sequence
  Description of Artificial Sequence: Synthetic oligonucleotide
  Sense strand starting at position 3248 of SEQ ID NO: 318371
gaggucuugugggugagaa

SEQ ID NO: 557458 - RNA, 19 nt, Artificial Sequence
  Description of Artificial Sequence: Synthetic oligonucleotide
  Antisense strand to SEQ ID NO: 557457
uucucacccacaagaccuc

SEQ ID NO: 557459 - RNA, 19 nt, Artificial Sequence
  Description of Artificial Sequence: Synthetic oligonucleotide
  Sense strand starting at position 3249 of SEQ ID NO: 318371
aggucuugugggugagaaa

SEQ ID NO: 557460 - RNA, 19 nt, Artificial Sequence
  Description of Artificial Sequence: Synthetic oligonucleotide
  Antisense strand to SEQ ID NO: 557459
uuucucacccacaagaccu

SEQ ID NO: 557461 - RNA, 19 nt, Artificial Sequence
  Description of Artificial Sequence: Synthetic oligonucleotide
  Sense strand starting at position 3250 of SEQ ID NO: 318371
ggucuugugggugagaaac

SEQ ID NO: 557462 - RNA, 19 nt, Artificial Sequence
  Description of Artificial Sequence: Synthetic oligonucleotide
  Antisense strand to SEQ ID NO: 557461
guuucucacccacaagacc

SEQ ID NO: 557463 - RNA, 19 nt, Artificial Sequence
  Description of Artificial Sequence: Synthetic oligonucleotide
  Sense strand starting at position 3424 of SEQ ID NO: 318371
gucugucuuagagagcaug

SEQ ID NO: 557464 - RNA, 19 nt, Artificial Sequence
  Description of Artificial Sequence: Synthetic oligonucleotide
  Antisense strand to SEQ ID NO: 557463
caugcucucuaagacagac

SEQ ID NO: 557465 - RNA, 19 nt, Artificial Sequence
  Description of Artificial Sequence: Synthetic oligonucleotide
  Sense strand starting at position 3670 of SEQ ID NO: 318371
guuugaucauuccuacuac

SEQ ID NO: 557466 - RNA, 19 nt, Artificial Sequence
  Description of Artificial Sequence: Synthetic oligonucleotide
  Antisense strand to SEQ ID NO: 557465
guaguaggaaugaucaaac

SEQ ID NO: 557467 - RNA, 19 nt, Artificial Sequence
  Description of Artificial Sequence: Synthetic oligonucleotide
  Sense strand starting at position 3790 of SEQ ID NO: 318371
acaagauucuccucucgaa

SEQ ID NO: 557468 - RNA, 19 nt, Artificial Sequence
  Description of Artificial Sequence: Synthetic oligonucleotide
  Antisense strand to SEQ ID NO: 557467
uucgagaggagaaucuugu

SEQ ID NO: 557469 - RNA, 19 nt, Artificial Sequence
  Description of Artificial Sequence: Synthetic oligonucleotide
  Sense strand starting at position 3902 of SEQ ID NO: 318371
agccuauauuucuuccagu

SEQ ID NO: 557470 - RNA, 19 nt, Artificial Sequence
  Description of Artificial Sequence: Synthetic oligonucleotide
  Antisense strand to SEQ ID NO: 557469
acuggaagaaauauaggcu

SEQ ID NO: 557471 - RNA, 19 nt, Artificial Sequence
  Description of Artificial Sequence: Synthetic oligonucleotide
  Sense strand starting at position 3903 of SEQ ID NO: 318371
gccuauauuucuuccagua

SEQ ID NO: 557472 - RNA, 19 nt, Artificial Sequence
  Description of Artificial Sequence: Synthetic oligonucleotide
  Antisense strand to SEQ ID NO: 557471
uacuggaagaaauauaggc

SEQ ID NO: 557473 - RNA, 19 nt, Artificial Sequence
  Description of Artificial Sequence: Synthetic oligonucleotide
  Sense strand starting at position 3983 of SEQ ID NO: 318371
cugucagguguuuaauaua

SEQ ID NO: 557474 - RNA, 19 nt, Artificial Sequence
  Description of Artificial Sequence: Synthetic oligonucleotide
  Antisense strand to SEQ ID NO: 557473
uauauuaaacaccugacag

SEQ ID NO: 557475 - RNA, 19 nt, Artificial Sequence
  Description of Artificial Sequence: Synthetic oligonucleotide
  Sense strand starting at position 103 of SEQ ID NO: 318372
gcuuauuucuuuccaguca

SEQ ID NO: 557476 - RNA, 19 nt, Artificial Sequence
  Description of Artificial Sequence: Synthetic oligonucleotide
  Antisense strand to SEQ ID NO: 557475
ugacuggaaagaaauaagc

SEQ ID NO: 557477 - RNA, 19 nt, Artificial Sequence
  Description of Artificial Sequence: Synthetic oligonucleotide
  Sense strand starting at position 222 of SEQ ID NO: 318372
gcuuaaacagcagaacuua

SEQ ID NO: 557478 - RNA, 19 nt, Artificial Sequence
  Description of Artificial Sequence: Synthetic oligonucleotide
  Antisense strand to SEQ ID NO: 557477
uaaguucugcuguuuaagc

SEQ ID NO: 557479 - RNA, 19 nt, Artificial Sequence
  Description of Artificial Sequence: Synthetic oligonucleotide
  Sense strand starting at position 285 of SEQ ID NO: 318372
aaaggagacugguaauuuc

SEQ ID NO: 557480 - RNA, 19 nt, Artificial Sequence
  Description of Artificial Sequence: Synthetic oligonucleotide
  Antisense strand to SEQ ID NO: 557479
gaaauuaccagucuccuuu

SEQ ID NO: 557481 - RNA, 19 nt, Artificial Sequence
  Description of Artificial Sequence: Synthetic oligonucleotide
  Sense strand starting at position 397 of SEQ ID NO: 318372
caggaacuguuuccaggau

SEQ ID NO: 557482 - RNA, 19 nt, Artificial Sequence
  Description of Artificial Sequence: Synthetic oligonucleotide
  Antisense strand to SEQ ID NO: 557481
auccuggaaacaguuccug

SEQ ID NO: 557483 - RNA, 19 nt, Artificial Sequence
  Description of Artificial Sequence: Synthetic oligonucleotide
  Sense strand starting at position 623 of SEQ ID NO: 318372
aguagcucuggucagcaaa

SEQ ID NO: 557484 - RNA, 19 nt, Artificial Sequence
  Description of Artificial Sequence: Synthetic oligonucleotide
  Antisense strand to SEQ ID NO: 557483
uuugcugaccagagcuacu

SEQ ID NO: 557485 - RNA, 19 nt, Artificial Sequence
  Description of Artificial Sequence: Synthetic oligonucleotide
  Sense strand starting at position 668 of SEQ ID NO: 318372
ucuggauggaucugguguu

SEQ ID NO: 557486 - RNA, 19 nt, Artificial Sequence
  Description of Artificial Sequence: Synthetic oligonucleotide
  Antisense strand to SEQ ID NO: 557485
aacaccagauccauccaga

SEQ ID NO: 557487 - RNA, 19 nt, Artificial Sequence
  Description of Artificial Sequence: Synthetic oligonucleotide
  Sense strand starting at position 899 of SEQ ID NO: 318372
agaguccagccagaacauu

SEQ ID NO: 557488 - RNA, 19 nt, Artificial Sequence
  Description of Artificial Sequence: Synthetic oligonucleotide
  Antisense strand to SEQ ID NO: 557487
aauguucuggcuggacucu

SEQ ID NO: 557489 - RNA, 19 nt, Artificial Sequence
  Description of Artificial Sequence: Synthetic oligonucleotide
  Sense strand starting at position 1052 of SEQ ID NO: 318372
acccuaaagguauggcaaa

SEQ ID NO: 557490 - RNA, 19 nt, Artificial Sequence
  Description of Artificial Sequence: Synthetic oligonucleotide
  Antisense strand to SEQ ID NO: 557489
uuugccauaccuuuagggu

SEQ ID NO: 557491 - RNA, 19 nt, Artificial Sequence
  Description of Artificial Sequence: Synthetic oligonucleotide
  Sense strand starting at position 1118 of SEQ ID NO: 318372
agcaaugaguuccuacaca

SEQ ID NO: 557492 - RNA, 19 nt, Artificial Sequence
  Description of Artificial Sequence: Synthetic oligonucleotide
  Antisense strand to SEQ ID NO: 557491
uguguaggaacucauugcu

SEQ ID NO: 557493 - RNA, 19 nt, Artificial Sequence
  Description of Artificial Sequence: Synthetic oligonucleotide
  Sense strand starting at position 1241 of SEQ ID NO: 318372
aagcaaguucuaugagagc

SEQ ID NO: 557494 - RNA, 19 nt, Artificial Sequence
  Description of Artificial Sequence: Synthetic oligonucleotide
  Antisense strand to SEQ ID NO: 557493
gcucucauagaacuugcuu

SEQ ID NO: 557495 - RNA, 19 nt, Artificial Sequence
  Description of Artificial Sequence: Synthetic oligonucleotide
  Sense strand starting at position 1345 of SEQ ID NO: 318372
uauccuuaacugugaggca

SEQ ID NO: 557496 - RNA, 19 nt, Artificial Sequence
  Description of Artificial Sequence: Synthetic oligonucleotide
  Antisense strand to SEQ ID NO: 557495
ugccucacaguuaaggaua

SEQ ID NO: 557497 - RNA, 19 nt, Artificial Sequence
  Description of Artificial Sequence: Synthetic oligonucleotide
  Sense strand starting at position 1615 of SEQ ID NO: 318372
guccucaugcuugacuuau

SEQ ID NO: 557498 - RNA, 19 nt, Artificial Sequence
  Description of Artificial Sequence: Synthetic oligonucleotide
  Antisense strand to SEQ ID NO: 557497
auaagucaagcaugaggac

SEQ ID NO: 557499 - RNA, 19 nt, Artificial Sequence
  Description of Artificial Sequence: Synthetic oligonucleotide
  Sense strand starting at position 1767 of SEQ ID NO: 318372
gguaccugucacggaauuu

SEQ ID NO: 557500 - RNA, 19 nt, Artificial Sequence
  Description of Artificial Sequence: Synthetic oligonucleotide
  Antisense strand to SEQ ID NO: 557499
aaauuccgugacagguacc

SEQ ID NO: 557501 - RNA, 19 nt, Artificial Sequence
  Description of Artificial Sequence: Synthetic oligonucleotide
  Sense strand starting at position 2103 of SEQ ID NO: 318372
cagguauggguccauccau

SEQ ID NO: 557502 - RNA, 19 nt, Artificial Sequence
  Description of Artificial Sequence: Synthetic oligonucleotide
  Antisense strand to SEQ ID NO: 557501
auggauggacccauaccug

SEQ ID NO: 557503 - RNA, 19 nt, Artificial Sequence
  Description of Artificial Sequence: Synthetic oligonucleotide
  Sense strand starting at position 2125 of SEQ ID NO: 318372
gguuccacuaguuagucaa

SEQ ID NO: 557504 - RNA, 19 nt, Artificial Sequence
  Description of Artificial Sequence: Synthetic oligonucleotide
  Antisense strand to SEQ ID NO: 557503
uugacuaacuaguggaacc

SEQ ID NO: 557505 - RNA, 19 nt, Artificial Sequence
  Description of Artificial Sequence: Synthetic oligonucleotide
  Sense strand starting at position 2128 of SEQ ID NO: 318372
uccacuaguuagucaacau

SEQ ID NO: 557506 - RNA, 19 nt, Artificial Sequence
  Description of Artificial Sequence: Synthetic oligonucleotide
  Antisense strand to SEQ ID NO: 557505
auguugacuaacuagugga

SEQ ID NO: 557507 - RNA, 19 nt, Artificial Sequence
  Description of Artificial Sequence: Synthetic oligonucleotide
  Sense strand starting at position 2132 of SEQ ID NO: 318372
cuaguuagucaacauacua

SEQ ID NO: 557508 - RNA, 19 nt, Artificial Sequence
  Description of Artificial Sequence: Synthetic oligonucleotide
  Antisense strand to SEQ ID NO: 557507
uaguauguugacuaacuag

SEQ ID NO: 557509 - RNA, 19 nt, Artificial Sequence
  Description of Artificial Sequence: Synthetic oligonucleotide
  Sense strand starting at position 2172 of SEQ ID NO: 318372
auccuaaaugguggcaaau

SEQ ID NO: 557510 - RNA, 19 nt, Artificial Sequence
  Description of Artificial Sequence: Synthetic oligonucleotide
  Antisense strand to SEQ ID NO: 557509
auuugccaccauuuaggau

SEQ ID NO: 557511 - RNA, 19 nt, Artificial Sequence
  Description of Artificial Sequence: Synthetic oligonucleotide
  Sense strand starting at position 2226 of SEQ ID NO: 318372
auuaaugcauccuuaagga

SEQ ID NO: 557512 - RNA, 19 nt, Artificial Sequence
  Description of Artificial Sequence: Synthetic oligonucleotide
  Antisense strand to SEQ ID NO: 557511
uccuuaaggaugcauuaau

SEQ ID NO: 557513 - RNA, 19 nt, Artificial Sequence
  Description of Artificial Sequence: Synthetic oligonucleotide
  Sense strand starting at position 2288 of SEQ ID NO: 318372
uugauauccuuguuaaaga

SEQ ID NO: 557514 - RNA, 19 nt, Artificial Sequence
  Description of Artificial Sequence: Synthetic oligonucleotide
  Antisense strand to SEQ ID NO: 557513
ucuuuaacaaggauaucaa

SEQ ID NO: 557515 - RNA, 19 nt, Artificial Sequence
  Description of Artificial Sequence: Synthetic oligonucleotide
  Sense strand starting at position 2297 of SEQ ID NO: 318372
uuguuaaagaaguguuaga

SEQ ID NO: 557516 - RNA, 19 nt, Artificial Sequence
  Description of Artificial Sequence: Synthetic oligonucleotide
  Antisense strand to SEQ ID NO: 557515
ucuaacacuucuuuaacaa

SEQ ID NO: 557517 - RNA, 19 nt, Artificial Sequence
  Description of Artificial Sequence: Synthetic oligonucleotide
  Sense strand starting at position 2535 of SEQ ID NO: 318372
guaggaaggcaaugaguaa

SEQ ID NO: 557518 - RNA, 19 nt, Artificial Sequence
  Description of Artificial Sequence: Synthetic oligonucleotide
  Antisense strand to SEQ ID NO: 557517
uuacucauugccuuccuac

SEQ ID NO: 557519 - RNA, 19 nt, Artificial Sequence
  Description of Artificial Sequence: Synthetic oligonucleotide
  Sense strand starting at position 2604 of SEQ ID NO: 318372
agaugcugucacgaugaaa

SEQ ID NO: 557520 - RNA, 19 nt, Artificial Sequence
  Description of Artificial Sequence: Synthetic oligonucleotide
  Antisense strand to SEQ ID NO: 557519
uuucaucgugacagcaucu

SEQ ID NO: 557521 - RNA, 19 nt, Artificial Sequence
  Description of Artificial Sequence: Synthetic oligonucleotide
  Sense strand starting at position 2607 of SEQ ID NO: 318372
ugcugucacgaugaaauuc

SEQ ID NO: 557522 - RNA, 19 nt, Artificial Sequence
  Description of Artificial Sequence: Synthetic oligonucleotide
  Antisense strand to SEQ ID NO: 557521
gaauuucaucgugacagca

SEQ ID NO: 557523 - RNA, 19 nt, Artificial Sequence
  Description of Artificial Sequence: Synthetic oligonucleotide
  Sense strand starting at position 2656 of SEQ ID NO: 318372
ggcuguucucuuuaaguaa

SEQ ID NO: 557524 - RNA, 19 nt, Artificial Sequence
  Description of Artificial Sequence: Synthetic oligonucleotide
  Antisense strand to SEQ ID NO: 557523
uuacuuaaagagaacagcc

SEQ ID NO: 557525 - RNA, 19 nt, Artificial Sequence
  Description of Artificial Sequence: Synthetic oligonucleotide
  Sense strand starting at position 2792 of SEQ ID NO: 318372
ucagacguugucuaagaau

SEQ ID NO: 557526 - RNA, 19 nt, Artificial Sequence
  Description of Artificial Sequence: Synthetic oligonucleotide
  Antisense strand to SEQ ID NO: 557525
auucuuagacaacgucuga

SEQ ID NO: 557527 - RNA, 19 nt, Artificial Sequence
  Description of Artificial Sequence: Synthetic oligonucleotide
  Sense strand starting at position 2899 of SEQ ID NO: 318372
uuauucugaugcucugaca

SEQ ID NO: 557528 - RNA, 19 nt, Artificial Sequence
  Description of Artificial Sequence: Synthetic oligonucleotide
  Antisense strand to SEQ ID NO: 557527
ugucagagcaucagaauaa

SEQ ID NO: 557529 - RNA, 19 nt, Artificial Sequence
  Description of Artificial Sequence: Synthetic oligonucleotide
  Sense strand starting at position 3305 of SEQ ID NO: 318372
caguaauuaccaggcaaga

SEQ ID NO: 557530 - RNA, 19 nt, Artificial Sequence
  Description of Artificial Sequence: Synthetic oligonucleotide
  Antisense strand to SEQ ID NO: 557529
ucuugccugguaauuacug

SEQ ID NO: 557531 - RNA, 19 nt, Artificial Sequence
  Description of Artificial Sequence: Synthetic oligonucleotide
  Sense strand starting at position 3359 of SEQ ID NO: 318372
cagggaaauuacgccuuaa

SEQ ID NO: 557532 - RNA, 19 nt, Artificial Sequence
  Description of Artificial Sequence: Synthetic oligonucleotide
  Antisense strand to SEQ ID NO: 557531
uuaaggcguaauuucccug

SEQ ID NO: 557533 - RNA, 19 nt, Artificial Sequence
  Description of Artificial Sequence: Synthetic oligonucleotide
  Sense strand starting at position 3455 of SEQ ID NO: 318372
agagauaauuugcaaauga

SEQ ID NO: 557534 - RNA, 19 nt, Artificial Sequence
  Description of Artificial Sequence: Synthetic oligonucleotide
  Antisense strand to SEQ ID NO: 557533
ucauuugcaaauuaucucu

SEQ ID NO: 557535 - RNA, 19 nt, Artificial Sequence
  Description of Artificial Sequence: Synthetic oligonucleotide
  Sense strand starting at position 3462 of SEQ ID NO: 318372
auuugcaaaugauagaguu

SEQ ID NO: 557536 - RNA, 19 nt, Artificial Sequence
  Description of Artificial Sequence: Synthetic oligonucleotide
  Antisense strand to SEQ ID NO: 557535
aacucuaucauuugcaaau

SEQ ID NO: 557537 - RNA, 19 nt, Artificial Sequence
  Description of Artificial Sequence: Synthetic oligonucleotide
  Sense strand starting at position 3469 of SEQ ID NO: 318372
aaugauagaguuuggugga

SEQ ID NO: 557538 - RNA, 19 nt, Artificial Sequence
  Description of Artificial Sequence: Synthetic oligonucleotide
  Antisense strand to SEQ ID NO: 557537
uccaccaaacucuaucauu

SEQ ID NO: 557539 - RNA, 19 nt, Artificial Sequence
  Description of Artificial Sequence: Synthetic oligonucleotide
  Sense strand starting at position 3525 of SEQ ID NO: 318372
ccuuguuuacuugaugauu

SEQ ID NO: 557540 - RNA, 19 nt, Artificial Sequence
  Description of Artificial Sequence: Synthetic oligonucleotide
  Antisense strand to SEQ ID NO: 557539
aaucaucaaguaaacaagg

SEQ ID NO: 557541 - RNA, 19 nt, Artificial Sequence
  Description of Artificial Sequence: Synthetic oligonucleotide
  Sense strand starting at position 3534 of SEQ ID NO: 318372
cuugaugauuuguaaccau

SEQ ID NO: 557542 - RNA, 19 nt, Artificial Sequence
  Description of Artificial Sequence: Synthetic oligonucleotide
  Antisense strand to SEQ ID NO: 557541
augguuacaaaucaucaag

SEQ ID NO: 557543 - RNA, 19 nt, Artificial Sequence
  Description of Artificial Sequence: Synthetic oligonucleotide
  Sense strand starting at position 3561 of SEQ ID NO: 318372
agaugaccacauggugauu

SEQ ID NO: 557544 - RNA, 19 nt, Artificial Sequence
  Description of Artificial Sequence: Synthetic oligonucleotide
  Antisense strand to SEQ ID NO: 557543
aaucaccauguggucaucu

SEQ ID NO: 557545 - RNA, 19 nt, Artificial Sequence
  Description of Artificial Sequence: Synthetic oligonucleotide
  Sense strand starting at position 3636 of SEQ ID NO: 318372
gcaauugcgcaugccauaa

SEQ ID NO: 557546 - RNA, 19 nt, Artificial Sequence
  Description of Artificial Sequence: Synthetic oligonucleotide
  Antisense strand to SEQ ID NO: 557545
uuauggcaugcgcaauugc

SEQ ID NO: 557547 - RNA, 19 nt, Artificial Sequence
  Description of Artificial Sequence: Synthetic oligonucleotide
  Sense strand starting at position 3876 of SEQ ID NO: 318372
guuugaaaucagugggaga

SEQ ID NO: 557548 - RNA, 19 nt, Artificial Sequence
  Description of Artificial Sequence: Synthetic oligonucleotide
  Antisense strand to SEQ ID NO: 557547
ucucccacugauuucaaac

SEQ ID NO: 557549 - RNA, 19 nt, Artificial Sequence
  Description of Artificial Sequence: Synthetic oligonucleotide
  Sense strand starting at position 3891 of SEQ ID NO: 318372
gagaauggacuuugcagua

SEQ ID NO: 557550 - RNA, 19 nt, Artificial Sequence
  Description of Artificial Sequence: Synthetic oligonucleotide
  Antisense strand to SEQ ID NO: 557549
uacugcaaaguccauucuc

SEQ ID NO: 557551 - RNA, 19 nt, Artificial Sequence
  Description of Artificial Sequence: Synthetic oligonucleotide
  Sense strand starting at position 3896 of SEQ ID NO: 318372
uggacuuugcaguagaagu

SEQ ID NO: 557552 - RNA, 19 nt, Artificial Sequence
  Description of Artificial Sequence: Synthetic oligonucleotide
  Antisense strand to SEQ ID NO: 557551
acuucuacugcaaagucca

SEQ ID NO: 557553 - RNA, 19 nt, Artificial Sequence
  Description of Artificial Sequence: Synthetic oligonucleotide
  Sense strand starting at position 3966 of SEQ ID NO: 318372
acgcaauugcuugauauua

SEQ ID NO: 557554 - RNA, 19 nt, Artificial Sequence
  Description of Artificial Sequence: Synthetic oligonucleotide
  Antisense strand to SEQ ID NO: 557553
uaauaucaagcaauugcgu

SEQ ID NO: 557555 - RNA, 19 nt, Artificial Sequence
  Description of Artificial Sequence: Synthetic oligonucleotide
  Sense strand starting at position 120 of SEQ ID NO: 318373
agaacauaugauuggguuu

SEQ ID NO: 557556 - RNA, 19 nt, Artificial Sequence
  Description of Artificial Sequence: Synthetic oligonucleotide
  Antisense strand to SEQ ID NO: 557555
aaacccaaucauauguucu

SEQ ID NO: 557557 - RNA, 19 nt, Artificial Sequence
  Description of Artificial Sequence: Synthetic oligonucleotide
  Sense strand starting at position 857 of SEQ ID NO: 318373
cuaugauuccgucauugua

SEQ ID NO: 557558 - RNA, 19 nt, Artificial Sequence
  Description of Artificial Sequence: Synthetic oligonucleotide
  Antisense strand to SEQ ID NO: 557557
uacaaugacggaaucauag

SEQ ID NO: 557559 - RNA, 19 nt, Artificial Sequence
  Description of Artificial Sequence: Synthetic oligonucleotide
  Sense strand starting at position 871 of SEQ ID NO: 318373
uuguacuguggauagguaa

SEQ ID NO: 557560 - RNA, 19 nt, Artificial Sequence
  Description of Artificial Sequence: Synthetic oligonucleotide
  Antisense strand to SEQ ID NO: 557559
uuaccuauccacaguacaa

SEQ ID NO: 557561 - RNA, 19 nt, Artificial Sequence
  Description of Artificial Sequence: Synthetic oligonucleotide
  Sense strand starting at position 874 of SEQ ID NO: 318373
uacuguggauagguaagaa

SEQ ID NO: 557562 - RNA, 19 nt, Artificial Sequence
  Description of Artificial Sequence: Synthetic oligonucleotide
  Antisense strand to SEQ ID NO: 557561
uucuuaccuauccacagua

SEQ ID NO: 557563 - RNA, 19 nt, Artificial Sequence
  Description of Artificial Sequence: Synthetic oligonucleotide
  Sense strand starting at position 888 of SEQ ID NO: 318373
aagaaauguccuuguucug

SEQ ID NO: 557564 - RNA, 19 nt, Artificial Sequence
  Description of Artificial Sequence: Synthetic oligonucleotide
  Antisense strand to SEQ ID NO: 557563
cagaacaaggacauuucuu

SEQ ID NO: 557565 - RNA, 19 nt, Artificial Sequence
  Description of Artificial Sequence: Synthetic oligonucleotide
  Sense strand starting at position 891 of SEQ ID NO: 318373
aaauguccuuguucuggaa

SEQ ID NO: 557566 - RNA, 19 nt, Artificial Sequence
  Description of Artificial Sequence: Synthetic oligonucleotide
  Antisense strand to SEQ ID NO: 557565
uuccagaacaaggacauuu

SEQ ID NO: 557567 - RNA, 19 nt, Artificial Sequence
  Description of Artificial Sequence: Synthetic oligonucleotide
  Sense strand starting at position 895 of SEQ ID NO: 318373
guccuuguucuggaaguac

SEQ ID NO: 557568 - RNA, 19 nt, Artificial Sequence
  Description of Artificial Sequence: Synthetic oligonucleotide
  Antisense strand to SEQ ID NO: 557567
guacuuccagaacaaggac

SEQ ID NO: 557569 - RNA, 19 nt, Artificial Sequence
  Description of Artificial Sequence: Synthetic oligonucleotide
  Sense strand starting at position 906 of SEQ ID NO: 318373
ggaaguacuguggagguau

SEQ ID NO: 557570 - RNA, 19 nt, Artificial Sequence
  Description of Artificial Sequence: Synthetic oligonucleotide
  Antisense strand to SEQ ID NO: 557569
auaccuccacaguacuucc

SEQ ID NO: 557571 - RNA, 19 nt, Artificial Sequence
  Description of Artificial Sequence: Synthetic oligonucleotide
  Sense strand starting at position 983 of SEQ ID NO: 318373
guggaaguacuguguagaa

SEQ ID NO: 557572 - RNA, 19 nt, Artificial Sequence
  Description of Artificial Sequence: Synthetic oligonucleotide
  Antisense strand to SEQ ID NO: 557571
uucuacacaguacuuccac

SEQ ID NO: 557573 - RNA, 19 nt, Artificial Sequence
  Description of Artificial Sequence: Synthetic oligonucleotide
  Sense strand starting at position 985 of SEQ ID NO: 318373
ggaaguacuguguagaagu

SEQ ID NO: 557574 - RNA, 19 nt, Artificial Sequence
  Description of Artificial Sequence: Synthetic oligonucleotide
  Antisense strand to SEQ ID NO: 557573
acuucuacacaguacuucc

SEQ ID NO: 557575 - RNA, 19 nt, Artificial Sequence
  Description of Artificial Sequence: Synthetic oligonucleotide
  Sense strand starting at position 996 of SEQ ID NO: 318373
guagaaguacuguggaagu

SEQ ID NO: 557576 - RNA, 19 nt, Artificial Sequence
  Description of Artificial Sequence: Synthetic oligonucleotide
  Antisense strand to SEQ ID NO: 557575
acuuccacaguacuucuac

SEQ ID NO: 557577 - RNA, 19 nt, Artificial Sequence
  Description of Artificial Sequence: Synthetic oligonucleotide
  Sense strand starting at position 1007 of SEQ ID NO: 318373
guggaaguacuguguauuu

SEQ ID NO: 557578 - RNA, 19 nt, Artificial Sequence
  Description of Artificial Sequence: Synthetic oligonucleotide
  Antisense strand to SEQ ID NO: 557577
aaauacacaguacuuccac

SEQ ID NO: 557579 - RNA, 19 nt, Artificial Sequence
  Description of Artificial Sequence: Synthetic oligonucleotide
  Sense strand starting at position 1033 of SEQ ID NO: 318373
agggacauuucuuaccuau

SEQ ID NO: 557580 - RNA, 19 nt, Artificial Sequence
  Description of Artificial Sequence: Synthetic oligonucleotide
  Antisense strand to SEQ ID NO: 557579
auagguaagaaaugucccu

SEQ ID NO: 557581 - RNA, 19 nt, Artificial Sequence
  Description of Artificial Sequence: Synthetic oligonucleotide
  Sense strand starting at position 1194 of SEQ ID NO: 318373
acauacaguucucuguauu

SEQ ID NO: 557582 - RNA, 19 nt, Artificial Sequence
  Description of Artificial Sequence: Synthetic oligonucleotide
  Antisense strand to SEQ ID NO: 557581
aauacagagaacuguaugu

SEQ ID NO: 557583 - RNA, 19 nt, Artificial Sequence
  Description of Artificial Sequence: Synthetic oligonucleotide
  Sense strand starting at position 1647 of SEQ ID NO: 318373
gaugcauuucucugucugu

SEQ ID NO: 557584 - RNA, 19 nt, Artificial Sequence
  Description of Artificial Sequence: Synthetic oligonucleotide
  Antisense strand to SEQ ID NO: 557583
acagacagagaaaugcauc

SEQ ID NO: 557585 - RNA, 19 nt, Artificial Sequence
  Description of Artificial Sequence: Synthetic oligonucleotide
  Sense strand starting at position 1648 of SEQ ID NO: 318373
augcauuucucugucugua

SEQ ID NO: 557586 - RNA, 19 nt, Artificial Sequence
  Description of Artificial Sequence: Synthetic oligonucleotide
  Antisense strand to SEQ ID NO: 557585
uacagacagagaaaugcau

SEQ ID NO: 557587 - RNA, 19 nt, Artificial Sequence
  Description of Artificial Sequence: Synthetic oligonucleotide
  Sense strand starting at position 1650 of SEQ ID NO: 318373
gcauuucucugucuguaaa

SEQ ID NO: 557588 - RNA, 19 nt, Artificial Sequence
  Description of Artificial Sequence: Synthetic oligonucleotide
  Antisense strand to SEQ ID NO: 557587
uuuacagacagagaaaugc

SEQ ID NO: 557589 - RNA, 19 nt, Artificial Sequence
  Description of Artificial Sequence: Synthetic oligonucleotide
  Sense strand starting at position 1660 of SEQ ID NO: 318373
gucuguaaauucuccugaa

SEQ ID NO: 557590 - RNA, 19 nt, Artificial Sequence
  Description of Artificial Sequence: Synthetic oligonucleotide
  Antisense strand to SEQ ID NO: 557589
uucaggagaauuuacagac

SEQ ID NO: 557591 - RNA, 19 nt, Artificial Sequence
  Description of Artificial Sequence: Synthetic oligonucleotide
  Sense strand starting at position 1664 of SEQ ID NO: 318373
guaaauucuccugaaaguc

SEQ ID NO: 557592 - RNA, 19 nt, Artificial Sequence
  Description of Artificial Sequence: Synthetic oligonucleotide
  Antisense strand to SEQ ID NO: 557591
gacuuucaggagaauuuac

SEQ ID NO: 557593 - RNA, 19 nt, Artificial Sequence
  Description of Artificial Sequence: Synthetic oligonucleotide
  Sense strand starting at position 2031 of SEQ ID NO: 318373
uugggagauuaagucauua

SEQ ID NO: 557594 - RNA, 19 nt, Artificial Sequence
  Description of Artificial Sequence: Synthetic oligonucleotide
  Antisense strand to SEQ ID NO: 557593
uaaugacuuaaucucccaa

SEQ ID NO: 557595 - RNA, 19 nt, Artificial Sequence
  Description of Artificial Sequence: Synthetic oligonucleotide
  Sense strand starting at position 2292 of SEQ ID NO: 318373
acagaagacugacauuuac

SEQ ID NO: 557596 - RNA, 19 nt, Artificial Sequence
  Description of Artificial Sequence: Synthetic oligonucleotide
  Antisense strand to SEQ ID NO: 557595
guaaaugucagucuucugu

SEQ ID NO: 557597 - RNA, 19 nt, Artificial Sequence
  Description of Artificial Sequence: Synthetic oligonucleotide
  Sense strand starting at position 2493 of SEQ ID NO: 318373
ccucauguacauuauggau

SEQ ID NO: 557598 - RNA, 19 nt, Artificial Sequence
  Description of Artificial Sequence: Synthetic oligonucleotide
  Antisense strand to SEQ ID NO: 557597
auccauaauguacaugagg

SEQ ID NO: 557599 - RNA, 19 nt, Artificial Sequence
  Description of Artificial Sequence: Synthetic oligonucleotide
  Sense strand starting at position 2501 of SEQ ID NO: 318373
acauuauggaucugguaug

SEQ ID NO: 557600 - RNA, 19 nt, Artificial Sequence
  Description of Artificial Sequence: Synthetic oligonucleotide
  Antisense strand to SEQ ID NO: 557599
cauaccagauccauaaugu

SEQ ID NO: 557601 - RNA, 19 nt, Artificial Sequence
  Description of Artificial Sequence: Synthetic oligonucleotide
  Sense strand starting at position 2655 of SEQ ID NO: 318373
auauuauagucacuguuga

SEQ ID NO: 557602 - RNA, 19 nt, Artificial Sequence
  Description of Artificial Sequence: Synthetic oligonucleotide
  Antisense strand to SEQ ID NO: 557601
ucaacagugacuauaauau

SEQ ID NO: 557603 - RNA, 19 nt, Artificial Sequence
  Description of Artificial Sequence: Synthetic oligonucleotide
  Sense strand starting at position 2660 of SEQ ID NO: 318373
auagucacuguugaacaua

SEQ ID NO: 557604 - RNA, 19 nt, Artificial Sequence
  Description of Artificial Sequence: Synthetic oligonucleotide
  Antisense strand to SEQ ID NO: 557603
uauguucaacagugacuau

SEQ ID NO: 557605 - RNA, 19 nt, Artificial Sequence
  Description of Artificial Sequence: Synthetic oligonucleotide
  Sense strand starting at position 2720 of SEQ ID NO: 318373
agaggcaaccuuuaguuaa

SEQ ID NO: 557606 - RNA, 19 nt, Artificial Sequence
  Description of Artificial Sequence: Synthetic oligonucleotide
  Antisense strand to SEQ ID NO: 557605
uuaacuaaagguugccucu

SEQ ID NO: 557607 - RNA, 19 nt, Artificial Sequence
  Description of Artificial Sequence: Synthetic oligonucleotide
  Sense strand starting at position 2722 of SEQ ID NO: 318373
aggcaaccuuuaguuaaca

SEQ ID NO: 557608 - RNA, 19 nt, Artificial Sequence
  Description of Artificial Sequence: Synthetic oligonucleotide
  Antisense strand to SEQ ID NO: 557607
uguuaacuaaagguugccu

SEQ ID NO: 557609 - RNA, 19 nt, Artificial Sequence
  Description of Artificial Sequence: Synthetic oligonucleotide
  Sense strand starting at position 2723 of SEQ ID NO: 318373
ggcaaccuuuaguuaacau

SEQ ID NO: 557610 - RNA, 19 nt, Artificial Sequence
  Description of Artificial Sequence: Synthetic oligonucleotide
  Antisense strand to SEQ ID NO: 557609
auguuaacuaaagguugcc

SEQ ID NO: 557611 - RNA, 19 nt, Artificial Sequence
  Description of Artificial Sequence: Synthetic oligonucleotide
  Sense strand starting at position 2862 of SEQ ID NO: 318373
gccuguaauuucuuggguu

SEQ ID NO: 557612 - RNA, 19 nt, Artificial Sequence
  Description of Artificial Sequence: Synthetic oligonucleotide
  Antisense strand to SEQ ID NO: 557611
aacccaagaaauuacaggc

SEQ ID NO: 557613 - RNA, 19 nt, Artificial Sequence
  Description of Artificial Sequence: Synthetic oligonucleotide
  Sense strand starting at position 2864 of SEQ ID NO: 318373
cuguaauuucuuggguugu

SEQ ID NO: 557614 - RNA, 19 nt, Artificial Sequence
  Description of Artificial Sequence: Synthetic oligonucleotide
  Antisense strand to SEQ ID NO: 557613
acaacccaagaaauuacag

SEQ ID NO: 557615 - RNA, 19 nt, Artificial Sequence
  Description of Artificial Sequence: Synthetic oligonucleotide
  Sense strand starting at position 2866 of SEQ ID NO: 318373
guaauuucuuggguugucu

SEQ ID NO: 557616 - RNA, 19 nt, Artificial Sequence
  Description of Artificial Sequence: Synthetic oligonucleotide
  Antisense strand to SEQ ID NO: 557615
agacaacccaagaaauuac

SEQ ID NO: 557617 - RNA, 19 nt, Artificial Sequence
  Description of Artificial Sequence: Synthetic oligonucleotide
  Sense strand starting at position 3167 of SEQ ID NO: 318373
agaccuagacuuugucuca

SEQ ID NO: 557618 - RNA, 19 nt, Artificial Sequence
  Description of Artificial Sequence: Synthetic oligonucleotide
  Antisense strand to SEQ ID NO: 557617
ugagacaaagucuaggucu

SEQ ID NO: 557619 - RNA, 19 nt, Artificial Sequence
  Description of Artificial Sequence: Synthetic oligonucleotide
  Sense strand starting at position 3381 of SEQ ID NO: 318373
uguuguaaacuauguggaa

SEQ ID NO: 557620 - RNA, 19 nt, Artificial Sequence
  Description of Artificial Sequence: Synthetic oligonucleotide
  Antisense strand to SEQ ID NO: 557619
uuccacauaguuuacaaca

SEQ ID NO: 557621 - RNA, 19 nt, Artificial Sequence
  Description of Artificial Sequence: Synthetic oligonucleotide
  Sense strand starting at position 3382 of SEQ ID NO: 318373
guuguaaacuauguggaac

SEQ ID NO: 557622 - RNA, 19 nt, Artificial Sequence
  Description of Artificial Sequence: Synthetic oligonucleotide
  Antisense strand to SEQ ID NO: 557621
guuccacauaguuuacaac

SEQ ID NO: 557623 - RNA, 19 nt, Artificial Sequence
  Description of Artificial Sequence: Synthetic oligonucleotide
  Sense strand starting at position 3390 of SEQ ID NO: 318373
cuauguggaacgcauaauu

SEQ ID NO: 557624 - RNA, 19 nt, Artificial Sequence
  Description of Artificial Sequence: Synthetic oligonucleotide
  Antisense strand to SEQ ID NO: 557623
aauuaugcguuccacauag

SEQ ID NO: 557625 - RNA, 19 nt, Artificial Sequence
  Description of Artificial Sequence: Synthetic oligonucleotide
  Sense strand starting at position 3442 of SEQ ID NO: 318373
ugaccuuuacugggaagca

SEQ ID NO: 557626 - RNA, 19 nt, Artificial Sequence
  Description of Artificial Sequence: Synthetic oligonucleotide
  Antisense strand to SEQ ID NO: 557625
ugcuucccaguaaagguca

SEQ ID NO: 557627 - RNA, 19 nt, Artificial Sequence
  Description of Artificial Sequence: Synthetic oligonucleotide
  Sense strand starting at position 3468 of SEQ ID NO: 318373
uccuuuauuguagagugua

SEQ ID NO: 557628 - RNA, 19 nt, Artificial Sequence
  Description of Artificial Sequence: Synthetic oligonucleotide
  Antisense strand to SEQ ID NO: 557627
uacacucuacaauaaagga

SEQ ID NO: 557629 - RNA, 19 nt, Artificial Sequence
  Description of Artificial Sequence: Synthetic oligonucleotide
  Sense strand starting at position 3726 of SEQ ID NO: 318373
cgguuucugccugucauau

SEQ ID NO: 557630 - RNA, 19 nt, Artificial Sequence
  Description of Artificial Sequence: Synthetic oligonucleotide
  Antisense strand to SEQ ID NO: 557629
auaugacaggcagaaaccg

SEQ ID NO: 557631 - RNA, 19 nt, Artificial Sequence
  Description of Artificial Sequence: Synthetic oligonucleotide
  Sense strand starting at position 3898 of SEQ ID NO: 318373
ccugacacauccuugguau

SEQ ID NO: 557632 - RNA, 19 nt, Artificial Sequence
  Description of Artificial Sequence: Synthetic oligonucleotide
  Antisense strand to SEQ ID NO: 557631
auaccaaggaugugucagg

SEQ ID NO: 557633 - RNA, 19 nt, Artificial Sequence
  Description of Artificial Sequence: Synthetic oligonucleotide
  Sense strand starting at position 3899 of SEQ ID NO: 318373
cugacacauccuugguauu

SEQ ID NO: 557634 - RNA, 19 nt, Artificial Sequence
  Description of Artificial Sequence: Synthetic oligonucleotide
  Antisense strand to SEQ ID NO: 557633
aauaccaaggaugugucag

SEQ ID NO: 557635 - RNA, 19 nt, Artificial Sequence
  Description of Artificial Sequence: Synthetic oligonucleotide
  Sense strand starting at position 19 of SEQ ID NO: 318374
aaaggauggucuuuacuga

SEQ ID NO: 557636 - RNA, 19 nt, Artificial Sequence
  Description of Artificial Sequence: Synthetic oligonucleotide
  Antisense strand to SEQ ID NO: 557635
ucaguaaagaccauccuuu

SEQ ID NO: 557637 - RNA, 19 nt, Artificial Sequence
  Description of Artificial Sequence: Synthetic oligonucleotide
  Sense strand starting at position 97 of SEQ ID NO: 318374
uaaagcuaacuuuguguga

SEQ ID NO: 557638 - RNA, 19 nt, Artificial Sequence
  Description of Artificial Sequence: Synthetic oligonucleotide
  Antisense strand to SEQ ID NO: 557637
ucacacaaaguuagcuuua

SEQ ID NO: 557639 - RNA, 19 nt, Artificial Sequence
  Description of Artificial Sequence: Synthetic oligonucleotide
  Sense strand starting at position 98 of SEQ ID NO: 318374
aaagcuaacuuugugugaa

SEQ ID NO: 557640 - RNA, 19 nt, Artificial Sequence
  Description of Artificial Sequence: Synthetic oligonucleotide
  Antisense strand to SEQ ID NO: 557639
uucacacaaaguuagcuuu

SEQ ID NO: 557641 - RNA, 19 nt, Artificial Sequence
  Description of Artificial Sequence: Synthetic oligonucleotide
  Sense strand starting at position 100 of SEQ ID NO: 318374
agcuaacuuugugugaaca

SEQ ID NO: 557642 - RNA, 19 nt, Artificial Sequence
  Description of Artificial Sequence: Synthetic oligonucleotide
  Antisense strand to SEQ ID NO: 557641
uguucacacaaaguuagcu

SEQ ID NO: 557643 - RNA, 19 nt, Artificial Sequence
  Description of Artificial Sequence: Synthetic oligonucleotide
  Sense strand starting at position 101 of SEQ ID NO: 318374
gcuaacuuugugugaacag

SEQ ID NO: 557644 - RNA, 19 nt, Artificial Sequence
  Description of Artificial Sequence: Synthetic oligonucleotide
  Antisense strand to SEQ ID NO: 557643
cuguucacacaaaguuagc

SEQ ID NO: 557645 - RNA, 19 nt, Artificial Sequence
  Description of Artificial Sequence: Synthetic oligonucleotide
  Sense strand starting at position 333 of SEQ ID NO: 318374
cuauaauggugauuaugau

SEQ ID NO: 557646 - RNA, 19 nt, Artificial Sequence
  Description of Artificial Sequence: Synthetic oligonucleotide
  Antisense strand to SEQ ID NO: 557645
aucauaaucaccauuauag

SEQ ID NO: 557647 - RNA, 19 nt, Artificial Sequence
  Description of Artificial Sequence: Synthetic oligonucleotide
  Sense strand starting at position 552 of SEQ ID NO: 318374
auacaaaugugucuuugac

SEQ ID NO: 557648 - RNA, 19 nt, Artificial Sequence
  Description of Artificial Sequence: Synthetic oligonucleotide
  Antisense strand to SEQ ID NO: 557647
gucaaagacacauuuguau

SEQ ID NO: 557649 - RNA, 19 nt, Artificial Sequence
  Description of Artificial Sequence: Synthetic oligonucleotide
  Sense strand starting at position 554 of SEQ ID NO: 318374
acaaaugugucuuugacaa

SEQ ID NO: 557650 - RNA, 19 nt, Artificial Sequence
  Description of Artificial Sequence: Synthetic oligonucleotide
  Antisense strand to SEQ ID NO: 557649
uugucaaagacacauuugu

SEQ ID NO: 557651 - RNA, 19 nt, Artificial Sequence
  Description of Artificial Sequence: Synthetic oligonucleotide
  Sense strand starting at position 580 of SEQ ID NO: 318374
auggaaugguucuugguaa

SEQ ID NO: 557652 - RNA, 19 nt, Artificial Sequence
  Description of Artificial Sequence: Synthetic oligonucleotide
  Antisense strand to SEQ ID NO: 557651
uuaccaagaaccauuccau

SEQ ID NO: 557653 - RNA, 19 nt, Artificial Sequence
  Description of Artificial Sequence: Synthetic oligonucleotide
  Sense strand starting at position 595 of SEQ ID NO: 318374
guaaccuauugaccaggua

SEQ ID NO: 557654 - RNA, 19 nt, Artificial Sequence
  Description of Artificial Sequence: Synthetic oligonucleotide
  Antisense strand to SEQ ID NO: 557653
uaccuggucaauagguuac

SEQ ID NO: 557655 - RNA, 19 nt, Artificial Sequence
  Description of Artificial Sequence: Synthetic oligonucleotide
  Sense strand starting at position 598 of SEQ ID NO: 318374
accuauugaccagguaaag

SEQ ID NO: 557656 - RNA, 19 nt, Artificial Sequence
  Description of Artificial Sequence: Synthetic oligonucleotide
  Antisense strand to SEQ ID NO: 557655
cuuuaccuggucaauaggu

SEQ ID NO: 557657 - RNA, 19 nt, Artificial Sequence
  Description of Artificial Sequence: Synthetic oligonucleotide
  Sense strand starting at position 607 of SEQ ID NO: 318374
ccagguaaaggcugugauu

SEQ ID NO: 557658 - RNA, 19 nt, Artificial Sequence
  Description of Artificial Sequence: Synthetic oligonucleotide
  Antisense strand to SEQ ID NO: 557657
aaucacagccuuuaccugg

SEQ ID NO: 557659 - RNA, 19 nt, Artificial Sequence
  Description of Artificial Sequence: Synthetic oligonucleotide
  Sense strand starting at position 609 of SEQ ID NO: 318374
agguaaaggcugugauucu

SEQ ID NO: 557660 - RNA, 19 nt, Artificial Sequence
  Description of Artificial Sequence: Synthetic oligonucleotide
  Antisense strand to SEQ ID NO: 557659
agaaucacagccuuuaccu

SEQ ID NO: 557661 - RNA, 19 nt, Artificial Sequence
  Description of Artificial Sequence: Synthetic oligonucleotide
  Sense strand starting at position 618 of SEQ ID NO: 318374
cugugauucuaucugacau

SEQ ID NO: 557662 - RNA, 19 nt, Artificial Sequence
  Description of Artificial Sequence: Synthetic oligonucleotide
  Antisense strand to SEQ ID NO: 557661
augucagauagaaucacag

SEQ ID NO: 557663 - RNA, 19 nt, Artificial Sequence
  Description of Artificial Sequence: Synthetic oligonucleotide
  Sense strand starting at position 665 of SEQ ID NO: 318374
aggauaugccauuguuauc

SEQ ID NO: 557664 - RNA, 19 nt, Artificial Sequence
  Description of Artificial Sequence: Synthetic oligonucleotide
  Antisense strand to SEQ ID NO: 557663
gauaacaauggcauauccu

SEQ ID NO: 557665 - RNA, 19 nt, Artificial Sequence
  Description of Artificial Sequence: Synthetic oligonucleotide
  Sense strand starting at position 679 of SEQ ID NO: 318374
uuaucuuguuugcugaaag

SEQ ID NO: 557666 - RNA, 19 nt, Artificial Sequence
  Description of Artificial Sequence: Synthetic oligonucleotide
  Antisense strand to SEQ ID NO: 557665
cuuucagcaaacaagauaa

SEQ ID NO: 557667 - RNA, 19 nt, Artificial Sequence
  Description of Artificial Sequence: Synthetic oligonucleotide
  Sense strand starting at position 818 of SEQ ID NO: 318374
auauuuagcgacugcuuua

SEQ ID NO: 557668 - RNA, 19 nt, Artificial Sequence
  Description of Artificial Sequence: Synthetic oligonucleotide
  Antisense strand to SEQ ID NO: 557667
uaaagcagucgcuaaauau

SEQ ID NO: 557669 - RNA, 19 nt, Artificial Sequence
  Description of Artificial Sequence: Synthetic oligonucleotide
  Sense strand starting at position 879 of SEQ ID NO: 318374
cugggaagaucaguuguau

SEQ ID NO: 557670 - RNA, 19 nt, Artificial Sequence
  Description of Artificial Sequence: Synthetic oligonucleotide
  Antisense strand to SEQ ID NO: 557669
auacaacugaucuucccag

SEQ ID NO: 557671 - RNA, 19 nt, Artificial Sequence
  Description of Artificial Sequence: Synthetic oligonucleotide
  Sense strand starting at position 891 of SEQ ID NO: 318374
guuguaugugcagaaucau

SEQ ID NO: 557672 - RNA, 19 nt, Artificial Sequence
  Description of Artificial Sequence: Synthetic oligonucleotide
  Antisense strand to SEQ ID NO: 557671
augauucugcacauacaac

SEQ ID NO: 557673 - RNA, 19 nt, Artificial Sequence
  Description of Artificial Sequence: Synthetic oligonucleotide
  Sense strand starting at position 900 of SEQ ID NO: 318374
gcagaaucauccucagaca

SEQ ID NO: 557674 - RNA, 19 nt, Artificial Sequence
  Description of Artificial Sequence: Synthetic oligonucleotide
  Antisense strand to SEQ ID NO: 557673
ugucugaggaugauucugc

SEQ ID NO: 557675 - RNA, 19 nt, Artificial Sequence
  Description of Artificial Sequence: Synthetic oligonucleotide
  Sense strand starting at position 989 of SEQ ID NO: 318374
ucucaauucugucuaggau

SEQ ID NO: 557676 - RNA, 19 nt, Artificial Sequence
  Description of Artificial Sequence: Synthetic oligonucleotide
  Antisense strand to SEQ ID NO: 557675
auccuagacagaauugaga

SEQ ID NO: 557677 - RNA, 19 nt, Artificial Sequence
  Description of Artificial Sequence: Synthetic oligonucleotide
  Sense strand starting at position 990 of SEQ ID NO: 318374
cucaauucugucuaggaug

SEQ ID NO: 557678 - RNA, 19 nt, Artificial Sequence
  Description of Artificial Sequence: Synthetic oligonucleotide
  Antisense strand to SEQ ID NO: 557677
cauccuagacagaauugag

SEQ ID NO: 557679 - RNA, 19 nt, Artificial Sequence
  Description of Artificial Sequence: Synthetic oligonucleotide
  Sense strand starting at position 992 of SEQ ID NO: 318374
caauucugucuaggaugca

SEQ ID NO: 557680 - RNA, 19 nt, Artificial Sequence
  Description of Artificial Sequence: Synthetic oligonucleotide
  Antisense strand to SEQ ID NO: 557679
ugcauccuagacagaauug

SEQ ID NO: 557681 - RNA, 19 nt, Artificial Sequence
  Description of Artificial Sequence: Synthetic oligonucleotide
  Sense strand starting at position 1481 of SEQ ID NO: 318374
guaaacuccuccuuaguga

SEQ ID NO: 557682 - RNA, 19 nt, Artificial Sequence
  Description of Artificial Sequence: Synthetic oligonucleotide
  Antisense strand to SEQ ID NO: 557681
ucacuaaggaggaguuuac

SEQ ID NO: 557683 - RNA, 19 nt, Artificial Sequence
  Description of Artificial Sequence: Synthetic oligonucleotide
  Sense strand starting at position 2704 of SEQ ID NO: 318374
uguguaagccucucgcuuu

SEQ ID NO: 557684 - RNA, 19 nt, Artificial Sequence
  Description of Artificial Sequence: Synthetic oligonucleotide
  Antisense strand to SEQ ID NO: 557683
aaagcgagaggcuuacaca

SEQ ID NO: 557685 - RNA, 19 nt, Artificial Sequence
  Description of Artificial Sequence: Synthetic oligonucleotide
  Sense strand starting at position 2812 of SEQ ID NO: 318374
gcauuugcuugccucucaa

SEQ ID NO: 557686 - RNA, 19 nt, Artificial Sequence
  Description of Artificial Sequence: Synthetic oligonucleotide
  Antisense strand to SEQ ID NO: 557685
uugagaggcaagcaaaugc

SEQ ID NO: 557687 - RNA, 19 nt, Artificial Sequence
  Description of Artificial Sequence: Synthetic oligonucleotide
  Sense strand starting at position 3044 of SEQ ID NO: 318374
acagaaagaagcugucuga

SEQ ID NO: 557688 - RNA, 19 nt, Artificial Sequence
  Description of Artificial Sequence: Synthetic oligonucleotide
  Antisense strand to SEQ ID NO: 557687
ucagacagcuucuuucugu

SEQ ID NO: 557689 - RNA, 19 nt, Artificial Sequence
  Description of Artificial Sequence: Synthetic oligonucleotide
  Sense strand starting at position 3048 of SEQ ID NO: 318374
aaagaagcugucugauggu

SEQ ID NO: 557690 - RNA, 19 nt, Artificial Sequence
  Description of Artificial Sequence: Synthetic oligonucleotide
  Antisense strand to SEQ ID NO: 557689
accaucagacagcuucuuu

SEQ ID NO: 557691 - RNA, 19 nt, Artificial Sequence
  Description of Artificial Sequence: Synthetic oligonucleotide
  Sense strand starting at position 3198 of SEQ ID NO: 318374
cccucauucuccuugguga

SEQ ID NO: 557692 - RNA, 19 nt, Artificial Sequence
  Description of Artificial Sequence: Synthetic oligonucleotide
  Antisense strand to SEQ ID NO: 557691
ucaccaaggagaaugaggg

SEQ ID NO: 557693 - RNA, 19 nt, Artificial Sequence
  Description of Artificial Sequence: Synthetic oligonucleotide
  Sense strand starting at position 3289 of SEQ ID NO: 318374
ccuuguaaacucugaguua

SEQ ID NO: 557694 - RNA, 19 nt, Artificial Sequence
  Description of Artificial Sequence: Synthetic oligonucleotide
  Antisense strand to SEQ ID NO: 557693
uaacucagaguuuacaagg

SEQ ID NO: 557695 - RNA, 19 nt, Artificial Sequence
  Description of Artificial Sequence: Synthetic oligonucleotide
  Sense strand starting at position 3292 of SEQ ID NO: 318374
uguaaacucugaguuacag

SEQ ID NO: 557696 - RNA, 19 nt, Artificial Sequence
  Description of Artificial Sequence: Synthetic oligonucleotide
  Antisense strand to SEQ ID NO: 557695
cuguaacucagaguuuaca

SEQ ID NO: 557697 - RNA, 19 nt, Artificial Sequence
  Description of Artificial Sequence: Synthetic oligonucleotide
  Sense strand starting at position 3350 of SEQ ID NO: 318374
aguaauuccugcccgauuu

SEQ ID NO: 557698 - RNA, 19 nt, Artificial Sequence
  Description of Artificial Sequence: Synthetic oligonucleotide
  Antisense strand to SEQ ID NO: 557697
aaaucgggcaggaauuacu

SEQ ID NO: 557699 - RNA, 19 nt, Artificial Sequence
  Description of Artificial Sequence: Synthetic oligonucleotide
  Sense strand starting at position 3455 of SEQ ID NO: 318374
ggcuuaaugcaaggcacaa

SEQ ID NO: 557700 - RNA, 19 nt, Artificial Sequence
  Description of Artificial Sequence: Synthetic oligonucleotide
  Antisense strand to SEQ ID NO: 557699
uugugccuugcauuaagcc

SEQ ID NO: 557701 - RNA, 19 nt, Artificial Sequence
  Description of Artificial Sequence: Synthetic oligonucleotide
  Sense strand starting at position 3547 of SEQ ID NO: 318374
cuuggaugugacuggauga

SEQ ID NO: 557702 - RNA, 19 nt, Artificial Sequence
  Description of Artificial Sequence: Synthetic oligonucleotide
  Antisense strand to SEQ ID NO: 557701
ucauccagucacauccaag

SEQ ID NO: 557703 - RNA, 19 nt, Artificial Sequence
  Description of Artificial Sequence: Synthetic oligonucleotide
  Sense strand starting at position 3548 of SEQ ID NO: 318374
uuggaugugacuggaugaa

SEQ ID NO: 557704 - RNA, 19 nt, Artificial Sequence
  Description of Artificial Sequence: Synthetic oligonucleotide
  Antisense strand to SEQ ID NO: 557703
uucauccagucacauccaa

SEQ ID NO: 557705 - RNA, 19 nt, Artificial Sequence
  Description of Artificial Sequence: Synthetic oligonucleotide
  Sense strand starting at position 3628 of SEQ ID NO: 318374
ucaguuauacagggagagu

SEQ ID NO: 557706 - RNA, 19 nt, Artificial Sequence
  Description of Artificial Sequence: Synthetic oligonucleotide
  Antisense strand to SEQ ID NO: 557705
acucucccuguauaacuga

SEQ ID NO: 557707 - RNA, 19 nt, Artificial Sequence
  Description of Artificial Sequence: Synthetic oligonucleotide
  Sense strand starting at position 3639 of SEQ ID NO: 318374
gggagagucuaaccuuauu

SEQ ID NO: 557708 - RNA, 19 nt, Artificial Sequence
  Description of Artificial Sequence: Synthetic oligonucleotide
  Antisense strand to SEQ ID NO: 557707
aauaagguuagacucuccc

SEQ ID NO: 557709 - RNA, 19 nt, Artificial Sequence
  Description of Artificial Sequence: Synthetic oligonucleotide
  Sense strand starting at position 3790 of SEQ ID NO: 318374
cagguuggguccuccuaga

SEQ ID NO: 557710 - RNA, 19 nt, Artificial Sequence
  Description of Artificial Sequence: Synthetic oligonucleotide
  Antisense strand to SEQ ID NO: 557709
ucuaggaggacccaaccug

SEQ ID NO: 557711 - RNA, 19 nt, Artificial Sequence
  Description of Artificial Sequence: Synthetic oligonucleotide
  Sense strand starting at position 3811 of SEQ ID NO: 318374
cagauucugagaugguguu

SEQ ID NO: 557712 - RNA, 19 nt, Artificial Sequence
  Description of Artificial Sequence: Synthetic oligonucleotide
  Antisense strand to SEQ ID NO: 557711
aacaccaucucagaaucug

SEQ ID NO: 557713 - RNA, 19 nt, Artificial Sequence
  Description of Artificial Sequence: Synthetic oligonucleotide
  Sense strand starting at position 3871 of SEQ ID NO: 318374
caacauuugugggaggaaa

SEQ ID NO: 557714 - RNA, 19 nt, Artificial Sequence
  Description of Artificial Sequence: Synthetic oligonucleotide
  Antisense strand to SEQ ID NO: 557713
uuuccucccacaaauguug

SEQ ID NO: 557715 - RNA, 19 nt, Artificial Sequence
  Description of Artificial Sequence: Synthetic oligonucleotide
  Sense strand starting at position 20 of SEQ ID NO: 318375
agcagaaggucuucaguga

SEQ ID NO: 557716 - RNA, 19 nt, Artificial Sequence
  Description of Artificial Sequence: Synthetic oligonucleotide
  Antisense strand to SEQ ID NO: 557715
ucacugaagaccuucugcu

SEQ ID NO: 557717 - RNA, 19 nt, Artificial Sequence
  Description of Artificial Sequence: Synthetic oligonucleotide
  Sense strand starting at position 21 of SEQ ID NO: 318375
gcagaaggucuucagugag

SEQ ID NO: 557718 - RNA, 19 nt, Artificial Sequence
  Description of Artificial Sequence: Synthetic oligonucleotide
  Antisense strand to SEQ ID NO: 557717
cucacugaagaccuucugc

SEQ ID NO: 557719 - RNA, 19 nt, Artificial Sequence
  Description of Artificial Sequence: Synthetic oligonucleotide
  Sense strand starting at position 179 of SEQ ID NO: 318375
ugaacaaucucugaugaac

SEQ ID NO: 557720 - RNA, 19 nt, Artificial Sequence
  Description of Artificial Sequence: Synthetic oligonucleotide
  Antisense strand to SEQ ID NO: 557719
guucaucagagauuguuca

SEQ ID NO: 557721 - RNA, 19 nt, Artificial Sequence
  Description of Artificial Sequence: Synthetic oligonucleotide
  Sense strand starting at position 262 of SEQ ID NO: 318375
auggcuagcacuuggaaga

SEQ ID NO: 557722 - RNA, 19 nt, Artificial Sequence
  Description of Artificial Sequence: Synthetic oligonucleotide
  Antisense strand to SEQ ID NO: 557721
ucuuccaagugcuagccau

SEQ ID NO: 557723 - RNA, 19 nt, Artificial Sequence
  Description of Artificial Sequence: Synthetic oligonucleotide
  Sense strand starting at position 303 of SEQ ID NO: 318375
ccuggaagaggugguguau

SEQ ID NO: 557724 - RNA, 19 nt, Artificial Sequence
  Description of Artificial Sequence: Synthetic oligonucleotide
  Antisense strand to SEQ ID NO: 557723
auacaccaccucuuccagg

SEQ ID NO: 557725 - RNA, 19 nt, Artificial Sequence
  Description of Artificial Sequence: Synthetic oligonucleotide
  Sense strand starting at position 309 of SEQ ID NO: 318375
agaggugguguauggaaua

SEQ ID NO: 557726 - RNA, 19 nt, Artificial Sequence
  Description of Artificial Sequence: Synthetic oligonucleotide
  Antisense strand to SEQ ID NO: 557725
uauuccauacaccaccucu

SEQ ID NO: 557727 - RNA, 19 nt, Artificial Sequence
  Description of Artificial Sequence: Synthetic oligonucleotide
  Sense strand starting at position 408 of SEQ ID NO: 318375
gcauuccuucugggaauuc

SEQ ID NO: 557728 - RNA, 19 nt, Artificial Sequence
  Description of Artificial Sequence: Synthetic oligonucleotide
  Antisense strand to SEQ ID NO: 557727
gaauucccagaaggaaugc

SEQ ID NO: 557729 - RNA, 19 nt, Artificial Sequence
  Description of Artificial Sequence: Synthetic oligonucleotide
  Sense strand starting at position 417 of SEQ ID NO: 318375
cugggaauucugggaucug

SEQ ID NO: 557730 - RNA, 19 nt, Artificial Sequence
  Description of Artificial Sequence: Synthetic oligonucleotide
  Antisense strand to SEQ ID NO: 557729
cagaucccagaauucccag

SEQ ID NO: 557731 - RNA, 19 nt, Artificial Sequence
  Description of Artificial Sequence: Synthetic oligonucleotide
  Sense strand starting at position 548 of SEQ ID NO: 318375
ccucaaguuccucauguau

SEQ ID NO: 557732 - RNA, 19 nt, Artificial Sequence
  Description of Artificial Sequence: Synthetic oligonucleotide
  Antisense strand to SEQ ID NO: 557731
auacaugaggaacuugagg

SEQ ID NO: 557733 - RNA, 19 nt, Artificial Sequence
  Description of Artificial Sequence: Synthetic oligonucleotide
  Sense strand starting at position 603 of SEQ ID NO: 318375
gcuggugagcauuacauga

SEQ ID NO: 557734 - RNA, 19 nt, Artificial Sequence
  Description of Artificial Sequence: Synthetic oligonucleotide
  Antisense strand to SEQ ID NO: 557733
ucauguaaugcucaccagc

SEQ ID NO: 557735 - RNA, 19 nt, Artificial Sequence
  Description of Artificial Sequence: Synthetic oligonucleotide
  Sense strand starting at position 605 of SEQ ID NO: 318375
uggugagcauuacaugaga

SEQ ID NO: 557736 - RNA, 19 nt, Artificial Sequence
  Description of Artificial Sequence: Synthetic oligonucleotide
  Antisense strand to SEQ ID NO: 557735
ucucauguaaugcucacca

SEQ ID NO: 557737 - RNA, 19 nt, Artificial Sequence
  Description of Artificial Sequence: Synthetic oligonucleotide
  Sense strand starting at position 607 of SEQ ID NO: 318375
gugagcauuacaugagauc

SEQ ID NO: 557738 - RNA, 19 nt, Artificial Sequence
  Description of Artificial Sequence: Synthetic oligonucleotide
  Antisense strand to SEQ ID NO: 557737
gaucucauguaaugcucac

SEQ ID NO: 557739 - RNA, 19 nt, Artificial Sequence
  Description of Artificial Sequence: Synthetic oligonucleotide
  Sense strand starting at position 610 of SEQ ID NO: 318375
agcauuacaugagaucagu

SEQ ID NO: 557740 - RNA, 19 nt, Artificial Sequence
  Description of Artificial Sequence: Synthetic oligonucleotide
  Antisense strand to SEQ ID NO: 557739
acugaucucauguaaugcu

SEQ ID NO: 557741 - RNA, 19 nt, Artificial Sequence
  Description of Artificial Sequence: Synthetic oligonucleotide
  Sense strand starting at position 619 of SEQ ID NO: 318375
ugagaucagucucauaaag

SEQ ID NO: 557742 - RNA, 19 nt, Artificial Sequence
  Description of Artificial Sequence: Synthetic oligonucleotide
  Antisense strand to SEQ ID NO: 557741
cuuuaugagacugaucuca

SEQ ID NO: 557743 - RNA, 19 nt, Artificial Sequence
  Description of Artificial Sequence: Synthetic oligonucleotide
  Sense strand starting at position 621 of SEQ ID NO: 318375
agaucagucucauaaagca

SEQ ID NO: 557744 - RNA, 19 nt, Artificial Sequence
  Description of Artificial Sequence: Synthetic oligonucleotide
  Antisense strand to SEQ ID NO: 557743
ugcuuuaugagacugaucu

SEQ ID NO: 557745 - RNA, 19 nt, Artificial Sequence
  Description of Artificial Sequence: Synthetic oligonucleotide
  Sense strand starting at position 1015 of SEQ ID NO: 318375
aggauaucuuaagaaucua

SEQ ID NO: 557746 - RNA, 19 nt, Artificial Sequence
  Description of Artificial Sequence: Synthetic oligonucleotide
  Antisense strand to SEQ ID NO: 557745
uagauucuuaagauauccu

SEQ ID NO: 557747 - RNA, 19 nt, Artificial Sequence
  Description of Artificial Sequence: Synthetic oligonucleotide
  Sense strand starting at position 1084 of SEQ ID NO: 318375
ggccuaaagccagacugau

SEQ ID NO: 557748 - RNA, 19 nt, Artificial Sequence
  Description of Artificial Sequence: Synthetic oligonucleotide
  Antisense strand to SEQ ID NO: 557747
aucagucuggcuuuaggcc

SEQ ID NO: 557749 - RNA, 19 nt, Artificial Sequence
  Description of Artificial Sequence: Synthetic oligonucleotide
  Sense strand starting at position 1280 of SEQ ID NO: 318375
cccugaggauuguuugaug

SEQ ID NO: 557750 - RNA, 19 nt, Artificial Sequence
  Description of Artificial Sequence: Synthetic oligonucleotide
  Antisense strand to SEQ ID NO: 557749
caucaaacaauccucaggg

SEQ ID NO: 557751 - RNA, 19 nt, Artificial Sequence
  Description of Artificial Sequence: Synthetic oligonucleotide
  Sense strand starting at position 1283 of SEQ ID NO: 318375
ugaggauuguuugaugaag

SEQ ID NO: 557752 - RNA, 19 nt, Artificial Sequence
  Description of Artificial Sequence: Synthetic oligonucleotide
  Antisense strand to SEQ ID NO: 557751
cuucaucaaacaauccuca

SEQ ID NO: 557753 - RNA, 19 nt, Artificial Sequence
  Description of Artificial Sequence: Synthetic oligonucleotide
  Sense strand starting at position 1923 of SEQ ID NO: 318375
gcuccaaguugcucacaga

SEQ ID NO: 557754 - RNA, 19 nt, Artificial Sequence
  Description of Artificial Sequence: Synthetic oligonucleotide
  Antisense strand to SEQ ID NO: 557753
ucugugagcaacuuggagc

SEQ ID NO: 557755 - RNA, 19 nt, Artificial Sequence
  Description of Artificial Sequence: Synthetic oligonucleotide
  Sense strand starting at position 2380 of SEQ ID NO: 318375
aucauuucucagugccuca

SEQ ID NO: 557756 - RNA, 19 nt, Artificial Sequence
  Description of Artificial Sequence: Synthetic oligonucleotide
  Antisense strand to SEQ ID NO: 557755
ugaggcacugagaaaugau

SEQ ID NO: 557757 - RNA, 19 nt, Artificial Sequence
  Description of Artificial Sequence: Synthetic oligonucleotide
  Sense strand starting at position 2422 of SEQ ID NO: 318375
ucugaucaucucugugguu

SEQ ID NO: 557758 - RNA, 19 nt, Artificial Sequence
  Description of Artificial Sequence: Synthetic oligonucleotide
  Antisense strand to SEQ ID NO: 557757
aaccacagagaugaucaga

SEQ ID NO: 557759 - RNA, 19 nt, Artificial Sequence
  Description of Artificial Sequence: Synthetic oligonucleotide
  Sense strand starting at position 2424 of SEQ ID NO: 318375
ugaucaucucugugguuga

SEQ ID NO: 557760 - RNA, 19 nt, Artificial Sequence
  Description of Artificial Sequence: Synthetic oligonucleotide
  Antisense strand to SEQ ID NO: 557759
ucaaccacagagaugauca

SEQ ID NO: 557761 - RNA, 19 nt, Artificial Sequence
  Description of Artificial Sequence: Synthetic oligonucleotide
  Sense strand starting at position 2552 of SEQ ID NO: 318375
caggcuagugagcaagaua

SEQ ID NO: 557762 - RNA, 19 nt, Artificial Sequence
  Description of Artificial Sequence: Synthetic oligonucleotide
  Antisense strand to SEQ ID NO: 557761
uaucuugcucacuagccug

SEQ ID NO: 557763 - RNA, 19 nt, Artificial Sequence
  Description of Artificial Sequence: Synthetic oligonucleotide
  Sense strand starting at position 2555 of SEQ ID NO: 318375
gcuagugagcaagauauuc

SEQ ID NO: 557764 - RNA, 19 nt, Artificial Sequence
  Description of Artificial Sequence: Synthetic oligonucleotide
  Antisense strand to SEQ ID NO: 557763
gaauaucuugcucacuagc

SEQ ID NO: 557765 - RNA, 19 nt, Artificial Sequence
  Description of Artificial Sequence: Synthetic oligonucleotide
  Sense strand starting at position 2704 of SEQ ID NO: 318375
ccaagaugaucagccguuu

SEQ ID NO: 557766 - RNA, 19 nt, Artificial Sequence
  Description of Artificial Sequence: Synthetic oligonucleotide
  Antisense strand to SEQ ID NO: 557765
aaacggcugaucaucuugg

SEQ ID NO: 557767 - RNA, 19 nt, Artificial Sequence
  Description of Artificial Sequence: Synthetic oligonucleotide
  Sense strand starting at position 2801 of SEQ ID NO: 318375
auuggauaucucuggauau

SEQ ID NO: 557768 - RNA, 19 nt, Artificial Sequence
  Description of Artificial Sequence: Synthetic oligonucleotide
  Antisense strand to SEQ ID NO: 557767
auauccagagauauccaau

SEQ ID NO: 557769 - RNA, 19 nt, Artificial Sequence
  Description of Artificial Sequence: Synthetic oligonucleotide
  Sense strand starting at position 2808 of SEQ ID NO: 318375
aucucuggauauugacaga

SEQ ID NO: 557770 - RNA, 19 nt, Artificial Sequence
  Description of Artificial Sequence: Synthetic oligonucleotide
  Antisense strand to SEQ ID NO: 557769
ucugucaauauccagagau

SEQ ID NO: 557771 - RNA, 19 nt, Artificial Sequence
  Description of Artificial Sequence: Synthetic oligonucleotide
  Sense strand starting at position 2811 of SEQ ID NO: 318375
ucuggauauugacagauac

SEQ ID NO: 557772 - RNA, 19 nt, Artificial Sequence
  Description of Artificial Sequence: Synthetic oligonucleotide
  Antisense strand to SEQ ID NO: 557771
guaucugucaauauccaga

SEQ ID NO: 557773 - RNA, 19 nt, Artificial Sequence
  Description of Artificial Sequence: Synthetic oligonucleotide
  Sense strand starting at position 2858 of SEQ ID NO: 318375
ggugcaaggagaggauuau

SEQ ID NO: 557774 - RNA, 19 nt, Artificial Sequence
  Description of Artificial Sequence: Synthetic oligonucleotide
  Antisense strand to SEQ ID NO: 557773
auaauccucuccuugcacc

SEQ ID NO: 557775 - RNA, 19 nt, Artificial Sequence
  Description of Artificial Sequence: Synthetic oligonucleotide
  Sense strand starting at position 2963 of SEQ ID NO: 318375
agaacuaggucucaugaga

SEQ ID NO: 557776 - RNA, 19 nt, Artificial Sequence
  Description of Artificial Sequence: Synthetic oligonucleotide
  Antisense strand to SEQ ID NO: 557775
ucucaugagaccuaguucu

SEQ ID NO: 557777 - RNA, 19 nt, Artificial Sequence
  Description of Artificial Sequence: Synthetic oligonucleotide
  Sense strand starting at position 2968 of SEQ ID NO: 318375
uaggucucaugagacacau

SEQ ID NO: 557778 - RNA, 19 nt, Artificial Sequence
  Description of Artificial Sequence: Synthetic oligonucleotide
  Antisense strand to SEQ ID NO: 557777
augugucucaugagaccua

SEQ ID NO: 557779 - RNA, 19 nt, Artificial Sequence
  Description of Artificial Sequence: Synthetic oligonucleotide
  Sense strand starting at position 3027 of SEQ ID NO: 318375
ccuauuccaguguagauga

SEQ ID NO: 557780 - RNA, 19 nt, Artificial Sequence
  Description of Artificial Sequence: Synthetic oligonucleotide
  Antisense strand to SEQ ID NO: 557779
ucaucuacacuggaauagg

SEQ ID NO: 557781 - RNA, 19 nt, Artificial Sequence
  Description of Artificial Sequence: Synthetic oligonucleotide
  Sense strand starting at position 3489 of SEQ ID NO: 318375
ugccaagacuccuccaguu

SEQ ID NO: 557782 - RNA, 19 nt, Artificial Sequence
  Description of Artificial Sequence: Synthetic oligonucleotide
  Antisense strand to SEQ ID NO: 557781
aacuggaggagucuuggca

SEQ ID NO: 557783 - RNA, 19 nt, Artificial Sequence
  Description of Artificial Sequence: Synthetic oligonucleotide
  Sense strand starting at position 3611 of SEQ ID NO: 318375
ggcauauagagugggcuua

SEQ ID NO: 557784 - RNA, 19 nt, Artificial Sequence
  Description of Artificial Sequence: Synthetic oligonucleotide
  Antisense strand to SEQ ID NO: 557783
uaagcccacucuauaugcc

SEQ ID NO: 557785 - RNA, 19 nt, Artificial Sequence
  Description of Artificial Sequence: Synthetic oligonucleotide
  Sense strand starting at position 3681 of SEQ ID NO: 318375
gaagaaagcugucccaggu

SEQ ID NO: 557786 - RNA, 19 nt, Artificial Sequence
  Description of Artificial Sequence: Synthetic oligonucleotide
  Antisense strand to SEQ ID NO: 557785
accugggacagcuuucuuc

SEQ ID NO: 557787 - RNA, 19 nt, Artificial Sequence
  Description of Artificial Sequence: Synthetic oligonucleotide
  Sense strand starting at position 3685 of SEQ ID NO: 318375
aaagcugucccaggugaca

SEQ ID NO: 557788 - RNA, 19 nt, Artificial Sequence
  Description of Artificial Sequence: Synthetic oligonucleotide
  Antisense strand to SEQ ID NO: 557787
ugucaccugggacagcuuu

SEQ ID NO: 557789 - RNA, 19 nt, Artificial Sequence
  Description of Artificial Sequence: Synthetic oligonucleotide
  Sense strand starting at position 3789 of SEQ ID NO: 318375
agaggauuugcgugagcug

SEQ ID NO: 557790 - RNA, 19 nt, Artificial Sequence
  Description of Artificial Sequence: Synthetic oligonucleotide
  Antisense strand to SEQ ID NO: 557789
cagcucacgcaaauccucu

SEQ ID NO: 557791 - RNA, 19 nt, Artificial Sequence
  Description of Artificial Sequence: Synthetic oligonucleotide
  Sense strand starting at position 3837 of SEQ ID NO: 318375
uugcauuucuuggucuagu

SEQ ID NO: 557792 - RNA, 19 nt, Artificial Sequence
  Description of Artificial Sequence: Synthetic oligonucleotide
  Antisense strand to SEQ ID NO: 557791
acuagaccaagaaaugcaa

SEQ ID NO: 557793 - RNA, 19 nt, Artificial Sequence
  Description of Artificial Sequence: Synthetic oligonucleotide
  Sense strand starting at position 3903 of SEQ ID NO: 318375
ggagaaguguucucagacu

SEQ ID NO: 557794 - RNA, 19 nt, Artificial Sequence
  Description of Artificial Sequence: Synthetic oligonucleotide
  Antisense strand to SEQ ID NO: 557793
agucugagaacacuucucc

SEQ ID NO: 557795 - RNA, 19 nt, Artificial Sequence
  Description of Artificial Sequence: Synthetic oligonucleotide
  Sense strand starting at position 546 of SEQ ID NO: 318376
gaugaaaggcucugggaug

SEQ ID NO: 557796 - RNA, 19 nt, Artificial Sequence
  Description of Artificial Sequence: Synthetic oligonucleotide
  Antisense strand to SEQ ID NO: 557795
caucccagagccuuucauc

SEQ ID NO: 557797 - RNA, 19 nt, Artificial Sequence
  Description of Artificial Sequence: Synthetic oligonucleotide
  Sense strand starting at position 553 of SEQ ID NO: 318376
ggcucugggauguguugaa

SEQ ID NO: 557798 - RNA, 19 nt, Artificial Sequence
  Description of Artificial Sequence: Synthetic oligonucleotide
  Antisense strand to SEQ ID NO: 557797
uucaacacaucccagagcc

SEQ ID NO: 557799 - RNA, 19 nt, Artificial Sequence
  Description of Artificial Sequence: Synthetic oligonucleotide
  Sense strand starting at position 974 of SEQ ID NO: 318376
gggucugaguccucucuuu

SEQ ID NO: 557800 - RNA, 19 nt, Artificial Sequence
  Description of Artificial Sequence: Synthetic oligonucleotide
  Antisense strand to SEQ ID NO: 557799
aaagagaggacucagaccc

SEQ ID NO: 557801 - RNA, 19 nt, Artificial Sequence
  Description of Artificial Sequence: Synthetic oligonucleotide
  Sense strand starting at position 1204 of SEQ ID NO: 318376
ggcuuugugucaucuugug

SEQ ID NO: 557802 - RNA, 19 nt, Artificial Sequence
  Description of Artificial Sequence: Synthetic oligonucleotide
  Antisense strand to SEQ ID NO: 557801
cacaagaugacacaaagcc

SEQ ID NO: 557803 - RNA, 19 nt, Artificial Sequence
  Description of Artificial Sequence: Synthetic oligonucleotide
  Sense strand starting at position 1301 of SEQ ID NO: 318376
ggugacugaggucgugaau

SEQ ID NO: 557804 - RNA, 19 nt, Artificial Sequence
  Description of Artificial Sequence: Synthetic oligonucleotide
  Antisense strand to SEQ ID NO: 557803
auucacgaccucagucacc

SEQ ID NO: 557805 - RNA, 19 nt, Artificial Sequence
  Description of Artificial Sequence: Synthetic oligonucleotide
  Sense strand starting at position 1304 of SEQ ID NO: 318376
gacugaggucgugaaugag

SEQ ID NO: 557806 - RNA, 19 nt, Artificial Sequence
  Description of Artificial Sequence: Synthetic oligonucleotide
  Antisense strand to SEQ ID NO: 557805
cucauucacgaccucaguc

SEQ ID NO: 557807 - RNA, 19 nt, Artificial Sequence
  Description of Artificial Sequence: Synthetic oligonucleotide
  Sense strand starting at position 1307 of SEQ ID NO: 318376
ugaggucgugaaugagaga

SEQ ID NO: 557808 - RNA, 19 nt, Artificial Sequence
  Description of Artificial Sequence: Synthetic oligonucleotide
  Antisense strand to SEQ ID NO: 557807
ucucucauucacgaccuca

SEQ ID NO: 557809 - RNA, 19 nt, Artificial Sequence
  Description of Artificial Sequence: Synthetic oligonucleotide
  Sense strand starting at position 1355 of SEQ ID NO: 318376
ggaccucugucuucucaga

SEQ ID NO: 557810 - RNA, 19 nt, Artificial Sequence
  Description of Artificial Sequence: Synthetic oligonucleotide
  Antisense strand to SEQ ID NO: 557809
ucugagaagacagaggucc

SEQ ID NO: 557811 - RNA, 19 nt, Artificial Sequence
  Description of Artificial Sequence: Synthetic oligonucleotide
  Sense strand starting at position 1357 of SEQ ID NO: 318376
accucugucuucucagauu

SEQ ID NO: 557812 - RNA, 19 nt, Artificial Sequence
  Description of Artificial Sequence: Synthetic oligonucleotide
  Antisense strand to SEQ ID NO: 557811
aaucugagaagacagaggu

SEQ ID NO: 557813 - RNA, 19 nt, Artificial Sequence
  Description of Artificial Sequence: Synthetic oligonucleotide
  Sense strand starting at position 1480 of SEQ ID NO: 318376
gggugagucugaagaguuu

SEQ ID NO: 557814 - RNA, 19 nt, Artificial Sequence
  Description of Artificial Sequence: Synthetic oligonucleotide
  Antisense strand to SEQ ID NO: 557813
aaacucuucagacucaccc

SEQ ID NO: 557815 - RNA, 19 nt, Artificial Sequence
  Description of Artificial Sequence: Synthetic oligonucleotide
  Sense strand starting at position 1598 of SEQ ID NO: 318376
gcgugaacucuugggagau

SEQ ID NO: 557816 - RNA, 19 nt, Artificial Sequence
  Description of Artificial Sequence: Synthetic oligonucleotide
  Antisense strand to SEQ ID NO: 557815
aucucccaagaguucacgc

SEQ ID NO: 557817 - RNA, 19 nt, Artificial Sequence
  Description of Artificial Sequence: Synthetic oligonucleotide
  Sense strand starting at position 1609 of SEQ ID NO: 318376
ugggagauucuucgcggga

SEQ ID NO: 557818 - RNA, 19 nt, Artificial Sequence
  Description of Artificial Sequence: Synthetic oligonucleotide
  Antisense strand to SEQ ID NO: 557817
ucccgcgaagaaucuccca

SEQ ID NO: 557819 - RNA, 19 nt, Artificial Sequence
  Description of Artificial Sequence: Synthetic oligonucleotide
  Sense strand starting at position 1610 of SEQ ID NO: 318376
gggagauucuucgcgggau

SEQ ID NO: 557820 - RNA, 19 nt, Artificial Sequence
  Description of Artificial Sequence: Synthetic oligonucleotide
  Antisense strand to SEQ ID NO: 557819
aucccgcgaagaaucuccc

SEQ ID NO: 557821 - RNA, 19 nt, Artificial Sequence
  Description of Artificial Sequence: Synthetic oligonucleotide
  Sense strand starting at position 1821 of SEQ ID NO: 318376
gccagacucacccgugaga

SEQ ID NO: 557822 - RNA, 19 nt, Artificial Sequence
  Description of Artificial Sequence: Synthetic oligonucleotide
  Antisense strand to SEQ ID NO: 557821
ucucacgggugagucuggc

SEQ ID NO: 557823 - RNA, 19 nt, Artificial Sequence
  Description of Artificial Sequence: Synthetic oligonucleotide
  Sense strand starting at position 1823 of SEQ ID NO: 318376
cagacucacccgugagaug

SEQ ID NO: 557824 - RNA, 19 nt, Artificial Sequence
  Description of Artificial Sequence: Synthetic oligonucleotide
  Antisense strand to SEQ ID NO: 557823
caucucacgggugagucug

SEQ ID NO: 557825 - RNA, 19 nt, Artificial Sequence
  Description of Artificial Sequence: Synthetic oligonucleotide
  Sense strand starting at position 2168 of SEQ ID NO: 318376
ccacucagcucucagagau

SEQ ID NO: 557826 - RNA, 19 nt, Artificial Sequence
  Description of Artificial Sequence: Synthetic oligonucleotide
  Antisense strand to SEQ ID NO: 557825
aucucugagagcugagugg

SEQ ID NO: 557827 - RNA, 19 nt, Artificial Sequence
  Description of Artificial Sequence: Synthetic oligonucleotide
  Sense strand starting at position 2517 of SEQ ID NO: 318376
acagaaagguccucagacu

SEQ ID NO: 557828 - RNA, 19 nt, Artificial Sequence
  Description of Artificial Sequence: Synthetic oligonucleotide
  Antisense strand to SEQ ID NO: 557827
agucugaggaccuuucugu

SEQ ID NO: 557829 - RNA, 19 nt, Artificial Sequence
  Description of Artificial Sequence: Synthetic oligonucleotide
  Sense strand starting at position 2569 of SEQ ID NO: 318376
gguggucccugacuuguau

SEQ ID NO: 557830 - RNA, 19 nt, Artificial Sequence
  Description of Artificial Sequence: Synthetic oligonucleotide
  Antisense strand to SEQ ID NO: 557829
auacaagucagggaccacc

SEQ ID NO: 557831 - RNA, 19 nt, Artificial Sequence
  Description of Artificial Sequence: Synthetic oligonucleotide
  Sense strand starting at position 2690 of SEQ ID NO: 318376
cguccuuugccaggagauu

SEQ ID NO: 557832 - RNA, 19 nt, Artificial Sequence
  Description of Artificial Sequence: Synthetic oligonucleotide
  Antisense strand to SEQ ID NO: 557831
aaucuccuggcaaaggacg

SEQ ID NO: 557833 - RNA, 19 nt, Artificial Sequence
  Description of Artificial Sequence: Synthetic oligonucleotide
  Sense strand starting at position 2717 of SEQ ID NO: 318376
caggucuccugagaaagua

SEQ ID NO: 557834 - RNA, 19 nt, Artificial Sequence
  Description of Artificial Sequence: Synthetic oligonucleotide
  Antisense strand to SEQ ID NO: 557833
uacuuucucaggagaccug

SEQ ID NO: 557835 - RNA, 19 nt, Artificial Sequence
  Description of Artificial Sequence: Synthetic oligonucleotide
  Sense strand starting at position 2756 of SEQ ID NO: 318376
cguggcugugcaguguaaa

SEQ ID NO: 557836 - RNA, 19 nt, Artificial Sequence
  Description of Artificial Sequence: Synthetic oligonucleotide
  Antisense strand to SEQ ID NO: 557835
uuuacacugcacagccacg

SEQ ID NO: 557837 - RNA, 19 nt, Artificial Sequence
  Description of Artificial Sequence: Synthetic oligonucleotide
  Sense strand starting at position 3015 of SEQ ID NO: 318376
uuagucaagcugugauaag

SEQ ID NO: 557838 - RNA, 19 nt, Artificial Sequence
  Description of Artificial Sequence: Synthetic oligonucleotide
  Antisense strand to SEQ ID NO: 557837
cuuaucacagcuugacuaa

SEQ ID NO: 557839 - RNA, 19 nt, Artificial Sequence
  Description of Artificial Sequence: Synthetic oligonucleotide
  Sense strand starting at position 3155 of SEQ ID NO: 318376
ggcccuucagaguagaaug

SEQ ID NO: 557840 - RNA, 19 nt, Artificial Sequence
  Description of Artificial Sequence: Synthetic oligonucleotide
  Antisense strand to SEQ ID NO: 557839
cauucuacucugaagggcc

SEQ ID NO: 557841 - RNA, 19 nt, Artificial Sequence
  Description of Artificial Sequence: Synthetic oligonucleotide
  Sense strand starting at position 3206 of SEQ ID NO: 318376
ucuguucagcugggagaga

SEQ ID NO: 557842 - RNA, 19 nt, Artificial Sequence
  Description of Artificial Sequence: Synthetic oligonucleotide
  Antisense strand to SEQ ID NO: 557841
ucucucccagcugaacaga

SEQ ID NO: 557843 - RNA, 19 nt, Artificial Sequence
  Description of Artificial Sequence: Synthetic oligonucleotide
  Sense strand starting at position 3224 of SEQ ID NO: 318376
aaacaagugguguguggua

SEQ ID NO: 557844 - RNA, 19 nt, Artificial Sequence
  Description of Artificial Sequence: Synthetic oligonucleotide
  Antisense strand to SEQ ID NO: 557843
uaccacacaccacuuguuu

SEQ ID NO: 557845 - RNA, 19 nt, Artificial Sequence
  Description of Artificial Sequence: Synthetic oligonucleotide
  Sense strand starting at position 3236 of SEQ ID NO: 318376
ugugguagcgguguuuaua

SEQ ID NO: 557846 - RNA, 19 nt, Artificial Sequence
  Description of Artificial Sequence: Synthetic oligonucleotide
  Antisense strand to SEQ ID NO: 557845
uauaaacaccgcuaccaca

SEQ ID NO: 557847 - RNA, 19 nt, Artificial Sequence
  Description of Artificial Sequence: Synthetic oligonucleotide
  Sense strand starting at position 3237 of SEQ ID NO: 318376
gugguagcgguguuuauau

SEQ ID NO: 557848 - RNA, 19 nt, Artificial Sequence
  Description of Artificial Sequence: Synthetic oligonucleotide
  Antisense strand to SEQ ID NO: 557847
auauaaacaccgcuaccac

SEQ ID NO: 557849 - RNA, 19 nt, Artificial Sequence
  Description of Artificial Sequence: Synthetic oligonucleotide
  Sense strand starting at position 3245 of SEQ ID NO: 318376
gguguuuauaugggagugu

SEQ ID NO: 557850 - RNA, 19 nt, Artificial Sequence
  Description of Artificial Sequence: Synthetic oligonucleotide
  Antisense strand to SEQ ID NO: 557849
acacucccauauaaacacc

SEQ ID NO: 557851 - RNA, 19 nt, Artificial Sequence
  Description of Artificial Sequence: Synthetic oligonucleotide
  Sense strand starting at position 3293 of SEQ ID NO: 318376
ggugucugaauccauuaga

SEQ ID NO: 557852 - RNA, 19 nt, Artificial Sequence
  Description of Artificial Sequence: Synthetic oligonucleotide
  Antisense strand to SEQ ID NO: 557851
ucuaauggauucagacacc

SEQ ID NO: 557853 - RNA, 19 nt, Artificial Sequence
  Description of Artificial Sequence: Synthetic oligonucleotide
  Sense strand starting at position 3296 of SEQ ID NO: 318376
gucugaauccauuagagca

SEQ ID NO: 557854 - RNA, 19 nt, Artificial Sequence
  Description of Artificial Sequence: Synthetic oligonucleotide
  Antisense strand to SEQ ID NO: 557853
ugcucuaauggauucagac

SEQ ID NO: 557855 - RNA, 19 nt, Artificial Sequence
  Description of Artificial Sequence: Synthetic oligonucleotide
  Sense strand starting at position 3376 of SEQ ID NO: 318376
agacuuggaucccaaguga

SEQ ID NO: 557856 - RNA, 19 nt, Artificial Sequence
  Description of Artificial Sequence: Synthetic oligonucleotide
  Antisense strand to SEQ ID NO: 557855
ucacuugggauccaagucu

SEQ ID NO: 557857 - RNA, 19 nt, Artificial Sequence
  Description of Artificial Sequence: Synthetic oligonucleotide
  Sense strand starting at position 3417 of SEQ ID NO: 318376
gagagcuggucacugcauu

SEQ ID NO: 557858 - RNA, 19 nt, Artificial Sequence
  Description of Artificial Sequence: Synthetic oligonucleotide
  Antisense strand to SEQ ID NO: 557857
aaugcagugaccagcucuc

SEQ ID NO: 557859 - RNA, 19 nt, Artificial Sequence
  Description of Artificial Sequence: Synthetic oligonucleotide
  Sense strand starting at position 3430 of SEQ ID NO: 318376
ugcauugucucucugaggu

SEQ ID NO: 557860 - RNA, 19 nt, Artificial Sequence
  Description of Artificial Sequence: Synthetic oligonucleotide
  Antisense strand to SEQ ID NO: 557859
accucagagagacaaugca

SEQ ID NO: 557861 - RNA, 19 nt, Artificial Sequence
  Description of Artificial Sequence: Synthetic oligonucleotide
  Sense strand starting at position 3535 of SEQ ID NO: 318376
gaggguuugguguacagca

SEQ ID NO: 557862 - RNA, 19 nt, Artificial Sequence
  Description of Artificial Sequence: Synthetic oligonucleotide
  Antisense strand to SEQ ID NO: 557861
ugcuguacaccaaacccuc

SEQ ID NO: 557863 - RNA, 19 nt, Artificial Sequence
  Description of Artificial Sequence: Synthetic oligonucleotide
  Sense strand starting at position 3584 of SEQ ID NO: 318376
cuccaagaguccuagugaa

SEQ ID NO: 557864 - RNA, 19 nt, Artificial Sequence
  Description of Artificial Sequence: Synthetic oligonucleotide
  Antisense strand to SEQ ID NO: 557863
uucacuaggacucuuggag

SEQ ID NO: 557865 - RNA, 19 nt, Artificial Sequence
  Description of Artificial Sequence: Synthetic oligonucleotide
  Sense strand starting at position 3591 of SEQ ID NO: 318376
aguccuagugaauguaaac

SEQ ID NO: 557866 - RNA, 19 nt, Artificial Sequence
  Description of Artificial Sequence: Synthetic oligonucleotide
  Antisense strand to SEQ ID NO: 557865
guuuacauucacuaggacu

SEQ ID NO: 557867 - RNA, 19 nt, Artificial Sequence
  Description of Artificial Sequence: Synthetic oligonucleotide
  Sense strand starting at position 3638 of SEQ ID NO: 318376
uccucaagggucuguggaa

SEQ ID NO: 557868 - RNA, 19 nt, Artificial Sequence
  Description of Artificial Sequence: Synthetic oligonucleotide
  Antisense strand to SEQ ID NO: 557867
uuccacagacccuugagga

SEQ ID NO: 557869 - RNA, 19 nt, Artificial Sequence
  Description of Artificial Sequence: Synthetic oligonucleotide
  Sense strand starting at position 3811 of SEQ ID NO: 318376
agugguccuccugaauaug

SEQ ID NO: 557870 - RNA, 19 nt, Artificial Sequence
  Description of Artificial Sequence: Synthetic oligonucleotide
  Antisense strand to SEQ ID NO: 557869
cauauucaggaggaccacu

SEQ ID NO: 557871 - RNA, 19 nt, Artificial Sequence
  Description of Artificial Sequence: Synthetic oligonucleotide
  Sense strand starting at position 3847 of SEQ ID NO: 318376
gucucugggcaguguaauc

SEQ ID NO: 557872 - RNA, 19 nt, Artificial Sequence
  Description of Artificial Sequence: Synthetic oligonucleotide
  Antisense strand to SEQ ID NO: 557871
gauuacacugcccagagac

SEQ ID NO: 557873 - RNA, 19 nt, Artificial Sequence
  Description of Artificial Sequence: Synthetic oligonucleotide
  Sense strand starting at position 3930 of SEQ ID NO: 318376
uuuagaaucugguccauaa

SEQ ID NO: 557874 - RNA, 19 nt, Artificial Sequence
  Description of Artificial Sequence: Synthetic oligonucleotide
  Antisense strand to SEQ ID NO: 557873
uuauggaccagauucuaaa

SEQ ID NO: 557875 - RNA, 19 nt, Artificial Sequence
  Description of Artificial Sequence: Synthetic oligonucleotide
  Sense strand starting at position 72 of SEQ ID NO: 318377
ggcugcauucuugggcuua

SEQ ID NO: 557876 - RNA, 19 nt, Artificial Sequence
  Description of Artificial Sequence: Synthetic oligonucleotide
  Antisense strand to SEQ ID NO: 557875
uaagcccaagaaugcagcc

SEQ ID NO: 557877 - RNA, 19 nt, Artificial Sequence
  Description of Artificial Sequence: Synthetic oligonucleotide
  Sense strand starting at position 74 of SEQ ID NO: 318377
cugcauucuugggcuuaua

SEQ ID NO: 557878 - RNA, 19 nt, Artificial Sequence
  Description of Artificial Sequence: Synthetic oligonucleotide
  Antisense strand to SEQ ID NO: 557877
uauaagcccaagaaugcag

SEQ ID NO: 557879 - RNA, 19 nt, Artificial Sequence
  Description of Artificial Sequence: Synthetic oligonucleotide
  Sense strand starting at position 244 of SEQ ID NO: 318377
ggauguggguccuuacaua

SEQ ID NO: 557880 - RNA, 19 nt, Artificial Sequence
  Description of Artificial Sequence: Synthetic oligonucleotide
  Antisense strand to SEQ ID NO: 557879
uauguaaggacccacaucc

SEQ ID NO: 557881 - RNA, 19 nt, Artificial Sequence
  Description of Artificial Sequence: Synthetic oligonucleotide
  Sense strand starting at position 370 of SEQ ID NO: 318377
augaguucuucucucaucu

SEQ ID NO: 557882 - RNA, 19 nt, Artificial Sequence
  Description of Artificial Sequence: Synthetic oligonucleotide
  Antisense strand to SEQ ID NO: 557881
agaugagagaagaacucau

SEQ ID NO: 557883 - RNA, 19 nt, Artificial Sequence
  Description of Artificial Sequence: Synthetic oligonucleotide
  Sense strand starting at position 396 of SEQ ID NO: 318377
cgggaugaggauugcuauu

SEQ ID NO: 557884 - RNA, 19 nt, Artificial Sequence
  Description of Artificial Sequence: Synthetic oligonucleotide
  Antisense strand to SEQ ID NO: 557883
aauagcaauccucaucccg

SEQ ID NO: 557885 - RNA, 19 nt, Artificial Sequence
  Description of Artificial Sequence: Synthetic oligonucleotide
  Sense strand starting at position 437 of SEQ ID NO: 318377
agugaaauccuauagucac

SEQ ID NO: 557886 - RNA, 19 nt, Artificial Sequence
  Description of Artificial Sequence: Synthetic oligonucleotide
  Antisense strand to SEQ ID NO: 557885
gugacuauaggauuucacu

SEQ ID NO: 557887 - RNA, 19 nt, Artificial Sequence
  Description of Artificial Sequence: Synthetic oligonucleotide
  Sense strand starting at position 500 of SEQ ID NO: 318377
uuagauaccuccugaaaug

SEQ ID NO: 557888 - RNA, 19 nt, Artificial Sequence
  Description of Artificial Sequence: Synthetic oligonucleotide
  Antisense strand to SEQ ID NO: 557887
cauuucaggagguaucuaa

SEQ ID NO: 557889 - RNA, 19 nt, Artificial Sequence
  Description of Artificial Sequence: Synthetic oligonucleotide
  Sense strand starting at position 802 of SEQ ID NO: 318377
cuaggcucacccgggaaau

SEQ ID NO: 557890 - RNA, 19 nt, Artificial Sequence
  Description of Artificial Sequence: Synthetic oligonucleotide
  Antisense strand to SEQ ID NO: 557889
auuucccgggugagccuag

SEQ ID NO: 557891 - RNA, 19 nt, Artificial Sequence
  Description of Artificial Sequence: Synthetic oligonucleotide
  Sense strand starting at position 1095 of SEQ ID NO: 318377
ggaccucacuuuggaaaga

SEQ ID NO: 557892 - RNA, 19 nt, Artificial Sequence
  Description of Artificial Sequence: Synthetic oligonucleotide
  Antisense strand to SEQ ID NO: 557891
ucuuuccaaagugaggucc

SEQ ID NO: 557893 - RNA, 19 nt, Artificial Sequence
  Description of Artificial Sequence: Synthetic oligonucleotide
  Sense strand starting at position 1169 of SEQ ID NO: 318377
gcuugagguucuuugcaac

SEQ ID NO: 557894 - RNA, 19 nt, Artificial Sequence
  Description of Artificial Sequence: Synthetic oligonucleotide
  Antisense strand to SEQ ID NO: 557893
guugcaaagaaccucaagc

SEQ ID NO: 557895 - RNA, 19 nt, Artificial Sequence
  Description of Artificial Sequence: Synthetic oligonucleotide
  Sense strand starting at position 1318 of SEQ ID NO: 318377
ggagccugcucggacuaua

SEQ ID NO: 557896 - RNA, 19 nt, Artificial Sequence
  Description of Artificial Sequence: Synthetic oligonucleotide
  Antisense strand to SEQ ID NO: 557895
uauaguccgagcaggcucc

SEQ ID NO: 557897 - RNA, 19 nt, Artificial Sequence
  Description of Artificial Sequence: Synthetic oligonucleotide
  Sense strand starting at position 1321 of SEQ ID NO: 318377
gccugcucggacuauauaa

SEQ ID NO: 557898 - RNA, 19 nt, Artificial Sequence
  Description of Artificial Sequence: Synthetic oligonucleotide
  Antisense strand to SEQ ID NO: 557897
uuauauaguccgagcaggc

SEQ ID NO: 557899 - RNA, 19 nt, Artificial Sequence
  Description of Artificial Sequence: Synthetic oligonucleotide
  Sense strand starting at position 1452 of SEQ ID NO: 318377
agcggauccuccuagccau

SEQ ID NO: 557900 - RNA, 19 nt, Artificial Sequence
  Description of Artificial Sequence: Synthetic oligonucleotide
  Antisense strand to SEQ ID NO: 557899
auggcuaggaggauccgcu

SEQ ID NO: 557901 - RNA, 19 nt, Artificial Sequence
  Description of Artificial Sequence: Synthetic oligonucleotide
  Sense strand starting at position 1464 of SEQ ID NO: 318377
uagccauuccgggaccagu

SEQ ID NO: 557902 - RNA, 19 nt, Artificial Sequence
  Description of Artificial Sequence: Synthetic oligonucleotide
  Antisense strand to SEQ ID NO: 557901
acuggucccggaauggcua

SEQ ID NO: 557903 - RNA, 19 nt, Artificial Sequence
  Description of Artificial Sequence: Synthetic oligonucleotide
  Sense strand starting at position 1962 of SEQ ID NO: 318377
cagggagccucguugggau

SEQ ID NO: 557904 - RNA, 19 nt, Artificial Sequence
  Description of Artificial Sequence: Synthetic oligonucleotide
  Antisense strand to SEQ ID NO: 557903
aucccaacgaggcucccug

SEQ ID NO: 557905 - RNA, 19 nt, Artificial Sequence
  Description of Artificial Sequence: Synthetic oligonucleotide
  Sense strand starting at position 2317 of SEQ ID NO: 318377
gggacauaguagucucuga

SEQ ID NO: 557906 - RNA, 19 nt, Artificial Sequence
  Description of Artificial Sequence: Synthetic oligonucleotide
  Antisense strand to SEQ ID NO: 557905
ucagagacuacuauguccc

SEQ ID NO: 557907 - RNA, 19 nt, Artificial Sequence
  Description of Artificial Sequence: Synthetic oligonucleotide
  Sense strand starting at position 2322 of SEQ ID NO: 318377
auaguagucucugaaccuu

SEQ ID NO: 557908 - RNA, 19 nt, Artificial Sequence
  Description of Artificial Sequence: Synthetic oligonucleotide
  Antisense strand to SEQ ID NO: 557907
aagguucagagacuacuau

SEQ ID NO: 557909 - RNA, 19 nt, Artificial Sequence
  Description of Artificial Sequence: Synthetic oligonucleotide
  Sense strand starting at position 2339 of SEQ ID NO: 318377
uuaguuugcuacuccgaaa

SEQ ID NO: 557910 - RNA, 19 nt, Artificial Sequence
  Description of Artificial Sequence: Synthetic oligonucleotide
  Antisense strand to SEQ ID NO: 557909
uuucggaguagcaaacuaa

SEQ ID NO: 557911 - RNA, 19 nt, Artificial Sequence
  Description of Artificial Sequence: Synthetic oligonucleotide
  Sense strand starting at position 2391 of SEQ ID NO: 318377
cgcgagugucgguaucgua

SEQ ID NO: 557912 - RNA, 19 nt, Artificial Sequence
  Description of Artificial Sequence: Synthetic oligonucleotide
  Antisense strand to SEQ ID NO: 557911
uacgauaccgacacucgcg

SEQ ID NO: 557913 - RNA, 19 nt, Artificial Sequence
  Description of Artificial Sequence: Synthetic oligonucleotide
  Sense strand starting at position 2426 of SEQ ID NO: 318377
acugcagaaucuguaaauc

SEQ ID NO: 557914 - RNA, 19 nt, Artificial Sequence
  Description of Artificial Sequence: Synthetic oligonucleotide
  Antisense strand to SEQ ID NO: 557913
gauuuacagauucugcagu

SEQ ID NO: 557915 - RNA, 19 nt, Artificial Sequence
  Description of Artificial Sequence: Synthetic oligonucleotide
  Sense strand starting at position 2480 of SEQ ID NO: 318377
ggcguuuaaagcuagaguu

SEQ ID NO: 557916 - RNA, 19 nt, Artificial Sequence
  Description of Artificial Sequence: Synthetic oligonucleotide
  Antisense strand to SEQ ID NO: 557915
aacucuagcuuuaaacgcc

SEQ ID NO: 557917 - RNA, 19 nt, Artificial Sequence
  Description of Artificial Sequence: Synthetic oligonucleotide
  Sense strand starting at position 2849 of SEQ ID NO: 318377
ccgugagaguucucgucgu

SEQ ID NO: 557918 - RNA, 19 nt, Artificial Sequence
  Description of Artificial Sequence: Synthetic oligonucleotide
  Antisense strand to SEQ ID NO: 557917
acgacgagaacucucacgg

SEQ ID NO: 557919 - RNA, 19 nt, Artificial Sequence
  Description of Artificial Sequence: Synthetic oligonucleotide
  Sense strand starting at position 2851 of SEQ ID NO: 318377
gugagaguucucgucguua

SEQ ID NO: 557920 - RNA, 19 nt, Artificial Sequence
  Description of Artificial Sequence: Synthetic oligonucleotide
  Antisense strand to SEQ ID NO: 557919
uaacgacgagaacucucac

SEQ ID NO: 557921 - RNA, 19 nt, Artificial Sequence
  Description of Artificial Sequence: Synthetic oligonucleotide
  Sense strand starting at position 2853 of SEQ ID NO: 318377
gagaguucucgucguuaaa

SEQ ID NO: 557922 - RNA, 19 nt, Artificial Sequence
  Description of Artificial Sequence: Synthetic oligonucleotide
  Antisense strand to SEQ ID NO: 557921
uuuaacgacgagaacucuc

SEQ ID NO: 557923 - RNA, 19 nt, Artificial Sequence
  Description of Artificial Sequence: Synthetic oligonucleotide
  Sense strand starting at position 2855 of SEQ ID NO: 318377
gaguucucgucguuaaaga

SEQ ID NO: 557924 - RNA, 19 nt, Artificial Sequence
  Description of Artificial Sequence: Synthetic oligonucleotide
  Antisense strand to SEQ ID NO: 557923
ucuuuaacgacgagaacuc

SEQ ID NO: 557925 - RNA, 19 nt, Artificial Sequence
  Description of Artificial Sequence: Synthetic oligonucleotide
  Sense strand starting at position 2856 of SEQ ID NO: 318377
aguucucgucguuaaagac

SEQ ID NO: 557926 - RNA, 19 nt, Artificial Sequence
  Description of Artificial Sequence: Synthetic oligonucleotide
  Antisense strand to SEQ ID NO: 557925
gucuuuaacgacgagaacu

SEQ ID NO: 557927 - RNA, 19 nt, Artificial Sequence
  Description of Artificial Sequence: Synthetic oligonucleotide
  Sense strand starting at position 2911 of SEQ ID NO: 318377
cuuuaauucuccucucgag

SEQ ID NO: 557928 - RNA, 19 nt, Artificial Sequence
  Description of Artificial Sequence: Synthetic oligonucleotide
  Antisense strand to SEQ ID NO: 557927
cucgagaggagaauuaaag

SEQ ID NO: 557929 - RNA, 19 nt, Artificial Sequence
  Description of Artificial Sequence: Synthetic oligonucleotide
  Sense strand starting at position 2914 of SEQ ID NO: 318377
uaauucuccucucgagagu

SEQ ID NO: 557930 - RNA, 19 nt, Artificial Sequence
  Description of Artificial Sequence: Synthetic oligonucleotide
  Antisense strand to SEQ ID NO: 557929
acucucgagaggagaauua

SEQ ID NO: 557931 - RNA, 19 nt, Artificial Sequence
  Description of Artificial Sequence: Synthetic oligonucleotide
  Sense strand starting at position 2915 of SEQ ID NO: 318377
aauucuccucucgagagua

SEQ ID NO: 557932 - RNA, 19 nt, Artificial Sequence
  Description of Artificial Sequence: Synthetic oligonucleotide
  Antisense strand to SEQ ID NO: 557931
uacucucgagaggagaauu

SEQ ID NO: 557933 - RNA, 19 nt, Artificial Sequence
  Description of Artificial Sequence: Synthetic oligonucleotide
  Sense strand starting at position 2917 of SEQ ID NO: 318377
uucuccucucgagaguaaa

SEQ ID NO: 557934 - RNA, 19 nt, Artificial Sequence
  Description of Artificial Sequence: Synthetic oligonucleotide
  Antisense strand to SEQ ID NO: 557933
uuuacucucgagaggagaa

SEQ ID NO: 557935 - RNA, 19 nt, Artificial Sequence
  Description of Artificial Sequence: Synthetic oligonucleotide
  Sense strand starting at position 2943 of SEQ ID NO: 318377
cagggaguugucuguuuau

SEQ ID NO: 557936 - RNA, 19 nt, Artificial Sequence
  Description of Artificial Sequence: Synthetic oligonucleotide
  Antisense strand to SEQ ID NO: 557935
auaaacagacaacucccug

SEQ ID NO: 557937 - RNA, 19 nt, Artificial Sequence
  Description of Artificial Sequence: Synthetic oligonucleotide
  Sense strand starting at position 3035 of SEQ ID NO: 318377
ugagaucucucuucucaag

SEQ ID NO: 557938 - RNA, 19 nt, Artificial Sequence
  Description of Artificial Sequence: Synthetic oligonucleotide
  Antisense strand to SEQ ID NO: 557937
cuugagaagagagaucuca

SEQ ID NO: 557939 - RNA, 19 nt, Artificial Sequence
  Description of Artificial Sequence: Synthetic oligonucleotide
  Sense strand starting at position 3037 of SEQ ID NO: 318377
agaucucucuucucaaggu

SEQ ID NO: 557940 - RNA, 19 nt, Artificial Sequence
  Description of Artificial Sequence: Synthetic oligonucleotide
  Antisense strand to SEQ ID NO: 557939
accuugagaagagagaucu

SEQ ID NO: 557941 - RNA, 19 nt, Artificial Sequence
  Description of Artificial Sequence: Synthetic oligonucleotide
  Sense strand starting at position 3082 of SEQ ID NO: 318377
cauggaauccguggugguu

SEQ ID NO: 557942 - RNA, 19 nt, Artificial Sequence
  Description of Artificial Sequence: Synthetic oligonucleotide
  Antisense strand to SEQ ID NO: 557941
aaccaccacggauuccaug

SEQ ID NO: 557943 - RNA, 19 nt, Artificial Sequence
  Description of Artificial Sequence: Synthetic oligonucleotide
  Sense strand starting at position 3128 of SEQ ID NO: 318377
agcacugguccagguugau

SEQ ID NO: 557944 - RNA, 19 nt, Artificial Sequence
  Description of Artificial Sequence: Synthetic oligonucleotide
  Antisense strand to SEQ ID NO: 557943
aucaaccuggaccagugcu

SEQ ID NO: 557945 - RNA, 19 nt, Artificial Sequence
  Description of Artificial Sequence: Synthetic oligonucleotide
  Sense strand starting at position 3387 of SEQ ID NO: 318377
ugccuagauguuuacuaga

SEQ ID NO: 557946 - RNA, 19 nt, Artificial Sequence
  Description of Artificial Sequence: Synthetic oligonucleotide
  Antisense strand to SEQ ID NO: 557945
ucuaguaaacaucuaggca

SEQ ID NO: 557947 - RNA, 19 nt, Artificial Sequence
  Description of Artificial Sequence: Synthetic oligonucleotide
  Sense strand starting at position 3389 of SEQ ID NO: 318377
ccuagauguuuacuagauc

SEQ ID NO: 557948 - RNA, 19 nt, Artificial Sequence
  Description of Artificial Sequence: Synthetic oligonucleotide
  Antisense strand to SEQ ID NO: 557947
gaucuaguaaacaucuagg

SEQ ID NO: 557949 - RNA, 19 nt, Artificial Sequence
  Description of Artificial Sequence: Synthetic oligonucleotide
  Sense strand starting at position 3390 of SEQ ID NO: 318377
cuagauguuuacuagauca

SEQ ID NO: 557950 - RNA, 19 nt, Artificial Sequence
  Description of Artificial Sequence: Synthetic oligonucleotide
  Antisense strand to SEQ ID NO: 557949
ugaucuaguaaacaucuag

SEQ ID NO: 557951 - RNA, 19 nt, Artificial Sequence
  Description of Artificial Sequence: Synthetic oligonucleotide
  Sense strand starting at position 3746 of SEQ ID NO: 318377
uggcgcauaugccuauaau

SEQ ID NO: 557952 - RNA, 19 nt, Artificial Sequence
  Description of Artificial Sequence: Synthetic oligonucleotide
  Antisense strand to SEQ ID NO: 557951
auuauaggcauaugcgcca

SEQ ID NO: 557953 - RNA, 19 nt, Artificial Sequence
  Description of Artificial Sequence: Synthetic oligonucleotide
  Sense strand starting at position 3747 of SEQ ID NO: 318377
ggcgcauaugccuauaauc

SEQ ID NO: 557954 - RNA, 19 nt, Artificial Sequence
  Description of Artificial Sequence: Synthetic oligonucleotide
  Antisense strand to SEQ ID NO: 557953
gauuauaggcauaugcgcc

SEQ ID NO: 557955 - RNA, 19 nt, Artificial Sequence
  Description of Artificial Sequence: Synthetic oligonucleotide
  Sense strand starting at position 39 of SEQ ID NO: 318378
uccaaaggucacuacguuu

SEQ ID NO: 557956 - RNA, 19 nt, Artificial Sequence
  Description of Artificial Sequence: Synthetic oligonucleotide
  Antisense strand to SEQ ID NO: 557955
aaacguagugaccuuugga

SEQ ID NO: 557957 - RNA, 19 nt, Artificial Sequence
  Description of Artificial Sequence: Synthetic oligonucleotide
  Sense strand starting at position 65 of SEQ ID NO: 318378
uggccuucucuccaugauu

SEQ ID NO: 557958 - RNA, 19 nt, Artificial Sequence
  Description of Artificial Sequence: Synthetic oligonucleotide
  Antisense strand to SEQ ID NO: 557957
aaucauggagagaaggcca

SEQ ID NO: 557959 - RNA, 19 nt, Artificial Sequence
  Description of Artificial Sequence: Synthetic oligonucleotide
  Sense strand starting at position 210 of SEQ ID NO: 318378
aacccugauguguagugaa

SEQ ID NO: 557960 - RNA, 19 nt, Artificial Sequence
  Description of Artificial Sequence: Synthetic oligonucleotide
  Antisense strand to SEQ ID NO: 557959
uucacuacacaucaggguu

SEQ ID NO: 557961 - RNA, 19 nt, Artificial Sequence
  Description of Artificial Sequence: Synthetic oligonucleotide
  Sense strand starting at position 314 of SEQ ID NO: 318378
agaauauccugcuugacaa

SEQ ID NO: 557962 - RNA, 19 nt, Artificial Sequence
  Description of Artificial Sequence: Synthetic oligonucleotide
  Antisense strand to SEQ ID NO: 557961
uugucaagcaggauauucu

SEQ ID NO: 557963 - RNA, 19 nt, Artificial Sequence
  Description of Artificial Sequence: Synthetic oligonucleotide
  Sense strand starting at position 369 of SEQ ID NO: 318378
cagagaguuuaugcuaaga

SEQ ID NO: 557964 - RNA, 19 nt, Artificial Sequence
  Description of Artificial Sequence: Synthetic oligonucleotide
  Antisense strand to SEQ ID NO: 557963
ucuuagcauaaacucucug

SEQ ID NO: 557965 - RNA, 19 nt, Artificial Sequence
  Description of Artificial Sequence: Synthetic oligonucleotide
  Sense strand starting at position 382 of SEQ ID NO: 318378
cuaagaaugugacuuaaug

SEQ ID NO: 557966 - RNA, 19 nt, Artificial Sequence
  Description of Artificial Sequence: Synthetic oligonucleotide
  Antisense strand to SEQ ID NO: 557965
cauuaagucacauucuuag

SEQ ID NO: 557967 - RNA, 19 nt, Artificial Sequence
  Description of Artificial Sequence: Synthetic oligonucleotide
  Sense strand starting at position 400 of SEQ ID NO: 318378
gguagaagacuugggucau

SEQ ID NO: 557968 - RNA, 19 nt, Artificial Sequence
  Description of Artificial Sequence: Synthetic oligonucleotide
  Antisense strand to SEQ ID NO: 557967
augacccaagucuucuacc

SEQ ID NO: 557969 - RNA, 19 nt, Artificial Sequence
  Description of Artificial Sequence: Synthetic oligonucleotide
  Sense strand starting at position 559 of SEQ ID NO: 318378
acaucauugcugggagaac

SEQ ID NO: 557970 - RNA, 19 nt, Artificial Sequence
  Description of Artificial Sequence: Synthetic oligonucleotide
  Antisense strand to SEQ ID NO: 557969
guucucccagcaaugaugu

SEQ ID NO: 557971 - RNA, 19 nt, Artificial Sequence
  Description of Artificial Sequence: Synthetic oligonucleotide
  Sense strand starting at position 692 of SEQ ID NO: 318378
gguguaaugaacugaaacu

SEQ ID NO: 557972 - RNA, 19 nt, Artificial Sequence
  Description of Artificial Sequence: Synthetic oligonucleotide
  Antisense strand to SEQ ID NO: 557971
aguuucaguucauuacacc

SEQ ID NO: 557973 - RNA, 19 nt, Artificial Sequence
  Description of Artificial Sequence: Synthetic oligonucleotide
  Sense strand starting at position 709 of SEQ ID NO: 318378
cuagaaauaugacugcuuu

SEQ ID NO: 557974 - RNA, 19 nt, Artificial Sequence
  Description of Artificial Sequence: Synthetic oligonucleotide
  Antisense strand to SEQ ID NO: 557973
aaagcagucauauuucuag

SEQ ID NO: 557975 - RNA, 19 nt, Artificial Sequence
  Description of Artificial Sequence: Synthetic oligonucleotide
  Sense strand starting at position 737 of SEQ ID NO: 318378
gugaguccuaguuaaucac

SEQ ID NO: 557976 - RNA, 19 nt, Artificial Sequence
  Description of Artificial Sequence: Synthetic oligonucleotide
  Antisense strand to SEQ ID NO: 557975
gugauuaacuaggacucac

SEQ ID NO: 557977 - RNA, 19 nt, Artificial Sequence
  Description of Artificial Sequence: Synthetic oligonucleotide
  Sense strand starting at position 740 of SEQ ID NO: 318378
aguccuaguuaaucacuga

SEQ ID NO: 557978 - RNA, 19 nt, Artificial Sequence
  Description of Artificial Sequence: Synthetic oligonucleotide
  Antisense strand to SEQ ID NO: 557977
ucagugauuaacuaggacu

SEQ ID NO: 557979 - RNA, 19 nt, Artificial Sequence
  Description of Artificial Sequence: Synthetic oligonucleotide
  Sense strand starting at position 868 of SEQ ID NO: 318378
acagaaauaugcucgagag

SEQ ID NO: 557980 - RNA, 19 nt, Artificial Sequence
  Description of Artificial Sequence: Synthetic oligonucleotide
  Antisense strand to SEQ ID NO: 557979
cucucgagcauauuucugu

SEQ ID NO: 557981 - RNA, 19 nt, Artificial Sequence
  Description of Artificial Sequence: Synthetic oligonucleotide
  Sense strand starting at position 869 of SEQ ID NO: 318378
cagaaauaugcucgagagu

SEQ ID NO: 557982 - RNA, 19 nt, Artificial Sequence
  Description of Artificial Sequence: Synthetic oligonucleotide
  Antisense strand to SEQ ID NO: 557981
acucucgagcauauuucug

SEQ ID NO: 557983 - RNA, 19 nt, Artificial Sequence
  Description of Artificial Sequence: Synthetic oligonucleotide
  Sense strand starting at position 870 of SEQ ID NO: 318378
agaaauaugcucgagagua

SEQ ID NO: 557984 - RNA, 19 nt, Artificial Sequence
  Description of Artificial Sequence: Synthetic oligonucleotide
  Antisense strand to SEQ ID NO: 557983
uacucucgagcauauuucu

SEQ ID NO: 557985 - RNA, 19 nt, Artificial Sequence
  Description of Artificial Sequence: Synthetic oligonucleotide
  Sense strand starting at position 872 of SEQ ID NO: 318378
aaauaugcucgagaguauu

SEQ ID NO: 557986 - RNA, 19 nt, Artificial Sequence
  Description of Artificial Sequence: Synthetic oligonucleotide
  Antisense strand to SEQ ID NO: 557985
aauacucucgagcauauuu

SEQ ID NO: 557987 - RNA, 19 nt, Artificial Sequence
  Description of Artificial Sequence: Synthetic oligonucleotide
  Sense strand starting at position 1068 of SEQ ID NO: 318378
ggguuuaaaugagacauuu

SEQ ID NO: 557988 - RNA, 19 nt, Artificial Sequence
  Description of Artificial Sequence: Synthetic oligonucleotide
  Antisense strand to SEQ ID NO: 557987
aaaugucucauuuaaaccc

SEQ ID NO: 557989 - RNA, 19 nt, Artificial Sequence
  Description of Artificial Sequence: Synthetic oligonucleotide
  Sense strand starting at position 1986 of SEQ ID NO: 318378
ggaggaucccuccagcagu

SEQ ID NO: 557990 - RNA, 19 nt, Artificial Sequence
  Description of Artificial Sequence: Synthetic oligonucleotide
  Antisense strand to SEQ ID NO: 557989
acugcuggagggauccucc

SEQ ID NO: 557991 - RNA, 19 nt, Artificial Sequence
  Description of Artificial Sequence: Synthetic oligonucleotide
  Sense strand starting at position 2081 of SEQ ID NO: 318378
ugagccuucucaccuagaa

SEQ ID NO: 557992 - RNA, 19 nt, Artificial Sequence
  Description of Artificial Sequence: Synthetic oligonucleotide
  Antisense strand to SEQ ID NO: 557991
uucuaggugagaaggcuca

SEQ ID NO: 557993 - RNA, 19 nt, Artificial Sequence
  Description of Artificial Sequence: Synthetic oligonucleotide
  Sense strand starting at position 2121 of SEQ ID NO: 318378
gaaggaccauguguacuuu

SEQ ID NO: 557994 - RNA, 19 nt, Artificial Sequence
  Description of Artificial Sequence: Synthetic oligonucleotide
  Antisense strand to SEQ ID NO: 557993
aaaguacacaugguccuuc

SEQ ID NO: 557995 - RNA, 19 nt, Artificial Sequence
  Description of Artificial Sequence: Synthetic oligonucleotide
  Sense strand starting at position 2260 of SEQ ID NO: 318378
ggaaguuuccuggaucagc

SEQ ID NO: 557996 - RNA, 19 nt, Artificial Sequence
  Description of Artificial Sequence: Synthetic oligonucleotide
  Antisense strand to SEQ ID NO: 557995
gcugauccaggaaacuucc

SEQ ID NO: 557997 - RNA, 19 nt, Artificial Sequence
  Description of Artificial Sequence: Synthetic oligonucleotide
  Sense strand starting at position 2286 of SEQ ID NO: 318378
ccagaugacuuggccaaga

SEQ ID NO: 557998 - RNA, 19 nt, Artificial Sequence
  Description of Artificial Sequence: Synthetic oligonucleotide
  Antisense strand to SEQ ID NO: 557997
ucuuggccaagucaucugg

SEQ ID NO: 557999 - RNA, 19 nt, Artificial Sequence
  Description of Artificial Sequence: Synthetic oligonucleotide
  Sense strand starting at position 2353 of SEQ ID NO: 318378
gugacaagacccuguggaa

SEQ ID NO: 558000 - RNA, 19 nt, Artificial Sequence
  Description of Artificial Sequence: Synthetic oligonucleotide
  Antisense strand to SEQ ID NO: 557999
uuccacagggucuugucac

SEQ ID NO: 558001 - RNA, 19 nt, Artificial Sequence
  Description of Artificial Sequence: Synthetic oligonucleotide
  Sense strand starting at position 2375 of SEQ ID NO: 318378
uguggaaggaucugcauau

SEQ ID NO: 558002 - RNA, 19 nt, Artificial Sequence
  Description of Artificial Sequence: Synthetic oligonucleotide
  Antisense strand to SEQ ID NO: 558001
auaugcagauccuuccaca

SEQ ID NO: 558003 - RNA, 19 nt, Artificial Sequence
  Description of Artificial Sequence: Synthetic oligonucleotide
  Sense strand starting at position 2376 of SEQ ID NO: 318378
guggaaggaucugcauaua

SEQ ID NO: 558004 - RNA, 19 nt, Artificial Sequence
  Description of Artificial Sequence: Synthetic oligonucleotide
  Antisense strand to SEQ ID NO: 558003
uauaugcagauccuuccac

SEQ ID NO: 558005 - RNA, 19 nt, Artificial Sequence
  Description of Artificial Sequence: Synthetic oligonucleotide
  Sense strand starting at position 2431 of SEQ ID NO: 318378
guugauuugccuuggucag

SEQ ID NO: 558006 - RNA, 19 nt, Artificial Sequence
  Description of Artificial Sequence: Synthetic oligonucleotide
  Antisense strand to SEQ ID NO: 558005
cugaccaaggcaaaucaac

SEQ ID NO: 558007 - RNA, 19 nt, Artificial Sequence
  Description of Artificial Sequence: Synthetic oligonucleotide
  Sense strand starting at position 2709 of SEQ ID NO: 318378
agaggaauguuucuccaaa

SEQ ID NO: 558008 - RNA, 19 nt, Artificial Sequence
  Description of Artificial Sequence: Synthetic oligonucleotide
  Antisense strand to SEQ ID NO: 558007
uuuggagaaacauuccucu

SEQ ID NO: 558009 - RNA, 19 nt, Artificial Sequence
  Description of Artificial Sequence: Synthetic oligonucleotide
  Sense strand starting at position 2710 of SEQ ID NO: 318378
gaggaauguuucuccaaau

SEQ ID NO: 558010 - RNA, 19 nt, Artificial Sequence
  Description of Artificial Sequence: Synthetic oligonucleotide
  Antisense strand to SEQ ID NO: 558009
auuuggagaaacauuccuc

SEQ ID NO: 558011 - RNA, 19 nt, Artificial Sequence
  Description of Artificial Sequence: Synthetic oligonucleotide
  Sense strand starting at position 2711 of SEQ ID NO: 318378
aggaauguuucuccaaaug

SEQ ID NO: 558012 - RNA, 19 nt, Artificial Sequence
  Description of Artificial Sequence: Synthetic oligonucleotide
  Antisense strand to SEQ ID NO: 558011
cauuuggagaaacauuccu

SEQ ID NO: 558013 - RNA, 19 nt, Artificial Sequence
  Description of Artificial Sequence: Synthetic oligonucleotide
  Sense strand starting at position 2775 of SEQ ID NO: 318378
auugaauacaguggugaca

SEQ ID NO: 558014 - RNA, 19 nt, Artificial Sequence
  Description of Artificial Sequence: Synthetic oligonucleotide
  Antisense strand to SEQ ID NO: 558013
ugucaccacuguauucaau

SEQ ID NO: 558015 - RNA, 19 nt, Artificial Sequence
  Description of Artificial Sequence: Synthetic oligonucleotide
  Sense strand starting at position 2866 of SEQ ID NO: 318378
gugccugguacauauuaag

SEQ ID NO: 558016 - RNA, 19 nt, Artificial Sequence
  Description of Artificial Sequence: Synthetic oligonucleotide
  Antisense strand to SEQ ID NO: 558015
cuuaauauguaccaggcac

SEQ ID NO: 558017 - RNA, 19 nt, Artificial Sequence
  Description of Artificial Sequence: Synthetic oligonucleotide
  Sense strand starting at position 2922 of SEQ ID NO: 318378
cgccuucuccaccaaagaa

SEQ ID NO: 558018 - RNA, 19 nt, Artificial Sequence
  Description of Artificial Sequence: Synthetic oligonucleotide
  Antisense strand to SEQ ID NO: 558017
uucuuugguggagaaggcg

SEQ ID NO: 558019 - RNA, 19 nt, Artificial Sequence
  Description of Artificial Sequence: Synthetic oligonucleotide
  Sense strand starting at position 3063 of SEQ ID NO: 318378
cagccuucucaggaaguga

SEQ ID NO: 558020 - RNA, 19 nt, Artificial Sequence
  Description of Artificial Sequence: Synthetic oligonucleotide
  Antisense strand to SEQ ID NO: 558019
ucacuuccugagaaggcug

SEQ ID NO: 558021 - RNA, 19 nt, Artificial Sequence
  Description of Artificial Sequence: Synthetic oligonucleotide
  Sense strand starting at position 3180 of SEQ ID NO: 318378
cgugcuuugcguuuccaaa

SEQ ID NO: 558022 - RNA, 19 nt, Artificial Sequence
  Description of Artificial Sequence: Synthetic oligonucleotide
  Antisense strand to SEQ ID NO: 558021
uuuggaaacgcaaagcacg

SEQ ID NO: 558023 - RNA, 19 nt, Artificial Sequence
  Description of Artificial Sequence: Synthetic oligonucleotide
  Sense strand starting at position 3181 of SEQ ID NO: 318378
gugcuuugcguuuccaaag

SEQ ID NO: 558024 - RNA, 19 nt, Artificial Sequence
  Description of Artificial Sequence: Synthetic oligonucleotide
  Antisense strand to SEQ ID NO: 558023
cuuuggaaacgcaaagcac

SEQ ID NO: 558025 - RNA, 19 nt, Artificial Sequence
  Description of Artificial Sequence: Synthetic oligonucleotide
  Sense strand starting at position 3212 of SEQ ID NO: 318378
agcuauuaauugguuccaa

SEQ ID NO: 558026 - RNA, 19 nt, Artificial Sequence
  Description of Artificial Sequence: Synthetic oligonucleotide
  Antisense strand to SEQ ID NO: 558025
uuggaaccaauuaauagcu

SEQ ID NO: 558027 - RNA, 19 nt, Artificial Sequence
  Description of Artificial Sequence: Synthetic oligonucleotide
  Sense strand starting at position 3213 of SEQ ID NO: 318378
gcuauuaauugguuccaaa

SEQ ID NO: 558028 - RNA, 19 nt, Artificial Sequence
  Description of Artificial Sequence: Synthetic oligonucleotide
  Antisense strand to SEQ ID NO: 558027
uuuggaaccaauuaauagc

SEQ ID NO: 558029 - RNA, 19 nt, Artificial Sequence
  Description of Artificial Sequence: Synthetic oligonucleotide
  Sense strand starting at position 3260 of SEQ ID NO: 318378
auauaaucacaugguuguu

SEQ ID NO: 558030 - RNA, 19 nt, Artificial Sequence
  Description of Artificial Sequence: Synthetic oligonucleotide
  Antisense strand to SEQ ID NO: 558029
aacaaccaugugauuauau

SEQ ID NO: 558031 - RNA, 19 nt, Artificial Sequence
  Description of Artificial Sequence: Synthetic oligonucleotide
  Sense strand starting at position 3262 of SEQ ID NO: 318378
auaaucacaugguuguuaa

SEQ ID NO: 558032 - RNA, 19 nt, Artificial Sequence
  Description of Artificial Sequence: Synthetic oligonucleotide
  Antisense strand to SEQ ID NO: 558031
uuaacaaccaugugauuau

SEQ ID NO: 558033 - RNA, 19 nt, Artificial Sequence
  Description of Artificial Sequence: Synthetic oligonucleotide
  Sense strand starting at position 3645 of SEQ ID NO: 318378
uugagauggcuccauacau

SEQ ID NO: 558034 - RNA, 19 nt, Artificial Sequence
  Description of Artificial Sequence: Synthetic oligonucleotide
  Antisense strand to SEQ ID NO: 558033
auguauggagccaucucaa

SEQ ID NO: 558035 - RNA, 19 nt, Artificial Sequence
  Description of Artificial Sequence: Synthetic oligonucleotide
  Sense strand starting at position 215 of SEQ ID NO: 318379
aaauuugaguuggagaaga

SEQ ID NO: 558036 - RNA, 19 nt, Artificial Sequence
  Description of Artificial Sequence: Synthetic oligonucleotide
  Antisense strand to SEQ ID NO: 558035
ucuucuccaacucaaauuu

SEQ ID NO: 558037 - RNA, 19 nt, Artificial Sequence
  Description of Artificial Sequence: Synthetic oligonucleotide
  Sense strand starting at position 238 of SEQ ID NO: 318379
uaggucaaauauguguaaa

SEQ ID NO: 558038 - RNA, 19 nt, Artificial Sequence
  Description of Artificial Sequence: Synthetic oligonucleotide
  Antisense strand to SEQ ID NO: 558037
uuuacacauauuugaccua

SEQ ID NO: 558039 - RNA, 19 nt, Artificial Sequence
  Description of Artificial Sequence: Synthetic oligonucleotide
  Sense strand starting at position 314 of SEQ ID NO: 318379
guuaccacuguuuggauua

SEQ ID NO: 558040 - RNA, 19 nt, Artificial Sequence
  Description of Artificial Sequence: Synthetic oligonucleotide
  Antisense strand to SEQ ID NO: 558039
uaauccaaacagugguaac

SEQ ID NO: 558041 - RNA, 19 nt, Artificial Sequence
  Description of Artificial Sequence: Synthetic oligonucleotide
  Sense strand starting at position 321 of SEQ ID NO: 318379
cuguuuggauuauuggaca

SEQ ID NO: 558042 - RNA, 19 nt, Artificial Sequence
  Description of Artificial Sequence: Synthetic oligonucleotide
  Antisense strand to SEQ ID NO: 558041
uguccaauaauccaaacag

SEQ ID NO: 558043 - RNA, 19 nt, Artificial Sequence
  Description of Artificial Sequence: Synthetic oligonucleotide
  Sense strand starting at position 324 of SEQ ID NO: 318379
uuuggauuauuggacauuu

SEQ ID NO: 558044 - RNA, 19 nt, Artificial Sequence
  Description of Artificial Sequence: Synthetic oligonucleotide
  Antisense strand to SEQ ID NO: 558043
aaauguccaauaauccaaa

SEQ ID NO: 558045 - RNA, 19 nt, Artificial Sequence
  Description of Artificial Sequence: Synthetic oligonucleotide
  Sense strand starting at position 342 of SEQ ID NO: 318379
uccugaguagugggaaaug

SEQ ID NO: 558046 - RNA, 19 nt, Artificial Sequence
  Description of Artificial Sequence: Synthetic oligonucleotide
  Antisense strand to SEQ ID NO: 558045
cauuucccacuacucagga

SEQ ID NO: 558047 - RNA, 19 nt, Artificial Sequence
  Description of Artificial Sequence: Synthetic oligonucleotide
  Sense strand starting at position 351 of SEQ ID NO: 318379
gugggaaauguuuggauga

SEQ ID NO: 558048 - RNA, 19 nt, Artificial Sequence
  Description of Artificial Sequence: Synthetic oligonucleotide
  Antisense strand to SEQ ID NO: 558047
ucauccaaacauuucccac

SEQ ID NO: 558049 - RNA, 19 nt, Artificial Sequence
  Description of Artificial Sequence: Synthetic oligonucleotide
  Sense strand starting at position 373 of SEQ ID NO: 318379
gccaguagcuaauuauuaa

SEQ ID NO: 558050 - RNA, 19 nt, Artificial Sequence
  Description of Artificial Sequence: Synthetic oligonucleotide
  Antisense strand to SEQ ID NO: 558049
uuaauaauuagcuacuggc

SEQ ID NO: 558051 - RNA, 19 nt, Artificial Sequence
  Description of Artificial Sequence: Synthetic oligonucleotide
  Sense strand starting at position 742 of SEQ ID NO: 318379
aagaucugaccaugaguuc

SEQ ID NO: 558052 - RNA, 19 nt, Artificial Sequence
  Description of Artificial Sequence: Synthetic oligonucleotide
  Antisense strand to SEQ ID NO: 558051
gaacucauggucagaucuu

SEQ ID NO: 558053 - RNA, 19 nt, Artificial Sequence
  Description of Artificial Sequence: Synthetic oligonucleotide
  Sense strand starting at position 907 of SEQ ID NO: 318379
uagacugcccugugauauu

SEQ ID NO: 558054 - RNA, 19 nt, Artificial Sequence
  Description of Artificial Sequence: Synthetic oligonucleotide
  Antisense strand to SEQ ID NO: 558053
aauaucacagggcagucua

SEQ ID NO: 558055 - RNA, 19 nt, Artificial Sequence
  Description of Artificial Sequence: Synthetic oligonucleotide
  Sense strand starting at position 916 of SEQ ID NO: 318379
cugugauauuuacagagaa

SEQ ID NO: 558056 - RNA, 19 nt, Artificial Sequence
  Description of Artificial Sequence: Synthetic oligonucleotide
  Antisense strand to SEQ ID NO: 558055
uucucuguaaauaucacag

SEQ ID NO: 558057 - RNA, 19 nt, Artificial Sequence
  Description of Artificial Sequence: Synthetic oligonucleotide
  Sense strand starting at position 1014 of SEQ ID NO: 318379
ggcaguuucgucuugcauc

SEQ ID NO: 558058 - RNA, 19 nt, Artificial Sequence
  Description of Artificial Sequence: Synthetic oligonucleotide
  Antisense strand to SEQ ID NO: 558057
gaugcaagacgaaacugcc

SEQ ID NO: 558059 - RNA, 19 nt, Artificial Sequence
  Description of Artificial Sequence: Synthetic oligonucleotide
  Sense strand starting at position 1040 of SEQ ID NO: 318379
uuucuuguucugcauggga

SEQ ID NO: 558060 - RNA, 19 nt, Artificial Sequence
  Description of Artificial Sequence: Synthetic oligonucleotide
  Antisense strand to SEQ ID NO: 558059
ucccaugcagaacaagaaa

SEQ ID NO: 558061 - RNA, 19 nt, Artificial Sequence
  Description of Artificial Sequence: Synthetic oligonucleotide
  Sense strand starting at position 1042 of SEQ ID NO: 318379
ucuuguucugcaugggaaa

SEQ ID NO: 558062 - RNA, 19 nt, Artificial Sequence
  Description of Artificial Sequence: Synthetic oligonucleotide
  Antisense strand to SEQ ID NO: 558061
uuucccaugcagaacaaga

SEQ ID NO: 558063 - RNA, 19 nt, Artificial Sequence
  Description of Artificial Sequence: Synthetic oligonucleotide
  Sense strand starting at position 1217 of SEQ ID NO: 318379
ccuaauauacaauguguau

SEQ ID NO: 558064 - RNA, 19 nt, Artificial Sequence
  Description of Artificial Sequence: Synthetic oligonucleotide
  Antisense strand to SEQ ID NO: 558063
auacacauuguauauuagg

SEQ ID NO: 558065 - RNA, 19 nt, Artificial Sequence
  Description of Artificial Sequence: Synthetic oligonucleotide
  Sense strand starting at position 1298 of SEQ ID NO: 318379
cuccuacuccuagggugaa

SEQ ID NO: 558066 - RNA, 19 nt, Artificial Sequence
  Description of Artificial Sequence: Synthetic oligonucleotide
  Antisense strand to SEQ ID NO: 558065
uucacccuaggaguaggag

SEQ ID NO: 558067 - RNA, 19 nt, Artificial Sequence
  Description of Artificial Sequence: Synthetic oligonucleotide
  Sense strand starting at position 2157 of SEQ ID NO: 318379
guccauugcgcagagggau

SEQ ID NO: 558068 - RNA, 19 nt, Artificial Sequence
  Description of Artificial Sequence: Synthetic oligonucleotide
  Antisense strand to SEQ ID NO: 558067
aucccucugcgcaauggac

SEQ ID NO: 558069 - RNA, 19 nt, Artificial Sequence
  Description of Artificial Sequence: Synthetic oligonucleotide
  Sense strand starting at position 2301 of SEQ ID NO: 318379
agggcuuugcuuucgcuua

SEQ ID NO: 558070 - RNA, 19 nt, Artificial Sequence
  Description of Artificial Sequence: Synthetic oligonucleotide
  Antisense strand to SEQ ID NO: 558069
uaagcgaaagcaaagcccu

SEQ ID NO: 558071 - RNA, 19 nt, Artificial Sequence
  Description of Artificial Sequence: Synthetic oligonucleotide
  Sense strand starting at position 2349 of SEQ ID NO: 318379
gguaauucgugguuaaagg

SEQ ID NO: 558072 - RNA, 19 nt, Artificial Sequence
  Description of Artificial Sequence: Synthetic oligonucleotide
  Antisense strand to SEQ ID NO: 558071
ccuuuaaccacgaauuacc

SEQ ID NO: 558073 - RNA, 19 nt, Artificial Sequence
  Description of Artificial Sequence: Synthetic oligonucleotide
  Sense strand starting at position 2367 of SEQ ID NO: 318379
ggugguugcagauaagcuu

SEQ ID NO: 558074 - RNA, 19 nt, Artificial Sequence
  Description of Artificial Sequence: Synthetic oligonucleotide
  Antisense strand to SEQ ID NO: 558073
aagcuuaucugcaaccacc

SEQ ID NO: 558075 - RNA, 19 nt, Artificial Sequence
  Description of Artificial Sequence: Synthetic oligonucleotide
  Sense strand starting at position 2523 of SEQ ID NO: 318379
agugaauuaggauguuugu

SEQ ID NO: 558076 - RNA, 19 nt, Artificial Sequence
  Description of Artificial Sequence: Synthetic oligonucleotide
  Antisense strand to SEQ ID NO: 558075
acaaacauccuaauucacu

SEQ ID NO: 558077 - RNA, 19 nt, Artificial Sequence
  Description of Artificial Sequence: Synthetic oligonucleotide
  Sense strand starting at position 2621 of SEQ ID NO: 318379
gcauuaagaguccagaagu

SEQ ID NO: 558078 - RNA, 19 nt, Artificial Sequence
  Description of Artificial Sequence: Synthetic oligonucleotide
  Antisense strand to SEQ ID NO: 558077
acuucuggacucuuaaugc

SEQ ID NO: 558079 - RNA, 19 nt, Artificial Sequence
  Description of Artificial Sequence: Synthetic oligonucleotide
  Sense strand starting at position 2631 of SEQ ID NO: 318379
uccagaagugcuuaggaac

SEQ ID NO: 558080 - RNA, 19 nt, Artificial Sequence
  Description of Artificial Sequence: Synthetic oligonucleotide
  Antisense strand to SEQ ID NO: 558079
guuccuaagcacuucugga

SEQ ID NO: 558081 - RNA, 19 nt, Artificial Sequence
  Description of Artificial Sequence: Synthetic oligonucleotide
  Sense strand starting at position 2797 of SEQ ID NO: 318379
uuguguuuagaggaaucug

SEQ ID NO: 558082 - RNA, 19 nt, Artificial Sequence
  Description of Artificial Sequence: Synthetic oligonucleotide
  Antisense strand to SEQ ID NO: 558081
cagauuccucuaaacacaa

SEQ ID NO: 558083 - RNA, 19 nt, Artificial Sequence
  Description of Artificial Sequence: Synthetic oligonucleotide
  Sense strand starting at position 2908 of SEQ ID NO: 318379
ggaggguucguugagcaga

SEQ ID NO: 558084 - RNA, 19 nt, Artificial Sequence
  Description of Artificial Sequence: Synthetic oligonucleotide
  Antisense strand to SEQ ID NO: 558083
ucugcucaacgaacccucc

SEQ ID NO: 558085 - RNA, 19 nt, Artificial Sequence
  Description of Artificial Sequence: Synthetic oligonucleotide
  Sense strand starting at position 2992 of SEQ ID NO: 318379
cuggauacauugccagaua

SEQ ID NO: 558086 - RNA, 19 nt, Artificial Sequence
  Description of Artificial Sequence: Synthetic oligonucleotide
  Antisense strand to SEQ ID NO: 558085
uaucuggcaauguauccag

SEQ ID NO: 558087 - RNA, 19 nt, Artificial Sequence
  Description of Artificial Sequence: Synthetic oligonucleotide
  Sense strand starting at position 3054 of SEQ ID NO: 318379
aaguuuaaggagcgucaaa

SEQ ID NO: 558088 - RNA, 19 nt, Artificial Sequence
  Description of Artificial Sequence: Synthetic oligonucleotide
  Antisense strand to SEQ ID NO: 558087
uuugacgcuccuuaaacuu

SEQ ID NO: 558089 - RNA, 19 nt, Artificial Sequence
  Description of Artificial Sequence: Synthetic oligonucleotide
  Sense strand starting at position 3107 of SEQ ID NO: 318379
aucagaucucaguauguug

SEQ ID NO: 558090 - RNA, 19 nt, Artificial Sequence
  Description of Artificial Sequence: Synthetic oligonucleotide
  Antisense strand to SEQ ID NO: 558089
caacauacugagaucugau

SEQ ID NO: 558091 - RNA, 19 nt, Artificial Sequence
  Description of Artificial Sequence: Synthetic oligonucleotide
  Sense strand starting at position 3115 of SEQ ID NO: 318379
ucaguauguugacccauua

SEQ ID NO: 558092 - RNA, 19 nt, Artificial Sequence
  Description of Artificial Sequence: Synthetic oligonucleotide
  Antisense strand to SEQ ID NO: 558091
uaaugggucaacauacuga

SEQ ID NO: 558093 - RNA, 19 nt, Artificial Sequence
  Description of Artificial Sequence: Synthetic oligonucleotide
  Sense strand starting at position 3227 of SEQ ID NO: 318379
ugucauuucucaguucugu

SEQ ID NO: 558094 - RNA, 19 nt, Artificial Sequence
  Description of Artificial Sequence: Synthetic oligonucleotide
  Antisense strand to SEQ ID NO: 558093
acagaacugagaaaugaca

SEQ ID NO: 558095 - RNA, 19 nt, Artificial Sequence
  Description of Artificial Sequence: Synthetic oligonucleotide
  Sense strand starting at position 3281 of SEQ ID NO: 318379
guauuauguugggucacag

SEQ ID NO: 558096 - RNA, 19 nt, Artificial Sequence
  Description of Artificial Sequence: Synthetic oligonucleotide
  Antisense strand to SEQ ID NO: 558095
cugugacccaacauaauac

SEQ ID NO: 558097 - RNA, 19 nt, Artificial Sequence
  Description of Artificial Sequence: Synthetic oligonucleotide
  Sense strand starting at position 3309 of SEQ ID NO: 318379
auuggacuuuacuuaaguu

SEQ ID NO: 558098 - RNA, 19 nt, Artificial Sequence
  Description of Artificial Sequence: Synthetic oligonucleotide
  Antisense strand to SEQ ID NO: 558097
aacuuaaguaaaguccaau

SEQ ID NO: 558099 - RNA, 19 nt, Artificial Sequence
  Description of Artificial Sequence: Synthetic oligonucleotide
  Sense strand starting at position 3385 of SEQ ID NO: 318379
ucucguuucccuguuggua

SEQ ID NO: 558100 - RNA, 19 nt, Artificial Sequence
  Description of Artificial Sequence: Synthetic oligonucleotide
  Antisense strand to SEQ ID NO: 558099
uaccaacagggaaacgaga

SEQ ID NO: 558101 - RNA, 19 nt, Artificial Sequence
  Description of Artificial Sequence: Synthetic oligonucleotide
  Sense strand starting at position 3400 of SEQ ID NO: 318379
gguaguaucaguuaugucu

SEQ ID NO: 558102 - RNA, 19 nt, Artificial Sequence
  Description of Artificial Sequence: Synthetic oligonucleotide
  Antisense strand to SEQ ID NO: 558101
agacauaacugauacuacc

SEQ ID NO: 558103 - RNA, 19 nt, Artificial Sequence
  Description of Artificial Sequence: Synthetic oligonucleotide
  Sense strand starting at position 3443 of SEQ ID NO: 318379
ugcuuugaacaguaaccaa

SEQ ID NO: 558104 - RNA, 19 nt, Artificial Sequence
  Description of Artificial Sequence: Synthetic oligonucleotide
  Antisense strand to SEQ ID NO: 558103
uugguuacuguucaaagca

SEQ ID NO: 558105 - RNA, 19 nt, Artificial Sequence
  Description of Artificial Sequence: Synthetic oligonucleotide
  Sense strand starting at position 3464 of SEQ ID NO: 318379
gauauugauuaauucguag

SEQ ID NO: 558106 - RNA, 19 nt, Artificial Sequence
  Description of Artificial Sequence: Synthetic oligonucleotide
  Antisense strand to SEQ ID NO: 558105
cuacgaauuaaucaauauc

SEQ ID NO: 558107 - RNA, 19 nt, Artificial Sequence
  Description of Artificial Sequence: Synthetic oligonucleotide
  Sense strand starting at position 3467 of SEQ ID NO: 318379
auugauuaauucguagaca

SEQ ID NO: 558108 - RNA, 19 nt, Artificial Sequence
  Description of Artificial Sequence: Synthetic oligonucleotide
  Antisense strand to SEQ ID NO: 558107
ugucuacgaauuaaucaau

SEQ ID NO: 558109 - RNA, 19 nt, Artificial Sequence
  Description of Artificial Sequence: Synthetic oligonucleotide
  Sense strand starting at position 3499 of SEQ ID NO: 318379
guaaguacuuucccaauga

SEQ ID NO: 558110 - RNA, 19 nt, Artificial Sequence
  Description of Artificial Sequence: Synthetic oligonucleotide
  Antisense strand to SEQ ID NO: 558109
ucauugggaaaguacuuac

SEQ ID NO: 558111 - RNA, 19 nt, Artificial Sequence
  Description of Artificial Sequence: Synthetic oligonucleotide
  Sense strand starting at position 3571 of SEQ ID NO: 318379
acacaaucauguguaugua

SEQ ID NO: 558112 - RNA, 19 nt, Artificial Sequence
  Description of Artificial Sequence: Synthetic oligonucleotide
  Antisense strand to SEQ ID NO: 558111
uacauacacaugauugugu

SEQ ID NO: 558113 - RNA, 19 nt, Artificial Sequence
  Description of Artificial Sequence: Synthetic oligonucleotide
  Sense strand starting at position 3924 of SEQ ID NO: 318379
uuauaugucuagucaauac

SEQ ID NO: 558114 - RNA, 19 nt, Artificial Sequence
  Description of Artificial Sequence: Synthetic oligonucleotide
  Antisense strand to SEQ ID NO: 558113
guauugacuagacauauaa

SEQ ID NO: 558115 - RNA, 19 nt, Artificial Sequence
  Description of Artificial Sequence: Synthetic oligonucleotide
  Sense strand starting at position 115 of SEQ ID NO: 318380
uuccacugucuauaguaau

SEQ ID NO: 558116 - RNA, 19 nt, Artificial Sequence
  Description of Artificial Sequence: Synthetic oligonucleotide
  Antisense strand to SEQ ID NO: 558115
auuacuauagacaguggaa

SEQ ID NO: 558117 - RNA, 19 nt, Artificial Sequence
  Description of Artificial Sequence: Synthetic oligonucleotide
  Sense strand starting at position 278 of SEQ ID NO: 318380
gauaaacaguucuuggaua

SEQ ID NO: 558118 - RNA, 19 nt, Artificial Sequence
  Description of Artificial Sequence: Synthetic oligonucleotide
  Antisense strand to SEQ ID NO: 558117
uauccaagaacuguuuauc

SEQ ID NO: 558119 - RNA, 19 nt, Artificial Sequence
  Description of Artificial Sequence: Synthetic oligonucleotide
  Sense strand starting at position 302 of SEQ ID NO: 318380
guugaagugccuggaauga

SEQ ID NO: 558120 - RNA, 19 nt, Artificial Sequence
  Description of Artificial Sequence: Synthetic oligonucleotide
  Antisense strand to SEQ ID NO: 558119
ucauuccaggcacuucaac

SEQ ID NO: 558121 - RNA, 19 nt, Artificial Sequence
  Description of Artificial Sequence: Synthetic oligonucleotide
  Sense strand starting at position 332 of SEQ ID NO: 318380
uguuaaauuugugccuuaa

SEQ ID NO: 558122 - RNA, 19 nt, Artificial Sequence
  Description of Artificial Sequence: Synthetic oligonucleotide
  Antisense strand to SEQ ID NO: 558121
uuaaggcacaaauuuaaca

SEQ ID NO: 558123 - RNA, 19 nt, Artificial Sequence
  Description of Artificial Sequence: Synthetic oligonucleotide
  Sense strand starting at position 758 of SEQ ID NO: 318380
aucugacugcucuauacag

SEQ ID NO: 558124 - RNA, 19 nt, Artificial Sequence
  Description of Artificial Sequence: Synthetic oligonucleotide
  Antisense strand to SEQ ID NO: 558123
cuguauagagcagucagau

SEQ ID NO: 558125 - RNA, 19 nt, Artificial Sequence
  Description of Artificial Sequence: Synthetic oligonucleotide
  Sense strand starting at position 779 of SEQ ID NO: 318380
ugcuaaggaagcuaguaua

SEQ ID NO: 558126 - RNA, 19 nt, Artificial Sequence
  Description of Artificial Sequence: Synthetic oligonucleotide
  Antisense strand to SEQ ID NO: 558125
uauacuagcuuccuuagca

SEQ ID NO: 558127 - RNA, 19 nt, Artificial Sequence
  Description of Artificial Sequence: Synthetic oligonucleotide
  Sense strand starting at position 799 of SEQ ID NO: 318380
cauuaaagaugagcuagua

SEQ ID NO: 558128 - RNA, 19 nt, Artificial Sequence
  Description of Artificial Sequence: Synthetic oligonucleotide
  Antisense strand to SEQ ID NO: 558127
uacuagcucaucuuuaaug

SEQ ID NO: 558129 - RNA, 19 nt, Artificial Sequence
  Description of Artificial Sequence: Synthetic oligonucleotide
  Sense strand starting at position 947 of SEQ ID NO: 318380
agcuauuucggcuguccua

SEQ ID NO: 558130 - RNA, 19 nt, Artificial Sequence
  Description of Artificial Sequence: Synthetic oligonucleotide
  Antisense strand to SEQ ID NO: 558129
uaggacagccgaaauagcu

SEQ ID NO: 558131 - RNA, 19 nt, Artificial Sequence
  Description of Artificial Sequence: Synthetic oligonucleotide
  Sense strand starting at position 990 of SEQ ID NO: 318380
ggcagucuuaacuaagaug

SEQ ID NO: 558132 - RNA, 19 nt, Artificial Sequence
  Description of Artificial Sequence: Synthetic oligonucleotide
  Antisense strand to SEQ ID NO: 558131
caucuuaguuaagacugcc

SEQ ID NO: 558133 - RNA, 19 nt, Artificial Sequence
  Description of Artificial Sequence: Synthetic oligonucleotide
  Sense strand starting at position 1002 of SEQ ID NO: 318380
uaagauguugcucaucuga

SEQ ID NO: 558134 - RNA, 19 nt, Artificial Sequence
  Description of Artificial Sequence: Synthetic oligonucleotide
  Antisense strand to SEQ ID NO: 558133
ucagaugagcaacaucuua

SEQ ID NO: 558135 - RNA, 19 nt, Artificial Sequence
  Description of Artificial Sequence: Synthetic oligonucleotide
  Sense strand starting at position 1004 of SEQ ID NO: 318380
agauguugcucaucugaag

SEQ ID NO: 558136 - RNA, 19 nt, Artificial Sequence
  Description of Artificial Sequence: Synthetic oligonucleotide
  Antisense strand to SEQ ID NO: 558135
cuucagaugagcaacaucu

SEQ ID NO: 558137 - RNA, 19 nt, Artificial Sequence
  Description of Artificial Sequence: Synthetic oligonucleotide
  Sense strand starting at position 1010 of SEQ ID NO: 318380
ugcucaucugaagaacuca

SEQ ID NO: 558138 - RNA, 19 nt, Artificial Sequence
  Description of Artificial Sequence: Synthetic oligonucleotide
  Antisense strand to SEQ ID NO: 558137
ugaguucuucagaugagca

SEQ ID NO: 558139 - RNA, 19 nt, Artificial Sequence
  Description of Artificial Sequence: Synthetic oligonucleotide
  Sense strand starting at position 1067 of SEQ ID NO: 318380
acuggauucuagucccaac

SEQ ID NO: 558140 - RNA, 19 nt, Artificial Sequence
  Description of Artificial Sequence: Synthetic oligonucleotide
  Antisense strand to SEQ ID NO: 558139
guugggacuagaauccagu

SEQ ID NO: 558141 - RNA, 19 nt, Artificial Sequence
  Description of Artificial Sequence: Synthetic oligonucleotide
  Sense strand starting at position 1140 of SEQ ID NO: 318380
agauaaauucuaggguccu

SEQ ID NO: 558142 - RNA, 19 nt, Artificial Sequence
  Description of Artificial Sequence: Synthetic oligonucleotide
  Antisense strand to SEQ ID NO: 558141
aggacccuagaauuuaucu

SEQ ID NO: 558143 - RNA, 19 nt, Artificial Sequence
  Description of Artificial Sequence: Synthetic oligonucleotide
  Sense strand starting at position 1146 of SEQ ID NO: 318380
auucuaggguccuuuccaa

SEQ ID NO: 558144 - RNA, 19 nt, Artificial Sequence
  Description of Artificial Sequence: Synthetic oligonucleotide
  Antisense strand to SEQ ID NO: 558143
uuggaaaggacccuagaau

SEQ ID NO: 558145 - RNA, 19 nt, Artificial Sequence
  Description of Artificial Sequence: Synthetic oligonucleotide
  Sense strand starting at position 1211 of SEQ ID NO: 318380
uuagaaugcugaucauucu

SEQ ID NO: 558146 - RNA, 19 nt, Artificial Sequence
  Description of Artificial Sequence: Synthetic oligonucleotide
  Antisense strand to SEQ ID NO: 558145
agaaugaucagcauucuaa

SEQ ID NO: 558147 - RNA, 19 nt, Artificial Sequence
  Description of Artificial Sequence: Synthetic oligonucleotide
  Sense strand starting at position 1217 of SEQ ID NO: 318380
ugcugaucauucuuagaua

SEQ ID NO: 558148 - RNA, 19 nt, Artificial Sequence
  Description of Artificial Sequence: Synthetic oligonucleotide
  Antisense strand to SEQ ID NO: 558147
uaucuaagaaugaucagca

SEQ ID NO: 558149 - RNA, 19 nt, Artificial Sequence
  Description of Artificial Sequence: Synthetic oligonucleotide
  Sense strand starting at position 1518 of SEQ ID NO: 318380
aaagguuggacuuggaguu

SEQ ID NO: 558150 - RNA, 19 nt, Artificial Sequence
  Description of Artificial Sequence: Synthetic oligonucleotide
  Antisense strand to SEQ ID NO: 558149
aacuccaaguccaaccuuu

SEQ ID NO: 558151 - RNA, 19 nt, Artificial Sequence
  Description of Artificial Sequence: Synthetic oligonucleotide
  Sense strand starting at position 1552 of SEQ ID NO: 318380
ggcagaauuacggaugcca

SEQ ID NO: 558152 - RNA, 19 nt, Artificial Sequence
  Description of Artificial Sequence: Synthetic oligonucleotide
  Antisense strand to SEQ ID NO: 558151
uggcauccguaauucugcc

SEQ ID NO: 558153 - RNA, 19 nt, Artificial Sequence
  Description of Artificial Sequence: Synthetic oligonucleotide
  Sense strand starting at position 1554 of SEQ ID NO: 318380
cagaauuacggaugccaca

SEQ ID NO: 558154 - RNA, 19 nt, Artificial Sequence
  Description of Artificial Sequence: Synthetic oligonucleotide
  Antisense strand to SEQ ID NO: 558153
uguggcauccguaauucug

SEQ ID NO: 558155 - RNA, 19 nt, Artificial Sequence
  Description of Artificial Sequence: Synthetic oligonucleotide
  Sense strand starting at position 1634 of SEQ ID NO: 318380
aagugagucccugaagccu

SEQ ID NO: 558156 - RNA, 19 nt, Artificial Sequence
  Description of Artificial Sequence: Synthetic oligonucleotide
  Antisense strand to SEQ ID NO: 558155
aggcuucagggacucacuu

SEQ ID NO: 558157 - RNA, 19 nt, Artificial Sequence
  Description of Artificial Sequence: Synthetic oligonucleotide
  Sense strand starting at position 1795 of SEQ ID NO: 318380
gccuuaggacucugggaaa

SEQ ID NO: 558158 - RNA, 19 nt, Artificial Sequence
  Description of Artificial Sequence: Synthetic oligonucleotide
  Antisense strand to SEQ ID NO: 558157
uuucccagaguccuaaggc

SEQ ID NO: 558159 - RNA, 19 nt, Artificial Sequence
  Description of Artificial Sequence: Synthetic oligonucleotide
  Sense strand starting at position 1866 of SEQ ID NO: 318380
uugauauucuugucuauag

SEQ ID NO: 558160 - RNA, 19 nt, Artificial Sequence
  Description of Artificial Sequence: Synthetic oligonucleotide
  Antisense strand to SEQ ID NO: 558159
cuauagacaagaauaucaa

SEQ ID NO: 558161 - RNA, 19 nt, Artificial Sequence
  Description of Artificial Sequence: Synthetic oligonucleotide
  Sense strand starting at position 2183 of SEQ ID NO: 318380
ccguaucuuccagacauag

SEQ ID NO: 558162 - RNA, 19 nt, Artificial Sequence
  Description of Artificial Sequence: Synthetic oligonucleotide
  Antisense strand to SEQ ID NO: 558161
cuaugucuggaagauacgg

SEQ ID NO: 558163 - RNA, 19 nt, Artificial Sequence
  Description of Artificial Sequence: Synthetic oligonucleotide
  Sense strand starting at position 2210 of SEQ ID NO: 318380
gcagauuucccauguggcu

SEQ ID NO: 558164 - RNA, 19 nt, Artificial Sequence
  Description of Artificial Sequence: Synthetic oligonucleotide
  Antisense strand to SEQ ID NO: 558163
agccacaugggaaaucugc

SEQ ID NO: 558165 - RNA, 19 nt, Artificial Sequence
  Description of Artificial Sequence: Synthetic oligonucleotide
  Sense strand starting at position 2266 of SEQ ID NO: 318380
aauugagauguauguagau

SEQ ID NO: 558166 - RNA, 19 nt, Artificial Sequence
  Description of Artificial Sequence: Synthetic oligonucleotide
  Antisense strand to SEQ ID NO: 558165
aucuacauacaucucaauu

SEQ ID NO: 558167 - RNA, 19 nt, Artificial Sequence
  Description of Artificial Sequence: Synthetic oligonucleotide
  Sense strand starting at position 2272 of SEQ ID NO: 318380
gauguauguagaugagguc

SEQ ID NO: 558168 - RNA, 19 nt, Artificial Sequence
  Description of Artificial Sequence: Synthetic oligonucleotide
  Antisense strand to SEQ ID NO: 558167
gaccucaucuacauacauc

SEQ ID NO: 558169 - RNA, 19 nt, Artificial Sequence
  Description of Artificial Sequence: Synthetic oligonucleotide
  Sense strand starting at position 2323 of SEQ ID NO: 318380
gucgcugugcucucaggaa

SEQ ID NO: 558170 - RNA, 19 nt, Artificial Sequence
  Description of Artificial Sequence: Synthetic oligonucleotide
  Antisense strand to SEQ ID NO: 558169
uuccugagagcacagcgac

SEQ ID NO: 558171 - RNA, 19 nt, Artificial Sequence
  Description of Artificial Sequence: Synthetic oligonucleotide
  Sense strand starting at position 2330 of SEQ ID NO: 318380
ugcucucaggaaugaguaa

SEQ ID NO: 558172 - RNA, 19 nt, Artificial Sequence
  Description of Artificial Sequence: Synthetic oligonucleotide
  Antisense strand to SEQ ID NO: 558171
uuacucauuccugagagca

SEQ ID NO: 558173 - RNA, 19 nt, Artificial Sequence
  Description of Artificial Sequence: Synthetic oligonucleotide
  Sense strand starting at position 2453 of SEQ ID NO: 318380
aagacauucuaggcacagu

SEQ ID NO: 558174 - RNA, 19 nt, Artificial Sequence
  Description of Artificial Sequence: Synthetic oligonucleotide
  Antisense strand to SEQ ID NO: 558173
acugugccuagaaugucuu

SEQ ID NO: 558175 - RNA, 19 nt, Artificial Sequence
  Description of Artificial Sequence: Synthetic oligonucleotide
  Sense strand starting at position 2536 of SEQ ID NO: 318380
ucucaaacguacucagaau

SEQ ID NO: 558176 - RNA, 19 nt, Artificial Sequence
  Description of Artificial Sequence: Synthetic oligonucleotide
  Antisense strand to SEQ ID NO: 558175
auucugaguacguuugaga

SEQ ID NO: 558177 - RNA, 19 nt, Artificial Sequence
  Description of Artificial Sequence: Synthetic oligonucleotide
  Sense strand starting at position 2914 of SEQ ID NO: 318380
cuaauugugugacuuuaag

SEQ ID NO: 558178 - RNA, 19 nt, Artificial Sequence
  Description of Artificial Sequence: Synthetic oligonucleotide
  Antisense strand to SEQ ID NO: 558177
cuuaaagucacacaauuag

SEQ ID NO: 558179 - RNA, 19 nt, Artificial Sequence
  Description of Artificial Sequence: Synthetic oligonucleotide
  Sense strand starting at position 3255 of SEQ ID NO: 318380
auauuaaaggcuugagcca

SEQ ID NO: 558180 - RNA, 19 nt, Artificial Sequence
  Description of Artificial Sequence: Synthetic oligonucleotide
  Antisense strand to SEQ ID NO: 558179
uggcucaagccuuuaauau

SEQ ID NO: 558181 - RNA, 19 nt, Artificial Sequence
  Description of Artificial Sequence: Synthetic oligonucleotide
  Sense strand starting at position 3617 of SEQ ID NO: 318380
gucuucucauguuugagag

SEQ ID NO: 558182 - RNA, 19 nt, Artificial Sequence
  Description of Artificial Sequence: Synthetic oligonucleotide
  Antisense strand to SEQ ID NO: 558181
cucucaaacaugagaagac

SEQ ID NO: 558183 - RNA, 19 nt, Artificial Sequence
  Description of Artificial Sequence: Synthetic oligonucleotide
  Sense strand starting at position 3624 of SEQ ID NO: 318380
cauguuugagagugaccau

SEQ ID NO: 558184 - RNA, 19 nt, Artificial Sequence
  Description of Artificial Sequence: Synthetic oligonucleotide
  Antisense strand to SEQ ID NO: 558183
auggucacucucaaacaug

SEQ ID NO: 558185 - RNA, 19 nt, Artificial Sequence
  Description of Artificial Sequence: Synthetic oligonucleotide
  Sense strand starting at position 3627 of SEQ ID NO: 318380
guuugagagugaccauauu

SEQ ID NO: 558186 - RNA, 19 nt, Artificial Sequence
  Description of Artificial Sequence: Synthetic oligonucleotide
  Antisense strand to SEQ ID NO: 558185
aauauggucacucucaaac

SEQ ID NO: 558187 - RNA, 19 nt, Artificial Sequence
  Description of Artificial Sequence: Synthetic oligonucleotide
  Sense strand starting at position 3644 of SEQ ID NO: 318380
uugaccuaacaggguuauu

SEQ ID NO: 558188 - RNA, 19 nt, Artificial Sequence
  Description of Artificial Sequence: Synthetic oligonucleotide
  Antisense strand to SEQ ID NO: 558187
aauaacccuguuaggucaa

SEQ ID NO: 558189 - RNA, 19 nt, Artificial Sequence
  Description of Artificial Sequence: Synthetic oligonucleotide
  Sense strand starting at position 3727 of SEQ ID NO: 318380
ucaauaaaucacugguguu

SEQ ID NO: 558190 - RNA, 19 nt, Artificial Sequence
  Description of Artificial Sequence: Synthetic oligonucleotide
  Antisense strand to SEQ ID NO: 558189
aacaccagugauuuauuga

SEQ ID NO: 558191 - RNA, 19 nt, Artificial Sequence
  Description of Artificial Sequence: Synthetic oligonucleotide
  Sense strand starting at position 3742 of SEQ ID NO: 318380
uguuaaucgccguccuguu

SEQ ID NO: 558192 - RNA, 19 nt, Artificial Sequence
  Description of Artificial Sequence: Synthetic oligonucleotide
  Antisense strand to SEQ ID NO: 558191
aacaggacggcgauuaaca

SEQ ID NO: 558193 - RNA, 19 nt, Artificial Sequence
  Description of Artificial Sequence: Synthetic oligonucleotide
  Sense strand starting at position 3907 of SEQ ID NO: 318380
acuguaagcuccuugaaau

SEQ ID NO: 558194 - RNA, 19 nt, Artificial Sequence
  Description of Artificial Sequence: Synthetic oligonucleotide
  Antisense strand to SEQ ID NO: 558193
auuucaaggagcuuacagu

SEQ ID NO: 558195 - RNA, 19 nt, Artificial Sequence
  Description of Artificial Sequence: Synthetic oligonucleotide
  Sense strand starting at position 228 of SEQ ID NO: 318381
gcucuccaucaauggcaaa

SEQ ID NO: 558196 - RNA, 19 nt, Artificial Sequence
  Description of Artificial Sequence: Synthetic oligonucleotide
  Antisense strand to SEQ ID NO: 558195
uuugccauugauggagagc

SEQ ID NO: 558197 - RNA, 19 nt, Artificial Sequence
  Description of Artificial Sequence: Synthetic oligonucleotide
  Sense strand starting at position 383 of SEQ ID NO: 318381
cuaccuuagugaguccaaa

SEQ ID NO: 558198 - RNA, 19 nt, Artificial Sequence
  Description of Artificial Sequence: Synthetic oligonucleotide
  Antisense strand to SEQ ID NO: 558197
uuuggacucacuaagguag

SEQ ID NO: 558199 - RNA, 19 nt, Artificial Sequence
  Description of Artificial Sequence: Synthetic oligonucleotide
  Sense strand starting at position 727 of SEQ ID NO: 318381
guccacuaucuuugggcaa

SEQ ID NO: 558200 - RNA, 19 nt, Artificial Sequence
  Description of Artificial Sequence: Synthetic oligonucleotide
  Antisense strand to SEQ ID NO: 558199
uugcccaaagauaguggac

SEQ ID NO: 558201 - RNA, 19 nt, Artificial Sequence
  Description of Artificial Sequence: Synthetic oligonucleotide
  Sense strand starting at position 1064 of SEQ ID NO: 318381
uagugcuugagguaugagu

SEQ ID NO: 558202 - RNA, 19 nt, Artificial Sequence
  Description of Artificial Sequence: Synthetic oligonucleotide
  Antisense strand to SEQ ID NO: 558201
acucauaccucaagcacua

SEQ ID NO: 558203 - RNA, 19 nt, Artificial Sequence
  Description of Artificial Sequence: Synthetic oligonucleotide
  Sense strand starting at position 1172 of SEQ ID NO: 318381
cugccuaaugugugggaau

SEQ ID NO: 558204 - RNA, 19 nt, Artificial Sequence
  Description of Artificial Sequence: Synthetic oligonucleotide
  Antisense strand to SEQ ID NO: 558203
auucccacacauuaggcag

SEQ ID NO: 558205 - RNA, 19 nt, Artificial Sequence
  Description of Artificial Sequence: Synthetic oligonucleotide
  Sense strand starting at position 1174 of SEQ ID NO: 318381
gccuaaugugugggaauau

SEQ ID NO: 558206 - RNA, 19 nt, Artificial Sequence
  Description of Artificial Sequence: Synthetic oligonucleotide
  Antisense strand to SEQ ID NO: 558205
auauucccacacauuaggc

SEQ ID NO: 558207 - RNA, 19 nt, Artificial Sequence
  Description of Artificial Sequence: Synthetic oligonucleotide
  Sense strand starting at position 1185 of SEQ ID NO: 318381
gggaauaucucugagaaag

SEQ ID NO: 558208 - RNA, 19 nt, Artificial Sequence
  Description of Artificial Sequence: Synthetic oligonucleotide
  Antisense strand to SEQ ID NO: 558207
cuuucucagagauauuccc

SEQ ID NO: 558209 - RNA, 19 nt, Artificial Sequence
  Description of Artificial Sequence: Synthetic oligonucleotide
  Sense strand starting at position 1187 of SEQ ID NO: 318381
gaauaucucugagaaagga

SEQ ID NO: 558210 - RNA, 19 nt, Artificial Sequence
  Description of Artificial Sequence: Synthetic oligonucleotide
  Antisense strand to SEQ ID NO: 558209
uccuuucucagagauauuc

SEQ ID NO: 558211 - RNA, 19 nt, Artificial Sequence
  Description of Artificial Sequence: Synthetic oligonucleotide
  Sense strand starting at position 1549 of SEQ ID NO: 318381
ccgcguaugaguucgugca

SEQ ID NO: 558212 - RNA, 19 nt, Artificial Sequence
  Description of Artificial Sequence: Synthetic oligonucleotide
  Antisense strand to SEQ ID NO: 558211
ugcacgaacucauacgcgg

SEQ ID NO: 558213 - RNA, 19 nt, Artificial Sequence
  Description of Artificial Sequence: Synthetic oligonucleotide
  Sense strand starting at position 1553 of SEQ ID NO: 318381
guaugaguucgugcaccgu

SEQ ID NO: 558214 - RNA, 19 nt, Artificial Sequence
  Description of Artificial Sequence: Synthetic oligonucleotide
  Antisense strand to SEQ ID NO: 558213
acggugcacgaacucauac

SEQ ID NO: 558215 - RNA, 19 nt, Artificial Sequence
  Description of Artificial Sequence: Synthetic oligonucleotide
  Sense strand starting at position 2108 of SEQ ID NO: 318381
agugcugucgcaguucuaa

SEQ ID NO: 558216 - RNA, 19 nt, Artificial Sequence
  Description of Artificial Sequence: Synthetic oligonucleotide
  Antisense strand to SEQ ID NO: 558215
uuagaacugcgacagcacu

SEQ ID NO: 558217 - RNA, 19 nt, Artificial Sequence
  Description of Artificial Sequence: Synthetic oligonucleotide
  Sense strand starting at position 2125 of SEQ ID NO: 318381
aagguuauccuguaggaug

SEQ ID NO: 558218 - RNA, 19 nt, Artificial Sequence
  Description of Artificial Sequence: Synthetic oligonucleotide
  Antisense strand to SEQ ID NO: 558217
cauccuacaggauaaccuu

SEQ ID NO: 558219 - RNA, 19 nt, Artificial Sequence
  Description of Artificial Sequence: Synthetic oligonucleotide
  Sense strand starting at position 2136 of SEQ ID NO: 318381
guaggauggguuuggcaga

SEQ ID NO: 558220 - RNA, 19 nt, Artificial Sequence
  Description of Artificial Sequence: Synthetic oligonucleotide
  Antisense strand to SEQ ID NO: 558219
ucugccaaacccauccuac

SEQ ID NO: 558221 - RNA, 19 nt, Artificial Sequence
  Description of Artificial Sequence: Synthetic oligonucleotide
  Sense strand starting at position 2372 of SEQ ID NO: 318381
ucaggaagucuugagcuca

SEQ ID NO: 558222 - RNA, 19 nt, Artificial Sequence
  Description of Artificial Sequence: Synthetic oligonucleotide
  Antisense strand to SEQ ID NO: 558221
ugagcucaagacuuccuga

SEQ ID NO: 558223 - RNA, 19 nt, Artificial Sequence
  Description of Artificial Sequence: Synthetic oligonucleotide
  Sense strand starting at position 2493 of SEQ ID NO: 318381
aaaggauguugugucugga

SEQ ID NO: 558224 - RNA, 19 nt, Artificial Sequence
  Description of Artificial Sequence: Synthetic oligonucleotide
  Antisense strand to SEQ ID NO: 558223
uccagacacaacauccuuu

SEQ ID NO: 558225 - RNA, 19 nt, Artificial Sequence
  Description of Artificial Sequence: Synthetic oligonucleotide
  Sense strand starting at position 2496 of SEQ ID NO: 318381
ggauguugugucuggacag

SEQ ID NO: 558226 - RNA, 19 nt, Artificial Sequence
  Description of Artificial Sequence: Synthetic oligonucleotide
  Antisense strand to SEQ ID NO: 558225
cuguccagacacaacaucc

SEQ ID NO: 558227 - RNA, 19 nt, Artificial Sequence
  Description of Artificial Sequence: Synthetic oligonucleotide
  Sense strand starting at position 2552 of SEQ ID NO: 318381
cccagauugugguucuuaa

SEQ ID NO: 558228 - RNA, 19 nt, Artificial Sequence
  Description of Artificial Sequence: Synthetic oligonucleotide
  Antisense strand to SEQ ID NO: 558227
uuaagaaccacaaucuggg

SEQ ID NO: 558229 - RNA, 19 nt, Artificial Sequence
  Description of Artificial Sequence: Synthetic oligonucleotide
  Sense strand starting at position 2560 of SEQ ID NO: 318381
gugguucuuaagcaugaga

SEQ ID NO: 558230 - RNA, 19 nt, Artificial Sequence
  Description of Artificial Sequence: Synthetic oligonucleotide
  Antisense strand to SEQ ID NO: 558229
ucucaugcuuaagaaccac

SEQ ID NO: 558231 - RNA, 19 nt, Artificial Sequence
  Description of Artificial Sequence: Synthetic oligonucleotide
  Sense strand starting at position 2562 of SEQ ID NO: 318381
gguucuuaagcaugagaga

SEQ ID NO: 558232 - RNA, 19 nt, Artificial Sequence
  Description of Artificial Sequence: Synthetic oligonucleotide
  Antisense strand to SEQ ID NO: 558231
ucucucaugcuuaagaacc

SEQ ID NO: 558233 - RNA, 19 nt, Artificial Sequence
  Description of Artificial Sequence: Synthetic oligonucleotide
  Sense strand starting at position 2600 of SEQ ID NO: 318381
ggcuguuaaacagauugcu

SEQ ID NO: 558234 - RNA, 19 nt, Artificial Sequence
  Description of Artificial Sequence: Synthetic oligonucleotide
  Antisense strand to SEQ ID NO: 558233
agcaaucuguuuaacagcc

SEQ ID NO: 558235 - RNA, 19 nt, Artificial Sequence
  Description of Artificial Sequence: Synthetic oligonucleotide
  Sense strand starting at position 2651 of SEQ ID NO: 318381
uaaaguguagcccgagaau

SEQ ID NO: 558236 - RNA, 19 nt, Artificial Sequence
  Description of Artificial Sequence: Synthetic oligonucleotide
  Antisense strand to SEQ ID NO: 558235
auucucgggcuacacuuua

SEQ ID NO: 558237 - RNA, 19 nt, Artificial Sequence
  Description of Artificial Sequence: Synthetic oligonucleotide
  Sense strand starting at position 2660 of SEQ ID NO: 318381
gcccgagaauuuguuaugu

SEQ ID NO: 558238 - RNA, 19 nt, Artificial Sequence
  Description of Artificial Sequence: Synthetic oligonucleotide
  Antisense strand to SEQ ID NO: 558237
acauaacaaauucucgggc

SEQ ID NO: 558239 - RNA, 19 nt, Artificial Sequence
  Description of Artificial Sequence: Synthetic oligonucleotide
  Sense strand starting at position 2679 of SEQ ID NO: 318381
guaacaaguucccugguga

SEQ ID NO: 558240 - RNA, 19 nt, Artificial Sequence
  Description of Artificial Sequence: Synthetic oligonucleotide
  Antisense strand to SEQ ID NO: 558239
ucaccagggaacuuguuac

SEQ ID NO: 558241 - RNA, 19 nt, Artificial Sequence
  Description of Artificial Sequence: Synthetic oligonucleotide
  Sense strand starting at position 3006 of SEQ ID NO: 318381
uuucgaacuccugagcaau

SEQ ID NO: 558242 - RNA, 19 nt, Artificial Sequence
  Description of Artificial Sequence: Synthetic oligonucleotide
  Antisense strand to SEQ ID NO: 558241
auugcucaggaguucgaaa

SEQ ID NO: 558243 - RNA, 19 nt, Artificial Sequence
  Description of Artificial Sequence: Synthetic oligonucleotide
  Sense strand starting at position 3117 of SEQ ID NO: 318381
uuggcuguacauggaauua

SEQ ID NO: 558244 - RNA, 19 nt, Artificial Sequence
  Description of Artificial Sequence: Synthetic oligonucleotide
  Antisense strand to SEQ ID NO: 558243
uaauuccauguacagccaa

SEQ ID NO: 558245 - RNA, 19 nt, Artificial Sequence
  Description of Artificial Sequence: Synthetic oligonucleotide
  Sense strand starting at position 3206 of SEQ ID NO: 318381
guggaacuugggcauagau

SEQ ID NO: 558246 - RNA, 19 nt, Artificial Sequence
  Description of Artificial Sequence: Synthetic oligonucleotide
  Antisense strand to SEQ ID NO: 558245
aucuaugcccaaguuccac

SEQ ID NO: 558247 - RNA, 19 nt, Artificial Sequence
  Description of Artificial Sequence: Synthetic oligonucleotide
  Sense strand starting at position 3215 of SEQ ID NO: 318381
gggcauagauuggcucaaa

SEQ ID NO: 558248 - RNA, 19 nt, Artificial Sequence
  Description of Artificial Sequence: Synthetic oligonucleotide
  Antisense strand to SEQ ID NO: 558247
uuugagccaaucuaugccc

SEQ ID NO: 558249 - RNA, 19 nt, Artificial Sequence
  Description of Artificial Sequence: Synthetic oligonucleotide
  Sense strand starting at position 3250 of SEQ ID NO: 318381
cuuaauguauggucugaga

SEQ ID NO: 558250 - RNA, 19 nt, Artificial Sequence
  Description of Artificial Sequence: Synthetic oligonucleotide
  Antisense strand to SEQ ID NO: 558249
ucucagaccauacauuaag

SEQ ID NO: 558251 - RNA, 19 nt, Artificial Sequence
  Description of Artificial Sequence: Synthetic oligonucleotide
  Sense strand starting at position 3252 of SEQ ID NO: 318381
uaauguauggucugagaac

SEQ ID NO: 558252 - RNA, 19 nt, Artificial Sequence
  Description of Artificial Sequence: Synthetic oligonucleotide
  Antisense strand to SEQ ID NO: 558251
guucucagaccauacauua

SEQ ID NO: 558253 - RNA, 19 nt, Artificial Sequence
  Description of Artificial Sequence: Synthetic oligonucleotide
  Sense strand starting at position 3265 of SEQ ID NO: 318381
gagaacuacugcucuguaa

SEQ ID NO: 558254 - RNA, 19 nt, Artificial Sequence
  Description of Artificial Sequence: Synthetic oligonucleotide
  Antisense strand to SEQ ID NO: 558253
uuacagagcaguaguucuc

SEQ ID NO: 558255 - RNA, 19 nt, Artificial Sequence
  Description of Artificial Sequence: Synthetic oligonucleotide
  Sense strand starting at position 3337 of SEQ ID NO: 318381
cuugguauacaguauccua

SEQ ID NO: 558256 - RNA, 19 nt, Artificial Sequence
  Description of Artificial Sequence: Synthetic oligonucleotide
  Antisense strand to SEQ ID NO: 558255
uaggauacuguauaccaag

SEQ ID NO: 558257 - RNA, 19 nt, Artificial Sequence
  Description of Artificial Sequence: Synthetic oligonucleotide
  Sense strand starting at position 3348 of SEQ ID NO: 318381
guauccuaggcucaguaaa

SEQ ID NO: 558258 - RNA, 19 nt, Artificial Sequence
  Description of Artificial Sequence: Synthetic oligonucleotide
  Antisense strand to SEQ ID NO: 558257
uuuacugagccuaggauac

SEQ ID NO: 558259 - RNA, 19 nt, Artificial Sequence
  Description of Artificial Sequence: Synthetic oligonucleotide
  Sense strand starting at position 3350 of SEQ ID NO: 318381
auccuaggcucaguaaaca

SEQ ID NO: 558260 - RNA, 19 nt, Artificial Sequence
  Description of Artificial Sequence: Synthetic oligonucleotide
  Antisense strand to SEQ ID NO: 558259
uguuuacugagccuaggau

SEQ ID NO: 558261 - RNA, 19 nt, Artificial Sequence
  Description of Artificial Sequence: Synthetic oligonucleotide
  Sense strand starting at position 3410 of SEQ ID NO: 318381
uagaccuuguucucugaga

SEQ ID NO: 558262 - RNA, 19 nt, Artificial Sequence
  Description of Artificial Sequence: Synthetic oligonucleotide
  Antisense strand to SEQ ID NO: 558261
ucucagagaacaaggucua

SEQ ID NO: 558263 - RNA, 19 nt, Artificial Sequence
  Description of Artificial Sequence: Synthetic oligonucleotide
  Sense strand starting at position 3411 of SEQ ID NO: 318381
agaccuuguucucugagag

SEQ ID NO: 558264 - RNA, 19 nt, Artificial Sequence
  Description of Artificial Sequence: Synthetic oligonucleotide
  Antisense strand to SEQ ID NO: 558263
cucucagagaacaaggucu

SEQ ID NO: 558265 - RNA, 19 nt, Artificial Sequence
  Description of Artificial Sequence: Synthetic oligonucleotide
  Sense strand starting at position 3421 of SEQ ID NO: 318381
cucugagagcuguggagaa

SEQ ID NO: 558266 - RNA, 19 nt, Artificial Sequence
  Description of Artificial Sequence: Synthetic oligonucleotide
  Antisense strand to SEQ ID NO: 558265
uucuccacagcucucagag

SEQ ID NO: 558267 - RNA, 19 nt, Artificial Sequence
  Description of Artificial Sequence: Synthetic oligonucleotide
  Sense strand starting at position 3525 of SEQ ID NO: 318381
uauugaguuccugcgccau

SEQ ID NO: 558268 - RNA, 19 nt, Artificial Sequence
  Description of Artificial Sequence: Synthetic oligonucleotide
  Antisense strand to SEQ ID NO: 558267
auggcgcaggaacucaaua

SEQ ID NO: 558269 - RNA, 19 nt, Artificial Sequence
  Description of Artificial Sequence: Synthetic oligonucleotide
  Sense strand starting at position 3636 of SEQ ID NO: 318381
aaagaugagucccugagca

SEQ ID NO: 558270 - RNA, 19 nt, Artificial Sequence
  Description of Artificial Sequence: Synthetic oligonucleotide
  Antisense strand to SEQ ID NO: 558269
ugcucagggacucaucuuu

SEQ ID NO: 558271 - RNA, 19 nt, Artificial Sequence
  Description of Artificial Sequence: Synthetic oligonucleotide
  Sense strand starting at position 3638 of SEQ ID NO: 318381
agaugagucccugagcaau

SEQ ID NO: 558272 - RNA, 19 nt, Artificial Sequence
  Description of Artificial Sequence: Synthetic oligonucleotide
  Antisense strand to SEQ ID NO: 558271
auugcucagggacucaucu

SEQ ID NO: 558273 - RNA, 19 nt, Artificial Sequence
  Description of Artificial Sequence: Synthetic oligonucleotide
  Sense strand starting at position 3640 of SEQ ID NO: 318381
augagucccugagcaauca

SEQ ID NO: 558274 - RNA, 19 nt, Artificial Sequence
  Description of Artificial Sequence: Synthetic oligonucleotide
  Antisense strand to SEQ ID NO: 558273
ugauugcucagggacucau

SEQ ID NO: 558275 - RNA, 19 nt, Artificial Sequence
  Description of Artificial Sequence: Synthetic oligonucleotide
  Sense strand starting at position 3 of SEQ ID NO: 318382
ugcauuauucuauauggau

SEQ ID NO: 558276 - RNA, 19 nt, Artificial Sequence
  Description of Artificial Sequence: Synthetic oligonucleotide
  Antisense strand to SEQ ID NO: 558275
auccauauagaauaaugca

SEQ ID NO: 558277 - RNA, 19 nt, Artificial Sequence
  Description of Artificial Sequence: Synthetic oligonucleotide
  Sense strand starting at position 149 of SEQ ID NO: 318382
ggacuuauacacugcaucu

SEQ ID NO: 558278 - RNA, 19 nt, Artificial Sequence
  Description of Artificial Sequence: Synthetic oligonucleotide
  Antisense strand to SEQ ID NO: 558277
agaugcaguguauaagucc

SEQ ID NO: 558279 - RNA, 19 nt, Artificial Sequence
  Description of Artificial Sequence: Synthetic oligonucleotide
  Sense strand starting at position 176 of SEQ ID NO: 318382
aguguauguauacgauaaa

SEQ ID NO: 558280 - RNA, 19 nt, Artificial Sequence
  Description of Artificial Sequence: Synthetic oligonucleotide
  Antisense strand to SEQ ID NO: 558279
uuuaucguauacauacacu

SEQ ID NO: 558281 - RNA, 19 nt, Artificial Sequence
  Description of Artificial Sequence: Synthetic oligonucleotide
  Sense strand starting at position 333 of SEQ ID NO: 318382
aaccuuucgguuuggaaau

SEQ ID NO: 558282 - RNA, 19 nt, Artificial Sequence
  Description of Artificial Sequence: Synthetic oligonucleotide
  Antisense strand to SEQ ID NO: 558281
auuuccaaaccgaaagguu

SEQ ID NO: 558283 - RNA, 19 nt, Artificial Sequence
  Description of Artificial Sequence: Synthetic oligonucleotide
  Sense strand starting at position 531 of SEQ ID NO: 318382
uagugcaauguugaccaaa

SEQ ID NO: 558284 - RNA, 19 nt, Artificial Sequence
  Description of Artificial Sequence: Synthetic oligonucleotide
  Antisense strand to SEQ ID NO: 558283
uuuggucaacauugcacua

SEQ ID NO: 558285 - RNA, 19 nt, Artificial Sequence
  Description of Artificial Sequence: Synthetic oligonucleotide
  Sense strand starting at position 604 of SEQ ID NO: 318382
gcaacuggguacuugaaau

SEQ ID NO: 558286 - RNA, 19 nt, Artificial Sequence
  Description of Artificial Sequence: Synthetic oligonucleotide
  Antisense strand to SEQ ID NO: 558285
auuucaaguacccaguugc

SEQ ID NO: 558287 - RNA, 19 nt, Artificial Sequence
  Description of Artificial Sequence: Synthetic oligonucleotide
  Sense strand starting at position 731 of SEQ ID NO: 318382
guccuaaguauagagguaa

SEQ ID NO: 558288 - RNA, 19 nt, Artificial Sequence
  Description of Artificial Sequence: Synthetic oligonucleotide
  Antisense strand to SEQ ID NO: 558287
uuaccucuauacuuaggac

SEQ ID NO: 558289 - RNA, 19 nt, Artificial Sequence
  Description of Artificial Sequence: Synthetic oligonucleotide
  Sense strand starting at position 763 of SEQ ID NO: 318382
aaauguuaccuuugugaag

SEQ ID NO: 558290 - RNA, 19 nt, Artificial Sequence
  Description of Artificial Sequence: Synthetic oligonucleotide
  Antisense strand to SEQ ID NO: 558289
cuucacaaagguaacauuu

SEQ ID NO: 558291 - RNA, 19 nt, Artificial Sequence
  Description of Artificial Sequence: Synthetic oligonucleotide
  Sense strand starting at position 772 of SEQ ID NO: 318382
cuuugugaaguuuauaauc

SEQ ID NO: 558292 - RNA, 19 nt, Artificial Sequence
  Description of Artificial Sequence: Synthetic oligonucleotide
  Antisense strand to SEQ ID NO: 558291
gauuauaaacuucacaaag

SEQ ID NO: 558293 - RNA, 19 nt, Artificial Sequence
  Description of Artificial Sequence: Synthetic oligonucleotide
  Sense strand starting at position 839 of SEQ ID NO: 318382
ugagguggucauuggaagu

SEQ ID NO: 558294 - RNA, 19 nt, Artificial Sequence
  Description of Artificial Sequence: Synthetic oligonucleotide
  Antisense strand to SEQ ID NO: 558293
acuuccaaugaccaccuca

SEQ ID NO: 558295 - RNA, 19 nt, Artificial Sequence
  Description of Artificial Sequence: Synthetic oligonucleotide
  Sense strand starting at position 1009 of SEQ ID NO: 318382
accauaaugugguucuuga

SEQ ID NO: 558296 - RNA, 19 nt, Artificial Sequence
  Description of Artificial Sequence: Synthetic oligonucleotide
  Antisense strand to SEQ ID NO: 558295
ucaagaaccacauuauggu

SEQ ID NO: 558297 - RNA, 19 nt, Artificial Sequence
  Description of Artificial Sequence: Synthetic oligonucleotide
  Sense strand starting at position 1036 of SEQ ID NO: 318382
gcagaaguaaucugcaaag

SEQ ID NO: 558298 - RNA, 19 nt, Artificial Sequence
  Description of Artificial Sequence: Synthetic oligonucleotide
  Antisense strand to SEQ ID NO: 558297
cuuugcagauuacuucugc

SEQ ID NO: 558299 - RNA, 19 nt, Artificial Sequence
  Description of Artificial Sequence: Synthetic oligonucleotide
  Sense strand starting at position 1038 of SEQ ID NO: 318382
agaaguaaucugcaaagcu

SEQ ID NO: 558300 - RNA, 19 nt, Artificial Sequence
  Description of Artificial Sequence: Synthetic oligonucleotide
  Antisense strand to SEQ ID NO: 558299
agcuuugcagauuacuucu

SEQ ID NO: 558301 - RNA, 19 nt, Artificial Sequence
  Description of Artificial Sequence: Synthetic oligonucleotide
  Sense strand starting at position 2148 of SEQ ID NO: 318382
ccgauaucucccuagcuag

SEQ ID NO: 558302 - RNA, 19 nt, Artificial Sequence
  Description of Artificial Sequence: Synthetic oligonucleotide
  Antisense strand to SEQ ID NO: 558301
cuagcuagggagauaucgg

SEQ ID NO: 558303 - RNA, 19 nt, Artificial Sequence
  Description of Artificial Sequence: Synthetic oligonucleotide
  Sense strand starting at position 2242 of SEQ ID NO: 318382
acaaaucccuccgucagaa

SEQ ID NO: 558304 - RNA, 19 nt, Artificial Sequence
  Description of Artificial Sequence: Synthetic oligonucleotide
  Antisense strand to SEQ ID NO: 558303
uucugacggagggauuugu

SEQ ID NO: 558305 - RNA, 19 nt, Artificial Sequence
  Description of Artificial Sequence: Synthetic oligonucleotide
  Sense strand starting at position 2307 of SEQ ID NO: 318382
agacaauucuggcucugua

SEQ ID NO: 558306 - RNA, 19 nt, Artificial Sequence
  Description of Artificial Sequence: Synthetic oligonucleotide
  Antisense strand to SEQ ID NO: 558305
uacagagccagaauugucu

SEQ ID NO: 558307 - RNA, 19 nt, Artificial Sequence
  Description of Artificial Sequence: Synthetic oligonucleotide
  Sense strand starting at position 2319 of SEQ ID NO: 318382
cucuguagaaccugaggau

SEQ ID NO: 558308 - RNA, 19 nt, Artificial Sequence
  Description of Artificial Sequence: Synthetic oligonucleotide
  Antisense strand to SEQ ID NO: 558307
auccucagguucuacagag

SEQ ID NO: 558309 - RNA, 19 nt, Artificial Sequence
  Description of Artificial Sequence: Synthetic oligonucleotide
  Sense strand starting at position 2441 of SEQ ID NO: 318382
aguggagauaaauguuuau

SEQ ID NO: 558310 - RNA, 19 nt, Artificial Sequence
  Description of Artificial Sequence: Synthetic oligonucleotide
  Antisense strand to SEQ ID NO: 558309
auaaacauuuaucuccacu

SEQ ID NO: 558311 - RNA, 19 nt, Artificial Sequence
  Description of Artificial Sequence: Synthetic oligonucleotide
  Sense strand starting at position 2625 of SEQ ID NO: 318382
gcuugagucgacguguuau

SEQ ID NO: 558312 - RNA, 19 nt, Artificial Sequence
  Description of Artificial Sequence: Synthetic oligonucleotide
  Antisense strand to SEQ ID NO: 558311
auaacacgucgacucaagc

SEQ ID NO: 558313 - RNA, 19 nt, Artificial Sequence
  Description of Artificial Sequence: Synthetic oligonucleotide
  Sense strand starting at position 2635 of SEQ ID NO: 318382
acguguuaucaagaaucaa

SEQ ID NO: 558314 - RNA, 19 nt, Artificial Sequence
  Description of Artificial Sequence: Synthetic oligonucleotide
  Antisense strand to SEQ ID NO: 558313
uugauucuugauaacacgu

SEQ ID NO: 558315 - RNA, 19 nt, Artificial Sequence
  Description of Artificial Sequence: Synthetic oligonucleotide
  Sense strand starting at position 2764 of SEQ ID NO: 318382
guuguuuagccgguauacu

SEQ ID NO: 558316 - RNA, 19 nt, Artificial Sequence
  Description of Artificial Sequence: Synthetic oligonucleotide
  Antisense strand to SEQ ID NO: 558315
aguauaccggcuaaacaac

SEQ ID NO: 558317 - RNA, 19 nt, Artificial Sequence
  Description of Artificial Sequence: Synthetic oligonucleotide
  Sense strand starting at position 2850 of SEQ ID NO: 318382
aaacuagguucccugugau

SEQ ID NO: 558318 - RNA, 19 nt, Artificial Sequence
  Description of Artificial Sequence: Synthetic oligonucleotide
  Antisense strand to SEQ ID NO: 558317
aucacagggaaccuaguuu

SEQ ID NO: 558319 - RNA, 19 nt, Artificial Sequence
  Description of Artificial Sequence: Synthetic oligonucleotide
  Sense strand starting at position 2857 of SEQ ID NO: 318382
guucccugugaucaacuua

SEQ ID NO: 558320 - RNA, 19 nt, Artificial Sequence
  Description of Artificial Sequence: Synthetic oligonucleotide
  Antisense strand to SEQ ID NO: 558319
uaaguugaucacagggaac

SEQ ID NO: 558321 - RNA, 19 nt, Artificial Sequence
  Description of Artificial Sequence: Synthetic oligonucleotide
  Sense strand starting at position 2864 of SEQ ID NO: 318382
gugaucaacuuagcuaaua

SEQ ID NO: 558322 - RNA, 19 nt, Artificial Sequence
  Description of Artificial Sequence: Synthetic oligonucleotide
  Antisense strand to SEQ ID NO: 558321
uauuagcuaaguugaucac

SEQ ID NO: 558323 - RNA, 19 nt, Artificial Sequence
  Description of Artificial Sequence: Synthetic oligonucleotide
  Sense strand starting at position 2970 of SEQ ID NO: 318382
uccaaagugcucugaauaa

SEQ ID NO: 558324 - RNA, 19 nt, Artificial Sequence
  Description of Artificial Sequence: Synthetic oligonucleotide
  Antisense strand to SEQ ID NO: 558323
uuauucagagcacuuugga

SEQ ID NO: 558325 - RNA, 19 nt, Artificial Sequence
  Description of Artificial Sequence: Synthetic oligonucleotide
  Sense strand starting at position 3082 of SEQ ID NO: 318382
ucgguacuucccuacaaau

SEQ ID NO: 558326 - RNA, 19 nt, Artificial Sequence
  Description of Artificial Sequence: Synthetic oligonucleotide
  Antisense strand to SEQ ID NO: 558325
auuuguagggaaguaccga

SEQ ID NO: 558327 - RNA, 19 nt, Artificial Sequence
  Description of Artificial Sequence: Synthetic oligonucleotide
  Sense strand starting at position 3327 of SEQ ID NO: 318382
aucugauucucagcucaag

SEQ ID NO: 558328 - RNA, 19 nt, Artificial Sequence
  Description of Artificial Sequence: Synthetic oligonucleotide
  Antisense strand to SEQ ID NO: 558327
cuugagcugagaaucagau

SEQ ID NO: 558329 - RNA, 19 nt, Artificial Sequence
  Description of Artificial Sequence: Synthetic oligonucleotide
  Sense strand starting at position 3432 of SEQ ID NO: 318382
aaaggcuuuccaugaguga

SEQ ID NO: 558330 - RNA, 19 nt, Artificial Sequence
  Description of Artificial Sequence: Synthetic oligonucleotide
  Antisense strand to SEQ ID NO: 558329
ucacucauggaaagccuuu

SEQ ID NO: 558331 - RNA, 19 nt, Artificial Sequence
  Description of Artificial Sequence: Synthetic oligonucleotide
  Sense strand starting at position 3433 of SEQ ID NO: 318382
aaggcuuuccaugagugau

SEQ ID NO: 558332 - RNA, 19 nt, Artificial Sequence
  Description of Artificial Sequence: Synthetic oligonucleotide
  Antisense strand to SEQ ID NO: 558331
aucacucauggaaagccuu

SEQ ID NO: 558333 - RNA, 19 nt, Artificial Sequence
  Description of Artificial Sequence: Synthetic oligonucleotide
  Sense strand starting at position 3470 of SEQ ID NO: 318382
uuggcaugugcauaacaga

SEQ ID NO: 558334 - RNA, 19 nt, Artificial Sequence
  Description of Artificial Sequence: Synthetic oligonucleotide
  Antisense strand to SEQ ID NO: 558333
ucuguuaugcacaugccaa

SEQ ID NO: 558335 - RNA, 19 nt, Artificial Sequence
  Description of Artificial Sequence: Synthetic oligonucleotide
  Sense strand starting at position 3481 of SEQ ID NO: 318382
auaacagaaugggaaugau

SEQ ID NO: 558336 - RNA, 19 nt, Artificial Sequence
  Description of Artificial Sequence: Synthetic oligonucleotide
  Antisense strand to SEQ ID NO: 558335
aucauucccauucuguuau

SEQ ID NO: 558337 - RNA, 19 nt, Artificial Sequence
  Description of Artificial Sequence: Synthetic oligonucleotide
  Sense strand starting at position 3517 of SEQ ID NO: 318382
gaguguuauuuagccauua

SEQ ID NO: 558338 - RNA, 19 nt, Artificial Sequence
  Description of Artificial Sequence: Synthetic oligonucleotide
  Antisense strand to SEQ ID NO: 558337
uaauggcuaaauaacacuc

SEQ ID NO: 558339 - RNA, 19 nt, Artificial Sequence
  Description of Artificial Sequence: Synthetic oligonucleotide
  Sense strand starting at position 3518 of SEQ ID NO: 318382
aguguuauuuagccauuac

SEQ ID NO: 558340 - RNA, 19 nt, Artificial Sequence
  Description of Artificial Sequence: Synthetic oligonucleotide
  Antisense strand to SEQ ID NO: 558339
guaauggcuaaauaacacu

SEQ ID NO: 558341 - RNA, 19 nt, Artificial Sequence
  Description of Artificial Sequence: Synthetic oligonucleotide
  Sense strand starting at position 3581 of SEQ ID NO: 318382
gcaauuauagcauaguaau

SEQ ID NO: 558342 - RNA, 19 nt, Artificial Sequence
  Description of Artificial Sequence: Synthetic oligonucleotide
  Antisense strand to SEQ ID NO: 558341
auuacuaugcuauaauugc

SEQ ID NO: 558343 - RNA, 19 nt, Artificial Sequence
  Description of Artificial Sequence: Synthetic oligonucleotide
  Sense strand starting at position 3608 of SEQ ID NO: 318382
acuguaugacuguaacaau

SEQ ID NO: 558344 - RNA, 19 nt, Artificial Sequence
  Description of Artificial Sequence: Synthetic oligonucleotide
  Antisense strand to SEQ ID NO: 558343
auuguuacagucauacagu

SEQ ID NO: 558345 - RNA, 19 nt, Artificial Sequence
  Description of Artificial Sequence: Synthetic oligonucleotide
  Sense strand starting at position 3611 of SEQ ID NO: 318382
guaugacuguaacaauuua

SEQ ID NO: 558346 - RNA, 19 nt, Artificial Sequence
  Description of Artificial Sequence: Synthetic oligonucleotide
  Antisense strand to SEQ ID NO: 558345
uaaauuguuacagucauac

SEQ ID NO: 558347 - RNA, 19 nt, Artificial Sequence
  Description of Artificial Sequence: Synthetic oligonucleotide
  Sense strand starting at position 3663 of SEQ ID NO: 318382
ccuggaauuauggguacuu

SEQ ID NO: 558348 - RNA, 19 nt, Artificial Sequence
  Description of Artificial Sequence: Synthetic oligonucleotide
  Antisense strand to SEQ ID NO: 558347
aaguacccauaauuccagg

SEQ ID NO: 558349 - RNA, 19 nt, Artificial Sequence
  Description of Artificial Sequence: Synthetic oligonucleotide
  Sense strand starting at position 3910 of SEQ ID NO: 318382
ugcuguagaccuuagagau

SEQ ID NO: 558350 - RNA, 19 nt, Artificial Sequence
  Description of Artificial Sequence: Synthetic oligonucleotide
  Antisense strand to SEQ ID NO: 558349
aucucuaaggucuacagca

SEQ ID NO: 558351 - RNA, 19 nt, Artificial Sequence
  Description of Artificial Sequence: Synthetic oligonucleotide
  Sense strand starting at position 3916 of SEQ ID NO: 318382
agaccuuagagauggcaua

SEQ ID NO: 558352 - RNA, 19 nt, Artificial Sequence
  Description of Artificial Sequence: Synthetic oligonucleotide
  Antisense strand to SEQ ID NO: 558351
uaugccaucucuaaggucu

SEQ ID NO: 558353 - RNA, 19 nt, Artificial Sequence
  Description of Artificial Sequence: Synthetic oligonucleotide
  Sense strand starting at position 3917 of SEQ ID NO: 318382
gaccuuagagauggcauaa

SEQ ID NO: 558354 - RNA, 19 nt, Artificial Sequence
  Description of Artificial Sequence: Synthetic oligonucleotide
  Antisense strand to SEQ ID NO: 558353
uuaugccaucucuaagguc

SEQ ID NO: 558355 - RNA, 19 nt, Artificial Sequence
  Description of Artificial Sequence: Synthetic oligonucleotide
  Sense strand starting at position 215 of SEQ ID NO: 318383
cccagaguccacggcauua

SEQ ID NO: 558356 - RNA, 19 nt, Artificial Sequence
  Description of Artificial Sequence: Synthetic oligonucleotide
  Antisense strand to SEQ ID NO: 558355
uaaugccguggacucuggg

SEQ ID NO: 558357 - RNA, 19 nt, Artificial Sequence
  Description of Artificial Sequence: Synthetic oligonucleotide
  Sense strand starting at position 241 of SEQ ID NO: 318383
uuaccaagucaugggucaa

SEQ ID NO: 558358 - RNA, 19 nt, Artificial Sequence
  Description of Artificial Sequence: Synthetic oligonucleotide
  Antisense strand to SEQ ID NO: 558357
uugacccaugacuugguaa

SEQ ID NO: 558359 - RNA, 19 nt, Artificial Sequence
  Description of Artificial Sequence: Synthetic oligonucleotide
  Sense strand starting at position 333 of SEQ ID NO: 318383
gcaaguauuugucuuuguu

SEQ ID NO: 558360 - RNA, 19 nt, Artificial Sequence
  Description of Artificial Sequence: Synthetic oligonucleotide
  Antisense strand to SEQ ID NO: 558359
aacaaagacaaauacuugc

SEQ ID NO: 558361 - RNA, 19 nt, Artificial Sequence
  Description of Artificial Sequence: Synthetic oligonucleotide
  Sense strand starting at position 337 of SEQ ID NO: 318383
guauuugucuuuguuaaac

SEQ ID NO: 558362 - RNA, 19 nt, Artificial Sequence
  Description of Artificial Sequence: Synthetic oligonucleotide
  Antisense strand to SEQ ID NO: 558361
guuuaacaaagacaaauac

SEQ ID NO: 558363 - RNA, 19 nt, Artificial Sequence
  Description of Artificial Sequence: Synthetic oligonucleotide
  Sense strand starting at position 355 of SEQ ID NO: 318383
cuccuacuacgcuagaaau

SEQ ID NO: 558364 - RNA, 19 nt, Artificial Sequence
  Description of Artificial Sequence: Synthetic oligonucleotide
  Antisense strand to SEQ ID NO: 558363
auuucuagcguaguaggag

SEQ ID NO: 558365 - RNA, 19 nt, Artificial Sequence
  Description of Artificial Sequence: Synthetic oligonucleotide
  Sense strand starting at position 381 of SEQ ID NO: 318383
gggacuaucuaucuuccua

SEQ ID NO: 558366 - RNA, 19 nt, Artificial Sequence
  Description of Artificial Sequence: Synthetic oligonucleotide
  Antisense strand to SEQ ID NO: 558365
uaggaagauagauaguccc

SEQ ID NO: 558367 - RNA, 19 nt, Artificial Sequence
  Description of Artificial Sequence: Synthetic oligonucleotide
  Sense strand starting at position 433 of SEQ ID NO: 318383
ggcauuacugcacacugua

SEQ ID NO: 558368 - RNA, 19 nt, Artificial Sequence
  Description of Artificial Sequence: Synthetic oligonucleotide
  Antisense strand to SEQ ID NO: 558367
uacagugugcaguaaugcc

SEQ ID NO: 558369 - RNA, 19 nt, Artificial Sequence
  Description of Artificial Sequence: Synthetic oligonucleotide
  Sense strand starting at position 447 of SEQ ID NO: 318383
cuguaugcuccacagaauc

SEQ ID NO: 558370 - RNA, 19 nt, Artificial Sequence
  Description of Artificial Sequence: Synthetic oligonucleotide
  Antisense strand to SEQ ID NO: 558369
gauucuguggagcauacag

SEQ ID NO: 558371 - RNA, 19 nt, Artificial Sequence
  Description of Artificial Sequence: Synthetic oligonucleotide
  Sense strand starting at position 610 of SEQ ID NO: 318383
agagguugcuaccuaccaa

SEQ ID NO: 558372 - RNA, 19 nt, Artificial Sequence
  Description of Artificial Sequence: Synthetic oligonucleotide
  Antisense strand to SEQ ID NO: 558371
uugguagguagcaaccucu

SEQ ID NO: 558373 - RNA, 19 nt, Artificial Sequence
  Description of Artificial Sequence: Synthetic oligonucleotide
  Sense strand starting at position 640 of SEQ ID NO: 318383
caaauucccguuuagaaag

SEQ ID NO: 558374 - RNA, 19 nt, Artificial Sequence
  Description of Artificial Sequence: Synthetic oligonucleotide
  Antisense strand to SEQ ID NO: 558373
cuuucuaaacgggaauuug

SEQ ID NO: 558375 - RNA, 19 nt, Artificial Sequence
  Description of Artificial Sequence: Synthetic oligonucleotide
  Sense strand starting at position 906 of SEQ ID NO: 318383
ggagaaaucucgucucaac

SEQ ID NO: 558376 - RNA, 19 nt, Artificial Sequence
  Description of Artificial Sequence: Synthetic oligonucleotide
  Antisense strand to SEQ ID NO: 558375
guugagacgagauuucucc

SEQ ID NO: 558377 - RNA, 19 nt, Artificial Sequence
  Description of Artificial Sequence: Synthetic oligonucleotide
  Sense strand starting at position 1275 of SEQ ID NO: 318383
caugguaccgcaugacaaa

SEQ ID NO: 558378 - RNA, 19 nt, Artificial Sequence
  Description of Artificial Sequence: Synthetic oligonucleotide
  Antisense strand to SEQ ID NO: 558377
uuugucaugcgguaccaug

SEQ ID NO: 558379 - RNA, 19 nt, Artificial Sequence
  Description of Artificial Sequence: Synthetic oligonucleotide
  Sense strand starting at position 1292 of SEQ ID NO: 318383
aagcuagguucgguggaaa

SEQ ID NO: 558380 - RNA, 19 nt, Artificial Sequence
  Description of Artificial Sequence: Synthetic oligonucleotide
  Antisense strand to SEQ ID NO: 558379
uuuccaccgaaccuagcuu

SEQ ID NO: 558381 - RNA, 19 nt, Artificial Sequence
  Description of Artificial Sequence: Synthetic oligonucleotide
  Sense strand starting at position 1295 of SEQ ID NO: 318383
cuagguucgguggaaacau

SEQ ID NO: 558382 - RNA, 19 nt, Artificial Sequence
  Description of Artificial Sequence: Synthetic oligonucleotide
  Antisense strand to SEQ ID NO: 558381
auguuuccaccgaaccuag

SEQ ID NO: 558383 - RNA, 19 nt, Artificial Sequence
  Description of Artificial Sequence: Synthetic oligonucleotide
  Sense strand starting at position 1317 of SEQ ID NO: 318383
aaaccagaucuuugaguga

SEQ ID NO: 558384 - RNA, 19 nt, Artificial Sequence
  Description of Artificial Sequence: Synthetic oligonucleotide
  Antisense strand to SEQ ID NO: 558383
ucacucaaagaucugguuu

SEQ ID NO: 558385 - RNA, 19 nt, Artificial Sequence
  Description of Artificial Sequence: Synthetic oligonucleotide
  Sense strand starting at position 1321 of SEQ ID NO: 318383
cagaucuuugagugagcga

SEQ ID NO: 558386 - RNA, 19 nt, Artificial Sequence
  Description of Artificial Sequence: Synthetic oligonucleotide
  Antisense strand to SEQ ID NO: 558385
ucgcucacucaaagaucug

SEQ ID NO: 558387 - RNA, 19 nt, Artificial Sequence
  Description of Artificial Sequence: Synthetic oligonucleotide
  Sense strand starting at position 1322 of SEQ ID NO: 318383
agaucuuugagugagcgau

SEQ ID NO: 558388 - RNA, 19 nt, Artificial Sequence
  Description of Artificial Sequence: Synthetic oligonucleotide
  Antisense strand to SEQ ID NO: 558387
aucgcucacucaaagaucu

SEQ ID NO: 558389 - RNA, 19 nt, Artificial Sequence
  Description of Artificial Sequence: Synthetic oligonucleotide
  Sense strand starting at position 1324 of SEQ ID NO: 318383
aucuuugagugagcgauaa

SEQ ID NO: 558390 - RNA, 19 nt, Artificial Sequence
  Description of Artificial Sequence: Synthetic oligonucleotide
  Antisense strand to SEQ ID NO: 558389
uuaucgcucacucaaagau

SEQ ID NO: 558391 - RNA, 19 nt, Artificial Sequence
  Description of Artificial Sequence: Synthetic oligonucleotide
  Sense strand starting at position 1326 of SEQ ID NO: 318383
cuuugagugagcgauaaac

SEQ ID NO: 558392 - RNA, 19 nt, Artificial Sequence
  Description of Artificial Sequence: Synthetic oligonucleotide
  Antisense strand to SEQ ID NO: 558391
guuuaucgcucacucaaag

SEQ ID NO: 558393 - RNA, 19 nt, Artificial Sequence
  Description of Artificial Sequence: Synthetic oligonucleotide
  Sense strand starting at position 1328 of SEQ ID NO: 318383
uugagugagcgauaaacuu

SEQ ID NO: 558394 - RNA, 19 nt, Artificial Sequence
  Description of Artificial Sequence: Synthetic oligonucleotide
  Antisense strand to SEQ ID NO: 558393
aaguuuaucgcucacucaa

SEQ ID NO: 558395 - RNA, 19 nt, Artificial Sequence
  Description of Artificial Sequence: Synthetic oligonucleotide
  Sense strand starting at position 2226 of SEQ ID NO: 318383
cccuguaugcucuggacaa

SEQ ID NO: 558396 - RNA, 19 nt, Artificial Sequence
  Description of Artificial Sequence: Synthetic oligonucleotide
  Antisense strand to SEQ ID NO: 558395
uuguccagagcauacaggg

SEQ ID NO: 558397 - RNA, 19 nt, Artificial Sequence
  Description of Artificial Sequence: Synthetic oligonucleotide
  Sense strand starting at position 2472 of SEQ ID NO: 318383
ggaggauuguaccuuagcu

SEQ ID NO: 558398 - RNA, 19 nt, Artificial Sequence
  Description of Artificial Sequence: Synthetic oligonucleotide
  Antisense strand to SEQ ID NO: 558397
agcuaagguacaauccucc

SEQ ID NO: 558399 - RNA, 19 nt, Artificial Sequence
  Description of Artificial Sequence: Synthetic oligonucleotide
  Sense strand starting at position 2476 of SEQ ID NO: 318383
gauuguaccuuagcucgaa

SEQ ID NO: 558400 - RNA, 19 nt, Artificial Sequence
  Description of Artificial Sequence: Synthetic oligonucleotide
  Antisense strand to SEQ ID NO: 558399
uucgagcuaagguacaauc

SEQ ID NO: 558401 - RNA, 19 nt, Artificial Sequence
  Description of Artificial Sequence: Synthetic oligonucleotide
  Sense strand starting at position 2480 of SEQ ID NO: 318383
guaccuuagcucgaaucuu

SEQ ID NO: 558402 - RNA, 19 nt, Artificial Sequence
  Description of Artificial Sequence: Synthetic oligonucleotide
  Antisense strand to SEQ ID NO: 558401
aagauucgagcuaagguac

SEQ ID NO: 558403 - RNA, 19 nt, Artificial Sequence
  Description of Artificial Sequence: Synthetic oligonucleotide
  Sense strand starting at position 2523 of SEQ ID NO: 318383
aggacugaguucucagcau

SEQ ID NO: 558404 - RNA, 19 nt, Artificial Sequence
  Description of Artificial Sequence: Synthetic oligonucleotide
  Antisense strand to SEQ ID NO: 558403
augcugagaacucaguccu

SEQ ID NO: 558405 - RNA, 19 nt, Artificial Sequence
  Description of Artificial Sequence: Synthetic oligonucleotide
  Sense strand starting at position 2535 of SEQ ID NO: 318383
ucagcaugguguuugaaau

SEQ ID NO: 558406 - RNA, 19 nt, Artificial Sequence
  Description of Artificial Sequence: Synthetic oligonucleotide
  Antisense strand to SEQ ID NO: 558405
auuucaaacaccaugcuga

SEQ ID NO: 558407 - RNA, 19 nt, Artificial Sequence
  Description of Artificial Sequence: Synthetic oligonucleotide
  Sense strand starting at position 2536 of SEQ ID NO: 318383
cagcaugguguuugaaaug

SEQ ID NO: 558408 - RNA, 19 nt, Artificial Sequence
  Description of Artificial Sequence: Synthetic oligonucleotide
  Antisense strand to SEQ ID NO: 558407
cauuucaaacaccaugcug

SEQ ID NO: 558409 - RNA, 19 nt, Artificial Sequence
  Description of Artificial Sequence: Synthetic oligonucleotide
  Sense strand starting at position 2698 of SEQ ID NO: 318383
accugacguguuuaccuua

SEQ ID NO: 558410 - RNA, 19 nt, Artificial Sequence
  Description of Artificial Sequence: Synthetic oligonucleotide
  Antisense strand to SEQ ID NO: 558409
uaagguaaacacgucaggu

SEQ ID NO: 558411 - RNA, 19 nt, Artificial Sequence
  Description of Artificial Sequence: Synthetic oligonucleotide
  Sense strand starting at position 2907 of SEQ ID NO: 318383
gcuugcuuggacuaguaaa

SEQ ID NO: 558412 - RNA, 19 nt, Artificial Sequence
  Description of Artificial Sequence: Synthetic oligonucleotide
  Antisense strand to SEQ ID NO: 558411
uuuacuaguccaagcaagc

SEQ ID NO: 558413 - RNA, 19 nt, Artificial Sequence
  Description of Artificial Sequence: Synthetic oligonucleotide
  Sense strand starting at position 3283 of SEQ ID NO: 318383
cuuuaaggguuaucuugga

SEQ ID NO: 558414 - RNA, 19 nt, Artificial Sequence
  Description of Artificial Sequence: Synthetic oligonucleotide
  Antisense strand to SEQ ID NO: 558413
uccaagauaacccuuaaag

SEQ ID NO: 558415 - RNA, 19 nt, Artificial Sequence
  Description of Artificial Sequence: Synthetic oligonucleotide
  Sense strand starting at position 3417 of SEQ ID NO: 318383
ugggccugucaauguaacu

SEQ ID NO: 558416 - RNA, 19 nt, Artificial Sequence
  Description of Artificial Sequence: Synthetic oligonucleotide
  Antisense strand to SEQ ID NO: 558415
aguuacauugacaggccca

SEQ ID NO: 558417 - RNA, 19 nt, Artificial Sequence
  Description of Artificial Sequence: Synthetic oligonucleotide
  Sense strand starting at position 3428 of SEQ ID NO: 318383
auguaacuuugggagacau

SEQ ID NO: 558418 - RNA, 19 nt, Artificial Sequence
  Description of Artificial Sequence: Synthetic oligonucleotide
  Antisense strand to SEQ ID NO: 558417
augucucccaaaguuacau

SEQ ID NO: 558419 - RNA, 19 nt, Artificial Sequence
  Description of Artificial Sequence: Synthetic oligonucleotide
  Sense strand starting at position 3492 of SEQ ID NO: 318383
cgccuuuguaaagcuagua

SEQ ID NO: 558420 - RNA, 19 nt, Artificial Sequence
  Description of Artificial Sequence: Synthetic oligonucleotide
  Antisense strand to SEQ ID NO: 558419
uacuagcuuuacaaaggcg

SEQ ID NO: 558421 - RNA, 19 nt, Artificial Sequence
  Description of Artificial Sequence: Synthetic oligonucleotide
  Sense strand starting at position 3562 of SEQ ID NO: 318383
gacauaaaccguugccagu

SEQ ID NO: 558422 - RNA, 19 nt, Artificial Sequence
  Description of Artificial Sequence: Synthetic oligonucleotide
  Antisense strand to SEQ ID NO: 558421
acuggcaacgguuuauguc

SEQ ID NO: 558423 - RNA, 19 nt, Artificial Sequence
  Description of Artificial Sequence: Synthetic oligonucleotide
  Sense strand starting at position 3579 of SEQ ID NO: 318383
gucauuaucccagagguca

SEQ ID NO: 558424 - RNA, 19 nt, Artificial Sequence
  Description of Artificial Sequence: Synthetic oligonucleotide
  Antisense strand to SEQ ID NO: 558423
ugaccucugggauaaugac

SEQ ID NO: 558425 - RNA, 19 nt, Artificial Sequence
  Description of Artificial Sequence: Synthetic oligonucleotide
  Sense strand starting at position 3687 of SEQ ID NO: 318383
uugcaugucugacuaccaa

SEQ ID NO: 558426 - RNA, 19 nt, Artificial Sequence
  Description of Artificial Sequence: Synthetic oligonucleotide
  Antisense strand to SEQ ID NO: 558425
uugguagucagacaugcaa

SEQ ID NO: 558427 - RNA, 19 nt, Artificial Sequence
  Description of Artificial Sequence: Synthetic oligonucleotide
  Sense strand starting at position 3814 of SEQ ID NO: 318383
gcaagaacccauugcuuag

SEQ ID NO: 558428 - RNA, 19 nt, Artificial Sequence
  Description of Artificial Sequence: Synthetic oligonucleotide
  Antisense strand to SEQ ID NO: 558427
cuaagcaauggguucuugc

SEQ ID NO: 558429 - RNA, 19 nt, Artificial Sequence
  Description of Artificial Sequence: Synthetic oligonucleotide
  Sense strand starting at position 3873 of SEQ ID NO: 318383
gucccugaauucuccaaga

SEQ ID NO: 558430 - RNA, 19 nt, Artificial Sequence
  Description of Artificial Sequence: Synthetic oligonucleotide
  Antisense strand to SEQ ID NO: 558429
ucuuggagaauucagggac

SEQ ID NO: 558431 - RNA, 19 nt, Artificial Sequence
  Description of Artificial Sequence: Synthetic oligonucleotide
  Sense strand starting at position 3932 of SEQ ID NO: 318383
guggccuccugucuauuaa

SEQ ID NO: 558432 - RNA, 19 nt, Artificial Sequence
  Description of Artificial Sequence: Synthetic oligonucleotide
  Antisense strand to SEQ ID NO: 558431
uuaauagacaggaggccac

SEQ ID NO: 558433 - RNA, 19 nt, Artificial Sequence
  Description of Artificial Sequence: Synthetic oligonucleotide
  Sense strand starting at position 3933 of SEQ ID NO: 318383
uggccuccugucuauuaaa

SEQ ID NO: 558434 - RNA, 19 nt, Artificial Sequence
  Description of Artificial Sequence: Synthetic oligonucleotide
  Antisense strand to SEQ ID NO: 558433
uuuaauagacaggaggcca

SEQ ID NO: 558435 - RNA, 19 nt, Artificial Sequence
  Description of Artificial Sequence: Synthetic oligonucleotide
  Sense strand starting at position 36 of SEQ ID NO: 318384
gaucacaaguuaguaagua

SEQ ID NO: 558436 - RNA, 19 nt, Artificial Sequence
  Description of Artificial Sequence: Synthetic oligonucleotide
  Antisense strand to SEQ ID NO: 558435
uacuuacuaacuugugauc

SEQ ID NO: 558437 - RNA, 19 nt, Artificial Sequence
  Description of Artificial Sequence: Synthetic oligonucleotide
  Sense strand starting at position 71 of SEQ ID NO: 318384
gcccaagcagucuaagacu

SEQ ID NO: 558438 - RNA, 19 nt, Artificial Sequence
  Description of Artificial Sequence: Synthetic oligonucleotide
  Antisense strand to SEQ ID NO: 558437
agucuuagacugcuugggc

SEQ ID NO: 558439 - RNA, 19 nt, Artificial Sequence
  Description of Artificial Sequence: Synthetic oligonucleotide
  Sense strand starting at position 85 of SEQ ID NO: 318384
agacuagagucucugcuuu

SEQ ID NO: 558440 - RNA, 19 nt, Artificial Sequence
  Description of Artificial Sequence: Synthetic oligonucleotide
  Antisense strand to SEQ ID NO: 558439
aaagcagagacucuagucu

SEQ ID NO: 558441 - RNA, 19 nt, Artificial Sequence
  Description of Artificial Sequence: Synthetic oligonucleotide
  Sense strand starting at position 181 of SEQ ID NO: 318384
cuggcagccucaucaagau

SEQ ID NO: 558442 - RNA, 19 nt, Artificial Sequence
  Description of Artificial Sequence: Synthetic oligonucleotide
  Antisense strand to SEQ ID NO: 558441
aucuugaugaggcugccag

SEQ ID NO: 558443 - RNA, 19 nt, Artificial Sequence
  Description of Artificial Sequence: Synthetic oligonucleotide
  Sense strand starting at position 329 of SEQ ID NO: 318384
uugugagcucaucaucagu

SEQ ID NO: 558444 - RNA, 19 nt, Artificial Sequence
  Description of Artificial Sequence: Synthetic oligonucleotide
  Antisense strand to SEQ ID NO: 558443
acugaugaugagcucacaa

SEQ ID NO: 558445 - RNA, 19 nt, Artificial Sequence
  Description of Artificial Sequence: Synthetic oligonucleotide
  Sense strand starting at position 414 of SEQ ID NO: 318384
ugcagaauuccacagcuau

SEQ ID NO: 558446 - RNA, 19 nt, Artificial Sequence
  Description of Artificial Sequence: Synthetic oligonucleotide
  Antisense strand to SEQ ID NO: 558445
auagcuguggaauucugca

SEQ ID NO: 558447 - RNA, 19 nt, Artificial Sequence
  Description of Artificial Sequence: Synthetic oligonucleotide
  Sense strand starting at position 596 of SEQ ID NO: 318384
gcugaugcaaucgauguau

SEQ ID NO: 558448 - RNA, 19 nt, Artificial Sequence
  Description of Artificial Sequence: Synthetic oligonucleotide
  Antisense strand to SEQ ID NO: 558447
auacaucgauugcaucagc

SEQ ID NO: 558449 - RNA, 19 nt, Artificial Sequence
  Description of Artificial Sequence: Synthetic oligonucleotide
  Sense strand starting at position 752 of SEQ ID NO: 318384
gaagucuacucaucgcaga

SEQ ID NO: 558450 - RNA, 19 nt, Artificial Sequence
  Description of Artificial Sequence: Synthetic oligonucleotide
  Antisense strand to SEQ ID NO: 558449
ucugcgaugaguagacuuc

SEQ ID NO: 558451 - RNA, 19 nt, Artificial Sequence
  Description of Artificial Sequence: Synthetic oligonucleotide
  Sense strand starting at position 907 of SEQ ID NO: 318384
gaaacuucggauuguuucu

SEQ ID NO: 558452 - RNA, 19 nt, Artificial Sequence
  Description of Artificial Sequence: Synthetic oligonucleotide
  Antisense strand to SEQ ID NO: 558451
agaaacaauccgaaguuuc

SEQ ID NO: 558453 - RNA, 19 nt, Artificial Sequence
  Description of Artificial Sequence: Synthetic oligonucleotide
  Sense strand starting at position 912 of SEQ ID NO: 318384
uucggauuguuucugaaag

SEQ ID NO: 558454 - RNA, 19 nt, Artificial Sequence
  Description of Artificial Sequence: Synthetic oligonucleotide
  Antisense strand to SEQ ID NO: 558453
cuuucagaaacaauccgaa

SEQ ID NO: 558455 - RNA, 19 nt, Artificial Sequence
  Description of Artificial Sequence: Synthetic oligonucleotide
  Sense strand starting at position 955 of SEQ ID NO: 318384
ugcucauuucugcaugugu

SEQ ID NO: 558456 - RNA, 19 nt, Artificial Sequence
  Description of Artificial Sequence: Synthetic oligonucleotide
  Antisense strand to SEQ ID NO: 558455
acacaugcagaaaugagca

SEQ ID NO: 558457 - RNA, 19 nt, Artificial Sequence
  Description of Artificial Sequence: Synthetic oligonucleotide
  Sense strand starting at position 1207 of SEQ ID NO: 318384
ucaagugugcugccuguga

SEQ ID NO: 558458 - RNA, 19 nt, Artificial Sequence
  Description of Artificial Sequence: Synthetic oligonucleotide
  Antisense strand to SEQ ID NO: 558457
ucacaggcagcacacuuga

SEQ ID NO: 558459 - RNA, 19 nt, Artificial Sequence
  Description of Artificial Sequence: Synthetic oligonucleotide
  Sense strand starting at position 1344 of SEQ ID NO: 318384
gaaggucuucuccggagua

SEQ ID NO: 558460 - RNA, 19 nt, Artificial Sequence
  Description of Artificial Sequence: Synthetic oligonucleotide
  Antisense strand to SEQ ID NO: 558459
uacuccggagaagaccuuc

SEQ ID NO: 558461 - RNA, 19 nt, Artificial Sequence
  Description of Artificial Sequence: Synthetic oligonucleotide
  Sense strand starting at position 1346 of SEQ ID NO: 318384
aggucuucuccggaguaaa

SEQ ID NO: 558462 - RNA, 19 nt, Artificial Sequence
  Description of Artificial Sequence: Synthetic oligonucleotide
  Antisense strand to SEQ ID NO: 558461
uuuacuccggagaagaccu

SEQ ID NO: 558463 - RNA, 19 nt, Artificial Sequence
  Description of Artificial Sequence: Synthetic oligonucleotide
  Sense strand starting at position 2140 of SEQ ID NO: 318384
cuuugagucgccuugugca

SEQ ID NO: 558464 - RNA, 19 nt, Artificial Sequence
  Description of Artificial Sequence: Synthetic oligonucleotide
  Antisense strand to SEQ ID NO: 558463
ugcacaaggcgacucaaag

SEQ ID NO: 558465 - RNA, 19 nt, Artificial Sequence
  Description of Artificial Sequence: Synthetic oligonucleotide
  Sense strand starting at position 2142 of SEQ ID NO: 318384
uugagucgccuugugcaua

SEQ ID NO: 558466 - RNA, 19 nt, Artificial Sequence
  Description of Artificial Sequence: Synthetic oligonucleotide
  Antisense strand to SEQ ID NO: 558465
uaugcacaaggcgacucaa

SEQ ID NO: 558467 - RNA, 19 nt, Artificial Sequence
  Description of Artificial Sequence: Synthetic oligonucleotide
  Sense strand starting at position 2179 of SEQ ID NO: 318384
ggccuaagugcgaguaugu

SEQ ID NO: 558468 - RNA, 19 nt, Artificial Sequence
  Description of Artificial Sequence: Synthetic oligonucleotide
  Antisense strand to SEQ ID NO: 558467
acauacucgcacuuaggcc

SEQ ID NO: 558469 - RNA, 19 nt, Artificial Sequence
  Description of Artificial Sequence: Synthetic oligonucleotide
  Sense strand starting at position 2334 of SEQ ID NO: 318384
aggagaucaccaugggcuu

SEQ ID NO: 558470 - RNA, 19 nt, Artificial Sequence
  Description of Artificial Sequence: Synthetic oligonucleotide
  Antisense strand to SEQ ID NO: 558469
aagcccauggugaucuccu

SEQ ID NO: 558471 - RNA, 19 nt, Artificial Sequence
  Description of Artificial Sequence: Synthetic oligonucleotide
  Sense strand starting at position 2406 of SEQ ID NO: 318384
agcuguaucgucgcugaga

SEQ ID NO: 558472 - RNA, 19 nt, Artificial Sequence
  Description of Artificial Sequence: Synthetic oligonucleotide
  Antisense strand to SEQ ID NO: 558471
ucucagcgacgauacagcu

SEQ ID NO: 558473 - RNA, 19 nt, Artificial Sequence
  Description of Artificial Sequence: Synthetic oligonucleotide
  Sense strand starting at position 2421 of SEQ ID NO: 318384
gagagaaucaugcagcguu

SEQ ID NO: 558474 - RNA, 19 nt, Artificial Sequence
  Description of Artificial Sequence: Synthetic oligonucleotide
  Antisense strand to SEQ ID NO: 558473
aacgcugcaugauucucuc

SEQ ID NO: 558475 - RNA, 19 nt, Artificial Sequence
  Description of Artificial Sequence: Synthetic oligonucleotide
  Sense strand starting at position 2435 of SEQ ID NO: 318384
gcguuugggcaagaagaga

SEQ ID NO: 558476 - RNA, 19 nt, Artificial Sequence
  Description of Artificial Sequence: Synthetic oligonucleotide
  Antisense strand to SEQ ID NO: 558475
ucucuucuugcccaaacgc

SEQ ID NO: 558477 - RNA, 19 nt, Artificial Sequence
  Description of Artificial Sequence: Synthetic oligonucleotide
  Sense strand starting at position 2457 of SEQ ID NO: 318384
ugggaauccuccuuguggu

SEQ ID NO: 558478 - RNA, 19 nt, Artificial Sequence
  Description of Artificial Sequence: Synthetic oligonucleotide
  Antisense strand to SEQ ID NO: 558477
accacaaggaggauuccca

SEQ ID NO: 558479 - RNA, 19 nt, Artificial Sequence
  Description of Artificial Sequence: Synthetic oligonucleotide
  Sense strand starting at position 2458 of SEQ ID NO: 318384
gggaauccuccuuguggua

SEQ ID NO: 558480 - RNA, 19 nt, Artificial Sequence
  Description of Artificial Sequence: Synthetic oligonucleotide
  Antisense strand to SEQ ID NO: 558479
uaccacaaggaggauuccc

SEQ ID NO: 558481 - RNA, 19 nt, Artificial Sequence
  Description of Artificial Sequence: Synthetic oligonucleotide
  Sense strand starting at position 2657 of SEQ ID NO: 318384
ggcuuucugccuugaagaa

SEQ ID NO: 558482 - RNA, 19 nt, Artificial Sequence
  Description of Artificial Sequence: Synthetic oligonucleotide
  Antisense strand to SEQ ID NO: 558481
uucuucaaggcagaaagcc

SEQ ID NO: 558483 - RNA, 19 nt, Artificial Sequence
  Description of Artificial Sequence: Synthetic oligonucleotide
  Sense strand starting at position 2658 of SEQ ID NO: 318384
gcuuucugccuugaagaac

SEQ ID NO: 558484 - RNA, 19 nt, Artificial Sequence
  Description of Artificial Sequence: Synthetic oligonucleotide
  Antisense strand to SEQ ID NO: 558483
guucuucaaggcagaaagc

SEQ ID NO: 558485 - RNA, 19 nt, Artificial Sequence
  Description of Artificial Sequence: Synthetic oligonucleotide
  Sense strand starting at position 2736 of SEQ ID NO: 318384
uucuguccacaucaugauu

SEQ ID NO: 558486 - RNA, 19 nt, Artificial Sequence
  Description of Artificial Sequence: Synthetic oligonucleotide
  Antisense strand to SEQ ID NO: 558485
aaucaugauguggacagaa

SEQ ID NO: 558487 - RNA, 19 nt, Artificial Sequence
  Description of Artificial Sequence: Synthetic oligonucleotide
  Sense strand starting at position 2747 of SEQ ID NO: 318384
ucaugauucccaggccucu

SEQ ID NO: 558488 - RNA, 19 nt, Artificial Sequence
  Description of Artificial Sequence: Synthetic oligonucleotide
  Antisense strand to SEQ ID NO: 558487
agaggccugggaaucauga

SEQ ID NO: 558489 - RNA, 19 nt, Artificial Sequence
  Description of Artificial Sequence: Synthetic oligonucleotide
  Sense strand starting at position 2811 of SEQ ID NO: 318384
uuguaagaugcauaaggca

SEQ ID NO: 558490 - RNA, 19 nt, Artificial Sequence
  Description of Artificial Sequence: Synthetic oligonucleotide
  Antisense strand to SEQ ID NO: 558489
ugccuuaugcaucuuacaa

SEQ ID NO: 558491 - RNA, 19 nt, Artificial Sequence
  Description of Artificial Sequence: Synthetic oligonucleotide
  Sense strand starting at position 2934 of SEQ ID NO: 318384
uaaagaacauuuggaguuu

SEQ ID NO: 558492 - RNA, 19 nt, Artificial Sequence
  Description of Artificial Sequence: Synthetic oligonucleotide
  Antisense strand to SEQ ID NO: 558491
aaacuccaaauguucuuua

SEQ ID NO: 558493 - RNA, 19 nt, Artificial Sequence
  Description of Artificial Sequence: Synthetic oligonucleotide
  Sense strand starting at position 3173 of SEQ ID NO: 318384
ccaaauuaacugcgagguu

SEQ ID NO: 558494 - RNA, 19 nt, Artificial Sequence
  Description of Artificial Sequence: Synthetic oligonucleotide
  Antisense strand to SEQ ID NO: 558493
aaccucgcaguuaauuugg

SEQ ID NO: 558495 - RNA, 19 nt, Artificial Sequence
  Description of Artificial Sequence: Synthetic oligonucleotide
  Sense strand starting at position 3176 of SEQ ID NO: 318384
aauuaacugcgagguuaac

SEQ ID NO: 558496 - RNA, 19 nt, Artificial Sequence
  Description of Artificial Sequence: Synthetic oligonucleotide
  Antisense strand to SEQ ID NO: 558495
guuaaccucgcaguuaauu

SEQ ID NO: 558497 - RNA, 19 nt, Artificial Sequence
  Description of Artificial Sequence: Synthetic oligonucleotide
  Sense strand starting at position 3502 of SEQ ID NO: 318384
gaggaaucagguuggcuca

SEQ ID NO: 558498 - RNA, 19 nt, Artificial Sequence
  Description of Artificial Sequence: Synthetic oligonucleotide
  Antisense strand to SEQ ID NO: 558497
ugagccaaccugauuccuc

SEQ ID NO: 558499 - RNA, 19 nt, Artificial Sequence
  Description of Artificial Sequence: Synthetic oligonucleotide
  Sense strand starting at position 3592 of SEQ ID NO: 318384
ugggucaagaggugauaua

SEQ ID NO: 558500 - RNA, 19 nt, Artificial Sequence
  Description of Artificial Sequence: Synthetic oligonucleotide
  Antisense strand to SEQ ID NO: 558499
uauaucaccucuugaccca

SEQ ID NO: 558501 - RNA, 19 nt, Artificial Sequence
  Description of Artificial Sequence: Synthetic oligonucleotide
  Sense strand starting at position 3601 of SEQ ID NO: 318384
aggugauauaguuggaggu

SEQ ID NO: 558502 - RNA, 19 nt, Artificial Sequence
  Description of Artificial Sequence: Synthetic oligonucleotide
  Antisense strand to SEQ ID NO: 558501
accuccaacuauaucaccu

SEQ ID NO: 558503 - RNA, 19 nt, Artificial Sequence
  Description of Artificial Sequence: Synthetic oligonucleotide
  Sense strand starting at position 3605 of SEQ ID NO: 318384
gauauaguuggaggucaga

SEQ ID NO: 558504 - RNA, 19 nt, Artificial Sequence
  Description of Artificial Sequence: Synthetic oligonucleotide
  Antisense strand to SEQ ID NO: 558503
ucugaccuccaacuauauc

SEQ ID NO: 558505 - RNA, 19 nt, Artificial Sequence
  Description of Artificial Sequence: Synthetic oligonucleotide
  Sense strand starting at position 3783 of SEQ ID NO: 318384
guuggaguccaagagggua

SEQ ID NO: 558506 - RNA, 19 nt, Artificial Sequence
  Description of Artificial Sequence: Synthetic oligonucleotide
  Antisense strand to SEQ ID NO: 558505
uacccucuuggacuccaac

SEQ ID NO: 558507 - RNA, 19 nt, Artificial Sequence
  Description of Artificial Sequence: Synthetic oligonucleotide
  Sense strand starting at position 3843 of SEQ ID NO: 318384
gguguuucucaacaggguu

SEQ ID NO: 558508 - RNA, 19 nt, Artificial Sequence
  Description of Artificial Sequence: Synthetic oligonucleotide
  Antisense strand to SEQ ID NO: 558507
aacccuguugagaaacacc

SEQ ID NO: 558509 - RNA, 19 nt, Artificial Sequence
  Description of Artificial Sequence: Synthetic oligonucleotide
  Sense strand starting at position 3866 of SEQ ID NO: 318384
ccgggauucuuguugagau

SEQ ID NO: 558510 - RNA, 19 nt, Artificial Sequence
  Description of Artificial Sequence: Synthetic oligonucleotide
  Antisense strand to SEQ ID NO: 558509
aucucaacaagaaucccgg

SEQ ID NO: 558511 - RNA, 19 nt, Artificial Sequence
  Description of Artificial Sequence: Synthetic oligonucleotide
  Sense strand starting at position 3956 of SEQ ID NO: 318384
ccagguguccugcaaucau

SEQ ID NO: 558512 - RNA, 19 nt, Artificial Sequence
  Description of Artificial Sequence: Synthetic oligonucleotide
  Antisense strand to SEQ ID NO: 558511
augauugcaggacaccugg

SEQ ID NO: 558513 - RNA, 19 nt, Artificial Sequence
  Description of Artificial Sequence: Synthetic oligonucleotide
  Sense strand starting at position 3974 of SEQ ID NO: 318384
uugugcuaaccagaagcau

SEQ ID NO: 558514 - RNA, 19 nt, Artificial Sequence
  Description of Artificial Sequence: Synthetic oligonucleotide
  Antisense strand to SEQ ID NO: 558513
augcuucugguuagcacaa

SEQ ID NO: 558515 - RNA, 19 nt, Artificial Sequence
  Description of Artificial Sequence: Synthetic oligonucleotide
  Sense strand starting at position 222 of SEQ ID NO: 318385
cguagcaauuuccuauagu

SEQ ID NO: 558516 - RNA, 19 nt, Artificial Sequence
  Description of Artificial Sequence: Synthetic oligonucleotide
  Antisense strand to SEQ ID NO: 558515
acuauaggaaauugcuacg

SEQ ID NO: 558517 - RNA, 19 nt, Artificial Sequence
  Description of Artificial Sequence: Synthetic oligonucleotide
  Sense strand starting at position 255 of SEQ ID NO: 318385
aagcuauuguaguuuauag

SEQ ID NO: 558518 - RNA, 19 nt, Artificial Sequence
  Description of Artificial Sequence: Synthetic oligonucleotide
  Antisense strand to SEQ ID NO: 558517
cuauaaacuacaauagcuu

SEQ ID NO: 558519 - RNA, 19 nt, Artificial Sequence
  Description of Artificial Sequence: Synthetic oligonucleotide
  Sense strand starting at position 298 of SEQ ID NO: 318385
cuggcauucccagauacau

SEQ ID NO: 558520 - RNA, 19 nt, Artificial Sequence
  Description of Artificial Sequence: Synthetic oligonucleotide
  Antisense strand to SEQ ID NO: 558519
auguaucugggaaugccag

SEQ ID NO: 558521 - RNA, 19 nt, Artificial Sequence
  Description of Artificial Sequence: Synthetic oligonucleotide
  Sense strand starting at position 418 of SEQ ID NO: 318385
auuagacaagucugugaaa

SEQ ID NO: 558522 - RNA, 19 nt, Artificial Sequence
  Description of Artificial Sequence: Synthetic oligonucleotide
  Antisense strand to SEQ ID NO: 558521
uuucacagacuugucuaau

SEQ ID NO: 558523 - RNA, 19 nt, Artificial Sequence
  Description of Artificial Sequence: Synthetic oligonucleotide
  Sense strand starting at position 419 of SEQ ID NO: 318385
uuagacaagucugugaaac

SEQ ID NO: 558524 - RNA, 19 nt, Artificial Sequence
  Description of Artificial Sequence: Synthetic oligonucleotide
  Antisense strand to SEQ ID NO: 558523
guuucacagacuugucuaa

SEQ ID NO: 558525 - RNA, 19 nt, Artificial Sequence
  Description of Artificial Sequence: Synthetic oligonucleotide
  Sense strand starting at position 420 of SEQ ID NO: 318385
uagacaagucugugaaacu

SEQ ID NO: 558526 - RNA, 19 nt, Artificial Sequence
  Description of Artificial Sequence: Synthetic oligonucleotide
  Antisense strand to SEQ ID NO: 558525
aguuucacagacuugucua

SEQ ID NO: 558527 - RNA, 19 nt, Artificial Sequence
  Description of Artificial Sequence: Synthetic oligonucleotide
  Sense strand starting at position 517 of SEQ ID NO: 318385
caguuaucacgugaacuua

SEQ ID NO: 558528 - RNA, 19 nt, Artificial Sequence
  Description of Artificial Sequence: Synthetic oligonucleotide
  Antisense strand to SEQ ID NO: 558527
uaaguucacgugauaacug

SEQ ID NO: 558529 - RNA, 19 nt, Artificial Sequence
  Description of Artificial Sequence: Synthetic oligonucleotide
  Sense strand starting at position 564 of SEQ ID NO: 318385
gguuuaaagcuuuagagau

SEQ ID NO: 558530 - RNA, 19 nt, Artificial Sequence
  Description of Artificial Sequence: Synthetic oligonucleotide
  Antisense strand to SEQ ID NO: 558529
aucucuaaagcuuuaaacc

SEQ ID NO: 558531 - RNA, 19 nt, Artificial Sequence
  Description of Artificial Sequence: Synthetic oligonucleotide
  Sense strand starting at position 953 of SEQ ID NO: 318385
gcaauuauguaauuacgag

SEQ ID NO: 558532 - RNA, 19 nt, Artificial Sequence
  Description of Artificial Sequence: Synthetic oligonucleotide
  Antisense strand to SEQ ID NO: 558531
cucguaauuacauaauugc

SEQ ID NO: 558533 - RNA, 19 nt, Artificial Sequence
  Description of Artificial Sequence: Synthetic oligonucleotide
  Sense strand starting at position 982 of SEQ ID NO: 318385
uuuagacuugauuacaugu

SEQ ID NO: 558534 - RNA, 19 nt, Artificial Sequence
  Description of Artificial Sequence: Synthetic oligonucleotide
  Antisense strand to SEQ ID NO: 558533
acauguaaucaagucuaaa

SEQ ID NO: 558535 - RNA, 19 nt, Artificial Sequence
  Description of Artificial Sequence: Synthetic oligonucleotide
  Sense strand starting at position 1047 of SEQ ID NO: 318385
uaaacaucguaacuggaua

SEQ ID NO: 558536 - RNA, 19 nt, Artificial Sequence
  Description of Artificial Sequence: Synthetic oligonucleotide
  Antisense strand to SEQ ID NO: 558535
uauccaguuacgauguuua

SEQ ID NO: 558537 - RNA, 19 nt, Artificial Sequence
  Description of Artificial Sequence: Synthetic oligonucleotide
  Sense strand starting at position 1501 of SEQ ID NO: 318385
aagguuuagugaccacaga

SEQ ID NO: 558538 - RNA, 19 nt, Artificial Sequence
  Description of Artificial Sequence: Synthetic oligonucleotide
  Antisense strand to SEQ ID NO: 558537
ucuguggucacuaaaccuu

SEQ ID NO: 558539 - RNA, 19 nt, Artificial Sequence
  Description of Artificial Sequence: Synthetic oligonucleotide
  Sense strand starting at position 1681 of SEQ ID NO: 318385
auagaaauguuagcaauug

SEQ ID NO: 558540 - RNA, 19 nt, Artificial Sequence
  Description of Artificial Sequence: Synthetic oligonucleotide
  Antisense strand to SEQ ID NO: 558539
caauugcuaacauuucuau

SEQ ID NO: 558541 - RNA, 19 nt, Artificial Sequence
  Description of Artificial Sequence: Synthetic oligonucleotide
  Sense strand starting at position 1731 of SEQ ID NO: 318385
ucacuauugguguaucugu

SEQ ID NO: 558542 - RNA, 19 nt, Artificial Sequence
  Description of Artificial Sequence: Synthetic oligonucleotide
  Antisense strand to SEQ ID NO: 558541
acagauacaccaauaguga

SEQ ID NO: 558543 - RNA, 19 nt, Artificial Sequence
  Description of Artificial Sequence: Synthetic oligonucleotide
  Sense strand starting at position 1998 of SEQ ID NO: 318385
uaaugaaacuucccgggua

SEQ ID NO: 558544 - RNA, 19 nt, Artificial Sequence
  Description of Artificial Sequence: Synthetic oligonucleotide
  Antisense strand to SEQ ID NO: 558543
uacccgggaaguuucauua

SEQ ID NO: 558545 - RNA, 19 nt, Artificial Sequence
  Description of Artificial Sequence: Synthetic oligonucleotide
  Sense strand starting at position 2000 of SEQ ID NO: 318385
augaaacuucccggguauu

SEQ ID NO: 558546 - RNA, 19 nt, Artificial Sequence
  Description of Artificial Sequence: Synthetic oligonucleotide
  Antisense strand to SEQ ID NO: 558545
aauacccgggaaguuucau

SEQ ID NO: 558547 - RNA, 19 nt, Artificial Sequence
  Description of Artificial Sequence: Synthetic oligonucleotide
  Sense strand starting at position 2017 of SEQ ID NO: 318385
uuuaauuuccuguggcauc

SEQ ID NO: 558548 - RNA, 19 nt, Artificial Sequence
  Description of Artificial Sequence: Synthetic oligonucleotide
  Antisense strand to SEQ ID NO: 558547
gaugccacaggaaauuaaa

SEQ ID NO: 558549 - RNA, 19 nt, Artificial Sequence
  Description of Artificial Sequence: Synthetic oligonucleotide
  Sense strand starting at position 2074 of SEQ ID NO: 318385
ggucgucuuuggaagagaa

SEQ ID NO: 558550 - RNA, 19 nt, Artificial Sequence
  Description of Artificial Sequence: Synthetic oligonucleotide
  Antisense strand to SEQ ID NO: 558549
uucucuuccaaagacgacc

SEQ ID NO: 558551 - RNA, 19 nt, Artificial Sequence
  Description of Artificial Sequence: Synthetic oligonucleotide
  Sense strand starting at position 2105 of SEQ ID NO: 318385
caugcuuauguuggaugau

SEQ ID NO: 558552 - RNA, 19 nt, Artificial Sequence
  Description of Artificial Sequence: Synthetic oligonucleotide
  Antisense strand to SEQ ID NO: 558551
aucauccaacauaagcaug

SEQ ID NO: 558553 - RNA, 19 nt, Artificial Sequence
  Description of Artificial Sequence: Synthetic oligonucleotide
  Sense strand starting at position 2108 of SEQ ID NO: 318385
gcuuauguuggaugauauc

SEQ ID NO: 558554 - RNA, 19 nt, Artificial Sequence
  Description of Artificial Sequence: Synthetic oligonucleotide
  Antisense strand to SEQ ID NO: 558553
gauaucauccaacauaagc

SEQ ID NO: 558555 - RNA, 19 nt, Artificial Sequence
  Description of Artificial Sequence: Synthetic oligonucleotide
  Sense strand starting at position 2199 of SEQ ID NO: 318385
uagccuuaccucgagauau

SEQ ID NO: 558556 - RNA, 19 nt, Artificial Sequence
  Description of Artificial Sequence: Synthetic oligonucleotide
  Antisense strand to SEQ ID NO: 558555
auaucucgagguaaggcua

SEQ ID NO: 558557 - RNA, 19 nt, Artificial Sequence
  Description of Artificial Sequence: Synthetic oligonucleotide
  Sense strand starting at position 2201 of SEQ ID NO: 318385
gccuuaccucgagauaucu

SEQ ID NO: 558558 - RNA, 19 nt, Artificial Sequence
  Description of Artificial Sequence: Synthetic oligonucleotide
  Antisense strand to SEQ ID NO: 558557
agauaucucgagguaaggc

SEQ ID NO: 558559 - RNA, 19 nt, Artificial Sequence
  Description of Artificial Sequence: Synthetic oligonucleotide
  Sense strand starting at position 2304 of SEQ ID NO: 318385
ggcagugcugcagaugaaa

SEQ ID NO: 558560 - RNA, 19 nt, Artificial Sequence
  Description of Artificial Sequence: Synthetic oligonucleotide
  Antisense strand to SEQ ID NO: 558559
uuucaucugcagcacugcc

SEQ ID NO: 558561 - RNA, 19 nt, Artificial Sequence
  Description of Artificial Sequence: Synthetic oligonucleotide
  Sense strand starting at position 2603 of SEQ ID NO: 318385
ucuguacuucuagauucua

SEQ ID NO: 558562 - RNA, 19 nt, Artificial Sequence
  Description of Artificial Sequence: Synthetic oligonucleotide
  Antisense strand to SEQ ID NO: 558561
uagaaucuagaaguacaga

SEQ ID NO: 558563 - RNA, 19 nt, Artificial Sequence
  Description of Artificial Sequence: Synthetic oligonucleotide
  Sense strand starting at position 2677 of SEQ ID NO: 318385
auaugaguagcaggaauaa

SEQ ID NO: 558564 - RNA, 19 nt, Artificial Sequence
  Description of Artificial Sequence: Synthetic oligonucleotide
  Antisense strand to SEQ ID NO: 558563
uuauuccugcuacucauau

SEQ ID NO: 558565 - RNA, 19 nt, Artificial Sequence
  Description of Artificial Sequence: Synthetic oligonucleotide
  Sense strand starting at position 2686 of SEQ ID NO: 318385
gcaggaauaacaugaguug

SEQ ID NO: 558566 - RNA, 19 nt, Artificial Sequence
  Description of Artificial Sequence: Synthetic oligonucleotide
  Antisense strand to SEQ ID NO: 558565
caacucauguuauuccugc

SEQ ID NO: 558567 - RNA, 19 nt, Artificial Sequence
  Description of Artificial Sequence: Synthetic oligonucleotide
  Sense strand starting at position 2692 of SEQ ID NO: 318385
auaacaugaguuggcuuua

SEQ ID NO: 558568 - RNA, 19 nt, Artificial Sequence
  Description of Artificial Sequence: Synthetic oligonucleotide
  Antisense strand to SEQ ID NO: 558567
uaaagccaacucauguuau

SEQ ID NO: 558569 - RNA, 19 nt, Artificial Sequence
  Description of Artificial Sequence: Synthetic oligonucleotide
  Sense strand starting at position 2693 of SEQ ID NO: 318385
uaacaugaguuggcuuuaa

SEQ ID NO: 558570 - RNA, 19 nt, Artificial Sequence
  Description of Artificial Sequence: Synthetic oligonucleotide
  Antisense strand to SEQ ID NO: 558569
uuaaagccaacucauguua

SEQ ID NO: 558571 - RNA, 19 nt, Artificial Sequence
  Description of Artificial Sequence: Synthetic oligonucleotide
  Sense strand starting at position 2814 of SEQ ID NO: 318385
gcaauuggguuucucuaau

SEQ ID NO: 558572 - RNA, 19 nt, Artificial Sequence
  Description of Artificial Sequence: Synthetic oligonucleotide
  Antisense strand to SEQ ID NO: 558571
auuagagaaacccaauugc

SEQ ID NO: 558573 - RNA, 19 nt, Artificial Sequence
  Description of Artificial Sequence: Synthetic oligonucleotide
  Sense strand starting at position 2820 of SEQ ID NO: 318385
ggguuucucuaaucuuagu

SEQ ID NO: 558574 - RNA, 19 nt, Artificial Sequence
  Description of Artificial Sequence: Synthetic oligonucleotide
  Antisense strand to SEQ ID NO: 558573
acuaagauuagagaaaccc

SEQ ID NO: 558575 - RNA, 19 nt, Artificial Sequence
  Description of Artificial Sequence: Synthetic oligonucleotide
  Sense strand starting at position 2907 of SEQ ID NO: 318385
uguuaauauucuguuggau

SEQ ID NO: 558576 - RNA, 19 nt, Artificial Sequence
  Description of Artificial Sequence: Synthetic oligonucleotide
  Antisense strand to SEQ ID NO: 558575
auccaacagaauauuaaca

SEQ ID NO: 558577 - RNA, 19 nt, Artificial Sequence
  Description of Artificial Sequence: Synthetic oligonucleotide
  Sense strand starting at position 2921 of SEQ ID NO: 318385
uggauaaauugugcucuau

SEQ ID NO: 558578 - RNA, 19 nt, Artificial Sequence
  Description of Artificial Sequence: Synthetic oligonucleotide
  Antisense strand to SEQ ID NO: 558577
auagagcacaauuuaucca

SEQ ID NO: 558579 - RNA, 19 nt, Artificial Sequence
  Description of Artificial Sequence: Synthetic oligonucleotide
  Sense strand starting at position 2934 of SEQ ID NO: 318385
cucuauauacuaggucuga

SEQ ID NO: 558580 - RNA, 19 nt, Artificial Sequence
  Description of Artificial Sequence: Synthetic oligonucleotide
  Antisense strand to SEQ ID NO: 558579
ucagaccuaguauauagag

SEQ ID NO: 558581 - RNA, 19 nt, Artificial Sequence
  Description of Artificial Sequence: Synthetic oligonucleotide
  Sense strand starting at position 2935 of SEQ ID NO: 318385
ucuauauacuaggucugau

SEQ ID NO: 558582 - RNA, 19 nt, Artificial Sequence
  Description of Artificial Sequence: Synthetic oligonucleotide
  Antisense strand to SEQ ID NO: 558581
aucagaccuaguauauaga

SEQ ID NO: 558583 - RNA, 19 nt, Artificial Sequence
  Description of Artificial Sequence: Synthetic oligonucleotide
  Sense strand starting at position 2938 of SEQ ID NO: 318385
auauacuaggucugauuaa

SEQ ID NO: 558584 - RNA, 19 nt, Artificial Sequence
  Description of Artificial Sequence: Synthetic oligonucleotide
  Antisense strand to SEQ ID NO: 558583
uuaaucagaccuaguauau

SEQ ID NO: 558585 - RNA, 19 nt, Artificial Sequence
  Description of Artificial Sequence: Synthetic oligonucleotide
  Sense strand starting at position 3023 of SEQ ID NO: 318385
acugcaguauuccugaaua

SEQ ID NO: 558586 - RNA, 19 nt, Artificial Sequence
  Description of Artificial Sequence: Synthetic oligonucleotide
  Antisense strand to SEQ ID NO: 558585
uauucaggaauacugcagu

SEQ ID NO: 558587 - RNA, 19 nt, Artificial Sequence
  Description of Artificial Sequence: Synthetic oligonucleotide
  Sense strand starting at position 3025 of SEQ ID NO: 318385
ugcaguauuccugaauacc

SEQ ID NO: 558588 - RNA, 19 nt, Artificial Sequence
  Description of Artificial Sequence: Synthetic oligonucleotide
  Antisense strand to SEQ ID NO: 558587
gguauucaggaauacugca

SEQ ID NO: 558589 - RNA, 19 nt, Artificial Sequence
  Description of Artificial Sequence: Synthetic oligonucleotide
  Sense strand starting at position 3290 of SEQ ID NO: 318385
agagaacugaguuguaauc

SEQ ID NO: 558590 - RNA, 19 nt, Artificial Sequence
  Description of Artificial Sequence: Synthetic oligonucleotide
  Antisense strand to SEQ ID NO: 558589
gauuacaacucaguucucu

SEQ ID NO: 558591 - RNA, 19 nt, Artificial Sequence
  Description of Artificial Sequence: Synthetic oligonucleotide
  Sense strand starting at position 3341 of SEQ ID NO: 318385
aaguguuaucacugcaaag

SEQ ID NO: 558592 - RNA, 19 nt, Artificial Sequence
  Description of Artificial Sequence: Synthetic oligonucleotide
  Antisense strand to SEQ ID NO: 558591
cuuugcagugauaacacuu

SEQ ID NO: 558593 - RNA, 19 nt, Artificial Sequence
  Description of Artificial Sequence: Synthetic oligonucleotide
  Sense strand starting at position 3343 of SEQ ID NO: 318385
guguuaucacugcaaagug

SEQ ID NO: 558594 - RNA, 19 nt, Artificial Sequence
  Description of Artificial Sequence: Synthetic oligonucleotide
  Antisense strand to SEQ ID NO: 558593
cacuuugcagugauaacac

SEQ ID NO: 558595 - RNA, 19 nt, Artificial Sequence
  Description of Artificial Sequence: Synthetic oligonucleotide
  Sense strand starting at position 69 of SEQ ID NO: 318386
uaaugaaacuucccgggua

SEQ ID NO: 558596 - RNA, 19 nt, Artificial Sequence
  Description of Artificial Sequence: Synthetic oligonucleotide
  Antisense strand to SEQ ID NO: 558595
uacccgggaaguuucauua

SEQ ID NO: 558597 - RNA, 19 nt, Artificial Sequence
  Description of Artificial Sequence: Synthetic oligonucleotide
  Sense strand starting at position 71 of SEQ ID NO: 318386
augaaacuucccggguauu

SEQ ID NO: 558598 - RNA, 19 nt, Artificial Sequence
  Description of Artificial Sequence: Synthetic oligonucleotide
  Antisense strand to SEQ ID NO: 558597
aauacccgggaaguuucau

SEQ ID NO: 558599 - RNA, 19 nt, Artificial Sequence
  Description of Artificial Sequence: Synthetic oligonucleotide
  Sense strand starting at position 88 of SEQ ID NO: 318386
uuuaauuuccuguggcauc

SEQ ID NO: 558600 - RNA, 19 nt, Artificial Sequence
  Description of Artificial Sequence: Synthetic oligonucleotide
  Antisense strand to SEQ ID NO: 558599
gaugccacaggaaauuaaa

SEQ ID NO: 558601 - RNA, 19 nt, Artificial Sequence
  Description of Artificial Sequence: Synthetic oligonucleotide
  Sense strand starting at position 145 of SEQ ID NO: 318386
ggucgucuuuggaagagaa

SEQ ID NO: 558602 - RNA, 19 nt, Artificial Sequence
  Description of Artificial Sequence: Synthetic oligonucleotide
  Antisense strand to SEQ ID NO: 558601
uucucuuccaaagacgacc

SEQ ID NO: 558603 - RNA, 19 nt, Artificial Sequence
  Description of Artificial Sequence: Synthetic oligonucleotide
  Sense strand starting at position 270 of SEQ ID NO: 318386
uagccuuaccucgagauau

SEQ ID NO: 558604 - RNA, 19 nt, Artificial Sequence
  Description of Artificial Sequence: Synthetic oligonucleotide
  Antisense strand to SEQ ID NO: 558603
auaucucgagguaaggcua

SEQ ID NO: 558605 - RNA, 19 nt, Artificial Sequence
  Description of Artificial Sequence: Synthetic oligonucleotide
  Sense strand starting at position 272 of SEQ ID NO: 318386
gccuuaccucgagauaucu

SEQ ID NO: 558606 - RNA, 19 nt, Artificial Sequence
  Description of Artificial Sequence: Synthetic oligonucleotide
  Antisense strand to SEQ ID NO: 558605
agauaucucgagguaaggc

SEQ ID NO: 558607 - RNA, 19 nt, Artificial Sequence
  Description of Artificial Sequence: Synthetic oligonucleotide
  Sense strand starting at position 375 of SEQ ID NO: 318386
ggcagugcugcagaugaaa

SEQ ID NO: 558608 - RNA, 19 nt, Artificial Sequence
  Description of Artificial Sequence: Synthetic oligonucleotide
  Antisense strand to SEQ ID NO: 558607
uuucaucugcagcacugcc

SEQ ID NO: 558609 - RNA, 19 nt, Artificial Sequence
  Description of Artificial Sequence: Synthetic oligonucleotide
  Sense strand starting at position 674 of SEQ ID NO: 318386
ucuguacuucuagauucua

SEQ ID NO: 558610 - RNA, 19 nt, Artificial Sequence
  Description of Artificial Sequence: Synthetic oligonucleotide
  Antisense strand to SEQ ID NO: 558609
uagaaucuagaaguacaga

SEQ ID NO: 558611 - RNA, 19 nt, Artificial Sequence
  Description of Artificial Sequence: Synthetic oligonucleotide
  Sense strand starting at position 748 of SEQ ID NO: 318386
auaugaguagcaggaauaa

SEQ ID NO: 558612 - RNA, 19 nt, Artificial Sequence
  Description of Artificial Sequence: Synthetic oligonucleotide
  Antisense strand to SEQ ID NO: 558611
uuauuccugcuacucauau

SEQ ID NO: 558613 - RNA, 19 nt, Artificial Sequence
  Description of Artificial Sequence: Synthetic oligonucleotide
  Sense strand starting at position 757 of SEQ ID NO: 318386
gcaggaauaacaugaguug

SEQ ID NO: 558614 - RNA, 19 nt, Artificial Sequence
  Description of Artificial Sequence: Synthetic oligonucleotide
  Antisense strand to SEQ ID NO: 558613
caacucauguuauuccugc

SEQ ID NO: 558615 - RNA, 19 nt, Artificial Sequence
  Description of Artificial Sequence: Synthetic oligonucleotide
  Sense strand starting at position 763 of SEQ ID NO: 318386
auaacaugaguuggcuuua

SEQ ID NO: 558616 - RNA, 19 nt, Artificial Sequence
  Description of Artificial Sequence: Synthetic oligonucleotide
  Antisense strand to SEQ ID NO: 558615
uaaagccaacucauguuau

SEQ ID NO: 558617 - RNA, 19 nt, Artificial Sequence
  Description of Artificial Sequence: Synthetic oligonucleotide
  Sense strand starting at position 764 of SEQ ID NO: 318386
uaacaugaguuggcuuuaa

SEQ ID NO: 558618 - RNA, 19 nt, Artificial Sequence
  Description of Artificial Sequence: Synthetic oligonucleotide
  Antisense strand to SEQ ID NO: 558617
uuaaagccaacucauguua

SEQ ID NO: 558619 - RNA, 19 nt, Artificial Sequence
  Description of Artificial Sequence: Synthetic oligonucleotide
  Sense strand starting at position 978 of SEQ ID NO: 318386
uguuaauauucuguuggau

SEQ ID NO: 558620 - RNA, 19 nt, Artificial Sequence
  Description of Artificial Sequence: Synthetic oligonucleotide
  Antisense strand to SEQ ID NO: 558619
auccaacagaauauuaaca

SEQ ID NO: 558621 - RNA, 19 nt, Artificial Sequence
  Description of Artificial Sequence: Synthetic oligonucleotide
  Sense strand starting at position 992 of SEQ ID NO: 318386
uggauaaauugugcucuau

SEQ ID NO: 558622 - RNA, 19 nt, Artificial Sequence
  Description of Artificial Sequence: Synthetic oligonucleotide
  Antisense strand to SEQ ID NO: 558621
auagagcacaauuuaucca

SEQ ID NO: 558623 - RNA, 19 nt, Artificial Sequence
  Description of Artificial Sequence: Synthetic oligonucleotide
  Sense strand starting at position 1005 of SEQ ID NO: 318386
cucuauauacuaggucuga

SEQ ID NO: 558624 - RNA, 19 nt, Artificial Sequence
  Description of Artificial Sequence: Synthetic oligonucleotide
  Antisense strand to SEQ ID NO: 558623
ucagaccuaguauauagag

SEQ ID NO: 558625 - RNA, 19 nt, Artificial Sequence
  Description of Artificial Sequence: Synthetic oligonucleotide
  Sense strand starting at position 1006 of SEQ ID NO: 318386
ucuauauacuaggucugau

SEQ ID NO: 558626 - RNA, 19 nt, Artificial Sequence
  Description of Artificial Sequence: Synthetic oligonucleotide
  Antisense strand to SEQ ID NO: 558625
aucagaccuaguauauaga

SEQ ID NO: 558627 - RNA, 19 nt, Artificial Sequence
  Description of Artificial Sequence: Synthetic oligonucleotide
  Sense strand starting at position 1009 of SEQ ID NO: 318386
auauacuaggucugauuaa

SEQ ID NO: 558628 - RNA, 19 nt, Artificial Sequence
  Description of Artificial Sequence: Synthetic oligonucleotide
  Antisense strand to SEQ ID NO: 558627
uuaaucagaccuaguauau

SEQ ID NO: 558629 - RNA, 19 nt, Artificial Sequence
  Description of Artificial Sequence: Synthetic oligonucleotide
  Sense strand starting at position 1094 of SEQ ID NO: 318386
acugcaguauuccugaaua

SEQ ID NO: 558630 - RNA, 19 nt, Artificial Sequence
  Description of Artificial Sequence: Synthetic oligonucleotide
  Antisense strand to SEQ ID NO: 558629
uauucaggaauacugcagu

SEQ ID NO: 558631 - RNA, 19 nt, Artificial Sequence
  Description of Artificial Sequence: Synthetic oligonucleotide
  Sense strand starting at position 1096 of SEQ ID NO: 318386
ugcaguauuccugaauacc

SEQ ID NO: 558632 - RNA, 19 nt, Artificial Sequence
  Description of Artificial Sequence: Synthetic oligonucleotide
  Antisense strand to SEQ ID NO: 558631
gguauucaggaauacugca

SEQ ID NO: 558633 - RNA, 19 nt, Artificial Sequence
  Description of Artificial Sequence: Synthetic oligonucleotide
  Sense strand starting at position 1361 of SEQ ID NO: 318386
agagaacugaguuguaauc

SEQ ID NO: 558634 - RNA, 19 nt, Artificial Sequence
  Description of Artificial Sequence: Synthetic oligonucleotide
  Antisense strand to SEQ ID NO: 558633
gauuacaacucaguucucu

SEQ ID NO: 558635 - RNA, 19 nt, Artificial Sequence
  Description of Artificial Sequence: Synthetic oligonucleotide
  Sense strand starting at position 1412 of SEQ ID NO: 318386
aaguguuaucacugcaaag

SEQ ID NO: 558636 - RNA, 19 nt, Artificial Sequence
  Description of Artificial Sequence: Synthetic oligonucleotide
  Antisense strand to SEQ ID NO: 558635
cuuugcagugauaacacuu

SEQ ID NO: 558637 - RNA, 19 nt, Artificial Sequence
  Description of Artificial Sequence: Synthetic oligonucleotide
  Sense strand starting at position 2180 of SEQ ID NO: 318386
agguguuuaauuugacugu

SEQ ID NO: 558638 - RNA, 19 nt, Artificial Sequence
  Description of Artificial Sequence: Synthetic oligonucleotide
  Antisense strand to SEQ ID NO: 558637
acagucaaauuaaacaccu

SEQ ID NO: 558639 - RNA, 19 nt, Artificial Sequence
  Description of Artificial Sequence: Synthetic oligonucleotide
  Sense strand starting at position 2183 of SEQ ID NO: 318386
uguuuaauuugacuguucu

SEQ ID NO: 558640 - RNA, 19 nt, Artificial Sequence
  Description of Artificial Sequence: Synthetic oligonucleotide
  Antisense strand to SEQ ID NO: 558639
agaacagucaaauuaaaca

SEQ ID NO: 558641 - RNA, 19 nt, Artificial Sequence
  Description of Artificial Sequence: Synthetic oligonucleotide
  Sense strand starting at position 2184 of SEQ ID NO: 318386
guuuaauuugacuguucuc

SEQ ID NO: 558642 - RNA, 19 nt, Artificial Sequence
  Description of Artificial Sequence: Synthetic oligonucleotide
  Antisense strand to SEQ ID NO: 558641
gagaacagucaaauuaaac

SEQ ID NO: 558643 - RNA, 19 nt, Artificial Sequence
  Description of Artificial Sequence: Synthetic oligonucleotide
  Sense strand starting at position 2318 of SEQ ID NO: 318386
ugcaucuggguuuauagau

SEQ ID NO: 558644 - RNA, 19 nt, Artificial Sequence
  Description of Artificial Sequence: Synthetic oligonucleotide
  Antisense strand to SEQ ID NO: 558643
aucuauaaacccagaugca

SEQ ID NO: 558645 - RNA, 19 nt, Artificial Sequence
  Description of Artificial Sequence: Synthetic oligonucleotide
  Sense strand starting at position 2324 of SEQ ID NO: 318386
uggguuuauagauagccca

SEQ ID NO: 558646 - RNA, 19 nt, Artificial Sequence
  Description of Artificial Sequence: Synthetic oligonucleotide
  Antisense strand to SEQ ID NO: 558645
ugggcuaucuauaaaccca

SEQ ID NO: 558647 - RNA, 19 nt, Artificial Sequence
  Description of Artificial Sequence: Synthetic oligonucleotide
  Sense strand starting at position 2342 of SEQ ID NO: 318386
agucauuccuugguuuaaa

SEQ ID NO: 558648 - RNA, 19 nt, Artificial Sequence
  Description of Artificial Sequence: Synthetic oligonucleotide
  Antisense strand to SEQ ID NO: 558647
uuuaaaccaaggaaugacu

SEQ ID NO: 558649 - RNA, 19 nt, Artificial Sequence
  Description of Artificial Sequence: Synthetic oligonucleotide
  Sense strand starting at position 2407 of SEQ ID NO: 318386
guccuuagauaucucucau

SEQ ID NO: 558650 - RNA, 19 nt, Artificial Sequence
  Description of Artificial Sequence: Synthetic oligonucleotide
  Antisense strand to SEQ ID NO: 558649
augagagauaucuaaggac

SEQ ID NO: 558651 - RNA, 19 nt, Artificial Sequence
  Description of Artificial Sequence: Synthetic oligonucleotide
  Sense strand starting at position 2613 of SEQ ID NO: 318386
ucugaauaggaaugcagau

SEQ ID NO: 558652 - RNA, 19 nt, Artificial Sequence
  Description of Artificial Sequence: Synthetic oligonucleotide
  Antisense strand to SEQ ID NO: 558651
aucugcauuccuauucaga

SEQ ID NO: 558653 - RNA, 19 nt, Artificial Sequence
  Description of Artificial Sequence: Synthetic oligonucleotide
  Sense strand starting at position 2628 of SEQ ID NO: 318386
agaugccuauuagcagaaa

SEQ ID NO: 558654 - RNA, 19 nt, Artificial Sequence
  Description of Artificial Sequence: Synthetic oligonucleotide
  Antisense strand to SEQ ID NO: 558653
uuucugcuaauaggcaucu

SEQ ID NO: 558655 - RNA, 19 nt, Artificial Sequence
  Description of Artificial Sequence: Synthetic oligonucleotide
  Sense strand starting at position 2658 of SEQ ID NO: 318386
auugucugucaacauuauu

SEQ ID NO: 558656 - RNA, 19 nt, Artificial Sequence
  Description of Artificial Sequence: Synthetic oligonucleotide
  Antisense strand to SEQ ID NO: 558655
aauaauguugacagacaau

SEQ ID NO: 558657 - RNA, 19 nt, Artificial Sequence
  Description of Artificial Sequence: Synthetic oligonucleotide
  Sense strand starting at position 2661 of SEQ ID NO: 318386
gucugucaacauuauuaau

SEQ ID NO: 558658 - RNA, 19 nt, Artificial Sequence
  Description of Artificial Sequence: Synthetic oligonucleotide
  Antisense strand to SEQ ID NO: 558657
auuaauaauguugacagac

SEQ ID NO: 558659 - RNA, 19 nt, Artificial Sequence
  Description of Artificial Sequence: Synthetic oligonucleotide
  Sense strand starting at position 2824 of SEQ ID NO: 318386
acugcuugaacgggaagau

SEQ ID NO: 558660 - RNA, 19 nt, Artificial Sequence
  Description of Artificial Sequence: Synthetic oligonucleotide
  Antisense strand to SEQ ID NO: 558659
aucuucccguucaagcagu

SEQ ID NO: 558661 - RNA, 19 nt, Artificial Sequence
  Description of Artificial Sequence: Synthetic oligonucleotide
  Sense strand starting at position 2904 of SEQ ID NO: 318386
gccucacuccgggacaaau

SEQ ID NO: 558662 - RNA, 19 nt, Artificial Sequence
  Description of Artificial Sequence: Synthetic oligonucleotide
  Antisense strand to SEQ ID NO: 558661
auuugucccggagugaggc

SEQ ID NO: 558663 - RNA, 19 nt, Artificial Sequence
  Description of Artificial Sequence: Synthetic oligonucleotide
  Sense strand starting at position 2990 of SEQ ID NO: 318386
uccugucacccuuauagga

SEQ ID NO: 558664 - RNA, 19 nt, Artificial Sequence
  Description of Artificial Sequence: Synthetic oligonucleotide
  Antisense strand to SEQ ID NO: 558663
uccuauaagggugacagga

SEQ ID NO: 558665 - RNA, 19 nt, Artificial Sequence
  Description of Artificial Sequence: Synthetic oligonucleotide
  Sense strand starting at position 3015 of SEQ ID NO: 318386
uguacauucucauugugaa

SEQ ID NO: 558666 - RNA, 19 nt, Artificial Sequence
  Description of Artificial Sequence: Synthetic oligonucleotide
  Antisense strand to SEQ ID NO: 558665
uucacaaugagaauguaca

SEQ ID NO: 558667 - RNA, 19 nt, Artificial Sequence
  Description of Artificial Sequence: Synthetic oligonucleotide
  Sense strand starting at position 3016 of SEQ ID NO: 318386
guacauucucauugugaac

SEQ ID NO: 558668 - RNA, 19 nt, Artificial Sequence
  Description of Artificial Sequence: Synthetic oligonucleotide
  Antisense strand to SEQ ID NO: 558667
guucacaaugagaauguac

SEQ ID NO: 558669 - RNA, 19 nt, Artificial Sequence
  Description of Artificial Sequence: Synthetic oligonucleotide
  Sense strand starting at position 3187 of SEQ ID NO: 318386
ccuugagacuuucuguaaa

SEQ ID NO: 558670 - RNA, 19 nt, Artificial Sequence
  Description of Artificial Sequence: Synthetic oligonucleotide
  Antisense strand to SEQ ID NO: 558669
uuuacagaaagucucaagg

SEQ ID NO: 558671 - RNA, 19 nt, Artificial Sequence
  Description of Artificial Sequence: Synthetic oligonucleotide
  Sense strand starting at position 3472 of SEQ ID NO: 318386
gagacaaguucuccgagca

SEQ ID NO: 558672 - RNA, 19 nt, Artificial Sequence
  Description of Artificial Sequence: Synthetic oligonucleotide
  Antisense strand to SEQ ID NO: 558671
ugcucggagaacuugucuc

SEQ ID NO: 558673 - RNA, 19 nt, Artificial Sequence
  Description of Artificial Sequence: Synthetic oligonucleotide
  Sense strand starting at position 3674 of SEQ ID NO: 318386
auuaguaccuucuuacuga

SEQ ID NO: 558674 - RNA, 19 nt, Artificial Sequence
  Description of Artificial Sequence: Synthetic oligonucleotide
  Antisense strand to SEQ ID NO: 558673
ucaguaagaagguacuaau

SEQ ID NO: 558675 - RNA, 19 nt, Artificial Sequence
  Description of Artificial Sequence: Synthetic oligonucleotide
  Sense strand starting at position 243 of SEQ ID NO: 318387
agaacaguguaaucuguca

SEQ ID NO: 558676 - RNA, 19 nt, Artificial Sequence
  Description of Artificial Sequence: Synthetic oligonucleotide
  Antisense strand to SEQ ID NO: 558675
ugacagauuacacuguucu

SEQ ID NO: 558677 - RNA, 19 nt, Artificial Sequence
  Description of Artificial Sequence: Synthetic oligonucleotide
  Sense strand starting at position 263 of SEQ ID NO: 318387
aaaguuguauagcuaguga

SEQ ID NO: 558678 - RNA, 19 nt, Artificial Sequence
  Description of Artificial Sequence: Synthetic oligonucleotide
  Antisense strand to SEQ ID NO: 558677
ucacuagcuauacaacuuu

SEQ ID NO: 558679 - RNA, 19 nt, Artificial Sequence
  Description of Artificial Sequence: Synthetic oligonucleotide
  Sense strand starting at position 331 of SEQ ID NO: 318387
ugcagaagucaccaaauuc

SEQ ID NO: 558680 - RNA, 19 nt, Artificial Sequence
  Description of Artificial Sequence: Synthetic oligonucleotide
  Antisense strand to SEQ ID NO: 558679
gaauuuggugacuucugca

SEQ ID NO: 558681 - RNA, 19 nt, Artificial Sequence
  Description of Artificial Sequence: Synthetic oligonucleotide
  Sense strand starting at position 338 of SEQ ID NO: 318387
gucaccaaauuccuaguaa

SEQ ID NO: 558682 - RNA, 19 nt, Artificial Sequence
  Description of Artificial Sequence: Synthetic oligonucleotide
  Antisense strand to SEQ ID NO: 558681
uuacuaggaauuuggugac

SEQ ID NO: 558683 - RNA, 19 nt, Artificial Sequence
  Description of Artificial Sequence: Synthetic oligonucleotide
  Sense strand starting at position 514 of SEQ ID NO: 318387
accaauaagcucugugaau

SEQ ID NO: 558684 - RNA, 19 nt, Artificial Sequence
  Description of Artificial Sequence: Synthetic oligonucleotide
  Antisense strand to SEQ ID NO: 558683
auucacagagcuuauuggu

SEQ ID NO: 558685 - RNA, 19 nt, Artificial Sequence
  Description of Artificial Sequence: Synthetic oligonucleotide
  Sense strand starting at position 515 of SEQ ID NO: 318387
ccaauaagcucugugaaua

SEQ ID NO: 558686 - RNA, 19 nt, Artificial Sequence
  Description of Artificial Sequence: Synthetic oligonucleotide
  Antisense strand to SEQ ID NO: 558685
uauucacagagcuuauugg

SEQ ID NO: 558687 - RNA, 19 nt, Artificial Sequence
  Description of Artificial Sequence: Synthetic oligonucleotide
  Sense strand starting at position 525 of SEQ ID NO: 318387
cugugaauaucccuccuga

SEQ ID NO: 558688 - RNA, 19 nt, Artificial Sequence
  Description of Artificial Sequence: Synthetic oligonucleotide
  Antisense strand to SEQ ID NO: 558687
ucaggagggauauucacag

SEQ ID NO: 558689 - RNA, 19 nt, Artificial Sequence
  Description of Artificial Sequence: Synthetic oligonucleotide
  Sense strand starting at position 601 of SEQ ID NO: 318387
ccggaacugcuuuauccau

SEQ ID NO: 558690 - RNA, 19 nt, Artificial Sequence
  Description of Artificial Sequence: Synthetic oligonucleotide
  Antisense strand to SEQ ID NO: 558689
auggauaaagcaguuccgg

SEQ ID NO: 558691 - RNA, 19 nt, Artificial Sequence
  Description of Artificial Sequence: Synthetic oligonucleotide
  Sense strand starting at position 608 of SEQ ID NO: 318387
ugcuuuauccauugguacu

SEQ ID NO: 558692 - RNA, 19 nt, Artificial Sequence
  Description of Artificial Sequence: Synthetic oligonucleotide
  Antisense strand to SEQ ID NO: 558691
aguaccaauggauaaagca

SEQ ID NO: 558693 - RNA, 19 nt, Artificial Sequence
  Description of Artificial Sequence: Synthetic oligonucleotide
  Sense strand starting at position 729 of SEQ ID NO: 318387
gcugcagcucaagggauua

SEQ ID NO: 558694 - RNA, 19 nt, Artificial Sequence
  Description of Artificial Sequence: Synthetic oligonucleotide
  Antisense strand to SEQ ID NO: 558693
uaaucccuugagcugcagc

SEQ ID NO: 558695 - RNA, 19 nt, Artificial Sequence
  Description of Artificial Sequence: Synthetic oligonucleotide
  Sense strand starting at position 740 of SEQ ID NO: 318387
agggauuaacgguggaagu

SEQ ID NO: 558696 - RNA, 19 nt, Artificial Sequence
  Description of Artificial Sequence: Synthetic oligonucleotide
  Antisense strand to SEQ ID NO: 558695
acuuccaccguuaaucccu

SEQ ID NO: 558697 - RNA, 19 nt, Artificial Sequence
  Description of Artificial Sequence: Synthetic oligonucleotide
  Sense strand starting at position 988 of SEQ ID NO: 318387
gugguuuccagagaauugc

SEQ ID NO: 558698 - RNA, 19 nt, Artificial Sequence
  Description of Artificial Sequence: Synthetic oligonucleotide
  Antisense strand to SEQ ID NO: 558697
gcaauucucuggaaaccac

SEQ ID NO: 558699 - RNA, 19 nt, Artificial Sequence
  Description of Artificial Sequence: Synthetic oligonucleotide
  Sense strand starting at position 996 of SEQ ID NO: 318387
cagagaauugcccacgaua

SEQ ID NO: 558700 - RNA, 19 nt, Artificial Sequence
  Description of Artificial Sequence: Synthetic oligonucleotide
  Antisense strand to SEQ ID NO: 558699
uaucgugggcaauucucug

SEQ ID NO: 558701 - RNA, 19 nt, Artificial Sequence
  Description of Artificial Sequence: Synthetic oligonucleotide
  Sense strand starting at position 998 of SEQ ID NO: 318387
gagaauugcccacgauauu

SEQ ID NO: 558702 - RNA, 19 nt, Artificial Sequence
  Description of Artificial Sequence: Synthetic oligonucleotide
  Antisense strand to SEQ ID NO: 558701
aauaucgugggcaauucuc

SEQ ID NO: 558703 - RNA, 19 nt, Artificial Sequence
  Description of Artificial Sequence: Synthetic oligonucleotide
  Sense strand starting at position 1105 of SEQ ID NO: 318387
gcuggauuuccgggcgguu

SEQ ID NO: 558704 - RNA, 19 nt, Artificial Sequence
  Description of Artificial Sequence: Synthetic oligonucleotide
  Antisense strand to SEQ ID NO: 558703
aaccgcccggaaauccagc

SEQ ID NO: 558705 - RNA, 19 nt, Artificial Sequence
  Description of Artificial Sequence: Synthetic oligonucleotide
  Sense strand starting at position 1171 of SEQ ID NO: 318387
ggcaauaaacgcugaguua

SEQ ID NO: 558706 - RNA, 19 nt, Artificial Sequence
  Description of Artificial Sequence: Synthetic oligonucleotide
  Antisense strand to SEQ ID NO: 558705
uaacucagcguuuauugcc

SEQ ID NO: 558707 - RNA, 19 nt, Artificial Sequence
  Description of Artificial Sequence: Synthetic oligonucleotide
  Sense strand starting at position 1172 of SEQ ID NO: 318387
gcaauaaacgcugaguuag

SEQ ID NO: 558708 - RNA, 19 nt, Artificial Sequence
  Description of Artificial Sequence: Synthetic oligonucleotide
  Antisense strand to SEQ ID NO: 558707
cuaacucagcguuuauugc

SEQ ID NO: 558709 - RNA, 19 nt, Artificial Sequence
  Description of Artificial Sequence: Synthetic oligonucleotide
  Sense strand starting at position 2727 of SEQ ID NO: 318387
cuaguccugagaugacaga

SEQ ID NO: 558710 - RNA, 19 nt, Artificial Sequence
  Description of Artificial Sequence: Synthetic oligonucleotide
  Antisense strand to SEQ ID NO: 558709
ucugucaucucaggacuag

SEQ ID NO: 558711 - RNA, 19 nt, Artificial Sequence
  Description of Artificial Sequence: Synthetic oligonucleotide
  Sense strand starting at position 2855 of SEQ ID NO: 318387
ggugaauuacauugucucu

SEQ ID NO: 558712 - RNA, 19 nt, Artificial Sequence
  Description of Artificial Sequence: Synthetic oligonucleotide
  Antisense strand to SEQ ID NO: 558711
agagacaauguaauucacc

SEQ ID NO: 558713 - RNA, 19 nt, Artificial Sequence
  Description of Artificial Sequence: Synthetic oligonucleotide
  Sense strand starting at position 2955 of SEQ ID NO: 318387
ccuuccacugaugguaaga

SEQ ID NO: 558714 - RNA, 19 nt, Artificial Sequence
  Description of Artificial Sequence: Synthetic oligonucleotide
  Antisense strand to SEQ ID NO: 558713
ucuuaccaucaguggaagg

SEQ ID NO: 558715 - RNA, 19 nt, Artificial Sequence
  Description of Artificial Sequence: Synthetic oligonucleotide
  Sense strand starting at position 2960 of SEQ ID NO: 318387
cacugaugguaagauggaa

SEQ ID NO: 558716 - RNA, 19 nt, Artificial Sequence
  Description of Artificial Sequence: Synthetic oligonucleotide
  Antisense strand to SEQ ID NO: 558715
uuccaucuuaccaucagug

SEQ ID NO: 558717 - RNA, 19 nt, Artificial Sequence
  Description of Artificial Sequence: Synthetic oligonucleotide
  Sense strand starting at position 3018 of SEQ ID NO: 318387
gugagaaucugcuuccuaa

SEQ ID NO: 558718 - RNA, 19 nt, Artificial Sequence
  Description of Artificial Sequence: Synthetic oligonucleotide
  Antisense strand to SEQ ID NO: 558717
uuaggaagcagauucucac

SEQ ID NO: 558719 - RNA, 19 nt, Artificial Sequence
  Description of Artificial Sequence: Synthetic oligonucleotide
  Sense strand starting at position 3190 of SEQ ID NO: 318387
guugaauuuggugguuuau

SEQ ID NO: 558720 - RNA, 19 nt, Artificial Sequence
  Description of Artificial Sequence: Synthetic oligonucleotide
  Antisense strand to SEQ ID NO: 558719
auaaaccaccaaauucaac

SEQ ID NO: 558721 - RNA, 19 nt, Artificial Sequence
  Description of Artificial Sequence: Synthetic oligonucleotide
  Sense strand starting at position 3199 of SEQ ID NO: 318387
ggugguuuauucuugugga

SEQ ID NO: 558722 - RNA, 19 nt, Artificial Sequence
  Description of Artificial Sequence: Synthetic oligonucleotide
  Antisense strand to SEQ ID NO: 558721
uccacaagaauaaaccacc

SEQ ID NO: 558723 - RNA, 19 nt, Artificial Sequence
  Description of Artificial Sequence: Synthetic oligonucleotide
  Sense strand starting at position 3328 of SEQ ID NO: 318387
agacacugguguuucuauu

SEQ ID NO: 558724 - RNA, 19 nt, Artificial Sequence
  Description of Artificial Sequence: Synthetic oligonucleotide
  Antisense strand to SEQ ID NO: 558723
aauagaaacaccagugucu

SEQ ID NO: 558725 - RNA, 19 nt, Artificial Sequence
  Description of Artificial Sequence: Synthetic oligonucleotide
  Sense strand starting at position 3432 of SEQ ID NO: 318387
uaggaaauuuaccaaggua

SEQ ID NO: 558726 - RNA, 19 nt, Artificial Sequence
  Description of Artificial Sequence: Synthetic oligonucleotide
  Antisense strand to SEQ ID NO: 558725
uaccuugguaaauuuccua

SEQ ID NO: 558727 - RNA, 19 nt, Artificial Sequence
  Description of Artificial Sequence: Synthetic oligonucleotide
  Sense strand starting at position 3457 of SEQ ID NO: 318387
ucacaccuacugugugaaa

SEQ ID NO: 558728 - RNA, 19 nt, Artificial Sequence
  Description of Artificial Sequence: Synthetic oligonucleotide
  Antisense strand to SEQ ID NO: 558727
uuucacacaguagguguga

SEQ ID NO: 558729 - RNA, 19 nt, Artificial Sequence
  Description of Artificial Sequence: Synthetic oligonucleotide
  Sense strand starting at position 3459 of SEQ ID NO: 318387
acaccuacugugugaaaug

SEQ ID NO: 558730 - RNA, 19 nt, Artificial Sequence
  Description of Artificial Sequence: Synthetic oligonucleotide
  Antisense strand to SEQ ID NO: 558729
cauuucacacaguaggugu

SEQ ID NO: 558731 - RNA, 19 nt, Artificial Sequence
  Description of Artificial Sequence: Synthetic oligonucleotide
  Sense strand starting at position 3512 of SEQ ID NO: 318387
ugauauaccuugccuugca

SEQ ID NO: 558732 - RNA, 19 nt, Artificial Sequence
  Description of Artificial Sequence: Synthetic oligonucleotide
  Antisense strand to SEQ ID NO: 558731
ugcaaggcaagguauauca

SEQ ID NO: 558733 - RNA, 19 nt, Artificial Sequence
  Description of Artificial Sequence: Synthetic oligonucleotide
  Sense strand starting at position 3520 of SEQ ID NO: 318387
cuugccuugcaguagaauu

SEQ ID NO: 558734 - RNA, 19 nt, Artificial Sequence
  Description of Artificial Sequence: Synthetic oligonucleotide
  Antisense strand to SEQ ID NO: 558733
aauucuacugcaaggcaag

SEQ ID NO: 558735 - RNA, 19 nt, Artificial Sequence
  Description of Artificial Sequence: Synthetic oligonucleotide
  Sense strand starting at position 3528 of SEQ ID NO: 318387
gcaguagaauuacuuugau

SEQ ID NO: 558736 - RNA, 19 nt, Artificial Sequence
  Description of Artificial Sequence: Synthetic oligonucleotide
  Antisense strand to SEQ ID NO: 558735
aucaaaguaauucuacugc

SEQ ID NO: 558737 - RNA, 19 nt, Artificial Sequence
  Description of Artificial Sequence: Synthetic oligonucleotide
  Sense strand starting at position 3531 of SEQ ID NO: 318387
guagaauuacuuugaucca

SEQ ID NO: 558738 - RNA, 19 nt, Artificial Sequence
  Description of Artificial Sequence: Synthetic oligonucleotide
  Antisense strand to SEQ ID NO: 558737
uggaucaaaguaauucuac

SEQ ID NO: 558739 - RNA, 19 nt, Artificial Sequence
  Description of Artificial Sequence: Synthetic oligonucleotide
  Sense strand starting at position 3552 of SEQ ID NO: 318387
ccaauaagcugagaugaaa

SEQ ID NO: 558740 - RNA, 19 nt, Artificial Sequence
  Description of Artificial Sequence: Synthetic oligonucleotide
  Antisense strand to SEQ ID NO: 558739
uuucaucucagcuuauugg

SEQ ID NO: 558741 - RNA, 19 nt, Artificial Sequence
  Description of Artificial Sequence: Synthetic oligonucleotide
  Sense strand starting at position 3584 of SEQ ID NO: 318387
cccaguauuuccuuuaggu

SEQ ID NO: 558742 - RNA, 19 nt, Artificial Sequence
  Description of Artificial Sequence: Synthetic oligonucleotide
  Antisense strand to SEQ ID NO: 558741
accuaaaggaaauacuggg

SEQ ID NO: 558743 - RNA, 19 nt, Artificial Sequence
  Description of Artificial Sequence: Synthetic oligonucleotide
  Sense strand starting at position 3598 of SEQ ID NO: 318387
uagguuccgcucugaacaa

SEQ ID NO: 558744 - RNA, 19 nt, Artificial Sequence
  Description of Artificial Sequence: Synthetic oligonucleotide
  Antisense strand to SEQ ID NO: 558743
uuguucagagcggaaccua

SEQ ID NO: 558745 - RNA, 19 nt, Artificial Sequence
  Description of Artificial Sequence: Synthetic oligonucleotide
  Sense strand starting at position 3657 of SEQ ID NO: 318387
ggagauagcuggaaagagu

SEQ ID NO: 558746 - RNA, 19 nt, Artificial Sequence
  Description of Artificial Sequence: Synthetic oligonucleotide
  Antisense strand to SEQ ID NO: 558745
acucuuuccagcuaucucc

SEQ ID NO: 558747 - RNA, 19 nt, Artificial Sequence
  Description of Artificial Sequence: Synthetic oligonucleotide
  Sense strand starting at position 3673 of SEQ ID NO: 318387
agucuuaugcacuauugca

SEQ ID NO: 558748 - RNA, 19 nt, Artificial Sequence
  Description of Artificial Sequence: Synthetic oligonucleotide
  Antisense strand to SEQ ID NO: 558747
ugcaauagugcauaagacu

SEQ ID NO: 558749 - RNA, 19 nt, Artificial Sequence
  Description of Artificial Sequence: Synthetic oligonucleotide
  Sense strand starting at position 3681 of SEQ ID NO: 318387
gcacuauugcagugggauu

SEQ ID NO: 558750 - RNA, 19 nt, Artificial Sequence
  Description of Artificial Sequence: Synthetic oligonucleotide
  Antisense strand to SEQ ID NO: 558749
aaucccacugcaauagugc

SEQ ID NO: 558751 - RNA, 19 nt, Artificial Sequence
  Description of Artificial Sequence: Synthetic oligonucleotide
  Sense strand starting at position 3754 of SEQ ID NO: 318387
agacacagucuuuaguaau

SEQ ID NO: 558752 - RNA, 19 nt, Artificial Sequence
  Description of Artificial Sequence: Synthetic oligonucleotide
  Antisense strand to SEQ ID NO: 558751
auuacuaaagacugugucu

SEQ ID NO: 558753 - RNA, 19 nt, Artificial Sequence
  Description of Artificial Sequence: Synthetic oligonucleotide
  Sense strand starting at position 3820 of SEQ ID NO: 318387
gagugucccaagggaagaa

SEQ ID NO: 558754 - RNA, 19 nt, Artificial Sequence
  Description of Artificial Sequence: Synthetic oligonucleotide
  Antisense strand to SEQ ID NO: 558753
uucuucccuugggacacuc

SEQ ID NO: 558755 - RNA, 19 nt, Artificial Sequence
  Description of Artificial Sequence: Synthetic oligonucleotide
  Sense strand starting at position 103 of SEQ ID NO: 318388
ugcaucuggguuuauagau

SEQ ID NO: 558756 - RNA, 19 nt, Artificial Sequence
  Description of Artificial Sequence: Synthetic oligonucleotide
  Antisense strand to SEQ ID NO: 558755
aucuauaaacccagaugca

SEQ ID NO: 558757 - RNA, 19 nt, Artificial Sequence
  Description of Artificial Sequence: Synthetic oligonucleotide
  Sense strand starting at position 109 of SEQ ID NO: 318388
uggguuuauagauagccca

SEQ ID NO: 558758 - RNA, 19 nt, Artificial Sequence
  Description of Artificial Sequence: Synthetic oligonucleotide
  Antisense strand to SEQ ID NO: 558757
ugggcuaucuauaaaccca

SEQ ID NO: 558759 - RNA, 19 nt, Artificial Sequence
  Description of Artificial Sequence: Synthetic oligonucleotide
  Sense strand starting at position 127 of SEQ ID NO: 318388
agucauuccuugguuuaaa

SEQ ID NO: 558760 - RNA, 19 nt, Artificial Sequence
  Description of Artificial Sequence: Synthetic oligonucleotide
  Antisense strand to SEQ ID NO: 558759
uuuaaaccaaggaaugacu

SEQ ID NO: 558761 - RNA, 19 nt, Artificial Sequence
  Description of Artificial Sequence: Synthetic oligonucleotide
  Sense strand starting at position 192 of SEQ ID NO: 318388
guccuuagauaucucucau

SEQ ID NO: 558762 - RNA, 19 nt, Artificial Sequence
  Description of Artificial Sequence: Synthetic oligonucleotide
  Antisense strand to SEQ ID NO: 558761
augagagauaucuaaggac

SEQ ID NO: 558763 - RNA, 19 nt, Artificial Sequence
  Description of Artificial Sequence: Synthetic oligonucleotide
  Sense strand starting at position 398 of SEQ ID NO: 318388
ucugaauaggaaugcagau

SEQ ID NO: 558764 - RNA, 19 nt, Artificial Sequence
  Description of Artificial Sequence: Synthetic oligonucleotide
  Antisense strand to SEQ ID NO: 558763
aucugcauuccuauucaga

SEQ ID NO: 558765 - RNA, 19 nt, Artificial Sequence
  Description of Artificial Sequence: Synthetic oligonucleotide
  Sense strand starting at position 413 of SEQ ID NO: 318388
agaugccuauuagcagaaa

SEQ ID NO: 558766 - RNA, 19 nt, Artificial Sequence
  Description of Artificial Sequence: Synthetic oligonucleotide
  Antisense strand to SEQ ID NO: 558765
uuucugcuaauaggcaucu

SEQ ID NO: 558767 - RNA, 19 nt, Artificial Sequence
  Description of Artificial Sequence: Synthetic oligonucleotide
  Sense strand starting at position 443 of SEQ ID NO: 318388
auugucugucaacauuauu

SEQ ID NO: 558768 - RNA, 19 nt, Artificial Sequence
  Description of Artificial Sequence: Synthetic oligonucleotide
  Antisense strand to SEQ ID NO: 558767
aauaauguugacagacaau

SEQ ID NO: 558769 - RNA, 19 nt, Artificial Sequence
  Description of Artificial Sequence: Synthetic oligonucleotide
  Sense strand starting at position 446 of SEQ ID NO: 318388
gucugucaacauuauuaau

SEQ ID NO: 558770 - RNA, 19 nt, Artificial Sequence
  Description of Artificial Sequence: Synthetic oligonucleotide
  Antisense strand to SEQ ID NO: 558769
auuaauaauguugacagac

SEQ ID NO: 558771 - RNA, 19 nt, Artificial Sequence
  Description of Artificial Sequence: Synthetic oligonucleotide
  Sense strand starting at position 609 of SEQ ID NO: 318388
acugcuugaacgggaagau

SEQ ID NO: 558772 - RNA, 19 nt, Artificial Sequence
  Description of Artificial Sequence: Synthetic oligonucleotide
  Antisense strand to SEQ ID NO: 558771
aucuucccguucaagcagu

SEQ ID NO: 558773 - RNA, 19 nt, Artificial Sequence
  Description of Artificial Sequence: Synthetic oligonucleotide
  Sense strand starting at position 688 of SEQ ID NO: 318388
ugccucacuccgggacaaa

SEQ ID NO: 558774 - RNA, 19 nt, Artificial Sequence
  Description of Artificial Sequence: Synthetic oligonucleotide
  Antisense strand to SEQ ID NO: 558773
uuugucccggagugaggca

SEQ ID NO: 558775 - RNA, 19 nt, Artificial Sequence
  Description of Artificial Sequence: Synthetic oligonucleotide
  Sense strand starting at position 689 of SEQ ID NO: 318388
gccucacuccgggacaaau

SEQ ID NO: 558776 - RNA, 19 nt, Artificial Sequence
  Description of Artificial Sequence: Synthetic oligonucleotide
  Antisense strand to SEQ ID NO: 558775
auuugucccggagugaggc

SEQ ID NO: 558777 - RNA, 19 nt, Artificial Sequence
  Description of Artificial Sequence: Synthetic oligonucleotide
  Sense strand starting at position 775 of SEQ ID NO: 318388
uccugucacccuuauagga

SEQ ID NO: 558778 - RNA, 19 nt, Artificial Sequence
  Description of Artificial Sequence: Synthetic oligonucleotide
  Antisense strand to SEQ ID NO: 558777
uccuauaagggugacagga

SEQ ID NO: 558779 - RNA, 19 nt, Artificial Sequence
  Description of Artificial Sequence: Synthetic oligonucleotide
  Sense strand starting at position 800 of SEQ ID NO: 318388
uguacauucucauugugaa

SEQ ID NO: 558780 - RNA, 19 nt, Artificial Sequence
  Description of Artificial Sequence: Synthetic oligonucleotide
  Antisense strand to SEQ ID NO: 558779
uucacaaugagaauguaca

SEQ ID NO: 558781 - RNA, 19 nt, Artificial Sequence
  Description of Artificial Sequence: Synthetic oligonucleotide
  Sense strand starting at position 801 of SEQ ID NO: 318388
guacauucucauugugaac

SEQ ID NO: 558782 - RNA, 19 nt, Artificial Sequence
  Description of Artificial Sequence: Synthetic oligonucleotide
  Antisense strand to SEQ ID NO: 558781
guucacaaugagaauguac

SEQ ID NO: 558783 - RNA, 19 nt, Artificial Sequence
  Description of Artificial Sequence: Synthetic oligonucleotide
  Sense strand starting at position 972 of SEQ ID NO: 318388
ccuugagacuuucuguaaa

SEQ ID NO: 558784 - RNA, 19 nt, Artificial Sequence
  Description of Artificial Sequence: Synthetic oligonucleotide
  Antisense strand to SEQ ID NO: 558783
uuuacagaaagucucaagg

SEQ ID NO: 558785 - RNA, 19 nt, Artificial Sequence
  Description of Artificial Sequence: Synthetic oligonucleotide
  Sense strand starting at position 1257 of SEQ ID NO: 318388
gagacaaguucuccgagca

SEQ ID NO: 558786 - RNA, 19 nt, Artificial Sequence
  Description of Artificial Sequence: Synthetic oligonucleotide
  Antisense strand to SEQ ID NO: 558785
ugcucggagaacuugucuc

SEQ ID NO: 558787 - RNA, 19 nt, Artificial Sequence
  Description of Artificial Sequence: Synthetic oligonucleotide
  Sense strand starting at position 1459 of SEQ ID NO: 318388
auuaguaccuucuuacuga

SEQ ID NO: 558788 - RNA, 19 nt, Artificial Sequence
  Description of Artificial Sequence: Synthetic oligonucleotide
  Antisense strand to SEQ ID NO: 558787
ucaguaagaagguacuaau

SEQ ID NO: 558789 - RNA, 19 nt, Artificial Sequence
  Description of Artificial Sequence: Synthetic oligonucleotide
  Sense strand starting at position 2035 of SEQ ID NO: 318388
gcacgucucccuuagauaa

SEQ ID NO: 558790 - RNA, 19 nt, Artificial Sequence
  Description of Artificial Sequence: Synthetic oligonucleotide
  Antisense strand to SEQ ID NO: 558789
uuaucuaagggagacgugc

SEQ ID NO: 558791 - RNA, 19 nt, Artificial Sequence
  Description of Artificial Sequence: Synthetic oligonucleotide
  Sense strand starting at position 2541 of SEQ ID NO: 318388
gcauccucggacgaauauu

SEQ ID NO: 558792 - RNA, 19 nt, Artificial Sequence
  Description of Artificial Sequence: Synthetic oligonucleotide
  Antisense strand to SEQ ID NO: 558791
aauauucguccgaggaugc

SEQ ID NO: 558793 - RNA, 19 nt, Artificial Sequence
  Description of Artificial Sequence: Synthetic oligonucleotide
  Sense strand starting at position 2640 of SEQ ID NO: 318388
ggucgauugcaacucgcau

SEQ ID NO: 558794 - RNA, 19 nt, Artificial Sequence
  Description of Artificial Sequence: Synthetic oligonucleotide
  Antisense strand to SEQ ID NO: 558793
augcgaguugcaaucgacc

SEQ ID NO: 558795 - RNA, 19 nt, Artificial Sequence
  Description of Artificial Sequence: Synthetic oligonucleotide
  Sense strand starting at position 2641 of SEQ ID NO: 318388
gucgauugcaacucgcauu

SEQ ID NO: 558796 - RNA, 19 nt, Artificial Sequence
  Description of Artificial Sequence: Synthetic oligonucleotide
  Antisense strand to SEQ ID NO: 558795
aaugcgaguugcaaucgac

SEQ ID NO: 558797 - RNA, 19 nt, Artificial Sequence
  Description of Artificial Sequence: Synthetic oligonucleotide
  Sense strand starting at position 2771 of SEQ ID NO: 318388
guuugcccuuuauuugaga

SEQ ID NO: 558798 - RNA, 19 nt, Artificial Sequence
  Description of Artificial Sequence: Synthetic oligonucleotide
  Antisense strand to SEQ ID NO: 558797
ucucaaauaaagggcaaac

SEQ ID NO: 558799 - RNA, 19 nt, Artificial Sequence
  Description of Artificial Sequence: Synthetic oligonucleotide
  Sense strand starting at position 2776 of SEQ ID NO: 318388
cccuuuauuugagaaagug

SEQ ID NO: 558800 - RNA, 19 nt, Artificial Sequence
  Description of Artificial Sequence: Synthetic oligonucleotide
  Antisense strand to SEQ ID NO: 558799
cacuuucucaaauaaaggg

SEQ ID NO: 558801 - RNA, 19 nt, Artificial Sequence
  Description of Artificial Sequence: Synthetic oligonucleotide
  Sense strand starting at position 2860 of SEQ ID NO: 318388
guugcaugagcauagauag

SEQ ID NO: 558802 - RNA, 19 nt, Artificial Sequence
  Description of Artificial Sequence: Synthetic oligonucleotide
  Antisense strand to SEQ ID NO: 558801
cuaucuaugcucaugcaac

SEQ ID NO: 558803 - RNA, 19 nt, Artificial Sequence
  Description of Artificial Sequence: Synthetic oligonucleotide
  Sense strand starting at position 2867 of SEQ ID NO: 318388
gagcauagauagcuuuaag

SEQ ID NO: 558804 - RNA, 19 nt, Artificial Sequence
  Description of Artificial Sequence: Synthetic oligonucleotide
  Antisense strand to SEQ ID NO: 558803
cuuaaagcuaucuaugcuc

SEQ ID NO: 558805 - RNA, 19 nt, Artificial Sequence
  Description of Artificial Sequence: Synthetic oligonucleotide
  Sense strand starting at position 2870 of SEQ ID NO: 318388
cauagauagcuuuaagguu

SEQ ID NO: 558806 - RNA, 19 nt, Artificial Sequence
  Description of Artificial Sequence: Synthetic oligonucleotide
  Antisense strand to SEQ ID NO: 558805
aaccuuaaagcuaucuaug

SEQ ID NO: 558807 - RNA, 19 nt, Artificial Sequence
  Description of Artificial Sequence: Synthetic oligonucleotide
  Sense strand starting at position 2990 of SEQ ID NO: 318388
ggugaagugguuuacagaa

SEQ ID NO: 558808 - RNA, 19 nt, Artificial Sequence
  Description of Artificial Sequence: Synthetic oligonucleotide
  Antisense strand to SEQ ID NO: 558807
uucuguaaaccacuucacc

SEQ ID NO: 558809 - RNA, 19 nt, Artificial Sequence
  Description of Artificial Sequence: Synthetic oligonucleotide
  Sense strand starting at position 3089 of SEQ ID NO: 318388
cccuuugcuagagaacgua

SEQ ID NO: 558810 - RNA, 19 nt, Artificial Sequence
  Description of Artificial Sequence: Synthetic oligonucleotide
  Antisense strand to SEQ ID NO: 558809
uacguucucuagcaaaggg

SEQ ID NO: 558811 - RNA, 19 nt, Artificial Sequence
  Description of Artificial Sequence: Synthetic oligonucleotide
  Sense strand starting at position 3270 of SEQ ID NO: 318388
ucauacucugcaugggaaa

SEQ ID NO: 558812 - RNA, 19 nt, Artificial Sequence
  Description of Artificial Sequence: Synthetic oligonucleotide
  Antisense strand to SEQ ID NO: 558811
uuucccaugcagaguauga

SEQ ID NO: 558813 - RNA, 19 nt, Artificial Sequence
  Description of Artificial Sequence: Synthetic oligonucleotide
  Sense strand starting at position 3283 of SEQ ID NO: 318388
gggaaagugauccaguggu

SEQ ID NO: 558814 - RNA, 19 nt, Artificial Sequence
  Description of Artificial Sequence: Synthetic oligonucleotide
  Antisense strand to SEQ ID NO: 558813
accacuggaucacuuuccc

SEQ ID NO: 558815 - RNA, 19 nt, Artificial Sequence
  Description of Artificial Sequence: Synthetic oligonucleotide
  Sense strand starting at position 3290 of SEQ ID NO: 318388
ugauccaguggucacauaa

SEQ ID NO: 558816 - RNA, 19 nt, Artificial Sequence
  Description of Artificial Sequence: Synthetic oligonucleotide
  Antisense strand to SEQ ID NO: 558815
uuaugugaccacuggauca

SEQ ID NO: 558817 - RNA, 19 nt, Artificial Sequence
  Description of Artificial Sequence: Synthetic oligonucleotide
  Sense strand starting at position 3487 of SEQ ID NO: 318388
gggacauaugguuaguuca

SEQ ID NO: 558818 - RNA, 19 nt, Artificial Sequence
  Description of Artificial Sequence: Synthetic oligonucleotide
  Antisense strand to SEQ ID NO: 558817
ugaacuaaccauauguccc

SEQ ID NO: 558819 - RNA, 19 nt, Artificial Sequence
  Description of Artificial Sequence: Synthetic oligonucleotide
  Sense strand starting at position 3521 of SEQ ID NO: 318388
uccugagcugcauaaucuu

SEQ ID NO: 558820 - RNA, 19 nt, Artificial Sequence
  Description of Artificial Sequence: Synthetic oligonucleotide
  Antisense strand to SEQ ID NO: 558819
aagauuaugcagcucagga

SEQ ID NO: 558821 - RNA, 19 nt, Artificial Sequence
  Description of Artificial Sequence: Synthetic oligonucleotide
  Sense strand starting at position 3598 of SEQ ID NO: 318388
aagcauaccugucuggauu

SEQ ID NO: 558822 - RNA, 19 nt, Artificial Sequence
  Description of Artificial Sequence: Synthetic oligonucleotide
  Antisense strand to SEQ ID NO: 558821
aauccagacagguaugcuu

SEQ ID NO: 558823 - RNA, 19 nt, Artificial Sequence
  Description of Artificial Sequence: Synthetic oligonucleotide
  Sense strand starting at position 3660 of SEQ ID NO: 318388
uguuaaguccaccaguaua

SEQ ID NO: 558824 - RNA, 19 nt, Artificial Sequence
  Description of Artificial Sequence: Synthetic oligonucleotide
  Antisense strand to SEQ ID NO: 558823
uauacugguggacuuaaca

SEQ ID NO: 558825 - RNA, 19 nt, Artificial Sequence
  Description of Artificial Sequence: Synthetic oligonucleotide
  Sense strand starting at position 3872 of SEQ ID NO: 318388
agugaucugcaagacacau

SEQ ID NO: 558826 - RNA, 19 nt, Artificial Sequence
  Description of Artificial Sequence: Synthetic oligonucleotide
  Antisense strand to SEQ ID NO: 558825
augugucuugcagaucacu

SEQ ID NO: 558827 - RNA, 19 nt, Artificial Sequence
  Description of Artificial Sequence: Synthetic oligonucleotide
  Sense strand starting at position 3883 of SEQ ID NO: 318388
agacacauguucuuuauua

SEQ ID NO: 558828 - RNA, 19 nt, Artificial Sequence
  Description of Artificial Sequence: Synthetic oligonucleotide
  Antisense strand to SEQ ID NO: 558827
uaauaaagaacaugugucu

SEQ ID NO: 558829 - RNA, 19 nt, Artificial Sequence
  Description of Artificial Sequence: Synthetic oligonucleotide
  Sense strand starting at position 3940 of SEQ ID NO: 318388
aguaauuccugcuuuggga

SEQ ID NO: 558830 - RNA, 19 nt, Artificial Sequence
  Description of Artificial Sequence: Synthetic oligonucleotide
  Antisense strand to SEQ ID NO: 558829
ucccaaagcaggaauuacu

SEQ ID NO: 558831 - RNA, 19 nt, Artificial Sequence
  Description of Artificial Sequence: Synthetic oligonucleotide
  Sense strand starting at position 3942 of SEQ ID NO: 318388
uaauuccugcuuugggaga

SEQ ID NO: 558832 - RNA, 19 nt, Artificial Sequence
  Description of Artificial Sequence: Synthetic oligonucleotide
  Antisense strand to SEQ ID NO: 558831
ucucccaaagcaggaauua

SEQ ID NO: 558833 - RNA, 19 nt, Artificial Sequence
  Description of Artificial Sequence: Synthetic oligonucleotide
  Sense strand starting at position 3977 of SEQ ID NO: 318388
guauauuucguauguccaa

SEQ ID NO: 558834 - RNA, 19 nt, Artificial Sequence
  Description of Artificial Sequence: Synthetic oligonucleotide
  Antisense strand to SEQ ID NO: 558833
uuggacauacgaaauauac

SEQ ID NO: 558835 - RNA, 19 nt, Artificial Sequence
  Description of Artificial Sequence: Synthetic oligonucleotide
  Sense strand starting at position 1 of SEQ ID NO: 318389
cagaaagcuccguacaaac

SEQ ID NO: 558836 - RNA, 19 nt, Artificial Sequence
  Description of Artificial Sequence: Synthetic oligonucleotide
  Antisense strand to SEQ ID NO: 558835
guuuguacggagcuuucug

SEQ ID NO: 558837 - RNA, 19 nt, Artificial Sequence
  Description of Artificial Sequence: Synthetic oligonucleotide
  Sense strand starting at position 104 of SEQ ID NO: 318389
uguaccguuguagauagau

SEQ ID NO: 558838 - RNA, 19 nt, Artificial Sequence
  Description of Artificial Sequence: Synthetic oligonucleotide
  Antisense strand to SEQ ID NO: 558837
aucuaucuacaacgguaca

SEQ ID NO: 558839 - RNA, 19 nt, Artificial Sequence
  Description of Artificial Sequence: Synthetic oligonucleotide
  Sense strand starting at position 143 of SEQ ID NO: 318389
ggcccuuguagagauaauu

SEQ ID NO: 558840 - RNA, 19 nt, Artificial Sequence
  Description of Artificial Sequence: Synthetic oligonucleotide
  Antisense strand to SEQ ID NO: 558839
aauuaucucuacaagggcc

SEQ ID NO: 558841 - RNA, 19 nt, Artificial Sequence
  Description of Artificial Sequence: Synthetic oligonucleotide
  Sense strand starting at position 289 of SEQ ID NO: 318389
agaauaauguugcauguag

SEQ ID NO: 558842 - RNA, 19 nt, Artificial Sequence
  Description of Artificial Sequence: Synthetic oligonucleotide
  Antisense strand to SEQ ID NO: 558841
cuacaugcaacauuauucu

SEQ ID NO: 558843 - RNA, 19 nt, Artificial Sequence
  Description of Artificial Sequence: Synthetic oligonucleotide
  Sense strand starting at position 291 of SEQ ID NO: 318389
aauaauguugcauguagau

SEQ ID NO: 558844 - RNA, 19 nt, Artificial Sequence
  Description of Artificial Sequence: Synthetic oligonucleotide
  Antisense strand to SEQ ID NO: 558843
aucuacaugcaacauuauu

SEQ ID NO: 558845 - RNA, 19 nt, Artificial Sequence
  Description of Artificial Sequence: Synthetic oligonucleotide
  Sense strand starting at position 326 of SEQ ID NO: 318389
cuacacuucguacguuaau

SEQ ID NO: 558846 - RNA, 19 nt, Artificial Sequence
  Description of Artificial Sequence: Synthetic oligonucleotide
  Antisense strand to SEQ ID NO: 558845
auuaacguacgaaguguag

SEQ ID NO: 558847 - RNA, 19 nt, Artificial Sequence
  Description of Artificial Sequence: Synthetic oligonucleotide
  Sense strand starting at position 327 of SEQ ID NO: 318389
uacacuucguacguuaauu

SEQ ID NO: 558848 - RNA, 19 nt, Artificial Sequence
  Description of Artificial Sequence: Synthetic oligonucleotide
  Antisense strand to SEQ ID NO: 558847
aauuaacguacgaagugua

SEQ ID NO: 558849 - RNA, 19 nt, Artificial Sequence
  Description of Artificial Sequence: Synthetic oligonucleotide
  Sense strand starting at position 418 of SEQ ID NO: 318389
uuauauaucucucuagguu

SEQ ID NO: 558850 - RNA, 19 nt, Artificial Sequence
  Description of Artificial Sequence: Synthetic oligonucleotide
  Antisense strand to SEQ ID NO: 558849
aaccuagagagauauauaa

SEQ ID NO: 558851 - RNA, 19 nt, Artificial Sequence
  Description of Artificial Sequence: Synthetic oligonucleotide
  Sense strand starting at position 486 of SEQ ID NO: 318389
aguagaguucagcguugau

SEQ ID NO: 558852 - RNA, 19 nt, Artificial Sequence
  Description of Artificial Sequence: Synthetic oligonucleotide
  Antisense strand to SEQ ID NO: 558851
aucaacgcugaacucuacu

SEQ ID NO: 558853 - RNA, 19 nt, Artificial Sequence
  Description of Artificial Sequence: Synthetic oligonucleotide
  Sense strand starting at position 489 of SEQ ID NO: 318389
agaguucagcguugauuau

SEQ ID NO: 558854 - RNA, 19 nt, Artificial Sequence
  Description of Artificial Sequence: Synthetic oligonucleotide
  Antisense strand to SEQ ID NO: 558853
auaaucaacgcugaacucu

SEQ ID NO: 558855 - RNA, 19 nt, Artificial Sequence
  Description of Artificial Sequence: Synthetic oligonucleotide
  Sense strand starting at position 490 of SEQ ID NO: 318389
gaguucagcguugauuaug

SEQ ID NO: 558856 - RNA, 19 nt, Artificial Sequence
  Description of Artificial Sequence: Synthetic oligonucleotide
  Antisense strand to SEQ ID NO: 558855
cauaaucaacgcugaacuc

SEQ ID NO: 558857 - RNA, 19 nt, Artificial Sequence
  Description of Artificial Sequence: Synthetic oligonucleotide
  Sense strand starting at position 600 of SEQ ID NO: 318389
guauuaagaaaugaacgca

SEQ ID NO: 558858 - RNA, 19 nt, Artificial Sequence
  Description of Artificial Sequence: Synthetic oligonucleotide
  Antisense strand to SEQ ID NO: 558857
ugcguucauuucuuaauac

SEQ ID NO: 558859 - RNA, 19 nt, Artificial Sequence
  Description of Artificial Sequence: Synthetic oligonucleotide
  Sense strand starting at position 603 of SEQ ID NO: 318389
uuaagaaaugaacgcagaa

SEQ ID NO: 558860 - RNA, 19 nt, Artificial Sequence
  Description of Artificial Sequence: Synthetic oligonucleotide
  Antisense strand to SEQ ID NO: 558859
uucugcguucauuucuuaa

SEQ ID NO: 558861 - RNA, 19 nt, Artificial Sequence
  Description of Artificial Sequence: Synthetic oligonucleotide
  Sense strand starting at position 1306 of SEQ ID NO: 318389
aagaaagcuccugacgcuu

SEQ ID NO: 558862 - RNA, 19 nt, Artificial Sequence
  Description of Artificial Sequence: Synthetic oligonucleotide
  Antisense strand to SEQ ID NO: 558861
aagcgucaggagcuuucuu

SEQ ID NO: 558863 - RNA, 19 nt, Artificial Sequence
  Description of Artificial Sequence: Synthetic oligonucleotide
  Sense strand starting at position 1439 of SEQ ID NO: 318389
cuggcagcuccgugucaga

SEQ ID NO: 558864 - RNA, 19 nt, Artificial Sequence
  Description of Artificial Sequence: Synthetic oligonucleotide
  Antisense strand to SEQ ID NO: 558863
ucugacacggagcugccag

SEQ ID NO: 558865 - RNA, 19 nt, Artificial Sequence
  Description of Artificial Sequence: Synthetic oligonucleotide
  Sense strand starting at position 1937 of SEQ ID NO: 318389
gccggcagagucugucuua

SEQ ID NO: 558866 - RNA, 19 nt, Artificial Sequence
  Description of Artificial Sequence: Synthetic oligonucleotide
  Antisense strand to SEQ ID NO: 558865
uaagacagacucugccggc

SEQ ID NO: 558867 - RNA, 19 nt, Artificial Sequence
  Description of Artificial Sequence: Synthetic oligonucleotide
  Sense strand starting at position 1938 of SEQ ID NO: 318389
ccggcagagucugucuuaa

SEQ ID NO: 558868 - RNA, 19 nt, Artificial Sequence
  Description of Artificial Sequence: Synthetic oligonucleotide
  Antisense strand to SEQ ID NO: 558867
uuaagacagacucugccgg

SEQ ID NO: 558869 - RNA, 19 nt, Artificial Sequence
  Description of Artificial Sequence: Synthetic oligonucleotide
  Sense strand starting at position 1940 of SEQ ID NO: 318389
ggcagagucugucuuaaag

SEQ ID NO: 558870 - RNA, 19 nt, Artificial Sequence
  Description of Artificial Sequence: Synthetic oligonucleotide
  Antisense strand to SEQ ID NO: 558869
cuuuaagacagacucugcc

SEQ ID NO: 558871 - RNA, 19 nt, Artificial Sequence
  Description of Artificial Sequence: Synthetic oligonucleotide
  Sense strand starting at position 2307 of SEQ ID NO: 318389
augacuuguuucgccuaga

SEQ ID NO: 558872 - RNA, 19 nt, Artificial Sequence
  Description of Artificial Sequence: Synthetic oligonucleotide
  Antisense strand to SEQ ID NO: 558871
ucuaggcgaaacaagucau

SEQ ID NO: 558873 - RNA, 19 nt, Artificial Sequence
  Description of Artificial Sequence: Synthetic oligonucleotide
  Sense strand starting at position 2308 of SEQ ID NO: 318389
ugacuuguuucgccuagaa

SEQ ID NO: 558874 - RNA, 19 nt, Artificial Sequence
  Description of Artificial Sequence: Synthetic oligonucleotide
  Antisense strand to SEQ ID NO: 558873
uucuaggcgaaacaaguca

SEQ ID NO: 558875 - RNA, 19 nt, Artificial Sequence
  Description of Artificial Sequence: Synthetic oligonucleotide
  Sense strand starting at position 2310 of SEQ ID NO: 318389
acuuguuucgccuagaauc

SEQ ID NO: 558876 - RNA, 19 nt, Artificial Sequence
  Description of Artificial Sequence: Synthetic oligonucleotide
  Antisense strand to SEQ ID NO: 558875
gauucuaggcgaaacaagu

SEQ ID NO: 558877 - RNA, 19 nt, Artificial Sequence
  Description of Artificial Sequence: Synthetic oligonucleotide
  Sense strand starting at position 2312 of SEQ ID NO: 318389
uuguuucgccuagaaucaa

SEQ ID NO: 558878 - RNA, 19 nt, Artificial Sequence
  Description of Artificial Sequence: Synthetic oligonucleotide
  Antisense strand to SEQ ID NO: 558877
uugauucuaggcgaaacaa

SEQ ID NO: 558879 - RNA, 19 nt, Artificial Sequence
  Description of Artificial Sequence: Synthetic oligonucleotide
  Sense strand starting at position 2384 of SEQ ID NO: 318389
gagugaauguuugccgaac

SEQ ID NO: 558880 - RNA, 19 nt, Artificial Sequence
  Description of Artificial Sequence: Synthetic oligonucleotide
  Antisense strand to SEQ ID NO: 558879
guucggcaaacauucacuc

SEQ ID NO: 558881 - RNA, 19 nt, Artificial Sequence
  Description of Artificial Sequence: Synthetic oligonucleotide
  Sense strand starting at position 2385 of SEQ ID NO: 318389
agugaauguuugccgaaca

SEQ ID NO: 558882 - RNA, 19 nt, Artificial Sequence
  Description of Artificial Sequence: Synthetic oligonucleotide
  Antisense strand to SEQ ID NO: 558881
uguucggcaaacauucacu

SEQ ID NO: 558883 - RNA, 19 nt, Artificial Sequence
  Description of Artificial Sequence: Synthetic oligonucleotide
  Sense strand starting at position 2521 of SEQ ID NO: 318389
gccucuucucccgggaacu

SEQ ID NO: 558884 - RNA, 19 nt, Artificial Sequence
  Description of Artificial Sequence: Synthetic oligonucleotide
  Antisense strand to SEQ ID NO: 558883
aguucccgggagaagaggc

SEQ ID NO: 558885 - RNA, 19 nt, Artificial Sequence
  Description of Artificial Sequence: Synthetic oligonucleotide
  Sense strand starting at position 2674 of SEQ ID NO: 318389
gauagaaaugauggcuucu

SEQ ID NO: 558886 - RNA, 19 nt, Artificial Sequence
  Description of Artificial Sequence: Synthetic oligonucleotide
  Antisense strand to SEQ ID NO: 558885
agaagccaucauuucuauc

SEQ ID NO: 558887 - RNA, 19 nt, Artificial Sequence
  Description of Artificial Sequence: Synthetic oligonucleotide
  Sense strand starting at position 2686 of SEQ ID NO: 318389
ggcuucuaaucagacgaaa

SEQ ID NO: 558888 - RNA, 19 nt, Artificial Sequence
  Description of Artificial Sequence: Synthetic oligonucleotide
  Antisense strand to SEQ ID NO: 558887
uuucgucugauuagaagcc

SEQ ID NO: 558889 - RNA, 19 nt, Artificial Sequence
  Description of Artificial Sequence: Synthetic oligonucleotide
  Sense strand starting at position 2716 of SEQ ID NO: 318389
gcucuaggcguuuggagaa

SEQ ID NO: 558890 - RNA, 19 nt, Artificial Sequence
  Description of Artificial Sequence: Synthetic oligonucleotide
  Antisense strand to SEQ ID NO: 558889
uucuccaaacgccuagagc

SEQ ID NO: 558891 - RNA, 19 nt, Artificial Sequence
  Description of Artificial Sequence: Synthetic oligonucleotide
  Sense strand starting at position 2723 of SEQ ID NO: 318389
gcguuuggagaaugcagaa

SEQ ID NO: 558892 - RNA, 19 nt, Artificial Sequence
  Description of Artificial Sequence: Synthetic oligonucleotide
  Antisense strand to SEQ ID NO: 558891
uucugcauucuccaaacgc

SEQ ID NO: 558893 - RNA, 19 nt, Artificial Sequence
  Description of Artificial Sequence: Synthetic oligonucleotide
  Sense strand starting at position 2987 of SEQ ID NO: 318389
ccaggaagcccucagucuu

SEQ ID NO: 558894 - RNA, 19 nt, Artificial Sequence
  Description of Artificial Sequence: Synthetic oligonucleotide
  Antisense strand to SEQ ID NO: 558893
aagacugagggcuuccugg

SEQ ID NO: 558895 - RNA, 19 nt, Artificial Sequence
  Description of Artificial Sequence: Synthetic oligonucleotide
  Sense strand starting at position 3108 of SEQ ID NO: 318389
ccucgaguccuugcacgua

SEQ ID NO: 558896 - RNA, 19 nt, Artificial Sequence
  Description of Artificial Sequence: Synthetic oligonucleotide
  Antisense strand to SEQ ID NO: 558895
uacgugcaaggacucgagg

SEQ ID NO: 558897 - RNA, 19 nt, Artificial Sequence
  Description of Artificial Sequence: Synthetic oligonucleotide
  Sense strand starting at position 3124 of SEQ ID NO: 318389
guaggugaaguuugucgaa

SEQ ID NO: 558898 - RNA, 19 nt, Artificial Sequence
  Description of Artificial Sequence: Synthetic oligonucleotide
  Antisense strand to SEQ ID NO: 558897
uucgacaaacuucaccuac

SEQ ID NO: 558899 - RNA, 19 nt, Artificial Sequence
  Description of Artificial Sequence: Synthetic oligonucleotide
  Sense strand starting at position 3326 of SEQ ID NO: 318389
aggauugucugccugggaa

SEQ ID NO: 558900 - RNA, 19 nt, Artificial Sequence
  Description of Artificial Sequence: Synthetic oligonucleotide
  Antisense strand to SEQ ID NO: 558899
uucccaggcagacaauccu

SEQ ID NO: 558901 - RNA, 19 nt, Artificial Sequence
  Description of Artificial Sequence: Synthetic oligonucleotide
  Sense strand starting at position 3328 of SEQ ID NO: 318389
gauugucugccugggaaag

SEQ ID NO: 558902 - RNA, 19 nt, Artificial Sequence
  Description of Artificial Sequence: Synthetic oligonucleotide
  Antisense strand to SEQ ID NO: 558901
cuuucccaggcagacaauc

SEQ ID NO: 558903 - RNA, 19 nt, Artificial Sequence
  Description of Artificial Sequence: Synthetic oligonucleotide
  Sense strand starting at position 3329 of SEQ ID NO: 318389
auugucugccugggaaaga

SEQ ID NO: 558904 - RNA, 19 nt, Artificial Sequence
  Description of Artificial Sequence: Synthetic oligonucleotide
  Antisense strand to SEQ ID NO: 558903
ucuuucccaggcagacaau

SEQ ID NO: 558905 - RNA, 19 nt, Artificial Sequence
  Description of Artificial Sequence: Synthetic oligonucleotide
  Sense strand starting at position 3330 of SEQ ID NO: 318389
uugucugccugggaaagaa

SEQ ID NO: 558906 - RNA, 19 nt, Artificial Sequence
  Description of Artificial Sequence: Synthetic oligonucleotide
  Antisense strand to SEQ ID NO: 558905
uucuuucccaggcagacaa

SEQ ID NO: 558907 - RNA, 19 nt, Artificial Sequence
  Description of Artificial Sequence: Synthetic oligonucleotide
  Sense strand starting at position 3457 of SEQ ID NO: 318389
gccuuugaguccucgucuu

SEQ ID NO: 558908 - RNA, 19 nt, Artificial Sequence
  Description of Artificial Sequence: Synthetic oligonucleotide
  Antisense strand to SEQ ID NO: 558907
aagacgaggacucaaaggc

SEQ ID NO: 558909 - RNA, 19 nt, Artificial Sequence
  Description of Artificial Sequence: Synthetic oligonucleotide
  Sense strand starting at position 3934 of SEQ ID NO: 318389
acgagucuccugcaguaga

SEQ ID NO: 558910 - RNA, 19 nt, Artificial Sequence
  Description of Artificial Sequence: Synthetic oligonucleotide
  Antisense strand to SEQ ID NO: 558909
ucuacugcaggagacucgu

SEQ ID NO: 558911 - RNA, 19 nt, Artificial Sequence
  Description of Artificial Sequence: Synthetic oligonucleotide
  Sense strand starting at position 3947 of SEQ ID NO: 318389
aguagaagaucccuccuuu

SEQ ID NO: 558912 - RNA, 19 nt, Artificial Sequence
  Description of Artificial Sequence: Synthetic oligonucleotide
  Antisense strand to SEQ ID NO: 558911
aaaggagggaucuucuacu

SEQ ID NO: 558913 - RNA, 19 nt, Artificial Sequence
  Description of Artificial Sequence: Synthetic oligonucleotide
  Sense strand starting at position 3968 of SEQ ID NO: 318389
aggagauauucagguguug

SEQ ID NO: 558914 - RNA, 19 nt, Artificial Sequence
  Description of Artificial Sequence: Synthetic oligonucleotide
  Antisense strand to SEQ ID NO: 558913
caacaccugaauaucuccu

SEQ ID NO: 558915 - RNA, 19 nt, Artificial Sequence
  Description of Artificial Sequence: Synthetic oligonucleotide
  Sense strand starting at position 3 of SEQ ID NO: 318390
gucuaaaguuuaccuagaa

SEQ ID NO: 558916 - RNA, 19 nt, Artificial Sequence
  Description of Artificial Sequence: Synthetic oligonucleotide
  Antisense strand to SEQ ID NO: 558915
uucuagguaaacuuuagac

SEQ ID NO: 558917 - RNA, 19 nt, Artificial Sequence
  Description of Artificial Sequence: Synthetic oligonucleotide
  Sense strand starting at position 4 of SEQ ID NO: 318390
ucuaaaguuuaccuagaag

SEQ ID NO: 558918 - RNA, 19 nt, Artificial Sequence
  Description of Artificial Sequence: Synthetic oligonucleotide
  Antisense strand to SEQ ID NO: 558917
cuucuagguaaacuuuaga

SEQ ID NO: 558919 - RNA, 19 nt, Artificial Sequence
  Description of Artificial Sequence: Synthetic oligonucleotide
  Sense strand starting at position 301 of SEQ ID NO: 318390
guaauuaaacaucgaucaa

SEQ ID NO: 558920 - RNA, 19 nt, Artificial Sequence
  Description of Artificial Sequence: Synthetic oligonucleotide
  Antisense strand to SEQ ID NO: 558919
uugaucgauguuuaauuac

SEQ ID NO: 558921 - RNA, 19 nt, Artificial Sequence
  Description of Artificial Sequence: Synthetic oligonucleotide
  Sense strand starting at position 432 of SEQ ID NO: 318390
cgagauaccaguuagccuu

SEQ ID NO: 558922 - RNA, 19 nt, Artificial Sequence
  Description of Artificial Sequence: Synthetic oligonucleotide
  Antisense strand to SEQ ID NO: 558921
aaggcuaacugguaucucg

SEQ ID NO: 558923 - RNA, 19 nt, Artificial Sequence
  Description of Artificial Sequence: Synthetic oligonucleotide
  Sense strand starting at position 491 of SEQ ID NO: 318390
uguccaacauauguaauua

SEQ ID NO: 558924 - RNA, 19 nt, Artificial Sequence
  Description of Artificial Sequence: Synthetic oligonucleotide
  Antisense strand to SEQ ID NO: 558923
uaauuacauauguuggaca

SEQ ID NO: 558925 - RNA, 19 nt, Artificial Sequence
  Description of Artificial Sequence: Synthetic oligonucleotide
  Sense strand starting at position 531 of SEQ ID NO: 318390
caaacauguuugguauaug

SEQ ID NO: 558926 - RNA, 19 nt, Artificial Sequence
  Description of Artificial Sequence: Synthetic oligonucleotide
  Antisense strand to SEQ ID NO: 558925
cauauaccaaacauguuug

SEQ ID NO: 558927 - RNA, 19 nt, Artificial Sequence
  Description of Artificial Sequence: Synthetic oligonucleotide
  Sense strand starting at position 534 of SEQ ID NO: 318390
acauguuugguauauggua

SEQ ID NO: 558928 - RNA, 19 nt, Artificial Sequence
  Description of Artificial Sequence: Synthetic oligonucleotide
  Antisense strand to SEQ ID NO: 558927
uaccauauaccaaacaugu

SEQ ID NO: 558929 - RNA, 19 nt, Artificial Sequence
  Description of Artificial Sequence: Synthetic oligonucleotide
  Sense strand starting at position 592 of SEQ ID NO: 318390
ugugucuagaagugcauuu

SEQ ID NO: 558930 - RNA, 19 nt, Artificial Sequence
  Description of Artificial Sequence: Synthetic oligonucleotide
  Antisense strand to SEQ ID NO: 558929
aaaugcacuucuagacaca

SEQ ID NO: 558931 - RNA, 19 nt, Artificial Sequence
  Description of Artificial Sequence: Synthetic oligonucleotide
  Sense strand starting at position 693 of SEQ ID NO: 318390
accuaacaguccguuauuu

SEQ ID NO: 558932 - RNA, 19 nt, Artificial Sequence
  Description of Artificial Sequence: Synthetic oligonucleotide
  Antisense strand to SEQ ID NO: 558931
aaauaacggacuguuaggu

SEQ ID NO: 558933 - RNA, 19 nt, Artificial Sequence
  Description of Artificial Sequence: Synthetic oligonucleotide
  Sense strand starting at position 698 of SEQ ID NO: 318390
acaguccguuauuuauauu

SEQ ID NO: 558934 - RNA, 19 nt, Artificial Sequence
  Description of Artificial Sequence: Synthetic oligonucleotide
  Antisense strand to SEQ ID NO: 558933
aauauaaauaacggacugu

SEQ ID NO: 558935 - RNA, 19 nt, Artificial Sequence
  Description of Artificial Sequence: Synthetic oligonucleotide
  Sense strand starting at position 716 of SEQ ID NO: 318390
uguugaaguguacaucaaa

SEQ ID NO: 558936 - RNA, 19 nt, Artificial Sequence
  Description of Artificial Sequence: Synthetic oligonucleotide
  Antisense strand to SEQ ID NO: 558935
uuugauguacacuucaaca

SEQ ID NO: 558937 - RNA, 19 nt, Artificial Sequence
  Description of Artificial Sequence: Synthetic oligonucleotide
  Sense strand starting at position 719 of SEQ ID NO: 318390
ugaaguguacaucaaacuu

SEQ ID NO: 558938 - RNA, 19 nt, Artificial Sequence
  Description of Artificial Sequence: Synthetic oligonucleotide
  Antisense strand to SEQ ID NO: 558937
aaguuugauguacacuuca

SEQ ID NO: 558939 - RNA, 19 nt, Artificial Sequence
  Description of Artificial Sequence: Synthetic oligonucleotide
  Sense strand starting at position 738 of SEQ ID NO: 318390
gcaugucugcaaugaauuu

SEQ ID NO: 558940 - RNA, 19 nt, Artificial Sequence
  Description of Artificial Sequence: Synthetic oligonucleotide
  Antisense strand to SEQ ID NO: 558939
aaauucauugcagacaugc

SEQ ID NO: 558941 - RNA, 19 nt, Artificial Sequence
  Description of Artificial Sequence: Synthetic oligonucleotide
  Sense strand starting at position 952 of SEQ ID NO: 318390
auacauuaagccugcaaug

SEQ ID NO: 558942 - RNA, 19 nt, Artificial Sequence
  Description of Artificial Sequence: Synthetic oligonucleotide
  Antisense strand to SEQ ID NO: 558941
cauugcaggcuuaauguau

SEQ ID NO: 558943 - RNA, 19 nt, Artificial Sequence
  Description of Artificial Sequence: Synthetic oligonucleotide
  Sense strand starting at position 954 of SEQ ID NO: 318390
acauuaagccugcaaugaa

SEQ ID NO: 558944 - RNA, 19 nt, Artificial Sequence
  Description of Artificial Sequence: Synthetic oligonucleotide
  Antisense strand to SEQ ID NO: 558943
uucauugcaggcuuaaugu

SEQ ID NO: 558945 - RNA, 19 nt, Artificial Sequence
  Description of Artificial Sequence: Synthetic oligonucleotide
  Sense strand starting at position 1166 of SEQ ID NO: 318390
uuaccagucaucugaggga

SEQ ID NO: 558946 - RNA, 19 nt, Artificial Sequence
  Description of Artificial Sequence: Synthetic oligonucleotide
  Antisense strand to SEQ ID NO: 558945
ucccucagaugacugguaa

SEQ ID NO: 558947 - RNA, 19 nt, Artificial Sequence
  Description of Artificial Sequence: Synthetic oligonucleotide
  Sense strand starting at position 1260 of SEQ ID NO: 318390
ugcugaucccgggaguaga

SEQ ID NO: 558948 - RNA, 19 nt, Artificial Sequence
  Description of Artificial Sequence: Synthetic oligonucleotide
  Antisense strand to SEQ ID NO: 558947
ucuacucccgggaucagca

SEQ ID NO: 558949 - RNA, 19 nt, Artificial Sequence
  Description of Artificial Sequence: Synthetic oligonucleotide
  Sense strand starting at position 2399 of SEQ ID NO: 318390
gugguuugggcugagagaa

SEQ ID NO: 558950 - RNA, 19 nt, Artificial Sequence
  Description of Artificial Sequence: Synthetic oligonucleotide
  Antisense strand to SEQ ID NO: 558949
uucucucagcccaaaccac

SEQ ID NO: 558951 - RNA, 19 nt, Artificial Sequence
  Description of Artificial Sequence: Synthetic oligonucleotide
  Sense strand starting at position 2527 of SEQ ID NO: 318390
aaucgauccugauucgacu

SEQ ID NO: 558952 - RNA, 19 nt, Artificial Sequence
  Description of Artificial Sequence: Synthetic oligonucleotide
  Antisense strand to SEQ ID NO: 558951
agucgaaucaggaucgauu

SEQ ID NO: 558953 - RNA, 19 nt, Artificial Sequence
  Description of Artificial Sequence: Synthetic oligonucleotide
  Sense strand starting at position 2533 of SEQ ID NO: 318390
uccugauucgacuggaaac

SEQ ID NO: 558954 - RNA, 19 nt, Artificial Sequence
  Description of Artificial Sequence: Synthetic oligonucleotide
  Antisense strand to SEQ ID NO: 558953
guuuccagucgaaucagga

SEQ ID NO: 558955 - RNA, 19 nt, Artificial Sequence
  Description of Artificial Sequence: Synthetic oligonucleotide
  Sense strand starting at position 2569 of SEQ ID NO: 318390
ggucuccuggcauaaaguu

SEQ ID NO: 558956 - RNA, 19 nt, Artificial Sequence
  Description of Artificial Sequence: Synthetic oligonucleotide
  Antisense strand to SEQ ID NO: 558955
aacuuuaugccaggagacc

SEQ ID NO: 558957 - RNA, 19 nt, Artificial Sequence
  Description of Artificial Sequence: Synthetic oligonucleotide
  Sense strand starting at position 2595 of SEQ ID NO: 318390
aaugcagauaucggugaga

SEQ ID NO: 558958 - RNA, 19 nt, Artificial Sequence
  Description of Artificial Sequence: Synthetic oligonucleotide
  Antisense strand to SEQ ID NO: 558957
ucucaccgauaucugcauu

SEQ ID NO: 558959 - RNA, 19 nt, Artificial Sequence
  Description of Artificial Sequence: Synthetic oligonucleotide
  Sense strand starting at position 2597 of SEQ ID NO: 318390
ugcagauaucggugagaca

SEQ ID NO: 558960 - RNA, 19 nt, Artificial Sequence
  Description of Artificial Sequence: Synthetic oligonucleotide
  Antisense strand to SEQ ID NO: 558959
ugucucaccgauaucugca

SEQ ID NO: 558961 - RNA, 19 nt, Artificial Sequence
  Description of Artificial Sequence: Synthetic oligonucleotide
  Sense strand starting at position 2598 of SEQ ID NO: 318390
gcagauaucggugagacaa

SEQ ID NO: 558962 - RNA, 19 nt, Artificial Sequence
  Description of Artificial Sequence: Synthetic oligonucleotide
  Antisense strand to SEQ ID NO: 558961
uugucucaccgauaucugc

SEQ ID NO: 558963 - RNA, 19 nt, Artificial Sequence
  Description of Artificial Sequence: Synthetic oligonucleotide
  Sense strand starting at position 2815 of SEQ ID NO: 318390
uugucaagccgggaaguaa

SEQ ID NO: 558964 - RNA, 19 nt, Artificial Sequence
  Description of Artificial Sequence: Synthetic oligonucleotide
  Antisense strand to SEQ ID NO: 558963
uuacuucccggcuugacaa

SEQ ID NO: 558965 - RNA, 19 nt, Artificial Sequence
  Description of Artificial Sequence: Synthetic oligonucleotide
  Sense strand starting at position 2881 of SEQ ID NO: 318390
cggacaccuugcuuaauuu

SEQ ID NO: 558966 - RNA, 19 nt, Artificial Sequence
  Description of Artificial Sequence: Synthetic oligonucleotide
  Antisense strand to SEQ ID NO: 558965
aaauuaagcaagguguccg

SEQ ID NO: 558967 - RNA, 19 nt, Artificial Sequence
  Description of Artificial Sequence: Synthetic oligonucleotide
  Sense strand starting at position 2920 of SEQ ID NO: 318390
uuaauuaugucagugauac

SEQ ID NO: 558968 - RNA, 19 nt, Artificial Sequence
  Description of Artificial Sequence: Synthetic oligonucleotide
  Antisense strand to SEQ ID NO: 558967
guaucacugacauaauuaa

SEQ ID NO: 558969 - RNA, 19 nt, Artificial Sequence
  Description of Artificial Sequence: Synthetic oligonucleotide
  Sense strand starting at position 2978 of SEQ ID NO: 318390
ucuugaaacguguccgcuu

SEQ ID NO: 558970 - RNA, 19 nt, Artificial Sequence
  Description of Artificial Sequence: Synthetic oligonucleotide
  Antisense strand to SEQ ID NO: 558969
aagcggacacguuucaaga

SEQ ID NO: 558971 - RNA, 19 nt, Artificial Sequence
  Description of Artificial Sequence: Synthetic oligonucleotide
  Sense strand starting at position 3048 of SEQ ID NO: 318390
ccugaugcccaggauauau

SEQ ID NO: 558972 - RNA, 19 nt, Artificial Sequence
  Description of Artificial Sequence: Synthetic oligonucleotide
  Antisense strand to SEQ ID NO: 558971
auauauccugggcaucagg

SEQ ID NO: 558973 - RNA, 19 nt, Artificial Sequence
  Description of Artificial Sequence: Synthetic oligonucleotide
  Sense strand starting at position 3166 of SEQ ID NO: 318390
uuugcuguugauggaaaua

SEQ ID NO: 558974 - RNA, 19 nt, Artificial Sequence
  Description of Artificial Sequence: Synthetic oligonucleotide
  Antisense strand to SEQ ID NO: 558973
uauuuccaucaacagcaaa

SEQ ID NO: 558975 - RNA, 19 nt, Artificial Sequence
  Description of Artificial Sequence: Synthetic oligonucleotide
  Sense strand starting at position 3211 of SEQ ID NO: 318390
uuagguuuaugagaauuug

SEQ ID NO: 558976 - RNA, 19 nt, Artificial Sequence
  Description of Artificial Sequence: Synthetic oligonucleotide
  Antisense strand to SEQ ID NO: 558975
caaauucucauaaaccuaa

SEQ ID NO: 558977 - RNA, 19 nt, Artificial Sequence
  Description of Artificial Sequence: Synthetic oligonucleotide
  Sense strand starting at position 3456 of SEQ ID NO: 318390
uaaccuguucuagaaggca

SEQ ID NO: 558978 - RNA, 19 nt, Artificial Sequence
  Description of Artificial Sequence: Synthetic oligonucleotide
  Antisense strand to SEQ ID NO: 558977
ugccuucuagaacagguua

SEQ ID NO: 558979 - RNA, 19 nt, Artificial Sequence
  Description of Artificial Sequence: Synthetic oligonucleotide
  Sense strand starting at position 3628 of SEQ ID NO: 318390
guugaaaguaacuguaaga

SEQ ID NO: 558980 - RNA, 19 nt, Artificial Sequence
  Description of Artificial Sequence: Synthetic oligonucleotide
  Antisense strand to SEQ ID NO: 558979
ucuuacaguuacuuucaac

SEQ ID NO: 558981 - RNA, 19 nt, Artificial Sequence
  Description of Artificial Sequence: Synthetic oligonucleotide
  Sense strand starting at position 3669 of SEQ ID NO: 318390
uuuaaauuguggcuagaaa

SEQ ID NO: 558982 - RNA, 19 nt, Artificial Sequence
  Description of Artificial Sequence: Synthetic oligonucleotide
  Antisense strand to SEQ ID NO: 558981
uuucuagccacaauuuaaa

SEQ ID NO: 558983 - RNA, 19 nt, Artificial Sequence
  Description of Artificial Sequence: Synthetic oligonucleotide
  Sense strand starting at position 3670 of SEQ ID NO: 318390
uuaaauuguggcuagaaac

SEQ ID NO: 558984 - RNA, 19 nt, Artificial Sequence
  Description of Artificial Sequence: Synthetic oligonucleotide
  Antisense strand to SEQ ID NO: 558983
guuucuagccacaauuuaa

SEQ ID NO: 558985 - RNA, 19 nt, Artificial Sequence
  Description of Artificial Sequence: Synthetic oligonucleotide
  Sense strand starting at position 3683 of SEQ ID NO: 318390
agaaacuguuguccacuaa

SEQ ID NO: 558986 - RNA, 19 nt, Artificial Sequence
  Description of Artificial Sequence: Synthetic oligonucleotide
  Antisense strand to SEQ ID NO: 558985
uuaguggacaacaguuucu

SEQ ID NO: 558987 - RNA, 19 nt, Artificial Sequence
  Description of Artificial Sequence: Synthetic oligonucleotide
  Sense strand starting at position 3717 of SEQ ID NO: 318390
agacaacugucuuuguuaa

SEQ ID NO: 558988 - RNA, 19 nt, Artificial Sequence
  Description of Artificial Sequence: Synthetic oligonucleotide
  Antisense strand to SEQ ID NO: 558987
uuaacaaagacaguugucu

SEQ ID NO: 558989 - RNA, 19 nt, Artificial Sequence
  Description of Artificial Sequence: Synthetic oligonucleotide
  Sense strand starting at position 3844 of SEQ ID NO: 318390
acuuucucacuauaugagu

SEQ ID NO: 558990 - RNA, 19 nt, Artificial Sequence
  Description of Artificial Sequence: Synthetic oligonucleotide
  Antisense strand to SEQ ID NO: 558989
acucauauagugagaaagu

SEQ ID NO: 558991 - RNA, 19 nt, Artificial Sequence
  Description of Artificial Sequence: Synthetic oligonucleotide
  Sense strand starting at position 3914 of SEQ ID NO: 318390
auaagugaucuauguuacu

SEQ ID NO: 558992 - RNA, 19 nt, Artificial Sequence
  Description of Artificial Sequence: Synthetic oligonucleotide
  Antisense strand to SEQ ID NO: 558991
aguaacauagaucacuuau

SEQ ID NO: 558993 - RNA, 19 nt, Artificial Sequence
  Description of Artificial Sequence: Synthetic oligonucleotide
  Sense strand starting at position 3963 of SEQ ID NO: 318390
gccuguacucuagaaucaa

SEQ ID NO: 558994 - RNA, 19 nt, Artificial Sequence
  Description of Artificial Sequence: Synthetic oligonucleotide
  Antisense strand to SEQ ID NO: 558993
uugauucuagaguacaggc

SEQ ID NO: 558995 - RNA, 19 nt, Artificial Sequence
  Description of Artificial Sequence: Synthetic oligonucleotide
  Sense strand starting at position 4 of SEQ ID NO: 318391
agugcagucguugcaauca

SEQ ID NO: 558996 - RNA, 19 nt, Artificial Sequence
  Description of Artificial Sequence: Synthetic oligonucleotide
  Antisense strand to SEQ ID NO: 558995
ugauugcaacgacugcacu

SEQ ID NO: 558997 - RNA, 19 nt, Artificial Sequence
  Description of Artificial Sequence: Synthetic oligonucleotide
  Sense strand starting at position 265 of SEQ ID NO: 318391
uugggugccaucgacaaau

SEQ ID NO: 558998 - RNA, 19 nt, Artificial Sequence
  Description of Artificial Sequence: Synthetic oligonucleotide
  Antisense strand to SEQ ID NO: 558997
auuugucgauggcacccaa

SEQ ID NO: 558999 - RNA, 19 nt, Artificial Sequence
  Description of Artificial Sequence: Synthetic oligonucleotide
  Sense strand starting at position 274 of SEQ ID NO: 318391
aucgacaaaugcucuuuaa

SEQ ID NO: 559000 - RNA, 19 nt, Artificial Sequence
  Description of Artificial Sequence: Synthetic oligonucleotide
  Antisense strand to SEQ ID NO: 558999
uuaaagagcauuugucgau

SEQ ID NO: 559001 - RNA, 19 nt, Artificial Sequence
  Description of Artificial Sequence: Synthetic oligonucleotide
  Sense strand starting at position 382 of SEQ ID NO: 318391
ugcauugacucagcacaaa

SEQ ID NO: 559002 - RNA, 19 nt, Artificial Sequence
  Description of Artificial Sequence: Synthetic oligonucleotide
  Antisense strand to SEQ ID NO: 559001
uuugugcugagucaaugca

SEQ ID NO: 559003 - RNA, 19 nt, Artificial Sequence
  Description of Artificial Sequence: Synthetic oligonucleotide
  Sense strand starting at position 412 of SEQ ID NO: 318391
acugcaauaggucagugaa

SEQ ID NO: 559004 - RNA, 19 nt, Artificial Sequence
  Description of Artificial Sequence: Synthetic oligonucleotide
  Antisense strand to SEQ ID NO: 559003
uucacugaccuauugcagu

SEQ ID NO: 559005 - RNA, 19 nt, Artificial Sequence
  Description of Artificial Sequence: Synthetic oligonucleotide
  Sense strand starting at position 457 of SEQ ID NO: 318391
agaugaacuuuggccucau

SEQ ID NO: 559006 - RNA, 19 nt, Artificial Sequence
  Description of Artificial Sequence: Synthetic oligonucleotide
  Antisense strand to SEQ ID NO: 559005
augaggccaaaguucaucu

SEQ ID NO: 559007 - RNA, 19 nt, Artificial Sequence
  Description of Artificial Sequence: Synthetic oligonucleotide
  Sense strand starting at position 488 of SEQ ID NO: 318391
uuaugaaacucagcugaug

SEQ ID NO: 559008 - RNA, 19 nt, Artificial Sequence
  Description of Artificial Sequence: Synthetic oligonucleotide
  Antisense strand to SEQ ID NO: 559007
caucagcugaguuucauaa

SEQ ID NO: 559009 - RNA, 19 nt, Artificial Sequence
  Description of Artificial Sequence: Synthetic oligonucleotide
  Sense strand starting at position 499 of SEQ ID NO: 318391
agcugaugugucuauauga

SEQ ID NO: 559010 - RNA, 19 nt, Artificial Sequence
  Description of Artificial Sequence: Synthetic oligonucleotide
  Antisense strand to SEQ ID NO: 559009
ucauauagacacaucagcu

SEQ ID NO: 559011 - RNA, 19 nt, Artificial Sequence
  Description of Artificial Sequence: Synthetic oligonucleotide
  Sense strand starting at position 506 of SEQ ID NO: 318391
gugucuauaugacucuaaa

SEQ ID NO: 559012 - RNA, 19 nt, Artificial Sequence
  Description of Artificial Sequence: Synthetic oligonucleotide
  Antisense strand to SEQ ID NO: 559011
uuuagagucauauagacac

SEQ ID NO: 559013 - RNA, 19 nt, Artificial Sequence
  Description of Artificial Sequence: Synthetic oligonucleotide
  Sense strand starting at position 621 of SEQ ID NO: 318391
auggaagcuucuuacauuu

SEQ ID NO: 559014 - RNA, 19 nt, Artificial Sequence
  Description of Artificial Sequence: Synthetic oligonucleotide
  Antisense strand to SEQ ID NO: 559013
aaauguaagaagcuuccau

SEQ ID NO: 559015 - RNA, 19 nt, Artificial Sequence
  Description of Artificial Sequence: Synthetic oligonucleotide
  Sense strand starting at position 627 of SEQ ID NO: 318391
gcuucuuacauuugcgaug

SEQ ID NO: 559016 - RNA, 19 nt, Artificial Sequence
  Description of Artificial Sequence: Synthetic oligonucleotide
  Antisense strand to SEQ ID NO: 559015
caucgcaaauguaagaagc

SEQ ID NO: 559017 - RNA, 19 nt, Artificial Sequence
  Description of Artificial Sequence: Synthetic oligonucleotide
  Sense strand starting at position 839 of SEQ ID NO: 318391
auaucuguguacuuacaua

SEQ ID NO: 559018 - RNA, 19 nt, Artificial Sequence
  Description of Artificial Sequence: Synthetic oligonucleotide
  Antisense strand to SEQ ID NO: 559017
uauguaaguacacagauau

SEQ ID NO: 559019 - RNA, 19 nt, Artificial Sequence
  Description of Artificial Sequence: Synthetic oligonucleotide
  Sense strand starting at position 1661 of SEQ ID NO: 318391
ggucacucgacaggugaca

SEQ ID NO: 559020 - RNA, 19 nt, Artificial Sequence
  Description of Artificial Sequence: Synthetic oligonucleotide
  Antisense strand to SEQ ID NO: 559019
ugucaccugucgagugacc

SEQ ID NO: 559021 - RNA, 19 nt, Artificial Sequence
  Description of Artificial Sequence: Synthetic oligonucleotide
  Sense strand starting at position 1787 of SEQ ID NO: 318391
ggcugugagggcuaaaggu

SEQ ID NO: 559022 - RNA, 19 nt, Artificial Sequence
  Description of Artificial Sequence: Synthetic oligonucleotide
  Antisense strand to SEQ ID NO: 559021
accuuuagcccucacagcc

SEQ ID NO: 559023 - RNA, 19 nt, Artificial Sequence
  Description of Artificial Sequence: Synthetic oligonucleotide
  Sense strand starting at position 2163 of SEQ ID NO: 318391
ggccaacuucugggaauaa

SEQ ID NO: 559024 - RNA, 19 nt, Artificial Sequence
  Description of Artificial Sequence: Synthetic oligonucleotide
  Antisense strand to SEQ ID NO: 559023
uuauucccagaaguuggcc

SEQ ID NO: 559025 - RNA, 19 nt, Artificial Sequence
  Description of Artificial Sequence: Synthetic oligonucleotide
  Sense strand starting at position 2249 of SEQ ID NO: 318391
cauuuaucgccuuguuagu

SEQ ID NO: 559026 - RNA, 19 nt, Artificial Sequence
  Description of Artificial Sequence: Synthetic oligonucleotide
  Antisense strand to SEQ ID NO: 559025
acuaacaaggcgauaaaug

SEQ ID NO: 559027 - RNA, 19 nt, Artificial Sequence
  Description of Artificial Sequence: Synthetic oligonucleotide
  Sense strand starting at position 2280 of SEQ ID NO: 318391
cuccgugaaagguagguau

SEQ ID NO: 559028 - RNA, 19 nt, Artificial Sequence
  Description of Artificial Sequence: Synthetic oligonucleotide
  Antisense strand to SEQ ID NO: 559027
auaccuaccuuucacggag

SEQ ID NO: 559029 - RNA, 19 nt, Artificial Sequence
  Description of Artificial Sequence: Synthetic oligonucleotide
  Sense strand starting at position 2282 of SEQ ID NO: 318391
ccgugaaagguagguauuu

SEQ ID NO: 559030 - RNA, 19 nt, Artificial Sequence
  Description of Artificial Sequence: Synthetic oligonucleotide
  Antisense strand to SEQ ID NO: 559029
aaauaccuaccuuucacgg

SEQ ID NO: 559031 - RNA, 19 nt, Artificial Sequence
  Description of Artificial Sequence: Synthetic oligonucleotide
  Sense strand starting at position 2368 of SEQ ID NO: 318391
ccaagucuuggaugcccaa

SEQ ID NO: 559032 - RNA, 19 nt, Artificial Sequence
  Description of Artificial Sequence: Synthetic oligonucleotide
  Antisense strand to SEQ ID NO: 559031
uugggcauccaagacuugg

SEQ ID NO: 559033 - RNA, 19 nt, Artificial Sequence
  Description of Artificial Sequence: Synthetic oligonucleotide
  Sense strand starting at position 2434 of SEQ ID NO: 318391
ugcagaaacugguuauuaa

SEQ ID NO: 559034 - RNA, 19 nt, Artificial Sequence
  Description of Artificial Sequence: Synthetic oligonucleotide
  Antisense strand to SEQ ID NO: 559033
uuaauaaccaguuucugca

SEQ ID NO: 559035 - RNA, 19 nt, Artificial Sequence
  Description of Artificial Sequence: Synthetic oligonucleotide
  Sense strand starting at position 2435 of SEQ ID NO: 318391
gcagaaacugguuauuaac

SEQ ID NO: 559036 - RNA, 19 nt, Artificial Sequence
  Description of Artificial Sequence: Synthetic oligonucleotide
  Antisense strand to SEQ ID NO: 559035
guuaauaaccaguuucugc

SEQ ID NO: 559037 - RNA, 19 nt, Artificial Sequence
  Description of Artificial Sequence: Synthetic oligonucleotide
  Sense strand starting at position 2443 of SEQ ID NO: 318391
ugguuauuaaccgagagcu

SEQ ID NO: 559038 - RNA, 19 nt, Artificial Sequence
  Description of Artificial Sequence: Synthetic oligonucleotide
  Antisense strand to SEQ ID NO: 559037
agcucucgguuaauaacca

SEQ ID NO: 559039 - RNA, 19 nt, Artificial Sequence
  Description of Artificial Sequence: Synthetic oligonucleotide
  Sense strand starting at position 2445 of SEQ ID NO: 318391
guuauuaaccgagagcugu

SEQ ID NO: 559040 - RNA, 19 nt, Artificial Sequence
  Description of Artificial Sequence: Synthetic oligonucleotide
  Antisense strand to SEQ ID NO: 559039
acagcucucgguuaauaac

SEQ ID NO: 559041 - RNA, 19 nt, Artificial Sequence
  Description of Artificial Sequence: Synthetic oligonucleotide
  Sense strand starting at position 2518 of SEQ ID NO: 318391
cucugcagugauuauguga

SEQ ID NO: 559042 - RNA, 19 nt, Artificial Sequence
  Description of Artificial Sequence: Synthetic oligonucleotide
  Antisense strand to SEQ ID NO: 559041
ucacauaaucacugcagag

SEQ ID NO: 559043 - RNA, 19 nt, Artificial Sequence
  Description of Artificial Sequence: Synthetic oligonucleotide
  Sense strand starting at position 2521 of SEQ ID NO: 318391
ugcagugauuaugugaaag

SEQ ID NO: 559044 - RNA, 19 nt, Artificial Sequence
  Description of Artificial Sequence: Synthetic oligonucleotide
  Antisense strand to SEQ ID NO: 559043
cuuucacauaaucacugca

SEQ ID NO: 559045 - RNA, 19 nt, Artificial Sequence
  Description of Artificial Sequence: Synthetic oligonucleotide
  Sense strand starting at position 2575 of SEQ ID NO: 318391
acaucugacccagaagcuu

SEQ ID NO: 559046 - RNA, 19 nt, Artificial Sequence
  Description of Artificial Sequence: Synthetic oligonucleotide
  Antisense strand to SEQ ID NO: 559045
aagcuucugggucagaugu

SEQ ID NO: 559047 - RNA, 19 nt, Artificial Sequence
  Description of Artificial Sequence: Synthetic oligonucleotide
  Sense strand starting at position 2583 of SEQ ID NO: 318391
cccagaagcuuugcaaaga

SEQ ID NO: 559048 - RNA, 19 nt, Artificial Sequence
  Description of Artificial Sequence: Synthetic oligonucleotide
  Antisense strand to SEQ ID NO: 559047
ucuuugcaaagcuucuggg

SEQ ID NO: 559049 - RNA, 19 nt, Artificial Sequence
  Description of Artificial Sequence: Synthetic oligonucleotide
  Sense strand starting at position 2830 of SEQ ID NO: 318391
uagacugcugucgauaaau

SEQ ID NO: 559050 - RNA, 19 nt, Artificial Sequence
  Description of Artificial Sequence: Synthetic oligonucleotide
  Antisense strand to SEQ ID NO: 559049
auuuaucgacagcagucua

SEQ ID NO: 559051 - RNA, 19 nt, Artificial Sequence
  Description of Artificial Sequence: Synthetic oligonucleotide
  Sense strand starting at position 2832 of SEQ ID NO: 318391
gacugcugucgauaaaugc

SEQ ID NO: 559052 - RNA, 19 nt, Artificial Sequence
  Description of Artificial Sequence: Synthetic oligonucleotide
  Antisense strand to SEQ ID NO: 559051
gcauuuaucgacagcaguc

SEQ ID NO: 559053 - RNA, 19 nt, Artificial Sequence
  Description of Artificial Sequence: Synthetic oligonucleotide
  Sense strand starting at position 2884 of SEQ ID NO: 318391
cacaguagugagggucaaa

SEQ ID NO: 559054 - RNA, 19 nt, Artificial Sequence
  Description of Artificial Sequence: Synthetic oligonucleotide
  Antisense strand to SEQ ID NO: 559053
uuugacccucacuacugug

SEQ ID NO: 559055 - RNA, 19 nt, Artificial Sequence
  Description of Artificial Sequence: Synthetic oligonucleotide
  Sense strand starting at position 2944 of SEQ ID NO: 318391
gcugacagccagugaacua

SEQ ID NO: 559056 - RNA, 19 nt, Artificial Sequence
  Description of Artificial Sequence: Synthetic oligonucleotide
  Antisense strand to SEQ ID NO: 559055
uaguucacuggcugucagc

SEQ ID NO: 559057 - RNA, 19 nt, Artificial Sequence
  Description of Artificial Sequence: Synthetic oligonucleotide
  Sense strand starting at position 3159 of SEQ ID NO: 318391
ucgcuauauuucccagucu

SEQ ID NO: 559058 - RNA, 19 nt, Artificial Sequence
  Description of Artificial Sequence: Synthetic oligonucleotide
  Antisense strand to SEQ ID NO: 559057
agacugggaaauauagcga

SEQ ID NO: 559059 - RNA, 19 nt, Artificial Sequence
  Description of Artificial Sequence: Synthetic oligonucleotide
  Sense strand starting at position 3232 of SEQ ID NO: 318391
ggacuaccgggcugucaaa

SEQ ID NO: 559060 - RNA, 19 nt, Artificial Sequence
  Description of Artificial Sequence: Synthetic oligonucleotide
  Antisense strand to SEQ ID NO: 559059
uuugacagcccgguagucc

SEQ ID NO: 559061 - RNA, 19 nt, Artificial Sequence
  Description of Artificial Sequence: Synthetic oligonucleotide
  Sense strand starting at position 3265 of SEQ ID NO: 318391
gagaauuaagcagguaauc

SEQ ID NO: 559062 - RNA, 19 nt, Artificial Sequence
  Description of Artificial Sequence: Synthetic oligonucleotide
  Antisense strand to SEQ ID NO: 559061
gauuaccugcuuaauucuc

SEQ ID NO: 559063 - RNA, 19 nt, Artificial Sequence
  Description of Artificial Sequence: Synthetic oligonucleotide
  Sense strand starting at position 3274 of SEQ ID NO: 318391
gcagguaaucucuagagac

SEQ ID NO: 559064 - RNA, 19 nt, Artificial Sequence
  Description of Artificial Sequence: Synthetic oligonucleotide
  Antisense strand to SEQ ID NO: 559063
gucucuagagauuaccugc

SEQ ID NO: 559065 - RNA, 19 nt, Artificial Sequence
  Description of Artificial Sequence: Synthetic oligonucleotide
  Sense strand starting at position 3301 of SEQ ID NO: 318391
uuccuuugagcauaacaga

SEQ ID NO: 559066 - RNA, 19 nt, Artificial Sequence
  Description of Artificial Sequence: Synthetic oligonucleotide
  Antisense strand to SEQ ID NO: 559065
ucuguuaugcucaaaggaa

SEQ ID NO: 559067 - RNA, 19 nt, Artificial Sequence
  Description of Artificial Sequence: Synthetic oligonucleotide
  Sense strand starting at position 3441 of SEQ ID NO: 318391
uuaguuucuagaggaauug

SEQ ID NO: 559068 - RNA, 19 nt, Artificial Sequence
  Description of Artificial Sequence: Synthetic oligonucleotide
  Antisense strand to SEQ ID NO: 559067
caauuccucuagaaacuaa

SEQ ID NO: 559069 - RNA, 19 nt, Artificial Sequence
  Description of Artificial Sequence: Synthetic oligonucleotide
  Sense strand starting at position 3451 of SEQ ID NO: 318391
gaggaauuggcugagcugu

SEQ ID NO: 559070 - RNA, 19 nt, Artificial Sequence
  Description of Artificial Sequence: Synthetic oligonucleotide
  Antisense strand to SEQ ID NO: 559069
acagcucagccaauuccuc

SEQ ID NO: 559071 - RNA, 19 nt, Artificial Sequence
  Description of Artificial Sequence: Synthetic oligonucleotide
  Sense strand starting at position 3453 of SEQ ID NO: 318391
ggaauuggcugagcuguaa

SEQ ID NO: 559072 - RNA, 19 nt, Artificial Sequence
  Description of Artificial Sequence: Synthetic oligonucleotide
  Antisense strand to SEQ ID NO: 559071
uuacagcucagccaauucc

SEQ ID NO: 559073 - RNA, 19 nt, Artificial Sequence
  Description of Artificial Sequence: Synthetic oligonucleotide
  Sense strand starting at position 3457 of SEQ ID NO: 318391
uuggcugagcuguaaguga

SEQ ID NO: 559074 - RNA, 19 nt, Artificial Sequence
  Description of Artificial Sequence: Synthetic oligonucleotide
  Antisense strand to SEQ ID NO: 559073
ucacuuacagcucagccaa

SEQ ID NO: 559075 - RNA, 19 nt, Artificial Sequence
  Description of Artificial Sequence: Synthetic oligonucleotide
  Sense strand starting at position 180 of SEQ ID NO: 318392
acauauuacgcccagggaa

SEQ ID NO: 559076 - RNA, 19 nt, Artificial Sequence
  Description of Artificial Sequence: Synthetic oligonucleotide
  Antisense strand to SEQ ID NO: 559075
uucccugggcguaauaugu

SEQ ID NO: 559077 - RNA, 19 nt, Artificial Sequence
  Description of Artificial Sequence: Synthetic oligonucleotide
  Sense strand starting at position 193 of SEQ ID NO: 318392
agggaaucuucugcuacca

SEQ ID NO: 559078 - RNA, 19 nt, Artificial Sequence
  Description of Artificial Sequence: Synthetic oligonucleotide
  Antisense strand to SEQ ID NO: 559077
ugguagcagaagauucccu

SEQ ID NO: 559079 - RNA, 19 nt, Artificial Sequence
  Description of Artificial Sequence: Synthetic oligonucleotide
  Sense strand starting at position 219 of SEQ ID NO: 318392
caggaaugaguaugcaaac

SEQ ID NO: 559080 - RNA, 19 nt, Artificial Sequence
  Description of Artificial Sequence: Synthetic oligonucleotide
  Antisense strand to SEQ ID NO: 559079
guuugcauacucauuccug

SEQ ID NO: 559081 - RNA, 19 nt, Artificial Sequence
  Description of Artificial Sequence: Synthetic oligonucleotide
  Sense strand starting at position 220 of SEQ ID NO: 318392
aggaaugaguaugcaaaca

SEQ ID NO: 559082 - RNA, 19 nt, Artificial Sequence
  Description of Artificial Sequence: Synthetic oligonucleotide
  Antisense strand to SEQ ID NO: 559081
uguuugcauacucauuccu

SEQ ID NO: 559083 - RNA, 19 nt, Artificial Sequence
  Description of Artificial Sequence: Synthetic oligonucleotide
  Sense strand starting at position 575 of SEQ ID NO: 318392
uagggcauucuguauacuu

SEQ ID NO: 559084 - RNA, 19 nt, Artificial Sequence
  Description of Artificial Sequence: Synthetic oligonucleotide
  Antisense strand to SEQ ID NO: 559083
aaguauacagaaugcccua

SEQ ID NO: 559085 - RNA, 19 nt, Artificial Sequence
  Description of Artificial Sequence: Synthetic oligonucleotide
  Sense strand starting at position 739 of SEQ ID NO: 318392
gugacaggauugcuuaaau

SEQ ID NO: 559086 - RNA, 19 nt, Artificial Sequence
  Description of Artificial Sequence: Synthetic oligonucleotide
  Antisense strand to SEQ ID NO: 559085
auuuaagcaauccugucac

SEQ ID NO: 559087 - RNA, 19 nt, Artificial Sequence
  Description of Artificial Sequence: Synthetic oligonucleotide
  Sense strand starting at position 750 of SEQ ID NO: 318392
gcuuaaauccaugagcaag

SEQ ID NO: 559088 - RNA, 19 nt, Artificial Sequence
  Description of Artificial Sequence: Synthetic oligonucleotide
  Antisense strand to SEQ ID NO: 559087
cuugcucauggauuuaagc

SEQ ID NO: 559089 - RNA, 19 nt, Artificial Sequence
  Description of Artificial Sequence: Synthetic oligonucleotide
  Sense strand starting at position 1200 of SEQ ID NO: 318392
aaccaagaugguuggugau

SEQ ID NO: 559090 - RNA, 19 nt, Artificial Sequence
  Description of Artificial Sequence: Synthetic oligonucleotide
  Antisense strand to SEQ ID NO: 559089
aucaccaaccaucuugguu

SEQ ID NO: 559091 - RNA, 19 nt, Artificial Sequence
  Description of Artificial Sequence: Synthetic oligonucleotide
  Sense strand starting at position 1413 of SEQ ID NO: 318392
guaaucacacuuggaguau

SEQ ID NO: 559092 - RNA, 19 nt, Artificial Sequence
  Description of Artificial Sequence: Synthetic oligonucleotide
  Antisense strand to SEQ ID NO: 559091
auacuccaagugugauuac

SEQ ID NO: 559093 - RNA, 19 nt, Artificial Sequence
  Description of Artificial Sequence: Synthetic oligonucleotide
  Sense strand starting at position 1455 of SEQ ID NO: 318392
cuaggccuccuugauuauu

SEQ ID NO: 559094 - RNA, 19 nt, Artificial Sequence
  Description of Artificial Sequence: Synthetic oligonucleotide
  Antisense strand to SEQ ID NO: 559093
aauaaucaaggaggccuag

SEQ ID NO: 559095 - RNA, 19 nt, Artificial Sequence
  Description of Artificial Sequence: Synthetic oligonucleotide
  Sense strand starting at position 1669 of SEQ ID NO: 318392
ucaaguuugcauggagaaa

SEQ ID NO: 559096 - RNA, 19 nt, Artificial Sequence
  Description of Artificial Sequence: Synthetic oligonucleotide
  Antisense strand to SEQ ID NO: 559095
uuucuccaugcaaacuuga

SEQ ID NO: 559097 - RNA, 19 nt, Artificial Sequence
  Description of Artificial Sequence: Synthetic oligonucleotide
  Sense strand starting at position 1732 of SEQ ID NO: 318392
guuccuuauaaguagaggu

SEQ ID NO: 559098 - RNA, 19 nt, Artificial Sequence
  Description of Artificial Sequence: Synthetic oligonucleotide
  Antisense strand to SEQ ID NO: 559097
accucuacuuauaaggaac

SEQ ID NO: 559099 - RNA, 19 nt, Artificial Sequence
  Description of Artificial Sequence: Synthetic oligonucleotide
  Sense strand starting at position 1736 of SEQ ID NO: 318392
cuuauaaguagagguugau

SEQ ID NO: 559100 - RNA, 19 nt, Artificial Sequence
  Description of Artificial Sequence: Synthetic oligonucleotide
  Antisense strand to SEQ ID NO: 559099
aucaaccucuacuuauaag

SEQ ID NO: 559101 - RNA, 19 nt, Artificial Sequence
  Description of Artificial Sequence: Synthetic oligonucleotide
  Sense strand starting at position 1806 of SEQ ID NO: 318392
cuaccucaaguuggaaaua

SEQ ID NO: 559102 - RNA, 19 nt, Artificial Sequence
  Description of Artificial Sequence: Synthetic oligonucleotide
  Antisense strand to SEQ ID NO: 559101
uauuuccaacuugagguag

SEQ ID NO: 559103 - RNA, 19 nt, Artificial Sequence
  Description of Artificial Sequence: Synthetic oligonucleotide
  Sense strand starting at position 1837 of SEQ ID NO: 318392
ucagaugacaugugugaca

SEQ ID NO: 559104 - RNA, 19 nt, Artificial Sequence
  Description of Artificial Sequence: Synthetic oligonucleotide
  Antisense strand to SEQ ID NO: 559103
ugucacacaugucaucuga

SEQ ID NO: 559105 - RNA, 19 nt, Artificial Sequence
  Description of Artificial Sequence: Synthetic oligonucleotide
  Sense strand starting at position 1839 of SEQ ID NO: 318392
agaugacaugugugacaac

SEQ ID NO: 559106 - RNA, 19 nt, Artificial Sequence
  Description of Artificial Sequence: Synthetic oligonucleotide
  Antisense strand to SEQ ID NO: 559105
guugucacacaugucaucu

SEQ ID NO: 559107 - RNA, 19 nt, Artificial Sequence
  Description of Artificial Sequence: Synthetic oligonucleotide
  Sense strand starting at position 1863 of SEQ ID NO: 318392
ugaguauauguugaguaag

SEQ ID NO: 559108 - RNA, 19 nt, Artificial Sequence
  Description of Artificial Sequence: Synthetic oligonucleotide
  Antisense strand to SEQ ID NO: 559107
cuuacucaacauauacuca

SEQ ID NO: 559109 - RNA, 19 nt, Artificial Sequence
  Description of Artificial Sequence: Synthetic oligonucleotide
  Sense strand starting at position 1865 of SEQ ID NO: 318392
aguauauguugaguaagga

SEQ ID NO: 559110 - RNA, 19 nt, Artificial Sequence
  Description of Artificial Sequence: Synthetic oligonucleotide
  Antisense strand to SEQ ID NO: 559109
uccuuacucaacauauacu

SEQ ID NO: 559111 - RNA, 19 nt, Artificial Sequence
  Description of Artificial Sequence: Synthetic oligonucleotide
  Sense strand starting at position 1866 of SEQ ID NO: 318392
guauauguugaguaaggaa

SEQ ID NO: 559112 - RNA, 19 nt, Artificial Sequence
  Description of Artificial Sequence: Synthetic oligonucleotide
  Antisense strand to SEQ ID NO: 559111
uuccuuacucaacauauac

SEQ ID NO: 559113 - RNA, 19 nt, Artificial Sequence
  Description of Artificial Sequence: Synthetic oligonucleotide
  Sense strand starting at position 1996 of SEQ ID NO: 318392
uucggauuaguccaaagug

SEQ ID NO: 559114 - RNA, 19 nt, Artificial Sequence
  Description of Artificial Sequence: Synthetic oligonucleotide
  Antisense strand to SEQ ID NO: 559113
cacuuuggacuaauccgaa

SEQ ID NO: 559115 - RNA, 19 nt, Artificial Sequence
  Description of Artificial Sequence: Synthetic oligonucleotide
  Sense strand starting at position 2024 of SEQ ID NO: 318392
uugaaagaauguucccuua

SEQ ID NO: 559116 - RNA, 19 nt, Artificial Sequence
  Description of Artificial Sequence: Synthetic oligonucleotide
  Antisense strand to SEQ ID NO: 559115
uaagggaacauucuuucaa

SEQ ID NO: 559117 - RNA, 19 nt, Artificial Sequence
  Description of Artificial Sequence: Synthetic oligonucleotide
  Sense strand starting at position 2132 of SEQ ID NO: 318392
ucuuacuaaucuguaggga

SEQ ID NO: 559118 - RNA, 19 nt, Artificial Sequence
  Description of Artificial Sequence: Synthetic oligonucleotide
  Antisense strand to SEQ ID NO: 559117
ucccuacagauuaguaaga

SEQ ID NO: 559119 - RNA, 19 nt, Artificial Sequence
  Description of Artificial Sequence: Synthetic oligonucleotide
  Sense strand starting at position 2135 of SEQ ID NO: 318392
uacuaaucuguagggagau

SEQ ID NO: 559120 - RNA, 19 nt, Artificial Sequence
  Description of Artificial Sequence: Synthetic oligonucleotide
  Antisense strand to SEQ ID NO: 559119
aucucccuacagauuagua

SEQ ID NO: 559121 - RNA, 19 nt, Artificial Sequence
  Description of Artificial Sequence: Synthetic oligonucleotide
  Sense strand starting at position 2148 of SEQ ID NO: 318392
ggagauauugcuggaguau

SEQ ID NO: 559122 - RNA, 19 nt, Artificial Sequence
  Description of Artificial Sequence: Synthetic oligonucleotide
  Antisense strand to SEQ ID NO: 559121
auacuccagcaauaucucc

SEQ ID NO: 559123 - RNA, 19 nt, Artificial Sequence
  Description of Artificial Sequence: Synthetic oligonucleotide
  Sense strand starting at position 2184 of SEQ ID NO: 318392
aagacuuaucuuuggugga

SEQ ID NO: 559124 - RNA, 19 nt, Artificial Sequence
  Description of Artificial Sequence: Synthetic oligonucleotide
  Antisense strand to SEQ ID NO: 559123
uccaccaaagauaagucuu

SEQ ID NO: 559125 - RNA, 19 nt, Artificial Sequence
  Description of Artificial Sequence: Synthetic oligonucleotide
  Sense strand starting at position 2186 of SEQ ID NO: 318392
gacuuaucuuugguggaaa

SEQ ID NO: 559126 - RNA, 19 nt, Artificial Sequence
  Description of Artificial Sequence: Synthetic oligonucleotide
  Antisense strand to SEQ ID NO: 559125
uuuccaccaaagauaaguc

SEQ ID NO: 559127 - RNA, 19 nt, Artificial Sequence
  Description of Artificial Sequence: Synthetic oligonucleotide
  Sense strand starting at position 2295 of SEQ ID NO: 318392
caugccaugugacugagaa

SEQ ID NO: 559128 - RNA, 19 nt, Artificial Sequence
  Description of Artificial Sequence: Synthetic oligonucleotide
  Antisense strand to SEQ ID NO: 559127
uucucagucacauggcaug

SEQ ID NO: 559129 - RNA, 19 nt, Artificial Sequence
  Description of Artificial Sequence: Synthetic oligonucleotide
  Sense strand starting at position 2296 of SEQ ID NO: 318392
augccaugugacugagaag

SEQ ID NO: 559130 - RNA, 19 nt, Artificial Sequence
  Description of Artificial Sequence: Synthetic oligonucleotide
  Antisense strand to SEQ ID NO: 559129
cuucucagucacauggcau

SEQ ID NO: 559131 - RNA, 19 nt, Artificial Sequence
  Description of Artificial Sequence: Synthetic oligonucleotide
  Sense strand starting at position 2473 of SEQ ID NO: 318392
uaugguagauugucacaag

SEQ ID NO: 559132 - RNA, 19 nt, Artificial Sequence
  Description of Artificial Sequence: Synthetic oligonucleotide
  Antisense strand to SEQ ID NO: 559131
cuugugacaaucuaccaua

SEQ ID NO: 559133 - RNA, 19 nt, Artificial Sequence
  Description of Artificial Sequence: Synthetic oligonucleotide
  Sense strand starting at position 2545 of SEQ ID NO: 318392
uugauaaugccaggaaagu

SEQ ID NO: 559134 - RNA, 19 nt, Artificial Sequence
  Description of Artificial Sequence: Synthetic oligonucleotide
  Antisense strand to SEQ ID NO: 559133
acuuuccuggcauuaucaa

SEQ ID NO: 559135 - RNA, 19 nt, Artificial Sequence
  Description of Artificial Sequence: Synthetic oligonucleotide
  Sense strand starting at position 2620 of SEQ ID NO: 318392
uggugauguccucacaaca

SEQ ID NO: 559136 - RNA, 19 nt, Artificial Sequence
  Description of Artificial Sequence: Synthetic oligonucleotide
  Antisense strand to SEQ ID NO: 559135
uguugugaggacaucacca

SEQ ID NO: 559137 - RNA, 19 nt, Artificial Sequence
  Description of Artificial Sequence: Synthetic oligonucleotide
  Sense strand starting at position 2686 of SEQ ID NO: 318392
acaugucuuauggaggugu

SEQ ID NO: 559138 - RNA, 19 nt, Artificial Sequence
  Description of Artificial Sequence: Synthetic oligonucleotide
  Antisense strand to SEQ ID NO: 559137
acaccuccauaagacaugu

SEQ ID NO: 559139 - RNA, 19 nt, Artificial Sequence
  Description of Artificial Sequence: Synthetic oligonucleotide
  Sense strand starting at position 2856 of SEQ ID NO: 318392
cauagagaaugguugcuua

SEQ ID NO: 559140 - RNA, 19 nt, Artificial Sequence
  Description of Artificial Sequence: Synthetic oligonucleotide
  Antisense strand to SEQ ID NO: 559139
uaagcaaccauucucuaug

SEQ ID NO: 559141 - RNA, 19 nt, Artificial Sequence
  Description of Artificial Sequence: Synthetic oligonucleotide
  Sense strand starting at position 3031 of SEQ ID NO: 318392
acauuaaggacagguaugu

SEQ ID NO: 559142 - RNA, 19 nt, Artificial Sequence
  Description of Artificial Sequence: Synthetic oligonucleotide
  Antisense strand to SEQ ID NO: 559141
acauaccuguccuuaaugu

SEQ ID NO: 559143 - RNA, 19 nt, Artificial Sequence
  Description of Artificial Sequence: Synthetic oligonucleotide
  Sense strand starting at position 3125 of SEQ ID NO: 318392
auaaaugugcccuacauga

SEQ ID NO: 559144 - RNA, 19 nt, Artificial Sequence
  Description of Artificial Sequence: Synthetic oligonucleotide
  Antisense strand to SEQ ID NO: 559143
ucauguagggcacauuuau

SEQ ID NO: 559145 - RNA, 19 nt, Artificial Sequence
  Description of Artificial Sequence: Synthetic oligonucleotide
  Sense strand starting at position 3226 of SEQ ID NO: 318392
acaguaagauuccuuugaa

SEQ ID NO: 559146 - RNA, 19 nt, Artificial Sequence
  Description of Artificial Sequence: Synthetic oligonucleotide
  Antisense strand to SEQ ID NO: 559145
uucaaaggaaucuuacugu

SEQ ID NO: 559147 - RNA, 19 nt, Artificial Sequence
  Description of Artificial Sequence: Synthetic oligonucleotide
  Sense strand starting at position 3227 of SEQ ID NO: 318392
caguaagauuccuuugaag

SEQ ID NO: 559148 - RNA, 19 nt, Artificial Sequence
  Description of Artificial Sequence: Synthetic oligonucleotide
  Antisense strand to SEQ ID NO: 559147
cuucaaaggaaucuuacug

SEQ ID NO: 559149 - RNA, 19 nt, Artificial Sequence
  Description of Artificial Sequence: Synthetic oligonucleotide
  Sense strand starting at position 3333 of SEQ ID NO: 318392
ugaagugacuaauccacau

SEQ ID NO: 559150 - RNA, 19 nt, Artificial Sequence
  Description of Artificial Sequence: Synthetic oligonucleotide
  Antisense strand to SEQ ID NO: 559149
auguggauuagucacuuca

SEQ ID NO: 559151 - RNA, 19 nt, Artificial Sequence
  Description of Artificial Sequence: Synthetic oligonucleotide
  Sense strand starting at position 3337 of SEQ ID NO: 318392
gugacuaauccacaugcua

SEQ ID NO: 559152 - RNA, 19 nt, Artificial Sequence
  Description of Artificial Sequence: Synthetic oligonucleotide
  Antisense strand to SEQ ID NO: 559151
uagcauguggauuagucac

SEQ ID NO: 559153 - RNA, 19 nt, Artificial Sequence
  Description of Artificial Sequence: Synthetic oligonucleotide
  Sense strand starting at position 3747 of SEQ ID NO: 318392
agguccuagaagugaucaa

SEQ ID NO: 559154 - RNA, 19 nt, Artificial Sequence
  Description of Artificial Sequence: Synthetic oligonucleotide
  Antisense strand to SEQ ID NO: 559153
uugaucacuucuaggaccu

SEQ ID NO: 559155 - RNA, 19 nt, Artificial Sequence
  Description of Artificial Sequence: Synthetic oligonucleotide
  Sense strand starting at position 70 of SEQ ID NO: 318393
gaagguuugcaucacagug

SEQ ID NO: 559156 - RNA, 19 nt, Artificial Sequence
  Description of Artificial Sequence: Synthetic oligonucleotide
  Antisense strand to SEQ ID NO: 559155
cacugugaugcaaaccuuc

SEQ ID NO: 559157 - RNA, 19 nt, Artificial Sequence
  Description of Artificial Sequence: Synthetic oligonucleotide
  Sense strand starting at position 137 of SEQ ID NO: 318393
ugugaaagaagcugucuaa

SEQ ID NO: 559158 - RNA, 19 nt, Artificial Sequence
  Description of Artificial Sequence: Synthetic oligonucleotide
  Antisense strand to SEQ ID NO: 559157
uuagacagcuucuuucaca

SEQ ID NO: 559159 - RNA, 19 nt, Artificial Sequence
  Description of Artificial Sequence: Synthetic oligonucleotide
  Sense strand starting at position 285 of SEQ ID NO: 318393
auaagugcugcauggagaa

SEQ ID NO: 559160 - RNA, 19 nt, Artificial Sequence
  Description of Artificial Sequence: Synthetic oligonucleotide
  Antisense strand to SEQ ID NO: 559159
uucuccaugcagcacuuau

SEQ ID NO: 559161 - RNA, 19 nt, Artificial Sequence
  Description of Artificial Sequence: Synthetic oligonucleotide
  Sense strand starting at position 607 of SEQ ID NO: 318393
ggagguagaccauaacguu

SEQ ID NO: 559162 - RNA, 19 nt, Artificial Sequence
  Description of Artificial Sequence: Synthetic oligonucleotide
  Antisense strand to SEQ ID NO: 559161
aacguuauggucuaccucc

SEQ ID NO: 559163 - RNA, 19 nt, Artificial Sequence
  Description of Artificial Sequence: Synthetic oligonucleotide
  Sense strand starting at position 614 of SEQ ID NO: 318393
gaccauaacguugaguuua

SEQ ID NO: 559164 - RNA, 19 nt, Artificial Sequence
  Description of Artificial Sequence: Synthetic oligonucleotide
  Antisense strand to SEQ ID NO: 559163
uaaacucaacguuaugguc

SEQ ID NO: 559165 - RNA, 19 nt, Artificial Sequence
  Description of Artificial Sequence: Synthetic oligonucleotide
  Sense strand starting at position 784 of SEQ ID NO: 318393
guaaacuguccugaaacga

SEQ ID NO: 559166 - RNA, 19 nt, Artificial Sequence
  Description of Artificial Sequence: Synthetic oligonucleotide
  Antisense strand to SEQ ID NO: 559165
ucguuucaggacaguuuac

SEQ ID NO: 559167 - RNA, 19 nt, Artificial Sequence
  Description of Artificial Sequence: Synthetic oligonucleotide
  Sense strand starting at position 984 of SEQ ID NO: 318393
ccguacuauuugccuauua

SEQ ID NO: 559168 - RNA, 19 nt, Artificial Sequence
  Description of Artificial Sequence: Synthetic oligonucleotide
  Antisense strand to SEQ ID NO: 559167
uaauaggcaaauaguacgg

SEQ ID NO: 559169 - RNA, 19 nt, Artificial Sequence
  Description of Artificial Sequence: Synthetic oligonucleotide
  Sense strand starting at position 985 of SEQ ID NO: 318393
cguacuauuugccuauuaa

SEQ ID NO: 559170 - RNA, 19 nt, Artificial Sequence
  Description of Artificial Sequence: Synthetic oligonucleotide
  Antisense strand to SEQ ID NO: 559169
uuaauaggcaaauaguacg

SEQ ID NO: 559171 - RNA, 19 nt, Artificial Sequence
  Description of Artificial Sequence: Synthetic oligonucleotide
  Sense strand starting at position 1098 of SEQ ID NO: 318393
gggcgaaguguguugccaa

SEQ ID NO: 559172 - RNA, 19 nt, Artificial Sequence
  Description of Artificial Sequence: Synthetic oligonucleotide
  Antisense strand to SEQ ID NO: 559171
uuggcaacacacuucgccc

SEQ ID NO: 559173 - RNA, 19 nt, Artificial Sequence
  Description of Artificial Sequence: Synthetic oligonucleotide
  Sense strand starting at position 1168 of SEQ ID NO: 318393
gguccaaaccgauacgaaa

SEQ ID NO: 559174 - RNA, 19 nt, Artificial Sequence
  Description of Artificial Sequence: Synthetic oligonucleotide
  Antisense strand to SEQ ID NO: 559173
uuucguaucgguuuggacc

SEQ ID NO: 559175 - RNA, 19 nt, Artificial Sequence
  Description of Artificial Sequence: Synthetic oligonucleotide
  Sense strand starting at position 1272 of SEQ ID NO: 318393
ucgggaagcgcuuugucuu

SEQ ID NO: 559176 - RNA, 19 nt, Artificial Sequence
  Description of Artificial Sequence: Synthetic oligonucleotide
  Antisense strand to SEQ ID NO: 559175
aagacaaagcgcuucccga

SEQ ID NO: 559177 - RNA, 19 nt, Artificial Sequence
  Description of Artificial Sequence: Synthetic oligonucleotide
  Sense strand starting at position 1320 of SEQ ID NO: 318393
gacuguagccgagaaucua

SEQ ID NO: 559178 - RNA, 19 nt, Artificial Sequence
  Description of Artificial Sequence: Synthetic oligonucleotide
  Antisense strand to SEQ ID NO: 559177
uagauucucggcuacaguc

SEQ ID NO: 559179 - RNA, 19 nt, Artificial Sequence
  Description of Artificial Sequence: Synthetic oligonucleotide
  Sense strand starting at position 1352 of SEQ ID NO: 318393
auuccaugccagggauaga

SEQ ID NO: 559180 - RNA, 19 nt, Artificial Sequence
  Description of Artificial Sequence: Synthetic oligonucleotide
  Antisense strand to SEQ ID NO: 559179
ucuaucccuggcauggaau

SEQ ID NO: 559181 - RNA, 19 nt, Artificial Sequence
  Description of Artificial Sequence: Synthetic oligonucleotide
  Sense strand starting at position 1462 of SEQ ID NO: 318393
cccaaaucugcaggagaaa

SEQ ID NO: 559182 - RNA, 19 nt, Artificial Sequence
  Description of Artificial Sequence: Synthetic oligonucleotide
  Antisense strand to SEQ ID NO: 559181
uuucuccugcagauuuggg

SEQ ID NO: 559183 - RNA, 19 nt, Artificial Sequence
  Description of Artificial Sequence: Synthetic oligonucleotide
  Sense strand starting at position 1829 of SEQ ID NO: 318393
gcaugcucuccggcagagu

SEQ ID NO: 559184 - RNA, 19 nt, Artificial Sequence
  Description of Artificial Sequence: Synthetic oligonucleotide
  Antisense strand to SEQ ID NO: 559183
acucugccggagagcaugc

SEQ ID NO: 559185 - RNA, 19 nt, Artificial Sequence
  Description of Artificial Sequence: Synthetic oligonucleotide
  Sense strand starting at position 2303 of SEQ ID NO: 318393
uuucucguccuguuuguau

SEQ ID NO: 559186 - RNA, 19 nt, Artificial Sequence
  Description of Artificial Sequence: Synthetic oligonucleotide
  Antisense strand to SEQ ID NO: 559185
auacaaacaggacgagaaa

SEQ ID NO: 559187 - RNA, 19 nt, Artificial Sequence
  Description of Artificial Sequence: Synthetic oligonucleotide
  Sense strand starting at position 2357 of SEQ ID NO: 318393
cagacuuugggauguuauu

SEQ ID NO: 559188 - RNA, 19 nt, Artificial Sequence
  Description of Artificial Sequence: Synthetic oligonucleotide
  Antisense strand to SEQ ID NO: 559187
aauaacaucccaaagucug

SEQ ID NO: 559189 - RNA, 19 nt, Artificial Sequence
  Description of Artificial Sequence: Synthetic oligonucleotide
  Sense strand starting at position 2385 of SEQ ID NO: 318393
ggaacagacuucucaugcu

SEQ ID NO: 559190 - RNA, 19 nt, Artificial Sequence
  Description of Artificial Sequence: Synthetic oligonucleotide
  Antisense strand to SEQ ID NO: 559189
agcaugagaagucuguucc

SEQ ID NO: 559191 - RNA, 19 nt, Artificial Sequence
  Description of Artificial Sequence: Synthetic oligonucleotide
  Sense strand starting at position 2446 of SEQ ID NO: 318393
uguaaucuacaacagguua

SEQ ID NO: 559192 - RNA, 19 nt, Artificial Sequence
  Description of Artificial Sequence: Synthetic oligonucleotide
  Antisense strand to SEQ ID NO: 559191
uaaccuguuguagauuaca

SEQ ID NO: 559193 - RNA, 19 nt, Artificial Sequence
  Description of Artificial Sequence: Synthetic oligonucleotide
  Sense strand starting at position 2552 of SEQ ID NO: 318393
guaaguaugagucagugaa

SEQ ID NO: 559194 - RNA, 19 nt, Artificial Sequence
  Description of Artificial Sequence: Synthetic oligonucleotide
  Antisense strand to SEQ ID NO: 559193
uucacugacucauacuuac

SEQ ID NO: 559195 - RNA, 19 nt, Artificial Sequence
  Description of Artificial Sequence: Synthetic oligonucleotide
  Sense strand starting at position 2564 of SEQ ID NO: 318393
cagugaagggcaugguaaa

SEQ ID NO: 559196 - RNA, 19 nt, Artificial Sequence
  Description of Artificial Sequence: Synthetic oligonucleotide
  Antisense strand to SEQ ID NO: 559195
uuuaccaugcccuucacug

SEQ ID NO: 559197 - RNA, 19 nt, Artificial Sequence
  Description of Artificial Sequence: Synthetic oligonucleotide
  Sense strand starting at position 2565 of SEQ ID NO: 318393
agugaagggcaugguaaau

SEQ ID NO: 559198 - RNA, 19 nt, Artificial Sequence
  Description of Artificial Sequence: Synthetic oligonucleotide
  Antisense strand to SEQ ID NO: 559197
auuuaccaugcccuucacu

SEQ ID NO: 559199 - RNA, 19 nt, Artificial Sequence
  Description of Artificial Sequence: Synthetic oligonucleotide
  Sense strand starting at position 2598 of SEQ ID NO: 318393
acuuaauccuggguaccuu

SEQ ID NO: 559200 - RNA, 19 nt, Artificial Sequence
  Description of Artificial Sequence: Synthetic oligonucleotide
  Antisense strand to SEQ ID NO: 559199
aagguacccaggauuaagu

SEQ ID NO: 559201 - RNA, 19 nt, Artificial Sequence
  Description of Artificial Sequence: Synthetic oligonucleotide
  Sense strand starting at position 2609 of SEQ ID NO: 318393
gguaccuugcuccagacau

SEQ ID NO: 559202 - RNA, 19 nt, Artificial Sequence
  Description of Artificial Sequence: Synthetic oligonucleotide
  Antisense strand to SEQ ID NO: 559201
augucuggagcaagguacc

SEQ ID NO: 559203 - RNA, 19 nt, Artificial Sequence
  Description of Artificial Sequence: Synthetic oligonucleotide
  Sense strand starting at position 2704 of SEQ ID NO: 318393
gccucuguccugucaguuu

SEQ ID NO: 559204 - RNA, 19 nt, Artificial Sequence
  Description of Artificial Sequence: Synthetic oligonucleotide
  Antisense strand to SEQ ID NO: 559203
aaacugacaggacagaggc

SEQ ID NO: 559205 - RNA, 19 nt, Artificial Sequence
  Description of Artificial Sequence: Synthetic oligonucleotide
  Sense strand starting at position 2746 of SEQ ID NO: 318393
agccuuaugcuggaagaaa

SEQ ID NO: 559206 - RNA, 19 nt, Artificial Sequence
  Description of Artificial Sequence: Synthetic oligonucleotide
  Antisense strand to SEQ ID NO: 559205
uuucuuccagcauaaggcu

SEQ ID NO: 559207 - RNA, 19 nt, Artificial Sequence
  Description of Artificial Sequence: Synthetic oligonucleotide
  Sense strand starting at position 2780 of SEQ ID NO: 318393
agugacaugcucuaauuau

SEQ ID NO: 559208 - RNA, 19 nt, Artificial Sequence
  Description of Artificial Sequence: Synthetic oligonucleotide
  Antisense strand to SEQ ID NO: 559207
auaauuagagcaugucacu

SEQ ID NO: 559209 - RNA, 19 nt, Artificial Sequence
  Description of Artificial Sequence: Synthetic oligonucleotide
  Sense strand starting at position 2804 of SEQ ID NO: 318393
guagcauuugguggaaugu

SEQ ID NO: 559210 - RNA, 19 nt, Artificial Sequence
  Description of Artificial Sequence: Synthetic oligonucleotide
  Antisense strand to SEQ ID NO: 559209
acauuccaccaaaugcuac

SEQ ID NO: 559211 - RNA, 19 nt, Artificial Sequence
  Description of Artificial Sequence: Synthetic oligonucleotide
  Sense strand starting at position 2836 of SEQ ID NO: 318393
caaagugaucuaugugacu

SEQ ID NO: 559212 - RNA, 19 nt, Artificial Sequence
  Description of Artificial Sequence: Synthetic oligonucleotide
  Antisense strand to SEQ ID NO: 559211
agucacauagaucacuuug

SEQ ID NO: 559213 - RNA, 19 nt, Artificial Sequence
  Description of Artificial Sequence: Synthetic oligonucleotide
  Sense strand starting at position 2891 of SEQ ID NO: 318393
ugccucucucaagagaaau

SEQ ID NO: 559214 - RNA, 19 nt, Artificial Sequence
  Description of Artificial Sequence: Synthetic oligonucleotide
  Antisense strand to SEQ ID NO: 559213
auuucucuugagagaggca

SEQ ID NO: 559215 - RNA, 19 nt, Artificial Sequence
  Description of Artificial Sequence: Synthetic oligonucleotide
  Sense strand starting at position 3005 of SEQ ID NO: 318393
guggccugaauaggaauua

SEQ ID NO: 559216 - RNA, 19 nt, Artificial Sequence
  Description of Artificial Sequence: Synthetic oligonucleotide
  Antisense strand to SEQ ID NO: 559215
uaauuccuauucaggccac

SEQ ID NO: 559217 - RNA, 19 nt, Artificial Sequence
  Description of Artificial Sequence: Synthetic oligonucleotide
  Sense strand starting at position 3015 of SEQ ID NO: 318393
uaggaauuauaagagauga

SEQ ID NO: 559218 - RNA, 19 nt, Artificial Sequence
  Description of Artificial Sequence: Synthetic oligonucleotide
  Antisense strand to SEQ ID NO: 559217
ucaucucuuauaauuccua

SEQ ID NO: 559219 - RNA, 19 nt, Artificial Sequence
  Description of Artificial Sequence: Synthetic oligonucleotide
  Sense strand starting at position 3428 of SEQ ID NO: 318393
caguuaucuuuagugauga

SEQ ID NO: 559220 - RNA, 19 nt, Artificial Sequence
  Description of Artificial Sequence: Synthetic oligonucleotide
  Antisense strand to SEQ ID NO: 559219
ucaucacuaaagauaacug

SEQ ID NO: 559221 - RNA, 19 nt, Artificial Sequence
  Description of Artificial Sequence: Synthetic oligonucleotide
  Sense strand starting at position 3531 of SEQ ID NO: 318393
augauaguuuagcuuacua

SEQ ID NO: 559222 - RNA, 19 nt, Artificial Sequence
  Description of Artificial Sequence: Synthetic oligonucleotide
  Antisense strand to SEQ ID NO: 559221
uaguaagcuaaacuaucau

SEQ ID NO: 559223 - RNA, 19 nt, Artificial Sequence
  Description of Artificial Sequence: Synthetic oligonucleotide
  Sense strand starting at position 3549 of SEQ ID NO: 318393
auaggacucuuggucaaga

SEQ ID NO: 559224 - RNA, 19 nt, Artificial Sequence
  Description of Artificial Sequence: Synthetic oligonucleotide
  Antisense strand to SEQ ID NO: 559223
ucuugaccaagaguccuau

SEQ ID NO: 559225 - RNA, 19 nt, Artificial Sequence
  Description of Artificial Sequence: Synthetic oligonucleotide
  Sense strand starting at position 3621 of SEQ ID NO: 318393
guggucucagggcaugauu

SEQ ID NO: 559226 - RNA, 19 nt, Artificial Sequence
  Description of Artificial Sequence: Synthetic oligonucleotide
  Antisense strand to SEQ ID NO: 559225
aaucaugcccugagaccac

SEQ ID NO: 559227 - RNA, 19 nt, Artificial Sequence
  Description of Artificial Sequence: Synthetic oligonucleotide
  Sense strand starting at position 3792 of SEQ ID NO: 318393
ugcauacauguuuaagaua

SEQ ID NO: 559228 - RNA, 19 nt, Artificial Sequence
  Description of Artificial Sequence: Synthetic oligonucleotide
  Antisense strand to SEQ ID NO: 559227
uaucuuaaacauguaugca

SEQ ID NO: 559229 - RNA, 19 nt, Artificial Sequence
  Description of Artificial Sequence: Synthetic oligonucleotide
  Sense strand starting at position 3921 of SEQ ID NO: 318393
uuagaaacaugcccuguua

SEQ ID NO: 559230 - RNA, 19 nt, Artificial Sequence
  Description of Artificial Sequence: Synthetic oligonucleotide
  Antisense strand to SEQ ID NO: 559229
uaacagggcauguuucuaa

SEQ ID NO: 559231 - RNA, 19 nt, Artificial Sequence
  Description of Artificial Sequence: Synthetic oligonucleotide
  Sense strand starting at position 3923 of SEQ ID NO: 318393
agaaacaugcccuguuaaa

SEQ ID NO: 559232 - RNA, 19 nt, Artificial Sequence
  Description of Artificial Sequence: Synthetic oligonucleotide
  Antisense strand to SEQ ID NO: 559231
uuuaacagggcauguuucu

SEQ ID NO: 559233 - RNA, 19 nt, Artificial Sequence
  Description of Artificial Sequence: Synthetic oligonucleotide
  Sense strand starting at position 3939 of SEQ ID NO: 318393
aaaguauauugagcuuaug

SEQ ID NO: 559234 - RNA, 19 nt, Artificial Sequence
  Description of Artificial Sequence: Synthetic oligonucleotide
  Antisense strand to SEQ ID NO: 559233
cauaagcucaauauacuuu

SEQ ID NO: 559235 - RNA, 19 nt, Artificial Sequence
  Description of Artificial Sequence: Synthetic oligonucleotide
  Sense strand starting at position 100 of SEQ ID NO: 318394
acagaauacucucagguag

SEQ ID NO: 559236 - RNA, 19 nt, Artificial Sequence
  Description of Artificial Sequence: Synthetic oligonucleotide
  Antisense strand to SEQ ID NO: 559235
cuaccugagaguauucugu

SEQ ID NO: 559237 - RNA, 19 nt, Artificial Sequence
  Description of Artificial Sequence: Synthetic oligonucleotide
  Sense strand starting at position 102 of SEQ ID NO: 318394
agaauacucucagguagug

SEQ ID NO: 559238 - RNA, 19 nt, Artificial Sequence
  Description of Artificial Sequence: Synthetic oligonucleotide
  Antisense strand to SEQ ID NO: 559237
cacuaccugagaguauucu

SEQ ID NO: 559239 - RNA, 19 nt, Artificial Sequence
  Description of Artificial Sequence: Synthetic oligonucleotide
  Sense strand starting at position 127 of SEQ ID NO: 318394
ccaagugaguacuucuguu

SEQ ID NO: 559240 - RNA, 19 nt, Artificial Sequence
  Description of Artificial Sequence: Synthetic oligonucleotide
  Antisense strand to SEQ ID NO: 559239
aacagaaguacucacuugg

SEQ ID NO: 559241 - RNA, 19 nt, Artificial Sequence
  Description of Artificial Sequence: Synthetic oligonucleotide
  Sense strand starting at position 131 of SEQ ID NO: 318394
gugaguacuucuguuacaa

SEQ ID NO: 559242 - RNA, 19 nt, Artificial Sequence
  Description of Artificial Sequence: Synthetic oligonucleotide
  Antisense strand to SEQ ID NO: 559241
uuguaacagaaguacucac

SEQ ID NO: 559243 - RNA, 19 nt, Artificial Sequence
  Description of Artificial Sequence: Synthetic oligonucleotide
  Sense strand starting at position 133 of SEQ ID NO: 318394
gaguacuucuguuacaaag

SEQ ID NO: 559244 - RNA, 19 nt, Artificial Sequence
  Description of Artificial Sequence: Synthetic oligonucleotide
  Antisense strand to SEQ ID NO: 559243
cuuuguaacagaaguacuc

SEQ ID NO: 559245 - RNA, 19 nt, Artificial Sequence
  Description of Artificial Sequence: Synthetic oligonucleotide
  Sense strand starting at position 135 of SEQ ID NO: 318394
guacuucuguuacaaagcu

SEQ ID NO: 559246 - RNA, 19 nt, Artificial Sequence
  Description of Artificial Sequence: Synthetic oligonucleotide
  Antisense strand to SEQ ID NO: 559245
agcuuuguaacagaaguac

SEQ ID NO: 559247 - RNA, 19 nt, Artificial Sequence
  Description of Artificial Sequence: Synthetic oligonucleotide
  Sense strand starting at position 222 of SEQ ID NO: 318394
ccuaacuuugaaggcgaaa

SEQ ID NO: 559248 - RNA, 19 nt, Artificial Sequence
  Description of Artificial Sequence: Synthetic oligonucleotide
  Antisense strand to SEQ ID NO: 559247
uuucgccuucaaaguuagg

SEQ ID NO: 559249 - RNA, 19 nt, Artificial Sequence
  Description of Artificial Sequence: Synthetic oligonucleotide
  Sense strand starting at position 447 of SEQ ID NO: 318394
gagccuacaucaguauguu

SEQ ID NO: 559250 - RNA, 19 nt, Artificial Sequence
  Description of Artificial Sequence: Synthetic oligonucleotide
  Antisense strand to SEQ ID NO: 559249
aacauacugauguaggcuc

SEQ ID NO: 559251 - RNA, 19 nt, Artificial Sequence
  Description of Artificial Sequence: Synthetic oligonucleotide
  Sense strand starting at position 495 of SEQ ID NO: 318394
gguuguguuacucacagga

SEQ ID NO: 559252 - RNA, 19 nt, Artificial Sequence
  Description of Artificial Sequence: Synthetic oligonucleotide
  Antisense strand to SEQ ID NO: 559251
uccugugaguaacacaacc

SEQ ID NO: 559253 - RNA, 19 nt, Artificial Sequence
  Description of Artificial Sequence: Synthetic oligonucleotide
  Sense strand starting at position 497 of SEQ ID NO: 318394
uuguguuacucacaggaua

SEQ ID NO: 559254 - RNA, 19 nt, Artificial Sequence
  Description of Artificial Sequence: Synthetic oligonucleotide
  Antisense strand to SEQ ID NO: 559253
uauccugugaguaacacaa

SEQ ID NO: 559255 - RNA, 19 nt, Artificial Sequence
  Description of Artificial Sequence: Synthetic oligonucleotide
  Sense strand starting at position 693 of SEQ ID NO: 318394
ugaggucguccuggguuua

SEQ ID NO: 559256 - RNA, 19 nt, Artificial Sequence
  Description of Artificial Sequence: Synthetic oligonucleotide
  Antisense strand to SEQ ID NO: 559255
uaaacccaggacgaccuca

SEQ ID NO: 559257 - RNA, 19 nt, Artificial Sequence
  Description of Artificial Sequence: Synthetic oligonucleotide
  Sense strand starting at position 960 of SEQ ID NO: 318394
caggcuucuuguggaucaa

SEQ ID NO: 559258 - RNA, 19 nt, Artificial Sequence
  Description of Artificial Sequence: Synthetic oligonucleotide
  Antisense strand to SEQ ID NO: 559257
uugauccacaagaagccug

SEQ ID NO: 559259 - RNA, 19 nt, Artificial Sequence
  Description of Artificial Sequence: Synthetic oligonucleotide
  Sense strand starting at position 964 of SEQ ID NO: 318394
cuucuuguggaucaaguga

SEQ ID NO: 559260 - RNA, 19 nt, Artificial Sequence
  Description of Artificial Sequence: Synthetic oligonucleotide
  Antisense strand to SEQ ID NO: 559259
ucacuugauccacaagaag

SEQ ID NO: 559261 - RNA, 19 nt, Artificial Sequence
  Description of Artificial Sequence: Synthetic oligonucleotide
  Sense strand starting at position 1477 of SEQ ID NO: 318394
gggagauugugggaugugu

SEQ ID NO: 559262 - RNA, 19 nt, Artificial Sequence
  Description of Artificial Sequence: Synthetic oligonucleotide
  Antisense strand to SEQ ID NO: 559261
acacaucccacaaucuccc

SEQ ID NO: 559263 - RNA, 19 nt, Artificial Sequence
  Description of Artificial Sequence: Synthetic oligonucleotide
  Sense strand starting at position 2152 of SEQ ID NO: 318394
uuucgaagucccugucuga

SEQ ID NO: 559264 - RNA, 19 nt, Artificial Sequence
  Description of Artificial Sequence: Synthetic oligonucleotide
  Antisense strand to SEQ ID NO: 559263
ucagacagggacuucgaaa

SEQ ID NO: 559265 - RNA, 19 nt, Artificial Sequence
  Description of Artificial Sequence: Synthetic oligonucleotide
  Sense strand starting at position 2290 of SEQ ID NO: 318394
aggcgcuucccuggaaaug

SEQ ID NO: 559266 - RNA, 19 nt, Artificial Sequence
  Description of Artificial Sequence: Synthetic oligonucleotide
  Antisense strand to SEQ ID NO: 559265
cauuuccagggaagcgccu

SEQ ID NO: 559267 - RNA, 19 nt, Artificial Sequence
  Description of Artificial Sequence: Synthetic oligonucleotide
  Sense strand starting at position 2383 of SEQ ID NO: 318394
uggaguagcucugcaggau

SEQ ID NO: 559268 - RNA, 19 nt, Artificial Sequence
  Description of Artificial Sequence: Synthetic oligonucleotide
  Antisense strand to SEQ ID NO: 559267
auccugcagagcuacucca

SEQ ID NO: 559269 - RNA, 19 nt, Artificial Sequence
  Description of Artificial Sequence: Synthetic oligonucleotide
  Sense strand starting at position 2384 of SEQ ID NO: 318394
ggaguagcucugcaggaug

SEQ ID NO: 559270 - RNA, 19 nt, Artificial Sequence
  Description of Artificial Sequence: Synthetic oligonucleotide
  Antisense strand to SEQ ID NO: 559269
cauccugcagagcuacucc

SEQ ID NO: 559271 - RNA, 19 nt, Artificial Sequence
  Description of Artificial Sequence: Synthetic oligonucleotide
  Sense strand starting at position 2909 of SEQ ID NO: 318394
gguguccuguuccuuggaa

SEQ ID NO: 559272 - RNA, 19 nt, Artificial Sequence
  Description of Artificial Sequence: Synthetic oligonucleotide
  Antisense strand to SEQ ID NO: 559271
uuccaaggaacaggacacc

SEQ ID NO: 559273 - RNA, 19 nt, Artificial Sequence
  Description of Artificial Sequence: Synthetic oligonucleotide
  Sense strand starting at position 2911 of SEQ ID NO: 318394
uguccuguuccuuggaaca

SEQ ID NO: 559274 - RNA, 19 nt, Artificial Sequence
  Description of Artificial Sequence: Synthetic oligonucleotide
  Antisense strand to SEQ ID NO: 559273
uguuccaaggaacaggaca

SEQ ID NO: 559275 - RNA, 19 nt, Artificial Sequence
  Description of Artificial Sequence: Synthetic oligonucleotide
  Sense strand starting at position 2913 of SEQ ID NO: 318394
uccuguuccuuggaacaua

SEQ ID NO: 559276 - RNA, 19 nt, Artificial Sequence
  Description of Artificial Sequence: Synthetic oligonucleotide
  Antisense strand to SEQ ID NO: 559275
uauguuccaaggaacagga

SEQ ID NO: 559277 - RNA, 19 nt, Artificial Sequence
  Description of Artificial Sequence: Synthetic oligonucleotide
  Sense strand starting at position 2934 of SEQ ID NO: 318394
gcaggucauuaggacuaga

SEQ ID NO: 559278 - RNA, 19 nt, Artificial Sequence
  Description of Artificial Sequence: Synthetic oligonucleotide
  Antisense strand to SEQ ID NO: 559277
ucuaguccuaaugaccugc

SEQ ID NO: 559279 - RNA, 19 nt, Artificial Sequence
  Description of Artificial Sequence: Synthetic oligonucleotide
  Sense strand starting at position 2997 of SEQ ID NO: 318394
uuguauagcucuuccugga

SEQ ID NO: 559280 - RNA, 19 nt, Artificial Sequence
  Description of Artificial Sequence: Synthetic oligonucleotide
  Antisense strand to SEQ ID NO: 559279
uccaggaagagcuauacaa

SEQ ID NO: 559281 - RNA, 19 nt, Artificial Sequence
  Description of Artificial Sequence: Synthetic oligonucleotide
  Sense strand starting at position 3091 of SEQ ID NO: 318394
aaggaugaguugucccuca

SEQ ID NO: 559282 - RNA, 19 nt, Artificial Sequence
  Description of Artificial Sequence: Synthetic oligonucleotide
  Antisense strand to SEQ ID NO: 559281
ugagggacaacucauccuu

SEQ ID NO: 559283 - RNA, 19 nt, Artificial Sequence
  Description of Artificial Sequence: Synthetic oligonucleotide
  Sense strand starting at position 3096 of SEQ ID NO: 318394
ugaguugucccucagagug

SEQ ID NO: 559284 - RNA, 19 nt, Artificial Sequence
  Description of Artificial Sequence: Synthetic oligonucleotide
  Antisense strand to SEQ ID NO: 559283
cacucugagggacaacuca

SEQ ID NO: 559285 - RNA, 19 nt, Artificial Sequence
  Description of Artificial Sequence: Synthetic oligonucleotide
  Sense strand starting at position 3274 of SEQ ID NO: 318394
ccaggaugcuggugaauuu

SEQ ID NO: 559286 - RNA, 19 nt, Artificial Sequence
  Description of Artificial Sequence: Synthetic oligonucleotide
  Antisense strand to SEQ ID NO: 559285
aaauucaccagcauccugg

SEQ ID NO: 559287 - RNA, 19 nt, Artificial Sequence
  Description of Artificial Sequence: Synthetic oligonucleotide
  Sense strand starting at position 3314 of SEQ ID NO: 318394
cccuuuaaauagcugagau

SEQ ID NO: 559288 - RNA, 19 nt, Artificial Sequence
  Description of Artificial Sequence: Synthetic oligonucleotide
  Antisense strand to SEQ ID NO: 559287
aucucagcuauuuaaaggg

SEQ ID NO: 559289 - RNA, 19 nt, Artificial Sequence
  Description of Artificial Sequence: Synthetic oligonucleotide
  Sense strand starting at position 3345 of SEQ ID NO: 318394
acaauuguguacuuuaacu

SEQ ID NO: 559290 - RNA, 19 nt, Artificial Sequence
  Description of Artificial Sequence: Synthetic oligonucleotide
  Antisense strand to SEQ ID NO: 559289
aguuaaaguacacaauugu

SEQ ID NO: 559291 - RNA, 19 nt, Artificial Sequence
  Description of Artificial Sequence: Synthetic oligonucleotide
  Sense strand starting at position 3385 of SEQ ID NO: 318394
auuagcauuuccugugcua

SEQ ID NO: 559292 - RNA, 19 nt, Artificial Sequence
  Description of Artificial Sequence: Synthetic oligonucleotide
  Antisense strand to SEQ ID NO: 559291
uagcacaggaaaugcuaau

SEQ ID NO: 559293 - RNA, 19 nt, Artificial Sequence
  Description of Artificial Sequence: Synthetic oligonucleotide
  Sense strand starting at position 3388 of SEQ ID NO: 318394
agcauuuccugugcuauua

SEQ ID NO: 559294 - RNA, 19 nt, Artificial Sequence
  Description of Artificial Sequence: Synthetic oligonucleotide
  Antisense strand to SEQ ID NO: 559293
uaauagcacaggaaaugcu

SEQ ID NO: 559295 - RNA, 19 nt, Artificial Sequence
  Description of Artificial Sequence: Synthetic oligonucleotide
  Sense strand starting at position 3423 of SEQ ID NO: 318394
cacuuaacuguugaguguu

SEQ ID NO: 559296 - RNA, 19 nt, Artificial Sequence
  Description of Artificial Sequence: Synthetic oligonucleotide
  Antisense strand to SEQ ID NO: 559295
aacacucaacaguuaagug

SEQ ID NO: 559297 - RNA, 19 nt, Artificial Sequence
  Description of Artificial Sequence: Synthetic oligonucleotide
  Sense strand starting at position 3425 of SEQ ID NO: 318394
cuuaacuguugaguguuua

SEQ ID NO: 559298 - RNA, 19 nt, Artificial Sequence
  Description of Artificial Sequence: Synthetic oligonucleotide
  Antisense strand to SEQ ID NO: 559297
uaaacacucaacaguuaag

SEQ ID NO: 559299 - RNA, 19 nt, Artificial Sequence
  Description of Artificial Sequence: Synthetic oligonucleotide
  Sense strand starting at position 3426 of SEQ ID NO: 318394
uuaacuguugaguguuuau

SEQ ID NO: 559300 - RNA, 19 nt, Artificial Sequence
  Description of Artificial Sequence: Synthetic oligonucleotide
  Antisense strand to SEQ ID NO: 559299
auaaacacucaacaguuaa

SEQ ID NO: 559301 - RNA, 19 nt, Artificial Sequence
  Description of Artificial Sequence: Synthetic oligonucleotide
  Sense strand starting at position 3449 of SEQ ID NO: 318394
cccaaauguugcucugaca

SEQ ID NO: 559302 - RNA, 19 nt, Artificial Sequence
  Description of Artificial Sequence: Synthetic oligonucleotide
  Antisense strand to SEQ ID NO: 559301
ugucagagcaacauuuggg

SEQ ID NO: 559303 - RNA, 19 nt, Artificial Sequence
  Description of Artificial Sequence: Synthetic oligonucleotide
  Sense strand starting at position 3515 of SEQ ID NO: 318394
ucaguugcuucugcagaau

SEQ ID NO: 559304 - RNA, 19 nt, Artificial Sequence
  Description of Artificial Sequence: Synthetic oligonucleotide
  Antisense strand to SEQ ID NO: 559303
auucugcagaagcaacuga

SEQ ID NO: 559305 - RNA, 19 nt, Artificial Sequence
  Description of Artificial Sequence: Synthetic oligonucleotide
  Sense strand starting at position 3518 of SEQ ID NO: 318394
guugcuucugcagaaucuu

SEQ ID NO: 559306 - RNA, 19 nt, Artificial Sequence
  Description of Artificial Sequence: Synthetic oligonucleotide
  Antisense strand to SEQ ID NO: 559305
aagauucugcagaagcaac

SEQ ID NO: 559307 - RNA, 19 nt, Artificial Sequence
  Description of Artificial Sequence: Synthetic oligonucleotide
  Sense strand starting at position 3526 of SEQ ID NO: 318394
ugcagaaucuuacaccaag

SEQ ID NO: 559308 - RNA, 19 nt, Artificial Sequence
  Description of Artificial Sequence: Synthetic oligonucleotide
  Antisense strand to SEQ ID NO: 559307
cuugguguaagauucugca

SEQ ID NO: 559309 - RNA, 19 nt, Artificial Sequence
  Description of Artificial Sequence: Synthetic oligonucleotide
  Sense strand starting at position 3693 of SEQ ID NO: 318394
uuuccagaauggcaauaaa

SEQ ID NO: 559310 - RNA, 19 nt, Artificial Sequence
  Description of Artificial Sequence: Synthetic oligonucleotide
  Antisense strand to SEQ ID NO: 559309
uuuauugccauucuggaaa

SEQ ID NO: 559311 - RNA, 19 nt, Artificial Sequence
  Description of Artificial Sequence: Synthetic oligonucleotide
  Sense strand starting at position 3957 of SEQ ID NO: 318394
acggaacuaucauugauau

SEQ ID NO: 559312 - RNA, 19 nt, Artificial Sequence
  Description of Artificial Sequence: Synthetic oligonucleotide
  Antisense strand to SEQ ID NO: 559311
auaucaaugauaguuccgu

SEQ ID NO: 559313 - RNA, 19 nt, Artificial Sequence
  Description of Artificial Sequence: Synthetic oligonucleotide
  Sense strand starting at position 3958 of SEQ ID NO: 318394
cggaacuaucauugauaug

SEQ ID NO: 559314 - RNA, 19 nt, Artificial Sequence
  Description of Artificial Sequence: Synthetic oligonucleotide
  Antisense strand to SEQ ID NO: 559313
cauaucaaugauaguuccg

SEQ ID NO: 559315 - RNA, 19 nt, Artificial Sequence
  Description of Artificial Sequence: Synthetic oligonucleotide
  Sense strand starting at position 245 of SEQ ID NO: 318395
gcgucaaugacuuaccuag

SEQ ID NO: 559316 - RNA, 19 nt, Artificial Sequence
  Description of Artificial Sequence: Synthetic oligonucleotide
  Antisense strand to SEQ ID NO: 559315
cuagguaagucauugacgc

SEQ ID NO: 559317 - RNA, 19 nt, Artificial Sequence
  Description of Artificial Sequence: Synthetic oligonucleotide
  Sense strand starting at position 247 of SEQ ID NO: 318395
gucaaugacuuaccuaguu

SEQ ID NO: 559318 - RNA, 19 nt, Artificial Sequence
  Description of Artificial Sequence: Synthetic oligonucleotide
  Antisense strand to SEQ ID NO: 559317
aacuagguaagucauugac

SEQ ID NO: 559319 - RNA, 19 nt, Artificial Sequence
  Description of Artificial Sequence: Synthetic oligonucleotide
  Sense strand starting at position 252 of SEQ ID NO: 318395
ugacuuaccuaguuugaga

SEQ ID NO: 559320 - RNA, 19 nt, Artificial Sequence
  Description of Artificial Sequence: Synthetic oligonucleotide
  Antisense strand to SEQ ID NO: 559319
ucucaaacuagguaaguca

SEQ ID NO: 559321 - RNA, 19 nt, Artificial Sequence
  Description of Artificial Sequence: Synthetic oligonucleotide
  Sense strand starting at position 265 of SEQ ID NO: 318395
uugagaucucugugcaaga

SEQ ID NO: 559322 - RNA, 19 nt, Artificial Sequence
  Description of Artificial Sequence: Synthetic oligonucleotide
  Antisense strand to SEQ ID NO: 559321
ucuugcacagagaucucaa

SEQ ID NO: 559323 - RNA, 19 nt, Artificial Sequence
  Description of Artificial Sequence: Synthetic oligonucleotide
  Sense strand starting at position 266 of SEQ ID NO: 318395
ugagaucucugugcaagau

SEQ ID NO: 559324 - RNA, 19 nt, Artificial Sequence
  Description of Artificial Sequence: Synthetic oligonucleotide
  Antisense strand to SEQ ID NO: 559323
aucuugcacagagaucuca

SEQ ID NO: 559325 - RNA, 19 nt, Artificial Sequence
  Description of Artificial Sequence: Synthetic oligonucleotide
  Sense strand starting at position 267 of SEQ ID NO: 318395
gagaucucugugcaagauu

SEQ ID NO: 559326 - RNA, 19 nt, Artificial Sequence
  Description of Artificial Sequence: Synthetic oligonucleotide
  Antisense strand to SEQ ID NO: 559325
aaucuugcacagagaucuc

SEQ ID NO: 559327 - RNA, 19 nt, Artificial Sequence
  Description of Artificial Sequence: Synthetic oligonucleotide
  Sense strand starting at position 313 of SEQ ID NO: 318395
gacacaaucugccugaggu

SEQ ID NO: 559328 - RNA, 19 nt, Artificial Sequence
  Description of Artificial Sequence: Synthetic oligonucleotide
  Antisense strand to SEQ ID NO: 559327
accucaggcagauuguguc

SEQ ID NO: 559329 - RNA, 19 nt, Artificial Sequence
  Description of Artificial Sequence: Synthetic oligonucleotide
  Sense strand starting at position 314 of SEQ ID NO: 318395
acacaaucugccugaggua

SEQ ID NO: 559330 - RNA, 19 nt, Artificial Sequence
  Description of Artificial Sequence: Synthetic oligonucleotide
  Antisense strand to SEQ ID NO: 559329
uaccucaggcagauugugu

SEQ ID NO: 559331 - RNA, 19 nt, Artificial Sequence
  Description of Artificial Sequence: Synthetic oligonucleotide
  Sense strand starting at position 457 of SEQ ID NO: 318395
caggaugagcaaugaaagu

SEQ ID NO: 559332 - RNA, 19 nt, Artificial Sequence
  Description of Artificial Sequence: Synthetic oligonucleotide
  Antisense strand to SEQ ID NO: 559331
acuuucauugcucauccug

SEQ ID NO: 559333 - RNA, 19 nt, Artificial Sequence
  Description of Artificial Sequence: Synthetic oligonucleotide
  Sense strand starting at position 550 of SEQ ID NO: 318395
guaagcaaauguucucaaa

SEQ ID NO: 559334 - RNA, 19 nt, Artificial Sequence
  Description of Artificial Sequence: Synthetic oligonucleotide
  Antisense strand to SEQ ID NO: 559333
uuugagaacauuugcuuac

SEQ ID NO: 559335 - RNA, 19 nt, Artificial Sequence
  Description of Artificial Sequence: Synthetic oligonucleotide
  Sense strand starting at position 651 of SEQ ID NO: 318395
gcacuacaugcuuaugaug

SEQ ID NO: 559336 - RNA, 19 nt, Artificial Sequence
  Description of Artificial Sequence: Synthetic oligonucleotide
  Antisense strand to SEQ ID NO: 559335
caucauaagcauguagugc

SEQ ID NO: 559337 - RNA, 19 nt, Artificial Sequence
  Description of Artificial Sequence: Synthetic oligonucleotide
  Sense strand starting at position 668 of SEQ ID NO: 318395
ugaagaauucugugaagcu

SEQ ID NO: 559338 - RNA, 19 nt, Artificial Sequence
  Description of Artificial Sequence: Synthetic oligonucleotide
  Antisense strand to SEQ ID NO: 559337
agcuucacagaauucuuca

SEQ ID NO: 559339 - RNA, 19 nt, Artificial Sequence
  Description of Artificial Sequence: Synthetic oligonucleotide
  Sense strand starting at position 872 of SEQ ID NO: 318395
cucugcugugaggaauaau

SEQ ID NO: 559340 - RNA, 19 nt, Artificial Sequence
  Description of Artificial Sequence: Synthetic oligonucleotide
  Antisense strand to SEQ ID NO: 559339
auuauuccucacagcagag

SEQ ID NO: 559341 - RNA, 19 nt, Artificial Sequence
  Description of Artificial Sequence: Synthetic oligonucleotide
  Sense strand starting at position 897 of SEQ ID NO: 318395
ggcguagacuuuguuauuu

SEQ ID NO: 559342 - RNA, 19 nt, Artificial Sequence
  Description of Artificial Sequence: Synthetic oligonucleotide
  Antisense strand to SEQ ID NO: 559341
aaauaacaaagucuacgcc

SEQ ID NO: 559343 - RNA, 19 nt, Artificial Sequence
  Description of Artificial Sequence: Synthetic oligonucleotide
  Sense strand starting at position 1122 of SEQ ID NO: 318395
agagaaaugcauugcugga

SEQ ID NO: 559344 - RNA, 19 nt, Artificial Sequence
  Description of Artificial Sequence: Synthetic oligonucleotide
  Antisense strand to SEQ ID NO: 559343
uccagcaaugcauuucucu

SEQ ID NO: 559345 - RNA, 19 nt, Artificial Sequence
  Description of Artificial Sequence: Synthetic oligonucleotide
  Sense strand starting at position 1124 of SEQ ID NO: 318395
agaaaugcauugcuggaaa

SEQ ID NO: 559346 - RNA, 19 nt, Artificial Sequence
  Description of Artificial Sequence: Synthetic oligonucleotide
  Antisense strand to SEQ ID NO: 559345
uuuccagcaaugcauuucu

SEQ ID NO: 559347 - RNA, 19 nt, Artificial Sequence
  Description of Artificial Sequence: Synthetic oligonucleotide
  Sense strand starting at position 1183 of SEQ ID NO: 318395
gagcuuuauggagggaguu

SEQ ID NO: 559348 - RNA, 19 nt, Artificial Sequence
  Description of Artificial Sequence: Synthetic oligonucleotide
  Antisense strand to SEQ ID NO: 559347
aacucccuccauaaagcuc

SEQ ID NO: 559349 - RNA, 19 nt, Artificial Sequence
  Description of Artificial Sequence: Synthetic oligonucleotide
  Sense strand starting at position 1270 of SEQ ID NO: 318395
gggagagaggucugaugua

SEQ ID NO: 559350 - RNA, 19 nt, Artificial Sequence
  Description of Artificial Sequence: Synthetic oligonucleotide
  Antisense strand to SEQ ID NO: 559349
uacaucagaccucucuccc

SEQ ID NO: 559351 - RNA, 19 nt, Artificial Sequence
  Description of Artificial Sequence: Synthetic oligonucleotide
  Sense strand starting at position 1343 of SEQ ID NO: 318395
caguucugaggcuaagaau

SEQ ID NO: 559352 - RNA, 19 nt, Artificial Sequence
  Description of Artificial Sequence: Synthetic oligonucleotide
  Antisense strand to SEQ ID NO: 559351
auucuuagccucagaacug

SEQ ID NO: 559353 - RNA, 19 nt, Artificial Sequence
  Description of Artificial Sequence: Synthetic oligonucleotide
  Sense strand starting at position 1600 of SEQ ID NO: 318395
acgauaauccgcgagaucu

SEQ ID NO: 559354 - RNA, 19 nt, Artificial Sequence
  Description of Artificial Sequence: Synthetic oligonucleotide
  Antisense strand to SEQ ID NO: 559353
agaucucgcggauuaucgu

SEQ ID NO: 559355 - RNA, 19 nt, Artificial Sequence
  Description of Artificial Sequence: Synthetic oligonucleotide
  Sense strand starting at position 2800 of SEQ ID NO: 318395
ugccguuaggugucgaagu

SEQ ID NO: 559356 - RNA, 19 nt, Artificial Sequence
  Description of Artificial Sequence: Synthetic oligonucleotide
  Antisense strand to SEQ ID NO: 559355
acuucgacaccuaacggca

SEQ ID NO: 559357 - RNA, 19 nt, Artificial Sequence
  Description of Artificial Sequence: Synthetic oligonucleotide
  Sense strand starting at position 2876 of SEQ ID NO: 318395
gauugugaguuuccaauca

SEQ ID NO: 559358 - RNA, 19 nt, Artificial Sequence
  Description of Artificial Sequence: Synthetic oligonucleotide
  Antisense strand to SEQ ID NO: 559357
ugauuggaaacucacaauc

SEQ ID NO: 559359 - RNA, 19 nt, Artificial Sequence
  Description of Artificial Sequence: Synthetic oligonucleotide
  Sense strand starting at position 2900 of SEQ ID NO: 318395
aucuaugacuucuuccgaa

SEQ ID NO: 559360 - RNA, 19 nt, Artificial Sequence
  Description of Artificial Sequence: Synthetic oligonucleotide
  Antisense strand to SEQ ID NO: 559359
uucggaagaagucauagau

SEQ ID NO: 559361 - RNA, 19 nt, Artificial Sequence
  Description of Artificial Sequence: Synthetic oligonucleotide
  Sense strand starting at position 3069 of SEQ ID NO: 318395
caguuugacuaaucuagga

SEQ ID NO: 559362 - RNA, 19 nt, Artificial Sequence
  Description of Artificial Sequence: Synthetic oligonucleotide
  Antisense strand to SEQ ID NO: 559361
uccuagauuagucaaacug

SEQ ID NO: 559363 - RNA, 19 nt, Artificial Sequence
  Description of Artificial Sequence: Synthetic oligonucleotide
  Sense strand starting at position 3114 of SEQ ID NO: 318395
uucuaauuacgauagagua

SEQ ID NO: 559364 - RNA, 19 nt, Artificial Sequence
  Description of Artificial Sequence: Synthetic oligonucleotide
  Antisense strand to SEQ ID NO: 559363
uacucuaucguaauuagaa

SEQ ID NO: 559365 - RNA, 19 nt, Artificial Sequence
  Description of Artificial Sequence: Synthetic oligonucleotide
  Sense strand starting at position 3122 of SEQ ID NO: 318395
acgauagaguaacauuuau

SEQ ID NO: 559366 - RNA, 19 nt, Artificial Sequence
  Description of Artificial Sequence: Synthetic oligonucleotide
  Antisense strand to SEQ ID NO: 559365
auaaauguuacucuaucgu

SEQ ID NO: 559367 - RNA, 19 nt, Artificial Sequence
  Description of Artificial Sequence: Synthetic oligonucleotide
  Sense strand starting at position 3193 of SEQ ID NO: 318395
agagaaauauuguaaggaa

SEQ ID NO: 559368 - RNA, 19 nt, Artificial Sequence
  Description of Artificial Sequence: Synthetic oligonucleotide
  Antisense strand to SEQ ID NO: 559367
uuccuuacaauauuucucu

SEQ ID NO: 559369 - RNA, 19 nt, Artificial Sequence
  Description of Artificial Sequence: Synthetic oligonucleotide
  Sense strand starting at position 3423 of SEQ ID NO: 318395
ccaggaaauguacgguaaa

SEQ ID NO: 559370 - RNA, 19 nt, Artificial Sequence
  Description of Artificial Sequence: Synthetic oligonucleotide
  Antisense strand to SEQ ID NO: 559369
uuuaccguacauuuccugg

SEQ ID NO: 559371 - RNA, 19 nt, Artificial Sequence
  Description of Artificial Sequence: Synthetic oligonucleotide
  Sense strand starting at position 3593 of SEQ ID NO: 318395
ucccuuacgaaaggguaau

SEQ ID NO: 559372 - RNA, 19 nt, Artificial Sequence
  Description of Artificial Sequence: Synthetic oligonucleotide
  Antisense strand to SEQ ID NO: 559371
auuacccuuucguaaggga

SEQ ID NO: 559373 - RNA, 19 nt, Artificial Sequence
  Description of Artificial Sequence: Synthetic oligonucleotide
  Sense strand starting at position 3594 of SEQ ID NO: 318395
cccuuacgaaaggguaaua

SEQ ID NO: 559374 - RNA, 19 nt, Artificial Sequence
  Description of Artificial Sequence: Synthetic oligonucleotide
  Antisense strand to SEQ ID NO: 559373
uauuacccuuucguaaggg

SEQ ID NO: 559375 - RNA, 19 nt, Artificial Sequence
  Description of Artificial Sequence: Synthetic oligonucleotide
  Sense strand starting at position 3671 of SEQ ID NO: 318395
aucuuuaucccagggccau

SEQ ID NO: 559376 - RNA, 19 nt, Artificial Sequence
  Description of Artificial Sequence: Synthetic oligonucleotide
  Antisense strand to SEQ ID NO: 559375
auggcccugggauaaagau

SEQ ID NO: 559377 - RNA, 19 nt, Artificial Sequence
  Description of Artificial Sequence: Synthetic oligonucleotide
  Sense strand starting at position 3672 of SEQ ID NO: 318395
ucuuuaucccagggccaua

SEQ ID NO: 559378 - RNA, 19 nt, Artificial Sequence
  Description of Artificial Sequence: Synthetic oligonucleotide
  Antisense strand to SEQ ID NO: 559377
uauggcccugggauaaaga

SEQ ID NO: 559379 - RNA, 19 nt, Artificial Sequence
  Description of Artificial Sequence: Synthetic oligonucleotide
  Sense strand starting at position 3752 of SEQ ID NO: 318395
gaacuuagguaauuauugu

SEQ ID NO: 559380 - RNA, 19 nt, Artificial Sequence
  Description of Artificial Sequence: Synthetic oligonucleotide
  Antisense strand to SEQ ID NO: 559379
acaauaauuaccuaaguuc

SEQ ID NO: 559381 - RNA, 19 nt, Artificial Sequence
  Description of Artificial Sequence: Synthetic oligonucleotide
  Sense strand starting at position 3777 of SEQ ID NO: 318395
uuacuagaucaucgagguu

SEQ ID NO: 559382 - RNA, 19 nt, Artificial Sequence
  Description of Artificial Sequence: Synthetic oligonucleotide
  Antisense strand to SEQ ID NO: 559381
aaccucgaugaucuaguaa

SEQ ID NO: 559383 - RNA, 19 nt, Artificial Sequence
  Description of Artificial Sequence: Synthetic oligonucleotide
  Sense strand starting at position 3783 of SEQ ID NO: 318395
gaucaucgagguuagguua

SEQ ID NO: 559384 - RNA, 19 nt, Artificial Sequence
  Description of Artificial Sequence: Synthetic oligonucleotide
  Antisense strand to SEQ ID NO: 559383
uaaccuaaccucgaugauc

SEQ ID NO: 559385 - RNA, 19 nt, Artificial Sequence
  Description of Artificial Sequence: Synthetic oligonucleotide
  Sense strand starting at position 3786 of SEQ ID NO: 318395
caucgagguuagguuaauu

SEQ ID NO: 559386 - RNA, 19 nt, Artificial Sequence
  Description of Artificial Sequence: Synthetic oligonucleotide
  Antisense strand to SEQ ID NO: 559385
aauuaaccuaaccucgaug

SEQ ID NO: 559387 - RNA, 19 nt, Artificial Sequence
  Description of Artificial Sequence: Synthetic oligonucleotide
  Sense strand starting at position 3833 of SEQ ID NO: 318395
guuaacaggauaugguaaa

SEQ ID NO: 559388 - RNA, 19 nt, Artificial Sequence
  Description of Artificial Sequence: Synthetic oligonucleotide
  Antisense strand to SEQ ID NO: 559387
uuuaccauauccuguuaac

SEQ ID NO: 559389 - RNA, 19 nt, Artificial Sequence
  Description of Artificial Sequence: Synthetic oligonucleotide
  Sense strand starting at position 3896 of SEQ ID NO: 318395
uauugaaucccuggaaggu

SEQ ID NO: 559390 - RNA, 19 nt, Artificial Sequence
  Description of Artificial Sequence: Synthetic oligonucleotide
  Antisense strand to SEQ ID NO: 559389
accuuccagggauucaaua

SEQ ID NO: 559391 - RNA, 19 nt, Artificial Sequence
  Description of Artificial Sequence: Synthetic oligonucleotide
  Sense strand starting at position 3946 of SEQ ID NO: 318395
aauuuagguauguguggua

SEQ ID NO: 559392 - RNA, 19 nt, Artificial Sequence
  Description of Artificial Sequence: Synthetic oligonucleotide
  Antisense strand to SEQ ID NO: 559391
uaccacacauaccuaaauu

SEQ ID NO: 559393 - RNA, 19 nt, Artificial Sequence
  Description of Artificial Sequence: Synthetic oligonucleotide
  Sense strand starting at position 3960 of SEQ ID NO: 318395
ugguaucaacauuaaucga

SEQ ID NO: 559394 - RNA, 19 nt, Artificial Sequence
  Description of Artificial Sequence: Synthetic oligonucleotide
  Antisense strand to SEQ ID NO: 559393
ucgauuaauguugauacca

SEQ ID NO: 559395 - RNA, 19 nt, Artificial Sequence
  Description of Artificial Sequence: Synthetic oligonucleotide
  Sense strand starting at position 66 of SEQ ID NO: 318396
ggaaaucgcccuuauaauc

SEQ ID NO: 559396 - RNA, 19 nt, Artificial Sequence
  Description of Artificial Sequence: Synthetic oligonucleotide
  Antisense strand to SEQ ID NO: 559395
gauuauaagggcgauuucc

SEQ ID NO: 559397 - RNA, 19 nt, Artificial Sequence
  Description of Artificial Sequence: Synthetic oligonucleotide
  Sense strand starting at position 200 of SEQ ID NO: 318396
cauaaaugugaauguguau

SEQ ID NO: 559398 - RNA, 19 nt, Artificial Sequence
  Description of Artificial Sequence: Synthetic oligonucleotide
  Antisense strand to SEQ ID NO: 559397
auacacauucacauuuaug

SEQ ID NO: 559399 - RNA, 19 nt, Artificial Sequence
  Description of Artificial Sequence: Synthetic oligonucleotide
  Sense strand starting at position 229 of SEQ ID NO: 318396
agaagaucuuucgcuuuaa

SEQ ID NO: 559400 - RNA, 19 nt, Artificial Sequence
  Description of Artificial Sequence: Synthetic oligonucleotide
  Antisense strand to SEQ ID NO: 559399
uuaaagcgaaagaucuucu

SEQ ID NO: 559401 - RNA, 19 nt, Artificial Sequence
  Description of Artificial Sequence: Synthetic oligonucleotide
  Sense strand starting at position 285 of SEQ ID NO: 318396
aaggacuacgacugugaau

SEQ ID NO: 559402 - RNA, 19 nt, Artificial Sequence
  Description of Artificial Sequence: Synthetic oligonucleotide
  Antisense strand to SEQ ID NO: 559401
auucacagucguaguccuu

SEQ ID NO: 559403 - RNA, 19 nt, Artificial Sequence
  Description of Artificial Sequence: Synthetic oligonucleotide
  Sense strand starting at position 287 of SEQ ID NO: 318396
ggacuacgacugugaauga

SEQ ID NO: 559404 - RNA, 19 nt, Artificial Sequence
  Description of Artificial Sequence: Synthetic oligonucleotide
  Antisense strand to SEQ ID NO: 559403
ucauucacagucguagucc

SEQ ID NO: 559405 - RNA, 19 nt, Artificial Sequence
  Description of Artificial Sequence: Synthetic oligonucleotide
  Sense strand starting at position 456 of SEQ ID NO: 318396
ccaugaggauuggauagaa

SEQ ID NO: 559406 - RNA, 19 nt, Artificial Sequence
  Description of Artificial Sequence: Synthetic oligonucleotide
  Antisense strand to SEQ ID NO: 559405
uucuauccaauccucaugg

SEQ ID NO: 559407 - RNA, 19 nt, Artificial Sequence
  Description of Artificial Sequence: Synthetic oligonucleotide
  Sense strand starting at position 466 of SEQ ID NO: 318396
uggauagaauuuggagauu

SEQ ID NO: 559408 - RNA, 19 nt, Artificial Sequence
  Description of Artificial Sequence: Synthetic oligonucleotide
  Antisense strand to SEQ ID NO: 559407
aaucuccaaauucuaucca

SEQ ID NO: 559409 - RNA, 19 nt, Artificial Sequence
  Description of Artificial Sequence: Synthetic oligonucleotide
  Sense strand starting at position 490 of SEQ ID NO: 318396
guugcugagacguuugcuu

SEQ ID NO: 559410 - RNA, 19 nt, Artificial Sequence
  Description of Artificial Sequence: Synthetic oligonucleotide
  Antisense strand to SEQ ID NO: 559409
aagcaaacgucucagcaac

SEQ ID NO: 559411 - RNA, 19 nt, Artificial Sequence
  Description of Artificial Sequence: Synthetic oligonucleotide
  Sense strand starting at position 497 of SEQ ID NO: 318396
agacguuugcuugaacaau

SEQ ID NO: 559412 - RNA, 19 nt, Artificial Sequence
  Description of Artificial Sequence: Synthetic oligonucleotide
  Antisense strand to SEQ ID NO: 559411
auuguucaagcaaacgucu

SEQ ID NO: 559413 - RNA, 19 nt, Artificial Sequence
  Description of Artificial Sequence: Synthetic oligonucleotide
  Sense strand starting at position 684 of SEQ ID NO: 318396
gaguaucacugugcauaca

SEQ ID NO: 559414 - RNA, 19 nt, Artificial Sequence
  Description of Artificial Sequence: Synthetic oligonucleotide
  Antisense strand to SEQ ID NO: 559413
uguaugcacagugauacuc

SEQ ID NO: 559415 - RNA, 19 nt, Artificial Sequence
  Description of Artificial Sequence: Synthetic oligonucleotide
  Sense strand starting at position 821 of SEQ ID NO: 318396
cugugauaacuugguccau

SEQ ID NO: 559416 - RNA, 19 nt, Artificial Sequence
  Description of Artificial Sequence: Synthetic oligonucleotide
  Antisense strand to SEQ ID NO: 559415
auggaccaaguuaucacag

SEQ ID NO: 559417 - RNA, 19 nt, Artificial Sequence
  Description of Artificial Sequence: Synthetic oligonucleotide
  Sense strand starting at position 822 of SEQ ID NO: 318396
ugugauaacuugguccauu

SEQ ID NO: 559418 - RNA, 19 nt, Artificial Sequence
  Description of Artificial Sequence: Synthetic oligonucleotide
  Antisense strand to SEQ ID NO: 559417
aauggaccaaguuaucaca

SEQ ID NO: 559419 - RNA, 19 nt, Artificial Sequence
  Description of Artificial Sequence: Synthetic oligonucleotide
  Sense strand starting at position 931 of SEQ ID NO: 318396
uaguaaguauggucagauc

SEQ ID NO: 559420 - RNA, 19 nt, Artificial Sequence
  Description of Artificial Sequence: Synthetic oligonucleotide
  Antisense strand to SEQ ID NO: 559419
gaucugaccauacuuacua

SEQ ID NO: 559421 - RNA, 19 nt, Artificial Sequence
  Description of Artificial Sequence: Synthetic oligonucleotide
  Sense strand starting at position 1037 of SEQ ID NO: 318396
gcuuuaugucaacaaggua

SEQ ID NO: 559422 - RNA, 19 nt, Artificial Sequence
  Description of Artificial Sequence: Synthetic oligonucleotide
  Antisense strand to SEQ ID NO: 559421
uaccuuguugacauaaagc

SEQ ID NO: 559423 - RNA, 19 nt, Artificial Sequence
  Description of Artificial Sequence: Synthetic oligonucleotide
  Sense strand starting at position 1040 of SEQ ID NO: 318396
uuaugucaacaagguauga

SEQ ID NO: 559424 - RNA, 19 nt, Artificial Sequence
  Description of Artificial Sequence: Synthetic oligonucleotide
  Antisense strand to SEQ ID NO: 559423
ucauaccuuguugacauaa

SEQ ID NO: 559425 - RNA, 19 nt, Artificial Sequence
  Description of Artificial Sequence: Synthetic oligonucleotide
  Sense strand starting at position 1042 of SEQ ID NO: 318396
augucaacaagguaugagu

SEQ ID NO: 559426 - RNA, 19 nt, Artificial Sequence
  Description of Artificial Sequence: Synthetic oligonucleotide
  Antisense strand to SEQ ID NO: 559425
acucauaccuuguugacau

SEQ ID NO: 559427 - RNA, 19 nt, Artificial Sequence
  Description of Artificial Sequence: Synthetic oligonucleotide
  Sense strand starting at position 1044 of SEQ ID NO: 318396
gucaacaagguaugaguua

SEQ ID NO: 559428 - RNA, 19 nt, Artificial Sequence
  Description of Artificial Sequence: Synthetic oligonucleotide
  Antisense strand to SEQ ID NO: 559427
uaacucauaccuuguugac

SEQ ID NO: 559429 - RNA, 19 nt, Artificial Sequence
  Description of Artificial Sequence: Synthetic oligonucleotide
  Sense strand starting at position 1069 of SEQ ID NO: 318396
acucuagaacaguagcauu

SEQ ID NO: 559430 - RNA, 19 nt, Artificial Sequence
  Description of Artificial Sequence: Synthetic oligonucleotide
  Antisense strand to SEQ ID NO: 559429
aaugcuacuguucuagagu

SEQ ID NO: 559431 - RNA, 19 nt, Artificial Sequence
  Description of Artificial Sequence: Synthetic oligonucleotide
  Sense strand starting at position 1259 of SEQ ID NO: 318396
uugguaauuaucuggcuga

SEQ ID NO: 559432 - RNA, 19 nt, Artificial Sequence
  Description of Artificial Sequence: Synthetic oligonucleotide
  Antisense strand to SEQ ID NO: 559431
ucagccagauaauuaccaa

SEQ ID NO: 559433 - RNA, 19 nt, Artificial Sequence
  Description of Artificial Sequence: Synthetic oligonucleotide
  Sense strand starting at position 1262 of SEQ ID NO: 318396
guaauuaucuggcugacag

SEQ ID NO: 559434 - RNA, 19 nt, Artificial Sequence
  Description of Artificial Sequence: Synthetic oligonucleotide
  Antisense strand to SEQ ID NO: 559433
cugucagccagauaauuac

SEQ ID NO: 559435 - RNA, 19 nt, Artificial Sequence
  Description of Artificial Sequence: Synthetic oligonucleotide
  Sense strand starting at position 1761 of SEQ ID NO: 318396
cacuacuuucgccagggau

SEQ ID NO: 559436 - RNA, 19 nt, Artificial Sequence
  Description of Artificial Sequence: Synthetic oligonucleotide
  Antisense strand to SEQ ID NO: 559435
aucccuggcgaaaguagug

SEQ ID NO: 559437 - RNA, 19 nt, Artificial Sequence
  Description of Artificial Sequence: Synthetic oligonucleotide
  Sense strand starting at position 2047 of SEQ ID NO: 318396
ccgggagaagccggaauua

SEQ ID NO: 559438 - RNA, 19 nt, Artificial Sequence
  Description of Artificial Sequence: Synthetic oligonucleotide
  Antisense strand to SEQ ID NO: 559437
uaauuccggcuucucccgg

SEQ ID NO: 559439 - RNA, 19 nt, Artificial Sequence
  Description of Artificial Sequence: Synthetic oligonucleotide
  Sense strand starting at position 2057 of SEQ ID NO: 318396
ccggaauuacuuuggagag

SEQ ID NO: 559440 - RNA, 19 nt, Artificial Sequence
  Description of Artificial Sequence: Synthetic oligonucleotide
  Antisense strand to SEQ ID NO: 559439
cucuccaaaguaauuccgg

SEQ ID NO: 559441 - RNA, 19 nt, Artificial Sequence
  Description of Artificial Sequence: Synthetic oligonucleotide
  Sense strand starting at position 2147 of SEQ ID NO: 318396
uaaauauugcgcgugcuca

SEQ ID NO: 559442 - RNA, 19 nt, Artificial Sequence
  Description of Artificial Sequence: Synthetic oligonucleotide
  Antisense strand to SEQ ID NO: 559441
ugagcacgcgcaauauuua

SEQ ID NO: 559443 - RNA, 19 nt, Artificial Sequence
  Description of Artificial Sequence: Synthetic oligonucleotide
  Sense strand starting at position 2202 of SEQ ID NO: 318396
gggagcugauuuggauaga

SEQ ID NO: 559444 - RNA, 19 nt, Artificial Sequence
  Description of Artificial Sequence: Synthetic oligonucleotide
  Antisense strand to SEQ ID NO: 559443
ucuauccaaaucagcuccc

SEQ ID NO: 559445 - RNA, 19 nt, Artificial Sequence
  Description of Artificial Sequence: Synthetic oligonucleotide
  Sense strand starting at position 2277 of SEQ ID NO: 318396
uccgguaaccuagauauga

SEQ ID NO: 559446 - RNA, 19 nt, Artificial Sequence
  Description of Artificial Sequence: Synthetic oligonucleotide
  Antisense strand to SEQ ID NO: 559445
ucauaucuagguuaccgga

SEQ ID NO: 559447 - RNA, 19 nt, Artificial Sequence
  Description of Artificial Sequence: Synthetic oligonucleotide
  Sense strand starting at position 2279 of SEQ ID NO: 318396
cgguaaccuagauaugagu

SEQ ID NO: 559448 - RNA, 19 nt, Artificial Sequence
  Description of Artificial Sequence: Synthetic oligonucleotide
  Antisense strand to SEQ ID NO: 559447
acucauaucuagguuaccg

SEQ ID NO: 559449 - RNA, 19 nt, Artificial Sequence
  Description of Artificial Sequence: Synthetic oligonucleotide
  Sense strand starting at position 2439 of SEQ ID NO: 318396
gggagacccuuucucuaua

SEQ ID NO: 559450 - RNA, 19 nt, Artificial Sequence
  Description of Artificial Sequence: Synthetic oligonucleotide
  Antisense strand to SEQ ID NO: 559449
uauagagaaagggucuccc

SEQ ID NO: 559451 - RNA, 19 nt, Artificial Sequence
  Description of Artificial Sequence: Synthetic oligonucleotide
  Sense strand starting at position 2440 of SEQ ID NO: 318396
ggagacccuuucucuauaa

SEQ ID NO: 559452 - RNA, 19 nt, Artificial Sequence
  Description of Artificial Sequence: Synthetic oligonucleotide
  Antisense strand to SEQ ID NO: 559451
uuauagagaaagggucucc

SEQ ID NO: 559453 - RNA, 19 nt, Artificial Sequence
  Description of Artificial Sequence: Synthetic oligonucleotide
  Sense strand starting at position 2887 of SEQ ID NO: 318396
gugauucugaugcaggagu

SEQ ID NO: 559454 - RNA, 19 nt, Artificial Sequence
  Description of Artificial Sequence: Synthetic oligonucleotide
  Antisense strand to SEQ ID NO: 559453
acuccugcaucagaaucac

SEQ ID NO: 559455 - RNA, 19 nt, Artificial Sequence
  Description of Artificial Sequence: Synthetic oligonucleotide
  Sense strand starting at position 3290 of SEQ ID NO: 318396
gagccuucuggugaaguau

SEQ ID NO: 559456 - RNA, 19 nt, Artificial Sequence
  Description of Artificial Sequence: Synthetic oligonucleotide
  Antisense strand to SEQ ID NO: 559455
auacuucaccagaaggcuc

SEQ ID NO: 559457 - RNA, 19 nt, Artificial Sequence
  Description of Artificial Sequence: Synthetic oligonucleotide
  Sense strand starting at position 3303 of SEQ ID NO: 318396
aaguauuggccuuagaauc

SEQ ID NO: 559458 - RNA, 19 nt, Artificial Sequence
  Description of Artificial Sequence: Synthetic oligonucleotide
  Antisense strand to SEQ ID NO: 559457
gauucuaaggccaauacuu

SEQ ID NO: 559459 - RNA, 19 nt, Artificial Sequence
  Description of Artificial Sequence: Synthetic oligonucleotide
  Sense strand starting at position 3529 of SEQ ID NO: 318396
gguucugcaaucugaagaa

SEQ ID NO: 559460 - RNA, 19 nt, Artificial Sequence
  Description of Artificial Sequence: Synthetic oligonucleotide
  Antisense strand to SEQ ID NO: 559459
uucuucagauugcagaacc

SEQ ID NO: 559461 - RNA, 19 nt, Artificial Sequence
  Description of Artificial Sequence: Synthetic oligonucleotide
  Sense strand starting at position 3550 of SEQ ID NO: 318396
gauacugagaucuggguga

SEQ ID NO: 559462 - RNA, 19 nt, Artificial Sequence
  Description of Artificial Sequence: Synthetic oligonucleotide
  Antisense strand to SEQ ID NO: 559461
ucacccagaucucaguauc

SEQ ID NO: 559463 - RNA, 19 nt, Artificial Sequence
  Description of Artificial Sequence: Synthetic oligonucleotide
  Sense strand starting at position 3552 of SEQ ID NO: 318396
uacugagaucugggugagu

SEQ ID NO: 559464 - RNA, 19 nt, Artificial Sequence
  Description of Artificial Sequence: Synthetic oligonucleotide
  Antisense strand to SEQ ID NO: 559463
acucacccagaucucagua

SEQ ID NO: 559465 - RNA, 19 nt, Artificial Sequence
  Description of Artificial Sequence: Synthetic oligonucleotide
  Sense strand starting at position 3583 of SEQ ID NO: 318396
uucuguuaccuccaguaua

SEQ ID NO: 559466 - RNA, 19 nt, Artificial Sequence
  Description of Artificial Sequence: Synthetic oligonucleotide
  Antisense strand to SEQ ID NO: 559465
uauacuggagguaacagaa

SEQ ID NO: 559467 - RNA, 19 nt, Artificial Sequence
  Description of Artificial Sequence: Synthetic oligonucleotide
  Sense strand starting at position 3627 of SEQ ID NO: 318396
ugacauaaccugggucuca

SEQ ID NO: 559468 - RNA, 19 nt, Artificial Sequence
  Description of Artificial Sequence: Synthetic oligonucleotide
  Antisense strand to SEQ ID NO: 559467
ugagacccagguuauguca

SEQ ID NO: 559469 - RNA, 19 nt, Artificial Sequence
  Description of Artificial Sequence: Synthetic oligonucleotide
  Sense strand starting at position 3706 of SEQ ID NO: 318396
gaaguuucuuuggcauaaa

SEQ ID NO: 559470 - RNA, 19 nt, Artificial Sequence
  Description of Artificial Sequence: Synthetic oligonucleotide
  Antisense strand to SEQ ID NO: 559469
uuuaugccaaagaaacuuc

SEQ ID NO: 559471 - RNA, 19 nt, Artificial Sequence
  Description of Artificial Sequence: Synthetic oligonucleotide
  Sense strand starting at position 3754 of SEQ ID NO: 318396
gcuuauuauagaggacaag

SEQ ID NO: 559472 - RNA, 19 nt, Artificial Sequence
  Description of Artificial Sequence: Synthetic oligonucleotide
  Antisense strand to SEQ ID NO: 559471
cuuguccucuauaauaagc

SEQ ID NO: 559473 - RNA, 19 nt, Artificial Sequence
  Description of Artificial Sequence: Synthetic oligonucleotide
  Sense strand starting at position 3764 of SEQ ID NO: 318396
gaggacaaguuccuauuaa

SEQ ID NO: 559474 - RNA, 19 nt, Artificial Sequence
  Description of Artificial Sequence: Synthetic oligonucleotide
  Antisense strand to SEQ ID NO: 559473
uuaauaggaacuuguccuc

SEQ ID NO: 559475 - RNA, 19 nt, Artificial Sequence
  Description of Artificial Sequence: Synthetic oligonucleotide
  Sense strand starting at position 5 of SEQ ID NO: 318397
gggcccugagagcauuaau

SEQ ID NO: 559476 - RNA, 19 nt, Artificial Sequence
  Description of Artificial Sequence: Synthetic oligonucleotide
  Antisense strand to SEQ ID NO: 559475
auuaaugcucucagggccc

SEQ ID NO: 559477 - RNA, 19 nt, Artificial Sequence
  Description of Artificial Sequence: Synthetic oligonucleotide
  Sense strand starting at position 8 of SEQ ID NO: 318397
cccugagagcauuaaugua

SEQ ID NO: 559478 - RNA, 19 nt, Artificial Sequence
  Description of Artificial Sequence: Synthetic oligonucleotide
  Antisense strand to SEQ ID NO: 559477
uacauuaaugcucucaggg

SEQ ID NO: 559479 - RNA, 19 nt, Artificial Sequence
  Description of Artificial Sequence: Synthetic oligonucleotide
  Sense strand starting at position 269 of SEQ ID NO: 318397
agcagauuaauaugauggu

SEQ ID NO: 559480 - RNA, 19 nt, Artificial Sequence
  Description of Artificial Sequence: Synthetic oligonucleotide
  Antisense strand to SEQ ID NO: 559479
accaucauauuaaucugcu

SEQ ID NO: 559481 - RNA, 19 nt, Artificial Sequence
  Description of Artificial Sequence: Synthetic oligonucleotide
  Sense strand starting at position 273 of SEQ ID NO: 318397
gauuaauaugauggugauc

SEQ ID NO: 559482 - RNA, 19 nt, Artificial Sequence
  Description of Artificial Sequence: Synthetic oligonucleotide
  Antisense strand to SEQ ID NO: 559481
gaucaccaucauauuaauc

SEQ ID NO: 559483 - RNA, 19 nt, Artificial Sequence
  Description of Artificial Sequence: Synthetic oligonucleotide
  Sense strand starting at position 278 of SEQ ID NO: 318397
auaugauggugaucuuaua

SEQ ID NO: 559484 - RNA, 19 nt, Artificial Sequence
  Description of Artificial Sequence: Synthetic oligonucleotide
  Antisense strand to SEQ ID NO: 559483
uauaagaucaccaucauau

SEQ ID NO: 559485 - RNA, 19 nt, Artificial Sequence
  Description of Artificial Sequence: Synthetic oligonucleotide
  Sense strand starting at position 462 of SEQ ID NO: 318397
acuucugcucuggauaaga

SEQ ID NO: 559486 - RNA, 19 nt, Artificial Sequence
  Description of Artificial Sequence: Synthetic oligonucleotide
  Antisense strand to SEQ ID NO: 559485
ucuuauccagagcagaagu

SEQ ID NO: 559487 - RNA, 19 nt, Artificial Sequence
  Description of Artificial Sequence: Synthetic oligonucleotide
  Sense strand starting at position 602 of SEQ ID NO: 318397
aguauuccaugaccauaua

SEQ ID NO: 559488 - RNA, 19 nt, Artificial Sequence
  Description of Artificial Sequence: Synthetic oligonucleotide
  Antisense strand to SEQ ID NO: 559487
uauauggucauggaauacu

SEQ ID NO: 559489 - RNA, 19 nt, Artificial Sequence
  Description of Artificial Sequence: Synthetic oligonucleotide
  Sense strand starting at position 936 of SEQ ID NO: 318397
guguauaagcacuauggau

SEQ ID NO: 559490 - RNA, 19 nt, Artificial Sequence
  Description of Artificial Sequence: Synthetic oligonucleotide
  Antisense strand to SEQ ID NO: 559489
auccauagugcuuauacac

SEQ ID NO: 559491 - RNA, 19 nt, Artificial Sequence
  Description of Artificial Sequence: Synthetic oligonucleotide
  Sense strand starting at position 1180 of SEQ ID NO: 318397
guaauaacacuguauguac

SEQ ID NO: 559492 - RNA, 19 nt, Artificial Sequence
  Description of Artificial Sequence: Synthetic oligonucleotide
  Antisense strand to SEQ ID NO: 559491
guacauacaguguuauuac

SEQ ID NO: 559493 - RNA, 19 nt, Artificial Sequence
  Description of Artificial Sequence: Synthetic oligonucleotide
  Sense strand starting at position 1188 of SEQ ID NO: 318397
acuguauguacagggaaua

SEQ ID NO: 559494 - RNA, 19 nt, Artificial Sequence
  Description of Artificial Sequence: Synthetic oligonucleotide
  Antisense strand to SEQ ID NO: 559493
uauucccuguacauacagu

SEQ ID NO: 559495 - RNA, 19 nt, Artificial Sequence
  Description of Artificial Sequence: Synthetic oligonucleotide
  Sense strand starting at position 1189 of SEQ ID NO: 318397
cuguauguacagggaauau

SEQ ID NO: 559496 - RNA, 19 nt, Artificial Sequence
  Description of Artificial Sequence: Synthetic oligonucleotide
  Antisense strand to SEQ ID NO: 559495
auauucccuguacauacag

SEQ ID NO: 559497 - RNA, 19 nt, Artificial Sequence
  Description of Artificial Sequence: Synthetic oligonucleotide
  Sense strand starting at position 1239 of SEQ ID NO: 318397
guaggaacauuaguugaca

SEQ ID NO: 559498 - RNA, 19 nt, Artificial Sequence
  Description of Artificial Sequence: Synthetic oligonucleotide
  Antisense strand to SEQ ID NO: 559497
ugucaacuaauguuccuac

SEQ ID NO: 559499 - RNA, 19 nt, Artificial Sequence
  Description of Artificial Sequence: Synthetic oligonucleotide
  Sense strand starting at position 1241 of SEQ ID NO: 318397
aggaacauuaguugacagu

SEQ ID NO: 559500 - RNA, 19 nt, Artificial Sequence
  Description of Artificial Sequence: Synthetic oligonucleotide
  Antisense strand to SEQ ID NO: 559499
acugucaacuaauguuccu

SEQ ID NO: 559501 - RNA, 19 nt, Artificial Sequence
  Description of Artificial Sequence: Synthetic oligonucleotide
  Sense strand starting at position 1279 of SEQ ID NO: 318397
uuacauuauagguggguaa

SEQ ID NO: 559502 - RNA, 19 nt, Artificial Sequence
  Description of Artificial Sequence: Synthetic oligonucleotide
  Antisense strand to SEQ ID NO: 559501
uuacccaccuauaauguaa

SEQ ID NO: 559503 - RNA, 19 nt, Artificial Sequence
  Description of Artificial Sequence: Synthetic oligonucleotide
  Sense strand starting at position 1280 of SEQ ID NO: 318397
uacauuauagguggguaaa

SEQ ID NO: 559504 - RNA, 19 nt, Artificial Sequence
  Description of Artificial Sequence: Synthetic oligonucleotide
  Antisense strand to SEQ ID NO: 559503
uuuacccaccuauaaugua

SEQ ID NO: 559505 - RNA, 19 nt, Artificial Sequence
  Description of Artificial Sequence: Synthetic oligonucleotide
  Sense strand starting at position 1281 of SEQ ID NO: 318397
acauuauagguggguaaac

SEQ ID NO: 559506 - RNA, 19 nt, Artificial Sequence
  Description of Artificial Sequence: Synthetic oligonucleotide
  Antisense strand to SEQ ID NO: 559505
guuuacccaccuauaaugu

SEQ ID NO: 559507 - RNA, 19 nt, Artificial Sequence
  Description of Artificial Sequence: Synthetic oligonucleotide
  Sense strand starting at position 1282 of SEQ ID NO: 318397
cauuauagguggguaaaca

SEQ ID NO: 559508 - RNA, 19 nt, Artificial Sequence
  Description of Artificial Sequence: Synthetic oligonucleotide
  Antisense strand to SEQ ID NO: 559507
uguuuacccaccuauaaug

SEQ ID NO: 559509 - RNA, 19 nt, Artificial Sequence
  Description of Artificial Sequence: Synthetic oligonucleotide
  Sense strand starting at position 1498 of SEQ ID NO: 318397
aguacugucaccugaagag

SEQ ID NO: 559510 - RNA, 19 nt, Artificial Sequence
  Description of Artificial Sequence: Synthetic oligonucleotide
  Antisense strand to SEQ ID NO: 559509
cucuucaggugacaguacu

SEQ ID NO: 559511 - RNA, 19 nt, Artificial Sequence
  Description of Artificial Sequence: Synthetic oligonucleotide
  Sense strand starting at position 1698 of SEQ ID NO: 318397
ucucauaucguacagaauc

SEQ ID NO: 559512 - RNA, 19 nt, Artificial Sequence
  Description of Artificial Sequence: Synthetic oligonucleotide
  Antisense strand to SEQ ID NO: 559511
gauucuguacgauaugaga

SEQ ID NO: 559513 - RNA, 19 nt, Artificial Sequence
  Description of Artificial Sequence: Synthetic oligonucleotide
  Sense strand starting at position 2015 of SEQ ID NO: 318397
agggaaucuugagcucuag

SEQ ID NO: 559514 - RNA, 19 nt, Artificial Sequence
  Description of Artificial Sequence: Synthetic oligonucleotide
  Antisense strand to SEQ ID NO: 559513
cuagagcucaagauucccu

SEQ ID NO: 559515 - RNA, 19 nt, Artificial Sequence
  Description of Artificial Sequence: Synthetic oligonucleotide
  Sense strand starting at position 2021 of SEQ ID NO: 318397
ucuugagcucuagaacuuu

SEQ ID NO: 559516 - RNA, 19 nt, Artificial Sequence
  Description of Artificial Sequence: Synthetic oligonucleotide
  Antisense strand to SEQ ID NO: 559515
aaaguucuagagcucaaga

SEQ ID NO: 559517 - RNA, 19 nt, Artificial Sequence
  Description of Artificial Sequence: Synthetic oligonucleotide
  Sense strand starting at position 2032 of SEQ ID NO: 318397
agaacuuuggaugguuuga

SEQ ID NO: 559518 - RNA, 19 nt, Artificial Sequence
  Description of Artificial Sequence: Synthetic oligonucleotide
  Antisense strand to SEQ ID NO: 559517
ucaaaccauccaaaguucu

SEQ ID NO: 559519 - RNA, 19 nt, Artificial Sequence
  Description of Artificial Sequence: Synthetic oligonucleotide
  Sense strand starting at position 2034 of SEQ ID NO: 318397
aacuuuggaugguuugaua

SEQ ID NO: 559520 - RNA, 19 nt, Artificial Sequence
  Description of Artificial Sequence: Synthetic oligonucleotide
  Antisense strand to SEQ ID NO: 559519
uaucaaaccauccaaaguu

SEQ ID NO: 559521 - RNA, 19 nt, Artificial Sequence
  Description of Artificial Sequence: Synthetic oligonucleotide
  Sense strand starting at position 2079 of SEQ ID NO: 318397
aguagcauucaugagaggu

SEQ ID NO: 559522 - RNA, 19 nt, Artificial Sequence
  Description of Artificial Sequence: Synthetic oligonucleotide
  Antisense strand to SEQ ID NO: 559521
accucucaugaaugcuacu

SEQ ID NO: 559523 - RNA, 19 nt, Artificial Sequence
  Description of Artificial Sequence: Synthetic oligonucleotide
  Sense strand starting at position 2252 of SEQ ID NO: 318397
acaguaauuccugaaguuu

SEQ ID NO: 559524 - RNA, 19 nt, Artificial Sequence
  Description of Artificial Sequence: Synthetic oligonucleotide
  Antisense strand to SEQ ID NO: 559523
aaacuucaggaauuacugu

SEQ ID NO: 559525 - RNA, 19 nt, Artificial Sequence
  Description of Artificial Sequence: Synthetic oligonucleotide
  Sense strand starting at position 2455 of SEQ ID NO: 318397
gugaguauuucuccucauc

SEQ ID NO: 559526 - RNA, 19 nt, Artificial Sequence
  Description of Artificial Sequence: Synthetic oligonucleotide
  Antisense strand to SEQ ID NO: 559525
gaugaggagaaauacucac

SEQ ID NO: 559527 - RNA, 19 nt, Artificial Sequence
  Description of Artificial Sequence: Synthetic oligonucleotide
  Sense strand starting at position 2474 of SEQ ID NO: 318397
ugaugacauucugcacaaa

SEQ ID NO: 559528 - RNA, 19 nt, Artificial Sequence
  Description of Artificial Sequence: Synthetic oligonucleotide
  Antisense strand to SEQ ID NO: 559527
uuugugcagaaugucauca

SEQ ID NO: 559529 - RNA, 19 nt, Artificial Sequence
  Description of Artificial Sequence: Synthetic oligonucleotide
  Sense strand starting at position 2752 of SEQ ID NO: 318397
auagauugugaucacuguu

SEQ ID NO: 559530 - RNA, 19 nt, Artificial Sequence
  Description of Artificial Sequence: Synthetic oligonucleotide
  Antisense strand to SEQ ID NO: 559529
aacagugaucacaaucuau

SEQ ID NO: 559531 - RNA, 19 nt, Artificial Sequence
  Description of Artificial Sequence: Synthetic oligonucleotide
  Sense strand starting at position 3016 of SEQ ID NO: 318397
aauagugacuauucgaacu

SEQ ID NO: 559532 - RNA, 19 nt, Artificial Sequence
  Description of Artificial Sequence: Synthetic oligonucleotide
  Antisense strand to SEQ ID NO: 559531
aguucgaauagucacuauu

SEQ ID NO: 559533 - RNA, 19 nt, Artificial Sequence
  Description of Artificial Sequence: Synthetic oligonucleotide
  Sense strand starting at position 3100 of SEQ ID NO: 318397
aguuuacaaucuguagaga

SEQ ID NO: 559534 - RNA, 19 nt, Artificial Sequence
  Description of Artificial Sequence: Synthetic oligonucleotide
  Antisense strand to SEQ ID NO: 559533
ucucuacagauuguaaacu

SEQ ID NO: 559535 - RNA, 19 nt, Artificial Sequence
  Description of Artificial Sequence: Synthetic oligonucleotide
  Sense strand starting at position 3136 of SEQ ID NO: 318397
uauauaagugaccgacuga

SEQ ID NO: 559536 - RNA, 19 nt, Artificial Sequence
  Description of Artificial Sequence: Synthetic oligonucleotide
  Antisense strand to SEQ ID NO: 559535
ucagucggucacuuauaua

SEQ ID NO: 559537 - RNA, 19 nt, Artificial Sequence
  Description of Artificial Sequence: Synthetic oligonucleotide
  Sense strand starting at position 3227 of SEQ ID NO: 318397
guaagauugcaugacugua

SEQ ID NO: 559538 - RNA, 19 nt, Artificial Sequence
  Description of Artificial Sequence: Synthetic oligonucleotide
  Antisense strand to SEQ ID NO: 559537
uacagucaugcaaucuuac

SEQ ID NO: 559539 - RNA, 19 nt, Artificial Sequence
  Description of Artificial Sequence: Synthetic oligonucleotide
  Sense strand starting at position 3229 of SEQ ID NO: 318397
aagauugcaugacuguaaa

SEQ ID NO: 559540 - RNA, 19 nt, Artificial Sequence
  Description of Artificial Sequence: Synthetic oligonucleotide
  Antisense strand to SEQ ID NO: 559539
uuuacagucaugcaaucuu

SEQ ID NO: 559541 - RNA, 19 nt, Artificial Sequence
  Description of Artificial Sequence: Synthetic oligonucleotide
  Sense strand starting at position 3232 of SEQ ID NO: 318397
auugcaugacuguaaauaa

SEQ ID NO: 559542 - RNA, 19 nt, Artificial Sequence
  Description of Artificial Sequence: Synthetic oligonucleotide
  Antisense strand to SEQ ID NO: 559541
uuauuuacagucaugcaau

SEQ ID NO: 559543 - RNA, 19 nt, Artificial Sequence
  Description of Artificial Sequence: Synthetic oligonucleotide
  Sense strand starting at position 3293 of SEQ ID NO: 318397
gguguugagaucugaaaga

SEQ ID NO: 559544 - RNA, 19 nt, Artificial Sequence
  Description of Artificial Sequence: Synthetic oligonucleotide
  Antisense strand to SEQ ID NO: 559543
ucuuucagaucucaacacc

SEQ ID NO: 559545 - RNA, 19 nt, Artificial Sequence
  Description of Artificial Sequence: Synthetic oligonucleotide
  Sense strand starting at position 3306 of SEQ ID NO: 318397
gaaagaugaguaggucuca

SEQ ID NO: 559546 - RNA, 19 nt, Artificial Sequence
  Description of Artificial Sequence: Synthetic oligonucleotide
  Antisense strand to SEQ ID NO: 559545
ugagaccuacucaucuuuc

SEQ ID NO: 559547 - RNA, 19 nt, Artificial Sequence
  Description of Artificial Sequence: Synthetic oligonucleotide
  Sense strand starting at position 3307 of SEQ ID NO: 318397
aaagaugaguaggucucau

SEQ ID NO: 559548 - RNA, 19 nt, Artificial Sequence
  Description of Artificial Sequence: Synthetic oligonucleotide
  Antisense strand to SEQ ID NO: 559547
augagaccuacucaucuuu

SEQ ID NO: 559549 - RNA, 19 nt, Artificial Sequence
  Description of Artificial Sequence: Synthetic oligonucleotide
  Sense strand starting at position 3369 of SEQ ID NO: 318397
uaggcaguagagcaauaua

SEQ ID NO: 559550 - RNA, 19 nt, Artificial Sequence
  Description of Artificial Sequence: Synthetic oligonucleotide
  Antisense strand to SEQ ID NO: 559549
uauauugcucuacugccua

SEQ ID NO: 559551 - RNA, 19 nt, Artificial Sequence
  Description of Artificial Sequence: Synthetic oligonucleotide
  Sense strand starting at position 3957 of SEQ ID NO: 318397
acugcaguagucuaagaga

SEQ ID NO: 559552 - RNA, 19 nt, Artificial Sequence
  Description of Artificial Sequence: Synthetic oligonucleotide
  Antisense strand to SEQ ID NO: 559551
ucucuuagacuacugcagu

SEQ ID NO: 559553 - RNA, 19 nt, Artificial Sequence
  Description of Artificial Sequence: Synthetic oligonucleotide
  Sense strand starting at position 3973 of SEQ ID NO: 318397
agauaaauguucucuuuga

SEQ ID NO: 559554 - RNA, 19 nt, Artificial Sequence
  Description of Artificial Sequence: Synthetic oligonucleotide
  Antisense strand to SEQ ID NO: 559553
ucaaagagaacauuuaucu

SEQ ID NO: 559555 - RNA, 19 nt, Artificial Sequence
  Description of Artificial Sequence: Synthetic oligonucleotide
  Sense strand starting at position 8 of SEQ ID NO: 318398
gaaagaacauguguacaug

SEQ ID NO: 559556 - RNA, 19 nt, Artificial Sequence
  Description of Artificial Sequence: Synthetic oligonucleotide
  Antisense strand to SEQ ID NO: 559555
cauguacacauguucuuuc

SEQ ID NO: 559557 - RNA, 19 nt, Artificial Sequence
  Description of Artificial Sequence: Synthetic oligonucleotide
  Sense strand starting at position 103 of SEQ ID NO: 318398
uagugaagccuaugaaaua

SEQ ID NO: 559558 - RNA, 19 nt, Artificial Sequence
  Description of Artificial Sequence: Synthetic oligonucleotide
  Antisense strand to SEQ ID NO: 559557
uauuucauaggcuucacua

SEQ ID NO: 559559 - RNA, 19 nt, Artificial Sequence
  Description of Artificial Sequence: Synthetic oligonucleotide
  Sense strand starting at position 374 of SEQ ID NO: 318398
ugugaagugcauuaaggua

SEQ ID NO: 559560 - RNA, 19 nt, Artificial Sequence
  Description of Artificial Sequence: Synthetic oligonucleotide
  Antisense strand to SEQ ID NO: 559559
uaccuuaaugcacuucaca

SEQ ID NO: 559561 - RNA, 19 nt, Artificial Sequence
  Description of Artificial Sequence: Synthetic oligonucleotide
  Sense strand starting at position 443 of SEQ ID NO: 318398
gcugucuuuggagacuuaa

SEQ ID NO: 559562 - RNA, 19 nt, Artificial Sequence
  Description of Artificial Sequence: Synthetic oligonucleotide
  Antisense strand to SEQ ID NO: 559561
uuaagucuccaaagacagc

SEQ ID NO: 559563 - RNA, 19 nt, Artificial Sequence
  Description of Artificial Sequence: Synthetic oligonucleotide
  Sense strand starting at position 543 of SEQ ID NO: 318398
gcaguaugagcauaauaua

SEQ ID NO: 559564 - RNA, 19 nt, Artificial Sequence
  Description of Artificial Sequence: Synthetic oligonucleotide
  Antisense strand to SEQ ID NO: 559563
uauauuaugcucauacugc

SEQ ID NO: 559565 - RNA, 19 nt, Artificial Sequence
  Description of Artificial Sequence: Synthetic oligonucleotide
  Sense strand starting at position 594 of SEQ ID NO: 318398
auauaaauggaguguggau

SEQ ID NO: 559566 - RNA, 19 nt, Artificial Sequence
  Description of Artificial Sequence: Synthetic oligonucleotide
  Antisense strand to SEQ ID NO: 559565
auccacacuccauuuauau

SEQ ID NO: 559567 - RNA, 19 nt, Artificial Sequence
  Description of Artificial Sequence: Synthetic oligonucleotide
  Sense strand starting at position 603 of SEQ ID NO: 318398
gaguguggauggucagaaa

SEQ ID NO: 559568 - RNA, 19 nt, Artificial Sequence
  Description of Artificial Sequence: Synthetic oligonucleotide
  Antisense strand to SEQ ID NO: 559567
uuucugaccauccacacuc

SEQ ID NO: 559569 - RNA, 19 nt, Artificial Sequence
  Description of Artificial Sequence: Synthetic oligonucleotide
  Sense strand starting at position 652 of SEQ ID NO: 318398
auuggcaaugccuacuuaa

SEQ ID NO: 559570 - RNA, 19 nt, Artificial Sequence
  Description of Artificial Sequence: Synthetic oligonucleotide
  Antisense strand to SEQ ID NO: 559569
uuaaguaggcauugccaau

SEQ ID NO: 559571 - RNA, 19 nt, Artificial Sequence
  Description of Artificial Sequence: Synthetic oligonucleotide
  Sense strand starting at position 809 of SEQ ID NO: 318398
auauaaagagcuggaguua

SEQ ID NO: 559572 - RNA, 19 nt, Artificial Sequence
  Description of Artificial Sequence: Synthetic oligonucleotide
  Antisense strand to SEQ ID NO: 559571
uaacuccagcucuuuauau

SEQ ID NO: 559573 - RNA, 19 nt, Artificial Sequence
  Description of Artificial Sequence: Synthetic oligonucleotide
  Sense strand starting at position 1003 of SEQ ID NO: 318398
acucgaaauuucgcuccua

SEQ ID NO: 559574 - RNA, 19 nt, Artificial Sequence
  Description of Artificial Sequence: Synthetic oligonucleotide
  Antisense strand to SEQ ID NO: 559573
uaggagcgaaauuucgagu

SEQ ID NO: 559575 - RNA, 19 nt, Artificial Sequence
  Description of Artificial Sequence: Synthetic oligonucleotide
  Sense strand starting at position 1004 of SEQ ID NO: 318398
cucgaaauuucgcuccuau

SEQ ID NO: 559576 - RNA, 19 nt, Artificial Sequence
  Description of Artificial Sequence: Synthetic oligonucleotide
  Antisense strand to SEQ ID NO: 559575
auaggagcgaaauuucgag

SEQ ID NO: 559577 - RNA, 19 nt, Artificial Sequence
  Description of Artificial Sequence: Synthetic oligonucleotide
  Sense strand starting at position 1038 of SEQ ID NO: 318398
guaagaaaguacucuuucu

SEQ ID NO: 559578 - RNA, 19 nt, Artificial Sequence
  Description of Artificial Sequence: Synthetic oligonucleotide
  Antisense strand to SEQ ID NO: 559577
agaaagaguacuuucuuac

SEQ ID NO: 559579 - RNA, 19 nt, Artificial Sequence
  Description of Artificial Sequence: Synthetic oligonucleotide
  Sense strand starting at position 1082 of SEQ ID NO: 318398
uggcaauuacaaggaaauc

SEQ ID NO: 559580 - RNA, 19 nt, Artificial Sequence
  Description of Artificial Sequence: Synthetic oligonucleotide
  Antisense strand to SEQ ID NO: 559579
gauuuccuuguaauugcca

SEQ ID NO: 559581 - RNA, 19 nt, Artificial Sequence
  Description of Artificial Sequence: Synthetic oligonucleotide
  Sense strand starting at position 1180 of SEQ ID NO: 318398
acugacaagaguuguuaga

SEQ ID NO: 559582 - RNA, 19 nt, Artificial Sequence
  Description of Artificial Sequence: Synthetic oligonucleotide
  Antisense strand to SEQ ID NO: 559581
ucuaacaacucuugucagu

SEQ ID NO: 559583 - RNA, 19 nt, Artificial Sequence
  Description of Artificial Sequence: Synthetic oligonucleotide
  Sense strand starting at position 1182 of SEQ ID NO: 318398
ugacaagaguuguuagauc

SEQ ID NO: 559584 - RNA, 19 nt, Artificial Sequence
  Description of Artificial Sequence: Synthetic oligonucleotide
  Antisense strand to SEQ ID NO: 559583
gaucuaacaacucuuguca

SEQ ID NO: 559585 - RNA, 19 nt, Artificial Sequence
  Description of Artificial Sequence: Synthetic oligonucleotide
  Sense strand starting at position 1288 of SEQ ID NO: 318398
gcacuucgguauuucuaau

SEQ ID NO: 559586 - RNA, 19 nt, Artificial Sequence
  Description of Artificial Sequence: Synthetic oligonucleotide
  Antisense strand to SEQ ID NO: 559585
auuagaaauaccgaagugc

SEQ ID NO: 559587 - RNA, 19 nt, Artificial Sequence
  Description of Artificial Sequence: Synthetic oligonucleotide
  Sense strand starting at position 1299 of SEQ ID NO: 318398
uuucuaauacgagaaaguu

SEQ ID NO: 559588 - RNA, 19 nt, Artificial Sequence
  Description of Artificial Sequence: Synthetic oligonucleotide
  Antisense strand to SEQ ID NO: 559587
aacuuucucguauuagaaa

SEQ ID NO: 559589 - RNA, 19 nt, Artificial Sequence
  Description of Artificial Sequence: Synthetic oligonucleotide
  Sense strand starting at position 1307 of SEQ ID NO: 318398
acgagaaaguuucuauaua

SEQ ID NO: 559590 - RNA, 19 nt, Artificial Sequence
  Description of Artificial Sequence: Synthetic oligonucleotide
  Antisense strand to SEQ ID NO: 559589
uauauagaaacuuucucgu

SEQ ID NO: 559591 - RNA, 19 nt, Artificial Sequence
  Description of Artificial Sequence: Synthetic oligonucleotide
  Sense strand starting at position 1558 of SEQ ID NO: 318398
uccuuuaaacgucaaaugu

SEQ ID NO: 559592 - RNA, 19 nt, Artificial Sequence
  Description of Artificial Sequence: Synthetic oligonucleotide
  Antisense strand to SEQ ID NO: 559591
acauuugacguuuaaagga

SEQ ID NO: 559593 - RNA, 19 nt, Artificial Sequence
  Description of Artificial Sequence: Synthetic oligonucleotide
  Sense strand starting at position 1594 of SEQ ID NO: 318398
gaguaagacccucgagauu

SEQ ID NO: 559594 - RNA, 19 nt, Artificial Sequence
  Description of Artificial Sequence: Synthetic oligonucleotide
  Antisense strand to SEQ ID NO: 559593
aaucucgagggucuuacuc

SEQ ID NO: 559595 - RNA, 19 nt, Artificial Sequence
  Description of Artificial Sequence: Synthetic oligonucleotide
  Sense strand starting at position 1619 of SEQ ID NO: 318398
gguggucugguggaaagaa

SEQ ID NO: 559596 - RNA, 19 nt, Artificial Sequence
  Description of Artificial Sequence: Synthetic oligonucleotide
  Antisense strand to SEQ ID NO: 559595
uucuuuccaccagaccacc

SEQ ID NO: 559597 - RNA, 19 nt, Artificial Sequence
  Description of Artificial Sequence: Synthetic oligonucleotide
  Sense strand starting at position 1620 of SEQ ID NO: 318398
guggucugguggaaagaaa

SEQ ID NO: 559598 - RNA, 19 nt, Artificial Sequence
  Description of Artificial Sequence: Synthetic oligonucleotide
  Antisense strand to SEQ ID NO: 559597
uuucuuuccaccagaccac

SEQ ID NO: 559599 - RNA, 19 nt, Artificial Sequence
  Description of Artificial Sequence: Synthetic oligonucleotide
  Sense strand starting at position 2836 of SEQ ID NO: 318398
cugaguguugcugcagcga

SEQ ID NO: 559600 - RNA, 19 nt, Artificial Sequence
  Description of Artificial Sequence: Synthetic oligonucleotide
  Antisense strand to SEQ ID NO: 559599
ucgcugcagcaacacucag

SEQ ID NO: 559601 - RNA, 19 nt, Artificial Sequence
  Description of Artificial Sequence: Synthetic oligonucleotide
  Sense strand starting at position 2934 of SEQ ID NO: 318398
gguguauaaaccugagauc

SEQ ID NO: 559602 - RNA, 19 nt, Artificial Sequence
  Description of Artificial Sequence: Synthetic oligonucleotide
  Antisense strand to SEQ ID NO: 559601
gaucucagguuuauacacc

SEQ ID NO: 559603 - RNA, 19 nt, Artificial Sequence
  Description of Artificial Sequence: Synthetic oligonucleotide
  Sense strand starting at position 3200 of SEQ ID NO: 318398
gaauucugcuagguuagau

SEQ ID NO: 559604 - RNA, 19 nt, Artificial Sequence
  Description of Artificial Sequence: Synthetic oligonucleotide
  Antisense strand to SEQ ID NO: 559603
aucuaaccuagcagaauuc

SEQ ID NO: 559605 - RNA, 19 nt, Artificial Sequence
  Description of Artificial Sequence: Synthetic oligonucleotide
  Sense strand starting at position 3220 of SEQ ID NO: 318398
uagugagacagaugaaugu

SEQ ID NO: 559606 - RNA, 19 nt, Artificial Sequence
  Description of Artificial Sequence: Synthetic oligonucleotide
  Antisense strand to SEQ ID NO: 559605
acauucaucugucucacua

SEQ ID NO: 559607 - RNA, 19 nt, Artificial Sequence
  Description of Artificial Sequence: Synthetic oligonucleotide
  Sense strand starting at position 3230 of SEQ ID NO: 318398
gaugaauguggaggacuuu

SEQ ID NO: 559608 - RNA, 19 nt, Artificial Sequence
  Description of Artificial Sequence: Synthetic oligonucleotide
  Antisense strand to SEQ ID NO: 559607
aaaguccuccacauucauc

SEQ ID NO: 559609 - RNA, 19 nt, Artificial Sequence
  Description of Artificial Sequence: Synthetic oligonucleotide
  Sense strand starting at position 3280 of SEQ ID NO: 318398
agauauugaaucggcacau

SEQ ID NO: 559610 - RNA, 19 nt, Artificial Sequence
  Description of Artificial Sequence: Synthetic oligonucleotide
  Antisense strand to SEQ ID NO: 559609
augugccgauucaauaucu

SEQ ID NO: 559611 - RNA, 19 nt, Artificial Sequence
  Description of Artificial Sequence: Synthetic oligonucleotide
  Sense strand starting at position 3281 of SEQ ID NO: 318398
gauauugaaucggcacaug

SEQ ID NO: 559612 - RNA, 19 nt, Artificial Sequence
  Description of Artificial Sequence: Synthetic oligonucleotide
  Antisense strand to SEQ ID NO: 559611
caugugccgauucaauauc

SEQ ID NO: 559613 - RNA, 19 nt, Artificial Sequence
  Description of Artificial Sequence: Synthetic oligonucleotide
  Sense strand starting at position 3348 of SEQ ID NO: 318398
acugaucuuuaguccagga

SEQ ID NO: 559614 - RNA, 19 nt, Artificial Sequence
  Description of Artificial Sequence: Synthetic oligonucleotide
  Antisense strand to SEQ ID NO: 559613
uccuggacuaaagaucagu

SEQ ID NO: 559615 - RNA, 19 nt, Artificial Sequence
  Description of Artificial Sequence: Synthetic oligonucleotide
  Sense strand starting at position 3352 of SEQ ID NO: 318398
aucuuuaguccaggaagag

SEQ ID NO: 559616 - RNA, 19 nt, Artificial Sequence
  Description of Artificial Sequence: Synthetic oligonucleotide
  Antisense strand to SEQ ID NO: 559615
cucuuccuggacuaaagau

SEQ ID NO: 559617 - RNA, 19 nt, Artificial Sequence
  Description of Artificial Sequence: Synthetic oligonucleotide
  Sense strand starting at position 3497 of SEQ ID NO: 318398
gguggaugaucucuugaua

SEQ ID NO: 559618 - RNA, 19 nt, Artificial Sequence
  Description of Artificial Sequence: Synthetic oligonucleotide
  Antisense strand to SEQ ID NO: 559617
uaucaagagaucauccacc

SEQ ID NO: 559619 - RNA, 19 nt, Artificial Sequence
  Description of Artificial Sequence: Synthetic oligonucleotide
  Sense strand starting at position 3678 of SEQ ID NO: 318398
auaagauacuaugucaugu

SEQ ID NO: 559620 - RNA, 19 nt, Artificial Sequence
  Description of Artificial Sequence: Synthetic oligonucleotide
  Antisense strand to SEQ ID NO: 559619
acaugacauaguaucuuau

SEQ ID NO: 559621 - RNA, 19 nt, Artificial Sequence
  Description of Artificial Sequence: Synthetic oligonucleotide
  Sense strand starting at position 3745 of SEQ ID NO: 318398
ggcaaaucacuuggacauu

SEQ ID NO: 559622 - RNA, 19 nt, Artificial Sequence
  Description of Artificial Sequence: Synthetic oligonucleotide
  Antisense strand to SEQ ID NO: 559621
aauguccaagugauuugcc

SEQ ID NO: 559623 - RNA, 19 nt, Artificial Sequence
  Description of Artificial Sequence: Synthetic oligonucleotide
  Sense strand starting at position 3792 of SEQ ID NO: 318398
uuauaaugucuagaaagcu

SEQ ID NO: 559624 - RNA, 19 nt, Artificial Sequence
  Description of Artificial Sequence: Synthetic oligonucleotide
  Antisense strand to SEQ ID NO: 559623
agcuuucuagacauuauaa

SEQ ID NO: 559625 - RNA, 19 nt, Artificial Sequence
  Description of Artificial Sequence: Synthetic oligonucleotide
  Sense strand starting at position 3831 of SEQ ID NO: 318398
aggcaugaguagucagaac

SEQ ID NO: 559626 - RNA, 19 nt, Artificial Sequence
  Description of Artificial Sequence: Synthetic oligonucleotide
  Antisense strand to SEQ ID NO: 559625
guucugacuacucaugccu

SEQ ID NO: 559627 - RNA, 19 nt, Artificial Sequence
  Description of Artificial Sequence: Synthetic oligonucleotide
  Sense strand starting at position 3845 of SEQ ID NO: 318398
agaacuaaggauugcaagu

SEQ ID NO: 559628 - RNA, 19 nt, Artificial Sequence
  Description of Artificial Sequence: Synthetic oligonucleotide
  Antisense strand to SEQ ID NO: 559627
acuugcaauccuuaguucu

SEQ ID NO: 559629 - RNA, 19 nt, Artificial Sequence
  Description of Artificial Sequence: Synthetic oligonucleotide
  Sense strand starting at position 3910 of SEQ ID NO: 318398
cugugaucauucuugaaau

SEQ ID NO: 559630 - RNA, 19 nt, Artificial Sequence
  Description of Artificial Sequence: Synthetic oligonucleotide
  Antisense strand to SEQ ID NO: 559629
auuucaagaaugaucacag

SEQ ID NO: 559631 - RNA, 19 nt, Artificial Sequence
  Description of Artificial Sequence: Synthetic oligonucleotide
  Sense strand starting at position 3950 of SEQ ID NO: 318398
acgagaagcuccucaggau

SEQ ID NO: 559632 - RNA, 19 nt, Artificial Sequence
  Description of Artificial Sequence: Synthetic oligonucleotide
  Antisense strand to SEQ ID NO: 559631
auccugaggagcuucucgu

SEQ ID NO: 559633 - RNA, 19 nt, Artificial Sequence
  Description of Artificial Sequence: Synthetic oligonucleotide
  Sense strand starting at position 3951 of SEQ ID NO: 318398
cgagaagcuccucaggauu

SEQ ID NO: 559634 - RNA, 19 nt, Artificial Sequence
  Description of Artificial Sequence: Synthetic oligonucleotide
  Antisense strand to SEQ ID NO: 559633
aauccugaggagcuucucg

SEQ ID NO: 559635 - RNA, 19 nt, Artificial Sequence
  Description of Artificial Sequence: Synthetic oligonucleotide
  Sense strand starting at position 30 of SEQ ID NO: 318399
ccucucuuacuuggugaua

SEQ ID NO: 559636 - RNA, 19 nt, Artificial Sequence
  Description of Artificial Sequence: Synthetic oligonucleotide
  Antisense strand to SEQ ID NO: 559635
uaucaccaaguaagagagg

SEQ ID NO: 559637 - RNA, 19 nt, Artificial Sequence
  Description of Artificial Sequence: Synthetic oligonucleotide
  Sense strand starting at position 42 of SEQ ID NO: 318399
ggugauaccugagcauaag

SEQ ID NO: 559638 - RNA, 19 nt, Artificial Sequence
  Description of Artificial Sequence: Synthetic oligonucleotide
  Antisense strand to SEQ ID NO: 559637
cuuaugcucagguaucacc

SEQ ID NO: 559639 - RNA, 19 nt, Artificial Sequence
  Description of Artificial Sequence: Synthetic oligonucleotide
  Sense strand starting at position 51 of SEQ ID NO: 318399
ugagcauaagccugacaaa

SEQ ID NO: 559640 - RNA, 19 nt, Artificial Sequence
  Description of Artificial Sequence: Synthetic oligonucleotide
  Antisense strand to SEQ ID NO: 559639
uuugucaggcuuaugcuca

SEQ ID NO: 559641 - RNA, 19 nt, Artificial Sequence
  Description of Artificial Sequence: Synthetic oligonucleotide
  Sense strand starting at position 151 of SEQ ID NO: 318399
gaaggucuccuuggaaacu

SEQ ID NO: 559642 - RNA, 19 nt, Artificial Sequence
  Description of Artificial Sequence: Synthetic oligonucleotide
  Antisense strand to SEQ ID NO: 559641
aguuuccaaggagaccuuc

SEQ ID NO: 559643 - RNA, 19 nt, Artificial Sequence
  Description of Artificial Sequence: Synthetic oligonucleotide
  Sense strand starting at position 215 of SEQ ID NO: 318399
ggccaaugauuauuggaua

SEQ ID NO: 559644 - RNA, 19 nt, Artificial Sequence
  Description of Artificial Sequence: Synthetic oligonucleotide
  Antisense strand to SEQ ID NO: 559643
uauccaauaaucauuggcc

SEQ ID NO: 559645 - RNA, 19 nt, Artificial Sequence
  Description of Artificial Sequence: Synthetic oligonucleotide
  Sense strand starting at position 227 of SEQ ID NO: 318399
uuggauaaauuauugcuga

SEQ ID NO: 559646 - RNA, 19 nt, Artificial Sequence
  Description of Artificial Sequence: Synthetic oligonucleotide
  Antisense strand to SEQ ID NO: 559645
ucagcaauaauuuauccaa

SEQ ID NO: 559647 - RNA, 19 nt, Artificial Sequence
  Description of Artificial Sequence: Synthetic oligonucleotide
  Sense strand starting at position 251 of SEQ ID NO: 318399
uggccugguagagauauca

SEQ ID NO: 559648 - RNA, 19 nt, Artificial Sequence
  Description of Artificial Sequence: Synthetic oligonucleotide
  Antisense strand to SEQ ID NO: 559647
ugauaucucuaccaggcca

SEQ ID NO: 559649 - RNA, 19 nt, Artificial Sequence
  Description of Artificial Sequence: Synthetic oligonucleotide
  Sense strand starting at position 290 of SEQ ID NO: 318399
cuugcuucugccuagagaa

SEQ ID NO: 559650 - RNA, 19 nt, Artificial Sequence
  Description of Artificial Sequence: Synthetic oligonucleotide
  Antisense strand to SEQ ID NO: 559649
uucucuaggcagaagcaag

SEQ ID NO: 559651 - RNA, 19 nt, Artificial Sequence
  Description of Artificial Sequence: Synthetic oligonucleotide
  Sense strand starting at position 322 of SEQ ID NO: 318399
uacugagggcccuauauua

SEQ ID NO: 559652 - RNA, 19 nt, Artificial Sequence
  Description of Artificial Sequence: Synthetic oligonucleotide
  Antisense strand to SEQ ID NO: 559651
uaauauagggcccucagua

SEQ ID NO: 559653 - RNA, 19 nt, Artificial Sequence
  Description of Artificial Sequence: Synthetic oligonucleotide
  Sense strand starting at position 333 of SEQ ID NO: 318399
cuauauuacucugcugaga

SEQ ID NO: 559654 - RNA, 19 nt, Artificial Sequence
  Description of Artificial Sequence: Synthetic oligonucleotide
  Antisense strand to SEQ ID NO: 559653
ucucagcagaguaauauag

SEQ ID NO: 559655 - RNA, 19 nt, Artificial Sequence
  Description of Artificial Sequence: Synthetic oligonucleotide
  Sense strand starting at position 409 of SEQ ID NO: 318399
ccaccuguauucuuacuga

SEQ ID NO: 559656 - RNA, 19 nt, Artificial Sequence
  Description of Artificial Sequence: Synthetic oligonucleotide
  Antisense strand to SEQ ID NO: 559655
ucaguaagaauacaggugg

SEQ ID NO: 559657 - RNA, 19 nt, Artificial Sequence
  Description of Artificial Sequence: Synthetic oligonucleotide
  Sense strand starting at position 478 of SEQ ID NO: 318399
caaguaauuguguacagac

SEQ ID NO: 559658 - RNA, 19 nt, Artificial Sequence
  Description of Artificial Sequence: Synthetic oligonucleotide
  Antisense strand to SEQ ID NO: 559657
gucuguacacaauuacuug

SEQ ID NO: 559659 - RNA, 19 nt, Artificial Sequence
  Description of Artificial Sequence: Synthetic oligonucleotide
  Sense strand starting at position 480 of SEQ ID NO: 318399
aguaauuguguacagacau

SEQ ID NO: 559660 - RNA, 19 nt, Artificial Sequence
  Description of Artificial Sequence: Synthetic oligonucleotide
  Antisense strand to SEQ ID NO: 559659
augucuguacacaauuacu

SEQ ID NO: 559661 - RNA, 19 nt, Artificial Sequence
  Description of Artificial Sequence: Synthetic oligonucleotide
  Sense strand starting at position 573 of SEQ ID NO: 318399
gcgacuugugcauaaggaa

SEQ ID NO: 559662 - RNA, 19 nt, Artificial Sequence
  Description of Artificial Sequence: Synthetic oligonucleotide
  Antisense strand to SEQ ID NO: 559661
uuccuuaugcacaagucgc

SEQ ID NO: 559663 - RNA, 19 nt, Artificial Sequence
  Description of Artificial Sequence: Synthetic oligonucleotide
  Sense strand starting at position 597 of SEQ ID NO: 318399
ccagcugaguaaccgaaua

SEQ ID NO: 559664 - RNA, 19 nt, Artificial Sequence
  Description of Artificial Sequence: Synthetic oligonucleotide
  Antisense strand to SEQ ID NO: 559663
uauucgguuacucagcugg

SEQ ID NO: 559665 - RNA, 19 nt, Artificial Sequence
  Description of Artificial Sequence: Synthetic oligonucleotide
  Sense strand starting at position 599 of SEQ ID NO: 318399
agcugaguaaccgaauaau

SEQ ID NO: 559666 - RNA, 19 nt, Artificial Sequence
  Description of Artificial Sequence: Synthetic oligonucleotide
  Antisense strand to SEQ ID NO: 559665
auuauucgguuacucagcu

SEQ ID NO: 559667 - RNA, 19 nt, Artificial Sequence
  Description of Artificial Sequence: Synthetic oligonucleotide
  Sense strand starting at position 602 of SEQ ID NO: 318399
ugaguaaccgaauaaucuc

SEQ ID NO: 559668 - RNA, 19 nt, Artificial Sequence
  Description of Artificial Sequence: Synthetic oligonucleotide
  Antisense strand to SEQ ID NO: 559667
gagauuauucgguuacuca

SEQ ID NO: 559669 - RNA, 19 nt, Artificial Sequence
  Description of Artificial Sequence: Synthetic oligonucleotide
  Sense strand starting at position 608 of SEQ ID NO: 318399
accgaauaaucucugugaa

SEQ ID NO: 559670 - RNA, 19 nt, Artificial Sequence
  Description of Artificial Sequence: Synthetic oligonucleotide
  Antisense strand to SEQ ID NO: 559669
uucacagagauuauucggu

SEQ ID NO: 559671 - RNA, 19 nt, Artificial Sequence
  Description of Artificial Sequence: Synthetic oligonucleotide
  Sense strand starting at position 609 of SEQ ID NO: 318399
ccgaauaaucucugugaag

SEQ ID NO: 559672 - RNA, 19 nt, Artificial Sequence
  Description of Artificial Sequence: Synthetic oligonucleotide
  Antisense strand to SEQ ID NO: 559671
cuucacagagauuauucgg

SEQ ID NO: 559673 - RNA, 19 nt, Artificial Sequence
  Description of Artificial Sequence: Synthetic oligonucleotide
  Sense strand starting at position 610 of SEQ ID NO: 318399
cgaauaaucucugugaaga

SEQ ID NO: 559674 - RNA, 19 nt, Artificial Sequence
  Description of Artificial Sequence: Synthetic oligonucleotide
  Antisense strand to SEQ ID NO: 559673
ucuucacagagauuauucg

SEQ ID NO: 559675 - RNA, 19 nt, Artificial Sequence
  Description of Artificial Sequence: Synthetic oligonucleotide
  Sense strand starting at position 618 of SEQ ID NO: 318399
cucugugaagauuagcaaa

SEQ ID NO: 559676 - RNA, 19 nt, Artificial Sequence
  Description of Artificial Sequence: Synthetic oligonucleotide
  Antisense strand to SEQ ID NO: 559675
uuugcuaaucuucacagag

SEQ ID NO: 559677 - RNA, 19 nt, Artificial Sequence
  Description of Artificial Sequence: Synthetic oligonucleotide
  Sense strand starting at position 620 of SEQ ID NO: 318399
cugugaagauuagcaaagu

SEQ ID NO: 559678 - RNA, 19 nt, Artificial Sequence
  Description of Artificial Sequence: Synthetic oligonucleotide
  Antisense strand to SEQ ID NO: 559677
acuuugcuaaucuucacag

SEQ ID NO: 559679 - RNA, 19 nt, Artificial Sequence
  Description of Artificial Sequence: Synthetic oligonucleotide
  Sense strand starting at position 767 of SEQ ID NO: 318399
ucaugagucucuuuaucau

SEQ ID NO: 559680 - RNA, 19 nt, Artificial Sequence
  Description of Artificial Sequence: Synthetic oligonucleotide
  Antisense strand to SEQ ID NO: 559679
augauaaagagacucauga

SEQ ID NO: 559681 - RNA, 19 nt, Artificial Sequence
  Description of Artificial Sequence: Synthetic oligonucleotide
  Sense strand starting at position 800 of SEQ ID NO: 318399
uuaagagguuaguuaaguu

SEQ ID NO: 559682 - RNA, 19 nt, Artificial Sequence
  Description of Artificial Sequence: Synthetic oligonucleotide
  Antisense strand to SEQ ID NO: 559681
aacuuaacuaaccucuuaa

SEQ ID NO: 559683 - RNA, 19 nt, Artificial Sequence
  Description of Artificial Sequence: Synthetic oligonucleotide
  Sense strand starting at position 804 of SEQ ID NO: 318399
gagguuaguuaaguucuca

SEQ ID NO: 559684 - RNA, 19 nt, Artificial Sequence
  Description of Artificial Sequence: Synthetic oligonucleotide
  Antisense strand to SEQ ID NO: 559683
ugagaacuuaacuaaccuc

SEQ ID NO: 559685 - RNA, 19 nt, Artificial Sequence
  Description of Artificial Sequence: Synthetic oligonucleotide
  Sense strand starting at position 812 of SEQ ID NO: 318399
uuaaguucucaagggaauu

SEQ ID NO: 559686 - RNA, 19 nt, Artificial Sequence
  Description of Artificial Sequence: Synthetic oligonucleotide
  Antisense strand to SEQ ID NO: 559685
aauucccuugagaacuuaa

SEQ ID NO: 559687 - RNA, 19 nt, Artificial Sequence
  Description of Artificial Sequence: Synthetic oligonucleotide
  Sense strand starting at position 822 of SEQ ID NO: 318399
aagggaauuucugaagccu

SEQ ID NO: 559688 - RNA, 19 nt, Artificial Sequence
  Description of Artificial Sequence: Synthetic oligonucleotide
  Antisense strand to SEQ ID NO: 559687
aggcuucagaaauucccuu

SEQ ID NO: 559689 - RNA, 19 nt, Artificial Sequence
  Description of Artificial Sequence: Synthetic oligonucleotide
  Sense strand starting at position 1195 of SEQ ID NO: 318399
gagacagugaccugauguu

SEQ ID NO: 559690 - RNA, 19 nt, Artificial Sequence
  Description of Artificial Sequence: Synthetic oligonucleotide
  Antisense strand to SEQ ID NO: 559689
aacaucaggucacugucuc

SEQ ID NO: 559691 - RNA, 19 nt, Artificial Sequence
  Description of Artificial Sequence: Synthetic oligonucleotide
  Sense strand starting at position 1211 of SEQ ID NO: 318399
guuaacagagcggaugauu

SEQ ID NO: 559692 - RNA, 19 nt, Artificial Sequence
  Description of Artificial Sequence: Synthetic oligonucleotide
  Antisense strand to SEQ ID NO: 559691
aaucauccgcucuguuaac

SEQ ID NO: 559693 - RNA, 19 nt, Artificial Sequence
  Description of Artificial Sequence: Synthetic oligonucleotide
  Sense strand starting at position 2266 of SEQ ID NO: 318399
gcguuaaagcucucucgug

SEQ ID NO: 559694 - RNA, 19 nt, Artificial Sequence
  Description of Artificial Sequence: Synthetic oligonucleotide
  Antisense strand to SEQ ID NO: 559693
cacgagagagcuuuaacgc

SEQ ID NO: 559695 - RNA, 19 nt, Artificial Sequence
  Description of Artificial Sequence: Synthetic oligonucleotide
  Sense strand starting at position 3141 of SEQ ID NO: 318399
cgcagagccacuucuguuu

SEQ ID NO: 559696 - RNA, 19 nt, Artificial Sequence
  Description of Artificial Sequence: Synthetic oligonucleotide
  Antisense strand to SEQ ID NO: 559695
aaacagaaguggcucugcg

SEQ ID NO: 559697 - RNA, 19 nt, Artificial Sequence
  Description of Artificial Sequence: Synthetic oligonucleotide
  Sense strand starting at position 3326 of SEQ ID NO: 318399
aaagacuugugacugacua

SEQ ID NO: 559698 - RNA, 19 nt, Artificial Sequence
  Description of Artificial Sequence: Synthetic oligonucleotide
  Antisense strand to SEQ ID NO: 559697
uagucagucacaagucuuu

SEQ ID NO: 559699 - RNA, 19 nt, Artificial Sequence
  Description of Artificial Sequence: Synthetic oligonucleotide
  Sense strand starting at position 3518 of SEQ ID NO: 318399
gccuuagagagucaucaga

SEQ ID NO: 559700 - RNA, 19 nt, Artificial Sequence
  Description of Artificial Sequence: Synthetic oligonucleotide
  Antisense strand to SEQ ID NO: 559699
ucugaugacucucuaaggc

SEQ ID NO: 559701 - RNA, 19 nt, Artificial Sequence
  Description of Artificial Sequence: Synthetic oligonucleotide
  Sense strand starting at position 3532 of SEQ ID NO: 318399
ucagaccagugauuccaau

SEQ ID NO: 559702 - RNA, 19 nt, Artificial Sequence
  Description of Artificial Sequence: Synthetic oligonucleotide
  Antisense strand to SEQ ID NO: 559701
auuggaaucacuggucuga

SEQ ID NO: 559703 - RNA, 19 nt, Artificial Sequence
  Description of Artificial Sequence: Synthetic oligonucleotide
  Sense strand starting at position 3640 of SEQ ID NO: 318399
gaauaugucugagucuuac

SEQ ID NO: 559704 - RNA, 19 nt, Artificial Sequence
  Description of Artificial Sequence: Synthetic oligonucleotide
  Antisense strand to SEQ ID NO: 559703
guaagacucagacauauuc

SEQ ID NO: 559705 - RNA, 19 nt, Artificial Sequence
  Description of Artificial Sequence: Synthetic oligonucleotide
  Sense strand starting at position 3649 of SEQ ID NO: 318399
ugagucuuacuuuaugaca

SEQ ID NO: 559706 - RNA, 19 nt, Artificial Sequence
  Description of Artificial Sequence: Synthetic oligonucleotide
  Antisense strand to SEQ ID NO: 559705
ugucauaaaguaagacuca

SEQ ID NO: 559707 - RNA, 19 nt, Artificial Sequence
  Description of Artificial Sequence: Synthetic oligonucleotide
  Sense strand starting at position 3729 of SEQ ID NO: 318399
gagguaaauuauguggacu

SEQ ID NO: 559708 - RNA, 19 nt, Artificial Sequence
  Description of Artificial Sequence: Synthetic oligonucleotide
  Antisense strand to SEQ ID NO: 559707
aguccacauaauuuaccuc

SEQ ID NO: 559709 - RNA, 19 nt, Artificial Sequence
  Description of Artificial Sequence: Synthetic oligonucleotide
  Sense strand starting at position 3730 of SEQ ID NO: 318399
agguaaauuauguggacua

SEQ ID NO: 559710 - RNA, 19 nt, Artificial Sequence
  Description of Artificial Sequence: Synthetic oligonucleotide
  Antisense strand to SEQ ID NO: 559709
uaguccacauaauuuaccu

SEQ ID NO: 559711 - RNA, 19 nt, Artificial Sequence
  Description of Artificial Sequence: Synthetic oligonucleotide
  Sense strand starting at position 3775 of SEQ ID NO: 318399
ggcucugugaaagacaagu

SEQ ID NO: 559712 - RNA, 19 nt, Artificial Sequence
  Description of Artificial Sequence: Synthetic oligonucleotide
  Antisense strand to SEQ ID NO: 559711
acuugucuuucacagagcc

SEQ ID NO: 559713 - RNA, 19 nt, Artificial Sequence
  Description of Artificial Sequence: Synthetic oligonucleotide
  Sense strand starting at position 3860 of SEQ ID NO: 318399
ggacuuaaauaauugagcu

SEQ ID NO: 559714 - RNA, 19 nt, Artificial Sequence
  Description of Artificial Sequence: Synthetic oligonucleotide
  Antisense strand to SEQ ID NO: 559713
agcucaauuauuuaagucc

SEQ ID NO: 559715 - RNA, 19 nt, Artificial Sequence
  Description of Artificial Sequence: Synthetic oligonucleotide
  Sense strand starting at position 58 of SEQ ID NO: 318400
ggaguauaaggcuauccuu

SEQ ID NO: 559716 - RNA, 19 nt, Artificial Sequence
  Description of Artificial Sequence: Synthetic oligonucleotide
  Antisense strand to SEQ ID NO: 559715
aaggauagccuuauacucc

SEQ ID NO: 559717 - RNA, 19 nt, Artificial Sequence
  Description of Artificial Sequence: Synthetic oligonucleotide
  Sense strand starting at position 107 of SEQ ID NO: 318400
auaaaucuccagugcaugu

SEQ ID NO: 559718 - RNA, 19 nt, Artificial Sequence
  Description of Artificial Sequence: Synthetic oligonucleotide
  Antisense strand to SEQ ID NO: 559717
acaugcacuggagauuuau

SEQ ID NO: 559719 - RNA, 19 nt, Artificial Sequence
  Description of Artificial Sequence: Synthetic oligonucleotide
  Sense strand starting at position 143 of SEQ ID NO: 318400
auccuagacuuuguguuau

SEQ ID NO: 559720 - RNA, 19 nt, Artificial Sequence
  Description of Artificial Sequence: Synthetic oligonucleotide
  Antisense strand to SEQ ID NO: 559719
auaacacaaagucuaggau

SEQ ID NO: 559721 - RNA, 19 nt, Artificial Sequence
  Description of Artificial Sequence: Synthetic oligonucleotide
  Sense strand starting at position 145 of SEQ ID NO: 318400
ccuagacuuuguguuauua

SEQ ID NO: 559722 - RNA, 19 nt, Artificial Sequence
  Description of Artificial Sequence: Synthetic oligonucleotide
  Antisense strand to SEQ ID NO: 559721
uaauaacacaaagucuagg

SEQ ID NO: 559723 - RNA, 19 nt, Artificial Sequence
  Description of Artificial Sequence: Synthetic oligonucleotide
  Sense strand starting at position 149 of SEQ ID NO: 318400
gacuuuguguuauuauuga

SEQ ID NO: 559724 - RNA, 19 nt, Artificial Sequence
  Description of Artificial Sequence: Synthetic oligonucleotide
  Antisense strand to SEQ ID NO: 559723
ucaauaauaacacaaaguc

SEQ ID NO: 559725 - RNA, 19 nt, Artificial Sequence
  Description of Artificial Sequence: Synthetic oligonucleotide
  Sense strand starting at position 156 of SEQ ID NO: 318400
uguuauuauugaucacuuc

SEQ ID NO: 559726 - RNA, 19 nt, Artificial Sequence
  Description of Artificial Sequence: Synthetic oligonucleotide
  Antisense strand to SEQ ID NO: 559725
gaagugaucaauaauaaca

SEQ ID NO: 559727 - RNA, 19 nt, Artificial Sequence
  Description of Artificial Sequence: Synthetic oligonucleotide
  Sense strand starting at position 195 of SEQ ID NO: 318400
ugccuaaucgcgcuuagca

SEQ ID NO: 559728 - RNA, 19 nt, Artificial Sequence
  Description of Artificial Sequence: Synthetic oligonucleotide
  Antisense strand to SEQ ID NO: 559727
ugcuaagcgcgauuaggca

SEQ ID NO: 559729 - RNA, 19 nt, Artificial Sequence
  Description of Artificial Sequence: Synthetic oligonucleotide
  Sense strand starting at position 196 of SEQ ID NO: 318400
gccuaaucgcgcuuagcaa

SEQ ID NO: 559730 - RNA, 19 nt, Artificial Sequence
  Description of Artificial Sequence: Synthetic oligonucleotide
  Antisense strand to SEQ ID NO: 559729
uugcuaagcgcgauuaggc

SEQ ID NO: 559731 - RNA, 19 nt, Artificial Sequence
  Description of Artificial Sequence: Synthetic oligonucleotide
  Sense strand starting at position 474 of SEQ ID NO: 318400
gccuaaccugccuaggaaa

SEQ ID NO: 559732 - RNA, 19 nt, Artificial Sequence
  Description of Artificial Sequence: Synthetic oligonucleotide
  Antisense strand to SEQ ID NO: 559731
uuuccuaggcagguuaggc

SEQ ID NO: 559733 - RNA, 19 nt, Artificial Sequence
  Description of Artificial Sequence: Synthetic oligonucleotide
  Sense strand starting at position 486 of SEQ ID NO: 318400
uaggaaacgccuuggaguu

SEQ ID NO: 559734 - RNA, 19 nt, Artificial Sequence
  Description of Artificial Sequence: Synthetic oligonucleotide
  Antisense strand to SEQ ID NO: 559733
aacuccaaggcguuuccua

SEQ ID NO: 559735 - RNA, 19 nt, Artificial Sequence
  Description of Artificial Sequence: Synthetic oligonucleotide
  Sense strand starting at position 498 of SEQ ID NO: 318400
uggaguucccgauaaccau

SEQ ID NO: 559736 - RNA, 19 nt, Artificial Sequence
  Description of Artificial Sequence: Synthetic oligonucleotide
  Antisense strand to SEQ ID NO: 559735
augguuaucgggaacucca

SEQ ID NO: 559737 - RNA, 19 nt, Artificial Sequence
  Description of Artificial Sequence: Synthetic oligonucleotide
  Sense strand starting at position 1554 of SEQ ID NO: 318400
cgagaugccucuccucaaa

SEQ ID NO: 559738 - RNA, 19 nt, Artificial Sequence
  Description of Artificial Sequence: Synthetic oligonucleotide
  Antisense strand to SEQ ID NO: 559737
uuugaggagaggcaucucg

SEQ ID NO: 559739 - RNA, 19 nt, Artificial Sequence
  Description of Artificial Sequence: Synthetic oligonucleotide
  Sense strand starting at position 1566 of SEQ ID NO: 318400
ccucaaagcccaggucaua

SEQ ID NO: 559740 - RNA, 19 nt, Artificial Sequence
  Description of Artificial Sequence: Synthetic oligonucleotide
  Antisense strand to SEQ ID NO: 559739
uaugaccugggcuuugagg

SEQ ID NO: 559741 - RNA, 19 nt, Artificial Sequence
  Description of Artificial Sequence: Synthetic oligonucleotide
  Sense strand starting at position 1612 of SEQ ID NO: 318400
cuggaacagacguguggau

SEQ ID NO: 559742 - RNA, 19 nt, Artificial Sequence
  Description of Artificial Sequence: Synthetic oligonucleotide
  Antisense strand to SEQ ID NO: 559741
auccacacgucuguuccag

SEQ ID NO: 559743 - RNA, 19 nt, Artificial Sequence
  Description of Artificial Sequence: Synthetic oligonucleotide
  Sense strand starting at position 1614 of SEQ ID NO: 318400
ggaacagacguguggauca

SEQ ID NO: 559744 - RNA, 19 nt, Artificial Sequence
  Description of Artificial Sequence: Synthetic oligonucleotide
  Antisense strand to SEQ ID NO: 559743
ugauccacacgucuguucc

SEQ ID NO: 559745 - RNA, 19 nt, Artificial Sequence
  Description of Artificial Sequence: Synthetic oligonucleotide
  Sense strand starting at position 1706 of SEQ ID NO: 318400
gauuguucugggcgacaug

SEQ ID NO: 559746 - RNA, 19 nt, Artificial Sequence
  Description of Artificial Sequence: Synthetic oligonucleotide
  Antisense strand to SEQ ID NO: 559745
caugucgcccagaacaauc

SEQ ID NO: 559747 - RNA, 19 nt, Artificial Sequence
  Description of Artificial Sequence: Synthetic oligonucleotide
  Sense strand starting at position 1707 of SEQ ID NO: 318400
auuguucugggcgacauga

SEQ ID NO: 559748 - RNA, 19 nt, Artificial Sequence
  Description of Artificial Sequence: Synthetic oligonucleotide
  Antisense strand to SEQ ID NO: 559747
ucaugucgcccagaacaau

SEQ ID NO: 559749 - RNA, 19 nt, Artificial Sequence
  Description of Artificial Sequence: Synthetic oligonucleotide
  Sense strand starting at position 1709 of SEQ ID NO: 318400
uguucugggcgacaugaaa

SEQ ID NO: 559750 - RNA, 19 nt, Artificial Sequence
  Description of Artificial Sequence: Synthetic oligonucleotide
  Antisense strand to SEQ ID NO: 559749
uuucaugucgcccagaaca

SEQ ID NO: 559751 - RNA, 19 nt, Artificial Sequence
  Description of Artificial Sequence: Synthetic oligonucleotide
  Sense strand starting at position 1760 of SEQ ID NO: 318400
gccuuagagcgguaauuau

SEQ ID NO: 559752 - RNA, 19 nt, Artificial Sequence
  Description of Artificial Sequence: Synthetic oligonucleotide
  Antisense strand to SEQ ID NO: 559751
auaauuaccgcucuaaggc

SEQ ID NO: 559753 - RNA, 19 nt, Artificial Sequence
  Description of Artificial Sequence: Synthetic oligonucleotide
  Sense strand starting at position 2355 of SEQ ID NO: 318400
gcucgaacugccuggauaa

SEQ ID NO: 559754 - RNA, 19 nt, Artificial Sequence
  Description of Artificial Sequence: Synthetic oligonucleotide
  Antisense strand to SEQ ID NO: 559753
uuauccaggcaguucgagc

SEQ ID NO: 559755 - RNA, 19 nt, Artificial Sequence
  Description of Artificial Sequence: Synthetic oligonucleotide
  Sense strand starting at position 2356 of SEQ ID NO: 318400
cucgaacugccuggauaaa

SEQ ID NO: 559756 - RNA, 19 nt, Artificial Sequence
  Description of Artificial Sequence: Synthetic oligonucleotide
  Antisense strand to SEQ ID NO: 559755
uuuauccaggcaguucgag

SEQ ID NO: 559757 - RNA, 19 nt, Artificial Sequence
  Description of Artificial Sequence: Synthetic oligonucleotide
  Sense strand starting at position 2855 of SEQ ID NO: 318400
cugggaguccuucagugca

SEQ ID NO: 559758 - RNA, 19 nt, Artificial Sequence
  Description of Artificial Sequence: Synthetic oligonucleotide
  Antisense strand to SEQ ID NO: 559757
ugcacugaaggacucccag

SEQ ID NO: 559759 - RNA, 19 nt, Artificial Sequence
  Description of Artificial Sequence: Synthetic oligonucleotide
  Sense strand starting at position 2902 of SEQ ID NO: 318400
cccauuccucgugacaaca

SEQ ID NO: 559760 - RNA, 19 nt, Artificial Sequence
  Description of Artificial Sequence: Synthetic oligonucleotide
  Antisense strand to SEQ ID NO: 559759
uguugucacgaggaauggg

SEQ ID NO: 559761 - RNA, 19 nt, Artificial Sequence
  Description of Artificial Sequence: Synthetic oligonucleotide
  Sense strand starting at position 2918 of SEQ ID NO: 318400
acagcuaccguuuaagagu

SEQ ID NO: 559762 - RNA, 19 nt, Artificial Sequence
  Description of Artificial Sequence: Synthetic oligonucleotide
  Antisense strand to SEQ ID NO: 559761
acucuuaaacgguagcugu

SEQ ID NO: 559763 - RNA, 19 nt, Artificial Sequence
  Description of Artificial Sequence: Synthetic oligonucleotide
  Sense strand starting at position 2927 of SEQ ID NO: 318400
guuuaagaguuccuaauau

SEQ ID NO: 559764 - RNA, 19 nt, Artificial Sequence
  Description of Artificial Sequence: Synthetic oligonucleotide
  Antisense strand to SEQ ID NO: 559763
auauuaggaacucuuaaac

SEQ ID NO: 559765 - RNA, 19 nt, Artificial Sequence
  Description of Artificial Sequence: Synthetic oligonucleotide
  Sense strand starting at position 2960 of SEQ ID NO: 318400
agaguuugcccaugggauu

SEQ ID NO: 559766 - RNA, 19 nt, Artificial Sequence
  Description of Artificial Sequence: Synthetic oligonucleotide
  Antisense strand to SEQ ID NO: 559765
aaucccaugggcaaacucu

SEQ ID NO: 559767 - RNA, 19 nt, Artificial Sequence
  Description of Artificial Sequence: Synthetic oligonucleotide
  Sense strand starting at position 2992 of SEQ ID NO: 318400
uauggaguaggugauguua

SEQ ID NO: 559768 - RNA, 19 nt, Artificial Sequence
  Description of Artificial Sequence: Synthetic oligonucleotide
  Antisense strand to SEQ ID NO: 559767
uaacaucaccuacuccaua

SEQ ID NO: 559769 - RNA, 19 nt, Artificial Sequence
  Description of Artificial Sequence: Synthetic oligonucleotide
  Sense strand starting at position 3047 of SEQ ID NO: 318400
ggcuaaugauuagcccauu

SEQ ID NO: 559770 - RNA, 19 nt, Artificial Sequence
  Description of Artificial Sequence: Synthetic oligonucleotide
  Antisense strand to SEQ ID NO: 559769
aaugggcuaaucauuagcc

SEQ ID NO: 559771 - RNA, 19 nt, Artificial Sequence
  Description of Artificial Sequence: Synthetic oligonucleotide
  Sense strand starting at position 3143 of SEQ ID NO: 318400
uggucuuccuucucaaagu

SEQ ID NO: 559772 - RNA, 19 nt, Artificial Sequence
  Description of Artificial Sequence: Synthetic oligonucleotide
  Antisense strand to SEQ ID NO: 559771
acuuugagaaggaagacca

SEQ ID NO: 559773 - RNA, 19 nt, Artificial Sequence
  Description of Artificial Sequence: Synthetic oligonucleotide
  Sense strand starting at position 3262 of SEQ ID NO: 318400
ucuaguaaacaucgugaau

SEQ ID NO: 559774 - RNA, 19 nt, Artificial Sequence
  Description of Artificial Sequence: Synthetic oligonucleotide
  Antisense strand to SEQ ID NO: 559773
auucacgauguuuacuaga

SEQ ID NO: 559775 - RNA, 19 nt, Artificial Sequence
  Description of Artificial Sequence: Synthetic oligonucleotide
  Sense strand starting at position 3265 of SEQ ID NO: 318400
aguaaacaucgugaauaau

SEQ ID NO: 559776 - RNA, 19 nt, Artificial Sequence
  Description of Artificial Sequence: Synthetic oligonucleotide
  Antisense strand to SEQ ID NO: 559775
auuauucacgauguuuacu

SEQ ID NO: 559777 - RNA, 19 nt, Artificial Sequence
  Description of Artificial Sequence: Synthetic oligonucleotide
  Sense strand starting at position 3419 of SEQ ID NO: 318400
ccuguuauugugcagggua

SEQ ID NO: 559778 - RNA, 19 nt, Artificial Sequence
  Description of Artificial Sequence: Synthetic oligonucleotide
  Antisense strand to SEQ ID NO: 559777
uacccugcacaauaacagg

SEQ ID NO: 559779 - RNA, 19 nt, Artificial Sequence
  Description of Artificial Sequence: Synthetic oligonucleotide
  Sense strand starting at position 3683 of SEQ ID NO: 318400
gguuucggcggcucuuaaa

SEQ ID NO: 559780 - RNA, 19 nt, Artificial Sequence
  Description of Artificial Sequence: Synthetic oligonucleotide
  Antisense strand to SEQ ID NO: 559779
uuuaagagccgccgaaacc

SEQ ID NO: 559781 - RNA, 19 nt, Artificial Sequence
  Description of Artificial Sequence: Synthetic oligonucleotide
  Sense strand starting at position 3736 of SEQ ID NO: 318400
ggugaagacguucagaguu

SEQ ID NO: 559782 - RNA, 19 nt, Artificial Sequence
  Description of Artificial Sequence: Synthetic oligonucleotide
  Antisense strand to SEQ ID NO: 559781
aacucugaacgucuucacc

SEQ ID NO: 559783 - RNA, 19 nt, Artificial Sequence
  Description of Artificial Sequence: Synthetic oligonucleotide
  Sense strand starting at position 3750 of SEQ ID NO: 318400
gaguuaggguaagaagaaa

SEQ ID NO: 559784 - RNA, 19 nt, Artificial Sequence
  Description of Artificial Sequence: Synthetic oligonucleotide
  Antisense strand to SEQ ID NO: 559783
uuucuucuuacccuaacuc

SEQ ID NO: 559785 - RNA, 19 nt, Artificial Sequence
  Description of Artificial Sequence: Synthetic oligonucleotide
  Sense strand starting at position 3769 of SEQ ID NO: 318400
agcauugagccacgaaauu

SEQ ID NO: 559786 - RNA, 19 nt, Artificial Sequence
  Description of Artificial Sequence: Synthetic oligonucleotide
  Antisense strand to SEQ ID NO: 559785
aauuucguggcucaaugcu

SEQ ID NO: 559787 - RNA, 19 nt, Artificial Sequence
  Description of Artificial Sequence: Synthetic oligonucleotide
  Sense strand starting at position 3781 of SEQ ID NO: 318400
cgaaauuggugcucaguaa

SEQ ID NO: 559788 - RNA, 19 nt, Artificial Sequence
  Description of Artificial Sequence: Synthetic oligonucleotide
  Antisense strand to SEQ ID NO: 559787
uuacugagcaccaauuucg

SEQ ID NO: 559789 - RNA, 19 nt, Artificial Sequence
  Description of Artificial Sequence: Synthetic oligonucleotide
  Sense strand starting at position 3782 of SEQ ID NO: 318400
gaaauuggugcucaguaaa

SEQ ID NO: 559790 - RNA, 19 nt, Artificial Sequence
  Description of Artificial Sequence: Synthetic oligonucleotide
  Antisense strand to SEQ ID NO: 559789
uuuacugagcaccaauuuc

SEQ ID NO: 559791 - RNA, 19 nt, Artificial Sequence
  Description of Artificial Sequence: Synthetic oligonucleotide
  Sense strand starting at position 3955 of SEQ ID NO: 318400
gauuguugugaggaaugca

SEQ ID NO: 559792 - RNA, 19 nt, Artificial Sequence
  Description of Artificial Sequence: Synthetic oligonucleotide
  Antisense strand to SEQ ID NO: 559791
ugcauuccucacaacaauc

SEQ ID NO: 559793 - RNA, 19 nt, Artificial Sequence
  Description of Artificial Sequence: Synthetic oligonucleotide
  Sense strand starting at position 3963 of SEQ ID NO: 318400
ugaggaaugcacugggaua

SEQ ID NO: 559794 - RNA, 19 nt, Artificial Sequence
  Description of Artificial Sequence: Synthetic oligonucleotide
  Antisense strand to SEQ ID NO: 559793
uaucccagugcauuccuca

SEQ ID NO: 559795 - RNA, 19 nt, Artificial Sequence
  Description of Artificial Sequence: Synthetic oligonucleotide
  Sense strand starting at position 171 of SEQ ID NO: 318401
aagggaaauucccagggaa

SEQ ID NO: 559796 - RNA, 19 nt, Artificial Sequence
  Description of Artificial Sequence: Synthetic oligonucleotide
  Antisense strand to SEQ ID NO: 559795
uucccugggaauuucccuu

SEQ ID NO: 559797 - RNA, 19 nt, Artificial Sequence
  Description of Artificial Sequence: Synthetic oligonucleotide
  Sense strand starting at position 276 of SEQ ID NO: 318401
uuuagaauacagugacugu

SEQ ID NO: 559798 - RNA, 19 nt, Artificial Sequence
  Description of Artificial Sequence: Synthetic oligonucleotide
  Antisense strand to SEQ ID NO: 559797
acagucacuguauucuaaa

SEQ ID NO: 559799 - RNA, 19 nt, Artificial Sequence
  Description of Artificial Sequence: Synthetic oligonucleotide
  Sense strand starting at position 305 of SEQ ID NO: 318401
gacauagucccaugggacu

SEQ ID NO: 559800 - RNA, 19 nt, Artificial Sequence
  Description of Artificial Sequence: Synthetic oligonucleotide
  Antisense strand to SEQ ID NO: 559799
agucccaugggacuauguc

SEQ ID NO: 559801 - RNA, 19 nt, Artificial Sequence
  Description of Artificial Sequence: Synthetic oligonucleotide
  Sense strand starting at position 465 of SEQ ID NO: 318401
guguuucuucccuaucaca

SEQ ID NO: 559802 - RNA, 19 nt, Artificial Sequence
  Description of Artificial Sequence: Synthetic oligonucleotide
  Antisense strand to SEQ ID NO: 559801
ugugauagggaagaaacac

SEQ ID NO: 559803 - RNA, 19 nt, Artificial Sequence
  Description of Artificial Sequence: Synthetic oligonucleotide
  Sense strand starting at position 531 of SEQ ID NO: 318401
uguguuuacacagaguucu

SEQ ID NO: 559804 - RNA, 19 nt, Artificial Sequence
  Description of Artificial Sequence: Synthetic oligonucleotide
  Antisense strand to SEQ ID NO: 559803
agaacucuguguaaacaca

SEQ ID NO: 559805 - RNA, 19 nt, Artificial Sequence
  Description of Artificial Sequence: Synthetic oligonucleotide
  Sense strand starting at position 721 of SEQ ID NO: 318401
acuguaauguaccuuuaaa

SEQ ID NO: 559806 - RNA, 19 nt, Artificial Sequence
  Description of Artificial Sequence: Synthetic oligonucleotide
  Antisense strand to SEQ ID NO: 559805
uuuaaagguacauuacagu

SEQ ID NO: 559807 - RNA, 19 nt, Artificial Sequence
  Description of Artificial Sequence: Synthetic oligonucleotide
  Sense strand starting at position 852 of SEQ ID NO: 318401
uucuuuagacagugaauga

SEQ ID NO: 559808 - RNA, 19 nt, Artificial Sequence
  Description of Artificial Sequence: Synthetic oligonucleotide
  Antisense strand to SEQ ID NO: 559807
ucauucacugucuaaagaa

SEQ ID NO: 559809 - RNA, 19 nt, Artificial Sequence
  Description of Artificial Sequence: Synthetic oligonucleotide
  Sense strand starting at position 1031 of SEQ ID NO: 318401
agaguagagacguguauag

SEQ ID NO: 559810 - RNA, 19 nt, Artificial Sequence
  Description of Artificial Sequence: Synthetic oligonucleotide
  Antisense strand to SEQ ID NO: 559809
cuauacacgucucuacucu

SEQ ID NO: 559811 - RNA, 19 nt, Artificial Sequence
  Description of Artificial Sequence: Synthetic oligonucleotide
  Sense strand starting at position 1033 of SEQ ID NO: 318401
aguagagacguguauagug

SEQ ID NO: 559812 - RNA, 19 nt, Artificial Sequence
  Description of Artificial Sequence: Synthetic oligonucleotide
  Antisense strand to SEQ ID NO: 559811
cacuauacacgucucuacu

SEQ ID NO: 559813 - RNA, 19 nt, Artificial Sequence
  Description of Artificial Sequence: Synthetic oligonucleotide
  Sense strand starting at position 1227 of SEQ ID NO: 318401
ccagcaauguggcugauuu

SEQ ID NO: 559814 - RNA, 19 nt, Artificial Sequence
  Description of Artificial Sequence: Synthetic oligonucleotide
  Antisense strand to SEQ ID NO: 559813
aaaucagccacauugcugg

SEQ ID NO: 559815 - RNA, 19 nt, Artificial Sequence
  Description of Artificial Sequence: Synthetic oligonucleotide
  Sense strand starting at position 1333 of SEQ ID NO: 318401
cagacuguugcaggaucau

SEQ ID NO: 559816 - RNA, 19 nt, Artificial Sequence
  Description of Artificial Sequence: Synthetic oligonucleotide
  Antisense strand to SEQ ID NO: 559815
augauccugcaacagucug

SEQ ID NO: 559817 - RNA, 19 nt, Artificial Sequence
  Description of Artificial Sequence: Synthetic oligonucleotide
  Sense strand starting at position 1360 of SEQ ID NO: 318401
ugcauaagcccagaagguu

SEQ ID NO: 559818 - RNA, 19 nt, Artificial Sequence
  Description of Artificial Sequence: Synthetic oligonucleotide
  Antisense strand to SEQ ID NO: 559817
aaccuucugggcuuaugca

SEQ ID NO: 559819 - RNA, 19 nt, Artificial Sequence
  Description of Artificial Sequence: Synthetic oligonucleotide
  Sense strand starting at position 1769 of SEQ ID NO: 318401
gggaauccuccacacguca

SEQ ID NO: 559820 - RNA, 19 nt, Artificial Sequence
  Description of Artificial Sequence: Synthetic oligonucleotide
  Antisense strand to SEQ ID NO: 559819
ugacguguggaggauuccc

SEQ ID NO: 559821 - RNA, 19 nt, Artificial Sequence
  Description of Artificial Sequence: Synthetic oligonucleotide
  Sense strand starting at position 2107 of SEQ ID NO: 318401
gguagauccauaggaacuc

SEQ ID NO: 559822 - RNA, 19 nt, Artificial Sequence
  Description of Artificial Sequence: Synthetic oligonucleotide
  Antisense strand to SEQ ID NO: 559821
gaguuccuauggaucuacc

SEQ ID NO: 559823 - RNA, 19 nt, Artificial Sequence
  Description of Artificial Sequence: Synthetic oligonucleotide
  Sense strand starting at position 2207 of SEQ ID NO: 318401
ggauuugcaucuccaagcu

SEQ ID NO: 559824 - RNA, 19 nt, Artificial Sequence
  Description of Artificial Sequence: Synthetic oligonucleotide
  Antisense strand to SEQ ID NO: 559823
agcuuggagaugcaaaucc

SEQ ID NO: 559825 - RNA, 19 nt, Artificial Sequence
  Description of Artificial Sequence: Synthetic oligonucleotide
  Sense strand starting at position 2371 of SEQ ID NO: 318401
ccagauauugcugggacga

SEQ ID NO: 559826 - RNA, 19 nt, Artificial Sequence
  Description of Artificial Sequence: Synthetic oligonucleotide
  Antisense strand to SEQ ID NO: 559825
ucgucccagcaauaucugg

SEQ ID NO: 559827 - RNA, 19 nt, Artificial Sequence
  Description of Artificial Sequence: Synthetic oligonucleotide
  Sense strand starting at position 2420 of SEQ ID NO: 318401
cuaucuuuauggucacaag

SEQ ID NO: 559828 - RNA, 19 nt, Artificial Sequence
  Description of Artificial Sequence: Synthetic oligonucleotide
  Antisense strand to SEQ ID NO: 559827
cuugugaccauaaagauag

SEQ ID NO: 559829 - RNA, 19 nt, Artificial Sequence
  Description of Artificial Sequence: Synthetic oligonucleotide
  Sense strand starting at position 2471 of SEQ ID NO: 318401
gucccugugcccuaagaaa

SEQ ID NO: 559830 - RNA, 19 nt, Artificial Sequence
  Description of Artificial Sequence: Synthetic oligonucleotide
  Antisense strand to SEQ ID NO: 559829
uuucuuagggcacagggac

SEQ ID NO: 559831 - RNA, 19 nt, Artificial Sequence
  Description of Artificial Sequence: Synthetic oligonucleotide
  Sense strand starting at position 2505 of SEQ ID NO: 318401
uugaguuucuaguuaacau

SEQ ID NO: 559832 - RNA, 19 nt, Artificial Sequence
  Description of Artificial Sequence: Synthetic oligonucleotide
  Antisense strand to SEQ ID NO: 559831
auguuaacuagaaacucaa

SEQ ID NO: 559833 - RNA, 19 nt, Artificial Sequence
  Description of Artificial Sequence: Synthetic oligonucleotide
  Sense strand starting at position 2512 of SEQ ID NO: 318401
ucuaguuaacaucaguuua

SEQ ID NO: 559834 - RNA, 19 nt, Artificial Sequence
  Description of Artificial Sequence: Synthetic oligonucleotide
  Antisense strand to SEQ ID NO: 559833
uaaacugauguuaacuaga

SEQ ID NO: 559835 - RNA, 19 nt, Artificial Sequence
  Description of Artificial Sequence: Synthetic oligonucleotide
  Sense strand starting at position 2523 of SEQ ID NO: 318401
ucaguuuacuaccucagau

SEQ ID NO: 559836 - RNA, 19 nt, Artificial Sequence
  Description of Artificial Sequence: Synthetic oligonucleotide
  Antisense strand to SEQ ID NO: 559835
aucugagguaguaaacuga

SEQ ID NO: 559837 - RNA, 19 nt, Artificial Sequence
  Description of Artificial Sequence: Synthetic oligonucleotide
  Sense strand starting at position 2525 of SEQ ID NO: 318401
aguuuacuaccucagauuc

SEQ ID NO: 559838 - RNA, 19 nt, Artificial Sequence
  Description of Artificial Sequence: Synthetic oligonucleotide
  Antisense strand to SEQ ID NO: 559837
gaaucugagguaguaaacu

SEQ ID NO: 559839 - RNA, 19 nt, Artificial Sequence
  Description of Artificial Sequence: Synthetic oligonucleotide
  Sense strand starting at position 2663 of SEQ ID NO: 318401
agcuucuugguccagaguu

SEQ ID NO: 559840 - RNA, 19 nt, Artificial Sequence
  Description of Artificial Sequence: Synthetic oligonucleotide
  Antisense strand to SEQ ID NO: 559839
aacucuggaccaagaagcu

SEQ ID NO: 559841 - RNA, 19 nt, Artificial Sequence
  Description of Artificial Sequence: Synthetic oligonucleotide
  Sense strand starting at position 2691 of SEQ ID NO: 318401
aacagagaucuaggugugu

SEQ ID NO: 559842 - RNA, 19 nt, Artificial Sequence
  Description of Artificial Sequence: Synthetic oligonucleotide
  Antisense strand to SEQ ID NO: 559841
acacaccuagaucucuguu

SEQ ID NO: 559843 - RNA, 19 nt, Artificial Sequence
  Description of Artificial Sequence: Synthetic oligonucleotide
  Sense strand starting at position 2729 of SEQ ID NO: 318401
agagacaggucucugaacu

SEQ ID NO: 559844 - RNA, 19 nt, Artificial Sequence
  Description of Artificial Sequence: Synthetic oligonucleotide
  Antisense strand to SEQ ID NO: 559843
aguucagagaccugucucu

SEQ ID NO: 559845 - RNA, 19 nt, Artificial Sequence
  Description of Artificial Sequence: Synthetic oligonucleotide
  Sense strand starting at position 2730 of SEQ ID NO: 318401
gagacaggucucugaacug

SEQ ID NO: 559846 - RNA, 19 nt, Artificial Sequence
  Description of Artificial Sequence: Synthetic oligonucleotide
  Antisense strand to SEQ ID NO: 559845
caguucagagaccugucuc

SEQ ID NO: 559847 - RNA, 19 nt, Artificial Sequence
  Description of Artificial Sequence: Synthetic oligonucleotide
  Sense strand starting at position 2771 of SEQ ID NO: 318401
gaggaugcucccugcaaua

SEQ ID NO: 559848 - RNA, 19 nt, Artificial Sequence
  Description of Artificial Sequence: Synthetic oligonucleotide
  Antisense strand to SEQ ID NO: 559847
uauugcagggagcauccuc

SEQ ID NO: 559849 - RNA, 19 nt, Artificial Sequence
  Description of Artificial Sequence: Synthetic oligonucleotide
  Sense strand starting at position 2773 of SEQ ID NO: 318401
ggaugcucccugcaauaua

SEQ ID NO: 559850 - RNA, 19 nt, Artificial Sequence
  Description of Artificial Sequence: Synthetic oligonucleotide
  Antisense strand to SEQ ID NO: 559849
uauauugcagggagcaucc

SEQ ID NO: 559851 - RNA, 19 nt, Artificial Sequence
  Description of Artificial Sequence: Synthetic oligonucleotide
  Sense strand starting at position 2958 of SEQ ID NO: 318401
caauguuuccuaggaggaa

SEQ ID NO: 559852 - RNA, 19 nt, Artificial Sequence
  Description of Artificial Sequence: Synthetic oligonucleotide
  Antisense strand to SEQ ID NO: 559851
uuccuccuaggaaacauug

SEQ ID NO: 559853 - RNA, 19 nt, Artificial Sequence
  Description of Artificial Sequence: Synthetic oligonucleotide
  Sense strand starting at position 3065 of SEQ ID NO: 318401
acuggucuucuugaaguca

SEQ ID NO: 559854 - RNA, 19 nt, Artificial Sequence
  Description of Artificial Sequence: Synthetic oligonucleotide
  Antisense strand to SEQ ID NO: 559853
ugacuucaagaagaccagu

SEQ ID NO: 559855 - RNA, 19 nt, Artificial Sequence
  Description of Artificial Sequence: Synthetic oligonucleotide
  Sense strand starting at position 3073 of SEQ ID NO: 318401
ucuugaagucaucagugau

SEQ ID NO: 559856 - RNA, 19 nt, Artificial Sequence
  Description of Artificial Sequence: Synthetic oligonucleotide
  Antisense strand to SEQ ID NO: 559855
aucacugaugacuucaaga

SEQ ID NO: 559857 - RNA, 19 nt, Artificial Sequence
  Description of Artificial Sequence: Synthetic oligonucleotide
  Sense strand starting at position 3506 of SEQ ID NO: 318401
gcaccuugagacuaaauuc

SEQ ID NO: 559858 - RNA, 19 nt, Artificial Sequence
  Description of Artificial Sequence: Synthetic oligonucleotide
  Antisense strand to SEQ ID NO: 559857
gaauuuagucucaaggugc

SEQ ID NO: 559859 - RNA, 19 nt, Artificial Sequence
  Description of Artificial Sequence: Synthetic oligonucleotide
  Sense strand starting at position 3549 of SEQ ID NO: 318401
cagauauggccuugaagca

SEQ ID NO: 559860 - RNA, 19 nt, Artificial Sequence
  Description of Artificial Sequence: Synthetic oligonucleotide
  Antisense strand to SEQ ID NO: 559859
ugcuucaaggccauaucug

SEQ ID NO: 559861 - RNA, 19 nt, Artificial Sequence
  Description of Artificial Sequence: Synthetic oligonucleotide
  Sense strand starting at position 3550 of SEQ ID NO: 318401
agauauggccuugaagcaa

SEQ ID NO: 559862 - RNA, 19 nt, Artificial Sequence
  Description of Artificial Sequence: Synthetic oligonucleotide
  Antisense strand to SEQ ID NO: 559861
uugcuucaaggccauaucu

SEQ ID NO: 559863 - RNA, 19 nt, Artificial Sequence
  Description of Artificial Sequence: Synthetic oligonucleotide
  Sense strand starting at position 3558 of SEQ ID NO: 318401
ccuugaagcaaugguaaag

SEQ ID NO: 559864 - RNA, 19 nt, Artificial Sequence
  Description of Artificial Sequence: Synthetic oligonucleotide
  Antisense strand to SEQ ID NO: 559863
cuuuaccauugcuucaagg

SEQ ID NO: 559865 - RNA, 19 nt, Artificial Sequence
  Description of Artificial Sequence: Synthetic oligonucleotide
  Sense strand starting at position 3782 of SEQ ID NO: 318401
aagugaaucucuguagcau

SEQ ID NO: 559866 - RNA, 19 nt, Artificial Sequence
  Description of Artificial Sequence: Synthetic oligonucleotide
  Antisense strand to SEQ ID NO: 559865
augcuacagagauucacuu

SEQ ID NO: 559867 - RNA, 19 nt, Artificial Sequence
  Description of Artificial Sequence: Synthetic oligonucleotide
  Sense strand starting at position 3783 of SEQ ID NO: 318401
agugaaucucuguagcauu

SEQ ID NO: 559868 - RNA, 19 nt, Artificial Sequence
  Description of Artificial Sequence: Synthetic oligonucleotide
  Antisense strand to SEQ ID NO: 559867
aaugcuacagagauucacu

SEQ ID NO: 559869 - RNA, 19 nt, Artificial Sequence
  Description of Artificial Sequence: Synthetic oligonucleotide
  Sense strand starting at position 3892 of SEQ ID NO: 318401
agaauaacuuugcugguau

SEQ ID NO: 559870 - RNA, 19 nt, Artificial Sequence
  Description of Artificial Sequence: Synthetic oligonucleotide
  Antisense strand to SEQ ID NO: 559869
auaccagcaaaguuauucu

SEQ ID NO: 559871 - RNA, 19 nt, Artificial Sequence
  Description of Artificial Sequence: Synthetic oligonucleotide
  Sense strand starting at position 3909 of SEQ ID NO: 318401
aucuauucucuugagguau

SEQ ID NO: 559872 - RNA, 19 nt, Artificial Sequence
  Description of Artificial Sequence: Synthetic oligonucleotide
  Antisense strand to SEQ ID NO: 559871
auaccucaagagaauagau

SEQ ID NO: 559873 - RNA, 19 nt, Artificial Sequence
  Description of Artificial Sequence: Synthetic oligonucleotide
  Sense strand starting at position 3978 of SEQ ID NO: 318401
cggaaugaaagcuggauca

SEQ ID NO: 559874 - RNA, 19 nt, Artificial Sequence
  Description of Artificial Sequence: Synthetic oligonucleotide
  Antisense strand to SEQ ID NO: 559873
ugauccagcuuucauuccg

SEQ ID NO: 559875 - RNA, 19 nt, Artificial Sequence
  Description of Artificial Sequence: Synthetic oligonucleotide
  Sense strand starting at position 467 of SEQ ID NO: 318402
aucuccugucacugagaaa

SEQ ID NO: 559876 - RNA, 19 nt, Artificial Sequence
  Description of Artificial Sequence: Synthetic oligonucleotide
  Antisense strand to SEQ ID NO: 559875
uuucucagugacaggagau

SEQ ID NO: 559877 - RNA, 19 nt, Artificial Sequence
  Description of Artificial Sequence: Synthetic oligonucleotide
  Sense strand starting at position 572 of SEQ ID NO: 318402
ucaacaugaguaggacuau

SEQ ID NO: 559878 - RNA, 19 nt, Artificial Sequence
  Description of Artificial Sequence: Synthetic oligonucleotide
  Antisense strand to SEQ ID NO: 559877
auaguccuacucauguuga

SEQ ID NO: 559879 - RNA, 19 nt, Artificial Sequence
  Description of Artificial Sequence: Synthetic oligonucleotide
  Sense strand starting at position 805 of SEQ ID NO: 318402
gcgaaaucugcugcagcca

SEQ ID NO: 559880 - RNA, 19 nt, Artificial Sequence
  Description of Artificial Sequence: Synthetic oligonucleotide
  Antisense strand to SEQ ID NO: 559879
uggcugcagcagauuucgc

SEQ ID NO: 559881 - RNA, 19 nt, Artificial Sequence
  Description of Artificial Sequence: Synthetic oligonucleotide
  Sense strand starting at position 806 of SEQ ID NO: 318402
cgaaaucugcugcagccaa

SEQ ID NO: 559882 - RNA, 19 nt, Artificial Sequence
  Description of Artificial Sequence: Synthetic oligonucleotide
  Antisense strand to SEQ ID NO: 559881
uuggcugcagcagauuucg

SEQ ID NO: 559883 - RNA, 19 nt, Artificial Sequence
  Description of Artificial Sequence: Synthetic oligonucleotide
  Sense strand starting at position 830 of SEQ ID NO: 318402
gucuacugcuccuugagac

SEQ ID NO: 559884 - RNA, 19 nt, Artificial Sequence
  Description of Artificial Sequence: Synthetic oligonucleotide
  Antisense strand to SEQ ID NO: 559883
gucucaaggagcaguagac

SEQ ID NO: 559885 - RNA, 19 nt, Artificial Sequence
  Description of Artificial Sequence: Synthetic oligonucleotide
  Sense strand starting at position 831 of SEQ ID NO: 318402
ucuacugcuccuugagaca

SEQ ID NO: 559886 - RNA, 19 nt, Artificial Sequence
  Description of Artificial Sequence: Synthetic oligonucleotide
  Antisense strand to SEQ ID NO: 559885
ugucucaaggagcaguaga

SEQ ID NO: 559887 - RNA, 19 nt, Artificial Sequence
  Description of Artificial Sequence: Synthetic oligonucleotide
  Sense strand starting at position 943 of SEQ ID NO: 318402
ucuuuagaccuauacgcaa

SEQ ID NO: 559888 - RNA, 19 nt, Artificial Sequence
  Description of Artificial Sequence: Synthetic oligonucleotide
  Antisense strand to SEQ ID NO: 559887
uugcguauaggucuaaaga

SEQ ID NO: 559889 - RNA, 19 nt, Artificial Sequence
  Description of Artificial Sequence: Synthetic oligonucleotide
  Sense strand starting at position 1058 of SEQ ID NO: 318402
uuaaacugcuucucacgau

SEQ ID NO: 559890 - RNA, 19 nt, Artificial Sequence
  Description of Artificial Sequence: Synthetic oligonucleotide
  Antisense strand to SEQ ID NO: 559889
aucgugagaagcaguuuaa

SEQ ID NO: 559891 - RNA, 19 nt, Artificial Sequence
  Description of Artificial Sequence: Synthetic oligonucleotide
  Sense strand starting at position 1062 of SEQ ID NO: 318402
acugcuucucacgauaaau

SEQ ID NO: 559892 - RNA, 19 nt, Artificial Sequence
  Description of Artificial Sequence: Synthetic oligonucleotide
  Antisense strand to SEQ ID NO: 559891
auuuaucgugagaagcagu

SEQ ID NO: 559893 - RNA, 19 nt, Artificial Sequence
  Description of Artificial Sequence: Synthetic oligonucleotide
  Sense strand starting at position 1064 of SEQ ID NO: 318402
ugcuucucacgauaaauca

SEQ ID NO: 559894 - RNA, 19 nt, Artificial Sequence
  Description of Artificial Sequence: Synthetic oligonucleotide
  Antisense strand to SEQ ID NO: 559893
ugauuuaucgugagaagca

SEQ ID NO: 559895 - RNA, 19 nt, Artificial Sequence
  Description of Artificial Sequence: Synthetic oligonucleotide
  Sense strand starting at position 1899 of SEQ ID NO: 318402
uccagacucucgcuuuaag

SEQ ID NO: 559896 - RNA, 19 nt, Artificial Sequence
  Description of Artificial Sequence: Synthetic oligonucleotide
  Antisense strand to SEQ ID NO: 559895
cuuaaagcgagagucugga

SEQ ID NO: 559897 - RNA, 19 nt, Artificial Sequence
  Description of Artificial Sequence: Synthetic oligonucleotide
  Sense strand starting at position 1902 of SEQ ID NO: 318402
agacucucgcuuuaaggau

SEQ ID NO: 559898 - RNA, 19 nt, Artificial Sequence
  Description of Artificial Sequence: Synthetic oligonucleotide
  Antisense strand to SEQ ID NO: 559897
auccuuaaagcgagagucu

SEQ ID NO: 559899 - RNA, 19 nt, Artificial Sequence
  Description of Artificial Sequence: Synthetic oligonucleotide
  Sense strand starting at position 2329 of SEQ ID NO: 318402
gucagauuguuaccacuga

SEQ ID NO: 559900 - RNA, 19 nt, Artificial Sequence
  Description of Artificial Sequence: Synthetic oligonucleotide
  Antisense strand to SEQ ID NO: 559899
ucagugguaacaaucugac

SEQ ID NO: 559901 - RNA, 19 nt, Artificial Sequence
  Description of Artificial Sequence: Synthetic oligonucleotide
  Sense strand starting at position 2333 of SEQ ID NO: 318402
gauuguuaccacugaguuu

SEQ ID NO: 559902 - RNA, 19 nt, Artificial Sequence
  Description of Artificial Sequence: Synthetic oligonucleotide
  Antisense strand to SEQ ID NO: 559901
aaacucagugguaacaauc

SEQ ID NO: 559903 - RNA, 19 nt, Artificial Sequence
  Description of Artificial Sequence: Synthetic oligonucleotide
  Sense strand starting at position 2466 of SEQ ID NO: 318402
gcccaaauguuagcaagaa

SEQ ID NO: 559904 - RNA, 19 nt, Artificial Sequence
  Description of Artificial Sequence: Synthetic oligonucleotide
  Antisense strand to SEQ ID NO: 559903
uucuugcuaacauuugggc

SEQ ID NO: 559905 - RNA, 19 nt, Artificial Sequence
  Description of Artificial Sequence: Synthetic oligonucleotide
  Sense strand starting at position 2508 of SEQ ID NO: 318402
auaccugaucaccguugaa

SEQ ID NO: 559906 - RNA, 19 nt, Artificial Sequence
  Description of Artificial Sequence: Synthetic oligonucleotide
  Antisense strand to SEQ ID NO: 559905
uucaacggugaucagguau

SEQ ID NO: 559907 - RNA, 19 nt, Artificial Sequence
  Description of Artificial Sequence: Synthetic oligonucleotide
  Sense strand starting at position 2511 of SEQ ID NO: 318402
ccugaucaccguugaauuc

SEQ ID NO: 559908 - RNA, 19 nt, Artificial Sequence
  Description of Artificial Sequence: Synthetic oligonucleotide
  Antisense strand to SEQ ID NO: 559907
gaauucaacggugaucagg

SEQ ID NO: 559909 - RNA, 19 nt, Artificial Sequence
  Description of Artificial Sequence: Synthetic oligonucleotide
  Sense strand starting at position 2518 of SEQ ID NO: 318402
accguugaauucuugauau

SEQ ID NO: 559910 - RNA, 19 nt, Artificial Sequence
  Description of Artificial Sequence: Synthetic oligonucleotide
  Antisense strand to SEQ ID NO: 559909
auaucaagaauucaacggu

SEQ ID NO: 559911 - RNA, 19 nt, Artificial Sequence
  Description of Artificial Sequence: Synthetic oligonucleotide
  Sense strand starting at position 2529 of SEQ ID NO: 318402
cuugauauuuaauaucgga

SEQ ID NO: 559912 - RNA, 19 nt, Artificial Sequence
  Description of Artificial Sequence: Synthetic oligonucleotide
  Antisense strand to SEQ ID NO: 559911
uccgauauuaaauaucaag

SEQ ID NO: 559913 - RNA, 19 nt, Artificial Sequence
  Description of Artificial Sequence: Synthetic oligonucleotide
  Sense strand starting at position 2544 of SEQ ID NO: 318402
cggauuagauuccuuauau

SEQ ID NO: 559914 - RNA, 19 nt, Artificial Sequence
  Description of Artificial Sequence: Synthetic oligonucleotide
  Antisense strand to SEQ ID NO: 559913
auauaaggaaucuaauccg

SEQ ID NO: 559915 - RNA, 19 nt, Artificial Sequence
  Description of Artificial Sequence: Synthetic oligonucleotide
  Sense strand starting at position 2545 of SEQ ID NO: 318402
ggauuagauuccuuauauu

SEQ ID NO: 559916 - RNA, 19 nt, Artificial Sequence
  Description of Artificial Sequence: Synthetic oligonucleotide
  Antisense strand to SEQ ID NO: 559915
aauauaaggaaucuaaucc

SEQ ID NO: 559917 - RNA, 19 nt, Artificial Sequence
  Description of Artificial Sequence: Synthetic oligonucleotide
  Sense strand starting at position 2559 of SEQ ID NO: 318402
auauuacaccuuuguugua

SEQ ID NO: 559918 - RNA, 19 nt, Artificial Sequence
  Description of Artificial Sequence: Synthetic oligonucleotide
  Antisense strand to SEQ ID NO: 559917
uacaacaaagguguaauau

SEQ ID NO: 559919 - RNA, 19 nt, Artificial Sequence
  Description of Artificial Sequence: Synthetic oligonucleotide
  Sense strand starting at position 2751 of SEQ ID NO: 318402
agucaugacccuuauugua

SEQ ID NO: 559920 - RNA, 19 nt, Artificial Sequence
  Description of Artificial Sequence: Synthetic oligonucleotide
  Antisense strand to SEQ ID NO: 559919
uacaauaagggucaugacu

SEQ ID NO: 559921 - RNA, 19 nt, Artificial Sequence
  Description of Artificial Sequence: Synthetic oligonucleotide
  Sense strand starting at position 2877 of SEQ ID NO: 318402
uuaguaaucucaguuuccu

SEQ ID NO: 559922 - RNA, 19 nt, Artificial Sequence
  Description of Artificial Sequence: Synthetic oligonucleotide
  Antisense strand to SEQ ID NO: 559921
aggaaacugagauuacuaa

SEQ ID NO: 559923 - RNA, 19 nt, Artificial Sequence
  Description of Artificial Sequence: Synthetic oligonucleotide
  Sense strand starting at position 2976 of SEQ ID NO: 318402
aucugaggcccuuguaacu

SEQ ID NO: 559924 - RNA, 19 nt, Artificial Sequence
  Description of Artificial Sequence: Synthetic oligonucleotide
  Antisense strand to SEQ ID NO: 559923
aguuacaagggccucagau

SEQ ID NO: 559925 - RNA, 19 nt, Artificial Sequence
  Description of Artificial Sequence: Synthetic oligonucleotide
  Sense strand starting at position 2986 of SEQ ID NO: 318402
cuuguaacucuggaaguaa

SEQ ID NO: 559926 - RNA, 19 nt, Artificial Sequence
  Description of Artificial Sequence: Synthetic oligonucleotide
  Antisense strand to SEQ ID NO: 559925
uuacuuccagaguuacaag

SEQ ID NO: 559927 - RNA, 19 nt, Artificial Sequence
  Description of Artificial Sequence: Synthetic oligonucleotide
  Sense strand starting at position 3041 of SEQ ID NO: 318402
agguguaaauugcuuaaag

SEQ ID NO: 559928 - RNA, 19 nt, Artificial Sequence
  Description of Artificial Sequence: Synthetic oligonucleotide
  Antisense strand to SEQ ID NO: 559927
cuuuaagcaauuuacaccu

SEQ ID NO: 559929 - RNA, 19 nt, Artificial Sequence
  Description of Artificial Sequence: Synthetic oligonucleotide
  Sense strand starting at position 3043 of SEQ ID NO: 318402
guguaaauugcuuaaagcu

SEQ ID NO: 559930 - RNA, 19 nt, Artificial Sequence
  Description of Artificial Sequence: Synthetic oligonucleotide
  Antisense strand to SEQ ID NO: 559929
agcuuuaagcaauuuacac

SEQ ID NO: 559931 - RNA, 19 nt, Artificial Sequence
  Description of Artificial Sequence: Synthetic oligonucleotide
  Sense strand starting at position 3124 of SEQ ID NO: 318402
auaugauaguggcuuuauc

SEQ ID NO: 559932 - RNA, 19 nt, Artificial Sequence
  Description of Artificial Sequence: Synthetic oligonucleotide
  Antisense strand to SEQ ID NO: 559931
gauaaagccacuaucauau

SEQ ID NO: 559933 - RNA, 19 nt, Artificial Sequence
  Description of Artificial Sequence: Synthetic oligonucleotide
  Sense strand starting at position 3131 of SEQ ID NO: 318402
aguggcuuuaucuagaguu

SEQ ID NO: 559934 - RNA, 19 nt, Artificial Sequence
  Description of Artificial Sequence: Synthetic oligonucleotide
  Antisense strand to SEQ ID NO: 559933
aacucuagauaaagccacu

SEQ ID NO: 559935 - RNA, 19 nt, Artificial Sequence
  Description of Artificial Sequence: Synthetic oligonucleotide
  Sense strand starting at position 3133 of SEQ ID NO: 318402
uggcuuuaucuagaguuaa

SEQ ID NO: 559936 - RNA, 19 nt, Artificial Sequence
  Description of Artificial Sequence: Synthetic oligonucleotide
  Antisense strand to SEQ ID NO: 559935
uuaacucuagauaaagcca

SEQ ID NO: 559937 - RNA, 19 nt, Artificial Sequence
  Description of Artificial Sequence: Synthetic oligonucleotide
  Sense strand starting at position 3146 of SEQ ID NO: 318402
aguuaaaccgucuacagau

SEQ ID NO: 559938 - RNA, 19 nt, Artificial Sequence
  Description of Artificial Sequence: Synthetic oligonucleotide
  Antisense strand to SEQ ID NO: 559937
aucuguagacgguuuaacu

SEQ ID NO: 559939 - RNA, 19 nt, Artificial Sequence
  Description of Artificial Sequence: Synthetic oligonucleotide
  Sense strand starting at position 3161 of SEQ ID NO: 318402
agauguuaaugauugguau

SEQ ID NO: 559940 - RNA, 19 nt, Artificial Sequence
  Description of Artificial Sequence: Synthetic oligonucleotide
  Antisense strand to SEQ ID NO: 559939
auaccaaucauuaacaucu

SEQ ID NO: 559941 - RNA, 19 nt, Artificial Sequence
  Description of Artificial Sequence: Synthetic oligonucleotide
  Sense strand starting at position 3162 of SEQ ID NO: 318402
gauguuaaugauugguaua

SEQ ID NO: 559942 - RNA, 19 nt, Artificial Sequence
  Description of Artificial Sequence: Synthetic oligonucleotide
  Antisense strand to SEQ ID NO: 559941
uauaccaaucauuaacauc

SEQ ID NO: 559943 - RNA, 19 nt, Artificial Sequence
  Description of Artificial Sequence: Synthetic oligonucleotide
  Sense strand starting at position 3234 of SEQ ID NO: 318402
cgacuuauccugcaaagca

SEQ ID NO: 559944 - RNA, 19 nt, Artificial Sequence
  Description of Artificial Sequence: Synthetic oligonucleotide
  Antisense strand to SEQ ID NO: 559943
ugcuuugcaggauaagucg

SEQ ID NO: 559945 - RNA, 19 nt, Artificial Sequence
  Description of Artificial Sequence: Synthetic oligonucleotide
  Sense strand starting at position 3417 of SEQ ID NO: 318402
auuuacaccugagaaagau

SEQ ID NO: 559946 - RNA, 19 nt, Artificial Sequence
  Description of Artificial Sequence: Synthetic oligonucleotide
  Antisense strand to SEQ ID NO: 559945
aucuuucucagguguaaau

SEQ ID NO: 559947 - RNA, 19 nt, Artificial Sequence
  Description of Artificial Sequence: Synthetic oligonucleotide
  Sense strand starting at position 3460 of SEQ ID NO: 318402
ucuuuacuuccagaguuac

SEQ ID NO: 559948 - RNA, 19 nt, Artificial Sequence
  Description of Artificial Sequence: Synthetic oligonucleotide
  Antisense strand to SEQ ID NO: 559947
guaacucuggaaguaaaga

SEQ ID NO: 559949 - RNA, 19 nt, Artificial Sequence
  Description of Artificial Sequence: Synthetic oligonucleotide
  Sense strand starting at position 3485 of SEQ ID NO: 318402
cucagauugcaaggucaca

SEQ ID NO: 559950 - RNA, 19 nt, Artificial Sequence
  Description of Artificial Sequence: Synthetic oligonucleotide
  Antisense strand to SEQ ID NO: 559949
ugugaccuugcaaucugag

SEQ ID NO: 559951 - RNA, 19 nt, Artificial Sequence
  Description of Artificial Sequence: Synthetic oligonucleotide
  Sense strand starting at position 3517 of SEQ ID NO: 318402
acuugugaugucugaguau

SEQ ID NO: 559952 - RNA, 19 nt, Artificial Sequence
  Description of Artificial Sequence: Synthetic oligonucleotide
  Antisense strand to SEQ ID NO: 559951
auacucagacaucacaagu

SEQ ID NO: 559953 - RNA, 19 nt, Artificial Sequence
  Description of Artificial Sequence: Synthetic oligonucleotide
  Sense strand starting at position 3520 of SEQ ID NO: 318402
ugugaugucugaguauuag

SEQ ID NO: 559954 - RNA, 19 nt, Artificial Sequence
  Description of Artificial Sequence: Synthetic oligonucleotide
  Antisense strand to SEQ ID NO: 559953
cuaauacucagacaucaca

SEQ ID NO: 559955 - RNA, 19 nt, Artificial Sequence
  Description of Artificial Sequence: Synthetic oligonucleotide
  Sense strand starting at position 126 of SEQ ID NO: 318403
cgcaguuucgucagaggua

SEQ ID NO: 559956 - RNA, 19 nt, Artificial Sequence
  Description of Artificial Sequence: Synthetic oligonucleotide
  Antisense strand to SEQ ID NO: 559955
uaccucugacgaaacugcg

SEQ ID NO: 559957 - RNA, 19 nt, Artificial Sequence
  Description of Artificial Sequence: Synthetic oligonucleotide
  Sense strand starting at position 127 of SEQ ID NO: 318403
gcaguuucgucagagguaa

SEQ ID NO: 559958 - RNA, 19 nt, Artificial Sequence
  Description of Artificial Sequence: Synthetic oligonucleotide
  Antisense strand to SEQ ID NO: 559957
uuaccucugacgaaacugc

SEQ ID NO: 559959 - RNA, 19 nt, Artificial Sequence
  Description of Artificial Sequence: Synthetic oligonucleotide
  Sense strand starting at position 129 of SEQ ID NO: 318403
aguuucgucagagguaaag

SEQ ID NO: 559960 - RNA, 19 nt, Artificial Sequence
  Description of Artificial Sequence: Synthetic oligonucleotide
  Antisense strand to SEQ ID NO: 559959
cuuuaccucugacgaaacu

SEQ ID NO: 559961 - RNA, 19 nt, Artificial Sequence
  Description of Artificial Sequence: Synthetic oligonucleotide
  Sense strand starting at position 131 of SEQ ID NO: 318403
uuucgucagagguaaaggu

SEQ ID NO: 559962 - RNA, 19 nt, Artificial Sequence
  Description of Artificial Sequence: Synthetic oligonucleotide
  Antisense strand to SEQ ID NO: 559961
accuuuaccucugacgaaa

SEQ ID NO: 559963 - RNA, 19 nt, Artificial Sequence
  Description of Artificial Sequence: Synthetic oligonucleotide
  Sense strand starting at position 576 of SEQ ID NO: 318403
ggcagauuauaacaagaag

SEQ ID NO: 559964 - RNA, 19 nt, Artificial Sequence
  Description of Artificial Sequence: Synthetic oligonucleotide
  Antisense strand to SEQ ID NO: 559963
cuucuuguuauaaucugcc

SEQ ID NO: 559965 - RNA, 19 nt, Artificial Sequence
  Description of Artificial Sequence: Synthetic oligonucleotide
  Sense strand starting at position 1425 of SEQ ID NO: 318403
gccacaaguccacgugaaa

SEQ ID NO: 559966 - RNA, 19 nt, Artificial Sequence
  Description of Artificial Sequence: Synthetic oligonucleotide
  Antisense strand to SEQ ID NO: 559965
uuucacguggacuuguggc

SEQ ID NO: 559967 - RNA, 19 nt, Artificial Sequence
  Description of Artificial Sequence: Synthetic oligonucleotide
  Sense strand starting at position 1428 of SEQ ID NO: 318403
acaaguccacgugaaagua

SEQ ID NO: 559968 - RNA, 19 nt, Artificial Sequence
  Description of Artificial Sequence: Synthetic oligonucleotide
  Antisense strand to SEQ ID NO: 559967
uacuuucacguggacuugu

SEQ ID NO: 559969 - RNA, 19 nt, Artificial Sequence
  Description of Artificial Sequence: Synthetic oligonucleotide
  Sense strand starting at position 2256 of SEQ ID NO: 318403
gagcgaaucacguugcguu

SEQ ID NO: 559970 - RNA, 19 nt, Artificial Sequence
  Description of Artificial Sequence: Synthetic oligonucleotide
  Antisense strand to SEQ ID NO: 559969
aacgcaacgugauucgcuc

SEQ ID NO: 559971 - RNA, 19 nt, Artificial Sequence
  Description of Artificial Sequence: Synthetic oligonucleotide
  Sense strand starting at position 2257 of SEQ ID NO: 318403
agcgaaucacguugcguua

SEQ ID NO: 559972 - RNA, 19 nt, Artificial Sequence
  Description of Artificial Sequence: Synthetic oligonucleotide
  Antisense strand to SEQ ID NO: 559971
uaacgcaacgugauucgcu

SEQ ID NO: 559973 - RNA, 19 nt, Artificial Sequence
  Description of Artificial Sequence: Synthetic oligonucleotide
  Sense strand starting at position 2792 of SEQ ID NO: 318403
agggaaagcuuaggucuua

SEQ ID NO: 559974 - RNA, 19 nt, Artificial Sequence
  Description of Artificial Sequence: Synthetic oligonucleotide
  Antisense strand to SEQ ID NO: 559973
uaagaccuaagcuuucccu

SEQ ID NO: 559975 - RNA, 19 nt, Artificial Sequence
  Description of Artificial Sequence: Synthetic oligonucleotide
  Sense strand starting at position 2938 of SEQ ID NO: 318403
aagggugcguuugccuaua

SEQ ID NO: 559976 - RNA, 19 nt, Artificial Sequence
  Description of Artificial Sequence: Synthetic oligonucleotide
  Antisense strand to SEQ ID NO: 559975
uauaggcaaacgcacccuu

SEQ ID NO: 559977 - RNA, 19 nt, Artificial Sequence
  Description of Artificial Sequence: Synthetic oligonucleotide
  Sense strand starting at position 2940 of SEQ ID NO: 318403
gggugcguuugccuauauu

SEQ ID NO: 559978 - RNA, 19 nt, Artificial Sequence
  Description of Artificial Sequence: Synthetic oligonucleotide
  Antisense strand to SEQ ID NO: 559977
aauauaggcaaacgcaccc

SEQ ID NO: 559979 - RNA, 19 nt, Artificial Sequence
  Description of Artificial Sequence: Synthetic oligonucleotide
  Sense strand starting at position 2948 of SEQ ID NO: 318403
uugccuauauucugugcua

SEQ ID NO: 559980 - RNA, 19 nt, Artificial Sequence
  Description of Artificial Sequence: Synthetic oligonucleotide
  Antisense strand to SEQ ID NO: 559979
uagcacagaauauaggcaa

SEQ ID NO: 559981 - RNA, 19 nt, Artificial Sequence
  Description of Artificial Sequence: Synthetic oligonucleotide
  Sense strand starting at position 2949 of SEQ ID NO: 318403
ugccuauauucugugcuaa

SEQ ID NO: 559982 - RNA, 19 nt, Artificial Sequence
  Description of Artificial Sequence: Synthetic oligonucleotide
  Antisense strand to SEQ ID NO: 559981
uuagcacagaauauaggca

SEQ ID NO: 559983 - RNA, 19 nt, Artificial Sequence
  Description of Artificial Sequence: Synthetic oligonucleotide
  Sense strand starting at position 2950 of SEQ ID NO: 318403
gccuauauucugugcuaaa

SEQ ID NO: 559984 - RNA, 19 nt, Artificial Sequence
  Description of Artificial Sequence: Synthetic oligonucleotide
  Antisense strand to SEQ ID NO: 559983
uuuagcacagaauauaggc

SEQ ID NO: 559985 - RNA, 19 nt, Artificial Sequence
  Description of Artificial Sequence: Synthetic oligonucleotide
  Sense strand starting at position 2960 of SEQ ID NO: 318403
ugugcuaaaccugaucaua

SEQ ID NO: 559986 - RNA, 19 nt, Artificial Sequence
  Description of Artificial Sequence: Synthetic oligonucleotide
  Antisense strand to SEQ ID NO: 559985
uaugaucagguuuagcaca

SEQ ID NO: 559987 - RNA, 19 nt, Artificial Sequence
  Description of Artificial Sequence: Synthetic oligonucleotide
  Sense strand starting at position 3132 of SEQ ID NO: 318403
gggcaucuuucccuauuac

SEQ ID NO: 559988 - RNA, 19 nt, Artificial Sequence
  Description of Artificial Sequence: Synthetic oligonucleotide
  Antisense strand to SEQ ID NO: 559987
guaauagggaaagaugccc

SEQ ID NO: 559989 - RNA, 19 nt, Artificial Sequence
  Description of Artificial Sequence: Synthetic oligonucleotide
  Sense strand starting at position 3258 of SEQ ID NO: 318403
uuacauuuguugcaaugaa

SEQ ID NO: 559990 - RNA, 19 nt, Artificial Sequence
  Description of Artificial Sequence: Synthetic oligonucleotide
  Antisense strand to SEQ ID NO: 559989
uucauugcaacaaauguaa

SEQ ID NO: 559991 - RNA, 19 nt, Artificial Sequence
  Description of Artificial Sequence: Synthetic oligonucleotide
  Sense strand starting at position 3360 of SEQ ID NO: 318403
ccguuucuggcacauagua

SEQ ID NO: 559992 - RNA, 19 nt, Artificial Sequence
  Description of Artificial Sequence: Synthetic oligonucleotide
  Antisense strand to SEQ ID NO: 559991
uacuaugugccagaaacgg

SEQ ID NO: 559993 - RNA, 19 nt, Artificial Sequence
  Description of Artificial Sequence: Synthetic oligonucleotide
  Sense strand starting at position 3376 of SEQ ID NO: 318403
guaggcacuuaauagauga

SEQ ID NO: 559994 - RNA, 19 nt, Artificial Sequence
  Description of Artificial Sequence: Synthetic oligonucleotide
  Antisense strand to SEQ ID NO: 559993
ucaucuauuaagugccuac

SEQ ID NO: 559995 - RNA, 19 nt, Artificial Sequence
  Description of Artificial Sequence: Synthetic oligonucleotide
  Sense strand starting at position 3383 of SEQ ID NO: 318403
cuuaauagaugauguguua

SEQ ID NO: 559996 - RNA, 19 nt, Artificial Sequence
  Description of Artificial Sequence: Synthetic oligonucleotide
  Antisense strand to SEQ ID NO: 559995
uaacacaucaucuauuaag

SEQ ID NO: 559997 - RNA, 19 nt, Artificial Sequence
  Description of Artificial Sequence: Synthetic oligonucleotide
  Sense strand starting at position 3386 of SEQ ID NO: 318403
aauagaugauguguuaacu

SEQ ID NO: 559998 - RNA, 19 nt, Artificial Sequence
  Description of Artificial Sequence: Synthetic oligonucleotide
  Antisense strand to SEQ ID NO: 559997
aguuaacacaucaucuauu

SEQ ID NO: 559999 - RNA, 19 nt, Artificial Sequence
  Description of Artificial Sequence: Synthetic oligonucleotide
  Sense strand starting at position 3477 of SEQ ID NO: 318403
caauguguacauggaguga

SEQ ID NO: 560000 - RNA, 19 nt, Artificial Sequence
  Description of Artificial Sequence: Synthetic oligonucleotide
  Antisense strand to SEQ ID NO: 559999
ucacuccauguacacauug

SEQ ID NO: 560001 - RNA, 19 nt, Artificial Sequence
  Description of Artificial Sequence: Synthetic oligonucleotide
  Sense strand starting at position 3556 of SEQ ID NO: 318403
ugcccuguuguuuaccaaa

SEQ ID NO: 560002 - RNA, 19 nt, Artificial Sequence
  Description of Artificial Sequence: Synthetic oligonucleotide
  Antisense strand to SEQ ID NO: 560001
uuugguaaacaacagggca

SEQ ID NO: 560003 - RNA, 19 nt, Artificial Sequence
  Description of Artificial Sequence: Synthetic oligonucleotide
  Sense strand starting at position 3558 of SEQ ID NO: 318403
cccuguuguuuaccaaaca

SEQ ID NO: 560004 - RNA, 19 nt, Artificial Sequence
  Description of Artificial Sequence: Synthetic oligonucleotide
  Antisense strand to SEQ ID NO: 560003
uguuugguaaacaacaggg

SEQ ID NO: 560005 - RNA, 19 nt, Artificial Sequence
  Description of Artificial Sequence: Synthetic oligonucleotide
  Sense strand starting at position 3900 of SEQ ID NO: 318403
gccucagagcccuagacua

SEQ ID NO: 560006 - RNA, 19 nt, Artificial Sequence
  Description of Artificial Sequence: Synthetic oligonucleotide
  Antisense strand to SEQ ID NO: 560005
uagucuagggcucugaggc

SEQ ID NO: 560007 - RNA, 19 nt, Artificial Sequence
  Description of Artificial Sequence: Synthetic oligonucleotide
  Sense strand starting at position 3907 of SEQ ID NO: 318403
agcccuagacuaggaguua

SEQ ID NO: 560008 - RNA, 19 nt, Artificial Sequence
  Description of Artificial Sequence: Synthetic oligonucleotide
  Antisense strand to SEQ ID NO: 560007
uaacuccuagucuagggcu

SEQ ID NO: 560009 - RNA, 19 nt, Artificial Sequence
  Description of Artificial Sequence: Synthetic oligonucleotide
  Sense strand starting at position 3965 of SEQ ID NO: 318403
uggaacaucuuguuccagu

SEQ ID NO: 560010 - RNA, 19 nt, Artificial Sequence
  Description of Artificial Sequence: Synthetic oligonucleotide
  Antisense strand to SEQ ID NO: 560009
acuggaacaagauguucca

SEQ ID NO: 560011 - RNA, 19 nt, Artificial Sequence
  Description of Artificial Sequence: Synthetic oligonucleotide
  Sense strand starting at position 3966 of SEQ ID NO: 318403
ggaacaucuuguuccagua

SEQ ID NO: 560012 - RNA, 19 nt, Artificial Sequence
  Description of Artificial Sequence: Synthetic oligonucleotide
  Antisense strand to SEQ ID NO: 560011
uacuggaacaagauguucc

SEQ ID NO: 560013 - RNA, 19 nt, Artificial Sequence
  Description of Artificial Sequence: Synthetic oligonucleotide
  Sense strand starting at position 66 of SEQ ID NO: 318404
cccaguucucaugagaguc

SEQ ID NO: 560014 - RNA, 19 nt, Artificial Sequence
  Description of Artificial Sequence: Synthetic oligonucleotide
  Antisense strand to SEQ ID NO: 560013
gacucucaugagaacuggg

SEQ ID NO: 560015 - RNA, 19 nt, Artificial Sequence
  Description of Artificial Sequence: Synthetic oligonucleotide
  Sense strand starting at position 270 of SEQ ID NO: 318404
cuguuagccuccucacauu

SEQ ID NO: 560016 - RNA, 19 nt, Artificial Sequence
  Description of Artificial Sequence: Synthetic oligonucleotide
  Antisense strand to SEQ ID NO: 560015
aaugugaggaggcuaacag

SEQ ID NO: 560017 - RNA, 19 nt, Artificial Sequence
  Description of Artificial Sequence: Synthetic oligonucleotide
  Sense strand starting at position 285 of SEQ ID NO: 318404
cauucucagugcguaacua

SEQ ID NO: 560018 - RNA, 19 nt, Artificial Sequence
  Description of Artificial Sequence: Synthetic oligonucleotide
  Antisense strand to SEQ ID NO: 560017
uaguuacgcacugagaaug

SEQ ID NO: 560019 - RNA, 19 nt, Artificial Sequence
  Description of Artificial Sequence: Synthetic oligonucleotide
  Sense strand starting at position 317 of SEQ ID NO: 318404
auaugugauuuccaucugu

SEQ ID NO: 560020 - RNA, 19 nt, Artificial Sequence
  Description of Artificial Sequence: Synthetic oligonucleotide
  Antisense strand to SEQ ID NO: 560019
acagauggaaaucacauau

SEQ ID NO: 560021 - RNA, 19 nt, Artificial Sequence
  Description of Artificial Sequence: Synthetic oligonucleotide
  Sense strand starting at position 321 of SEQ ID NO: 318404
gugauuuccaucugucugu

SEQ ID NO: 560022 - RNA, 19 nt, Artificial Sequence
  Description of Artificial Sequence: Synthetic oligonucleotide
  Antisense strand to SEQ ID NO: 560021
acagacagauggaaaucac

SEQ ID NO: 560023 - RNA, 19 nt, Artificial Sequence
  Description of Artificial Sequence: Synthetic oligonucleotide
  Sense strand starting at position 670 of SEQ ID NO: 318404
ggcuguuuggauuaguaag

SEQ ID NO: 560024 - RNA, 19 nt, Artificial Sequence
  Description of Artificial Sequence: Synthetic oligonucleotide
  Antisense strand to SEQ ID NO: 560023
cuuacuaauccaaacagcc

SEQ ID NO: 560025 - RNA, 19 nt, Artificial Sequence
  Description of Artificial Sequence: Synthetic oligonucleotide
  Sense strand starting at position 676 of SEQ ID NO: 318404
uuggauuaguaagagacau

SEQ ID NO: 560026 - RNA, 19 nt, Artificial Sequence
  Description of Artificial Sequence: Synthetic oligonucleotide
  Antisense strand to SEQ ID NO: 560025
augucucuuacuaauccaa

SEQ ID NO: 560027 - RNA, 19 nt, Artificial Sequence
  Description of Artificial Sequence: Synthetic oligonucleotide
  Sense strand starting at position 684 of SEQ ID NO: 318404
guaagagacauguagcucu

SEQ ID NO: 560028 - RNA, 19 nt, Artificial Sequence
  Description of Artificial Sequence: Synthetic oligonucleotide
  Antisense strand to SEQ ID NO: 560027
agagcuacaugucucuuac

SEQ ID NO: 560029 - RNA, 19 nt, Artificial Sequence
  Description of Artificial Sequence: Synthetic oligonucleotide
  Sense strand starting at position 687 of SEQ ID NO: 318404
agagacauguagcucucau

SEQ ID NO: 560030 - RNA, 19 nt, Artificial Sequence
  Description of Artificial Sequence: Synthetic oligonucleotide
  Antisense strand to SEQ ID NO: 560029
augagagcuacaugucucu

SEQ ID NO: 560031 - RNA, 19 nt, Artificial Sequence
  Description of Artificial Sequence: Synthetic oligonucleotide
  Sense strand starting at position 1145 of SEQ ID NO: 318404
ugaguugcauugcccuaaa

SEQ ID NO: 560032 - RNA, 19 nt, Artificial Sequence
  Description of Artificial Sequence: Synthetic oligonucleotide
  Antisense strand to SEQ ID NO: 560031
uuuagggcaaugcaacuca

SEQ ID NO: 560033 - RNA, 19 nt, Artificial Sequence
  Description of Artificial Sequence: Synthetic oligonucleotide
  Sense strand starting at position 1215 of SEQ ID NO: 318404
gagccaggcucuuuaaaga

SEQ ID NO: 560034 - RNA, 19 nt, Artificial Sequence
  Description of Artificial Sequence: Synthetic oligonucleotide
  Antisense strand to SEQ ID NO: 560033
ucuuuaaagagccuggcuc

SEQ ID NO: 560035 - RNA, 19 nt, Artificial Sequence
  Description of Artificial Sequence: Synthetic oligonucleotide
  Sense strand starting at position 1999 of SEQ ID NO: 318404
uguaaagcagaaugcuaaa

SEQ ID NO: 560036 - RNA, 19 nt, Artificial Sequence
  Description of Artificial Sequence: Synthetic oligonucleotide
  Antisense strand to SEQ ID NO: 560035
uuuagcauucugcuuuaca

SEQ ID NO: 560037 - RNA, 19 nt, Artificial Sequence
  Description of Artificial Sequence: Synthetic oligonucleotide
  Sense strand starting at position 2024 of SEQ ID NO: 318404
ggacaacguucagugacau

SEQ ID NO: 560038 - RNA, 19 nt, Artificial Sequence
  Description of Artificial Sequence: Synthetic oligonucleotide
  Antisense strand to SEQ ID NO: 560037
augucacugaacguugucc

SEQ ID NO: 560039 - RNA, 19 nt, Artificial Sequence
  Description of Artificial Sequence: Synthetic oligonucleotide
  Sense strand starting at position 2053 of SEQ ID NO: 318404
ggaugaaauuggccauggu

SEQ ID NO: 560040 - RNA, 19 nt, Artificial Sequence
  Description of Artificial Sequence: Synthetic oligonucleotide
  Antisense strand to SEQ ID NO: 560039
accauggccaauuucaucc

SEQ ID NO: 560041 - RNA, 19 nt, Artificial Sequence
  Description of Artificial Sequence: Synthetic oligonucleotide
  Sense strand starting at position 2294 of SEQ ID NO: 318404
ugcuauaauuuauguagga

SEQ ID NO: 560042 - RNA, 19 nt, Artificial Sequence
  Description of Artificial Sequence: Synthetic oligonucleotide
  Antisense strand to SEQ ID NO: 560041
uccuacauaaauuauagca

SEQ ID NO: 560043 - RNA, 19 nt, Artificial Sequence
  Description of Artificial Sequence: Synthetic oligonucleotide
  Sense strand starting at position 2330 of SEQ ID NO: 318404
ccuguuacucuaugccuua

SEQ ID NO: 560044 - RNA, 19 nt, Artificial Sequence
  Description of Artificial Sequence: Synthetic oligonucleotide
  Antisense strand to SEQ ID NO: 560043
uaaggcauagaguaacagg

SEQ ID NO: 560045 - RNA, 19 nt, Artificial Sequence
  Description of Artificial Sequence: Synthetic oligonucleotide
  Sense strand starting at position 2411 of SEQ ID NO: 318404
ugucacaccugacuagaau

SEQ ID NO: 560046 - RNA, 19 nt, Artificial Sequence
  Description of Artificial Sequence: Synthetic oligonucleotide
  Antisense strand to SEQ ID NO: 560045
auucuagucaggugugaca

SEQ ID NO: 560047 - RNA, 19 nt, Artificial Sequence
  Description of Artificial Sequence: Synthetic oligonucleotide
  Sense strand starting at position 2537 of SEQ ID NO: 318404
gaguccacuuguguaagga

SEQ ID NO: 560048 - RNA, 19 nt, Artificial Sequence
  Description of Artificial Sequence: Synthetic oligonucleotide
  Antisense strand to SEQ ID NO: 560047
uccuuacacaaguggacuc

SEQ ID NO: 560049 - RNA, 19 nt, Artificial Sequence
  Description of Artificial Sequence: Synthetic oligonucleotide
  Sense strand starting at position 2538 of SEQ ID NO: 318404
aguccacuuguguaaggaa

SEQ ID NO: 560050 - RNA, 19 nt, Artificial Sequence
  Description of Artificial Sequence: Synthetic oligonucleotide
  Antisense strand to SEQ ID NO: 560049
uuccuuacacaaguggacu

SEQ ID NO: 560051 - RNA, 19 nt, Artificial Sequence
  Description of Artificial Sequence: Synthetic oligonucleotide
  Sense strand starting at position 2654 of SEQ ID NO: 318404
ggcccaucauccucaggau

SEQ ID NO: 560052 - RNA, 19 nt, Artificial Sequence
  Description of Artificial Sequence: Synthetic oligonucleotide
  Antisense strand to SEQ ID NO: 560051
auccugaggaugaugggcc

SEQ ID NO: 560053 - RNA, 19 nt, Artificial Sequence
  Description of Artificial Sequence: Synthetic oligonucleotide
  Sense strand starting at position 2745 of SEQ ID NO: 318404
guggccggcacuuagaaau

SEQ ID NO: 560054 - RNA, 19 nt, Artificial Sequence
  Description of Artificial Sequence: Synthetic oligonucleotide
  Antisense strand to SEQ ID NO: 560053
auuucuaagugccggccac

SEQ ID NO: 560055 - RNA, 19 nt, Artificial Sequence
  Description of Artificial Sequence: Synthetic oligonucleotide
  Sense strand starting at position 2874 of SEQ ID NO: 318404
gguucuagaacaugaaguu

SEQ ID NO: 560056 - RNA, 19 nt, Artificial Sequence
  Description of Artificial Sequence: Synthetic oligonucleotide
  Antisense strand to SEQ ID NO: 560055
aacuucauguucuagaacc

SEQ ID NO: 560057 - RNA, 19 nt, Artificial Sequence
  Description of Artificial Sequence: Synthetic oligonucleotide
  Sense strand starting at position 2875 of SEQ ID NO: 318404
guucuagaacaugaaguuu

SEQ ID NO: 560058 - RNA, 19 nt, Artificial Sequence
  Description of Artificial Sequence: Synthetic oligonucleotide
  Antisense strand to SEQ ID NO: 560057
aaacuucauguucuagaac

SEQ ID NO: 560059 - RNA, 19 nt, Artificial Sequence
  Description of Artificial Sequence: Synthetic oligonucleotide
  Sense strand starting at position 2883 of SEQ ID NO: 318404
acaugaaguuuggagauga

SEQ ID NO: 560060 - RNA, 19 nt, Artificial Sequence
  Description of Artificial Sequence: Synthetic oligonucleotide
  Antisense strand to SEQ ID NO: 560059
ucaucuccaaacuucaugu

SEQ ID NO: 560061 - RNA, 19 nt, Artificial Sequence
  Description of Artificial Sequence: Synthetic oligonucleotide
  Sense strand starting at position 2929 of SEQ ID NO: 318404
gguccucgucugcagagua

SEQ ID NO: 560062 - RNA, 19 nt, Artificial Sequence
  Description of Artificial Sequence: Synthetic oligonucleotide
  Antisense strand to SEQ ID NO: 560061
uacucugcagacgaggacc

SEQ ID NO: 560063 - RNA, 19 nt, Artificial Sequence
  Description of Artificial Sequence: Synthetic oligonucleotide
  Sense strand starting at position 3015 of SEQ ID NO: 318404
cuaugauggcuucgguauc

SEQ ID NO: 560064 - RNA, 19 nt, Artificial Sequence
  Description of Artificial Sequence: Synthetic oligonucleotide
  Antisense strand to SEQ ID NO: 560063
gauaccgaagccaucauag

SEQ ID NO: 560065 - RNA, 19 nt, Artificial Sequence
  Description of Artificial Sequence: Synthetic oligonucleotide
  Sense strand starting at position 3056 of SEQ ID NO: 318404
ccaaucaacccuuguguuu

SEQ ID NO: 560066 - RNA, 19 nt, Artificial Sequence
  Description of Artificial Sequence: Synthetic oligonucleotide
  Antisense strand to SEQ ID NO: 560065
aaacacaaggguugauugg

SEQ ID NO: 560067 - RNA, 19 nt, Artificial Sequence
  Description of Artificial Sequence: Synthetic oligonucleotide
  Sense strand starting at position 3367 of SEQ ID NO: 318404
aaaggaagguccuacuauu

SEQ ID NO: 560068 - RNA, 19 nt, Artificial Sequence
  Description of Artificial Sequence: Synthetic oligonucleotide
  Antisense strand to SEQ ID NO: 560067
aauaguaggaccuuccuuu

SEQ ID NO: 560069 - RNA, 19 nt, Artificial Sequence
  Description of Artificial Sequence: Synthetic oligonucleotide
  Sense strand starting at position 3375 of SEQ ID NO: 318404
guccuacuauuugcacuua

SEQ ID NO: 560070 - RNA, 19 nt, Artificial Sequence
  Description of Artificial Sequence: Synthetic oligonucleotide
  Antisense strand to SEQ ID NO: 560069
uaagugcaaauaguaggac

SEQ ID NO: 560071 - RNA, 19 nt, Artificial Sequence
  Description of Artificial Sequence: Synthetic oligonucleotide
  Sense strand starting at position 3410 of SEQ ID NO: 318404
agccuaagagguuaaguua

SEQ ID NO: 560072 - RNA, 19 nt, Artificial Sequence
  Description of Artificial Sequence: Synthetic oligonucleotide
  Antisense strand to SEQ ID NO: 560071
uaacuuaaccucuuaggcu

SEQ ID NO: 560073 - RNA, 19 nt, Artificial Sequence
  Description of Artificial Sequence: Synthetic oligonucleotide
  Sense strand starting at position 3413 of SEQ ID NO: 318404
cuaagagguuaaguuacuu

SEQ ID NO: 560074 - RNA, 19 nt, Artificial Sequence
  Description of Artificial Sequence: Synthetic oligonucleotide
  Antisense strand to SEQ ID NO: 560073
aaguaacuuaaccucuuag

SEQ ID NO: 560075 - RNA, 19 nt, Artificial Sequence
  Description of Artificial Sequence: Synthetic oligonucleotide
  Sense strand starting at position 3426 of SEQ ID NO: 318404
uuacuugcccaggaugaca

SEQ ID NO: 560076 - RNA, 19 nt, Artificial Sequence
  Description of Artificial Sequence: Synthetic oligonucleotide
  Antisense strand to SEQ ID NO: 560075
ugucauccugggcaaguaa

SEQ ID NO: 560077 - RNA, 19 nt, Artificial Sequence
  Description of Artificial Sequence: Synthetic oligonucleotide
  Sense strand starting at position 3448 of SEQ ID NO: 318404
cugauaacugccuggaagu

SEQ ID NO: 560078 - RNA, 19 nt, Artificial Sequence
  Description of Artificial Sequence: Synthetic oligonucleotide
  Antisense strand to SEQ ID NO: 560077
acuuccaggcaguuaucag

SEQ ID NO: 560079 - RNA, 19 nt, Artificial Sequence
  Description of Artificial Sequence: Synthetic oligonucleotide
  Sense strand starting at position 3449 of SEQ ID NO: 318404
ugauaacugccuggaagua

SEQ ID NO: 560080 - RNA, 19 nt, Artificial Sequence
  Description of Artificial Sequence: Synthetic oligonucleotide
  Antisense strand to SEQ ID NO: 560079
uacuuccaggcaguuauca

SEQ ID NO: 560081 - RNA, 19 nt, Artificial Sequence
  Description of Artificial Sequence: Synthetic oligonucleotide
  Sense strand starting at position 3543 of SEQ ID NO: 318404
uccuguacgucuuuauacu

SEQ ID NO: 560082 - RNA, 19 nt, Artificial Sequence
  Description of Artificial Sequence: Synthetic oligonucleotide
  Antisense strand to SEQ ID NO: 560081
aguauaaagacguacagga

SEQ ID NO: 560083 - RNA, 19 nt, Artificial Sequence
  Description of Artificial Sequence: Synthetic oligonucleotide
  Sense strand starting at position 3544 of SEQ ID NO: 318404
ccuguacgucuuuauacuu

SEQ ID NO: 560084 - RNA, 19 nt, Artificial Sequence
  Description of Artificial Sequence: Synthetic oligonucleotide
  Antisense strand to SEQ ID NO: 560083
aaguauaaagacguacagg

SEQ ID NO: 560085 - RNA, 19 nt, Artificial Sequence
  Description of Artificial Sequence: Synthetic oligonucleotide
  Sense strand starting at position 3583 of SEQ ID NO: 318404
gacacaugauucuaggaag

SEQ ID NO: 560086 - RNA, 19 nt, Artificial Sequence
  Description of Artificial Sequence: Synthetic oligonucleotide
  Antisense strand to SEQ ID NO: 560085
cuuccuagaaucauguguc

SEQ ID NO: 560087 - RNA, 19 nt, Artificial Sequence
  Description of Artificial Sequence: Synthetic oligonucleotide
  Sense strand starting at position 3586 of SEQ ID NO: 318404
acaugauucuaggaaggaa

SEQ ID NO: 560088 - RNA, 19 nt, Artificial Sequence
  Description of Artificial Sequence: Synthetic oligonucleotide
  Antisense strand to SEQ ID NO: 560087
uuccuuccuagaaucaugu

SEQ ID NO: 560089 - RNA, 19 nt, Artificial Sequence
  Description of Artificial Sequence: Synthetic oligonucleotide
  Sense strand starting at position 3945 of SEQ ID NO: 318404
ucccaaaccugagaagaua

SEQ ID NO: 560090 - RNA, 19 nt, Artificial Sequence
  Description of Artificial Sequence: Synthetic oligonucleotide
  Antisense strand to SEQ ID NO: 560089
uaucuucucagguuuggga

SEQ ID NO: 560091 - RNA, 19 nt, Artificial Sequence
  Description of Artificial Sequence: Synthetic oligonucleotide
  Sense strand starting at position 3953 of SEQ ID NO: 318404
cugagaagauacuaccuua

SEQ ID NO: 560092 - RNA, 19 nt, Artificial Sequence
  Description of Artificial Sequence: Synthetic oligonucleotide
  Antisense strand to SEQ ID NO: 560091
uaagguaguaucuucucag

SEQ ID NO: 560093 - RNA, 19 nt, Artificial Sequence
  Description of Artificial Sequence: Synthetic oligonucleotide
  Sense strand starting at position 238 of SEQ ID NO: 318405
uggcucugacugcagaaua

SEQ ID NO: 560094 - RNA, 19 nt, Artificial Sequence
  Description of Artificial Sequence: Synthetic oligonucleotide
  Antisense strand to SEQ ID NO: 560093
uauucugcagucagagcca

SEQ ID NO: 560095 - RNA, 19 nt, Artificial Sequence
  Description of Artificial Sequence: Synthetic oligonucleotide
  Sense strand starting at position 420 of SEQ ID NO: 318405
gggcuuuccuguuugagga

SEQ ID NO: 560096 - RNA, 19 nt, Artificial Sequence
  Description of Artificial Sequence: Synthetic oligonucleotide
  Antisense strand to SEQ ID NO: 560095
uccucaaacaggaaagccc

SEQ ID NO: 560097 - RNA, 19 nt, Artificial Sequence
  Description of Artificial Sequence: Synthetic oligonucleotide
  Sense strand starting at position 575 of SEQ ID NO: 318405
uguuuauggcuuuauccca

SEQ ID NO: 560098 - RNA, 19 nt, Artificial Sequence
  Description of Artificial Sequence: Synthetic oligonucleotide
  Antisense strand to SEQ ID NO: 560097
ugggauaaagccauaaaca

SEQ ID NO: 560099 - RNA, 19 nt, Artificial Sequence
  Description of Artificial Sequence: Synthetic oligonucleotide
  Sense strand starting at position 640 of SEQ ID NO: 318405
guuagacaugccuacaaga

SEQ ID NO: 560100 - RNA, 19 nt, Artificial Sequence
  Description of Artificial Sequence: Synthetic oligonucleotide
  Antisense strand to SEQ ID NO: 560099
ucuuguaggcaugucuaac

SEQ ID NO: 560101 - RNA, 19 nt, Artificial Sequence
  Description of Artificial Sequence: Synthetic oligonucleotide
  Sense strand starting at position 818 of SEQ ID NO: 318405
cgaggauguaagcauucua

SEQ ID NO: 560102 - RNA, 19 nt, Artificial Sequence
  Description of Artificial Sequence: Synthetic oligonucleotide
  Antisense strand to SEQ ID NO: 560101
uagaaugcuuacauccucg

SEQ ID NO: 560103 - RNA, 19 nt, Artificial Sequence
  Description of Artificial Sequence: Synthetic oligonucleotide
  Sense strand starting at position 831 of SEQ ID NO: 318405
auucuacucguugauuagu

SEQ ID NO: 560104 - RNA, 19 nt, Artificial Sequence
  Description of Artificial Sequence: Synthetic oligonucleotide
  Antisense strand to SEQ ID NO: 560103
acuaaucaacgaguagaau

SEQ ID NO: 560105 - RNA, 19 nt, Artificial Sequence
  Description of Artificial Sequence: Synthetic oligonucleotide
  Sense strand starting at position 1012 of SEQ ID NO: 318405
gucuacccuugguuaaaua

SEQ ID NO: 560106 - RNA, 19 nt, Artificial Sequence
  Description of Artificial Sequence: Synthetic oligonucleotide
  Antisense strand to SEQ ID NO: 560105
uauuuaaccaaggguagac

SEQ ID NO: 560107 - RNA, 19 nt, Artificial Sequence
  Description of Artificial Sequence: Synthetic oligonucleotide
  Sense strand starting at position 1020 of SEQ ID NO: 318405
uugguuaaauacgcugaaa

SEQ ID NO: 560108 - RNA, 19 nt, Artificial Sequence
  Description of Artificial Sequence: Synthetic oligonucleotide
  Antisense strand to SEQ ID NO: 560107
uuucagcguauuuaaccaa

SEQ ID NO: 560109 - RNA, 19 nt, Artificial Sequence
  Description of Artificial Sequence: Synthetic oligonucleotide
  Sense strand starting at position 1051 of SEQ ID NO: 318405
cggaguuaaguacgaggaa

SEQ ID NO: 560110 - RNA, 19 nt, Artificial Sequence
  Description of Artificial Sequence: Synthetic oligonucleotide
  Antisense strand to SEQ ID NO: 560109
uuccucguacuuaacuccg

SEQ ID NO: 560111 - RNA, 19 nt, Artificial Sequence
  Description of Artificial Sequence: Synthetic oligonucleotide
  Sense strand starting at position 1254 of SEQ ID NO: 318405
gguagucucucaucugaac

SEQ ID NO: 560112 - RNA, 19 nt, Artificial Sequence
  Description of Artificial Sequence: Synthetic oligonucleotide
  Antisense strand to SEQ ID NO: 560111
guucagaugagagacuacc

SEQ ID NO: 560113 - RNA, 19 nt, Artificial Sequence
  Description of Artificial Sequence: Synthetic oligonucleotide
  Sense strand starting at position 1447 of SEQ ID NO: 318405
agucucuuuccuggagaac

SEQ ID NO: 560114 - RNA, 19 nt, Artificial Sequence
  Description of Artificial Sequence: Synthetic oligonucleotide
  Antisense strand to SEQ ID NO: 560113
guucuccaggaaagagacu

SEQ ID NO: 560115 - RNA, 19 nt, Artificial Sequence
  Description of Artificial Sequence: Synthetic oligonucleotide
  Sense strand starting at position 2353 of SEQ ID NO: 318405
gugugauugcugccgccuu

SEQ ID NO: 560116 - RNA, 19 nt, Artificial Sequence
  Description of Artificial Sequence: Synthetic oligonucleotide
  Antisense strand to SEQ ID NO: 560115
aaggcggcagcaaucacac

SEQ ID NO: 560117 - RNA, 19 nt, Artificial Sequence
  Description of Artificial Sequence: Synthetic oligonucleotide
  Sense strand starting at position 2435 of SEQ ID NO: 318405
ggacgcuuagcagaacuuu

SEQ ID NO: 560118 - RNA, 19 nt, Artificial Sequence
  Description of Artificial Sequence: Synthetic oligonucleotide
  Antisense strand to SEQ ID NO: 560117
aaaguucugcuaagcgucc

SEQ ID NO: 560119 - RNA, 19 nt, Artificial Sequence
  Description of Artificial Sequence: Synthetic oligonucleotide
  Sense strand starting at position 2441 of SEQ ID NO: 318405
uuagcagaacuuugacauc

SEQ ID NO: 560120 - RNA, 19 nt, Artificial Sequence
  Description of Artificial Sequence: Synthetic oligonucleotide
  Antisense strand to SEQ ID NO: 560119
gaugucaaaguucugcuaa

SEQ ID NO: 560121 - RNA, 19 nt, Artificial Sequence
  Description of Artificial Sequence: Synthetic oligonucleotide
  Sense strand starting at position 2447 of SEQ ID NO: 318405
gaacuuugacaucgcugga

SEQ ID NO: 560122 - RNA, 19 nt, Artificial Sequence
  Description of Artificial Sequence: Synthetic oligonucleotide
  Antisense strand to SEQ ID NO: 560121
uccagcgaugucaaaguuc

SEQ ID NO: 560123 - RNA, 19 nt, Artificial Sequence
  Description of Artificial Sequence: Synthetic oligonucleotide
  Sense strand starting at position 2476 of SEQ ID NO: 318405
ccuguugcacucgaauaau

SEQ ID NO: 560124 - RNA, 19 nt, Artificial Sequence
  Description of Artificial Sequence: Synthetic oligonucleotide
  Antisense strand to SEQ ID NO: 560123
auuauucgagugcaacagg

SEQ ID NO: 560125 - RNA, 19 nt, Artificial Sequence
  Description of Artificial Sequence: Synthetic oligonucleotide
  Sense strand starting at position 2583 of SEQ ID NO: 318405
ggcuuuaaguacuuuauuu

SEQ ID NO: 560126 - RNA, 19 nt, Artificial Sequence
  Description of Artificial Sequence: Synthetic oligonucleotide
  Antisense strand to SEQ ID NO: 560125
aaauaaaguacuuaaagcc

SEQ ID NO: 560127 - RNA, 19 nt, Artificial Sequence
  Description of Artificial Sequence: Synthetic oligonucleotide
  Sense strand starting at position 2591 of SEQ ID NO: 318405
guacuuuauuuggaggaug

SEQ ID NO: 560128 - RNA, 19 nt, Artificial Sequence
  Description of Artificial Sequence: Synthetic oligonucleotide
  Antisense strand to SEQ ID NO: 560127
cauccuccaaauaaaguac

SEQ ID NO: 560129 - RNA, 19 nt, Artificial Sequence
  Description of Artificial Sequence: Synthetic oligonucleotide
  Sense strand starting at position 2603 of SEQ ID NO: 318405
gaggaugauucugugaucu

SEQ ID NO: 560130 - RNA, 19 nt, Artificial Sequence
  Description of Artificial Sequence: Synthetic oligonucleotide
  Antisense strand to SEQ ID NO: 560129
agaucacagaaucauccuc

SEQ ID NO: 560131 - RNA, 19 nt, Artificial Sequence
  Description of Artificial Sequence: Synthetic oligonucleotide
  Sense strand starting at position 2607 of SEQ ID NO: 318405
augauucugugaucuuauc

SEQ ID NO: 560132 - RNA, 19 nt, Artificial Sequence
  Description of Artificial Sequence: Synthetic oligonucleotide
  Antisense strand to SEQ ID NO: 560131
gauaagaucacagaaucau

SEQ ID NO: 560133 - RNA, 19 nt, Artificial Sequence
  Description of Artificial Sequence: Synthetic oligonucleotide
  Sense strand starting at position 2613 of SEQ ID NO: 318405
cugugaucuuaucuacacu

SEQ ID NO: 560134 - RNA, 19 nt, Artificial Sequence
  Description of Artificial Sequence: Synthetic oligonucleotide
  Antisense strand to SEQ ID NO: 560133
aguguagauaagaucacag

SEQ ID NO: 560135 - RNA, 19 nt, Artificial Sequence
  Description of Artificial Sequence: Synthetic oligonucleotide
  Sense strand starting at position 2616 of SEQ ID NO: 318405
ugaucuuaucuacacuguu

SEQ ID NO: 560136 - RNA, 19 nt, Artificial Sequence
  Description of Artificial Sequence: Synthetic oligonucleotide
  Antisense strand to SEQ ID NO: 560135
aacaguguagauaagauca

SEQ ID NO: 560137 - RNA, 19 nt, Artificial Sequence
  Description of Artificial Sequence: Synthetic oligonucleotide
  Sense strand starting at position 2655 of SEQ ID NO: 318405
ggcccagaaccauggucau

SEQ ID NO: 560138 - RNA, 19 nt, Artificial Sequence
  Description of Artificial Sequence: Synthetic oligonucleotide
  Antisense strand to SEQ ID NO: 560137
augaccaugguucugggcc

SEQ ID NO: 560139 - RNA, 19 nt, Artificial Sequence
  Description of Artificial Sequence: Synthetic oligonucleotide
  Sense strand starting at position 2658 of SEQ ID NO: 318405
ccagaaccauggucaugua

SEQ ID NO: 560140 - RNA, 19 nt, Artificial Sequence
  Description of Artificial Sequence: Synthetic oligonucleotide
  Antisense strand to SEQ ID NO: 560139
uacaugaccaugguucugg

SEQ ID NO: 560141 - RNA, 19 nt, Artificial Sequence
  Description of Artificial Sequence: Synthetic oligonucleotide
  Sense strand starting at position 2716 of SEQ ID NO: 318405
uuagguguaucuguaggau

SEQ ID NO: 560142 - RNA, 19 nt, Artificial Sequence
  Description of Artificial Sequence: Synthetic oligonucleotide
  Antisense strand to SEQ ID NO: 560141
auccuacagauacaccuaa

SEQ ID NO: 560143 - RNA, 19 nt, Artificial Sequence
  Description of Artificial Sequence: Synthetic oligonucleotide
  Sense strand starting at position 2719 of SEQ ID NO: 318405
gguguaucuguaggaugga

SEQ ID NO: 560144 - RNA, 19 nt, Artificial Sequence
  Description of Artificial Sequence: Synthetic oligonucleotide
  Antisense strand to SEQ ID NO: 560143
uccauccuacagauacacc

SEQ ID NO: 560145 - RNA, 19 nt, Artificial Sequence
  Description of Artificial Sequence: Synthetic oligonucleotide
  Sense strand starting at position 2783 of SEQ ID NO: 318405
ggaaguaaguucuuauuau

SEQ ID NO: 560146 - RNA, 19 nt, Artificial Sequence
  Description of Artificial Sequence: Synthetic oligonucleotide
  Antisense strand to SEQ ID NO: 560145
auaauaagaacuuacuucc

SEQ ID NO: 560147 - RNA, 19 nt, Artificial Sequence
  Description of Artificial Sequence: Synthetic oligonucleotide
  Sense strand starting at position 2889 of SEQ ID NO: 318405
agagauguaccacaacguu

SEQ ID NO: 560148 - RNA, 19 nt, Artificial Sequence
  Description of Artificial Sequence: Synthetic oligonucleotide
  Antisense strand to SEQ ID NO: 560147
aacguugugguacaucucu

SEQ ID NO: 560149 - RNA, 19 nt, Artificial Sequence
  Description of Artificial Sequence: Synthetic oligonucleotide
  Sense strand starting at position 2901 of SEQ ID NO: 318405
caacguuuacaguagcuau

SEQ ID NO: 560150 - RNA, 19 nt, Artificial Sequence
  Description of Artificial Sequence: Synthetic oligonucleotide
  Antisense strand to SEQ ID NO: 560149
auagcuacuguaaacguug

SEQ ID NO: 560151 - RNA, 19 nt, Artificial Sequence
  Description of Artificial Sequence: Synthetic oligonucleotide
  Sense strand starting at position 2938 of SEQ ID NO: 318405
uugauagacuuauggauuu

SEQ ID NO: 560152 - RNA, 19 nt, Artificial Sequence
  Description of Artificial Sequence: Synthetic oligonucleotide
  Antisense strand to SEQ ID NO: 560151
aaauccauaagucuaucaa

SEQ ID NO: 560153 - RNA, 19 nt, Artificial Sequence
  Description of Artificial Sequence: Synthetic oligonucleotide
  Sense strand starting at position 3007 of SEQ ID NO: 318405
cuacaaugagcauauaagu

SEQ ID NO: 560154 - RNA, 19 nt, Artificial Sequence
  Description of Artificial Sequence: Synthetic oligonucleotide
  Antisense strand to SEQ ID NO: 560153
acuuauaugcucauuguag

SEQ ID NO: 560155 - RNA, 19 nt, Artificial Sequence
  Description of Artificial Sequence: Synthetic oligonucleotide
  Sense strand starting at position 3220 of SEQ ID NO: 318405
cuaaaugucagaugggauu

SEQ ID NO: 560156 - RNA, 19 nt, Artificial Sequence
  Description of Artificial Sequence: Synthetic oligonucleotide
  Antisense strand to SEQ ID NO: 560155
aaucccaucugacauuuag

SEQ ID NO: 560157 - RNA, 19 nt, Artificial Sequence
  Description of Artificial Sequence: Synthetic oligonucleotide
  Sense strand starting at position 3231 of SEQ ID NO: 318405
augggauuccuagguguac

SEQ ID NO: 560158 - RNA, 19 nt, Artificial Sequence
  Description of Artificial Sequence: Synthetic oligonucleotide
  Antisense strand to SEQ ID NO: 560157
guacaccuaggaaucccau

SEQ ID NO: 560159 - RNA, 19 nt, Artificial Sequence
  Description of Artificial Sequence: Synthetic oligonucleotide
  Sense strand starting at position 3233 of SEQ ID NO: 318405
gggauuccuagguguaccu

SEQ ID NO: 560160 - RNA, 19 nt, Artificial Sequence
  Description of Artificial Sequence: Synthetic oligonucleotide
  Antisense strand to SEQ ID NO: 560159
agguacaccuaggaauccc

SEQ ID NO: 560161 - RNA, 19 nt, Artificial Sequence
  Description of Artificial Sequence: Synthetic oligonucleotide
  Sense strand starting at position 3235 of SEQ ID NO: 318405
gauuccuagguguaccuaa

SEQ ID NO: 560162 - RNA, 19 nt, Artificial Sequence
  Description of Artificial Sequence: Synthetic oligonucleotide
  Antisense strand to SEQ ID NO: 560161
uuagguacaccuaggaauc

SEQ ID NO: 560163 - RNA, 19 nt, Artificial Sequence
  Description of Artificial Sequence: Synthetic oligonucleotide
  Sense strand starting at position 3242 of SEQ ID NO: 318405
agguguaccuaaguguaga

SEQ ID NO: 560164 - RNA, 19 nt, Artificial Sequence
  Description of Artificial Sequence: Synthetic oligonucleotide
  Antisense strand to SEQ ID NO: 560163
ucuacacuuagguacaccu

SEQ ID NO: 560165 - RNA, 19 nt, Artificial Sequence
  Description of Artificial Sequence: Synthetic oligonucleotide
  Sense strand starting at position 3475 of SEQ ID NO: 318405
cugugaggugauuguauau

SEQ ID NO: 560166 - RNA, 19 nt, Artificial Sequence
  Description of Artificial Sequence: Synthetic oligonucleotide
  Antisense strand to SEQ ID NO: 560165
auauacaaucaccucacag

SEQ ID NO: 560167 - RNA, 19 nt, Artificial Sequence
  Description of Artificial Sequence: Synthetic oligonucleotide
  Sense strand starting at position 3647 of SEQ ID NO: 318405
gaaugaauguguccaacua

SEQ ID NO: 560168 - RNA, 19 nt, Artificial Sequence
  Description of Artificial Sequence: Synthetic oligonucleotide
  Antisense strand to SEQ ID NO: 560167
uaguuggacacauucauuc

SEQ ID NO: 560169 - RNA, 19 nt, Artificial Sequence
  Description of Artificial Sequence: Synthetic oligonucleotide
  Sense strand starting at position 3840 of SEQ ID NO: 318405
aggguauuaccguauguau

SEQ ID NO: 560170 - RNA, 19 nt, Artificial Sequence
  Description of Artificial Sequence: Synthetic oligonucleotide
  Antisense strand to SEQ ID NO: 560169
auacauacgguaauacccu

SEQ ID NO: 560171 - RNA, 19 nt, Artificial Sequence
  Description of Artificial Sequence: Synthetic oligonucleotide
  Sense strand starting at position 3842 of SEQ ID NO: 318405
gguauuaccguauguauuu

SEQ ID NO: 560172 - RNA, 19 nt, Artificial Sequence
  Description of Artificial Sequence: Synthetic oligonucleotide
  Antisense strand to SEQ ID NO: 560171
aaauacauacgguaauacc

SEQ ID NO: 560173 - RNA, 19 nt, Artificial Sequence
  Description of Artificial Sequence: Synthetic oligonucleotide
  Sense strand starting at position 75 of SEQ ID NO: 318406
acaguuuguuaaucaucua

SEQ ID NO: 560174 - RNA, 19 nt, Artificial Sequence
  Description of Artificial Sequence: Synthetic oligonucleotide
  Antisense strand to SEQ ID NO: 560173
uagaugauuaacaaacugu

SEQ ID NO: 560175 - RNA, 19 nt, Artificial Sequence
  Description of Artificial Sequence: Synthetic oligonucleotide
  Sense strand starting at position 303 of SEQ ID NO: 318406
aguccauaacauugucuau

SEQ ID NO: 560176 - RNA, 19 nt, Artificial Sequence
  Description of Artificial Sequence: Synthetic oligonucleotide
  Antisense strand to SEQ ID NO: 560175
auagacaauguuauggacu

SEQ ID NO: 560177 - RNA, 19 nt, Artificial Sequence
  Description of Artificial Sequence: Synthetic oligonucleotide
  Sense strand starting at position 518 of SEQ ID NO: 318406
ugcaaaucaguuuagucau

SEQ ID NO: 560178 - RNA, 19 nt, Artificial Sequence
  Description of Artificial Sequence: Synthetic oligonucleotide
  Antisense strand to SEQ ID NO: 560177
augacuaaacugauuugca

SEQ ID NO: 560179 - RNA, 19 nt, Artificial Sequence
  Description of Artificial Sequence: Synthetic oligonucleotide
  Sense strand starting at position 577 of SEQ ID NO: 318406
uggguucugcacuacuuaa

SEQ ID NO: 560180 - RNA, 19 nt, Artificial Sequence
  Description of Artificial Sequence: Synthetic oligonucleotide
  Antisense strand to SEQ ID NO: 560179
uuaaguagugcagaaccca

SEQ ID NO: 560181 - RNA, 19 nt, Artificial Sequence
  Description of Artificial Sequence: Synthetic oligonucleotide
  Sense strand starting at position 916 of SEQ ID NO: 318406
aggaauaaaugacaaacua

SEQ ID NO: 560182 - RNA, 19 nt, Artificial Sequence
  Description of Artificial Sequence: Synthetic oligonucleotide
  Antisense strand to SEQ ID NO: 560181
uaguuugucauuuauuccu

SEQ ID NO: 560183 - RNA, 19 nt, Artificial Sequence
  Description of Artificial Sequence: Synthetic oligonucleotide
  Sense strand starting at position 970 of SEQ ID NO: 318406
ggcaacuaucguuauuauu

SEQ ID NO: 560184 - RNA, 19 nt, Artificial Sequence
  Description of Artificial Sequence: Synthetic oligonucleotide
  Antisense strand to SEQ ID NO: 560183
aauaauaacgauaguugcc

SEQ ID NO: 560185 - RNA, 19 nt, Artificial Sequence
  Description of Artificial Sequence: Synthetic oligonucleotide
  Sense strand starting at position 1179 of SEQ ID NO: 318406
ggucaagaaccucgugaau

SEQ ID NO: 560186 - RNA, 19 nt, Artificial Sequence
  Description of Artificial Sequence: Synthetic oligonucleotide
  Antisense strand to SEQ ID NO: 560185
auucacgagguucuugacc

SEQ ID NO: 560187 - RNA, 19 nt, Artificial Sequence
  Description of Artificial Sequence: Synthetic oligonucleotide
  Sense strand starting at position 1185 of SEQ ID NO: 318406
gaaccucgugaaugagauc

SEQ ID NO: 560188 - RNA, 19 nt, Artificial Sequence
  Description of Artificial Sequence: Synthetic oligonucleotide
  Antisense strand to SEQ ID NO: 560187
gaucucauucacgagguuc

SEQ ID NO: 560189 - RNA, 19 nt, Artificial Sequence
  Description of Artificial Sequence: Synthetic oligonucleotide
  Sense strand starting at position 1421 of SEQ ID NO: 318406
gucccauaacucgaggcua

SEQ ID NO: 560190 - RNA, 19 nt, Artificial Sequence
  Description of Artificial Sequence: Synthetic oligonucleotide
  Antisense strand to SEQ ID NO: 560189
uagccucgaguuaugggac

SEQ ID NO: 560191 - RNA, 19 nt, Artificial Sequence
  Description of Artificial Sequence: Synthetic oligonucleotide
  Sense strand starting at position 1423 of SEQ ID NO: 318406
cccauaacucgaggcuaau

SEQ ID NO: 560192 - RNA, 19 nt, Artificial Sequence
  Description of Artificial Sequence: Synthetic oligonucleotide
  Antisense strand to SEQ ID NO: 560191
auuagccucgaguuauggg

SEQ ID NO: 560193 - RNA, 19 nt, Artificial Sequence
  Description of Artificial Sequence: Synthetic oligonucleotide
  Sense strand starting at position 1514 of SEQ ID NO: 318406
gcgucucgaacccaagaaa

SEQ ID NO: 560194 - RNA, 19 nt, Artificial Sequence
  Description of Artificial Sequence: Synthetic oligonucleotide
  Antisense strand to SEQ ID NO: 560193
uuucuuggguucgagacgc

SEQ ID NO: 560195 - RNA, 19 nt, Artificial Sequence
  Description of Artificial Sequence: Synthetic oligonucleotide
  Sense strand starting at position 1563 of SEQ ID NO: 318406
gagaaaucaaggcgcgaaa

SEQ ID NO: 560196 - RNA, 19 nt, Artificial Sequence
  Description of Artificial Sequence: Synthetic oligonucleotide
  Antisense strand to SEQ ID NO: 560195
uuucgcgccuugauuucuc

SEQ ID NO: 560197 - RNA, 19 nt, Artificial Sequence
  Description of Artificial Sequence: Synthetic oligonucleotide
  Sense strand starting at position 1619 of SEQ ID NO: 318406
ugucauucucuccagcaca

SEQ ID NO: 560198 - RNA, 19 nt, Artificial Sequence
  Description of Artificial Sequence: Synthetic oligonucleotide
  Antisense strand to SEQ ID NO: 560197
ugugcuggagagaaugaca

SEQ ID NO: 560199 - RNA, 19 nt, Artificial Sequence
  Description of Artificial Sequence: Synthetic oligonucleotide
  Sense strand starting at position 2041 of SEQ ID NO: 318406
gccaaaugaucaguccuaa

SEQ ID NO: 560200 - RNA, 19 nt, Artificial Sequence
  Description of Artificial Sequence: Synthetic oligonucleotide
  Antisense strand to SEQ ID NO: 560199
uuaggacugaucauuuggc

SEQ ID NO: 560201 - RNA, 19 nt, Artificial Sequence
  Description of Artificial Sequence: Synthetic oligonucleotide
  Sense strand starting at position 2161 of SEQ ID NO: 318406
aaaucugucguuugaauuu

SEQ ID NO: 560202 - RNA, 19 nt, Artificial Sequence
  Description of Artificial Sequence: Synthetic oligonucleotide
  Antisense strand to SEQ ID NO: 560201
aaauucaaacgacagauuu

SEQ ID NO: 560203 - RNA, 19 nt, Artificial Sequence
  Description of Artificial Sequence: Synthetic oligonucleotide
  Sense strand starting at position 2284 of SEQ ID NO: 318406
ggccuaaggaaggguuuaa

SEQ ID NO: 560204 - RNA, 19 nt, Artificial Sequence
  Description of Artificial Sequence: Synthetic oligonucleotide
  Antisense strand to SEQ ID NO: 560203
uuaaacccuuccuuaggcc

SEQ ID NO: 560205 - RNA, 19 nt, Artificial Sequence
  Description of Artificial Sequence: Synthetic oligonucleotide
  Sense strand starting at position 2323 of SEQ ID NO: 318406
ugcgcaagcgccuuugaga

SEQ ID NO: 560206 - RNA, 19 nt, Artificial Sequence
  Description of Artificial Sequence: Synthetic oligonucleotide
  Antisense strand to SEQ ID NO: 560205
ucucaaaggcgcuugcgca

SEQ ID NO: 560207 - RNA, 19 nt, Artificial Sequence
  Description of Artificial Sequence: Synthetic oligonucleotide
  Sense strand starting at position 2324 of SEQ ID NO: 318406
gcgcaagcgccuuugagau

SEQ ID NO: 560208 - RNA, 19 nt, Artificial Sequence
  Description of Artificial Sequence: Synthetic oligonucleotide
  Antisense strand to SEQ ID NO: 560207
aucucaaaggcgcuugcgc

SEQ ID NO: 560209 - RNA, 19 nt, Artificial Sequence
  Description of Artificial Sequence: Synthetic oligonucleotide
  Sense strand starting at position 2419 of SEQ ID NO: 318406
gccuacuggguguaauuga

SEQ ID NO: 560210 - RNA, 19 nt, Artificial Sequence
  Description of Artificial Sequence: Synthetic oligonucleotide
  Antisense strand to SEQ ID NO: 560209
ucaauuacacccaguaggc

SEQ ID NO: 560211 - RNA, 19 nt, Artificial Sequence
  Description of Artificial Sequence: Synthetic oligonucleotide
  Sense strand starting at position 2481 of SEQ ID NO: 318406
ggaccuugcccuuaagauu

SEQ ID NO: 560212 - RNA, 19 nt, Artificial Sequence
  Description of Artificial Sequence: Synthetic oligonucleotide
  Antisense strand to SEQ ID NO: 560211
aaucuuaagggcaaggucc

SEQ ID NO: 560213 - RNA, 19 nt, Artificial Sequence
  Description of Artificial Sequence: Synthetic oligonucleotide
  Sense strand starting at position 2492 of SEQ ID NO: 318406
uuaagauuccguuaacgag

SEQ ID NO: 560214 - RNA, 19 nt, Artificial Sequence
  Description of Artificial Sequence: Synthetic oligonucleotide
  Antisense strand to SEQ ID NO: 560213
cucguuaacggaaucuuaa

SEQ ID NO: 560215 - RNA, 19 nt, Artificial Sequence
  Description of Artificial Sequence: Synthetic oligonucleotide
  Sense strand starting at position 2524 of SEQ ID NO: 318406
aggaaaugcucccucacag

SEQ ID NO: 560216 - RNA, 19 nt, Artificial Sequence
  Description of Artificial Sequence: Synthetic oligonucleotide
  Antisense strand to SEQ ID NO: 560215
cugugagggagcauuuccu

SEQ ID NO: 560217 - RNA, 19 nt, Artificial Sequence
  Description of Artificial Sequence: Synthetic oligonucleotide
  Sense strand starting at position 2544 of SEQ ID NO: 318406
guuugagacuaagcacuuu

SEQ ID NO: 560218 - RNA, 19 nt, Artificial Sequence
  Description of Artificial Sequence: Synthetic oligonucleotide
  Antisense strand to SEQ ID NO: 560217
aaagugcuuagucucaaac

SEQ ID NO: 560219 - RNA, 19 nt, Artificial Sequence
  Description of Artificial Sequence: Synthetic oligonucleotide
  Sense strand starting at position 2586 of SEQ ID NO: 318406
ccauuacuuugaucaguca

SEQ ID NO: 560220 - RNA, 19 nt, Artificial Sequence
  Description of Artificial Sequence: Synthetic oligonucleotide
  Antisense strand to SEQ ID NO: 560219
ugacugaucaaaguaaugg

SEQ ID NO: 560221 - RNA, 19 nt, Artificial Sequence
  Description of Artificial Sequence: Synthetic oligonucleotide
  Sense strand starting at position 2730 of SEQ ID NO: 318406
augggcauuucugaaccaa

SEQ ID NO: 560222 - RNA, 19 nt, Artificial Sequence
  Description of Artificial Sequence: Synthetic oligonucleotide
  Antisense strand to SEQ ID NO: 560221
uugguucagaaaugcccau

SEQ ID NO: 560223 - RNA, 19 nt, Artificial Sequence
  Description of Artificial Sequence: Synthetic oligonucleotide
  Sense strand starting at position 2774 of SEQ ID NO: 318406
gcauuuaucccauguggcu

SEQ ID NO: 560224 - RNA, 19 nt, Artificial Sequence
  Description of Artificial Sequence: Synthetic oligonucleotide
  Antisense strand to SEQ ID NO: 560223
agccacaugggauaaaugc

SEQ ID NO: 560225 - RNA, 19 nt, Artificial Sequence
  Description of Artificial Sequence: Synthetic oligonucleotide
  Sense strand starting at position 3009 of SEQ ID NO: 318406
ggaaccagcggguauuaua

SEQ ID NO: 560226 - RNA, 19 nt, Artificial Sequence
  Description of Artificial Sequence: Synthetic oligonucleotide
  Antisense strand to SEQ ID NO: 560225
uauaauacccgcugguucc

SEQ ID NO: 560227 - RNA, 19 nt, Artificial Sequence
  Description of Artificial Sequence: Synthetic oligonucleotide
  Sense strand starting at position 3142 of SEQ ID NO: 318406
ggaauuaagcaaugaguug

SEQ ID NO: 560228 - RNA, 19 nt, Artificial Sequence
  Description of Artificial Sequence: Synthetic oligonucleotide
  Antisense strand to SEQ ID NO: 560227
caacucauugcuuaauucc

SEQ ID NO: 560229 - RNA, 19 nt, Artificial Sequence
  Description of Artificial Sequence: Synthetic oligonucleotide
  Sense strand starting at position 3183 of SEQ ID NO: 318406
ggacaaaguguauaaagcu

SEQ ID NO: 560230 - RNA, 19 nt, Artificial Sequence
  Description of Artificial Sequence: Synthetic oligonucleotide
  Antisense strand to SEQ ID NO: 560229
agcuuuauacacuuugucc

SEQ ID NO: 560231 - RNA, 19 nt, Artificial Sequence
  Description of Artificial Sequence: Synthetic oligonucleotide
  Sense strand starting at position 3190 of SEQ ID NO: 318406
guguauaaagcuuaaccaa

SEQ ID NO: 560232 - RNA, 19 nt, Artificial Sequence
  Description of Artificial Sequence: Synthetic oligonucleotide
  Antisense strand to SEQ ID NO: 560231
uugguuaagcuuuauacac

SEQ ID NO: 560233 - RNA, 19 nt, Artificial Sequence
  Description of Artificial Sequence: Synthetic oligonucleotide
  Sense strand starting at position 3272 of SEQ ID NO: 318406
auuccuacauguuuaagua

SEQ ID NO: 560234 - RNA, 19 nt, Artificial Sequence
  Description of Artificial Sequence: Synthetic oligonucleotide
  Antisense strand to SEQ ID NO: 560233
uacuuaaacauguaggaau

SEQ ID NO: 560235 - RNA, 19 nt, Artificial Sequence
  Description of Artificial Sequence: Synthetic oligonucleotide
  Sense strand starting at position 3276 of SEQ ID NO: 318406
cuacauguuuaaguacauu

SEQ ID NO: 560236 - RNA, 19 nt, Artificial Sequence
  Description of Artificial Sequence: Synthetic oligonucleotide
  Antisense strand to SEQ ID NO: 560235
aauguacuuaaacauguag

SEQ ID NO: 560237 - RNA, 19 nt, Artificial Sequence
  Description of Artificial Sequence: Synthetic oligonucleotide
  Sense strand starting at position 3339 of SEQ ID NO: 318406
aaagaagucccaggacagu

SEQ ID NO: 560238 - RNA, 19 nt, Artificial Sequence
  Description of Artificial Sequence: Synthetic oligonucleotide
  Antisense strand to SEQ ID NO: 560237
acuguccugggacuucuuu

SEQ ID NO: 560239 - RNA, 19 nt, Artificial Sequence
  Description of Artificial Sequence: Synthetic oligonucleotide
  Sense strand starting at position 3348 of SEQ ID NO: 318406
ccaggacagucuuucuuua

SEQ ID NO: 560240 - RNA, 19 nt, Artificial Sequence
  Description of Artificial Sequence: Synthetic oligonucleotide
  Antisense strand to SEQ ID NO: 560239
uaaagaaagacuguccugg

SEQ ID NO: 560241 - RNA, 19 nt, Artificial Sequence
  Description of Artificial Sequence: Synthetic oligonucleotide
  Sense strand starting at position 3350 of SEQ ID NO: 318406
aggacagucuuucuuuaug

SEQ ID NO: 560242 - RNA, 19 nt, Artificial Sequence
  Description of Artificial Sequence: Synthetic oligonucleotide
  Antisense strand to SEQ ID NO: 560241
cauaaagaaagacuguccu

SEQ ID NO: 560243 - RNA, 19 nt, Artificial Sequence
  Description of Artificial Sequence: Synthetic oligonucleotide
  Sense strand starting at position 3662 of SEQ ID NO: 318406
guuugugaacugcauuaga

SEQ ID NO: 560244 - RNA, 19 nt, Artificial Sequence
  Description of Artificial Sequence: Synthetic oligonucleotide
  Antisense strand to SEQ ID NO: 560243
ucuaaugcaguucacaaac

SEQ ID NO: 560245 - RNA, 19 nt, Artificial Sequence
  Description of Artificial Sequence: Synthetic oligonucleotide
  Sense strand starting at position 3670 of SEQ ID NO: 318406
acugcauuagacuguuaua

SEQ ID NO: 560246 - RNA, 19 nt, Artificial Sequence
  Description of Artificial Sequence: Synthetic oligonucleotide
  Antisense strand to SEQ ID NO: 560245
uauaacagucuaaugcagu

SEQ ID NO: 560247 - RNA, 19 nt, Artificial Sequence
  Description of Artificial Sequence: Synthetic oligonucleotide
  Sense strand starting at position 3701 of SEQ ID NO: 318406
gauacaauucgugagucuu

SEQ ID NO: 560248 - RNA, 19 nt, Artificial Sequence
  Description of Artificial Sequence: Synthetic oligonucleotide
  Antisense strand to SEQ ID NO: 560247
aagacucacgaauuguauc

SEQ ID NO: 560249 - RNA, 19 nt, Artificial Sequence
  Description of Artificial Sequence: Synthetic oligonucleotide
  Sense strand starting at position 3856 of SEQ ID NO: 318406
cuuuaaacagccugauaug

SEQ ID NO: 560250 - RNA, 19 nt, Artificial Sequence
  Description of Artificial Sequence: Synthetic oligonucleotide
  Antisense strand to SEQ ID NO: 560249
cauaucaggcuguuuaaag

SEQ ID NO: 560251 - RNA, 19 nt, Artificial Sequence
  Description of Artificial Sequence: Synthetic oligonucleotide
  Sense strand starting at position 3865 of SEQ ID NO: 318406
gccugauauggaugauaau

SEQ ID NO: 560252 - RNA, 19 nt, Artificial Sequence
  Description of Artificial Sequence: Synthetic oligonucleotide
  Antisense strand to SEQ ID NO: 560251
auuaucauccauaucaggc

SEQ ID NO: 560253 - RNA, 19 nt, Artificial Sequence
  Description of Artificial Sequence: Synthetic oligonucleotide
  Sense strand starting at position 316 of SEQ ID NO: 318407
agacgcaugguaugacaau

SEQ ID NO: 560254 - RNA, 19 nt, Artificial Sequence
  Description of Artificial Sequence: Synthetic oligonucleotide
  Antisense strand to SEQ ID NO: 560253
auugucauaccaugcgucu

SEQ ID NO: 560255 - RNA, 19 nt, Artificial Sequence
  Description of Artificial Sequence: Synthetic oligonucleotide
  Sense strand starting at position 409 of SEQ ID NO: 318407
agauauagaugagacauaa

SEQ ID NO: 560256 - RNA, 19 nt, Artificial Sequence
  Description of Artificial Sequence: Synthetic oligonucleotide
  Antisense strand to SEQ ID NO: 560255
uuaugucucaucuauaucu

SEQ ID NO: 560257 - RNA, 19 nt, Artificial Sequence
  Description of Artificial Sequence: Synthetic oligonucleotide
  Sense strand starting at position 441 of SEQ ID NO: 318407
uaagaagccuggcuuugau

SEQ ID NO: 560258 - RNA, 19 nt, Artificial Sequence
  Description of Artificial Sequence: Synthetic oligonucleotide
  Antisense strand to SEQ ID NO: 560257
aucaaagccaggcuucuua

SEQ ID NO: 560259 - RNA, 19 nt, Artificial Sequence
  Description of Artificial Sequence: Synthetic oligonucleotide
  Sense strand starting at position 514 of SEQ ID NO: 318407
guaguagaggcugagucaa

SEQ ID NO: 560260 - RNA, 19 nt, Artificial Sequence
  Description of Artificial Sequence: Synthetic oligonucleotide
  Antisense strand to SEQ ID NO: 560259
uugacucagccucuacuac

SEQ ID NO: 560261 - RNA, 19 nt, Artificial Sequence
  Description of Artificial Sequence: Synthetic oligonucleotide
  Sense strand starting at position 516 of SEQ ID NO: 318407
aguagaggcugagucaaua

SEQ ID NO: 560262 - RNA, 19 nt, Artificial Sequence
  Description of Artificial Sequence: Synthetic oligonucleotide
  Antisense strand to SEQ ID NO: 560261
uauugacucagccucuacu

SEQ ID NO: 560263 - RNA, 19 nt, Artificial Sequence
  Description of Artificial Sequence: Synthetic oligonucleotide
  Sense strand starting at position 536 of SEQ ID NO: 318407
ugcuuucuaguuuaaguga

SEQ ID NO: 560264 - RNA, 19 nt, Artificial Sequence
  Description of Artificial Sequence: Synthetic oligonucleotide
  Antisense strand to SEQ ID NO: 560263
ucacuuaaacuagaaagca

SEQ ID NO: 560265 - RNA, 19 nt, Artificial Sequence
  Description of Artificial Sequence: Synthetic oligonucleotide
  Sense strand starting at position 555 of SEQ ID NO: 318407
gccagagacgcucugcuuu

SEQ ID NO: 560266 - RNA, 19 nt, Artificial Sequence
  Description of Artificial Sequence: Synthetic oligonucleotide
  Antisense strand to SEQ ID NO: 560265
aaagcagagcgucucuggc

SEQ ID NO: 560267 - RNA, 19 nt, Artificial Sequence
  Description of Artificial Sequence: Synthetic oligonucleotide
  Sense strand starting at position 618 of SEQ ID NO: 318407
aaaguuugagcugguaaga

SEQ ID NO: 560268 - RNA, 19 nt, Artificial Sequence
  Description of Artificial Sequence: Synthetic oligonucleotide
  Antisense strand to SEQ ID NO: 560267
ucuuaccagcucaaacuuu

SEQ ID NO: 560269 - RNA, 19 nt, Artificial Sequence
  Description of Artificial Sequence: Synthetic oligonucleotide
  Sense strand starting at position 707 of SEQ ID NO: 318407
augaguuaacaguagaguu

SEQ ID NO: 560270 - RNA, 19 nt, Artificial Sequence
  Description of Artificial Sequence: Synthetic oligonucleotide
  Antisense strand to SEQ ID NO: 560269
aacucuacuguuaacucau

SEQ ID NO: 560271 - RNA, 19 nt, Artificial Sequence
  Description of Artificial Sequence: Synthetic oligonucleotide
  Sense strand starting at position 734 of SEQ ID NO: 318407
agauauguguaacuccacu

SEQ ID NO: 560272 - RNA, 19 nt, Artificial Sequence
  Description of Artificial Sequence: Synthetic oligonucleotide
  Antisense strand to SEQ ID NO: 560271
aguggaguuacacauaucu

SEQ ID NO: 560273 - RNA, 19 nt, Artificial Sequence
  Description of Artificial Sequence: Synthetic oligonucleotide
  Sense strand starting at position 740 of SEQ ID NO: 318407
guguaacuccacugugaaa

SEQ ID NO: 560274 - RNA, 19 nt, Artificial Sequence
  Description of Artificial Sequence: Synthetic oligonucleotide
  Antisense strand to SEQ ID NO: 560273
uuucacaguggaguuacac

SEQ ID NO: 560275 - RNA, 19 nt, Artificial Sequence
  Description of Artificial Sequence: Synthetic oligonucleotide
  Sense strand starting at position 742 of SEQ ID NO: 318407
guaacuccacugugaaaga

SEQ ID NO: 560276 - RNA, 19 nt, Artificial Sequence
  Description of Artificial Sequence: Synthetic oligonucleotide
  Antisense strand to SEQ ID NO: 560275
ucuuucacaguggaguuac

SEQ ID NO: 560277 - RNA, 19 nt, Artificial Sequence
  Description of Artificial Sequence: Synthetic oligonucleotide
  Sense strand starting at position 1051 of SEQ ID NO: 318407
agaacaugauaucagaaag

SEQ ID NO: 560278 - RNA, 19 nt, Artificial Sequence
  Description of Artificial Sequence: Synthetic oligonucleotide
  Antisense strand to SEQ ID NO: 560277
cuuucugauaucauguucu

SEQ ID NO: 560279 - RNA, 19 nt, Artificial Sequence
  Description of Artificial Sequence: Synthetic oligonucleotide
  Sense strand starting at position 1329 of SEQ ID NO: 318407
ccagauuacuguuucucuu

SEQ ID NO: 560280 - RNA, 19 nt, Artificial Sequence
  Description of Artificial Sequence: Synthetic oligonucleotide
  Antisense strand to SEQ ID NO: 560279
aagagaaacaguaaucugg

SEQ ID NO: 560281 - RNA, 19 nt, Artificial Sequence
  Description of Artificial Sequence: Synthetic oligonucleotide
  Sense strand starting at position 1358 of SEQ ID NO: 318407
guuaccuaacacugaguua

SEQ ID NO: 560282 - RNA, 19 nt, Artificial Sequence
  Description of Artificial Sequence: Synthetic oligonucleotide
  Antisense strand to SEQ ID NO: 560281
uaacucaguguuagguaac

SEQ ID NO: 560283 - RNA, 19 nt, Artificial Sequence
  Description of Artificial Sequence: Synthetic oligonucleotide
  Sense strand starting at position 1381 of SEQ ID NO: 318407
augcguaucacugaaagaa

SEQ ID NO: 560284 - RNA, 19 nt, Artificial Sequence
  Description of Artificial Sequence: Synthetic oligonucleotide
  Antisense strand to SEQ ID NO: 560283
uucuuucagugauacgcau

SEQ ID NO: 560285 - RNA, 19 nt, Artificial Sequence
  Description of Artificial Sequence: Synthetic oligonucleotide
  Sense strand starting at position 1429 of SEQ ID NO: 318407
agguuugacccauaacugu

SEQ ID NO: 560286 - RNA, 19 nt, Artificial Sequence
  Description of Artificial Sequence: Synthetic oligonucleotide
  Antisense strand to SEQ ID NO: 560285
acaguuaugggucaaaccu

SEQ ID NO: 560287 - RNA, 19 nt, Artificial Sequence
  Description of Artificial Sequence: Synthetic oligonucleotide
  Sense strand starting at position 1532 of SEQ ID NO: 318407
gacuaacagugauuaguaa

SEQ ID NO: 560288 - RNA, 19 nt, Artificial Sequence
  Description of Artificial Sequence: Synthetic oligonucleotide
  Antisense strand to SEQ ID NO: 560287
uuacuaaucacuguuaguc

SEQ ID NO: 560289 - RNA, 19 nt, Artificial Sequence
  Description of Artificial Sequence: Synthetic oligonucleotide
  Sense strand starting at position 1569 of SEQ ID NO: 318407
gucuucucucgccaaagga

SEQ ID NO: 560290 - RNA, 19 nt, Artificial Sequence
  Description of Artificial Sequence: Synthetic oligonucleotide
  Antisense strand to SEQ ID NO: 560289
uccuuuggcgagagaagac

SEQ ID NO: 560291 - RNA, 19 nt, Artificial Sequence
  Description of Artificial Sequence: Synthetic oligonucleotide
  Sense strand starting at position 2090 of SEQ ID NO: 318407
gcccaauaacuugauguau

SEQ ID NO: 560292 - RNA, 19 nt, Artificial Sequence
  Description of Artificial Sequence: Synthetic oligonucleotide
  Antisense strand to SEQ ID NO: 560291
auacaucaaguuauugggc

SEQ ID NO: 560293 - RNA, 19 nt, Artificial Sequence
  Description of Artificial Sequence: Synthetic oligonucleotide
  Sense strand starting at position 2332 of SEQ ID NO: 318407
cuuagcacauaguuaugaa

SEQ ID NO: 560294 - RNA, 19 nt, Artificial Sequence
  Description of Artificial Sequence: Synthetic oligonucleotide
  Antisense strand to SEQ ID NO: 560293
uucauaacuaugugcuaag

SEQ ID NO: 560295 - RNA, 19 nt, Artificial Sequence
  Description of Artificial Sequence: Synthetic oligonucleotide
  Sense strand starting at position 2486 of SEQ ID NO: 318407
ucuauauucuggucucaua

SEQ ID NO: 560296 - RNA, 19 nt, Artificial Sequence
  Description of Artificial Sequence: Synthetic oligonucleotide
  Antisense strand to SEQ ID NO: 560295
uaugagaccagaauauaga

SEQ ID NO: 560297 - RNA, 19 nt, Artificial Sequence
  Description of Artificial Sequence: Synthetic oligonucleotide
  Sense strand starting at position 2522 of SEQ ID NO: 318407
agauuagagucagaacaag

SEQ ID NO: 560298 - RNA, 19 nt, Artificial Sequence
  Description of Artificial Sequence: Synthetic oligonucleotide
  Antisense strand to SEQ ID NO: 560297
cuuguucugacucuaaucu

SEQ ID NO: 560299 - RNA, 19 nt, Artificial Sequence
  Description of Artificial Sequence: Synthetic oligonucleotide
  Sense strand starting at position 2634 of SEQ ID NO: 318407
guacaugugcacuaaauuc

SEQ ID NO: 560300 - RNA, 19 nt, Artificial Sequence
  Description of Artificial Sequence: Synthetic oligonucleotide
  Antisense strand to SEQ ID NO: 560299
gaauuuagugcacauguac

SEQ ID NO: 560301 - RNA, 19 nt, Artificial Sequence
  Description of Artificial Sequence: Synthetic oligonucleotide
  Sense strand starting at position 2642 of SEQ ID NO: 318407
gcacuaaauucugcaagaa

SEQ ID NO: 560302 - RNA, 19 nt, Artificial Sequence
  Description of Artificial Sequence: Synthetic oligonucleotide
  Antisense strand to SEQ ID NO: 560301
uucuugcagaauuuagugc

SEQ ID NO: 560303 - RNA, 19 nt, Artificial Sequence
  Description of Artificial Sequence: Synthetic oligonucleotide
  Sense strand starting at position 2708 of SEQ ID NO: 318407
ccaugaguaucaguuaaag

SEQ ID NO: 560304 - RNA, 19 nt, Artificial Sequence
  Description of Artificial Sequence: Synthetic oligonucleotide
  Antisense strand to SEQ ID NO: 560303
cuuuaacugauacucaugg

SEQ ID NO: 560305 - RNA, 19 nt, Artificial Sequence
  Description of Artificial Sequence: Synthetic oligonucleotide
  Sense strand starting at position 2729 of SEQ ID NO: 318407
cuaucauagcuggacucau

SEQ ID NO: 560306 - RNA, 19 nt, Artificial Sequence
  Description of Artificial Sequence: Synthetic oligonucleotide
  Antisense strand to SEQ ID NO: 560305
augaguccagcuaugauag

SEQ ID NO: 560307 - RNA, 19 nt, Artificial Sequence
  Description of Artificial Sequence: Synthetic oligonucleotide
  Sense strand starting at position 2955 of SEQ ID NO: 318407
uuaccauaguuguuuacau

SEQ ID NO: 560308 - RNA, 19 nt, Artificial Sequence
  Description of Artificial Sequence: Synthetic oligonucleotide
  Antisense strand to SEQ ID NO: 560307
auguaaacaacuaugguaa

SEQ ID NO: 560309 - RNA, 19 nt, Artificial Sequence
  Description of Artificial Sequence: Synthetic oligonucleotide
  Sense strand starting at position 2978 of SEQ ID NO: 318407
uugcuuccuggucauauua

SEQ ID NO: 560310 - RNA, 19 nt, Artificial Sequence
  Description of Artificial Sequence: Synthetic oligonucleotide
  Antisense strand to SEQ ID NO: 560309
uaauaugaccaggaagcaa

SEQ ID NO: 560311 - RNA, 19 nt, Artificial Sequence
  Description of Artificial Sequence: Synthetic oligonucleotide
  Sense strand starting at position 3094 of SEQ ID NO: 318407
acaauaugcuagguagaau

SEQ ID NO: 560312 - RNA, 19 nt, Artificial Sequence
  Description of Artificial Sequence: Synthetic oligonucleotide
  Antisense strand to SEQ ID NO: 560311
auucuaccuagcauauugu

SEQ ID NO: 560313 - RNA, 19 nt, Artificial Sequence
  Description of Artificial Sequence: Synthetic oligonucleotide
  Sense strand starting at position 3155 of SEQ ID NO: 318407
ccaguauaacuuggugacu

SEQ ID NO: 560314 - RNA, 19 nt, Artificial Sequence
  Description of Artificial Sequence: Synthetic oligonucleotide
  Antisense strand to SEQ ID NO: 560313
agucaccaaguuauacugg

SEQ ID NO: 560315 - RNA, 19 nt, Artificial Sequence
  Description of Artificial Sequence: Synthetic oligonucleotide
  Sense strand starting at position 3406 of SEQ ID NO: 318407
gguggauaaguugaucuca

SEQ ID NO: 560316 - RNA, 19 nt, Artificial Sequence
  Description of Artificial Sequence: Synthetic oligonucleotide
  Antisense strand to SEQ ID NO: 560315
ugagaucaacuuauccacc

SEQ ID NO: 560317 - RNA, 19 nt, Artificial Sequence
  Description of Artificial Sequence: Synthetic oligonucleotide
  Sense strand starting at position 3408 of SEQ ID NO: 318407
uggauaaguugaucucagu

SEQ ID NO: 560318 - RNA, 19 nt, Artificial Sequence
  Description of Artificial Sequence: Synthetic oligonucleotide
  Antisense strand to SEQ ID NO: 560317
acugagaucaacuuaucca

SEQ ID NO: 560319 - RNA, 19 nt, Artificial Sequence
  Description of Artificial Sequence: Synthetic oligonucleotide
  Sense strand starting at position 3443 of SEQ ID NO: 318407
uggcaaauaucucuugguu

SEQ ID NO: 560320 - RNA, 19 nt, Artificial Sequence
  Description of Artificial Sequence: Synthetic oligonucleotide
  Antisense strand to SEQ ID NO: 560319
aaccaagagauauuugcca

SEQ ID NO: 560321 - RNA, 19 nt, Artificial Sequence
  Description of Artificial Sequence: Synthetic oligonucleotide
  Sense strand starting at position 3498 of SEQ ID NO: 318407
cucaaauauuucgauaaug

SEQ ID NO: 560322 - RNA, 19 nt, Artificial Sequence
  Description of Artificial Sequence: Synthetic oligonucleotide
  Antisense strand to SEQ ID NO: 560321
cauuaucgaaauauuugag

SEQ ID NO: 560323 - RNA, 19 nt, Artificial Sequence
  Description of Artificial Sequence: Synthetic oligonucleotide
  Sense strand starting at position 3585 of SEQ ID NO: 318407
aguugcuauuagucuauaa

SEQ ID NO: 560324 - RNA, 19 nt, Artificial Sequence
  Description of Artificial Sequence: Synthetic oligonucleotide
  Antisense strand to SEQ ID NO: 560323
uuauagacuaauagcaacu

SEQ ID NO: 560325 - RNA, 19 nt, Artificial Sequence
  Description of Artificial Sequence: Synthetic oligonucleotide
  Sense strand starting at position 3624 of SEQ ID NO: 318407
ccuguaacccuguaaagac

SEQ ID NO: 560326 - RNA, 19 nt, Artificial Sequence
  Description of Artificial Sequence: Synthetic oligonucleotide
  Antisense strand to SEQ ID NO: 560325
gucuuuacaggguuacagg

SEQ ID NO: 560327 - RNA, 19 nt, Artificial Sequence
  Description of Artificial Sequence: Synthetic oligonucleotide
  Sense strand starting at position 3888 of SEQ ID NO: 318407
uuuagucuaguaggaagau

SEQ ID NO: 560328 - RNA, 19 nt, Artificial Sequence
  Description of Artificial Sequence: Synthetic oligonucleotide
  Antisense strand to SEQ ID NO: 560327
aucuuccuacuagacuaaa

SEQ ID NO: 560329 - RNA, 19 nt, Artificial Sequence
  Description of Artificial Sequence: Synthetic oligonucleotide
  Sense strand starting at position 3897 of SEQ ID NO: 318407
guaggaagauagccaaaua

SEQ ID NO: 560330 - RNA, 19 nt, Artificial Sequence
  Description of Artificial Sequence: Synthetic oligonucleotide
  Antisense strand to SEQ ID NO: 560329
uauuuggcuaucuuccuac

SEQ ID NO: 560331 - RNA, 19 nt, Artificial Sequence
  Description of Artificial Sequence: Synthetic oligonucleotide
  Sense strand starting at position 3982 of SEQ ID NO: 318407
guaauaaaugucuaucuac

SEQ ID NO: 560332 - RNA, 19 nt, Artificial Sequence
  Description of Artificial Sequence: Synthetic oligonucleotide
  Antisense strand to SEQ ID NO: 560331
guagauagacauuuauuac

SEQ ID NO: 560333 - RNA, 19 nt, Artificial Sequence
  Description of Artificial Sequence: Synthetic oligonucleotide
  Sense strand starting at position 101 of SEQ ID NO: 318408
uuuguucaggcuugggaga

SEQ ID NO: 560334 - RNA, 19 nt, Artificial Sequence
  Description of Artificial Sequence: Synthetic oligonucleotide
  Antisense strand to SEQ ID NO: 560333
ucucccaagccugaacaaa

SEQ ID NO: 560335 - RNA, 19 nt, Artificial Sequence
  Description of Artificial Sequence: Synthetic oligonucleotide
  Sense strand starting at position 199 of SEQ ID NO: 318408
cgucaaacucaugaaccua

SEQ ID NO: 560336 - RNA, 19 nt, Artificial Sequence
  Description of Artificial Sequence: Synthetic oligonucleotide
  Antisense strand to SEQ ID NO: 560335
uagguucaugaguuugacg

SEQ ID NO: 560337 - RNA, 19 nt, Artificial Sequence
  Description of Artificial Sequence: Synthetic oligonucleotide
  Sense strand starting at position 234 of SEQ ID NO: 318408
agaaacaaaucaggauaau

SEQ ID NO: 560338 - RNA, 19 nt, Artificial Sequence
  Description of Artificial Sequence: Synthetic oligonucleotide
  Antisense strand to SEQ ID NO: 560337
auuauccugauuuguuucu

SEQ ID NO: 560339 - RNA, 19 nt, Artificial Sequence
  Description of Artificial Sequence: Synthetic oligonucleotide
  Sense strand starting at position 246 of SEQ ID NO: 318408
ggauaauaguucuccauua

SEQ ID NO: 560340 - RNA, 19 nt, Artificial Sequence
  Description of Artificial Sequence: Synthetic oligonucleotide
  Antisense strand to SEQ ID NO: 560339
uaauggagaacuauuaucc

SEQ ID NO: 560341 - RNA, 19 nt, Artificial Sequence
  Description of Artificial Sequence: Synthetic oligonucleotide
  Sense strand starting at position 503 of SEQ ID NO: 318408
aguuuaguguuacuaagug

SEQ ID NO: 560342 - RNA, 19 nt, Artificial Sequence
  Description of Artificial Sequence: Synthetic oligonucleotide
  Antisense strand to SEQ ID NO: 560341
cacuuaguaacacuaaacu

SEQ ID NO: 560343 - RNA, 19 nt, Artificial Sequence
  Description of Artificial Sequence: Synthetic oligonucleotide
  Sense strand starting at position 507 of SEQ ID NO: 318408
uaguguuacuaaguggacu

SEQ ID NO: 560344 - RNA, 19 nt, Artificial Sequence
  Description of Artificial Sequence: Synthetic oligonucleotide
  Antisense strand to SEQ ID NO: 560343
aguccacuuaguaacacua

SEQ ID NO: 560345 - RNA, 19 nt, Artificial Sequence
  Description of Artificial Sequence: Synthetic oligonucleotide
  Sense strand starting at position 508 of SEQ ID NO: 318408
aguguuacuaaguggacua

SEQ ID NO: 560346 - RNA, 19 nt, Artificial Sequence
  Description of Artificial Sequence: Synthetic oligonucleotide
  Antisense strand to SEQ ID NO: 560345
uaguccacuuaguaacacu

SEQ ID NO: 560347 - RNA, 19 nt, Artificial Sequence
  Description of Artificial Sequence: Synthetic oligonucleotide
  Sense strand starting at position 543 of SEQ ID NO: 318408
guguaugugagacauuauu

SEQ ID NO: 560348 - RNA, 19 nt, Artificial Sequence
  Description of Artificial Sequence: Synthetic oligonucleotide
  Antisense strand to SEQ ID NO: 560347
aauaaugucucacauacac

SEQ ID NO: 560349 - RNA, 19 nt, Artificial Sequence
  Description of Artificial Sequence: Synthetic oligonucleotide
  Sense strand starting at position 572 of SEQ ID NO: 318408
gcacaaugucuggaauaca

SEQ ID NO: 560350 - RNA, 19 nt, Artificial Sequence
  Description of Artificial Sequence: Synthetic oligonucleotide
  Antisense strand to SEQ ID NO: 560349
uguauuccagacauugugc

SEQ ID NO: 560351 - RNA, 19 nt, Artificial Sequence
  Description of Artificial Sequence: Synthetic oligonucleotide
  Sense strand starting at position 590 of SEQ ID NO: 318408
aaucucagucgacaguuau

SEQ ID NO: 560352 - RNA, 19 nt, Artificial Sequence
  Description of Artificial Sequence: Synthetic oligonucleotide
  Antisense strand to SEQ ID NO: 560351
auaacugucgacugagauu

SEQ ID NO: 560353 - RNA, 19 nt, Artificial Sequence
  Description of Artificial Sequence: Synthetic oligonucleotide
  Sense strand starting at position 729 of SEQ ID NO: 318408
guguguuaagcuuagagaa

SEQ ID NO: 560354 - RNA, 19 nt, Artificial Sequence
  Description of Artificial Sequence: Synthetic oligonucleotide
  Antisense strand to SEQ ID NO: 560353
uucucuaagcuuaacacac

SEQ ID NO: 560355 - RNA, 19 nt, Artificial Sequence
  Description of Artificial Sequence: Synthetic oligonucleotide
  Sense strand starting at position 741 of SEQ ID NO: 318408
uagagaaggcuuugaguca

SEQ ID NO: 560356 - RNA, 19 nt, Artificial Sequence
  Description of Artificial Sequence: Synthetic oligonucleotide
  Antisense strand to SEQ ID NO: 560355
ugacucaaagccuucucua

SEQ ID NO: 560357 - RNA, 19 nt, Artificial Sequence
  Description of Artificial Sequence: Synthetic oligonucleotide
  Sense strand starting at position 748 of SEQ ID NO: 318408
ggcuuugagucagcauaua

SEQ ID NO: 560358 - RNA, 19 nt, Artificial Sequence
  Description of Artificial Sequence: Synthetic oligonucleotide
  Antisense strand to SEQ ID NO: 560357
uauaugcugacucaaagcc

SEQ ID NO: 560359 - RNA, 19 nt, Artificial Sequence
  Description of Artificial Sequence: Synthetic oligonucleotide
  Sense strand starting at position 962 of SEQ ID NO: 318408
agaagaucgcuuggugagu

SEQ ID NO: 560360 - RNA, 19 nt, Artificial Sequence
  Description of Artificial Sequence: Synthetic oligonucleotide
  Antisense strand to SEQ ID NO: 560359
acucaccaagcgaucuucu

SEQ ID NO: 560361 - RNA, 19 nt, Artificial Sequence
  Description of Artificial Sequence: Synthetic oligonucleotide
  Sense strand starting at position 999 of SEQ ID NO: 318408
ggguacuaaagcuguguga

SEQ ID NO: 560362 - RNA, 19 nt, Artificial Sequence
  Description of Artificial Sequence: Synthetic oligonucleotide
  Antisense strand to SEQ ID NO: 560361
ucacacagcuuuaguaccc

SEQ ID NO: 560363 - RNA, 19 nt, Artificial Sequence
  Description of Artificial Sequence: Synthetic oligonucleotide
  Sense strand starting at position 1003 of SEQ ID NO: 318408
acuaaagcugugugaccuu

SEQ ID NO: 560364 - RNA, 19 nt, Artificial Sequence
  Description of Artificial Sequence: Synthetic oligonucleotide
  Antisense strand to SEQ ID NO: 560363
aaggucacacagcuuuagu

SEQ ID NO: 560365 - RNA, 19 nt, Artificial Sequence
  Description of Artificial Sequence: Synthetic oligonucleotide
  Sense strand starting at position 1010 of SEQ ID NO: 318408
cugugugaccuuuagguau

SEQ ID NO: 560366 - RNA, 19 nt, Artificial Sequence
  Description of Artificial Sequence: Synthetic oligonucleotide
  Antisense strand to SEQ ID NO: 560365
auaccuaaaggucacacag

SEQ ID NO: 560367 - RNA, 19 nt, Artificial Sequence
  Description of Artificial Sequence: Synthetic oligonucleotide
  Sense strand starting at position 2094 of SEQ ID NO: 318408
cggacuaaucccugagcac

SEQ ID NO: 560368 - RNA, 19 nt, Artificial Sequence
  Description of Artificial Sequence: Synthetic oligonucleotide
  Antisense strand to SEQ ID NO: 560367
gugcucagggauuaguccg

SEQ ID NO: 560369 - RNA, 19 nt, Artificial Sequence
  Description of Artificial Sequence: Synthetic oligonucleotide
  Sense strand starting at position 2095 of SEQ ID NO: 318408
ggacuaaucccugagcacu

SEQ ID NO: 560370 - RNA, 19 nt, Artificial Sequence
  Description of Artificial Sequence: Synthetic oligonucleotide
  Antisense strand to SEQ ID NO: 560369
agugcucagggauuagucc

SEQ ID NO: 560371 - RNA, 19 nt, Artificial Sequence
  Description of Artificial Sequence: Synthetic oligonucleotide
  Sense strand starting at position 2293 of SEQ ID NO: 318408
gggugcugcggcucuguaa

SEQ ID NO: 560372 - RNA, 19 nt, Artificial Sequence
  Description of Artificial Sequence: Synthetic oligonucleotide
  Antisense strand to SEQ ID NO: 560371
uuacagagccgcagcaccc

SEQ ID NO: 560373 - RNA, 19 nt, Artificial Sequence
  Description of Artificial Sequence: Synthetic oligonucleotide
  Sense strand starting at position 2294 of SEQ ID NO: 318408
ggugcugcggcucuguaau

SEQ ID NO: 560374 - RNA, 19 nt, Artificial Sequence
  Description of Artificial Sequence: Synthetic oligonucleotide
  Antisense strand to SEQ ID NO: 560373
auuacagagccgcagcacc

SEQ ID NO: 560375 - RNA, 19 nt, Artificial Sequence
  Description of Artificial Sequence: Synthetic oligonucleotide
  Sense strand starting at position 2304 of SEQ ID NO: 318408
cucuguaaucguguggguu

SEQ ID NO: 560376 - RNA, 19 nt, Artificial Sequence
  Description of Artificial Sequence: Synthetic oligonucleotide
  Antisense strand to SEQ ID NO: 560375
aacccacacgauuacagag

SEQ ID NO: 560377 - RNA, 19 nt, Artificial Sequence
  Description of Artificial Sequence: Synthetic oligonucleotide
  Sense strand starting at position 2352 of SEQ ID NO: 318408
gcgaguggccgcuuggauu

SEQ ID NO: 560378 - RNA, 19 nt, Artificial Sequence
  Description of Artificial Sequence: Synthetic oligonucleotide
  Antisense strand to SEQ ID NO: 560377
aauccaagcggccacucgc

SEQ ID NO: 560379 - RNA, 19 nt, Artificial Sequence
  Description of Artificial Sequence: Synthetic oligonucleotide
  Sense strand starting at position 2391 of SEQ ID NO: 318408
gcggcuggcaccuuguaau

SEQ ID NO: 560380 - RNA, 19 nt, Artificial Sequence
  Description of Artificial Sequence: Synthetic oligonucleotide
  Antisense strand to SEQ ID NO: 560379
auuacaaggugccagccgc

SEQ ID NO: 560381 - RNA, 19 nt, Artificial Sequence
  Description of Artificial Sequence: Synthetic oligonucleotide
  Sense strand starting at position 2613 of SEQ ID NO: 318408
guuuaauucucucugggaa

SEQ ID NO: 560382 - RNA, 19 nt, Artificial Sequence
  Description of Artificial Sequence: Synthetic oligonucleotide
  Antisense strand to SEQ ID NO: 560381
uucccagagagaauuaaac

SEQ ID NO: 560383 - RNA, 19 nt, Artificial Sequence
  Description of Artificial Sequence: Synthetic oligonucleotide
  Sense strand starting at position 2726 of SEQ ID NO: 318408
gugagaagcagcugugaua

SEQ ID NO: 560384 - RNA, 19 nt, Artificial Sequence
  Description of Artificial Sequence: Synthetic oligonucleotide
  Antisense strand to SEQ ID NO: 560383
uaucacagcugcuucucac

SEQ ID NO: 560385 - RNA, 19 nt, Artificial Sequence
  Description of Artificial Sequence: Synthetic oligonucleotide
  Sense strand starting at position 2762 of SEQ ID NO: 318408
gcucguauacccuaggauu

SEQ ID NO: 560386 - RNA, 19 nt, Artificial Sequence
  Description of Artificial Sequence: Synthetic oligonucleotide
  Antisense strand to SEQ ID NO: 560385
aauccuaggguauacgagc

SEQ ID NO: 560387 - RNA, 19 nt, Artificial Sequence
  Description of Artificial Sequence: Synthetic oligonucleotide
  Sense strand starting at position 2780 of SEQ ID NO: 318408
uggaccucugucugguuau

SEQ ID NO: 560388 - RNA, 19 nt, Artificial Sequence
  Description of Artificial Sequence: Synthetic oligonucleotide
  Antisense strand to SEQ ID NO: 560387
auaaccagacagaggucca

SEQ ID NO: 560389 - RNA, 19 nt, Artificial Sequence
  Description of Artificial Sequence: Synthetic oligonucleotide
  Sense strand starting at position 2783 of SEQ ID NO: 318408
accucugucugguuaugaa

SEQ ID NO: 560390 - RNA, 19 nt, Artificial Sequence
  Description of Artificial Sequence: Synthetic oligonucleotide
  Antisense strand to SEQ ID NO: 560389
uucauaaccagacagaggu

SEQ ID NO: 560391 - RNA, 19 nt, Artificial Sequence
  Description of Artificial Sequence: Synthetic oligonucleotide
  Sense strand starting at position 2793 of SEQ ID NO: 318408
gguuaugaaucgcuuugga

SEQ ID NO: 560392 - RNA, 19 nt, Artificial Sequence
  Description of Artificial Sequence: Synthetic oligonucleotide
  Antisense strand to SEQ ID NO: 560391
uccaaagcgauucauaacc

SEQ ID NO: 560393 - RNA, 19 nt, Artificial Sequence
  Description of Artificial Sequence: Synthetic oligonucleotide
  Sense strand starting at position 2802 of SEQ ID NO: 318408
ucgcuuuggaguuugcgaa

SEQ ID NO: 560394 - RNA, 19 nt, Artificial Sequence
  Description of Artificial Sequence: Synthetic oligonucleotide
  Antisense strand to SEQ ID NO: 560393
uucgcaaacuccaaagcga

SEQ ID NO: 560395 - RNA, 19 nt, Artificial Sequence
  Description of Artificial Sequence: Synthetic oligonucleotide
  Sense strand starting at position 2939 of SEQ ID NO: 318408
guauucucccaacaguacu

SEQ ID NO: 560396 - RNA, 19 nt, Artificial Sequence
  Description of Artificial Sequence: Synthetic oligonucleotide
  Antisense strand to SEQ ID NO: 560395
aguacuguugggagaauac

SEQ ID NO: 560397 - RNA, 19 nt, Artificial Sequence
  Description of Artificial Sequence: Synthetic oligonucleotide
  Sense strand starting at position 2949 of SEQ ID NO: 318408
aacaguacuggcugaagau

SEQ ID NO: 560398 - RNA, 19 nt, Artificial Sequence
  Description of Artificial Sequence: Synthetic oligonucleotide
  Antisense strand to SEQ ID NO: 560397
aucuucagccaguacuguu

SEQ ID NO: 560399 - RNA, 19 nt, Artificial Sequence
  Description of Artificial Sequence: Synthetic oligonucleotide
  Sense strand starting at position 3148 of SEQ ID NO: 318408
ggaggagacugcucacucu

SEQ ID NO: 560400 - RNA, 19 nt, Artificial Sequence
  Description of Artificial Sequence: Synthetic oligonucleotide
  Antisense strand to SEQ ID NO: 560399
agagugagcagucuccucc

SEQ ID NO: 560401 - RNA, 19 nt, Artificial Sequence
  Description of Artificial Sequence: Synthetic oligonucleotide
  Sense strand starting at position 3336 of SEQ ID NO: 318408
ucccauuagugugcacaaa

SEQ ID NO: 560402 - RNA, 19 nt, Artificial Sequence
  Description of Artificial Sequence: Synthetic oligonucleotide
  Antisense strand to SEQ ID NO: 560401
uuugugcacacuaauggga

SEQ ID NO: 560403 - RNA, 19 nt, Artificial Sequence
  Description of Artificial Sequence: Synthetic oligonucleotide
  Sense strand starting at position 3525 of SEQ ID NO: 318408
cuuagugcccgugauuaua

SEQ ID NO: 560404 - RNA, 19 nt, Artificial Sequence
  Description of Artificial Sequence: Synthetic oligonucleotide
  Antisense strand to SEQ ID NO: 560403
uauaaucacgggcacuaag

SEQ ID NO: 560405 - RNA, 19 nt, Artificial Sequence
  Description of Artificial Sequence: Synthetic oligonucleotide
  Sense strand starting at position 3587 of SEQ ID NO: 318408
ccaugaaccugugugagaa

SEQ ID NO: 560406 - RNA, 19 nt, Artificial Sequence
  Description of Artificial Sequence: Synthetic oligonucleotide
  Antisense strand to SEQ ID NO: 560405
uucucacacagguucaugg

SEQ ID NO: 560407 - RNA, 19 nt, Artificial Sequence
  Description of Artificial Sequence: Synthetic oligonucleotide
  Sense strand starting at position 3595 of SEQ ID NO: 318408
cugugugagaacugucuga

SEQ ID NO: 560408 - RNA, 19 nt, Artificial Sequence
  Description of Artificial Sequence: Synthetic oligonucleotide
  Antisense strand to SEQ ID NO: 560407
ucagacaguucucacacag

SEQ ID NO: 560409 - RNA, 19 nt, Artificial Sequence
  Description of Artificial Sequence: Synthetic oligonucleotide
  Sense strand starting at position 3659 of SEQ ID NO: 318408
cuaagauaguggucaggau

SEQ ID NO: 560410 - RNA, 19 nt, Artificial Sequence
  Description of Artificial Sequence: Synthetic oligonucleotide
  Antisense strand to SEQ ID NO: 560409
auccugaccacuaucuuag

SEQ ID NO: 560411 - RNA, 19 nt, Artificial Sequence
  Description of Artificial Sequence: Synthetic oligonucleotide
  Sense strand starting at position 3730 of SEQ ID NO: 318408
ccuuccaaggucugacaua

SEQ ID NO: 560412 - RNA, 19 nt, Artificial Sequence
  Description of Artificial Sequence: Synthetic oligonucleotide
  Antisense strand to SEQ ID NO: 560411
uaugucagaccuuggaagg

SEQ ID NO: 560413 - RNA, 19 nt, Artificial Sequence
  Description of Artificial Sequence: Synthetic oligonucleotide
  Sense strand starting at position 144 of SEQ ID NO: 318409
gugaauagugguuaccaga

SEQ ID NO: 560414 - RNA, 19 nt, Artificial Sequence
  Description of Artificial Sequence: Synthetic oligonucleotide
  Antisense strand to SEQ ID NO: 560413
ucugguaaccacuauucac

SEQ ID NO: 560415 - RNA, 19 nt, Artificial Sequence
  Description of Artificial Sequence: Synthetic oligonucleotide
  Sense strand starting at position 357 of SEQ ID NO: 318409
uggauaugcuaaucaucuu

SEQ ID NO: 560416 - RNA, 19 nt, Artificial Sequence
  Description of Artificial Sequence: Synthetic oligonucleotide
  Antisense strand to SEQ ID NO: 560415
aagaugauuagcauaucca

SEQ ID NO: 560417 - RNA, 19 nt, Artificial Sequence
  Description of Artificial Sequence: Synthetic oligonucleotide
  Sense strand starting at position 365 of SEQ ID NO: 318409
cuaaucaucuugguuugau

SEQ ID NO: 560418 - RNA, 19 nt, Artificial Sequence
  Description of Artificial Sequence: Synthetic oligonucleotide
  Antisense strand to SEQ ID NO: 560417
aucaaaccaagaugauuag

SEQ ID NO: 560419 - RNA, 19 nt, Artificial Sequence
  Description of Artificial Sequence: Synthetic oligonucleotide
  Sense strand starting at position 536 of SEQ ID NO: 318409
uuggucacccacuauuaga

SEQ ID NO: 560420 - RNA, 19 nt, Artificial Sequence
  Description of Artificial Sequence: Synthetic oligonucleotide
  Antisense strand to SEQ ID NO: 560419
ucuaauagugggugaccaa

SEQ ID NO: 560421 - RNA, 19 nt, Artificial Sequence
  Description of Artificial Sequence: Synthetic oligonucleotide
  Sense strand starting at position 612 of SEQ ID NO: 318409
agauuaaucuuugcuugaa

SEQ ID NO: 560422 - RNA, 19 nt, Artificial Sequence
  Description of Artificial Sequence: Synthetic oligonucleotide
  Antisense strand to SEQ ID NO: 560421
uucaagcaaagauuaaucu

SEQ ID NO: 560423 - RNA, 19 nt, Artificial Sequence
  Description of Artificial Sequence: Synthetic oligonucleotide
  Sense strand starting at position 657 of SEQ ID NO: 318409
ugcagaaugaccugaaguu

SEQ ID NO: 560424 - RNA, 19 nt, Artificial Sequence
  Description of Artificial Sequence: Synthetic oligonucleotide
  Antisense strand to SEQ ID NO: 560423
aacuucaggucauucugca

SEQ ID NO: 560425 - RNA, 19 nt, Artificial Sequence
  Description of Artificial Sequence: Synthetic oligonucleotide
  Sense strand starting at position 658 of SEQ ID NO: 318409
gcagaaugaccugaaguuc

SEQ ID NO: 560426 - RNA, 19 nt, Artificial Sequence
  Description of Artificial Sequence: Synthetic oligonucleotide
  Antisense strand to SEQ ID NO: 560425
gaacuucaggucauucugc

SEQ ID NO: 560427 - RNA, 19 nt, Artificial Sequence
  Description of Artificial Sequence: Synthetic oligonucleotide
  Sense strand starting at position 1037 of SEQ ID NO: 318409
gguaaagggcccuggaaua

SEQ ID NO: 560428 - RNA, 19 nt, Artificial Sequence
  Description of Artificial Sequence: Synthetic oligonucleotide
  Antisense strand to SEQ ID NO: 560427
uauuccagggcccuuuacc

SEQ ID NO: 560429 - RNA, 19 nt, Artificial Sequence
  Description of Artificial Sequence: Synthetic oligonucleotide
  Sense strand starting at position 1079 of SEQ ID NO: 318409
aggcaauuauaugcuaaga

SEQ ID NO: 560430 - RNA, 19 nt, Artificial Sequence
  Description of Artificial Sequence: Synthetic oligonucleotide
  Antisense strand to SEQ ID NO: 560429
ucuuagcauauaauugccu

SEQ ID NO: 560431 - RNA, 19 nt, Artificial Sequence
  Description of Artificial Sequence: Synthetic oligonucleotide
  Sense strand starting at position 1087 of SEQ ID NO: 318409
auaugcuaagauugggauu

SEQ ID NO: 560432 - RNA, 19 nt, Artificial Sequence
  Description of Artificial Sequence: Synthetic oligonucleotide
  Antisense strand to SEQ ID NO: 560431
aaucccaaucuuagcauau

SEQ ID NO: 560433 - RNA, 19 nt, Artificial Sequence
  Description of Artificial Sequence: Synthetic oligonucleotide
  Sense strand starting at position 1202 of SEQ ID NO: 318409
gagaauuauggcugaaagu

SEQ ID NO: 560434 - RNA, 19 nt, Artificial Sequence
  Description of Artificial Sequence: Synthetic oligonucleotide
  Antisense strand to SEQ ID NO: 560433
acuuucagccauaauucuc

SEQ ID NO: 560435 - RNA, 19 nt, Artificial Sequence
  Description of Artificial Sequence: Synthetic oligonucleotide
  Sense strand starting at position 1252 of SEQ ID NO: 318409
gcugacagaucauccugaa

SEQ ID NO: 560436 - RNA, 19 nt, Artificial Sequence
  Description of Artificial Sequence: Synthetic oligonucleotide
  Antisense strand to SEQ ID NO: 560435
uucaggaugaucugucagc

SEQ ID NO: 560437 - RNA, 19 nt, Artificial Sequence
  Description of Artificial Sequence: Synthetic oligonucleotide
  Sense strand starting at position 1740 of SEQ ID NO: 318409
guaucaucucgucagagaa

SEQ ID NO: 560438 - RNA, 19 nt, Artificial Sequence
  Description of Artificial Sequence: Synthetic oligonucleotide
  Antisense strand to SEQ ID NO: 560437
uucucugacgagaugauac

SEQ ID NO: 560439 - RNA, 19 nt, Artificial Sequence
  Description of Artificial Sequence: Synthetic oligonucleotide
  Sense strand starting at position 1854 of SEQ ID NO: 318409
ccaguuugaacuggagcaa

SEQ ID NO: 560440 - RNA, 19 nt, Artificial Sequence
  Description of Artificial Sequence: Synthetic oligonucleotide
  Antisense strand to SEQ ID NO: 560439
uugcuccaguucaaacugg

SEQ ID NO: 560441 - RNA, 19 nt, Artificial Sequence
  Description of Artificial Sequence: Synthetic oligonucleotide
  Sense strand starting at position 2110 of SEQ ID NO: 318409
gucagauacccagagcacu

SEQ ID NO: 560442 - RNA, 19 nt, Artificial Sequence
  Description of Artificial Sequence: Synthetic oligonucleotide
  Antisense strand to SEQ ID NO: 560441
agugcucuggguaucugac

SEQ ID NO: 560443 - RNA, 19 nt, Artificial Sequence
  Description of Artificial Sequence: Synthetic oligonucleotide
  Sense strand starting at position 2244 of SEQ ID NO: 318409
gggagucaguuucugacaa

SEQ ID NO: 560444 - RNA, 19 nt, Artificial Sequence
  Description of Artificial Sequence: Synthetic oligonucleotide
  Antisense strand to SEQ ID NO: 560443
uugucagaaacugacuccc

SEQ ID NO: 560445 - RNA, 19 nt, Artificial Sequence
  Description of Artificial Sequence: Synthetic oligonucleotide
  Sense strand starting at position 2324 of SEQ ID NO: 318409
cuaaauguucuggguaaua

SEQ ID NO: 560446 - RNA, 19 nt, Artificial Sequence
  Description of Artificial Sequence: Synthetic oligonucleotide
  Antisense strand to SEQ ID NO: 560445
uauuacccagaacauuuag

SEQ ID NO: 560447 - RNA, 19 nt, Artificial Sequence
  Description of Artificial Sequence: Synthetic oligonucleotide
  Sense strand starting at position 2326 of SEQ ID NO: 318409
aaauguucuggguaauagu

SEQ ID NO: 560448 - RNA, 19 nt, Artificial Sequence
  Description of Artificial Sequence: Synthetic oligonucleotide
  Antisense strand to SEQ ID NO: 560447
acuauuacccagaacauuu

SEQ ID NO: 560449 - RNA, 19 nt, Artificial Sequence
  Description of Artificial Sequence: Synthetic oligonucleotide
  Sense strand starting at position 2559 of SEQ ID NO: 318409
gggagaugguaugaauuua

SEQ ID NO: 560450 - RNA, 19 nt, Artificial Sequence
  Description of Artificial Sequence: Synthetic oligonucleotide
  Antisense strand to SEQ ID NO: 560449
uaaauucauaccaucuccc

SEQ ID NO: 560451 - RNA, 19 nt, Artificial Sequence
  Description of Artificial Sequence: Synthetic oligonucleotide
  Sense strand starting at position 2645 of SEQ ID NO: 318409
cagggaucugaguagucau

SEQ ID NO: 560452 - RNA, 19 nt, Artificial Sequence
  Description of Artificial Sequence: Synthetic oligonucleotide
  Antisense strand to SEQ ID NO: 560451
augacuacucagaucccug

SEQ ID NO: 560453 - RNA, 19 nt, Artificial Sequence
  Description of Artificial Sequence: Synthetic oligonucleotide
  Sense strand starting at position 2773 of SEQ ID NO: 318409
ggguuaucugauggaagua

SEQ ID NO: 560454 - RNA, 19 nt, Artificial Sequence
  Description of Artificial Sequence: Synthetic oligonucleotide
  Antisense strand to SEQ ID NO: 560453
uacuuccaucagauaaccc

SEQ ID NO: 560455 - RNA, 19 nt, Artificial Sequence
  Description of Artificial Sequence: Synthetic oligonucleotide
  Sense strand starting at position 2785 of SEQ ID NO: 318409
ggaaguaguauagagucau

SEQ ID NO: 560456 - RNA, 19 nt, Artificial Sequence
  Description of Artificial Sequence: Synthetic oligonucleotide
  Antisense strand to SEQ ID NO: 560455
augacucuauacuacuucc

SEQ ID NO: 560457 - RNA, 19 nt, Artificial Sequence
  Description of Artificial Sequence: Synthetic oligonucleotide
  Sense strand starting at position 2789 of SEQ ID NO: 318409
guaguauagagucaucauu

SEQ ID NO: 560458 - RNA, 19 nt, Artificial Sequence
  Description of Artificial Sequence: Synthetic oligonucleotide
  Antisense strand to SEQ ID NO: 560457
aaugaugacucuauacuac

SEQ ID NO: 560459 - RNA, 19 nt, Artificial Sequence
  Description of Artificial Sequence: Synthetic oligonucleotide
  Sense strand starting at position 2791 of SEQ ID NO: 318409
aguauagagucaucauuaa

SEQ ID NO: 560460 - RNA, 19 nt, Artificial Sequence
  Description of Artificial Sequence: Synthetic oligonucleotide
  Antisense strand to SEQ ID NO: 560459
uuaaugaugacucuauacu

SEQ ID NO: 560461 - RNA, 19 nt, Artificial Sequence
  Description of Artificial Sequence: Synthetic oligonucleotide
  Sense strand starting at position 2811 of SEQ ID NO: 318409
aguagagacuuugcaauua

SEQ ID NO: 560462 - RNA, 19 nt, Artificial Sequence
  Description of Artificial Sequence: Synthetic oligonucleotide
  Antisense strand to SEQ ID NO: 560461
uaauugcaaagucucuacu

SEQ ID NO: 560463 - RNA, 19 nt, Artificial Sequence
  Description of Artificial Sequence: Synthetic oligonucleotide
  Sense strand starting at position 2846 of SEQ ID NO: 318409
gggcucugacuugggacaa

SEQ ID NO: 560464 - RNA, 19 nt, Artificial Sequence
  Description of Artificial Sequence: Synthetic oligonucleotide
  Antisense strand to SEQ ID NO: 560463
uugucccaagucagagccc

SEQ ID NO: 560465 - RNA, 19 nt, Artificial Sequence
  Description of Artificial Sequence: Synthetic oligonucleotide
  Sense strand starting at position 2935 of SEQ ID NO: 318409
guggauguugaauaugauu

SEQ ID NO: 560466 - RNA, 19 nt, Artificial Sequence
  Description of Artificial Sequence: Synthetic oligonucleotide
  Antisense strand to SEQ ID NO: 560465
aaucauauucaacauccac

SEQ ID NO: 560467 - RNA, 19 nt, Artificial Sequence
  Description of Artificial Sequence: Synthetic oligonucleotide
  Sense strand starting at position 2941 of SEQ ID NO: 318409
guugaauaugauuagcaca

SEQ ID NO: 560468 - RNA, 19 nt, Artificial Sequence
  Description of Artificial Sequence: Synthetic oligonucleotide
  Antisense strand to SEQ ID NO: 560467
ugugcuaaucauauucaac

SEQ ID NO: 560469 - RNA, 19 nt, Artificial Sequence
  Description of Artificial Sequence: Synthetic oligonucleotide
  Sense strand starting at position 2943 of SEQ ID NO: 318409
ugaauaugauuagcacagu

SEQ ID NO: 560470 - RNA, 19 nt, Artificial Sequence
  Description of Artificial Sequence: Synthetic oligonucleotide
  Antisense strand to SEQ ID NO: 560469
acugugcuaaucauauuca

SEQ ID NO: 560471 - RNA, 19 nt, Artificial Sequence
  Description of Artificial Sequence: Synthetic oligonucleotide
  Sense strand starting at position 2946 of SEQ ID NO: 318409
auaugauuagcacagucaa

SEQ ID NO: 560472 - RNA, 19 nt, Artificial Sequence
  Description of Artificial Sequence: Synthetic oligonucleotide
  Antisense strand to SEQ ID NO: 560471
uugacugugcuaaucauau

SEQ ID NO: 560473 - RNA, 19 nt, Artificial Sequence
  Description of Artificial Sequence: Synthetic oligonucleotide
  Sense strand starting at position 2988 of SEQ ID NO: 318409
aguaguaaagauugauucu

SEQ ID NO: 560474 - RNA, 19 nt, Artificial Sequence
  Description of Artificial Sequence: Synthetic oligonucleotide
  Antisense strand to SEQ ID NO: 560473
agaaucaaucuuuacuacu

SEQ ID NO: 560475 - RNA, 19 nt, Artificial Sequence
  Description of Artificial Sequence: Synthetic oligonucleotide
  Sense strand starting at position 3373 of SEQ ID NO: 318409
aucaaugucuccuuugaga

SEQ ID NO: 560476 - RNA, 19 nt, Artificial Sequence
  Description of Artificial Sequence: Synthetic oligonucleotide
  Antisense strand to SEQ ID NO: 560475
ucucaaaggagacauugau

SEQ ID NO: 560477 - RNA, 19 nt, Artificial Sequence
  Description of Artificial Sequence: Synthetic oligonucleotide
  Sense strand starting at position 3375 of SEQ ID NO: 318409
caaugucuccuuugagaug

SEQ ID NO: 560478 - RNA, 19 nt, Artificial Sequence
  Description of Artificial Sequence: Synthetic oligonucleotide
  Antisense strand to SEQ ID NO: 560477
caucucaaaggagacauug

SEQ ID NO: 560479 - RNA, 19 nt, Artificial Sequence
  Description of Artificial Sequence: Synthetic oligonucleotide
  Sense strand starting at position 3446 of SEQ ID NO: 318409
ggccuuuagcagcauuuau

SEQ ID NO: 560480 - RNA, 19 nt, Artificial Sequence
  Description of Artificial Sequence: Synthetic oligonucleotide
  Antisense strand to SEQ ID NO: 560479
auaaaugcugcuaaaggcc

SEQ ID NO: 560481 - RNA, 19 nt, Artificial Sequence
  Description of Artificial Sequence: Synthetic oligonucleotide
  Sense strand starting at position 3523 of SEQ ID NO: 318409
cuuggauuccagcaucaga

SEQ ID NO: 560482 - RNA, 19 nt, Artificial Sequence
  Description of Artificial Sequence: Synthetic oligonucleotide
  Antisense strand to SEQ ID NO: 560481
ucugaugcuggaauccaag

SEQ ID NO: 560483 - RNA, 19 nt, Artificial Sequence
  Description of Artificial Sequence: Synthetic oligonucleotide
  Sense strand starting at position 3610 of SEQ ID NO: 318409
gcuguugagaucugagaca

SEQ ID NO: 560484 - RNA, 19 nt, Artificial Sequence
  Description of Artificial Sequence: Synthetic oligonucleotide
  Antisense strand to SEQ ID NO: 560483
ugucucagaucucaacagc

SEQ ID NO: 560485 - RNA, 19 nt, Artificial Sequence
  Description of Artificial Sequence: Synthetic oligonucleotide
  Sense strand starting at position 3707 of SEQ ID NO: 318409
uaugauucuggauguagau

SEQ ID NO: 560486 - RNA, 19 nt, Artificial Sequence
  Description of Artificial Sequence: Synthetic oligonucleotide
  Antisense strand to SEQ ID NO: 560485
aucuacauccagaaucaua

SEQ ID NO: 560487 - RNA, 19 nt, Artificial Sequence
  Description of Artificial Sequence: Synthetic oligonucleotide
  Sense strand starting at position 3826 of SEQ ID NO: 318409
ugagccuaugucuagauau

SEQ ID NO: 560488 - RNA, 19 nt, Artificial Sequence
  Description of Artificial Sequence: Synthetic oligonucleotide
  Antisense strand to SEQ ID NO: 560487
auaucuagacauaggcuca

SEQ ID NO: 560489 - RNA, 19 nt, Artificial Sequence
  Description of Artificial Sequence: Synthetic oligonucleotide
  Sense strand starting at position 3936 of SEQ ID NO: 318409
aguuacugacuuggugaau

SEQ ID NO: 560490 - RNA, 19 nt, Artificial Sequence
  Description of Artificial Sequence: Synthetic oligonucleotide
  Antisense strand to SEQ ID NO: 560489
auucaccaagucaguaacu

SEQ ID NO: 560491 - RNA, 19 nt, Artificial Sequence
  Description of Artificial Sequence: Synthetic oligonucleotide
  Sense strand starting at position 3961 of SEQ ID NO: 318409
ggaauaaugugaccaauuc

SEQ ID NO: 560492 - RNA, 19 nt, Artificial Sequence
  Description of Artificial Sequence: Synthetic oligonucleotide
  Antisense strand to SEQ ID NO: 560491
gaauuggucacauuauucc

SEQ ID NO: 560493 - RNA, 19 nt, Artificial Sequence
  Description of Artificial Sequence: Synthetic oligonucleotide
  Sense strand starting at position 3 of SEQ ID NO: 318410
uggacauucuuucugucua

SEQ ID NO: 560494 - RNA, 19 nt, Artificial Sequence
  Description of Artificial Sequence: Synthetic oligonucleotide
  Antisense strand to SEQ ID NO: 560493
uagacagaaagaaugucca

SEQ ID NO: 560495 - RNA, 19 nt, Artificial Sequence
  Description of Artificial Sequence: Synthetic oligonucleotide
  Sense strand starting at position 19 of SEQ ID NO: 318410
cuagaacuuccagggaugu

SEQ ID NO: 560496 - RNA, 19 nt, Artificial Sequence
  Description of Artificial Sequence: Synthetic oligonucleotide
  Antisense strand to SEQ ID NO: 560495
acaucccuggaaguucuag

SEQ ID NO: 560497 - RNA, 19 nt, Artificial Sequence
  Description of Artificial Sequence: Synthetic oligonucleotide
  Sense strand starting at position 20 of SEQ ID NO: 318410
uagaacuuccagggauguu

SEQ ID NO: 560498 - RNA, 19 nt, Artificial Sequence
  Description of Artificial Sequence: Synthetic oligonucleotide
  Antisense strand to SEQ ID NO: 560497
aacaucccuggaaguucua

SEQ ID NO: 560499 - RNA, 19 nt, Artificial Sequence
  Description of Artificial Sequence: Synthetic oligonucleotide
  Sense strand starting at position 159 of SEQ ID NO: 318410
acagaaauguuagcaucca

SEQ ID NO: 560500 - RNA, 19 nt, Artificial Sequence
  Description of Artificial Sequence: Synthetic oligonucleotide
  Antisense strand to SEQ ID NO: 560499
uggaugcuaacauuucugu

SEQ ID NO: 560501 - RNA, 19 nt, Artificial Sequence
  Description of Artificial Sequence: Synthetic oligonucleotide
  Sense strand starting at position 167 of SEQ ID NO: 318410
guuagcauccaagaauaau

SEQ ID NO: 560502 - RNA, 19 nt, Artificial Sequence
  Description of Artificial Sequence: Synthetic oligonucleotide
  Antisense strand to SEQ ID NO: 560501
auuauucuuggaugcuaac

SEQ ID NO: 560503 - RNA, 19 nt, Artificial Sequence
  Description of Artificial Sequence: Synthetic oligonucleotide
  Sense strand starting at position 248 of SEQ ID NO: 318410
uggauauuacaaugugaua

SEQ ID NO: 560504 - RNA, 19 nt, Artificial Sequence
  Description of Artificial Sequence: Synthetic oligonucleotide
  Antisense strand to SEQ ID NO: 560503
uaucacauuguaauaucca

SEQ ID NO: 560505 - RNA, 19 nt, Artificial Sequence
  Description of Artificial Sequence: Synthetic oligonucleotide
  Sense strand starting at position 277 of SEQ ID NO: 318410
uuguaugaguggcuaagga

SEQ ID NO: 560506 - RNA, 19 nt, Artificial Sequence
  Description of Artificial Sequence: Synthetic oligonucleotide
  Antisense strand to SEQ ID NO: 560505
uccuuagccacucauacaa

SEQ ID NO: 560507 - RNA, 19 nt, Artificial Sequence
  Description of Artificial Sequence: Synthetic oligonucleotide
  Sense strand starting at position 698 of SEQ ID NO: 318410
gagguucgcccgucugcaa

SEQ ID NO: 560508 - RNA, 19 nt, Artificial Sequence
  Description of Artificial Sequence: Synthetic oligonucleotide
  Antisense strand to SEQ ID NO: 560507
uugcagacgggcgaaccuc

SEQ ID NO: 560509 - RNA, 19 nt, Artificial Sequence
  Description of Artificial Sequence: Synthetic oligonucleotide
  Sense strand starting at position 1211 of SEQ ID NO: 318410
cguuaccuucggucgcaua

SEQ ID NO: 560510 - RNA, 19 nt, Artificial Sequence
  Description of Artificial Sequence: Synthetic oligonucleotide
  Antisense strand to SEQ ID NO: 560509
uaugcgaccgaagguaacg

SEQ ID NO: 560511 - RNA, 19 nt, Artificial Sequence
  Description of Artificial Sequence: Synthetic oligonucleotide
  Sense strand starting at position 1323 of SEQ ID NO: 318410
gcagacaaguauccaugau

SEQ ID NO: 560512 - RNA, 19 nt, Artificial Sequence
  Description of Artificial Sequence: Synthetic oligonucleotide
  Antisense strand to SEQ ID NO: 560511
aucauggauacuugucugc

SEQ ID NO: 560513 - RNA, 19 nt, Artificial Sequence
  Description of Artificial Sequence: Synthetic oligonucleotide
  Sense strand starting at position 2266 of SEQ ID NO: 318410
acgccugaacuugagaaca

SEQ ID NO: 560514 - RNA, 19 nt, Artificial Sequence
  Description of Artificial Sequence: Synthetic oligonucleotide
  Antisense strand to SEQ ID NO: 560513
uguucucaaguucaggcgu

SEQ ID NO: 560515 - RNA, 19 nt, Artificial Sequence
  Description of Artificial Sequence: Synthetic oligonucleotide
  Sense strand starting at position 2291 of SEQ ID NO: 318410
agaaguagguuccuuugga

SEQ ID NO: 560516 - RNA, 19 nt, Artificial Sequence
  Description of Artificial Sequence: Synthetic oligonucleotide
  Antisense strand to SEQ ID NO: 560515
uccaaaggaaccuacuucu

SEQ ID NO: 560517 - RNA, 19 nt, Artificial Sequence
  Description of Artificial Sequence: Synthetic oligonucleotide
  Sense strand starting at position 2292 of SEQ ID NO: 318410
gaaguagguuccuuuggau

SEQ ID NO: 560518 - RNA, 19 nt, Artificial Sequence
  Description of Artificial Sequence: Synthetic oligonucleotide
  Antisense strand to SEQ ID NO: 560517
auccaaaggaaccuacuuc

SEQ ID NO: 560519 - RNA, 19 nt, Artificial Sequence
  Description of Artificial Sequence: Synthetic oligonucleotide
  Sense strand starting at position 2486 of SEQ ID NO: 318410
gggccagaacuuugcaacu

SEQ ID NO: 560520 - RNA, 19 nt, Artificial Sequence
  Description of Artificial Sequence: Synthetic oligonucleotide
  Antisense strand to SEQ ID NO: 560519
aguugcaaaguucuggccc

SEQ ID NO: 560521 - RNA, 19 nt, Artificial Sequence
  Description of Artificial Sequence: Synthetic oligonucleotide
  Sense strand starting at position 2546 of SEQ ID NO: 318410
ggaggcugguguucaauaa

SEQ ID NO: 560522 - RNA, 19 nt, Artificial Sequence
  Description of Artificial Sequence: Synthetic oligonucleotide
  Antisense strand to SEQ ID NO: 560521
uuauugaacaccagccucc

SEQ ID NO: 560523 - RNA, 19 nt, Artificial Sequence
  Description of Artificial Sequence: Synthetic oligonucleotide
  Sense strand starting at position 3123 of SEQ ID NO: 318410
ucaguuaagcuccacaagu

SEQ ID NO: 560524 - RNA, 19 nt, Artificial Sequence
  Description of Artificial Sequence: Synthetic oligonucleotide
  Antisense strand to SEQ ID NO: 560523
acuuguggagcuuaacuga

SEQ ID NO: 560525 - RNA, 19 nt, Artificial Sequence
  Description of Artificial Sequence: Synthetic oligonucleotide
  Sense strand starting at position 3125 of SEQ ID NO: 318410
aguuaagcuccacaaguuu

SEQ ID NO: 560526 - RNA, 19 nt, Artificial Sequence
  Description of Artificial Sequence: Synthetic oligonucleotide
  Antisense strand to SEQ ID NO: 560525
aaacuuguggagcuuaacu

SEQ ID NO: 560527 - RNA, 19 nt, Artificial Sequence
  Description of Artificial Sequence: Synthetic oligonucleotide
  Sense strand starting at position 3133 of SEQ ID NO: 318410
uccacaaguuuagcuagau

SEQ ID NO: 560528 - RNA, 19 nt, Artificial Sequence
  Description of Artificial Sequence: Synthetic oligonucleotide
  Antisense strand to SEQ ID NO: 560527
aucuagcuaaacuugugga

SEQ ID NO: 560529 - RNA, 19 nt, Artificial Sequence
  Description of Artificial Sequence: Synthetic oligonucleotide
  Sense strand starting at position 3134 of SEQ ID NO: 318410
ccacaaguuuagcuagaug

SEQ ID NO: 560530 - RNA, 19 nt, Artificial Sequence
  Description of Artificial Sequence: Synthetic oligonucleotide
  Antisense strand to SEQ ID NO: 560529
caucuagcuaaacuugugg

SEQ ID NO: 560531 - RNA, 19 nt, Artificial Sequence
  Description of Artificial Sequence: Synthetic oligonucleotide
  Sense strand starting at position 3160 of SEQ ID NO: 318410
agggaccuaugaguuaauu

SEQ ID NO: 560532 - RNA, 19 nt, Artificial Sequence
  Description of Artificial Sequence: Synthetic oligonucleotide
  Antisense strand to SEQ ID NO: 560531
aauuaacucauaggucccu

SEQ ID NO: 560533 - RNA, 19 nt, Artificial Sequence
  Description of Artificial Sequence: Synthetic oligonucleotide
  Sense strand starting at position 3251 of SEQ ID NO: 318410
uuaacugagguugggaauu

SEQ ID NO: 560534 - RNA, 19 nt, Artificial Sequence
  Description of Artificial Sequence: Synthetic oligonucleotide
  Antisense strand to SEQ ID NO: 560533
aauucccaaccucaguuaa

SEQ ID NO: 560535 - RNA, 19 nt, Artificial Sequence
  Description of Artificial Sequence: Synthetic oligonucleotide
  Sense strand starting at position 3257 of SEQ ID NO: 318410
gagguugggaauugucauu

SEQ ID NO: 560536 - RNA, 19 nt, Artificial Sequence
  Description of Artificial Sequence: Synthetic oligonucleotide
  Antisense strand to SEQ ID NO: 560535
aaugacaauucccaaccuc

SEQ ID NO: 560537 - RNA, 19 nt, Artificial Sequence
  Description of Artificial Sequence: Synthetic oligonucleotide
  Sense strand starting at position 3262 of SEQ ID NO: 318410
ugggaauugucauuagauu

SEQ ID NO: 560538 - RNA, 19 nt, Artificial Sequence
  Description of Artificial Sequence: Synthetic oligonucleotide
  Antisense strand to SEQ ID NO: 560537
aaucuaaugacaauuccca

SEQ ID NO: 560539 - RNA, 19 nt, Artificial Sequence
  Description of Artificial Sequence: Synthetic oligonucleotide
  Sense strand starting at position 3343 of SEQ ID NO: 318410
acugcauaucccugggaga

SEQ ID NO: 560540 - RNA, 19 nt, Artificial Sequence
  Description of Artificial Sequence: Synthetic oligonucleotide
  Antisense strand to SEQ ID NO: 560539
ucucccagggauaugcagu

SEQ ID NO: 560541 - RNA, 19 nt, Artificial Sequence
  Description of Artificial Sequence: Synthetic oligonucleotide
  Sense strand starting at position 3344 of SEQ ID NO: 318410
cugcauaucccugggagaa

SEQ ID NO: 560542 - RNA, 19 nt, Artificial Sequence
  Description of Artificial Sequence: Synthetic oligonucleotide
  Antisense strand to SEQ ID NO: 560541
uucucccagggauaugcag

SEQ ID NO: 560543 - RNA, 19 nt, Artificial Sequence
  Description of Artificial Sequence: Synthetic oligonucleotide
  Sense strand starting at position 3345 of SEQ ID NO: 318410
ugcauaucccugggagaaa

SEQ ID NO: 560544 - RNA, 19 nt, Artificial Sequence
  Description of Artificial Sequence: Synthetic oligonucleotide
  Antisense strand to SEQ ID NO: 560543
uuucucccagggauaugca

SEQ ID NO: 560545 - RNA, 19 nt, Artificial Sequence
  Description of Artificial Sequence: Synthetic oligonucleotide
  Sense strand starting at position 3367 of SEQ ID NO: 318410
gcagaaauguuccuugaca

SEQ ID NO: 560546 - RNA, 19 nt, Artificial Sequence
  Description of Artificial Sequence: Synthetic oligonucleotide
  Antisense strand to SEQ ID NO: 560545
ugucaaggaacauuucugc

SEQ ID NO: 560547 - RNA, 19 nt, Artificial Sequence
  Description of Artificial Sequence: Synthetic oligonucleotide
  Sense strand starting at position 3369 of SEQ ID NO: 318410
agaaauguuccuugacaua

SEQ ID NO: 560548 - RNA, 19 nt, Artificial Sequence
  Description of Artificial Sequence: Synthetic oligonucleotide
  Antisense strand to SEQ ID NO: 560547
uaugucaaggaacauuucu

SEQ ID NO: 560549 - RNA, 19 nt, Artificial Sequence
  Description of Artificial Sequence: Synthetic oligonucleotide
  Sense strand starting at position 3485 of SEQ ID NO: 318410
ucaucuagugcuuaagacu

SEQ ID NO: 560550 - RNA, 19 nt, Artificial Sequence
  Description of Artificial Sequence: Synthetic oligonucleotide
  Antisense strand to SEQ ID NO: 560549
agucuuaagcacuagauga

SEQ ID NO: 560551 - RNA, 19 nt, Artificial Sequence
  Description of Artificial Sequence: Synthetic oligonucleotide
  Sense strand starting at position 3601 of SEQ ID NO: 318410
cugguucuuccaugggaug

SEQ ID NO: 560552 - RNA, 19 nt, Artificial Sequence
  Description of Artificial Sequence: Synthetic oligonucleotide
  Antisense strand to SEQ ID NO: 560551
caucccauggaagaaccag

SEQ ID NO: 560553 - RNA, 19 nt, Artificial Sequence
  Description of Artificial Sequence: Synthetic oligonucleotide
  Sense strand starting at position 3602 of SEQ ID NO: 318410
ugguucuuccaugggauga

SEQ ID NO: 560554 - RNA, 19 nt, Artificial Sequence
  Description of Artificial Sequence: Synthetic oligonucleotide
  Antisense strand to SEQ ID NO: 560553
ucaucccauggaagaacca

SEQ ID NO: 560555 - RNA, 19 nt, Artificial Sequence
  Description of Artificial Sequence: Synthetic oligonucleotide
  Sense strand starting at position 3603 of SEQ ID NO: 318410
gguucuuccaugggaugag

SEQ ID NO: 560556 - RNA, 19 nt, Artificial Sequence
  Description of Artificial Sequence: Synthetic oligonucleotide
  Antisense strand to SEQ ID NO: 560555
cucaucccauggaagaacc

SEQ ID NO: 560557 - RNA, 19 nt, Artificial Sequence
  Description of Artificial Sequence: Synthetic oligonucleotide
  Sense strand starting at position 3613 of SEQ ID NO: 318410
ugggaugagcuguaucuau

SEQ ID NO: 560558 - RNA, 19 nt, Artificial Sequence
  Description of Artificial Sequence: Synthetic oligonucleotide
  Antisense strand to SEQ ID NO: 560557
auagauacagcucauccca

SEQ ID NO: 560559 - RNA, 19 nt, Artificial Sequence
  Description of Artificial Sequence: Synthetic oligonucleotide
  Sense strand starting at position 3624 of SEQ ID NO: 318410
guaucuaucaccgagguuc

SEQ ID NO: 560560 - RNA, 19 nt, Artificial Sequence
  Description of Artificial Sequence: Synthetic oligonucleotide
  Antisense strand to SEQ ID NO: 560559
gaaccucggugauagauac

SEQ ID NO: 560561 - RNA, 19 nt, Artificial Sequence
  Description of Artificial Sequence: Synthetic oligonucleotide
  Sense strand starting at position 3774 of SEQ ID NO: 318410
uucgguuggaaugaucuua

SEQ ID NO: 560562 - RNA, 19 nt, Artificial Sequence
  Description of Artificial Sequence: Synthetic oligonucleotide
  Antisense strand to SEQ ID NO: 560561
uaagaucauuccaaccgaa

SEQ ID NO: 560563 - RNA, 19 nt, Artificial Sequence
  Description of Artificial Sequence: Synthetic oligonucleotide
  Sense strand starting at position 3805 of SEQ ID NO: 318410
gaggccuuggaauaguauu

SEQ ID NO: 560564 - RNA, 19 nt, Artificial Sequence
  Description of Artificial Sequence: Synthetic oligonucleotide
  Antisense strand to SEQ ID NO: 560563
aauacuauuccaaggccuc

SEQ ID NO: 560565 - RNA, 19 nt, Artificial Sequence
  Description of Artificial Sequence: Synthetic oligonucleotide
  Sense strand starting at position 3867 of SEQ ID NO: 318410
gggacagagcugugugaug

SEQ ID NO: 560566 - RNA, 19 nt, Artificial Sequence
  Description of Artificial Sequence: Synthetic oligonucleotide
  Antisense strand to SEQ ID NO: 560565
caucacacagcucuguccc

SEQ ID NO: 560567 - RNA, 19 nt, Artificial Sequence
  Description of Artificial Sequence: Synthetic oligonucleotide
  Sense strand starting at position 3869 of SEQ ID NO: 318410
gacagagcugugugaugaa

SEQ ID NO: 560568 - RNA, 19 nt, Artificial Sequence
  Description of Artificial Sequence: Synthetic oligonucleotide
  Antisense strand to SEQ ID NO: 560567
uucaucacacagcucuguc

SEQ ID NO: 560569 - RNA, 19 nt, Artificial Sequence
  Description of Artificial Sequence: Synthetic oligonucleotide
  Sense strand starting at position 3912 of SEQ ID NO: 318410
caggcugugcuugaggaau

SEQ ID NO: 560570 - RNA, 19 nt, Artificial Sequence
  Description of Artificial Sequence: Synthetic oligonucleotide
  Antisense strand to SEQ ID NO: 560569
auuccucaagcacagccug

SEQ ID NO: 560571 - RNA, 19 nt, Artificial Sequence
  Description of Artificial Sequence: Synthetic oligonucleotide
  Sense strand starting at position 3949 of SEQ ID NO: 318410
gggagaaugucccuuccac

SEQ ID NO: 560572 - RNA, 19 nt, Artificial Sequence
  Description of Artificial Sequence: Synthetic oligonucleotide
  Antisense strand to SEQ ID NO: 560571
guggaagggacauucuccc

SEQ ID NO: 560573 - RNA, 19 nt, Artificial Sequence
  Description of Artificial Sequence: Synthetic oligonucleotide
  Sense strand starting at position 137 of SEQ ID NO: 318411
aaagucaucuaggcaguuu

SEQ ID NO: 560574 - RNA, 19 nt, Artificial Sequence
  Description of Artificial Sequence: Synthetic oligonucleotide
  Antisense strand to SEQ ID NO: 560573
aaacugccuagaugacuuu

SEQ ID NO: 560575 - RNA, 19 nt, Artificial Sequence
  Description of Artificial Sequence: Synthetic oligonucleotide
  Sense strand starting at position 155 of SEQ ID NO: 318411
ucucuauggcuuuagaucu

SEQ ID NO: 560576 - RNA, 19 nt, Artificial Sequence
  Description of Artificial Sequence: Synthetic oligonucleotide
  Antisense strand to SEQ ID NO: 560575
agaucuaaagccauagaga

SEQ ID NO: 560577 - RNA, 19 nt, Artificial Sequence
  Description of Artificial Sequence: Synthetic oligonucleotide
  Sense strand starting at position 163 of SEQ ID NO: 318411
gcuuuagaucuuuaguauu

SEQ ID NO: 560578 - RNA, 19 nt, Artificial Sequence
  Description of Artificial Sequence: Synthetic oligonucleotide
  Antisense strand to SEQ ID NO: 560577
aauacuaaagaucuaaagc

SEQ ID NO: 560579 - RNA, 19 nt, Artificial Sequence
  Description of Artificial Sequence: Synthetic oligonucleotide
  Sense strand starting at position 361 of SEQ ID NO: 318411
augagauaucaaugucuau

SEQ ID NO: 560580 - RNA, 19 nt, Artificial Sequence
  Description of Artificial Sequence: Synthetic oligonucleotide
  Antisense strand to SEQ ID NO: 560579
auagacauugauaucucau

SEQ ID NO: 560581 - RNA, 19 nt, Artificial Sequence
  Description of Artificial Sequence: Synthetic oligonucleotide
  Sense strand starting at position 593 of SEQ ID NO: 318411
uagacaugaguuggaguca

SEQ ID NO: 560582 - RNA, 19 nt, Artificial Sequence
  Description of Artificial Sequence: Synthetic oligonucleotide
  Antisense strand to SEQ ID NO: 560581
ugacuccaacucaugucua

SEQ ID NO: 560583 - RNA, 19 nt, Artificial Sequence
  Description of Artificial Sequence: Synthetic oligonucleotide
  Sense strand starting at position 715 of SEQ ID NO: 318411
uuucuaggauaugucagau

SEQ ID NO: 560584 - RNA, 19 nt, Artificial Sequence
  Description of Artificial Sequence: Synthetic oligonucleotide
  Antisense strand to SEQ ID NO: 560583
aucugacauauccuagaaa

SEQ ID NO: 560585 - RNA, 19 nt, Artificial Sequence
  Description of Artificial Sequence: Synthetic oligonucleotide
  Sense strand starting at position 770 of SEQ ID NO: 318411
accagcuucugacuauaga

SEQ ID NO: 560586 - RNA, 19 nt, Artificial Sequence
  Description of Artificial Sequence: Synthetic oligonucleotide
  Antisense strand to SEQ ID NO: 560585
ucuauagucagaagcuggu

SEQ ID NO: 560587 - RNA, 19 nt, Artificial Sequence
  Description of Artificial Sequence: Synthetic oligonucleotide
  Sense strand starting at position 771 of SEQ ID NO: 318411
ccagcuucugacuauagaa

SEQ ID NO: 560588 - RNA, 19 nt, Artificial Sequence
  Description of Artificial Sequence: Synthetic oligonucleotide
  Antisense strand to SEQ ID NO: 560587
uucuauagucagaagcugg

SEQ ID NO: 560589 - RNA, 19 nt, Artificial Sequence
  Description of Artificial Sequence: Synthetic oligonucleotide
  Sense strand starting at position 824 of SEQ ID NO: 318411
uugccagaauguuuacaag

SEQ ID NO: 560590 - RNA, 19 nt, Artificial Sequence
  Description of Artificial Sequence: Synthetic oligonucleotide
  Antisense strand to SEQ ID NO: 560589
cuuguaaacauucuggcaa

SEQ ID NO: 560591 - RNA, 19 nt, Artificial Sequence
  Description of Artificial Sequence: Synthetic oligonucleotide
  Sense strand starting at position 861 of SEQ ID NO: 318411
auagcaugcuagguuagaa

SEQ ID NO: 560592 - RNA, 19 nt, Artificial Sequence
  Description of Artificial Sequence: Synthetic oligonucleotide
  Antisense strand to SEQ ID NO: 560591
uucuaaccuagcaugcuau

SEQ ID NO: 560593 - RNA, 19 nt, Artificial Sequence
  Description of Artificial Sequence: Synthetic oligonucleotide
  Sense strand starting at position 1010 of SEQ ID NO: 318411
guguucuuacugcucugua

SEQ ID NO: 560594 - RNA, 19 nt, Artificial Sequence
  Description of Artificial Sequence: Synthetic oligonucleotide
  Antisense strand to SEQ ID NO: 560593
uacagagcaguaagaacac

SEQ ID NO: 560595 - RNA, 19 nt, Artificial Sequence
  Description of Artificial Sequence: Synthetic oligonucleotide
  Sense strand starting at position 1159 of SEQ ID NO: 318411
agagcucggacagauguau

SEQ ID NO: 560596 - RNA, 19 nt, Artificial Sequence
  Description of Artificial Sequence: Synthetic oligonucleotide
  Antisense strand to SEQ ID NO: 560595
auacaucuguccgagcucu

SEQ ID NO: 560597 - RNA, 19 nt, Artificial Sequence
  Description of Artificial Sequence: Synthetic oligonucleotide
  Sense strand starting at position 1204 of SEQ ID NO: 318411
ucuugacacugguuccaau

SEQ ID NO: 560598 - RNA, 19 nt, Artificial Sequence
  Description of Artificial Sequence: Synthetic oligonucleotide
  Antisense strand to SEQ ID NO: 560597
auuggaaccagugucaaga

SEQ ID NO: 560599 - RNA, 19 nt, Artificial Sequence
  Description of Artificial Sequence: Synthetic oligonucleotide
  Sense strand starting at position 1299 of SEQ ID NO: 318411
cuuugagauuaccucugca

SEQ ID NO: 560600 - RNA, 19 nt, Artificial Sequence
  Description of Artificial Sequence: Synthetic oligonucleotide
  Antisense strand to SEQ ID NO: 560599
ugcagagguaaucucaaag

SEQ ID NO: 560601 - RNA, 19 nt, Artificial Sequence
  Description of Artificial Sequence: Synthetic oligonucleotide
  Sense strand starting at position 1302 of SEQ ID NO: 318411
ugagauuaccucugcaaca

SEQ ID NO: 560602 - RNA, 19 nt, Artificial Sequence
  Description of Artificial Sequence: Synthetic oligonucleotide
  Antisense strand to SEQ ID NO: 560601
uguugcagagguaaucuca

SEQ ID NO: 560603 - RNA, 19 nt, Artificial Sequence
  Description of Artificial Sequence: Synthetic oligonucleotide
  Sense strand starting at position 1381 of SEQ ID NO: 318411
cagaucuaagucuguugga

SEQ ID NO: 560604 - RNA, 19 nt, Artificial Sequence
  Description of Artificial Sequence: Synthetic oligonucleotide
  Antisense strand to SEQ ID NO: 560603
uccaacagacuuagaucug

SEQ ID NO: 560605 - RNA, 19 nt, Artificial Sequence
  Description of Artificial Sequence: Synthetic oligonucleotide
  Sense strand starting at position 1382 of SEQ ID NO: 318411
agaucuaagucuguuggau

SEQ ID NO: 560606 - RNA, 19 nt, Artificial Sequence
  Description of Artificial Sequence: Synthetic oligonucleotide
  Antisense strand to SEQ ID NO: 560605
auccaacagacuuagaucu

SEQ ID NO: 560607 - RNA, 19 nt, Artificial Sequence
  Description of Artificial Sequence: Synthetic oligonucleotide
  Sense strand starting at position 1416 of SEQ ID NO: 318411
gaaugacagucaccuagua

SEQ ID NO: 560608 - RNA, 19 nt, Artificial Sequence
  Description of Artificial Sequence: Synthetic oligonucleotide
  Antisense strand to SEQ ID NO: 560607
uacuaggugacugucauuc

SEQ ID NO: 560609 - RNA, 19 nt, Artificial Sequence
  Description of Artificial Sequence: Synthetic oligonucleotide
  Sense strand starting at position 1691 of SEQ ID NO: 318411
ucaccaauauguuuaugua

SEQ ID NO: 560610 - RNA, 19 nt, Artificial Sequence
  Description of Artificial Sequence: Synthetic oligonucleotide
  Antisense strand to SEQ ID NO: 560609
uacauaaacauauugguga

SEQ ID NO: 560611 - RNA, 19 nt, Artificial Sequence
  Description of Artificial Sequence: Synthetic oligonucleotide
  Sense strand starting at position 1833 of SEQ ID NO: 318411
ccaagcaagccgggauaua

SEQ ID NO: 560612 - RNA, 19 nt, Artificial Sequence
  Description of Artificial Sequence: Synthetic oligonucleotide
  Antisense strand to SEQ ID NO: 560611
uauaucccggcuugcuugg

SEQ ID NO: 560613 - RNA, 19 nt, Artificial Sequence
  Description of Artificial Sequence: Synthetic oligonucleotide
  Sense strand starting at position 2110 of SEQ ID NO: 318411
cguaaugccauggaucuca

SEQ ID NO: 560614 - RNA, 19 nt, Artificial Sequence
  Description of Artificial Sequence: Synthetic oligonucleotide
  Antisense strand to SEQ ID NO: 560613
ugagauccauggcauuacg

SEQ ID NO: 560615 - RNA, 19 nt, Artificial Sequence
  Description of Artificial Sequence: Synthetic oligonucleotide
  Sense strand starting at position 2139 of SEQ ID NO: 318411
aguacagugcaaugaaaug

SEQ ID NO: 560616 - RNA, 19 nt, Artificial Sequence
  Description of Artificial Sequence: Synthetic oligonucleotide
  Antisense strand to SEQ ID NO: 560615
cauuucauugcacuguacu

SEQ ID NO: 560617 - RNA, 19 nt, Artificial Sequence
  Description of Artificial Sequence: Synthetic oligonucleotide
  Sense strand starting at position 2259 of SEQ ID NO: 318411
ugaguagucggugacagag

SEQ ID NO: 560618 - RNA, 19 nt, Artificial Sequence
  Description of Artificial Sequence: Synthetic oligonucleotide
  Antisense strand to SEQ ID NO: 560617
cucugucaccgacuacuca

SEQ ID NO: 560619 - RNA, 19 nt, Artificial Sequence
  Description of Artificial Sequence: Synthetic oligonucleotide
  Sense strand starting at position 2288 of SEQ ID NO: 318411
gauagauucugugcuccac

SEQ ID NO: 560620 - RNA, 19 nt, Artificial Sequence
  Description of Artificial Sequence: Synthetic oligonucleotide
  Antisense strand to SEQ ID NO: 560619
guggagcacagaaucuauc

SEQ ID NO: 560621 - RNA, 19 nt, Artificial Sequence
  Description of Artificial Sequence: Synthetic oligonucleotide
  Sense strand starting at position 2344 of SEQ ID NO: 318411
agcaauaacuuaguucuga

SEQ ID NO: 560622 - RNA, 19 nt, Artificial Sequence
  Description of Artificial Sequence: Synthetic oligonucleotide
  Antisense strand to SEQ ID NO: 560621
ucagaacuaaguuauugcu

SEQ ID NO: 560623 - RNA, 19 nt, Artificial Sequence
  Description of Artificial Sequence: Synthetic oligonucleotide
  Sense strand starting at position 2345 of SEQ ID NO: 318411
gcaauaacuuaguucugag

SEQ ID NO: 560624 - RNA, 19 nt, Artificial Sequence
  Description of Artificial Sequence: Synthetic oligonucleotide
  Antisense strand to SEQ ID NO: 560623
cucagaacuaaguuauugc

SEQ ID NO: 560625 - RNA, 19 nt, Artificial Sequence
  Description of Artificial Sequence: Synthetic oligonucleotide
  Sense strand starting at position 2723 of SEQ ID NO: 318411
uuuauaaguucugucaaag

SEQ ID NO: 560626 - RNA, 19 nt, Artificial Sequence
  Description of Artificial Sequence: Synthetic oligonucleotide
  Antisense strand to SEQ ID NO: 560625
cuuugacagaacuuauaaa

SEQ ID NO: 560627 - RNA, 19 nt, Artificial Sequence
  Description of Artificial Sequence: Synthetic oligonucleotide
  Sense strand starting at position 2917 of SEQ ID NO: 318411
ugggcucucuuccuuacaa

SEQ ID NO: 560628 - RNA, 19 nt, Artificial Sequence
  Description of Artificial Sequence: Synthetic oligonucleotide
  Antisense strand to SEQ ID NO: 560627
uuguaaggaagagagccca

SEQ ID NO: 560629 - RNA, 19 nt, Artificial Sequence
  Description of Artificial Sequence: Synthetic oligonucleotide
  Sense strand starting at position 2918 of SEQ ID NO: 318411
gggcucucuuccuuacaaa

SEQ ID NO: 560630 - RNA, 19 nt, Artificial Sequence
  Description of Artificial Sequence: Synthetic oligonucleotide
  Antisense strand to SEQ ID NO: 560629
uuuguaaggaagagagccc

SEQ ID NO: 560631 - RNA, 19 nt, Artificial Sequence
  Description of Artificial Sequence: Synthetic oligonucleotide
  Sense strand starting at position 2942 of SEQ ID NO: 318411
uuaacucagcauuggagaa

SEQ ID NO: 560632 - RNA, 19 nt, Artificial Sequence
  Description of Artificial Sequence: Synthetic oligonucleotide
  Antisense strand to SEQ ID NO: 560631
uucuccaaugcugaguuaa

SEQ ID NO: 560633 - RNA, 19 nt, Artificial Sequence
  Description of Artificial Sequence: Synthetic oligonucleotide
  Sense strand starting at position 2946 of SEQ ID NO: 318411
cucagcauuggagaaaugu

SEQ ID NO: 560634 - RNA, 19 nt, Artificial Sequence
  Description of Artificial Sequence: Synthetic oligonucleotide
  Antisense strand to SEQ ID NO: 560633
acauuucuccaaugcugag

SEQ ID NO: 560635 - RNA, 19 nt, Artificial Sequence
  Description of Artificial Sequence: Synthetic oligonucleotide
  Sense strand starting at position 3071 of SEQ ID NO: 318411
cuacuauggcauggugaca

SEQ ID NO: 560636 - RNA, 19 nt, Artificial Sequence
  Description of Artificial Sequence: Synthetic oligonucleotide
  Antisense strand to SEQ ID NO: 560635
ugucaccaugccauaguag

SEQ ID NO: 560637 - RNA, 19 nt, Artificial Sequence
  Description of Artificial Sequence: Synthetic oligonucleotide
  Sense strand starting at position 3166 of SEQ ID NO: 318411
gggccauccuaaguaaggu

SEQ ID NO: 560638 - RNA, 19 nt, Artificial Sequence
  Description of Artificial Sequence: Synthetic oligonucleotide
  Antisense strand to SEQ ID NO: 560637
accuuacuuaggauggccc

SEQ ID NO: 560639 - RNA, 19 nt, Artificial Sequence
  Description of Artificial Sequence: Synthetic oligonucleotide
  Sense strand starting at position 3249 of SEQ ID NO: 318411
agacuauaugcaggagugu

SEQ ID NO: 560640 - RNA, 19 nt, Artificial Sequence
  Description of Artificial Sequence: Synthetic oligonucleotide
  Antisense strand to SEQ ID NO: 560639
acacuccugcauauagucu

SEQ ID NO: 560641 - RNA, 19 nt, Artificial Sequence
  Description of Artificial Sequence: Synthetic oligonucleotide
  Sense strand starting at position 3260 of SEQ ID NO: 318411
aggagugucucccuaagag

SEQ ID NO: 560642 - RNA, 19 nt, Artificial Sequence
  Description of Artificial Sequence: Synthetic oligonucleotide
  Antisense strand to SEQ ID NO: 560641
cucuuagggagacacuccu

SEQ ID NO: 560643 - RNA, 19 nt, Artificial Sequence
  Description of Artificial Sequence: Synthetic oligonucleotide
  Sense strand starting at position 3376 of SEQ ID NO: 318411
acuuaauggccagguagaa

SEQ ID NO: 560644 - RNA, 19 nt, Artificial Sequence
  Description of Artificial Sequence: Synthetic oligonucleotide
  Antisense strand to SEQ ID NO: 560643
uucuaccuggccauuaagu

SEQ ID NO: 560645 - RNA, 19 nt, Artificial Sequence
  Description of Artificial Sequence: Synthetic oligonucleotide
  Sense strand starting at position 3463 of SEQ ID NO: 318411
ccucauguauucuugaaag

SEQ ID NO: 560646 - RNA, 19 nt, Artificial Sequence
  Description of Artificial Sequence: Synthetic oligonucleotide
  Antisense strand to SEQ ID NO: 560645
cuuucaagaauacaugagg

SEQ ID NO: 560647 - RNA, 19 nt, Artificial Sequence
  Description of Artificial Sequence: Synthetic oligonucleotide
  Sense strand starting at position 3495 of SEQ ID NO: 318411
ggcauagagaucuggcaca

SEQ ID NO: 560648 - RNA, 19 nt, Artificial Sequence
  Description of Artificial Sequence: Synthetic oligonucleotide
  Antisense strand to SEQ ID NO: 560647
ugugccagaucucuaugcc

SEQ ID NO: 560649 - RNA, 19 nt, Artificial Sequence
  Description of Artificial Sequence: Synthetic oligonucleotide
  Sense strand starting at position 3632 of SEQ ID NO: 318411
guuagacagccaggguuua

SEQ ID NO: 560650 - RNA, 19 nt, Artificial Sequence
  Description of Artificial Sequence: Synthetic oligonucleotide
  Antisense strand to SEQ ID NO: 560649
uaaacccuggcugucuaac

SEQ ID NO: 560651 - RNA, 19 nt, Artificial Sequence
  Description of Artificial Sequence: Synthetic oligonucleotide
  Sense strand starting at position 3844 of SEQ ID NO: 318411
ugucuauaacaguaguauc

SEQ ID NO: 560652 - RNA, 19 nt, Artificial Sequence
  Description of Artificial Sequence: Synthetic oligonucleotide
  Antisense strand to SEQ ID NO: 560651
gauacuacuguuauagaca

SEQ ID NO: 560653 - RNA, 19 nt, Artificial Sequence
  Description of Artificial Sequence: Synthetic oligonucleotide
  Sense strand starting at position 194 of SEQ ID NO: 318412
gugaauagugguuaccaga

SEQ ID NO: 560654 - RNA, 19 nt, Artificial Sequence
  Description of Artificial Sequence: Synthetic oligonucleotide
  Antisense strand to SEQ ID NO: 560653
ucugguaaccacuauucac

SEQ ID NO: 560655 - RNA, 19 nt, Artificial Sequence
  Description of Artificial Sequence: Synthetic oligonucleotide
  Sense strand starting at position 407 of SEQ ID NO: 318412
uggauaugcuaaucaucuu

SEQ ID NO: 560656 - RNA, 19 nt, Artificial Sequence
  Description of Artificial Sequence: Synthetic oligonucleotide
  Antisense strand to SEQ ID NO: 560655
aagaugauuagcauaucca

SEQ ID NO: 560657 - RNA, 19 nt, Artificial Sequence
  Description of Artificial Sequence: Synthetic oligonucleotide
  Sense strand starting at position 415 of SEQ ID NO: 318412
cuaaucaucuugguuugau

SEQ ID NO: 560658 - RNA, 19 nt, Artificial Sequence
  Description of Artificial Sequence: Synthetic oligonucleotide
  Antisense strand to SEQ ID NO: 560657
aucaaaccaagaugauuag

SEQ ID NO: 560659 - RNA, 19 nt, Artificial Sequence
  Description of Artificial Sequence: Synthetic oligonucleotide
  Sense strand starting at position 586 of SEQ ID NO: 318412
uuggucacccacuauuaga

SEQ ID NO: 560660 - RNA, 19 nt, Artificial Sequence
  Description of Artificial Sequence: Synthetic oligonucleotide
  Antisense strand to SEQ ID NO: 560659
ucuaauagugggugaccaa

SEQ ID NO: 560661 - RNA, 19 nt, Artificial Sequence
  Description of Artificial Sequence: Synthetic oligonucleotide
  Sense strand starting at position 662 of SEQ ID NO: 318412
agauuaaucuuugcuugaa

SEQ ID NO: 560662 - RNA, 19 nt, Artificial Sequence
  Description of Artificial Sequence: Synthetic oligonucleotide
  Antisense strand to SEQ ID NO: 560661
uucaagcaaagauuaaucu

SEQ ID NO: 560663 - RNA, 19 nt, Artificial Sequence
  Description of Artificial Sequence: Synthetic oligonucleotide
  Sense strand starting at position 707 of SEQ ID NO: 318412
ugcagaaugaccugaaguu

SEQ ID NO: 560664 - RNA, 19 nt, Artificial Sequence
  Description of Artificial Sequence: Synthetic oligonucleotide
  Antisense strand to SEQ ID NO: 560663
aacuucaggucauucugca

SEQ ID NO: 560665 - RNA, 19 nt, Artificial Sequence
  Description of Artificial Sequence: Synthetic oligonucleotide
  Sense strand starting at position 708 of SEQ ID NO: 318412
gcagaaugaccugaaguuc

SEQ ID NO: 560666 - RNA, 19 nt, Artificial Sequence
  Description of Artificial Sequence: Synthetic oligonucleotide
  Antisense strand to SEQ ID NO: 560665
gaacuucaggucauucugc

SEQ ID NO: 560667 - RNA, 19 nt, Artificial Sequence
  Description of Artificial Sequence: Synthetic oligonucleotide
  Sense strand starting at position 1087 of SEQ ID NO: 318412
gguaaagggcccuggaaua

SEQ ID NO: 560668 - RNA, 19 nt, Artificial Sequence
  Description of Artificial Sequence: Synthetic oligonucleotide
  Antisense strand to SEQ ID NO: 560667
uauuccagggcccuuuacc

SEQ ID NO: 560669 - RNA, 19 nt, Artificial Sequence
  Description of Artificial Sequence: Synthetic oligonucleotide
  Sense strand starting at position 1129 of SEQ ID NO: 318412
aggcaauuauaugcuaaga

SEQ ID NO: 560670 - RNA, 19 nt, Artificial Sequence
  Description of Artificial Sequence: Synthetic oligonucleotide
  Antisense strand to SEQ ID NO: 560669
ucuuagcauauaauugccu

SEQ ID NO: 560671 - RNA, 19 nt, Artificial Sequence
  Description of Artificial Sequence: Synthetic oligonucleotide
  Sense strand starting at position 1137 of SEQ ID NO: 318412
auaugcuaagauugggauu

SEQ ID NO: 560672 - RNA, 19 nt, Artificial Sequence
  Description of Artificial Sequence: Synthetic oligonucleotide
  Antisense strand to SEQ ID NO: 560671
aaucccaaucuuagcauau

SEQ ID NO: 560673 - RNA, 19 nt, Artificial Sequence
  Description of Artificial Sequence: Synthetic oligonucleotide
  Sense strand starting at position 1252 of SEQ ID NO: 318412
gagaauuauggcugaaagu

SEQ ID NO: 560674 - RNA, 19 nt, Artificial Sequence
  Description of Artificial Sequence: Synthetic oligonucleotide
  Antisense strand to SEQ ID NO: 560673
acuuucagccauaauucuc

SEQ ID NO: 560675 - RNA, 19 nt, Artificial Sequence
  Description of Artificial Sequence: Synthetic oligonucleotide
  Sense strand starting at position 1302 of SEQ ID NO: 318412
gcugacagaucauccugaa

SEQ ID NO: 560676 - RNA, 19 nt, Artificial Sequence
  Description of Artificial Sequence: Synthetic oligonucleotide
  Antisense strand to SEQ ID NO: 560675
uucaggaugaucugucagc

SEQ ID NO: 560677 - RNA, 19 nt, Artificial Sequence
  Description of Artificial Sequence: Synthetic oligonucleotide
  Sense strand starting at position 1790 of SEQ ID NO: 318412
guaucaucucgucagagaa

SEQ ID NO: 560678 - RNA, 19 nt, Artificial Sequence
  Description of Artificial Sequence: Synthetic oligonucleotide
  Antisense strand to SEQ ID NO: 560677
uucucugacgagaugauac

SEQ ID NO: 560679 - RNA, 19 nt, Artificial Sequence
  Description of Artificial Sequence: Synthetic oligonucleotide
  Sense strand starting at position 1904 of SEQ ID NO: 318412
ccaguuugaacuggagcaa

SEQ ID NO: 560680 - RNA, 19 nt, Artificial Sequence
  Description of Artificial Sequence: Synthetic oligonucleotide
  Antisense strand to SEQ ID NO: 560679
uugcuccaguucaaacugg

SEQ ID NO: 560681 - RNA, 19 nt, Artificial Sequence
  Description of Artificial Sequence: Synthetic oligonucleotide
  Sense strand starting at position 2160 of SEQ ID NO: 318412
gucagauacccagagcacu

SEQ ID NO: 560682 - RNA, 19 nt, Artificial Sequence
  Description of Artificial Sequence: Synthetic oligonucleotide
  Antisense strand to SEQ ID NO: 560681
agugcucuggguaucugac

SEQ ID NO: 560683 - RNA, 19 nt, Artificial Sequence
  Description of Artificial Sequence: Synthetic oligonucleotide
  Sense strand starting at position 2294 of SEQ ID NO: 318412
gggagucaguuucugacaa

SEQ ID NO: 560684 - RNA, 19 nt, Artificial Sequence
  Description of Artificial Sequence: Synthetic oligonucleotide
  Antisense strand to SEQ ID NO: 560683
uugucagaaacugacuccc

SEQ ID NO: 560685 - RNA, 19 nt, Artificial Sequence
  Description of Artificial Sequence: Synthetic oligonucleotide
  Sense strand starting at position 2374 of SEQ ID NO: 318412
cuaaauguucuggguaaua

SEQ ID NO: 560686 - RNA, 19 nt, Artificial Sequence
  Description of Artificial Sequence: Synthetic oligonucleotide
  Antisense strand to SEQ ID NO: 560685
uauuacccagaacauuuag

SEQ ID NO: 560687 - RNA, 19 nt, Artificial Sequence
  Description of Artificial Sequence: Synthetic oligonucleotide
  Sense strand starting at position 2376 of SEQ ID NO: 318412
aaauguucuggguaauagu

SEQ ID NO: 560688 - RNA, 19 nt, Artificial Sequence
  Description of Artificial Sequence: Synthetic oligonucleotide
  Antisense strand to SEQ ID NO: 560687
acuauuacccagaacauuu

SEQ ID NO: 560689 - RNA, 19 nt, Artificial Sequence
  Description of Artificial Sequence: Synthetic oligonucleotide
  Sense strand starting at position 2609 of SEQ ID NO: 318412
gggagaugguaugaauuua

SEQ ID NO: 560690 - RNA, 19 nt, Artificial Sequence
  Description of Artificial Sequence: Synthetic oligonucleotide
  Antisense strand to SEQ ID NO: 560689
uaaauucauaccaucuccc

SEQ ID NO: 560691 - RNA, 19 nt, Artificial Sequence
  Description of Artificial Sequence: Synthetic oligonucleotide
  Sense strand starting at position 2695 of SEQ ID NO: 318412
cagggaucugaguagucau

SEQ ID NO: 560692 - RNA, 19 nt, Artificial Sequence
  Description of Artificial Sequence: Synthetic oligonucleotide
  Antisense strand to SEQ ID NO: 560691
augacuacucagaucccug

SEQ ID NO: 560693 - RNA, 19 nt, Artificial Sequence
  Description of Artificial Sequence: Synthetic oligonucleotide
  Sense strand starting at position 2823 of SEQ ID NO: 318412
ggguuaucugauggaagua

SEQ ID NO: 560694 - RNA, 19 nt, Artificial Sequence
  Description of Artificial Sequence: Synthetic oligonucleotide
  Antisense strand to SEQ ID NO: 560693
uacuuccaucagauaaccc

SEQ ID NO: 560695 - RNA, 19 nt, Artificial Sequence
  Description of Artificial Sequence: Synthetic oligonucleotide
  Sense strand starting at position 2835 of SEQ ID NO: 318412
ggaaguaguauagagucau

SEQ ID NO: 560696 - RNA, 19 nt, Artificial Sequence
  Description of Artificial Sequence: Synthetic oligonucleotide
  Antisense strand to SEQ ID NO: 560695
augacucuauacuacuucc

SEQ ID NO: 560697 - RNA, 19 nt, Artificial Sequence
  Description of Artificial Sequence: Synthetic oligonucleotide
  Sense strand starting at position 2839 of SEQ ID NO: 318412
guaguauagagucaucauu

SEQ ID NO: 560698 - RNA, 19 nt, Artificial Sequence
  Description of Artificial Sequence: Synthetic oligonucleotide
  Antisense strand to SEQ ID NO: 560697
aaugaugacucuauacuac

SEQ ID NO: 560699 - RNA, 19 nt, Artificial Sequence
  Description of Artificial Sequence: Synthetic oligonucleotide
  Sense strand starting at position 2841 of SEQ ID NO: 318412
aguauagagucaucauuaa

SEQ ID NO: 560700 - RNA, 19 nt, Artificial Sequence
  Description of Artificial Sequence: Synthetic oligonucleotide
  Antisense strand to SEQ ID NO: 560699
uuaaugaugacucuauacu

SEQ ID NO: 560701 - RNA, 19 nt, Artificial Sequence
  Description of Artificial Sequence: Synthetic oligonucleotide
  Sense strand starting at position 2861 of SEQ ID NO: 318412
aguagagacuuugcaauua

SEQ ID NO: 560702 - RNA, 19 nt, Artificial Sequence
  Description of Artificial Sequence: Synthetic oligonucleotide
  Antisense strand to SEQ ID NO: 560701
uaauugcaaagucucuacu

SEQ ID NO: 560703 - RNA, 19 nt, Artificial Sequence
  Description of Artificial Sequence: Synthetic oligonucleotide
  Sense strand starting at position 2896 of SEQ ID NO: 318412
gggcucugacuugggacaa

SEQ ID NO: 560704 - RNA, 19 nt, Artificial Sequence
  Description of Artificial Sequence: Synthetic oligonucleotide
  Antisense strand to SEQ ID NO: 560703
uugucccaagucagagccc

SEQ ID NO: 560705 - RNA, 19 nt, Artificial Sequence
  Description of Artificial Sequence: Synthetic oligonucleotide
  Sense strand starting at position 2985 of SEQ ID NO: 318412
guggauguugaauaugauu

SEQ ID NO: 560706 - RNA, 19 nt, Artificial Sequence
  Description of Artificial Sequence: Synthetic oligonucleotide
  Antisense strand to SEQ ID NO: 560705
aaucauauucaacauccac

SEQ ID NO: 560707 - RNA, 19 nt, Artificial Sequence
  Description of Artificial Sequence: Synthetic oligonucleotide
  Sense strand starting at position 2991 of SEQ ID NO: 318412
guugaauaugauuagcaca

SEQ ID NO: 560708 - RNA, 19 nt, Artificial Sequence
  Description of Artificial Sequence: Synthetic oligonucleotide
  Antisense strand to SEQ ID NO: 560707
ugugcuaaucauauucaac

SEQ ID NO: 560709 - RNA, 19 nt, Artificial Sequence
  Description of Artificial Sequence: Synthetic oligonucleotide
  Sense strand starting at position 2993 of SEQ ID NO: 318412
ugaauaugauuagcacagu

SEQ ID NO: 560710 - RNA, 19 nt, Artificial Sequence
  Description of Artificial Sequence: Synthetic oligonucleotide
  Antisense strand to SEQ ID NO: 560709
acugugcuaaucauauuca

SEQ ID NO: 560711 - RNA, 19 nt, Artificial Sequence
  Description of Artificial Sequence: Synthetic oligonucleotide
  Sense strand starting at position 2996 of SEQ ID NO: 318412
auaugauuagcacagucaa

SEQ ID NO: 560712 - RNA, 19 nt, Artificial Sequence
  Description of Artificial Sequence: Synthetic oligonucleotide
  Antisense strand to SEQ ID NO: 560711
uugacugugcuaaucauau

SEQ ID NO: 560713 - RNA, 19 nt, Artificial Sequence
  Description of Artificial Sequence: Synthetic oligonucleotide
  Sense strand starting at position 3038 of SEQ ID NO: 318412
aguaguaaagauugauucu

SEQ ID NO: 560714 - RNA, 19 nt, Artificial Sequence
  Description of Artificial Sequence: Synthetic oligonucleotide
  Antisense strand to SEQ ID NO: 560713
agaaucaaucuuuacuacu

SEQ ID NO: 560715 - RNA, 19 nt, Artificial Sequence
  Description of Artificial Sequence: Synthetic oligonucleotide
  Sense strand starting at position 3423 of SEQ ID NO: 318412
aucaaugucuccuuugaga

SEQ ID NO: 560716 - RNA, 19 nt, Artificial Sequence
  Description of Artificial Sequence: Synthetic oligonucleotide
  Antisense strand to SEQ ID NO: 560715
ucucaaaggagacauugau

SEQ ID NO: 560717 - RNA, 19 nt, Artificial Sequence
  Description of Artificial Sequence: Synthetic oligonucleotide
  Sense strand starting at position 3425 of SEQ ID NO: 318412
caaugucuccuuugagaug

SEQ ID NO: 560718 - RNA, 19 nt, Artificial Sequence
  Description of Artificial Sequence: Synthetic oligonucleotide
  Antisense strand to SEQ ID NO: 560717
caucucaaaggagacauug

SEQ ID NO: 560719 - RNA, 19 nt, Artificial Sequence
  Description of Artificial Sequence: Synthetic oligonucleotide
  Sense strand starting at position 3496 of SEQ ID NO: 318412
ggccuuuagcagcauuuau

SEQ ID NO: 560720 - RNA, 19 nt, Artificial Sequence
  Description of Artificial Sequence: Synthetic oligonucleotide
  Antisense strand to SEQ ID NO: 560719
auaaaugcugcuaaaggcc

SEQ ID NO: 560721 - RNA, 19 nt, Artificial Sequence
  Description of Artificial Sequence: Synthetic oligonucleotide
  Sense strand starting at position 3573 of SEQ ID NO: 318412
cuuggauuccagcaucaga

SEQ ID NO: 560722 - RNA, 19 nt, Artificial Sequence
  Description of Artificial Sequence: Synthetic oligonucleotide
  Antisense strand to SEQ ID NO: 560721
ucugaugcuggaauccaag

SEQ ID NO: 560723 - RNA, 19 nt, Artificial Sequence
  Description of Artificial Sequence: Synthetic oligonucleotide
  Sense strand starting at position 3660 of SEQ ID NO: 318412
gcuguugagaucugagaca

SEQ ID NO: 560724 - RNA, 19 nt, Artificial Sequence
  Description of Artificial Sequence: Synthetic oligonucleotide
  Antisense strand to SEQ ID NO: 560723
ugucucagaucucaacagc

SEQ ID NO: 560725 - RNA, 19 nt, Artificial Sequence
  Description of Artificial Sequence: Synthetic oligonucleotide
  Sense strand starting at position 3757 of SEQ ID NO: 318412
uaugauucuggauguagau

SEQ ID NO: 560726 - RNA, 19 nt, Artificial Sequence
  Description of Artificial Sequence: Synthetic oligonucleotide
  Antisense strand to SEQ ID NO: 560725
aucuacauccagaaucaua

SEQ ID NO: 560727 - RNA, 19 nt, Artificial Sequence
  Description of Artificial Sequence: Synthetic oligonucleotide
  Sense strand starting at position 3875 of SEQ ID NO: 318412
augagccuaugucuagaua

SEQ ID NO: 560728 - RNA, 19 nt, Artificial Sequence
  Description of Artificial Sequence: Synthetic oligonucleotide
  Antisense strand to SEQ ID NO: 560727
uaucuagacauaggcucau

SEQ ID NO: 560729 - RNA, 19 nt, Artificial Sequence
  Description of Artificial Sequence: Synthetic oligonucleotide
  Sense strand starting at position 3876 of SEQ ID NO: 318412
ugagccuaugucuagauau

SEQ ID NO: 560730 - RNA, 19 nt, Artificial Sequence
  Description of Artificial Sequence: Synthetic oligonucleotide
  Antisense strand to SEQ ID NO: 560729
auaucuagacauaggcuca

SEQ ID NO: 560731 - RNA, 19 nt, Artificial Sequence
  Description of Artificial Sequence: Synthetic oligonucleotide
  Sense strand starting at position 3924 of SEQ ID NO: 318412
ggaggaaccuggcuuaugu

SEQ ID NO: 560732 - RNA, 19 nt, Artificial Sequence
  Description of Artificial Sequence: Synthetic oligonucleotide
  Antisense strand to SEQ ID NO: 560731
acauaagccagguuccucc

SEQ ID NO: 560733 - RNA, 19 nt, Artificial Sequence
  Description of Artificial Sequence: Synthetic oligonucleotide
  Sense strand starting at position 40 of SEQ ID NO: 318413
agucuuagcaguggagaga

SEQ ID NO: 560734 - RNA, 19 nt, Artificial Sequence
  Description of Artificial Sequence: Synthetic oligonucleotide
  Antisense strand to SEQ ID NO: 560733
ucucuccacugcuaagacu

SEQ ID NO: 560735 - RNA, 19 nt, Artificial Sequence
  Description of Artificial Sequence: Synthetic oligonucleotide
  Sense strand starting at position 41 of SEQ ID NO: 318413
gucuuagcaguggagagaa

SEQ ID NO: 560736 - RNA, 19 nt, Artificial Sequence
  Description of Artificial Sequence: Synthetic oligonucleotide
  Antisense strand to SEQ ID NO: 560735
uucucuccacugcuaagac

SEQ ID NO: 560737 - RNA, 19 nt, Artificial Sequence
  Description of Artificial Sequence: Synthetic oligonucleotide
  Sense strand starting at position 239 of SEQ ID NO: 318413
uuugaaggcuaccuguaaa

SEQ ID NO: 560738 - RNA, 19 nt, Artificial Sequence
  Description of Artificial Sequence: Synthetic oligonucleotide
  Antisense strand to SEQ ID NO: 560737
uuuacagguagccuucaaa

SEQ ID NO: 560739 - RNA, 19 nt, Artificial Sequence
  Description of Artificial Sequence: Synthetic oligonucleotide
  Sense strand starting at position 242 of SEQ ID NO: 318413
gaaggcuaccuguaaauuc

SEQ ID NO: 560740 - RNA, 19 nt, Artificial Sequence
  Description of Artificial Sequence: Synthetic oligonucleotide
  Antisense strand to SEQ ID NO: 560739
gaauuuacagguagccuuc

SEQ ID NO: 560741 - RNA, 19 nt, Artificial Sequence
  Description of Artificial Sequence: Synthetic oligonucleotide
  Sense strand starting at position 361 of SEQ ID NO: 318413
gugcuaaagguugaccaaa

SEQ ID NO: 560742 - RNA, 19 nt, Artificial Sequence
  Description of Artificial Sequence: Synthetic oligonucleotide
  Antisense strand to SEQ ID NO: 560741
uuuggucaaccuuuagcac

SEQ ID NO: 560743 - RNA, 19 nt, Artificial Sequence
  Description of Artificial Sequence: Synthetic oligonucleotide
  Sense strand starting at position 381 of SEQ ID NO: 318413
gucaguucaguggaagagu

SEQ ID NO: 560744 - RNA, 19 nt, Artificial Sequence
  Description of Artificial Sequence: Synthetic oligonucleotide
  Antisense strand to SEQ ID NO: 560743
acucuuccacugaacugac

SEQ ID NO: 560745 - RNA, 19 nt, Artificial Sequence
  Description of Artificial Sequence: Synthetic oligonucleotide
  Sense strand starting at position 390 of SEQ ID NO: 318413
guggaagaguugagggaaa

SEQ ID NO: 560746 - RNA, 19 nt, Artificial Sequence
  Description of Artificial Sequence: Synthetic oligonucleotide
  Antisense strand to SEQ ID NO: 560745
uuucccucaacucuuccac

SEQ ID NO: 560747 - RNA, 19 nt, Artificial Sequence
  Description of Artificial Sequence: Synthetic oligonucleotide
  Sense strand starting at position 401 of SEQ ID NO: 318413
gagggaaauuauucccggu

SEQ ID NO: 560748 - RNA, 19 nt, Artificial Sequence
  Description of Artificial Sequence: Synthetic oligonucleotide
  Antisense strand to SEQ ID NO: 560747
accgggaauaauuucccuc

SEQ ID NO: 560749 - RNA, 19 nt, Artificial Sequence
  Description of Artificial Sequence: Synthetic oligonucleotide
  Sense strand starting at position 403 of SEQ ID NO: 318413
gggaaauuauucccgguag

SEQ ID NO: 560750 - RNA, 19 nt, Artificial Sequence
  Description of Artificial Sequence: Synthetic oligonucleotide
  Antisense strand to SEQ ID NO: 560749
cuaccgggaauaauuuccc

SEQ ID NO: 560751 - RNA, 19 nt, Artificial Sequence
  Description of Artificial Sequence: Synthetic oligonucleotide
  Sense strand starting at position 405 of SEQ ID NO: 318413
gaaauuauucccgguagaa

SEQ ID NO: 560752 - RNA, 19 nt, Artificial Sequence
  Description of Artificial Sequence: Synthetic oligonucleotide
  Antisense strand to SEQ ID NO: 560751
uucuaccgggaauaauuuc

SEQ ID NO: 560753 - RNA, 19 nt, Artificial Sequence
  Description of Artificial Sequence: Synthetic oligonucleotide
  Sense strand starting at position 407 of SEQ ID NO: 318413
aauuauucccgguagaaac

SEQ ID NO: 560754 - RNA, 19 nt, Artificial Sequence
  Description of Artificial Sequence: Synthetic oligonucleotide
  Antisense strand to SEQ ID NO: 560753
guuucuaccgggaauaauu

SEQ ID NO: 560755 - RNA, 19 nt, Artificial Sequence
  Description of Artificial Sequence: Synthetic oligonucleotide
  Sense strand starting at position 424 of SEQ ID NO: 318413
acaccauaucuggguagga

SEQ ID NO: 560756 - RNA, 19 nt, Artificial Sequence
  Description of Artificial Sequence: Synthetic oligonucleotide
  Antisense strand to SEQ ID NO: 560755
uccuacccagauauggugu

SEQ ID NO: 560757 - RNA, 19 nt, Artificial Sequence
  Description of Artificial Sequence: Synthetic oligonucleotide
  Sense strand starting at position 425 of SEQ ID NO: 318413
caccauaucuggguaggaa

SEQ ID NO: 560758 - RNA, 19 nt, Artificial Sequence
  Description of Artificial Sequence: Synthetic oligonucleotide
  Antisense strand to SEQ ID NO: 560757
uuccuacccagauauggug

SEQ ID NO: 560759 - RNA, 19 nt, Artificial Sequence
  Description of Artificial Sequence: Synthetic oligonucleotide
  Sense strand starting at position 578 of SEQ ID NO: 318413
uuauaugccaugugaggga

SEQ ID NO: 560760 - RNA, 19 nt, Artificial Sequence
  Description of Artificial Sequence: Synthetic oligonucleotide
  Antisense strand to SEQ ID NO: 560759
ucccucacauggcauauaa

SEQ ID NO: 560761 - RNA, 19 nt, Artificial Sequence
  Description of Artificial Sequence: Synthetic oligonucleotide
  Sense strand starting at position 591 of SEQ ID NO: 318413
gagggaguuugggcuuuaa

SEQ ID NO: 560762 - RNA, 19 nt, Artificial Sequence
  Description of Artificial Sequence: Synthetic oligonucleotide
  Antisense strand to SEQ ID NO: 560761
uuaaagcccaaacucccuc

SEQ ID NO: 560763 - RNA, 19 nt, Artificial Sequence
  Description of Artificial Sequence: Synthetic oligonucleotide
  Sense strand starting at position 595 of SEQ ID NO: 318413
gaguuugggcuuuaaugaa

SEQ ID NO: 560764 - RNA, 19 nt, Artificial Sequence
  Description of Artificial Sequence: Synthetic oligonucleotide
  Antisense strand to SEQ ID NO: 560763
uucauuaaagcccaaacuc

SEQ ID NO: 560765 - RNA, 19 nt, Artificial Sequence
  Description of Artificial Sequence: Synthetic oligonucleotide
  Sense strand starting at position 1004 of SEQ ID NO: 318413
ugucuuaaauacuuaagga

SEQ ID NO: 560766 - RNA, 19 nt, Artificial Sequence
  Description of Artificial Sequence: Synthetic oligonucleotide
  Antisense strand to SEQ ID NO: 560765
uccuuaaguauuuaagaca

SEQ ID NO: 560767 - RNA, 19 nt, Artificial Sequence
  Description of Artificial Sequence: Synthetic oligonucleotide
  Sense strand starting at position 1155 of SEQ ID NO: 318413
guaucaagagcgugauuuc

SEQ ID NO: 560768 - RNA, 19 nt, Artificial Sequence
  Description of Artificial Sequence: Synthetic oligonucleotide
  Antisense strand to SEQ ID NO: 560767
gaaaucacgcucuugauac

SEQ ID NO: 560769 - RNA, 19 nt, Artificial Sequence
  Description of Artificial Sequence: Synthetic oligonucleotide
  Sense strand starting at position 1204 of SEQ ID NO: 318413
acaaaucugugaucuagga

SEQ ID NO: 560770 - RNA, 19 nt, Artificial Sequence
  Description of Artificial Sequence: Synthetic oligonucleotide
  Antisense strand to SEQ ID NO: 560769
uccuagaucacagauuugu

SEQ ID NO: 560771 - RNA, 19 nt, Artificial Sequence
  Description of Artificial Sequence: Synthetic oligonucleotide
  Sense strand starting at position 1218 of SEQ ID NO: 318413
uaggaagcuuacgucauuu

SEQ ID NO: 560772 - RNA, 19 nt, Artificial Sequence
  Description of Artificial Sequence: Synthetic oligonucleotide
  Antisense strand to SEQ ID NO: 560771
aaaugacguaagcuuccua

SEQ ID NO: 560773 - RNA, 19 nt, Artificial Sequence
  Description of Artificial Sequence: Synthetic oligonucleotide
  Sense strand starting at position 1265 of SEQ ID NO: 318413
agugucagaguugaaauua

SEQ ID NO: 560774 - RNA, 19 nt, Artificial Sequence
  Description of Artificial Sequence: Synthetic oligonucleotide
  Antisense strand to SEQ ID NO: 560773
uaauuucaacucugacacu

SEQ ID NO: 560775 - RNA, 19 nt, Artificial Sequence
  Description of Artificial Sequence: Synthetic oligonucleotide
  Sense strand starting at position 2162 of SEQ ID NO: 318413
gguugauauaacgguugaa

SEQ ID NO: 560776 - RNA, 19 nt, Artificial Sequence
  Description of Artificial Sequence: Synthetic oligonucleotide
  Antisense strand to SEQ ID NO: 560775
uucaaccguuauaucaacc

SEQ ID NO: 560777 - RNA, 19 nt, Artificial Sequence
  Description of Artificial Sequence: Synthetic oligonucleotide
  Sense strand starting at position 2165 of SEQ ID NO: 318413
ugauauaacgguugaaucu

SEQ ID NO: 560778 - RNA, 19 nt, Artificial Sequence
  Description of Artificial Sequence: Synthetic oligonucleotide
  Antisense strand to SEQ ID NO: 560777
agauucaaccguuauauca

SEQ ID NO: 560779 - RNA, 19 nt, Artificial Sequence
  Description of Artificial Sequence: Synthetic oligonucleotide
  Sense strand starting at position 2166 of SEQ ID NO: 318413
gauauaacgguugaaucuu

SEQ ID NO: 560780 - RNA, 19 nt, Artificial Sequence
  Description of Artificial Sequence: Synthetic oligonucleotide
  Antisense strand to SEQ ID NO: 560779
aagauucaaccguuauauc

SEQ ID NO: 560781 - RNA, 19 nt, Artificial Sequence
  Description of Artificial Sequence: Synthetic oligonucleotide
  Sense strand starting at position 2192 of SEQ ID NO: 318413
uccaguccugaaggugaaa

SEQ ID NO: 560782 - RNA, 19 nt, Artificial Sequence
  Description of Artificial Sequence: Synthetic oligonucleotide
  Antisense strand to SEQ ID NO: 560781
uuucaccuucaggacugga

SEQ ID NO: 560783 - RNA, 19 nt, Artificial Sequence
  Description of Artificial Sequence: Synthetic oligonucleotide
  Sense strand starting at position 2531 of SEQ ID NO: 318413
uucucucugguauaggauu

SEQ ID NO: 560784 - RNA, 19 nt, Artificial Sequence
  Description of Artificial Sequence: Synthetic oligonucleotide
  Antisense strand to SEQ ID NO: 560783
aauccuauaccagagagaa

SEQ ID NO: 560785 - RNA, 19 nt, Artificial Sequence
  Description of Artificial Sequence: Synthetic oligonucleotide
  Sense strand starting at position 2935 of SEQ ID NO: 318413
acaaauuucccuuguucgu

SEQ ID NO: 560786 - RNA, 19 nt, Artificial Sequence
  Description of Artificial Sequence: Synthetic oligonucleotide
  Antisense strand to SEQ ID NO: 560785
acgaacaagggaaauuugu

SEQ ID NO: 560787 - RNA, 19 nt, Artificial Sequence
  Description of Artificial Sequence: Synthetic oligonucleotide
  Sense strand starting at position 2989 of SEQ ID NO: 318413
gcaucuccacagcgauuua

SEQ ID NO: 560788 - RNA, 19 nt, Artificial Sequence
  Description of Artificial Sequence: Synthetic oligonucleotide
  Antisense strand to SEQ ID NO: 560787
uaaaucgcuguggagaugc

SEQ ID NO: 560789 - RNA, 19 nt, Artificial Sequence
  Description of Artificial Sequence: Synthetic oligonucleotide
  Sense strand starting at position 3164 of SEQ ID NO: 318413
ccugaauuccgauaguacu

SEQ ID NO: 560790 - RNA, 19 nt, Artificial Sequence
  Description of Artificial Sequence: Synthetic oligonucleotide
  Antisense strand to SEQ ID NO: 560789
aguacuaucggaauucagg

SEQ ID NO: 560791 - RNA, 19 nt, Artificial Sequence
  Description of Artificial Sequence: Synthetic oligonucleotide
  Sense strand starting at position 3192 of SEQ ID NO: 318413
uguuguauacuuuaccauu

SEQ ID NO: 560792 - RNA, 19 nt, Artificial Sequence
  Description of Artificial Sequence: Synthetic oligonucleotide
  Antisense strand to SEQ ID NO: 560791
aaugguaaaguauacaaca

SEQ ID NO: 560793 - RNA, 19 nt, Artificial Sequence
  Description of Artificial Sequence: Synthetic oligonucleotide
  Sense strand starting at position 3261 of SEQ ID NO: 318413
ucauuuauauugucugcau

SEQ ID NO: 560794 - RNA, 19 nt, Artificial Sequence
  Description of Artificial Sequence: Synthetic oligonucleotide
  Antisense strand to SEQ ID NO: 560793
augcagacaauauaaauga

SEQ ID NO: 560795 - RNA, 19 nt, Artificial Sequence
  Description of Artificial Sequence: Synthetic oligonucleotide
  Sense strand starting at position 3265 of SEQ ID NO: 318413
uuauauugucugcaugaga

SEQ ID NO: 560796 - RNA, 19 nt, Artificial Sequence
  Description of Artificial Sequence: Synthetic oligonucleotide
  Antisense strand to SEQ ID NO: 560795
ucucaugcagacaauauaa

SEQ ID NO: 560797 - RNA, 19 nt, Artificial Sequence
  Description of Artificial Sequence: Synthetic oligonucleotide
  Sense strand starting at position 3268 of SEQ ID NO: 318413
uauugucugcaugagaaug

SEQ ID NO: 560798 - RNA, 19 nt, Artificial Sequence
  Description of Artificial Sequence: Synthetic oligonucleotide
  Antisense strand to SEQ ID NO: 560797
cauucucaugcagacaaua

SEQ ID NO: 560799 - RNA, 19 nt, Artificial Sequence
  Description of Artificial Sequence: Synthetic oligonucleotide
  Sense strand starting at position 3385 of SEQ ID NO: 318413
uuuagaauuauguggguau

SEQ ID NO: 560800 - RNA, 19 nt, Artificial Sequence
  Description of Artificial Sequence: Synthetic oligonucleotide
  Antisense strand to SEQ ID NO: 560799
auacccacauaauucuaaa

SEQ ID NO: 560801 - RNA, 19 nt, Artificial Sequence
  Description of Artificial Sequence: Synthetic oligonucleotide
  Sense strand starting at position 3461 of SEQ ID NO: 318413
aguauaguauuaucccuaa

SEQ ID NO: 560802 - RNA, 19 nt, Artificial Sequence
  Description of Artificial Sequence: Synthetic oligonucleotide
  Antisense strand to SEQ ID NO: 560801
uuagggauaauacuauacu

SEQ ID NO: 560803 - RNA, 19 nt, Artificial Sequence
  Description of Artificial Sequence: Synthetic oligonucleotide
  Sense strand starting at position 3555 of SEQ ID NO: 318413
guucccuuuccaggaagau

SEQ ID NO: 560804 - RNA, 19 nt, Artificial Sequence
  Description of Artificial Sequence: Synthetic oligonucleotide
  Antisense strand to SEQ ID NO: 560803
aucuuccuggaaagggaac

SEQ ID NO: 560805 - RNA, 19 nt, Artificial Sequence
  Description of Artificial Sequence: Synthetic oligonucleotide
  Sense strand starting at position 3675 of SEQ ID NO: 318413
ggucuagaggcuggagauu

SEQ ID NO: 560806 - RNA, 19 nt, Artificial Sequence
  Description of Artificial Sequence: Synthetic oligonucleotide
  Antisense strand to SEQ ID NO: 560805
aaucuccagccucuagacc

SEQ ID NO: 560807 - RNA, 19 nt, Artificial Sequence
  Description of Artificial Sequence: Synthetic oligonucleotide
  Sense strand starting at position 3826 of SEQ ID NO: 318413
acauuaaaucgccaagcca

SEQ ID NO: 560808 - RNA, 19 nt, Artificial Sequence
  Description of Artificial Sequence: Synthetic oligonucleotide
  Antisense strand to SEQ ID NO: 560807
uggcuuggcgauuuaaugu

SEQ ID NO: 560809 - RNA, 19 nt, Artificial Sequence
  Description of Artificial Sequence: Synthetic oligonucleotide
  Sense strand starting at position 3833 of SEQ ID NO: 318413
aucgccaagccagauaauu

SEQ ID NO: 560810 - RNA, 19 nt, Artificial Sequence
  Description of Artificial Sequence: Synthetic oligonucleotide
  Antisense strand to SEQ ID NO: 560809
aauuaucuggcuuggcgau

SEQ ID NO: 560811 - RNA, 19 nt, Artificial Sequence
  Description of Artificial Sequence: Synthetic oligonucleotide
  Sense strand starting at position 3931 of SEQ ID NO: 318413
uuugguggucaguaaagaa

SEQ ID NO: 560812 - RNA, 19 nt, Artificial Sequence
  Description of Artificial Sequence: Synthetic oligonucleotide
  Antisense strand to SEQ ID NO: 560811
uucuuuacugaccaccaaa

SEQ ID NO: 560813 - RNA, 19 nt, Artificial Sequence
  Description of Artificial Sequence: Synthetic oligonucleotide
  Sense strand starting at position 37 of SEQ ID NO: 318414
agucuuagcaguggagaga

SEQ ID NO: 560814 - RNA, 19 nt, Artificial Sequence
  Description of Artificial Sequence: Synthetic oligonucleotide
  Antisense strand to SEQ ID NO: 560813
ucucuccacugcuaagacu

SEQ ID NO: 560815 - RNA, 19 nt, Artificial Sequence
  Description of Artificial Sequence: Synthetic oligonucleotide
  Sense strand starting at position 38 of SEQ ID NO: 318414
gucuuagcaguggagagaa

SEQ ID NO: 560816 - RNA, 19 nt, Artificial Sequence
  Description of Artificial Sequence: Synthetic oligonucleotide
  Antisense strand to SEQ ID NO: 560815
uucucuccacugcuaagac

SEQ ID NO: 560817 - RNA, 19 nt, Artificial Sequence
  Description of Artificial Sequence: Synthetic oligonucleotide
  Sense strand starting at position 236 of SEQ ID NO: 318414
uuugaaggcuaccuguaaa

SEQ ID NO: 560818 - RNA, 19 nt, Artificial Sequence
  Description of Artificial Sequence: Synthetic oligonucleotide
  Antisense strand to SEQ ID NO: 560817
uuuacagguagccuucaaa

SEQ ID NO: 560819 - RNA, 19 nt, Artificial Sequence
  Description of Artificial Sequence: Synthetic oligonucleotide
  Sense strand starting at position 239 of SEQ ID NO: 318414
gaaggcuaccuguaaauuc

SEQ ID NO: 560820 - RNA, 19 nt, Artificial Sequence
  Description of Artificial Sequence: Synthetic oligonucleotide
  Antisense strand to SEQ ID NO: 560819
gaauuuacagguagccuuc

SEQ ID NO: 560821 - RNA, 19 nt, Artificial Sequence
  Description of Artificial Sequence: Synthetic oligonucleotide
  Sense strand starting at position 358 of SEQ ID NO: 318414
gugcuaaagguugaccaaa

SEQ ID NO: 560822 - RNA, 19 nt, Artificial Sequence
  Description of Artificial Sequence: Synthetic oligonucleotide
  Antisense strand to SEQ ID NO: 560821
uuuggucaaccuuuagcac

SEQ ID NO: 560823 - RNA, 19 nt, Artificial Sequence
  Description of Artificial Sequence: Synthetic oligonucleotide
  Sense strand starting at position 378 of SEQ ID NO: 318414
gucaguucaguggaagagu

SEQ ID NO: 560824 - RNA, 19 nt, Artificial Sequence
  Description of Artificial Sequence: Synthetic oligonucleotide
  Antisense strand to SEQ ID NO: 560823
acucuuccacugaacugac

SEQ ID NO: 560825 - RNA, 19 nt, Artificial Sequence
  Description of Artificial Sequence: Synthetic oligonucleotide
  Sense strand starting at position 387 of SEQ ID NO: 318414
guggaagaguugagggaaa

SEQ ID NO: 560826 - RNA, 19 nt, Artificial Sequence
  Description of Artificial Sequence: Synthetic oligonucleotide
  Antisense strand to SEQ ID NO: 560825
uuucccucaacucuuccac

SEQ ID NO: 560827 - RNA, 19 nt, Artificial Sequence
  Description of Artificial Sequence: Synthetic oligonucleotide
  Sense strand starting at position 398 of SEQ ID NO: 318414
gagggaaauuauucccggu

SEQ ID NO: 560828 - RNA, 19 nt, Artificial Sequence
  Description of Artificial Sequence: Synthetic oligonucleotide
  Antisense strand to SEQ ID NO: 560827
accgggaauaauuucccuc

SEQ ID NO: 560829 - RNA, 19 nt, Artificial Sequence
  Description of Artificial Sequence: Synthetic oligonucleotide
  Sense strand starting at position 400 of SEQ ID NO: 318414
gggaaauuauucccgguag

SEQ ID NO: 560830 - RNA, 19 nt, Artificial Sequence
  Description of Artificial Sequence: Synthetic oligonucleotide
  Antisense strand to SEQ ID NO: 560829
cuaccgggaauaauuuccc

SEQ ID NO: 560831 - RNA, 19 nt, Artificial Sequence
  Description of Artificial Sequence: Synthetic oligonucleotide
  Sense strand starting at position 402 of SEQ ID NO: 318414
gaaauuauucccgguagaa

SEQ ID NO: 560832 - RNA, 19 nt, Artificial Sequence
  Description of Artificial Sequence: Synthetic oligonucleotide
  Antisense strand to SEQ ID NO: 560831
uucuaccgggaauaauuuc

SEQ ID NO: 560833 - RNA, 19 nt, Artificial Sequence
  Description of Artificial Sequence: Synthetic oligonucleotide
  Sense strand starting at position 404 of SEQ ID NO: 318414
aauuauucccgguagaaac

SEQ ID NO: 560834 - RNA, 19 nt, Artificial Sequence
  Description of Artificial Sequence: Synthetic oligonucleotide
  Antisense strand to SEQ ID NO: 560833
guuucuaccgggaauaauu

SEQ ID NO: 560835 - RNA, 19 nt, Artificial Sequence
  Description of Artificial Sequence: Synthetic oligonucleotide
  Sense strand starting at position 421 of SEQ ID NO: 318414
acaccauaucuggguagga

SEQ ID NO: 560836 - RNA, 19 nt, Artificial Sequence
  Description of Artificial Sequence: Synthetic oligonucleotide
  Antisense strand to SEQ ID NO: 560835
uccuacccagauauggugu

SEQ ID NO: 560837 - RNA, 19 nt, Artificial Sequence
  Description of Artificial Sequence: Synthetic oligonucleotide
  Sense strand starting at position 422 of SEQ ID NO: 318414
caccauaucuggguaggaa

SEQ ID NO: 560838 - RNA, 19 nt, Artificial Sequence
  Description of Artificial Sequence: Synthetic oligonucleotide
  Antisense strand to SEQ ID NO: 560837
uuccuacccagauauggug

SEQ ID NO: 560839 - RNA, 19 nt, Artificial Sequence
  Description of Artificial Sequence: Synthetic oligonucleotide
  Sense strand starting at position 575 of SEQ ID NO: 318414
uuauaugccaugugaggga

SEQ ID NO: 560840 - RNA, 19 nt, Artificial Sequence
  Description of Artificial Sequence: Synthetic oligonucleotide
  Antisense strand to SEQ ID NO: 560839
ucccucacauggcauauaa

SEQ ID NO: 560841 - RNA, 19 nt, Artificial Sequence
  Description of Artificial Sequence: Synthetic oligonucleotide
  Sense strand starting at position 588 of SEQ ID NO: 318414
gagggaguuugggcuuuaa

SEQ ID NO: 560842 - RNA, 19 nt, Artificial Sequence
  Description of Artificial Sequence: Synthetic oligonucleotide
  Antisense strand to SEQ ID NO: 560841
uuaaagcccaaacucccuc

SEQ ID NO: 560843 - RNA, 19 nt, Artificial Sequence
  Description of Artificial Sequence: Synthetic oligonucleotide
  Sense strand starting at position 592 of SEQ ID NO: 318414
gaguuugggcuuuaaugaa

SEQ ID NO: 560844 - RNA, 19 nt, Artificial Sequence
  Description of Artificial Sequence: Synthetic oligonucleotide
  Antisense strand to SEQ ID NO: 560843
uucauuaaagcccaaacuc

SEQ ID NO: 560845 - RNA, 19 nt, Artificial Sequence
  Description of Artificial Sequence: Synthetic oligonucleotide
  Sense strand starting at position 1001 of SEQ ID NO: 318414
ugucuuaaauacuuaagga

SEQ ID NO: 560846 - RNA, 19 nt, Artificial Sequence
  Description of Artificial Sequence: Synthetic oligonucleotide
  Antisense strand to SEQ ID NO: 560845
uccuuaaguauuuaagaca

SEQ ID NO: 560847 - RNA, 19 nt, Artificial Sequence
  Description of Artificial Sequence: Synthetic oligonucleotide
  Sense strand starting at position 1152 of SEQ ID NO: 318414
guaucaagagcgugauuuc

SEQ ID NO: 560848 - RNA, 19 nt, Artificial Sequence
  Description of Artificial Sequence: Synthetic oligonucleotide
  Antisense strand to SEQ ID NO: 560847
gaaaucacgcucuugauac

SEQ ID NO: 560849 - RNA, 19 nt, Artificial Sequence
  Description of Artificial Sequence: Synthetic oligonucleotide
  Sense strand starting at position 1201 of SEQ ID NO: 318414
acaaaucugugaucuagga

SEQ ID NO: 560850 - RNA, 19 nt, Artificial Sequence
  Description of Artificial Sequence: Synthetic oligonucleotide
  Antisense strand to SEQ ID NO: 560849
uccuagaucacagauuugu

SEQ ID NO: 560851 - RNA, 19 nt, Artificial Sequence
  Description of Artificial Sequence: Synthetic oligonucleotide
  Sense strand starting at position 1215 of SEQ ID NO: 318414
uaggaagcuuacgucauuu

SEQ ID NO: 560852 - RNA, 19 nt, Artificial Sequence
  Description of Artificial Sequence: Synthetic oligonucleotide
  Antisense strand to SEQ ID NO: 560851
aaaugacguaagcuuccua

SEQ ID NO: 560853 - RNA, 19 nt, Artificial Sequence
  Description of Artificial Sequence: Synthetic oligonucleotide
  Sense strand starting at position 1262 of SEQ ID NO: 318414
agugucagaguugaaauua

SEQ ID NO: 560854 - RNA, 19 nt, Artificial Sequence
  Description of Artificial Sequence: Synthetic oligonucleotide
  Antisense strand to SEQ ID NO: 560853
uaauuucaacucugacacu

SEQ ID NO: 560855 - RNA, 19 nt, Artificial Sequence
  Description of Artificial Sequence: Synthetic oligonucleotide
  Sense strand starting at position 2159 of SEQ ID NO: 318414
gguugauauaacgguugaa

SEQ ID NO: 560856 - RNA, 19 nt, Artificial Sequence
  Description of Artificial Sequence: Synthetic oligonucleotide
  Antisense strand to SEQ ID NO: 560855
uucaaccguuauaucaacc

SEQ ID NO: 560857 - RNA, 19 nt, Artificial Sequence
  Description of Artificial Sequence: Synthetic oligonucleotide
  Sense strand starting at position 2162 of SEQ ID NO: 318414
ugauauaacgguugaaucu

SEQ ID NO: 560858 - RNA, 19 nt, Artificial Sequence
  Description of Artificial Sequence: Synthetic oligonucleotide
  Antisense strand to SEQ ID NO: 560857
agauucaaccguuauauca

SEQ ID NO: 560859 - RNA, 19 nt, Artificial Sequence
  Description of Artificial Sequence: Synthetic oligonucleotide
  Sense strand starting at position 2163 of SEQ ID NO: 318414
gauauaacgguugaaucuu

SEQ ID NO: 560860 - RNA, 19 nt, Artificial Sequence
  Description of Artificial Sequence: Synthetic oligonucleotide
  Antisense strand to SEQ ID NO: 560859
aagauucaaccguuauauc

SEQ ID NO: 560861 - RNA, 19 nt, Artificial Sequence
  Description of Artificial Sequence: Synthetic oligonucleotide
  Sense strand starting at position 2189 of SEQ ID NO: 318414
uccaguccugaaggugaaa

SEQ ID NO: 560862 - RNA, 19 nt, Artificial Sequence
  Description of Artificial Sequence: Synthetic oligonucleotide
  Antisense strand to SEQ ID NO: 560861
uuucaccuucaggacugga

SEQ ID NO: 560863 - RNA, 19 nt, Artificial Sequence
  Description of Artificial Sequence: Synthetic oligonucleotide
  Sense strand starting at position 2528 of SEQ ID NO: 318414
uucucucugguauaggauu

SEQ ID NO: 560864 - RNA, 19 nt, Artificial Sequence
  Description of Artificial Sequence: Synthetic oligonucleotide
  Antisense strand to SEQ ID NO: 560863
aauccuauaccagagagaa

SEQ ID NO: 560865 - RNA, 19 nt, Artificial Sequence
  Description of Artificial Sequence: Synthetic oligonucleotide
  Sense strand starting at position 2932 of SEQ ID NO: 318414
acaaauuucccuuguucgu

SEQ ID NO: 560866 - RNA, 19 nt, Artificial Sequence
  Description of Artificial Sequence: Synthetic oligonucleotide
  Antisense strand to SEQ ID NO: 560865
acgaacaagggaaauuugu

SEQ ID NO: 560867 - RNA, 19 nt, Artificial Sequence
  Description of Artificial Sequence: Synthetic oligonucleotide
  Sense strand starting at position 2986 of SEQ ID NO: 318414
gcaucuccacagcgauuua

SEQ ID NO: 560868 - RNA, 19 nt, Artificial Sequence
  Description of Artificial Sequence: Synthetic oligonucleotide
  Antisense strand to SEQ ID NO: 560867
uaaaucgcuguggagaugc

SEQ ID NO: 560869 - RNA, 19 nt, Artificial Sequence
  Description of Artificial Sequence: Synthetic oligonucleotide
  Sense strand starting at position 3161 of SEQ ID NO: 318414
ccugaauuccgauaguacu

SEQ ID NO: 560870 - RNA, 19 nt, Artificial Sequence
  Description of Artificial Sequence: Synthetic oligonucleotide
  Antisense strand to SEQ ID NO: 560869
aguacuaucggaauucagg

SEQ ID NO: 560871 - RNA, 19 nt, Artificial Sequence
  Description of Artificial Sequence: Synthetic oligonucleotide
  Sense strand starting at position 3189 of SEQ ID NO: 318414
uguuguauacuuuaccauu

SEQ ID NO: 560872 - RNA, 19 nt, Artificial Sequence
  Description of Artificial Sequence: Synthetic oligonucleotide
  Antisense strand to SEQ ID NO: 560871
aaugguaaaguauacaaca

SEQ ID NO: 560873 - RNA, 19 nt, Artificial Sequence
  Description of Artificial Sequence: Synthetic oligonucleotide
  Sense strand starting at position 3258 of SEQ ID NO: 318414
ucauuuauauugucugcau

SEQ ID NO: 560874 - RNA, 19 nt, Artificial Sequence
  Description of Artificial Sequence: Synthetic oligonucleotide
  Antisense strand to SEQ ID NO: 560873
augcagacaauauaaauga

SEQ ID NO: 560875 - RNA, 19 nt, Artificial Sequence
  Description of Artificial Sequence: Synthetic oligonucleotide
  Sense strand starting at position 3262 of SEQ ID NO: 318414
uuauauugucugcaugaga

SEQ ID NO: 560876 - RNA, 19 nt, Artificial Sequence
  Description of Artificial Sequence: Synthetic oligonucleotide
  Antisense strand to SEQ ID NO: 560875
ucucaugcagacaauauaa

SEQ ID NO: 560877 - RNA, 19 nt, Artificial Sequence
  Description of Artificial Sequence: Synthetic oligonucleotide
  Sense strand starting at position 3265 of SEQ ID NO: 318414
uauugucugcaugagaaug

SEQ ID NO: 560878 - RNA, 19 nt, Artificial Sequence
  Description of Artificial Sequence: Synthetic oligonucleotide
  Antisense strand to SEQ ID NO: 560877
cauucucaugcagacaaua

SEQ ID NO: 560879 - RNA, 19 nt, Artificial Sequence
  Description of Artificial Sequence: Synthetic oligonucleotide
  Sense strand starting at position 3382 of SEQ ID NO: 318414
uuuagaauuauguggguau

SEQ ID NO: 560880 - RNA, 19 nt, Artificial Sequence
  Description of Artificial Sequence: Synthetic oligonucleotide
  Antisense strand to SEQ ID NO: 560879
auacccacauaauucuaaa

SEQ ID NO: 560881 - RNA, 19 nt, Artificial Sequence
  Description of Artificial Sequence: Synthetic oligonucleotide
  Sense strand starting at position 3458 of SEQ ID NO: 318414
aguauaguauuaucccuaa

SEQ ID NO: 560882 - RNA, 19 nt, Artificial Sequence
  Description of Artificial Sequence: Synthetic oligonucleotide
  Antisense strand to SEQ ID NO: 560881
uuagggauaauacuauacu

SEQ ID NO: 560883 - RNA, 19 nt, Artificial Sequence
  Description of Artificial Sequence: Synthetic oligonucleotide
  Sense strand starting at position 3552 of SEQ ID NO: 318414
guucccuuuccaggaagau

SEQ ID NO: 560884 - RNA, 19 nt, Artificial Sequence
  Description of Artificial Sequence: Synthetic oligonucleotide
  Antisense strand to SEQ ID NO: 560883
aucuuccuggaaagggaac

SEQ ID NO: 560885 - RNA, 19 nt, Artificial Sequence
  Description of Artificial Sequence: Synthetic oligonucleotide
  Sense strand starting at position 3672 of SEQ ID NO: 318414
ggucuagaggcuggagauu

SEQ ID NO: 560886 - RNA, 19 nt, Artificial Sequence
  Description of Artificial Sequence: Synthetic oligonucleotide
  Antisense strand to SEQ ID NO: 560885
aaucuccagccucuagacc

SEQ ID NO: 560887 - RNA, 19 nt, Artificial Sequence
  Description of Artificial Sequence: Synthetic oligonucleotide
  Sense strand starting at position 3823 of SEQ ID NO: 318414
acauuaaaucgccaagcca

SEQ ID NO: 560888 - RNA, 19 nt, Artificial Sequence
  Description of Artificial Sequence: Synthetic oligonucleotide
  Antisense strand to SEQ ID NO: 560887
uggcuuggcgauuuaaugu

SEQ ID NO: 560889 - RNA, 19 nt, Artificial Sequence
  Description of Artificial Sequence: Synthetic oligonucleotide
  Sense strand starting at position 3830 of SEQ ID NO: 318414
aucgccaagccagauaauu

SEQ ID NO: 560890 - RNA, 19 nt, Artificial Sequence
  Description of Artificial Sequence: Synthetic oligonucleotide
  Antisense strand to SEQ ID NO: 560889
aauuaucuggcuuggcgau

SEQ ID NO: 560891 - RNA, 19 nt, Artificial Sequence
  Description of Artificial Sequence: Synthetic oligonucleotide
  Sense strand starting at position 3928 of SEQ ID NO: 318414
uuugguggucaguaaagaa

SEQ ID NO: 560892 - RNA, 19 nt, Artificial Sequence
  Description of Artificial Sequence: Synthetic oligonucleotide
  Antisense strand to SEQ ID NO: 560891
uucuuuacugaccaccaaa

SEQ ID NO: 560893 - RNA, 19 nt, Artificial Sequence
  Description of Artificial Sequence: Synthetic oligonucleotide
  Sense strand starting at position 440 of SEQ ID NO: 318415
ccgugucacuccuauccga

SEQ ID NO: 560894 - RNA, 19 nt, Artificial Sequence
  Description of Artificial Sequence: Synthetic oligonucleotide
  Antisense strand to SEQ ID NO: 560893
ucggauaggagugacacgg

SEQ ID NO: 560895 - RNA, 19 nt, Artificial Sequence
  Description of Artificial Sequence: Synthetic oligonucleotide
  Sense strand starting at position 1298 of SEQ ID NO: 318415
gcgcaaaguuuacuccgaa

SEQ ID NO: 560896 - RNA, 19 nt, Artificial Sequence
  Description of Artificial Sequence: Synthetic oligonucleotide
  Antisense strand to SEQ ID NO: 560895
uucggaguaaacuuugcgc

SEQ ID NO: 560897 - RNA, 19 nt, Artificial Sequence
  Description of Artificial Sequence: Synthetic oligonucleotide
  Sense strand starting at position 1299 of SEQ ID NO: 318415
cgcaaaguuuacuccgaag

SEQ ID NO: 560898 - RNA, 19 nt, Artificial Sequence
  Description of Artificial Sequence: Synthetic oligonucleotide
  Antisense strand to SEQ ID NO: 560897
cuucggaguaaacuuugcg

SEQ ID NO: 560899 - RNA, 19 nt, Artificial Sequence
  Description of Artificial Sequence: Synthetic oligonucleotide
  Sense strand starting at position 1301 of SEQ ID NO: 318415
caaaguuuacuccgaagcu

SEQ ID NO: 560900 - RNA, 19 nt, Artificial Sequence
  Description of Artificial Sequence: Synthetic oligonucleotide
  Antisense strand to SEQ ID NO: 560899
agcuucggaguaaacuuug

SEQ ID NO: 560901 - RNA, 19 nt, Artificial Sequence
  Description of Artificial Sequence: Synthetic oligonucleotide
  Sense strand starting at position 2234 of SEQ ID NO: 318415
ucuuucugcccaugauaug

SEQ ID NO: 560902 - RNA, 19 nt, Artificial Sequence
  Description of Artificial Sequence: Synthetic oligonucleotide
  Antisense strand to SEQ ID NO: 560901
cauaucaugggcagaaaga

SEQ ID NO: 560903 - RNA, 19 nt, Artificial Sequence
  Description of Artificial Sequence: Synthetic oligonucleotide
  Sense strand starting at position 2268 of SEQ ID NO: 318415
agcucagugcccugaucuu

SEQ ID NO: 560904 - RNA, 19 nt, Artificial Sequence
  Description of Artificial Sequence: Synthetic oligonucleotide
  Antisense strand to SEQ ID NO: 560903
aagaucagggcacugagcu

SEQ ID NO: 560905 - RNA, 19 nt, Artificial Sequence
  Description of Artificial Sequence: Synthetic oligonucleotide
  Sense strand starting at position 2275 of SEQ ID NO: 318415
ugcccugaucuugaaagca

SEQ ID NO: 560906 - RNA, 19 nt, Artificial Sequence
  Description of Artificial Sequence: Synthetic oligonucleotide
  Antisense strand to SEQ ID NO: 560905
ugcuuucaagaucagggca

SEQ ID NO: 560907 - RNA, 19 nt, Artificial Sequence
  Description of Artificial Sequence: Synthetic oligonucleotide
  Sense strand starting at position 2283 of SEQ ID NO: 318415
ucuugaaagcaguggaaau

SEQ ID NO: 560908 - RNA, 19 nt, Artificial Sequence
  Description of Artificial Sequence: Synthetic oligonucleotide
  Antisense strand to SEQ ID NO: 560907
auuuccacugcuuucaaga

SEQ ID NO: 560909 - RNA, 19 nt, Artificial Sequence
  Description of Artificial Sequence: Synthetic oligonucleotide
  Sense strand starting at position 2407 of SEQ ID NO: 318415
agugcuucugggugccaga

SEQ ID NO: 560910 - RNA, 19 nt, Artificial Sequence
  Description of Artificial Sequence: Synthetic oligonucleotide
  Antisense strand to SEQ ID NO: 560909
ucuggcacccagaagcacu

SEQ ID NO: 560911 - RNA, 19 nt, Artificial Sequence
  Description of Artificial Sequence: Synthetic oligonucleotide
  Sense strand starting at position 2743 of SEQ ID NO: 318415
aguguuacgucugguggca

SEQ ID NO: 560912 - RNA, 19 nt, Artificial Sequence
  Description of Artificial Sequence: Synthetic oligonucleotide
  Antisense strand to SEQ ID NO: 560911
ugccaccagacguaacacu

SEQ ID NO: 560913 - RNA, 19 nt, Artificial Sequence
  Description of Artificial Sequence: Synthetic oligonucleotide
  Sense strand starting at position 2819 of SEQ ID NO: 318415
ggaggucacgcauagguuu

SEQ ID NO: 560914 - RNA, 19 nt, Artificial Sequence
  Description of Artificial Sequence: Synthetic oligonucleotide
  Antisense strand to SEQ ID NO: 560913
aaaccuaugcgugaccucc

SEQ ID NO: 560915 - RNA, 19 nt, Artificial Sequence
  Description of Artificial Sequence: Synthetic oligonucleotide
  Sense strand starting at position 3012 of SEQ ID NO: 318415
caggcagggugugugaaau

SEQ ID NO: 560916 - RNA, 19 nt, Artificial Sequence
  Description of Artificial Sequence: Synthetic oligonucleotide
  Antisense strand to SEQ ID NO: 560915
auuucacacacccugccug

SEQ ID NO: 560917 - RNA, 19 nt, Artificial Sequence
  Description of Artificial Sequence: Synthetic oligonucleotide
  Sense strand starting at position 3023 of SEQ ID NO: 318415
ugugaaauugaccgacuca

SEQ ID NO: 560918 - RNA, 19 nt, Artificial Sequence
  Description of Artificial Sequence: Synthetic oligonucleotide
  Antisense strand to SEQ ID NO: 560917
ugagucggucaauuucaca

SEQ ID NO: 560919 - RNA, 19 nt, Artificial Sequence
  Description of Artificial Sequence: Synthetic oligonucleotide
  Sense strand starting at position 3134 of SEQ ID NO: 318415
uugccaaucugagcaauua

SEQ ID NO: 560920 - RNA, 19 nt, Artificial Sequence
  Description of Artificial Sequence: Synthetic oligonucleotide
  Antisense strand to SEQ ID NO: 560919
uaauugcucagauuggcaa

SEQ ID NO: 560921 - RNA, 19 nt, Artificial Sequence
  Description of Artificial Sequence: Synthetic oligonucleotide
  Sense strand starting at position 3135 of SEQ ID NO: 318415
ugccaaucugagcaauuaa

SEQ ID NO: 560922 - RNA, 19 nt, Artificial Sequence
  Description of Artificial Sequence: Synthetic oligonucleotide
  Antisense strand to SEQ ID NO: 560921
uuaauugcucagauuggca

SEQ ID NO: 560923 - RNA, 19 nt, Artificial Sequence
  Description of Artificial Sequence: Synthetic oligonucleotide
  Sense strand starting at position 3166 of SEQ ID NO: 318415
ccugauuucugcuuguuuc

SEQ ID NO: 560924 - RNA, 19 nt, Artificial Sequence
  Description of Artificial Sequence: Synthetic oligonucleotide
  Antisense strand to SEQ ID NO: 560923
gaaacaagcagaaaucagg

SEQ ID NO: 560925 - RNA, 19 nt, Artificial Sequence
  Description of Artificial Sequence: Synthetic oligonucleotide
  Sense strand starting at position 3265 of SEQ ID NO: 318415
uucgauguugguuggaaga

SEQ ID NO: 560926 - RNA, 19 nt, Artificial Sequence
  Description of Artificial Sequence: Synthetic oligonucleotide
  Antisense strand to SEQ ID NO: 560925
ucuuccaaccaacaucgaa

SEQ ID NO: 560927 - RNA, 19 nt, Artificial Sequence
  Description of Artificial Sequence: Synthetic oligonucleotide
  Sense strand starting at position 3313 of SEQ ID NO: 318415
ucguuaugacaaggucauc

SEQ ID NO: 560928 - RNA, 19 nt, Artificial Sequence
  Description of Artificial Sequence: Synthetic oligonucleotide
  Antisense strand to SEQ ID NO: 560927
gaugaccuugucauaacga

SEQ ID NO: 560929 - RNA, 19 nt, Artificial Sequence
  Description of Artificial Sequence: Synthetic oligonucleotide
  Sense strand starting at position 3323 of SEQ ID NO: 318415
aaggucauccgucauuguu

SEQ ID NO: 560930 - RNA, 19 nt, Artificial Sequence
  Description of Artificial Sequence: Synthetic oligonucleotide
  Antisense strand to SEQ ID NO: 560929
aacaaugacggaugaccuu

SEQ ID NO: 560931 - RNA, 19 nt, Artificial Sequence
  Description of Artificial Sequence: Synthetic oligonucleotide
  Sense strand starting at position 3330 of SEQ ID NO: 318415
uccgucauuguuggauaga

SEQ ID NO: 560932 - RNA, 19 nt, Artificial Sequence
  Description of Artificial Sequence: Synthetic oligonucleotide
  Antisense strand to SEQ ID NO: 560931
ucuauccaacaaugacgga

SEQ ID NO: 560933 - RNA, 19 nt, Artificial Sequence
  Description of Artificial Sequence: Synthetic oligonucleotide
  Sense strand starting at position 3331 of SEQ ID NO: 318415
ccgucauuguuggauagau

SEQ ID NO: 560934 - RNA, 19 nt, Artificial Sequence
  Description of Artificial Sequence: Synthetic oligonucleotide
  Antisense strand to SEQ ID NO: 560933
aucuauccaacaaugacgg

SEQ ID NO: 560935 - RNA, 19 nt, Artificial Sequence
  Description of Artificial Sequence: Synthetic oligonucleotide
  Sense strand starting at position 3333 of SEQ ID NO: 318415
gucauuguuggauagauug

SEQ ID NO: 560936 - RNA, 19 nt, Artificial Sequence
  Description of Artificial Sequence: Synthetic oligonucleotide
  Antisense strand to SEQ ID NO: 560935
caaucuauccaacaaugac

SEQ ID NO: 560937 - RNA, 19 nt, Artificial Sequence
  Description of Artificial Sequence: Synthetic oligonucleotide
  Sense strand starting at position 3487 of SEQ ID NO: 318415
uuaaucugcucgcagaacu

SEQ ID NO: 560938 - RNA, 19 nt, Artificial Sequence
  Description of Artificial Sequence: Synthetic oligonucleotide
  Antisense strand to SEQ ID NO: 560937
aguucugcgagcagauuaa

SEQ ID NO: 560939 - RNA, 19 nt, Artificial Sequence
  Description of Artificial Sequence: Synthetic oligonucleotide
  Sense strand starting at position 3497 of SEQ ID NO: 318415
cgcagaacugccgaagagu

SEQ ID NO: 560940 - RNA, 19 nt, Artificial Sequence
  Description of Artificial Sequence: Synthetic oligonucleotide
  Antisense strand to SEQ ID NO: 560939
acucuucggcaguucugcg

SEQ ID NO: 560941 - RNA, 19 nt, Artificial Sequence
  Description of Artificial Sequence: Synthetic oligonucleotide
  Sense strand starting at position 3593 of SEQ ID NO: 318415
uccucuguucccugggaga

SEQ ID NO: 560942 - RNA, 19 nt, Artificial Sequence
  Description of Artificial Sequence: Synthetic oligonucleotide
  Antisense strand to SEQ ID NO: 560941
ucucccagggaacagagga

SEQ ID NO: 560943 - RNA, 19 nt, Artificial Sequence
  Description of Artificial Sequence: Synthetic oligonucleotide
  Sense strand starting at position 3595 of SEQ ID NO: 318415
cucuguucccugggagaga

SEQ ID NO: 560944 - RNA, 19 nt, Artificial Sequence
  Description of Artificial Sequence: Synthetic oligonucleotide
  Antisense strand to SEQ ID NO: 560943
ucucucccagggaacagag

SEQ ID NO: 560945 - RNA, 19 nt, Artificial Sequence
  Description of Artificial Sequence: Synthetic oligonucleotide
  Sense strand starting at position 3791 of SEQ ID NO: 318415
auuagaaagucucuggauu

SEQ ID NO: 560946 - RNA, 19 nt, Artificial Sequence
  Description of Artificial Sequence: Synthetic oligonucleotide
  Antisense strand to SEQ ID NO: 560945
aauccagagacuuucuaau

SEQ ID NO: 560947 - RNA, 19 nt, Artificial Sequence
  Description of Artificial Sequence: Synthetic oligonucleotide
  Sense strand starting at position 3878 of SEQ ID NO: 318415
gaggguuccucucguaaua

SEQ ID NO: 560948 - RNA, 19 nt, Artificial Sequence
  Description of Artificial Sequence: Synthetic oligonucleotide
  Antisense strand to SEQ ID NO: 560947
uauuacgagaggaacccuc

SEQ ID NO: 560949 - RNA, 19 nt, Artificial Sequence
  Description of Artificial Sequence: Synthetic oligonucleotide
  Sense strand starting at position 3880 of SEQ ID NO: 318415
ggguuccucucguaauaag

SEQ ID NO: 560950 - RNA, 19 nt, Artificial Sequence
  Description of Artificial Sequence: Synthetic oligonucleotide
  Antisense strand to SEQ ID NO: 560949
cuuauuacgagaggaaccc

SEQ ID NO: 560951 - RNA, 19 nt, Artificial Sequence
  Description of Artificial Sequence: Synthetic oligonucleotide
  Sense strand starting at position 3883 of SEQ ID NO: 318415
uuccucucguaauaagauu

SEQ ID NO: 560952 - RNA, 19 nt, Artificial Sequence
  Description of Artificial Sequence: Synthetic oligonucleotide
  Antisense strand to SEQ ID NO: 560951
aaucuuauuacgagaggaa

SEQ ID NO: 560953 - RNA, 19 nt, Artificial Sequence
  Description of Artificial Sequence: Synthetic oligonucleotide
  Sense strand starting at position 3889 of SEQ ID NO: 318415
ucguaauaagauuagcuga

SEQ ID NO: 560954 - RNA, 19 nt, Artificial Sequence
  Description of Artificial Sequence: Synthetic oligonucleotide
  Antisense strand to SEQ ID NO: 560953
ucagcuaaucuuauuacga

SEQ ID NO: 560955 - RNA, 19 nt, Artificial Sequence
  Description of Artificial Sequence: Synthetic oligonucleotide
  Sense strand starting at position 3896 of SEQ ID NO: 318415
aagauuagcugaccuguua

SEQ ID NO: 560956 - RNA, 19 nt, Artificial Sequence
  Description of Artificial Sequence: Synthetic oligonucleotide
  Antisense strand to SEQ ID NO: 560955
uaacaggucagcuaaucuu

SEQ ID NO: 560957 - RNA, 19 nt, Artificial Sequence
  Description of Artificial Sequence: Synthetic oligonucleotide
  Sense strand starting at position 3904 of SEQ ID NO: 318415
cugaccuguuaaugagagu

SEQ ID NO: 560958 - RNA, 19 nt, Artificial Sequence
  Description of Artificial Sequence: Synthetic oligonucleotide
  Antisense strand to SEQ ID NO: 560957
acucucauuaacaggucag

SEQ ID NO: 560959 - RNA, 19 nt, Artificial Sequence
  Description of Artificial Sequence: Synthetic oligonucleotide
  Sense strand starting at position 3905 of SEQ ID NO: 318415
ugaccuguuaaugagaguu

SEQ ID NO: 560960 - RNA, 19 nt, Artificial Sequence
  Description of Artificial Sequence: Synthetic oligonucleotide
  Antisense strand to SEQ ID NO: 560959
aacucucauuaacagguca

SEQ ID NO: 560961 - RNA, 19 nt, Artificial Sequence
  Description of Artificial Sequence: Synthetic oligonucleotide
  Sense strand starting at position 3946 of SEQ ID NO: 318415
ggcgcuuuauguccauuua

SEQ ID NO: 560962 - RNA, 19 nt, Artificial Sequence
  Description of Artificial Sequence: Synthetic oligonucleotide
  Antisense strand to SEQ ID NO: 560961
uaaauggacauaaagcgcc

SEQ ID NO: 560963 - RNA, 19 nt, Artificial Sequence
  Description of Artificial Sequence: Synthetic oligonucleotide
  Sense strand starting at position 3947 of SEQ ID NO: 318415
gcgcuuuauguccauuuaa

SEQ ID NO: 560964 - RNA, 19 nt, Artificial Sequence
  Description of Artificial Sequence: Synthetic oligonucleotide
  Antisense strand to SEQ ID NO: 560963
uuaaauggacauaaagcgc

SEQ ID NO: 560965 - RNA, 19 nt, Artificial Sequence
  Description of Artificial Sequence: Synthetic oligonucleotide
  Sense strand starting at position 3978 of SEQ ID NO: 318415
cggagaaggcauuaucauu

SEQ ID NO: 560966 - RNA, 19 nt, Artificial Sequence
  Description of Artificial Sequence: Synthetic oligonucleotide
  Antisense strand to SEQ ID NO: 560965
aaugauaaugccuucuccg

SEQ ID NO: 560967 - RNA, 19 nt, Artificial Sequence
  Description of Artificial Sequence: Synthetic oligonucleotide
  Sense strand starting at position 14 of SEQ ID NO: 318416
uccuguuaccuauaguaau

SEQ ID NO: 560968 - RNA, 19 nt, Artificial Sequence
  Description of Artificial Sequence: Synthetic oligonucleotide
  Antisense strand to SEQ ID NO: 560967
auuacuauagguaacagga

SEQ ID NO: 560969 - RNA, 19 nt, Artificial Sequence
  Description of Artificial Sequence: Synthetic oligonucleotide
  Sense strand starting at position 172 of SEQ ID NO: 318416
gugauuuacuaguacacau

SEQ ID NO: 560970 - RNA, 19 nt, Artificial Sequence
  Description of Artificial Sequence: Synthetic oligonucleotide
  Antisense strand to SEQ ID NO: 560969
auguguacuaguaaaucac

SEQ ID NO: 560971 - RNA, 19 nt, Artificial Sequence
  Description of Artificial Sequence: Synthetic oligonucleotide
  Sense strand starting at position 241 of SEQ ID NO: 318416
cugggagucucugugaaac

SEQ ID NO: 560972 - RNA, 19 nt, Artificial Sequence
  Description of Artificial Sequence: Synthetic oligonucleotide
  Antisense strand to SEQ ID NO: 560971
guuucacagagacucccag

SEQ ID NO: 560973 - RNA, 19 nt, Artificial Sequence
  Description of Artificial Sequence: Synthetic oligonucleotide
  Sense strand starting at position 302 of SEQ ID NO: 318416
ugagcagacccugagcauu

SEQ ID NO: 560974 - RNA, 19 nt, Artificial Sequence
  Description of Artificial Sequence: Synthetic oligonucleotide
  Antisense strand to SEQ ID NO: 560973
aaugcucagggucugcuca

SEQ ID NO: 560975 - RNA, 19 nt, Artificial Sequence
  Description of Artificial Sequence: Synthetic oligonucleotide
  Sense strand starting at position 342 of SEQ ID NO: 318416
agagcagucgcugaugcua

SEQ ID NO: 560976 - RNA, 19 nt, Artificial Sequence
  Description of Artificial Sequence: Synthetic oligonucleotide
  Antisense strand to SEQ ID NO: 560975
uagcaucagcgacugcucu

SEQ ID NO: 560977 - RNA, 19 nt, Artificial Sequence
  Description of Artificial Sequence: Synthetic oligonucleotide
  Sense strand starting at position 454 of SEQ ID NO: 318416
ugcagcacuccagagauca

SEQ ID NO: 560978 - RNA, 19 nt, Artificial Sequence
  Description of Artificial Sequence: Synthetic oligonucleotide
  Antisense strand to SEQ ID NO: 560977
ugaucucuggagugcugca

SEQ ID NO: 560979 - RNA, 19 nt, Artificial Sequence
  Description of Artificial Sequence: Synthetic oligonucleotide
  Sense strand starting at position 959 of SEQ ID NO: 318416
ggaguccugaggugugaga

SEQ ID NO: 560980 - RNA, 19 nt, Artificial Sequence
  Description of Artificial Sequence: Synthetic oligonucleotide
  Antisense strand to SEQ ID NO: 560979
ucucacaccucaggacucc

SEQ ID NO: 560981 - RNA, 19 nt, Artificial Sequence
  Description of Artificial Sequence: Synthetic oligonucleotide
  Sense strand starting at position 1291 of SEQ ID NO: 318416
ggcugauaguaucuguggu

SEQ ID NO: 560982 - RNA, 19 nt, Artificial Sequence
  Description of Artificial Sequence: Synthetic oligonucleotide
  Antisense strand to SEQ ID NO: 560981
accacagauacuaucagcc

SEQ ID NO: 560983 - RNA, 19 nt, Artificial Sequence
  Description of Artificial Sequence: Synthetic oligonucleotide
  Sense strand starting at position 1293 of SEQ ID NO: 318416
cugauaguaucugugguuu

SEQ ID NO: 560984 - RNA, 19 nt, Artificial Sequence
  Description of Artificial Sequence: Synthetic oligonucleotide
  Antisense strand to SEQ ID NO: 560983
aaaccacagauacuaucag

SEQ ID NO: 560985 - RNA, 19 nt, Artificial Sequence
  Description of Artificial Sequence: Synthetic oligonucleotide
  Sense strand starting at position 1429 of SEQ ID NO: 318416
gaucuuugaggcugaggaa

SEQ ID NO: 560986 - RNA, 19 nt, Artificial Sequence
  Description of Artificial Sequence: Synthetic oligonucleotide
  Antisense strand to SEQ ID NO: 560985
uuccucagccucaaagauc

SEQ ID NO: 560987 - RNA, 19 nt, Artificial Sequence
  Description of Artificial Sequence: Synthetic oligonucleotide
  Sense strand starting at position 1442 of SEQ ID NO: 318416
gaggaaauucugggucuca

SEQ ID NO: 560988 - RNA, 19 nt, Artificial Sequence
  Description of Artificial Sequence: Synthetic oligonucleotide
  Antisense strand to SEQ ID NO: 560987
ugagacccagaauuuccuc

SEQ ID NO: 560989 - RNA, 19 nt, Artificial Sequence
  Description of Artificial Sequence: Synthetic oligonucleotide
  Sense strand starting at position 1443 of SEQ ID NO: 318416
aggaaauucugggucucag

SEQ ID NO: 560990 - RNA, 19 nt, Artificial Sequence
  Description of Artificial Sequence: Synthetic oligonucleotide
  Antisense strand to SEQ ID NO: 560989
cugagacccagaauuuccu

SEQ ID NO: 560991 - RNA, 19 nt, Artificial Sequence
  Description of Artificial Sequence: Synthetic oligonucleotide
  Sense strand starting at position 1455 of SEQ ID NO: 318416
gucucagguaaaggagauu

SEQ ID NO: 560992 - RNA, 19 nt, Artificial Sequence
  Description of Artificial Sequence: Synthetic oligonucleotide
  Antisense strand to SEQ ID NO: 560991
aaucuccuuuaccugagac

SEQ ID NO: 560993 - RNA, 19 nt, Artificial Sequence
  Description of Artificial Sequence: Synthetic oligonucleotide
  Sense strand starting at position 1499 of SEQ ID NO: 318416
ggucuuugacacugagguu

SEQ ID NO: 560994 - RNA, 19 nt, Artificial Sequence
  Description of Artificial Sequence: Synthetic oligonucleotide
  Antisense strand to SEQ ID NO: 560993
aaccucagugucaaagacc

SEQ ID NO: 560995 - RNA, 19 nt, Artificial Sequence
  Description of Artificial Sequence: Synthetic oligonucleotide
  Sense strand starting at position 1500 of SEQ ID NO: 318416
gucuuugacacugagguua

SEQ ID NO: 560996 - RNA, 19 nt, Artificial Sequence
  Description of Artificial Sequence: Synthetic oligonucleotide
  Antisense strand to SEQ ID NO: 560995
uaaccucagugucaaagac

SEQ ID NO: 560997 - RNA, 19 nt, Artificial Sequence
  Description of Artificial Sequence: Synthetic oligonucleotide
  Sense strand starting at position 1515 of SEQ ID NO: 318416
guuauuugguccuugaagc

SEQ ID NO: 560998 - RNA, 19 nt, Artificial Sequence
  Description of Artificial Sequence: Synthetic oligonucleotide
  Antisense strand to SEQ ID NO: 560997
gcuucaaggaccaaauaac

SEQ ID NO: 560999 - RNA, 19 nt, Artificial Sequence
  Description of Artificial Sequence: Synthetic oligonucleotide
  Sense strand starting at position 1516 of SEQ ID NO: 318416
uuauuugguccuugaagcu

SEQ ID NO: 561000 - RNA, 19 nt, Artificial Sequence
  Description of Artificial Sequence: Synthetic oligonucleotide
  Antisense strand to SEQ ID NO: 560999
agcuucaaggaccaaauaa

SEQ ID NO: 561001 - RNA, 19 nt, Artificial Sequence
  Description of Artificial Sequence: Synthetic oligonucleotide
  Sense strand starting at position 1531 of SEQ ID NO: 318416
agcugaagggauugaguuu

SEQ ID NO: 561002 - RNA, 19 nt, Artificial Sequence
  Description of Artificial Sequence: Synthetic oligonucleotide
  Antisense strand to SEQ ID NO: 561001
aaacucaaucccuucagcu

SEQ ID NO: 561003 - RNA, 19 nt, Artificial Sequence
  Description of Artificial Sequence: Synthetic oligonucleotide
  Sense strand starting at position 1578 of SEQ ID NO: 318416
ggaaauuuggucugucugu

SEQ ID NO: 561004 - RNA, 19 nt, Artificial Sequence
  Description of Artificial Sequence: Synthetic oligonucleotide
  Antisense strand to SEQ ID NO: 561003
acagacagaccaaauuucc

SEQ ID NO: 561005 - RNA, 19 nt, Artificial Sequence
  Description of Artificial Sequence: Synthetic oligonucleotide
  Sense strand starting at position 1579 of SEQ ID NO: 318416
gaaauuuggucugucugug

SEQ ID NO: 561006 - RNA, 19 nt, Artificial Sequence
  Description of Artificial Sequence: Synthetic oligonucleotide
  Antisense strand to SEQ ID NO: 561005
cacagacagaccaaauuuc

SEQ ID NO: 561007 - RNA, 19 nt, Artificial Sequence
  Description of Artificial Sequence: Synthetic oligonucleotide
  Sense strand starting at position 1586 of SEQ ID NO: 318416
ggucugucugugggugaga

SEQ ID NO: 561008 - RNA, 19 nt, Artificial Sequence
  Description of Artificial Sequence: Synthetic oligonucleotide
  Antisense strand to SEQ ID NO: 561007
ucucacccacagacagacc

SEQ ID NO: 561009 - RNA, 19 nt, Artificial Sequence
  Description of Artificial Sequence: Synthetic oligonucleotide
  Sense strand starting at position 1589 of SEQ ID NO: 318416
cugucugugggugagauau

SEQ ID NO: 561010 - RNA, 19 nt, Artificial Sequence
  Description of Artificial Sequence: Synthetic oligonucleotide
  Antisense strand to SEQ ID NO: 561009
auaucucacccacagacag

SEQ ID NO: 561011 - RNA, 19 nt, Artificial Sequence
  Description of Artificial Sequence: Synthetic oligonucleotide
  Sense strand starting at position 1591 of SEQ ID NO: 318416
gucugugggugagauauuu

SEQ ID NO: 561012 - RNA, 19 nt, Artificial Sequence
  Description of Artificial Sequence: Synthetic oligonucleotide
  Antisense strand to SEQ ID NO: 561011
aaauaucucacccacagac

SEQ ID NO: 561013 - RNA, 19 nt, Artificial Sequence
  Description of Artificial Sequence: Synthetic oligonucleotide
  Sense strand starting at position 1600 of SEQ ID NO: 318416
ugagauauuuaggguuccu

SEQ ID NO: 561014 - RNA, 19 nt, Artificial Sequence
  Description of Artificial Sequence: Synthetic oligonucleotide
  Antisense strand to SEQ ID NO: 561013
aggaacccuaaauaucuca

SEQ ID NO: 561015 - RNA, 19 nt, Artificial Sequence
  Description of Artificial Sequence: Synthetic oligonucleotide
  Sense strand starting at position 1662 of SEQ ID NO: 318416
gcuucucaggcucagaaua

SEQ ID NO: 561016 - RNA, 19 nt, Artificial Sequence
  Description of Artificial Sequence: Synthetic oligonucleotide
  Antisense strand to SEQ ID NO: 561015
uauucugagccugagaagc

SEQ ID NO: 561017 - RNA, 19 nt, Artificial Sequence
  Description of Artificial Sequence: Synthetic oligonucleotide
  Sense strand starting at position 1686 of SEQ ID NO: 318416
ugcucuaagcauuaggaga

SEQ ID NO: 561018 - RNA, 19 nt, Artificial Sequence
  Description of Artificial Sequence: Synthetic oligonucleotide
  Antisense strand to SEQ ID NO: 561017
ucuccuaaugcuuagagca

SEQ ID NO: 561019 - RNA, 19 nt, Artificial Sequence
  Description of Artificial Sequence: Synthetic oligonucleotide
  Sense strand starting at position 1984 of SEQ ID NO: 318416
ccgggcguucucucagagu

SEQ ID NO: 561020 - RNA, 19 nt, Artificial Sequence
  Description of Artificial Sequence: Synthetic oligonucleotide
  Antisense strand to SEQ ID NO: 561019
acucugagagaacgcccgg

SEQ ID NO: 561021 - RNA, 19 nt, Artificial Sequence
  Description of Artificial Sequence: Synthetic oligonucleotide
  Sense strand starting at position 2411 of SEQ ID NO: 318416
cacugauucucaucuggga

SEQ ID NO: 561022 - RNA, 19 nt, Artificial Sequence
  Description of Artificial Sequence: Synthetic oligonucleotide
  Antisense strand to SEQ ID NO: 561021
ucccagaugagaaucagug

SEQ ID NO: 561023 - RNA, 19 nt, Artificial Sequence
  Description of Artificial Sequence: Synthetic oligonucleotide
  Sense strand starting at position 2522 of SEQ ID NO: 318416
ccuuacgugugggugaauu

SEQ ID NO: 561024 - RNA, 19 nt, Artificial Sequence
  Description of Artificial Sequence: Synthetic oligonucleotide
  Antisense strand to SEQ ID NO: 561023
aauucacccacacguaagg

SEQ ID NO: 561025 - RNA, 19 nt, Artificial Sequence
  Description of Artificial Sequence: Synthetic oligonucleotide
  Sense strand starting at position 2561 of SEQ ID NO: 318416
uguauuagcuggccaauuu

SEQ ID NO: 561026 - RNA, 19 nt, Artificial Sequence
  Description of Artificial Sequence: Synthetic oligonucleotide
  Antisense strand to SEQ ID NO: 561025
aaauuggccagcuaauaca

SEQ ID NO: 561027 - RNA, 19 nt, Artificial Sequence
  Description of Artificial Sequence: Synthetic oligonucleotide
  Sense strand starting at position 2588 of SEQ ID NO: 318416
uaguuagggccgugaucca

SEQ ID NO: 561028 - RNA, 19 nt, Artificial Sequence
  Description of Artificial Sequence: Synthetic oligonucleotide
  Antisense strand to SEQ ID NO: 561027
uggaucacggcccuaacua

SEQ ID NO: 561029 - RNA, 19 nt, Artificial Sequence
  Description of Artificial Sequence: Synthetic oligonucleotide
  Sense strand starting at position 2741 of SEQ ID NO: 318416
ccuguaaucacugguggcu

SEQ ID NO: 561030 - RNA, 19 nt, Artificial Sequence
  Description of Artificial Sequence: Synthetic oligonucleotide
  Antisense strand to SEQ ID NO: 561029
agccaccagugauuacagg

SEQ ID NO: 561031 - RNA, 19 nt, Artificial Sequence
  Description of Artificial Sequence: Synthetic oligonucleotide
  Sense strand starting at position 3010 of SEQ ID NO: 318416
agaaguauggcuugagguu

SEQ ID NO: 561032 - RNA, 19 nt, Artificial Sequence
  Description of Artificial Sequence: Synthetic oligonucleotide
  Antisense strand to SEQ ID NO: 561031
aaccucaagccauacuucu

SEQ ID NO: 561033 - RNA, 19 nt, Artificial Sequence
  Description of Artificial Sequence: Synthetic oligonucleotide
  Sense strand starting at position 3011 of SEQ ID NO: 318416
gaaguauggcuugagguug

SEQ ID NO: 561034 - RNA, 19 nt, Artificial Sequence
  Description of Artificial Sequence: Synthetic oligonucleotide
  Antisense strand to SEQ ID NO: 561033
caaccucaagccauacuuc

SEQ ID NO: 561035 - RNA, 19 nt, Artificial Sequence
  Description of Artificial Sequence: Synthetic oligonucleotide
  Sense strand starting at position 3271 of SEQ ID NO: 318416
agucuccugcaaggagaua

SEQ ID NO: 561036 - RNA, 19 nt, Artificial Sequence
  Description of Artificial Sequence: Synthetic oligonucleotide
  Antisense strand to SEQ ID NO: 561035
uaucuccuugcaggagacu

SEQ ID NO: 561037 - RNA, 19 nt, Artificial Sequence
  Description of Artificial Sequence: Synthetic oligonucleotide
  Sense strand starting at position 3313 of SEQ ID NO: 318416
cuauuaguccguucucgca

SEQ ID NO: 561038 - RNA, 19 nt, Artificial Sequence
  Description of Artificial Sequence: Synthetic oligonucleotide
  Antisense strand to SEQ ID NO: 561037
ugcgagaacggacuaauag

SEQ ID NO: 561039 - RNA, 19 nt, Artificial Sequence
  Description of Artificial Sequence: Synthetic oligonucleotide
  Sense strand starting at position 3597 of SEQ ID NO: 318416
uaagaaguuuguccuguga

SEQ ID NO: 561040 - RNA, 19 nt, Artificial Sequence
  Description of Artificial Sequence: Synthetic oligonucleotide
  Antisense strand to SEQ ID NO: 561039
ucacaggacaaacuucuua

SEQ ID NO: 561041 - RNA, 19 nt, Artificial Sequence
  Description of Artificial Sequence: Synthetic oligonucleotide
  Sense strand starting at position 3601 of SEQ ID NO: 318416
aaguuuguccugugacaaa

SEQ ID NO: 561042 - RNA, 19 nt, Artificial Sequence
  Description of Artificial Sequence: Synthetic oligonucleotide
  Antisense strand to SEQ ID NO: 561041
uuugucacaggacaaacuu

SEQ ID NO: 561043 - RNA, 19 nt, Artificial Sequence
  Description of Artificial Sequence: Synthetic oligonucleotide
  Sense strand starting at position 3830 of SEQ ID NO: 318416
ucuuuauaacauuggaaug

SEQ ID NO: 561044 - RNA, 19 nt, Artificial Sequence
  Description of Artificial Sequence: Synthetic oligonucleotide
  Antisense strand to SEQ ID NO: 561043
cauuccaauguuauaaaga

SEQ ID NO: 561045 - RNA, 19 nt, Artificial Sequence
  Description of Artificial Sequence: Synthetic oligonucleotide
  Sense strand starting at position 3849 of SEQ ID NO: 318416
agcaauuacuuccuggaua

SEQ ID NO: 561046 - RNA, 19 nt, Artificial Sequence
  Description of Artificial Sequence: Synthetic oligonucleotide
  Antisense strand to SEQ ID NO: 561045
uauccaggaaguaauugcu

SEQ ID NO: 561047 - RNA, 19 nt, Artificial Sequence
  Description of Artificial Sequence: Synthetic oligonucleotide
  Sense strand starting at position 402 of SEQ ID NO: 318417
gguggugugugcuuagaaa

SEQ ID NO: 561048 - RNA, 19 nt, Artificial Sequence
  Description of Artificial Sequence: Synthetic oligonucleotide
  Antisense strand to SEQ ID NO: 561047
uuucuaagcacacaccacc

SEQ ID NO: 561049 - RNA, 19 nt, Artificial Sequence
  Description of Artificial Sequence: Synthetic oligonucleotide
  Sense strand starting at position 516 of SEQ ID NO: 318417
gugagacucuugucaccag

SEQ ID NO: 561050 - RNA, 19 nt, Artificial Sequence
  Description of Artificial Sequence: Synthetic oligonucleotide
  Antisense strand to SEQ ID NO: 561049
cuggugacaagagucucac

SEQ ID NO: 561051 - RNA, 19 nt, Artificial Sequence
  Description of Artificial Sequence: Synthetic oligonucleotide
  Sense strand starting at position 519 of SEQ ID NO: 318417
agacucuugucaccagaaa

SEQ ID NO: 561052 - RNA, 19 nt, Artificial Sequence
  Description of Artificial Sequence: Synthetic oligonucleotide
  Antisense strand to SEQ ID NO: 561051
uuucuggugacaagagucu

SEQ ID NO: 561053 - RNA, 19 nt, Artificial Sequence
  Description of Artificial Sequence: Synthetic oligonucleotide
  Sense strand starting at position 597 of SEQ ID NO: 318417
cugugaguccaacauauau

SEQ ID NO: 561054 - RNA, 19 nt, Artificial Sequence
  Description of Artificial Sequence: Synthetic oligonucleotide
  Antisense strand to SEQ ID NO: 561053
auauauguuggacucacag

SEQ ID NO: 561055 - RNA, 19 nt, Artificial Sequence
  Description of Artificial Sequence: Synthetic oligonucleotide
  Sense strand starting at position 608 of SEQ ID NO: 318417
acauauaucugugccauag

SEQ ID NO: 561056 - RNA, 19 nt, Artificial Sequence
  Description of Artificial Sequence: Synthetic oligonucleotide
  Antisense strand to SEQ ID NO: 561055
cuauggcacagauauaugu

SEQ ID NO: 561057 - RNA, 19 nt, Artificial Sequence
  Description of Artificial Sequence: Synthetic oligonucleotide
  Sense strand starting at position 634 of SEQ ID NO: 318417
augggagcgcuuugcauuu

SEQ ID NO: 561058 - RNA, 19 nt, Artificial Sequence
  Description of Artificial Sequence: Synthetic oligonucleotide
  Antisense strand to SEQ ID NO: 561057
aaaugcaaagcgcucccau

SEQ ID NO: 561059 - RNA, 19 nt, Artificial Sequence
  Description of Artificial Sequence: Synthetic oligonucleotide
  Sense strand starting at position 640 of SEQ ID NO: 318417
gcgcuuugcauuuagaacu

SEQ ID NO: 561060 - RNA, 19 nt, Artificial Sequence
  Description of Artificial Sequence: Synthetic oligonucleotide
  Antisense strand to SEQ ID NO: 561059
aguucuaaaugcaaagcgc

SEQ ID NO: 561061 - RNA, 19 nt, Artificial Sequence
  Description of Artificial Sequence: Synthetic oligonucleotide
  Sense strand starting at position 658 of SEQ ID NO: 318417
uuaggacaacuccguaaga

SEQ ID NO: 561062 - RNA, 19 nt, Artificial Sequence
  Description of Artificial Sequence: Synthetic oligonucleotide
  Antisense strand to SEQ ID NO: 561061
ucuuacggaguuguccuaa

SEQ ID NO: 561063 - RNA, 19 nt, Artificial Sequence
  Description of Artificial Sequence: Synthetic oligonucleotide
  Sense strand starting at position 659 of SEQ ID NO: 318417
uaggacaacuccguaagau

SEQ ID NO: 561064 - RNA, 19 nt, Artificial Sequence
  Description of Artificial Sequence: Synthetic oligonucleotide
  Antisense strand to SEQ ID NO: 561063
aucuuacggaguuguccua

SEQ ID NO: 561065 - RNA, 19 nt, Artificial Sequence
  Description of Artificial Sequence: Synthetic oligonucleotide
  Sense strand starting at position 825 of SEQ ID NO: 318417
gcucucuagccacauguau

SEQ ID NO: 561066 - RNA, 19 nt, Artificial Sequence
  Description of Artificial Sequence: Synthetic oligonucleotide
  Antisense strand to SEQ ID NO: 561065
auacauguggcuagagagc

SEQ ID NO: 561067 - RNA, 19 nt, Artificial Sequence
  Description of Artificial Sequence: Synthetic oligonucleotide
  Sense strand starting at position 833 of SEQ ID NO: 318417
gccacauguaucugaggag

SEQ ID NO: 561068 - RNA, 19 nt, Artificial Sequence
  Description of Artificial Sequence: Synthetic oligonucleotide
  Antisense strand to SEQ ID NO: 561067
cuccucagauacauguggc

SEQ ID NO: 561069 - RNA, 19 nt, Artificial Sequence
  Description of Artificial Sequence: Synthetic oligonucleotide
  Sense strand starting at position 900 of SEQ ID NO: 318417
ggaggugucucaccaucag

SEQ ID NO: 561070 - RNA, 19 nt, Artificial Sequence
  Description of Artificial Sequence: Synthetic oligonucleotide
  Antisense strand to SEQ ID NO: 561069
cugauggugagacaccucc

SEQ ID NO: 561071 - RNA, 19 nt, Artificial Sequence
  Description of Artificial Sequence: Synthetic oligonucleotide
  Sense strand starting at position 1258 of SEQ ID NO: 318417
ugguaugugcuaugguuca

SEQ ID NO: 561072 - RNA, 19 nt, Artificial Sequence
  Description of Artificial Sequence: Synthetic oligonucleotide
  Antisense strand to SEQ ID NO: 561071
ugaaccauagcacauacca

SEQ ID NO: 561073 - RNA, 19 nt, Artificial Sequence
  Description of Artificial Sequence: Synthetic oligonucleotide
  Sense strand starting at position 1460 of SEQ ID NO: 318417
gucucaccacacugagaaa

SEQ ID NO: 561074 - RNA, 19 nt, Artificial Sequence
  Description of Artificial Sequence: Synthetic oligonucleotide
  Antisense strand to SEQ ID NO: 561073
uuucucaguguggugagac

SEQ ID NO: 561075 - RNA, 19 nt, Artificial Sequence
  Description of Artificial Sequence: Synthetic oligonucleotide
  Sense strand starting at position 1628 of SEQ ID NO: 318417
auaauucgaucuccagaua

SEQ ID NO: 561076 - RNA, 19 nt, Artificial Sequence
  Description of Artificial Sequence: Synthetic oligonucleotide
  Antisense strand to SEQ ID NO: 561075
uaucuggagaucgaauuau

SEQ ID NO: 561077 - RNA, 19 nt, Artificial Sequence
  Description of Artificial Sequence: Synthetic oligonucleotide
  Sense strand starting at position 2243 of SEQ ID NO: 318417
gggucuucgaaggauaauc

SEQ ID NO: 561078 - RNA, 19 nt, Artificial Sequence
  Description of Artificial Sequence: Synthetic oligonucleotide
  Antisense strand to SEQ ID NO: 561077
gauuauccuucgaagaccc

SEQ ID NO: 561079 - RNA, 19 nt, Artificial Sequence
  Description of Artificial Sequence: Synthetic oligonucleotide
  Sense strand starting at position 2579 of SEQ ID NO: 318417
gccuuaucagaacgugagu

SEQ ID NO: 561080 - RNA, 19 nt, Artificial Sequence
  Description of Artificial Sequence: Synthetic oligonucleotide
  Antisense strand to SEQ ID NO: 561079
acucacguucugauaaggc

SEQ ID NO: 561081 - RNA, 19 nt, Artificial Sequence
  Description of Artificial Sequence: Synthetic oligonucleotide
  Sense strand starting at position 2639 of SEQ ID NO: 318417
gccgguaaucugcaccuau

SEQ ID NO: 561082 - RNA, 19 nt, Artificial Sequence
  Description of Artificial Sequence: Synthetic oligonucleotide
  Antisense strand to SEQ ID NO: 561081
auaggugcagauuaccggc

SEQ ID NO: 561083 - RNA, 19 nt, Artificial Sequence
  Description of Artificial Sequence: Synthetic oligonucleotide
  Sense strand starting at position 2768 of SEQ ID NO: 318417
ccaucuauucuugggagac

SEQ ID NO: 561084 - RNA, 19 nt, Artificial Sequence
  Description of Artificial Sequence: Synthetic oligonucleotide
  Antisense strand to SEQ ID NO: 561083
gucucccaagaauagaugg

SEQ ID NO: 561085 - RNA, 19 nt, Artificial Sequence
  Description of Artificial Sequence: Synthetic oligonucleotide
  Sense strand starting at position 2778 of SEQ ID NO: 318417
uugggagacucauuccuga

SEQ ID NO: 561086 - RNA, 19 nt, Artificial Sequence
  Description of Artificial Sequence: Synthetic oligonucleotide
  Antisense strand to SEQ ID NO: 561085
ucaggaaugagucucccaa

SEQ ID NO: 561087 - RNA, 19 nt, Artificial Sequence
  Description of Artificial Sequence: Synthetic oligonucleotide
  Sense strand starting at position 2803 of SEQ ID NO: 318417
guagguccugccuauuacu

SEQ ID NO: 561088 - RNA, 19 nt, Artificial Sequence
  Description of Artificial Sequence: Synthetic oligonucleotide
  Antisense strand to SEQ ID NO: 561087
aguaauaggcaggaccuac

SEQ ID NO: 561089 - RNA, 19 nt, Artificial Sequence
  Description of Artificial Sequence: Synthetic oligonucleotide
  Sense strand starting at position 2812 of SEQ ID NO: 318417
gccuauuacugguugauuu

SEQ ID NO: 561090 - RNA, 19 nt, Artificial Sequence
  Description of Artificial Sequence: Synthetic oligonucleotide
  Antisense strand to SEQ ID NO: 561089
aaaucaaccaguaauaggc

SEQ ID NO: 561091 - RNA, 19 nt, Artificial Sequence
  Description of Artificial Sequence: Synthetic oligonucleotide
  Sense strand starting at position 2823 of SEQ ID NO: 318417
guugauuuguggccucaca

SEQ ID NO: 561092 - RNA, 19 nt, Artificial Sequence
  Description of Artificial Sequence: Synthetic oligonucleotide
  Antisense strand to SEQ ID NO: 561091
ugugaggccacaaaucaac

SEQ ID NO: 561093 - RNA, 19 nt, Artificial Sequence
  Description of Artificial Sequence: Synthetic oligonucleotide
  Sense strand starting at position 2899 of SEQ ID NO: 318417
uggccuuaaguuugacuca

SEQ ID NO: 561094 - RNA, 19 nt, Artificial Sequence
  Description of Artificial Sequence: Synthetic oligonucleotide
  Antisense strand to SEQ ID NO: 561093
ugagucaaacuuaaggcca

SEQ ID NO: 561095 - RNA, 19 nt, Artificial Sequence
  Description of Artificial Sequence: Synthetic oligonucleotide
  Sense strand starting at position 2918 of SEQ ID NO: 318417
ggccuuacucuuuaggaca

SEQ ID NO: 561096 - RNA, 19 nt, Artificial Sequence
  Description of Artificial Sequence: Synthetic oligonucleotide
  Antisense strand to SEQ ID NO: 561095
uguccuaaagaguaaggcc

SEQ ID NO: 561097 - RNA, 19 nt, Artificial Sequence
  Description of Artificial Sequence: Synthetic oligonucleotide
  Sense strand starting at position 2950 of SEQ ID NO: 318417
gcgcuaugaggccaugagu

SEQ ID NO: 561098 - RNA, 19 nt, Artificial Sequence
  Description of Artificial Sequence: Synthetic oligonucleotide
  Antisense strand to SEQ ID NO: 561097
acucauggccucauagcgc

SEQ ID NO: 561099 - RNA, 19 nt, Artificial Sequence
  Description of Artificial Sequence: Synthetic oligonucleotide
  Sense strand starting at position 3134 of SEQ ID NO: 318417
gcagcuuugagcgagcaaa

SEQ ID NO: 561100 - RNA, 19 nt, Artificial Sequence
  Description of Artificial Sequence: Synthetic oligonucleotide
  Antisense strand to SEQ ID NO: 561099
uuugcucgcucaaagcugc

SEQ ID NO: 561101 - RNA, 19 nt, Artificial Sequence
  Description of Artificial Sequence: Synthetic oligonucleotide
  Sense strand starting at position 3147 of SEQ ID NO: 318417
agcaaaguucugggugaag

SEQ ID NO: 561102 - RNA, 19 nt, Artificial Sequence
  Description of Artificial Sequence: Synthetic oligonucleotide
  Antisense strand to SEQ ID NO: 561101
cuucacccagaacuuugcu

SEQ ID NO: 561103 - RNA, 19 nt, Artificial Sequence
  Description of Artificial Sequence: Synthetic oligonucleotide
  Sense strand starting at position 3149 of SEQ ID NO: 318417
caaaguucugggugaagga

SEQ ID NO: 561104 - RNA, 19 nt, Artificial Sequence
  Description of Artificial Sequence: Synthetic oligonucleotide
  Antisense strand to SEQ ID NO: 561103
uccuucacccagaacuuug

SEQ ID NO: 561105 - RNA, 19 nt, Artificial Sequence
  Description of Artificial Sequence: Synthetic oligonucleotide
  Sense strand starting at position 3270 of SEQ ID NO: 318417
ugccaaaucuacuuaugug

SEQ ID NO: 561106 - RNA, 19 nt, Artificial Sequence
  Description of Artificial Sequence: Synthetic oligonucleotide
  Antisense strand to SEQ ID NO: 561105
cacauaaguagauuuggca

SEQ ID NO: 561107 - RNA, 19 nt, Artificial Sequence
  Description of Artificial Sequence: Synthetic oligonucleotide
  Sense strand starting at position 3296 of SEQ ID NO: 318417
gagugaccugcuggaagaa

SEQ ID NO: 561108 - RNA, 19 nt, Artificial Sequence
  Description of Artificial Sequence: Synthetic oligonucleotide
  Antisense strand to SEQ ID NO: 561107
uucuuccagcaggucacuc

SEQ ID NO: 561109 - RNA, 19 nt, Artificial Sequence
  Description of Artificial Sequence: Synthetic oligonucleotide
  Sense strand starting at position 3405 of SEQ ID NO: 318417
ggcugucuggguggaucaa

SEQ ID NO: 561110 - RNA, 19 nt, Artificial Sequence
  Description of Artificial Sequence: Synthetic oligonucleotide
  Antisense strand to SEQ ID NO: 561109
uugauccacccagacagcc

SEQ ID NO: 561111 - RNA, 19 nt, Artificial Sequence
  Description of Artificial Sequence: Synthetic oligonucleotide
  Sense strand starting at position 3406 of SEQ ID NO: 318417
gcugucuggguggaucaaa

SEQ ID NO: 561112 - RNA, 19 nt, Artificial Sequence
  Description of Artificial Sequence: Synthetic oligonucleotide
  Antisense strand to SEQ ID NO: 561111
uuugauccacccagacagc

SEQ ID NO: 561113 - RNA, 19 nt, Artificial Sequence
  Description of Artificial Sequence: Synthetic oligonucleotide
  Sense strand starting at position 3567 of SEQ ID NO: 318417
agucacuucucuuuacaga

SEQ ID NO: 561114 - RNA, 19 nt, Artificial Sequence
  Description of Artificial Sequence: Synthetic oligonucleotide
  Antisense strand to SEQ ID NO: 561113
ucuguaaagagaagugacu

SEQ ID NO: 561115 - RNA, 19 nt, Artificial Sequence
  Description of Artificial Sequence: Synthetic oligonucleotide
  Sense strand starting at position 3568 of SEQ ID NO: 318417
gucacuucucuuuacagau

SEQ ID NO: 561116 - RNA, 19 nt, Artificial Sequence
  Description of Artificial Sequence: Synthetic oligonucleotide
  Antisense strand to SEQ ID NO: 561115
aucuguaaagagaagugac

SEQ ID NO: 561117 - RNA, 19 nt, Artificial Sequence
  Description of Artificial Sequence: Synthetic oligonucleotide
  Sense strand starting at position 3592 of SEQ ID NO: 318417
agcucagcucuuugaaaca

SEQ ID NO: 561118 - RNA, 19 nt, Artificial Sequence
  Description of Artificial Sequence: Synthetic oligonucleotide
  Antisense strand to SEQ ID NO: 561117
uguuucaaagagcugagcu

SEQ ID NO: 561119 - RNA, 19 nt, Artificial Sequence
  Description of Artificial Sequence: Synthetic oligonucleotide
  Sense strand starting at position 3719 of SEQ ID NO: 318417
gggagaucccagggcuacu

SEQ ID NO: 561120 - RNA, 19 nt, Artificial Sequence
  Description of Artificial Sequence: Synthetic oligonucleotide
  Antisense strand to SEQ ID NO: 561119
aguagcccugggaucuccc

SEQ ID NO: 561121 - RNA, 19 nt, Artificial Sequence
  Description of Artificial Sequence: Synthetic oligonucleotide
  Sense strand starting at position 3777 of SEQ ID NO: 318417
cgagcucuuccagaaagug

SEQ ID NO: 561122 - RNA, 19 nt, Artificial Sequence
  Description of Artificial Sequence: Synthetic oligonucleotide
  Antisense strand to SEQ ID NO: 561121
cacuuucuggaagagcucg

SEQ ID NO: 561123 - RNA, 19 nt, Artificial Sequence
  Description of Artificial Sequence: Synthetic oligonucleotide
  Sense strand starting at position 3798 of SEQ ID NO: 318417
agaggauuacgucagugug

SEQ ID NO: 561124 - RNA, 19 nt, Artificial Sequence
  Description of Artificial Sequence: Synthetic oligonucleotide
  Antisense strand to SEQ ID NO: 561123
cacacugacguaauccucu

SEQ ID NO: 561125 - RNA, 19 nt, Artificial Sequence
  Description of Artificial Sequence: Synthetic oligonucleotide
  Sense strand starting at position 3901 of SEQ ID NO: 318417
ugaguuaccugaucccaac

SEQ ID NO: 561126 - RNA, 19 nt, Artificial Sequence
  Description of Artificial Sequence: Synthetic oligonucleotide
  Antisense strand to SEQ ID NO: 561125
guugggaucagguaacuca

SEQ ID NO: 561127 - RNA, 19 nt, Artificial Sequence
  Description of Artificial Sequence: Synthetic oligonucleotide
  Sense strand starting at position 117 of SEQ ID NO: 318418
cuacaacaggucuguaaau

SEQ ID NO: 561128 - RNA, 19 nt, Artificial Sequence
  Description of Artificial Sequence: Synthetic oligonucleotide
  Antisense strand to SEQ ID NO: 561127
auuuacagaccuguuguag

SEQ ID NO: 561129 - RNA, 19 nt, Artificial Sequence
  Description of Artificial Sequence: Synthetic oligonucleotide
  Sense strand starting at position 694 of SEQ ID NO: 318418
uagaaacagucuuugggau

SEQ ID NO: 561130 - RNA, 19 nt, Artificial Sequence
  Description of Artificial Sequence: Synthetic oligonucleotide
  Antisense strand to SEQ ID NO: 561129
aucccaaagacuguuucua

SEQ ID NO: 561131 - RNA, 19 nt, Artificial Sequence
  Description of Artificial Sequence: Synthetic oligonucleotide
  Sense strand starting at position 695 of SEQ ID NO: 318418
agaaacagucuuugggauu

SEQ ID NO: 561132 - RNA, 19 nt, Artificial Sequence
  Description of Artificial Sequence: Synthetic oligonucleotide
  Antisense strand to SEQ ID NO: 561131
aaucccaaagacuguuucu

SEQ ID NO: 561133 - RNA, 19 nt, Artificial Sequence
  Description of Artificial Sequence: Synthetic oligonucleotide
  Sense strand starting at position 714 of SEQ ID NO: 318418
cagggcuccucaguauuga

SEQ ID NO: 561134 - RNA, 19 nt, Artificial Sequence
  Description of Artificial Sequence: Synthetic oligonucleotide
  Antisense strand to SEQ ID NO: 561133
ucaauacugaggagcccug

SEQ ID NO: 561135 - RNA, 19 nt, Artificial Sequence
  Description of Artificial Sequence: Synthetic oligonucleotide
  Sense strand starting at position 752 of SEQ ID NO: 318418
auugaaaucgguuguagua

SEQ ID NO: 561136 - RNA, 19 nt, Artificial Sequence
  Description of Artificial Sequence: Synthetic oligonucleotide
  Antisense strand to SEQ ID NO: 561135
uacuacaaccgauuucaau

SEQ ID NO: 561137 - RNA, 19 nt, Artificial Sequence
  Description of Artificial Sequence: Synthetic oligonucleotide
  Sense strand starting at position 841 of SEQ ID NO: 318418
agagcagauugugugaguu

SEQ ID NO: 561138 - RNA, 19 nt, Artificial Sequence
  Description of Artificial Sequence: Synthetic oligonucleotide
  Antisense strand to SEQ ID NO: 561137
aacucacacaaucugcucu

SEQ ID NO: 561139 - RNA, 19 nt, Artificial Sequence
  Description of Artificial Sequence: Synthetic oligonucleotide
  Sense strand starting at position 853 of SEQ ID NO: 318418
gugaguuacagugaaauau

SEQ ID NO: 561140 - RNA, 19 nt, Artificial Sequence
  Description of Artificial Sequence: Synthetic oligonucleotide
  Antisense strand to SEQ ID NO: 561139
auauuucacuguaacucac

SEQ ID NO: 561141 - RNA, 19 nt, Artificial Sequence
  Description of Artificial Sequence: Synthetic oligonucleotide
  Sense strand starting at position 942 of SEQ ID NO: 318418
cugggagcaacugguuaaa

SEQ ID NO: 561142 - RNA, 19 nt, Artificial Sequence
  Description of Artificial Sequence: Synthetic oligonucleotide
  Antisense strand to SEQ ID NO: 561141
uuuaaccaguugcucccag

SEQ ID NO: 561143 - RNA, 19 nt, Artificial Sequence
  Description of Artificial Sequence: Synthetic oligonucleotide
  Sense strand starting at position 1124 of SEQ ID NO: 318418
ucgacuucugcucaucaga

SEQ ID NO: 561144 - RNA, 19 nt, Artificial Sequence
  Description of Artificial Sequence: Synthetic oligonucleotide
  Antisense strand to SEQ ID NO: 561143
ucugaugagcagaagucga

SEQ ID NO: 561145 - RNA, 19 nt, Artificial Sequence
  Description of Artificial Sequence: Synthetic oligonucleotide
  Sense strand starting at position 1132 of SEQ ID NO: 318418
ugcucaucagaauguauac

SEQ ID NO: 561146 - RNA, 19 nt, Artificial Sequence
  Description of Artificial Sequence: Synthetic oligonucleotide
  Antisense strand to SEQ ID NO: 561145
guauacauucugaugagca

SEQ ID NO: 561147 - RNA, 19 nt, Artificial Sequence
  Description of Artificial Sequence: Synthetic oligonucleotide
  Sense strand starting at position 1171 of SEQ ID NO: 318418
ggaugcagcccucaaacuu

SEQ ID NO: 561148 - RNA, 19 nt, Artificial Sequence
  Description of Artificial Sequence: Synthetic oligonucleotide
  Antisense strand to SEQ ID NO: 561147
aaguuugagggcugcaucc

SEQ ID NO: 561149 - RNA, 19 nt, Artificial Sequence
  Description of Artificial Sequence: Synthetic oligonucleotide
  Sense strand starting at position 1180 of SEQ ID NO: 318418
ccucaaacuuggcucgaau

SEQ ID NO: 561150 - RNA, 19 nt, Artificial Sequence
  Description of Artificial Sequence: Synthetic oligonucleotide
  Antisense strand to SEQ ID NO: 561149
auucgagccaaguuugagg

SEQ ID NO: 561151 - RNA, 19 nt, Artificial Sequence
  Description of Artificial Sequence: Synthetic oligonucleotide
  Sense strand starting at position 1182 of SEQ ID NO: 318418
ucaaacuuggcucgaauga

SEQ ID NO: 561152 - RNA, 19 nt, Artificial Sequence
  Description of Artificial Sequence: Synthetic oligonucleotide
  Antisense strand to SEQ ID NO: 561151
ucauucgagccaaguuuga

SEQ ID NO: 561153 - RNA, 19 nt, Artificial Sequence
  Description of Artificial Sequence: Synthetic oligonucleotide
  Sense strand starting at position 1183 of SEQ ID NO: 318418
caaacuuggcucgaaugaa

SEQ ID NO: 561154 - RNA, 19 nt, Artificial Sequence
  Description of Artificial Sequence: Synthetic oligonucleotide
  Antisense strand to SEQ ID NO: 561153
uucauucgagccaaguuug

SEQ ID NO: 561155 - RNA, 19 nt, Artificial Sequence
  Description of Artificial Sequence: Synthetic oligonucleotide
  Sense strand starting at position 1235 of SEQ ID NO: 318418
ucauuuaggucacaacugu

SEQ ID NO: 561156 - RNA, 19 nt, Artificial Sequence
  Description of Artificial Sequence: Synthetic oligonucleotide
  Antisense strand to SEQ ID NO: 561155
acaguugugaccuaaauga

SEQ ID NO: 561157 - RNA, 19 nt, Artificial Sequence
  Description of Artificial Sequence: Synthetic oligonucleotide
  Sense strand starting at position 1298 of SEQ ID NO: 318418
acucuaugagucgguacua

SEQ ID NO: 561158 - RNA, 19 nt, Artificial Sequence
  Description of Artificial Sequence: Synthetic oligonucleotide
  Antisense strand to SEQ ID NO: 561157
uaguaccgacucauagagu

SEQ ID NO: 561159 - RNA, 19 nt, Artificial Sequence
  Description of Artificial Sequence: Synthetic oligonucleotide
  Sense strand starting at position 1299 of SEQ ID NO: 318418
cucuaugagucgguacuau

SEQ ID NO: 561160 - RNA, 19 nt, Artificial Sequence
  Description of Artificial Sequence: Synthetic oligonucleotide
  Antisense strand to SEQ ID NO: 561159
auaguaccgacucauagag

SEQ ID NO: 561161 - RNA, 19 nt, Artificial Sequence
  Description of Artificial Sequence: Synthetic oligonucleotide
  Sense strand starting at position 1550 of SEQ ID NO: 318418
cccggaggcucuuccuaaa

SEQ ID NO: 561162 - RNA, 19 nt, Artificial Sequence
  Description of Artificial Sequence: Synthetic oligonucleotide
  Antisense strand to SEQ ID NO: 561161
uuuaggaagagccuccggg

SEQ ID NO: 561163 - RNA, 19 nt, Artificial Sequence
  Description of Artificial Sequence: Synthetic oligonucleotide
  Sense strand starting at position 1645 of SEQ ID NO: 318418
gggagucuucgaggaaauc

SEQ ID NO: 561164 - RNA, 19 nt, Artificial Sequence
  Description of Artificial Sequence: Synthetic oligonucleotide
  Antisense strand to SEQ ID NO: 561163
gauuuccucgaagacuccc

SEQ ID NO: 561165 - RNA, 19 nt, Artificial Sequence
  Description of Artificial Sequence: Synthetic oligonucleotide
  Sense strand starting at position 1804 of SEQ ID NO: 318418
guaccuuucggagaaagcu

SEQ ID NO: 561166 - RNA, 19 nt, Artificial Sequence
  Description of Artificial Sequence: Synthetic oligonucleotide
  Antisense strand to SEQ ID NO: 561165
agcuuucuccgaaagguac

SEQ ID NO: 561167 - RNA, 19 nt, Artificial Sequence
  Description of Artificial Sequence: Synthetic oligonucleotide
  Sense strand starting at position 2264 of SEQ ID NO: 318418
gggcuuaugcguuuauggu

SEQ ID NO: 561168 - RNA, 19 nt, Artificial Sequence
  Description of Artificial Sequence: Synthetic oligonucleotide
  Antisense strand to SEQ ID NO: 561167
accauaaacgcauaagccc

SEQ ID NO: 561169 - RNA, 19 nt, Artificial Sequence
  Description of Artificial Sequence: Synthetic oligonucleotide
  Sense strand starting at position 2345 of SEQ ID NO: 318418
gaaggccuggugugacaaa

SEQ ID NO: 561170 - RNA, 19 nt, Artificial Sequence
  Description of Artificial Sequence: Synthetic oligonucleotide
  Antisense strand to SEQ ID NO: 561169
uuugucacaccaggccuuc

SEQ ID NO: 561171 - RNA, 19 nt, Artificial Sequence
  Description of Artificial Sequence: Synthetic oligonucleotide
  Sense strand starting at position 2406 of SEQ ID NO: 318418
uggguuugggccucgugua

SEQ ID NO: 561172 - RNA, 19 nt, Artificial Sequence
  Description of Artificial Sequence: Synthetic oligonucleotide
  Antisense strand to SEQ ID NO: 561171
uacacgaggcccaaaccca

SEQ ID NO: 561173 - RNA, 19 nt, Artificial Sequence
  Description of Artificial Sequence: Synthetic oligonucleotide
  Sense strand starting at position 2413 of SEQ ID NO: 318418
gggccucguguaagguaaa

SEQ ID NO: 561174 - RNA, 19 nt, Artificial Sequence
  Description of Artificial Sequence: Synthetic oligonucleotide
  Antisense strand to SEQ ID NO: 561173
uuuaccuuacacgaggccc

SEQ ID NO: 561175 - RNA, 19 nt, Artificial Sequence
  Description of Artificial Sequence: Synthetic oligonucleotide
  Sense strand starting at position 2416 of SEQ ID NO: 318418
ccucguguaagguaaagau

SEQ ID NO: 561176 - RNA, 19 nt, Artificial Sequence
  Description of Artificial Sequence: Synthetic oligonucleotide
  Antisense strand to SEQ ID NO: 561175
aucuuuaccuuacacgagg

SEQ ID NO: 561177 - RNA, 19 nt, Artificial Sequence
  Description of Artificial Sequence: Synthetic oligonucleotide
  Sense strand starting at position 2428 of SEQ ID NO: 318418
uaaagauugccucgggaau

SEQ ID NO: 561178 - RNA, 19 nt, Artificial Sequence
  Description of Artificial Sequence: Synthetic oligonucleotide
  Antisense strand to SEQ ID NO: 561177
auucccgaggcaaucuuua

SEQ ID NO: 561179 - RNA, 19 nt, Artificial Sequence
  Description of Artificial Sequence: Synthetic oligonucleotide
  Sense strand starting at position 2429 of SEQ ID NO: 318418
aaagauugccucgggaaua

SEQ ID NO: 561180 - RNA, 19 nt, Artificial Sequence
  Description of Artificial Sequence: Synthetic oligonucleotide
  Antisense strand to SEQ ID NO: 561179
uauucccgaggcaaucuuu

SEQ ID NO: 561181 - RNA, 19 nt, Artificial Sequence
  Description of Artificial Sequence: Synthetic oligonucleotide
  Sense strand starting at position 2538 of SEQ ID NO: 318418
aagaguugcgaguauuauu

SEQ ID NO: 561182 - RNA, 19 nt, Artificial Sequence
  Description of Artificial Sequence: Synthetic oligonucleotide
  Antisense strand to SEQ ID NO: 561181
aauaauacucgcaacucuu

SEQ ID NO: 561183 - RNA, 19 nt, Artificial Sequence
  Description of Artificial Sequence: Synthetic oligonucleotide
  Sense strand starting at position 2581 of SEQ ID NO: 318418
ggagaaccagcacguuaau

SEQ ID NO: 561184 - RNA, 19 nt, Artificial Sequence
  Description of Artificial Sequence: Synthetic oligonucleotide
  Antisense strand to SEQ ID NO: 561183
auuaacgugcugguucucc

SEQ ID NO: 561185 - RNA, 19 nt, Artificial Sequence
  Description of Artificial Sequence: Synthetic oligonucleotide
  Sense strand starting at position 2738 of SEQ ID NO: 318418
acaauaaucgguuaaagug

SEQ ID NO: 561186 - RNA, 19 nt, Artificial Sequence
  Description of Artificial Sequence: Synthetic oligonucleotide
  Antisense strand to SEQ ID NO: 561185
cacuuuaaccgauuauugu

SEQ ID NO: 561187 - RNA, 19 nt, Artificial Sequence
  Description of Artificial Sequence: Synthetic oligonucleotide
  Sense strand starting at position 2856 of SEQ ID NO: 318418
gucacacuggucuggcaaa

SEQ ID NO: 561188 - RNA, 19 nt, Artificial Sequence
  Description of Artificial Sequence: Synthetic oligonucleotide
  Antisense strand to SEQ ID NO: 561187
uuugccagaccagugugac

SEQ ID NO: 561189 - RNA, 19 nt, Artificial Sequence
  Description of Artificial Sequence: Synthetic oligonucleotide
  Sense strand starting at position 2877 of SEQ ID NO: 318418
ccuagccuuguguaaaucu

SEQ ID NO: 561190 - RNA, 19 nt, Artificial Sequence
  Description of Artificial Sequence: Synthetic oligonucleotide
  Antisense strand to SEQ ID NO: 561189
agauuuacacaaggcuagg

SEQ ID NO: 561191 - RNA, 19 nt, Artificial Sequence
  Description of Artificial Sequence: Synthetic oligonucleotide
  Sense strand starting at position 2886 of SEQ ID NO: 318418
guguaaaucuaggucuccu

SEQ ID NO: 561192 - RNA, 19 nt, Artificial Sequence
  Description of Artificial Sequence: Synthetic oligonucleotide
  Antisense strand to SEQ ID NO: 561191
aggagaccuagauuuacac

SEQ ID NO: 561193 - RNA, 19 nt, Artificial Sequence
  Description of Artificial Sequence: Synthetic oligonucleotide
  Sense strand starting at position 3412 of SEQ ID NO: 318418
agccuuauacuccagucau

SEQ ID NO: 561194 - RNA, 19 nt, Artificial Sequence
  Description of Artificial Sequence: Synthetic oligonucleotide
  Antisense strand to SEQ ID NO: 561193
augacuggaguauaaggcu

SEQ ID NO: 561195 - RNA, 19 nt, Artificial Sequence
  Description of Artificial Sequence: Synthetic oligonucleotide
  Sense strand starting at position 3447 of SEQ ID NO: 318418
ucacuuagucaauagguca

SEQ ID NO: 561196 - RNA, 19 nt, Artificial Sequence
  Description of Artificial Sequence: Synthetic oligonucleotide
  Antisense strand to SEQ ID NO: 561195
ugaccuauugacuaaguga

SEQ ID NO: 561197 - RNA, 19 nt, Artificial Sequence
  Description of Artificial Sequence: Synthetic oligonucleotide
  Sense strand starting at position 3528 of SEQ ID NO: 318418
ggugaacugucagcacuuu

SEQ ID NO: 561198 - RNA, 19 nt, Artificial Sequence
  Description of Artificial Sequence: Synthetic oligonucleotide
  Antisense strand to SEQ ID NO: 561197
aaagugcugacaguucacc

SEQ ID NO: 561199 - RNA, 19 nt, Artificial Sequence
  Description of Artificial Sequence: Synthetic oligonucleotide
  Sense strand starting at position 3561 of SEQ ID NO: 318418
gucuccauuuguccacuga

SEQ ID NO: 561200 - RNA, 19 nt, Artificial Sequence
  Description of Artificial Sequence: Synthetic oligonucleotide
  Antisense strand to SEQ ID NO: 561199
ucaguggacaaauggagac

SEQ ID NO: 561201 - RNA, 19 nt, Artificial Sequence
  Description of Artificial Sequence: Synthetic oligonucleotide
  Sense strand starting at position 3611 of SEQ ID NO: 318418
auagcuguccuuuaaagua

SEQ ID NO: 561202 - RNA, 19 nt, Artificial Sequence
  Description of Artificial Sequence: Synthetic oligonucleotide
  Antisense strand to SEQ ID NO: 561201
uacuuuaaaggacagcuau

SEQ ID NO: 561203 - RNA, 19 nt, Artificial Sequence
  Description of Artificial Sequence: Synthetic oligonucleotide
  Sense strand starting at position 3741 of SEQ ID NO: 318418
gcaacauggaguugaguga

SEQ ID NO: 561204 - RNA, 19 nt, Artificial Sequence
  Description of Artificial Sequence: Synthetic oligonucleotide
  Antisense strand to SEQ ID NO: 561203
ucacucaacuccauguugc

SEQ ID NO: 561205 - RNA, 19 nt, Artificial Sequence
  Description of Artificial Sequence: Synthetic oligonucleotide
  Sense strand starting at position 3979 of SEQ ID NO: 318418
agaguuugaggccagugua

SEQ ID NO: 561206 - RNA, 19 nt, Artificial Sequence
  Description of Artificial Sequence: Synthetic oligonucleotide
  Antisense strand to SEQ ID NO: 561205
uacacuggccucaaacucu

SEQ ID NO: 561207 - RNA, 19 nt, Artificial Sequence
  Description of Artificial Sequence: Synthetic oligonucleotide
  Sense strand starting at position 431 of SEQ ID NO: 318419
ugacauuguccgccuugca

SEQ ID NO: 561208 - RNA, 19 nt, Artificial Sequence
  Description of Artificial Sequence: Synthetic oligonucleotide
  Antisense strand to SEQ ID NO: 561207
ugcaaggcggacaauguca

SEQ ID NO: 561209 - RNA, 19 nt, Artificial Sequence
  Description of Artificial Sequence: Synthetic oligonucleotide
  Sense strand starting at position 476 of SEQ ID NO: 318419
ugcuucccugugggauaua

SEQ ID NO: 561210 - RNA, 19 nt, Artificial Sequence
  Description of Artificial Sequence: Synthetic oligonucleotide
  Antisense strand to SEQ ID NO: 561209
uauaucccacagggaagca

SEQ ID NO: 561211 - RNA, 19 nt, Artificial Sequence
  Description of Artificial Sequence: Synthetic oligonucleotide
  Sense strand starting at position 577 of SEQ ID NO: 318419
cuguuuauuuagcucugga

SEQ ID NO: 561212 - RNA, 19 nt, Artificial Sequence
  Description of Artificial Sequence: Synthetic oligonucleotide
  Antisense strand to SEQ ID NO: 561211
uccagagcuaaauaaacag

SEQ ID NO: 561213 - RNA, 19 nt, Artificial Sequence
  Description of Artificial Sequence: Synthetic oligonucleotide
  Sense strand starting at position 595 of SEQ ID NO: 318419
aagaguaaggcucaguuga

SEQ ID NO: 561214 - RNA, 19 nt, Artificial Sequence
  Description of Artificial Sequence: Synthetic oligonucleotide
  Antisense strand to SEQ ID NO: 561213
ucaacugagccuuacucuu

SEQ ID NO: 561215 - RNA, 19 nt, Artificial Sequence
  Description of Artificial Sequence: Synthetic oligonucleotide
  Sense strand starting at position 597 of SEQ ID NO: 318419
gaguaaggcucaguugagu

SEQ ID NO: 561216 - RNA, 19 nt, Artificial Sequence
  Description of Artificial Sequence: Synthetic oligonucleotide
  Antisense strand to SEQ ID NO: 561215
acucaacugagccuuacuc

SEQ ID NO: 561217 - RNA, 19 nt, Artificial Sequence
  Description of Artificial Sequence: Synthetic oligonucleotide
  Sense strand starting at position 611 of SEQ ID NO: 318419
ugaguuaccguacagacuu

SEQ ID NO: 561218 - RNA, 19 nt, Artificial Sequence
  Description of Artificial Sequence: Synthetic oligonucleotide
  Antisense strand to SEQ ID NO: 561217
aagucuguacgguaacuca

SEQ ID NO: 561219 - RNA, 19 nt, Artificial Sequence
  Description of Artificial Sequence: Synthetic oligonucleotide
  Sense strand starting at position 618 of SEQ ID NO: 318419
ccguacagacuuuggcaaa

SEQ ID NO: 561220 - RNA, 19 nt, Artificial Sequence
  Description of Artificial Sequence: Synthetic oligonucleotide
  Antisense strand to SEQ ID NO: 561219
uuugccaaagucuguacgg

SEQ ID NO: 561221 - RNA, 19 nt, Artificial Sequence
  Description of Artificial Sequence: Synthetic oligonucleotide
  Sense strand starting at position 675 of SEQ ID NO: 318419
guauaugcaagucagucua

SEQ ID NO: 561222 - RNA, 19 nt, Artificial Sequence
  Description of Artificial Sequence: Synthetic oligonucleotide
  Antisense strand to SEQ ID NO: 561221
uagacugacuugcauauac

SEQ ID NO: 561223 - RNA, 19 nt, Artificial Sequence
  Description of Artificial Sequence: Synthetic oligonucleotide
  Sense strand starting at position 677 of SEQ ID NO: 318419
auaugcaagucagucuauu

SEQ ID NO: 561224 - RNA, 19 nt, Artificial Sequence
  Description of Artificial Sequence: Synthetic oligonucleotide
  Antisense strand to SEQ ID NO: 561223
aauagacugacuugcauau

SEQ ID NO: 561225 - RNA, 19 nt, Artificial Sequence
  Description of Artificial Sequence: Synthetic oligonucleotide
  Sense strand starting at position 831 of SEQ ID NO: 318419
gccagaauugguggacugu

SEQ ID NO: 561226 - RNA, 19 nt, Artificial Sequence
  Description of Artificial Sequence: Synthetic oligonucleotide
  Antisense strand to SEQ ID NO: 561225
acaguccaccaauucuggc

SEQ ID NO: 561227 - RNA, 19 nt, Artificial Sequence
  Description of Artificial Sequence: Synthetic oligonucleotide
  Sense strand starting at position 832 of SEQ ID NO: 318419
ccagaauugguggacugua

SEQ ID NO: 561228 - RNA, 19 nt, Artificial Sequence
  Description of Artificial Sequence: Synthetic oligonucleotide
  Antisense strand to SEQ ID NO: 561227
uacaguccaccaauucugg

SEQ ID NO: 561229 - RNA, 19 nt, Artificial Sequence
  Description of Artificial Sequence: Synthetic oligonucleotide
  Sense strand starting at position 991 of SEQ ID NO: 318419
acccgaaugcuguacaaug

SEQ ID NO: 561230 - RNA, 19 nt, Artificial Sequence
  Description of Artificial Sequence: Synthetic oligonucleotide
  Antisense strand to SEQ ID NO: 561229
cauuguacagcauucgggu

SEQ ID NO: 561231 - RNA, 19 nt, Artificial Sequence
  Description of Artificial Sequence: Synthetic oligonucleotide
  Sense strand starting at position 1039 of SEQ ID NO: 318419
uucgaaugaugugcacuua

SEQ ID NO: 561232 - RNA, 19 nt, Artificial Sequence
  Description of Artificial Sequence: Synthetic oligonucleotide
  Antisense strand to SEQ ID NO: 561231
uaagugcacaucauucgaa

SEQ ID NO: 561233 - RNA, 19 nt, Artificial Sequence
  Description of Artificial Sequence: Synthetic oligonucleotide
  Sense strand starting at position 1040 of SEQ ID NO: 318419
ucgaaugaugugcacuuaa

SEQ ID NO: 561234 - RNA, 19 nt, Artificial Sequence
  Description of Artificial Sequence: Synthetic oligonucleotide
  Antisense strand to SEQ ID NO: 561233
uuaagugcacaucauucga

SEQ ID NO: 561235 - RNA, 19 nt, Artificial Sequence
  Description of Artificial Sequence: Synthetic oligonucleotide
  Sense strand starting at position 1095 of SEQ ID NO: 318419
guggaaaugaacuguacua

SEQ ID NO: 561236 - RNA, 19 nt, Artificial Sequence
  Description of Artificial Sequence: Synthetic oligonucleotide
  Antisense strand to SEQ ID NO: 561235
uaguacaguucauuuccac

SEQ ID NO: 561237 - RNA, 19 nt, Artificial Sequence
  Description of Artificial Sequence: Synthetic oligonucleotide
  Sense strand starting at position 1159 of SEQ ID NO: 318419
gaaguuucgcacggagaaa

SEQ ID NO: 561238 - RNA, 19 nt, Artificial Sequence
  Description of Artificial Sequence: Synthetic oligonucleotide
  Antisense strand to SEQ ID NO: 561237
uuucuccgugcgaaacuuc

SEQ ID NO: 561239 - RNA, 19 nt, Artificial Sequence
  Description of Artificial Sequence: Synthetic oligonucleotide
  Sense strand starting at position 1261 of SEQ ID NO: 318419
cauuaacugcuccgaagga

SEQ ID NO: 561240 - RNA, 19 nt, Artificial Sequence
  Description of Artificial Sequence: Synthetic oligonucleotide
  Antisense strand to SEQ ID NO: 561239
uccuucggagcaguuaaug

SEQ ID NO: 561241 - RNA, 19 nt, Artificial Sequence
  Description of Artificial Sequence: Synthetic oligonucleotide
  Sense strand starting at position 1283 of SEQ ID NO: 318419
cagugauccuuuccgacga

SEQ ID NO: 561242 - RNA, 19 nt, Artificial Sequence
  Description of Artificial Sequence: Synthetic oligonucleotide
  Antisense strand to SEQ ID NO: 561241
ucgucggaaaggaucacug

SEQ ID NO: 561243 - RNA, 19 nt, Artificial Sequence
  Description of Artificial Sequence: Synthetic oligonucleotide
  Sense strand starting at position 1287 of SEQ ID NO: 318419
gauccuuuccgacgacaug

SEQ ID NO: 561244 - RNA, 19 nt, Artificial Sequence
  Description of Artificial Sequence: Synthetic oligonucleotide
  Antisense strand to SEQ ID NO: 561243
caugucgucggaaaggauc

SEQ ID NO: 561245 - RNA, 19 nt, Artificial Sequence
  Description of Artificial Sequence: Synthetic oligonucleotide
  Sense strand starting at position 1343 of SEQ ID NO: 318419
accuuacuucugcggaaac

SEQ ID NO: 561246 - RNA, 19 nt, Artificial Sequence
  Description of Artificial Sequence: Synthetic oligonucleotide
  Antisense strand to SEQ ID NO: 561245
guuuccgcagaaguaaggu

SEQ ID NO: 561247 - RNA, 19 nt, Artificial Sequence
  Description of Artificial Sequence: Synthetic oligonucleotide
  Sense strand starting at position 1896 of SEQ ID NO: 318419
cagcgugucacccagaaug

SEQ ID NO: 561248 - RNA, 19 nt, Artificial Sequence
  Description of Artificial Sequence: Synthetic oligonucleotide
  Antisense strand to SEQ ID NO: 561247
cauucugggugacacgcug

SEQ ID NO: 561249 - RNA, 19 nt, Artificial Sequence
  Description of Artificial Sequence: Synthetic oligonucleotide
  Sense strand starting at position 1962 of SEQ ID NO: 318419
cgccaucuuucuccaggaa

SEQ ID NO: 561250 - RNA, 19 nt, Artificial Sequence
  Description of Artificial Sequence: Synthetic oligonucleotide
  Antisense strand to SEQ ID NO: 561249
uuccuggagaaagauggcg

SEQ ID NO: 561251 - RNA, 19 nt, Artificial Sequence
  Description of Artificial Sequence: Synthetic oligonucleotide
  Sense strand starting at position 2314 of SEQ ID NO: 318419
cugcgaucuucccuaacua

SEQ ID NO: 561252 - RNA, 19 nt, Artificial Sequence
  Description of Artificial Sequence: Synthetic oligonucleotide
  Antisense strand to SEQ ID NO: 561251
uaguuagggaagaucgcag

SEQ ID NO: 561253 - RNA, 19 nt, Artificial Sequence
  Description of Artificial Sequence: Synthetic oligonucleotide
  Sense strand starting at position 2315 of SEQ ID NO: 318419
ugcgaucuucccuaacuac

SEQ ID NO: 561254 - RNA, 19 nt, Artificial Sequence
  Description of Artificial Sequence: Synthetic oligonucleotide
  Antisense strand to SEQ ID NO: 561253
guaguuagggaagaucgca

SEQ ID NO: 561255 - RNA, 19 nt, Artificial Sequence
  Description of Artificial Sequence: Synthetic oligonucleotide
  Sense strand starting at position 2387 of SEQ ID NO: 318419
gcuugagugaugcacaucu

SEQ ID NO: 561256 - RNA, 19 nt, Artificial Sequence
  Description of Artificial Sequence: Synthetic oligonucleotide
  Antisense strand to SEQ ID NO: 561255
agaugugcaucacucaagc

SEQ ID NO: 561257 - RNA, 19 nt, Artificial Sequence
  Description of Artificial Sequence: Synthetic oligonucleotide
  Sense strand starting at position 2727 of SEQ ID NO: 318419
gugaauguguauuccaaga

SEQ ID NO: 561258 - RNA, 19 nt, Artificial Sequence
  Description of Artificial Sequence: Synthetic oligonucleotide
  Antisense strand to SEQ ID NO: 561257
ucuuggaauacacauucac

SEQ ID NO: 561259 - RNA, 19 nt, Artificial Sequence
  Description of Artificial Sequence: Synthetic oligonucleotide
  Sense strand starting at position 2749 of SEQ ID NO: 318419
ggaugauacgcagaucuuu

SEQ ID NO: 561260 - RNA, 19 nt, Artificial Sequence
  Description of Artificial Sequence: Synthetic oligonucleotide
  Antisense strand to SEQ ID NO: 561259
aaagaucugcguaucaucc

SEQ ID NO: 561261 - RNA, 19 nt, Artificial Sequence
  Description of Artificial Sequence: Synthetic oligonucleotide
  Sense strand starting at position 2879 of SEQ ID NO: 318419
acuuguaaugaguaauacu

SEQ ID NO: 561262 - RNA, 19 nt, Artificial Sequence
  Description of Artificial Sequence: Synthetic oligonucleotide
  Antisense strand to SEQ ID NO: 561261
aguauuacucauuacaagu

SEQ ID NO: 561263 - RNA, 19 nt, Artificial Sequence
  Description of Artificial Sequence: Synthetic oligonucleotide
  Sense strand starting at position 2934 of SEQ ID NO: 318419
agcauaaagucuguuuauu

SEQ ID NO: 561264 - RNA, 19 nt, Artificial Sequence
  Description of Artificial Sequence: Synthetic oligonucleotide
  Antisense strand to SEQ ID NO: 561263
aauaaacagacuuuaugcu

SEQ ID NO: 561265 - RNA, 19 nt, Artificial Sequence
  Description of Artificial Sequence: Synthetic oligonucleotide
  Sense strand starting at position 2961 of SEQ ID NO: 318419
aauguuugaguuuguuacu

SEQ ID NO: 561266 - RNA, 19 nt, Artificial Sequence
  Description of Artificial Sequence: Synthetic oligonucleotide
  Antisense strand to SEQ ID NO: 561265
aguaacaaacucaaacauu

SEQ ID NO: 561267 - RNA, 19 nt, Artificial Sequence
  Description of Artificial Sequence: Synthetic oligonucleotide
  Sense strand starting at position 2966 of SEQ ID NO: 318419
uugaguuuguuacucaauu

SEQ ID NO: 561268 - RNA, 19 nt, Artificial Sequence
  Description of Artificial Sequence: Synthetic oligonucleotide
  Antisense strand to SEQ ID NO: 561267
aauugaguaacaaacucaa

SEQ ID NO: 561269 - RNA, 19 nt, Artificial Sequence
  Description of Artificial Sequence: Synthetic oligonucleotide
  Sense strand starting at position 2967 of SEQ ID NO: 318419
ugaguuuguuacucaauuc

SEQ ID NO: 561270 - RNA, 19 nt, Artificial Sequence
  Description of Artificial Sequence: Synthetic oligonucleotide
  Antisense strand to SEQ ID NO: 561269
gaauugaguaacaaacuca

SEQ ID NO: 561271 - RNA, 19 nt, Artificial Sequence
  Description of Artificial Sequence: Synthetic oligonucleotide
  Sense strand starting at position 3275 of SEQ ID NO: 318419
ugccuuugagcuuagaauu

SEQ ID NO: 561272 - RNA, 19 nt, Artificial Sequence
  Description of Artificial Sequence: Synthetic oligonucleotide
  Antisense strand to SEQ ID NO: 561271
aauucuaagcucaaaggca

SEQ ID NO: 561273 - RNA, 19 nt, Artificial Sequence
  Description of Artificial Sequence: Synthetic oligonucleotide
  Sense strand starting at position 3344 of SEQ ID NO: 318419
uguauugaggacugcacau

SEQ ID NO: 561274 - RNA, 19 nt, Artificial Sequence
  Description of Artificial Sequence: Synthetic oligonucleotide
  Antisense strand to SEQ ID NO: 561273
augugcaguccucaauaca

SEQ ID NO: 561275 - RNA, 19 nt, Artificial Sequence
  Description of Artificial Sequence: Synthetic oligonucleotide
  Sense strand starting at position 3497 of SEQ ID NO: 318419
aaggcaucucuguaaagca

SEQ ID NO: 561276 - RNA, 19 nt, Artificial Sequence
  Description of Artificial Sequence: Synthetic oligonucleotide
  Antisense strand to SEQ ID NO: 561275
ugcuuuacagagaugccuu

SEQ ID NO: 561277 - RNA, 19 nt, Artificial Sequence
  Description of Artificial Sequence: Synthetic oligonucleotide
  Sense strand starting at position 3546 of SEQ ID NO: 318419
agaaauagcucucuggauu

SEQ ID NO: 561278 - RNA, 19 nt, Artificial Sequence
  Description of Artificial Sequence: Synthetic oligonucleotide
  Antisense strand to SEQ ID NO: 561277
aauccagagagcuauuucu

SEQ ID NO: 561279 - RNA, 19 nt, Artificial Sequence
  Description of Artificial Sequence: Synthetic oligonucleotide
  Sense strand starting at position 3846 of SEQ ID NO: 318419
cagucucuucgugaaacua

SEQ ID NO: 561280 - RNA, 19 nt, Artificial Sequence
  Description of Artificial Sequence: Synthetic oligonucleotide
  Antisense strand to SEQ ID NO: 561279
uaguuucacgaagagacug

SEQ ID NO: 561281 - RNA, 19 nt, Artificial Sequence
  Description of Artificial Sequence: Synthetic oligonucleotide
  Sense strand starting at position 3901 of SEQ ID NO: 318419
guagaaacaucaguuuguu

SEQ ID NO: 561282 - RNA, 19 nt, Artificial Sequence
  Description of Artificial Sequence: Synthetic oligonucleotide
  Antisense strand to SEQ ID NO: 561281
aacaaacugauguuucuac

SEQ ID NO: 561283 - RNA, 19 nt, Artificial Sequence
  Description of Artificial Sequence: Synthetic oligonucleotide
  Sense strand starting at position 3927 of SEQ ID NO: 318419
ugugcuguuguagauuaua

SEQ ID NO: 561284 - RNA, 19 nt, Artificial Sequence
  Description of Artificial Sequence: Synthetic oligonucleotide
  Antisense strand to SEQ ID NO: 561283
uauaaucuacaacagcaca

SEQ ID NO: 561285 - RNA, 19 nt, Artificial Sequence
  Description of Artificial Sequence: Synthetic oligonucleotide
  Sense strand starting at position 3930 of SEQ ID NO: 318419
gcuguuguagauuauaauu

SEQ ID NO: 561286 - RNA, 19 nt, Artificial Sequence
  Description of Artificial Sequence: Synthetic oligonucleotide
  Antisense strand to SEQ ID NO: 561285
aauuauaaucuacaacagc

SEQ ID NO: 561287 - RNA, 19 nt, Artificial Sequence
  Description of Artificial Sequence: Synthetic oligonucleotide
  Sense strand starting at position 203 of SEQ ID NO: 318420
ccaagaaggcuguggauua

SEQ ID NO: 561288 - RNA, 19 nt, Artificial Sequence
  Description of Artificial Sequence: Synthetic oligonucleotide
  Antisense strand to SEQ ID NO: 561287
uaauccacagccuucuugg

SEQ ID NO: 561289 - RNA, 19 nt, Artificial Sequence
  Description of Artificial Sequence: Synthetic oligonucleotide
  Sense strand starting at position 289 of SEQ ID NO: 318420
gggauugucaccugggauu

SEQ ID NO: 561290 - RNA, 19 nt, Artificial Sequence
  Description of Artificial Sequence: Synthetic oligonucleotide
  Antisense strand to SEQ ID NO: 561289
aaucccaggugacaauccc

SEQ ID NO: 561291 - RNA, 19 nt, Artificial Sequence
  Description of Artificial Sequence: Synthetic oligonucleotide
  Sense strand starting at position 635 of SEQ ID NO: 318420
gauggucaggauugggauu

SEQ ID NO: 561292 - RNA, 19 nt, Artificial Sequence
  Description of Artificial Sequence: Synthetic oligonucleotide
  Antisense strand to SEQ ID NO: 561291
aaucccaauccugaccauc

SEQ ID NO: 561293 - RNA, 19 nt, Artificial Sequence
  Description of Artificial Sequence: Synthetic oligonucleotide
  Sense strand starting at position 668 of SEQ ID NO: 318420
ggucaagugaagcacgauu

SEQ ID NO: 561294 - RNA, 19 nt, Artificial Sequence
  Description of Artificial Sequence: Synthetic oligonucleotide
  Antisense strand to SEQ ID NO: 561293
aaucgugcuucacuugacc

SEQ ID NO: 561295 - RNA, 19 nt, Artificial Sequence
  Description of Artificial Sequence: Synthetic oligonucleotide
  Sense strand starting at position 704 of SEQ ID NO: 318420
cccggucaacuugacaaau

SEQ ID NO: 561296 - RNA, 19 nt, Artificial Sequence
  Description of Artificial Sequence: Synthetic oligonucleotide
  Antisense strand to SEQ ID NO: 561295
auuugucaaguugaccggg

SEQ ID NO: 561297 - RNA, 19 nt, Artificial Sequence
  Description of Artificial Sequence: Synthetic oligonucleotide
  Sense strand starting at position 732 of SEQ ID NO: 318420
gugaucccuccagacuaau

SEQ ID NO: 561298 - RNA, 19 nt, Artificial Sequence
  Description of Artificial Sequence: Synthetic oligonucleotide
  Antisense strand to SEQ ID NO: 561297
auuagucuggagggaucac

SEQ ID NO: 561299 - RNA, 19 nt, Artificial Sequence
  Description of Artificial Sequence: Synthetic oligonucleotide
  Sense strand starting at position 1208 of SEQ ID NO: 318420
ucucgaguccggcuuucau

SEQ ID NO: 561300 - RNA, 19 nt, Artificial Sequence
  Description of Artificial Sequence: Synthetic oligonucleotide
  Antisense strand to SEQ ID NO: 561299
augaaagccggacucgaga

SEQ ID NO: 561301 - RNA, 19 nt, Artificial Sequence
  Description of Artificial Sequence: Synthetic oligonucleotide
  Sense strand starting at position 1328 of SEQ ID NO: 318420
cgaaacucaugcucaagga

SEQ ID NO: 561302 - RNA, 19 nt, Artificial Sequence
  Description of Artificial Sequence: Synthetic oligonucleotide
  Antisense strand to SEQ ID NO: 561301
uccuugagcaugaguuucg

SEQ ID NO: 561303 - RNA, 19 nt, Artificial Sequence
  Description of Artificial Sequence: Synthetic oligonucleotide
  Sense strand starting at position 1332 of SEQ ID NO: 318420
acucaugcucaaggauaca

SEQ ID NO: 561304 - RNA, 19 nt, Artificial Sequence
  Description of Artificial Sequence: Synthetic oligonucleotide
  Antisense strand to SEQ ID NO: 561303
uguauccuugagcaugagu

SEQ ID NO: 561305 - RNA, 19 nt, Artificial Sequence
  Description of Artificial Sequence: Synthetic oligonucleotide
  Sense strand starting at position 1353 of SEQ ID NO: 318420
ugaagaugccuuugacaaa

SEQ ID NO: 561306 - RNA, 19 nt, Artificial Sequence
  Description of Artificial Sequence: Synthetic oligonucleotide
  Antisense strand to SEQ ID NO: 561305
uuugucaaaggcaucuuca

SEQ ID NO: 561307 - RNA, 19 nt, Artificial Sequence
  Description of Artificial Sequence: Synthetic oligonucleotide
  Sense strand starting at position 1382 of SEQ ID NO: 318420
agccgagugcaguuuguaa

SEQ ID NO: 561308 - RNA, 19 nt, Artificial Sequence
  Description of Artificial Sequence: Synthetic oligonucleotide
  Antisense strand to SEQ ID NO: 561307
uuacaaacugcacucggcu

SEQ ID NO: 561309 - RNA, 19 nt, Artificial Sequence
  Description of Artificial Sequence: Synthetic oligonucleotide
  Sense strand starting at position 1427 of SEQ ID NO: 318420
ggcaaagcaccuuaagagu

SEQ ID NO: 561310 - RNA, 19 nt, Artificial Sequence
  Description of Artificial Sequence: Synthetic oligonucleotide
  Antisense strand to SEQ ID NO: 561309
acucuuaaggugcuuugcc

SEQ ID NO: 561311 - RNA, 19 nt, Artificial Sequence
  Description of Artificial Sequence: Synthetic oligonucleotide
  Sense strand starting at position 1703 of SEQ ID NO: 318420
acaucagucgaugaguacu

SEQ ID NO: 561312 - RNA, 19 nt, Artificial Sequence
  Description of Artificial Sequence: Synthetic oligonucleotide
  Antisense strand to SEQ ID NO: 561311
aguacucaucgacugaugu

SEQ ID NO: 561313 - RNA, 19 nt, Artificial Sequence
  Description of Artificial Sequence: Synthetic oligonucleotide
  Sense strand starting at position 1956 of SEQ ID NO: 318420
auuuauguuccuugcugga

SEQ ID NO: 561314 - RNA, 19 nt, Artificial Sequence
  Description of Artificial Sequence: Synthetic oligonucleotide
  Antisense strand to SEQ ID NO: 561313
uccagcaaggaacauaaau

SEQ ID NO: 561315 - RNA, 19 nt, Artificial Sequence
  Description of Artificial Sequence: Synthetic oligonucleotide
  Sense strand starting at position 2111 of SEQ ID NO: 318420
ugauuagggccacauaucu

SEQ ID NO: 561316 - RNA, 19 nt, Artificial Sequence
  Description of Artificial Sequence: Synthetic oligonucleotide
  Antisense strand to SEQ ID NO: 561315
agauauguggcccuaauca

SEQ ID NO: 561317 - RNA, 19 nt, Artificial Sequence
  Description of Artificial Sequence: Synthetic oligonucleotide
  Sense strand starting at position 2177 of SEQ ID NO: 318420
augacuuagugaguugaau

SEQ ID NO: 561318 - RNA, 19 nt, Artificial Sequence
  Description of Artificial Sequence: Synthetic oligonucleotide
  Antisense strand to SEQ ID NO: 561317
auucaacucacuaagucau

SEQ ID NO: 561319 - RNA, 19 nt, Artificial Sequence
  Description of Artificial Sequence: Synthetic oligonucleotide
  Sense strand starting at position 2179 of SEQ ID NO: 318420
gacuuagugaguugaauga

SEQ ID NO: 561320 - RNA, 19 nt, Artificial Sequence
  Description of Artificial Sequence: Synthetic oligonucleotide
  Antisense strand to SEQ ID NO: 561319
ucauucaacucacuaaguc

SEQ ID NO: 561321 - RNA, 19 nt, Artificial Sequence
  Description of Artificial Sequence: Synthetic oligonucleotide
  Sense strand starting at position 2186 of SEQ ID NO: 318420
ugaguugaaugaccucaaa

SEQ ID NO: 561322 - RNA, 19 nt, Artificial Sequence
  Description of Artificial Sequence: Synthetic oligonucleotide
  Antisense strand to SEQ ID NO: 561321
uuugaggucauucaacuca

SEQ ID NO: 561323 - RNA, 19 nt, Artificial Sequence
  Description of Artificial Sequence: Synthetic oligonucleotide
  Sense strand starting at position 2264 of SEQ ID NO: 318420
auuucugaguaacauugaa

SEQ ID NO: 561324 - RNA, 19 nt, Artificial Sequence
  Description of Artificial Sequence: Synthetic oligonucleotide
  Antisense strand to SEQ ID NO: 561323
uucaauguuacucagaaau

SEQ ID NO: 561325 - RNA, 19 nt, Artificial Sequence
  Description of Artificial Sequence: Synthetic oligonucleotide
  Sense strand starting at position 2295 of SEQ ID NO: 318420
uugagagguucuccaggga

SEQ ID NO: 561326 - RNA, 19 nt, Artificial Sequence
  Description of Artificial Sequence: Synthetic oligonucleotide
  Antisense strand to SEQ ID NO: 561325
ucccuggagaaccucucaa

SEQ ID NO: 561327 - RNA, 19 nt, Artificial Sequence
  Description of Artificial Sequence: Synthetic oligonucleotide
  Sense strand starting at position 2358 of SEQ ID NO: 318420
agaagauagucagugaccu

SEQ ID NO: 561328 - RNA, 19 nt, Artificial Sequence
  Description of Artificial Sequence: Synthetic oligonucleotide
  Antisense strand to SEQ ID NO: 561327
aggucacugacuaucuucu

SEQ ID NO: 561329 - RNA, 19 nt, Artificial Sequence
  Description of Artificial Sequence: Synthetic oligonucleotide
  Sense strand starting at position 2359 of SEQ ID NO: 318420
gaagauagucagugaccua

SEQ ID NO: 561330 - RNA, 19 nt, Artificial Sequence
  Description of Artificial Sequence: Synthetic oligonucleotide
  Antisense strand to SEQ ID NO: 561329
uaggucacugacuaucuuc

SEQ ID NO: 561331 - RNA, 19 nt, Artificial Sequence
  Description of Artificial Sequence: Synthetic oligonucleotide
  Sense strand starting at position 2362 of SEQ ID NO: 318420
gauagucagugaccuaaga

SEQ ID NO: 561332 - RNA, 19 nt, Artificial Sequence
  Description of Artificial Sequence: Synthetic oligonucleotide
  Antisense strand to SEQ ID NO: 561331
ucuuaggucacugacuauc

SEQ ID NO: 561333 - RNA, 19 nt, Artificial Sequence
  Description of Artificial Sequence: Synthetic oligonucleotide
  Sense strand starting at position 3147 of SEQ ID NO: 318420
acugcuacucuggauaacu

SEQ ID NO: 561334 - RNA, 19 nt, Artificial Sequence
  Description of Artificial Sequence: Synthetic oligonucleotide
  Antisense strand to SEQ ID NO: 561333
aguuauccagaguagcagu

SEQ ID NO: 561335 - RNA, 19 nt, Artificial Sequence
  Description of Artificial Sequence: Synthetic oligonucleotide
  Sense strand starting at position 3167 of SEQ ID NO: 318420
ggaaaucacaguuagcagu

SEQ ID NO: 561336 - RNA, 19 nt, Artificial Sequence
  Description of Artificial Sequence: Synthetic oligonucleotide
  Antisense strand to SEQ ID NO: 561335
acugcuaacugugauuucc

SEQ ID NO: 561337 - RNA, 19 nt, Artificial Sequence
  Description of Artificial Sequence: Synthetic oligonucleotide
  Sense strand starting at position 3263 of SEQ ID NO: 318420
gcaacuaccuaggcauaau

SEQ ID NO: 561338 - RNA, 19 nt, Artificial Sequence
  Description of Artificial Sequence: Synthetic oligonucleotide
  Antisense strand to SEQ ID NO: 561337
auuaugccuagguaguugc

SEQ ID NO: 561339 - RNA, 19 nt, Artificial Sequence
  Description of Artificial Sequence: Synthetic oligonucleotide
  Sense strand starting at position 3340 of SEQ ID NO: 318420
cuguuagcugaugggagau

SEQ ID NO: 561340 - RNA, 19 nt, Artificial Sequence
  Description of Artificial Sequence: Synthetic oligonucleotide
  Antisense strand to SEQ ID NO: 561339
aucucccaucagcuaacag

SEQ ID NO: 561341 - RNA, 19 nt, Artificial Sequence
  Description of Artificial Sequence: Synthetic oligonucleotide
  Sense strand starting at position 3388 of SEQ ID NO: 318420
uccugugaugauuagggua

SEQ ID NO: 561342 - RNA, 19 nt, Artificial Sequence
  Description of Artificial Sequence: Synthetic oligonucleotide
  Antisense strand to SEQ ID NO: 561341
uacccuaaucaucacagga

SEQ ID NO: 561343 - RNA, 19 nt, Artificial Sequence
  Description of Artificial Sequence: Synthetic oligonucleotide
  Sense strand starting at position 3422 of SEQ ID NO: 318420
auggguguccaugaaggua

SEQ ID NO: 561344 - RNA, 19 nt, Artificial Sequence
  Description of Artificial Sequence: Synthetic oligonucleotide
  Antisense strand to SEQ ID NO: 561343
uaccuucauggacacccau

SEQ ID NO: 561345 - RNA, 19 nt, Artificial Sequence
  Description of Artificial Sequence: Synthetic oligonucleotide
  Sense strand starting at position 3478 of SEQ ID NO: 318420
ugagauccucaguggcaga

SEQ ID NO: 561346 - RNA, 19 nt, Artificial Sequence
  Description of Artificial Sequence: Synthetic oligonucleotide
  Antisense strand to SEQ ID NO: 561345
ucugccacugaggaucuca

SEQ ID NO: 561347 - RNA, 19 nt, Artificial Sequence
  Description of Artificial Sequence: Synthetic oligonucleotide
  Sense strand starting at position 3483 of SEQ ID NO: 318420
uccucaguggcagaauauu

SEQ ID NO: 561348 - RNA, 19 nt, Artificial Sequence
  Description of Artificial Sequence: Synthetic oligonucleotide
  Antisense strand to SEQ ID NO: 561347
aauauucugccacugagga

SEQ ID NO: 561349 - RNA, 19 nt, Artificial Sequence
  Description of Artificial Sequence: Synthetic oligonucleotide
  Sense strand starting at position 3492 of SEQ ID NO: 318420
gcagaauauuucuauauga

SEQ ID NO: 561350 - RNA, 19 nt, Artificial Sequence
  Description of Artificial Sequence: Synthetic oligonucleotide
  Antisense strand to SEQ ID NO: 561349
ucauauagaaauauucugc

SEQ ID NO: 561351 - RNA, 19 nt, Artificial Sequence
  Description of Artificial Sequence: Synthetic oligonucleotide
  Sense strand starting at position 3503 of SEQ ID NO: 318420
cuauaugaccuuugcaaag

SEQ ID NO: 561352 - RNA, 19 nt, Artificial Sequence
  Description of Artificial Sequence: Synthetic oligonucleotide
  Antisense strand to SEQ ID NO: 561351
cuuugcaaaggucauauag

SEQ ID NO: 561353 - RNA, 19 nt, Artificial Sequence
  Description of Artificial Sequence: Synthetic oligonucleotide
  Sense strand starting at position 3520 of SEQ ID NO: 318420
agcaaagggucacucaauu

SEQ ID NO: 561354 - RNA, 19 nt, Artificial Sequence
  Description of Artificial Sequence: Synthetic oligonucleotide
  Antisense strand to SEQ ID NO: 561353
aauugagugacccuuugcu

SEQ ID NO: 561355 - RNA, 19 nt, Artificial Sequence
  Description of Artificial Sequence: Synthetic oligonucleotide
  Sense strand starting at position 3586 of SEQ ID NO: 318420
aagaucacucuggguaacu

SEQ ID NO: 561356 - RNA, 19 nt, Artificial Sequence
  Description of Artificial Sequence: Synthetic oligonucleotide
  Antisense strand to SEQ ID NO: 561355
aguuacccagagugaucuu

SEQ ID NO: 561357 - RNA, 19 nt, Artificial Sequence
  Description of Artificial Sequence: Synthetic oligonucleotide
  Sense strand starting at position 3717 of SEQ ID NO: 318420
guggcuaauccauaccuca

SEQ ID NO: 561358 - RNA, 19 nt, Artificial Sequence
  Description of Artificial Sequence: Synthetic oligonucleotide
  Antisense strand to SEQ ID NO: 561357
ugagguauggauuagccac

SEQ ID NO: 561359 - RNA, 19 nt, Artificial Sequence
  Description of Artificial Sequence: Synthetic oligonucleotide
  Sense strand starting at position 3758 of SEQ ID NO: 318420
cuuucugcucuguugugua

SEQ ID NO: 561360 - RNA, 19 nt, Artificial Sequence
  Description of Artificial Sequence: Synthetic oligonucleotide
  Antisense strand to SEQ ID NO: 561359
uacacaacagagcagaaag

SEQ ID NO: 561361 - RNA, 19 nt, Artificial Sequence
  Description of Artificial Sequence: Synthetic oligonucleotide
  Sense strand starting at position 3832 of SEQ ID NO: 318420
cccagcuuuccugagauga

SEQ ID NO: 561362 - RNA, 19 nt, Artificial Sequence
  Description of Artificial Sequence: Synthetic oligonucleotide
  Antisense strand to SEQ ID NO: 561361
ucaucucaggaaagcuggg

SEQ ID NO: 561363 - RNA, 19 nt, Artificial Sequence
  Description of Artificial Sequence: Synthetic oligonucleotide
  Sense strand starting at position 3836 of SEQ ID NO: 318420
gcuuuccugagaugaugaa

SEQ ID NO: 561364 - RNA, 19 nt, Artificial Sequence
  Description of Artificial Sequence: Synthetic oligonucleotide
  Antisense strand to SEQ ID NO: 561363
uucaucaucucaggaaagc

SEQ ID NO: 561365 - RNA, 19 nt, Artificial Sequence
  Description of Artificial Sequence: Synthetic oligonucleotide
  Sense strand starting at position 3848 of SEQ ID NO: 318420
ugaugaaauccgcagugag

SEQ ID NO: 561366 - RNA, 19 nt, Artificial Sequence
  Description of Artificial Sequence: Synthetic oligonucleotide
  Antisense strand to SEQ ID NO: 561365
cucacugcggauuucauca

SEQ ID NO: 561367 - RNA, 19 nt, Artificial Sequence
  Description of Artificial Sequence: Synthetic oligonucleotide
  Sense strand starting at position 90 of SEQ ID NO: 318421
acccuagggcuuuggaauu

SEQ ID NO: 561368 - RNA, 19 nt, Artificial Sequence
  Description of Artificial Sequence: Synthetic oligonucleotide
  Antisense strand to SEQ ID NO: 561367
aauuccaaagcccuagggu

SEQ ID NO: 561369 - RNA, 19 nt, Artificial Sequence
  Description of Artificial Sequence: Synthetic oligonucleotide
  Sense strand starting at position 277 of SEQ ID NO: 318421
aguggagaauaugucucaa

SEQ ID NO: 561370 - RNA, 19 nt, Artificial Sequence
  Description of Artificial Sequence: Synthetic oligonucleotide
  Antisense strand to SEQ ID NO: 561369
uugagacauauucuccacu

SEQ ID NO: 561371 - RNA, 19 nt, Artificial Sequence
  Description of Artificial Sequence: Synthetic oligonucleotide
  Sense strand starting at position 279 of SEQ ID NO: 318421
uggagaauaugucucaaau

SEQ ID NO: 561372 - RNA, 19 nt, Artificial Sequence
  Description of Artificial Sequence: Synthetic oligonucleotide
  Antisense strand to SEQ ID NO: 561371
auuugagacauauucucca

SEQ ID NO: 561373 - RNA, 19 nt, Artificial Sequence
  Description of Artificial Sequence: Synthetic oligonucleotide
  Sense strand starting at position 500 of SEQ ID NO: 318421
aguaaauagcaugaggcau

SEQ ID NO: 561374 - RNA, 19 nt, Artificial Sequence
  Description of Artificial Sequence: Synthetic oligonucleotide
  Antisense strand to SEQ ID NO: 561373
augccucaugcuauuuacu

SEQ ID NO: 561375 - RNA, 19 nt, Artificial Sequence
  Description of Artificial Sequence: Synthetic oligonucleotide
  Sense strand starting at position 508 of SEQ ID NO: 318421
gcaugaggcauuuggcaug

SEQ ID NO: 561376 - RNA, 19 nt, Artificial Sequence
  Description of Artificial Sequence: Synthetic oligonucleotide
  Antisense strand to SEQ ID NO: 561375
caugccaaaugccucaugc

SEQ ID NO: 561377 - RNA, 19 nt, Artificial Sequence
  Description of Artificial Sequence: Synthetic oligonucleotide
  Sense strand starting at position 675 of SEQ ID NO: 318421
uucugcaaguauuugcuaa

SEQ ID NO: 561378 - RNA, 19 nt, Artificial Sequence
  Description of Artificial Sequence: Synthetic oligonucleotide
  Antisense strand to SEQ ID NO: 561377
uuagcaaauacuugcagaa

SEQ ID NO: 561379 - RNA, 19 nt, Artificial Sequence
  Description of Artificial Sequence: Synthetic oligonucleotide
  Sense strand starting at position 677 of SEQ ID NO: 318421
cugcaaguauuugcuaaug

SEQ ID NO: 561380 - RNA, 19 nt, Artificial Sequence
  Description of Artificial Sequence: Synthetic oligonucleotide
  Antisense strand to SEQ ID NO: 561379
cauuagcaaauacuugcag

SEQ ID NO: 561381 - RNA, 19 nt, Artificial Sequence
  Description of Artificial Sequence: Synthetic oligonucleotide
  Sense strand starting at position 694 of SEQ ID NO: 318421
uguuauugugaacacuaua

SEQ ID NO: 561382 - RNA, 19 nt, Artificial Sequence
  Description of Artificial Sequence: Synthetic oligonucleotide
  Antisense strand to SEQ ID NO: 561381
uauaguguucacaauaaca

SEQ ID NO: 561383 - RNA, 19 nt, Artificial Sequence
  Description of Artificial Sequence: Synthetic oligonucleotide
  Sense strand starting at position 816 of SEQ ID NO: 318421
uggcaaagccuggaaacau

SEQ ID NO: 561384 - RNA, 19 nt, Artificial Sequence
  Description of Artificial Sequence: Synthetic oligonucleotide
  Antisense strand to SEQ ID NO: 561383
auguuuccaggcuuugcca

SEQ ID NO: 561385 - RNA, 19 nt, Artificial Sequence
  Description of Artificial Sequence: Synthetic oligonucleotide
  Sense strand starting at position 874 of SEQ ID NO: 318421
cuuggaacugucuggagau

SEQ ID NO: 561386 - RNA, 19 nt, Artificial Sequence
  Description of Artificial Sequence: Synthetic oligonucleotide
  Antisense strand to SEQ ID NO: 561385
aucuccagacaguuccaag

SEQ ID NO: 561387 - RNA, 19 nt, Artificial Sequence
  Description of Artificial Sequence: Synthetic oligonucleotide
  Sense strand starting at position 876 of SEQ ID NO: 318421
uggaacugucuggagaugu

SEQ ID NO: 561388 - RNA, 19 nt, Artificial Sequence
  Description of Artificial Sequence: Synthetic oligonucleotide
  Antisense strand to SEQ ID NO: 561387
acaucuccagacaguucca

SEQ ID NO: 561389 - RNA, 19 nt, Artificial Sequence
  Description of Artificial Sequence: Synthetic oligonucleotide
  Sense strand starting at position 1014 of SEQ ID NO: 318421
ccagaaugccuacacuguu

SEQ ID NO: 561390 - RNA, 19 nt, Artificial Sequence
  Description of Artificial Sequence: Synthetic oligonucleotide
  Antisense strand to SEQ ID NO: 561389
aacaguguaggcauucugg

SEQ ID NO: 561391 - RNA, 19 nt, Artificial Sequence
  Description of Artificial Sequence: Synthetic oligonucleotide
  Sense strand starting at position 1024 of SEQ ID NO: 318421
uacacuguuguuugagaaa

SEQ ID NO: 561392 - RNA, 19 nt, Artificial Sequence
  Description of Artificial Sequence: Synthetic oligonucleotide
  Antisense strand to SEQ ID NO: 561391
uuucucaaacaacagugua

SEQ ID NO: 561393 - RNA, 19 nt, Artificial Sequence
  Description of Artificial Sequence: Synthetic oligonucleotide
  Sense strand starting at position 1133 of SEQ ID NO: 318421
acuaguaaguuucccuaga

SEQ ID NO: 561394 - RNA, 19 nt, Artificial Sequence
  Description of Artificial Sequence: Synthetic oligonucleotide
  Antisense strand to SEQ ID NO: 561393
ucuagggaaacuuacuagu

SEQ ID NO: 561395 - RNA, 19 nt, Artificial Sequence
  Description of Artificial Sequence: Synthetic oligonucleotide
  Sense strand starting at position 1305 of SEQ ID NO: 318421
cccauuugccuguagugua

SEQ ID NO: 561396 - RNA, 19 nt, Artificial Sequence
  Description of Artificial Sequence: Synthetic oligonucleotide
  Antisense strand to SEQ ID NO: 561395
uacacuacaggcaaauggg

SEQ ID NO: 561397 - RNA, 19 nt, Artificial Sequence
  Description of Artificial Sequence: Synthetic oligonucleotide
  Sense strand starting at position 1545 of SEQ ID NO: 318421
uguagaguugcuuaagaaa

SEQ ID NO: 561398 - RNA, 19 nt, Artificial Sequence
  Description of Artificial Sequence: Synthetic oligonucleotide
  Antisense strand to SEQ ID NO: 561397
uuucuuaagcaacucuaca

SEQ ID NO: 561399 - RNA, 19 nt, Artificial Sequence
  Description of Artificial Sequence: Synthetic oligonucleotide
  Sense strand starting at position 1600 of SEQ ID NO: 318421
gaaguaacauagucauugu

SEQ ID NO: 561400 - RNA, 19 nt, Artificial Sequence
  Description of Artificial Sequence: Synthetic oligonucleotide
  Antisense strand to SEQ ID NO: 561399
acaaugacuauguuacuuc

SEQ ID NO: 561401 - RNA, 19 nt, Artificial Sequence
  Description of Artificial Sequence: Synthetic oligonucleotide
  Sense strand starting at position 1608 of SEQ ID NO: 318421
auagucauugucgauaauc

SEQ ID NO: 561402 - RNA, 19 nt, Artificial Sequence
  Description of Artificial Sequence: Synthetic oligonucleotide
  Antisense strand to SEQ ID NO: 561401
gauuaucgacaaugacuau

SEQ ID NO: 561403 - RNA, 19 nt, Artificial Sequence
  Description of Artificial Sequence: Synthetic oligonucleotide
  Sense strand starting at position 1816 of SEQ ID NO: 318421
gacauugacugguuugaga

SEQ ID NO: 561404 - RNA, 19 nt, Artificial Sequence
  Description of Artificial Sequence: Synthetic oligonucleotide
  Antisense strand to SEQ ID NO: 561403
ucucaaaccagucaauguc

SEQ ID NO: 561405 - RNA, 19 nt, Artificial Sequence
  Description of Artificial Sequence: Synthetic oligonucleotide
  Sense strand starting at position 1818 of SEQ ID NO: 318421
cauugacugguuugagaug

SEQ ID NO: 561406 - RNA, 19 nt, Artificial Sequence
  Description of Artificial Sequence: Synthetic oligonucleotide
  Antisense strand to SEQ ID NO: 561405
caucucaaaccagucaaug

SEQ ID NO: 561407 - RNA, 19 nt, Artificial Sequence
  Description of Artificial Sequence: Synthetic oligonucleotide
  Sense strand starting at position 1823 of SEQ ID NO: 318421
acugguuugagaugauauu

SEQ ID NO: 561408 - RNA, 19 nt, Artificial Sequence
  Description of Artificial Sequence: Synthetic oligonucleotide
  Antisense strand to SEQ ID NO: 561407
aauaucaucucaaaccagu

SEQ ID NO: 561409 - RNA, 19 nt, Artificial Sequence
  Description of Artificial Sequence: Synthetic oligonucleotide
  Sense strand starting at position 1829 of SEQ ID NO: 318421
uugagaugauauucuguaa

SEQ ID NO: 561410 - RNA, 19 nt, Artificial Sequence
  Description of Artificial Sequence: Synthetic oligonucleotide
  Antisense strand to SEQ ID NO: 561409
uuacagaauaucaucucaa

SEQ ID NO: 561411 - RNA, 19 nt, Artificial Sequence
  Description of Artificial Sequence: Synthetic oligonucleotide
  Sense strand starting at position 1832 of SEQ ID NO: 318421
agaugauauucuguaaacc

SEQ ID NO: 561412 - RNA, 19 nt, Artificial Sequence
  Description of Artificial Sequence: Synthetic oligonucleotide
  Antisense strand to SEQ ID NO: 561411
gguuuacagaauaucaucu

SEQ ID NO: 561413 - RNA, 19 nt, Artificial Sequence
  Description of Artificial Sequence: Synthetic oligonucleotide
  Sense strand starting at position 1841 of SEQ ID NO: 318421
ucuguaaaccaagauaguu

SEQ ID NO: 561414 - RNA, 19 nt, Artificial Sequence
  Description of Artificial Sequence: Synthetic oligonucleotide
  Antisense strand to SEQ ID NO: 561413
aacuaucuugguuuacaga

SEQ ID NO: 561415 - RNA, 19 nt, Artificial Sequence
  Description of Artificial Sequence: Synthetic oligonucleotide
  Sense strand starting at position 1975 of SEQ ID NO: 318421
ccuccaugaauaggagagu

SEQ ID NO: 561416 - RNA, 19 nt, Artificial Sequence
  Description of Artificial Sequence: Synthetic oligonucleotide
  Antisense strand to SEQ ID NO: 561415
acucuccuauucauggagg

SEQ ID NO: 561417 - RNA, 19 nt, Artificial Sequence
  Description of Artificial Sequence: Synthetic oligonucleotide
  Sense strand starting at position 1986 of SEQ ID NO: 318421
aggagaguucuuuagcuga

SEQ ID NO: 561418 - RNA, 19 nt, Artificial Sequence
  Description of Artificial Sequence: Synthetic oligonucleotide
  Antisense strand to SEQ ID NO: 561417
ucagcuaaagaacucuccu

SEQ ID NO: 561419 - RNA, 19 nt, Artificial Sequence
  Description of Artificial Sequence: Synthetic oligonucleotide
  Sense strand starting at position 1988 of SEQ ID NO: 318421
gagaguucuuuagcugaaa

SEQ ID NO: 561420 - RNA, 19 nt, Artificial Sequence
  Description of Artificial Sequence: Synthetic oligonucleotide
  Antisense strand to SEQ ID NO: 561419
uuucagcuaaagaacucuc

SEQ ID NO: 561421 - RNA, 19 nt, Artificial Sequence
  Description of Artificial Sequence: Synthetic oligonucleotide
  Sense strand starting at position 1989 of SEQ ID NO: 318421
agaguucuuuagcugaaag

SEQ ID NO: 561422 - RNA, 19 nt, Artificial Sequence
  Description of Artificial Sequence: Synthetic oligonucleotide
  Antisense strand to SEQ ID NO: 561421
cuuucagcuaaagaacucu

SEQ ID NO: 561423 - RNA, 19 nt, Artificial Sequence
  Description of Artificial Sequence: Synthetic oligonucleotide
  Sense strand starting at position 1991 of SEQ ID NO: 318421
aguucuuuagcugaaagag

SEQ ID NO: 561424 - RNA, 19 nt, Artificial Sequence
  Description of Artificial Sequence: Synthetic oligonucleotide
  Antisense strand to SEQ ID NO: 561423
cucuuucagcuaaagaacu

SEQ ID NO: 561425 - RNA, 19 nt, Artificial Sequence
  Description of Artificial Sequence: Synthetic oligonucleotide
  Sense strand starting at position 2102 of SEQ ID NO: 318421
cagugauaggcaugagaca

SEQ ID NO: 561426 - RNA, 19 nt, Artificial Sequence
  Description of Artificial Sequence: Synthetic oligonucleotide
  Antisense strand to SEQ ID NO: 561425
ugucucaugccuaucacug

SEQ ID NO: 561427 - RNA, 19 nt, Artificial Sequence
  Description of Artificial Sequence: Synthetic oligonucleotide
  Sense strand starting at position 2113 of SEQ ID NO: 318421
augagacagcucuaguguu

SEQ ID NO: 561428 - RNA, 19 nt, Artificial Sequence
  Description of Artificial Sequence: Synthetic oligonucleotide
  Antisense strand to SEQ ID NO: 561427
aacacuagagcugucucau

SEQ ID NO: 561429 - RNA, 19 nt, Artificial Sequence
  Description of Artificial Sequence: Synthetic oligonucleotide
  Sense strand starting at position 2324 of SEQ ID NO: 318421
agucacagucaugaugcau

SEQ ID NO: 561430 - RNA, 19 nt, Artificial Sequence
  Description of Artificial Sequence: Synthetic oligonucleotide
  Antisense strand to SEQ ID NO: 561429
augcaucaugacugugacu

SEQ ID NO: 561431 - RNA, 19 nt, Artificial Sequence
  Description of Artificial Sequence: Synthetic oligonucleotide
  Sense strand starting at position 2516 of SEQ ID NO: 318421
uuugguccuggagacuuua

SEQ ID NO: 561432 - RNA, 19 nt, Artificial Sequence
  Description of Artificial Sequence: Synthetic oligonucleotide
  Antisense strand to SEQ ID NO: 561431
uaaagucuccaggaccaaa

SEQ ID NO: 561433 - RNA, 19 nt, Artificial Sequence
  Description of Artificial Sequence: Synthetic oligonucleotide
  Sense strand starting at position 2654 of SEQ ID NO: 318421
cuguuagagguauggaucu

SEQ ID NO: 561434 - RNA, 19 nt, Artificial Sequence
  Description of Artificial Sequence: Synthetic oligonucleotide
  Antisense strand to SEQ ID NO: 561433
agauccauaccucuaacag

SEQ ID NO: 561435 - RNA, 19 nt, Artificial Sequence
  Description of Artificial Sequence: Synthetic oligonucleotide
  Sense strand starting at position 2656 of SEQ ID NO: 318421
guuagagguauggaucuuu

SEQ ID NO: 561436 - RNA, 19 nt, Artificial Sequence
  Description of Artificial Sequence: Synthetic oligonucleotide
  Antisense strand to SEQ ID NO: 561435
aaagauccauaccucuaac

SEQ ID NO: 561437 - RNA, 19 nt, Artificial Sequence
  Description of Artificial Sequence: Synthetic oligonucleotide
  Sense strand starting at position 2815 of SEQ ID NO: 318421
ggcacaugucauuacaccu

SEQ ID NO: 561438 - RNA, 19 nt, Artificial Sequence
  Description of Artificial Sequence: Synthetic oligonucleotide
  Antisense strand to SEQ ID NO: 561437
agguguaaugacaugugcc

SEQ ID NO: 561439 - RNA, 19 nt, Artificial Sequence
  Description of Artificial Sequence: Synthetic oligonucleotide
  Sense strand starting at position 3326 of SEQ ID NO: 318421
caaucaagagccuggaagu

SEQ ID NO: 561440 - RNA, 19 nt, Artificial Sequence
  Description of Artificial Sequence: Synthetic oligonucleotide
  Antisense strand to SEQ ID NO: 561439
acuuccaggcucuugauug

SEQ ID NO: 561441 - RNA, 19 nt, Artificial Sequence
  Description of Artificial Sequence: Synthetic oligonucleotide
  Sense strand starting at position 3336 of SEQ ID NO: 318421
ccuggaagucuuuacaauc

SEQ ID NO: 561442 - RNA, 19 nt, Artificial Sequence
  Description of Artificial Sequence: Synthetic oligonucleotide
  Antisense strand to SEQ ID NO: 561441
gauuguaaagacuuccagg

SEQ ID NO: 561443 - RNA, 19 nt, Artificial Sequence
  Description of Artificial Sequence: Synthetic oligonucleotide
  Sense strand starting at position 3374 of SEQ ID NO: 318421
gggccaucugagcauaaga

SEQ ID NO: 561444 - RNA, 19 nt, Artificial Sequence
  Description of Artificial Sequence: Synthetic oligonucleotide
  Antisense strand to SEQ ID NO: 561443
ucuuaugcucagauggccc

SEQ ID NO: 561445 - RNA, 19 nt, Artificial Sequence
  Description of Artificial Sequence: Synthetic oligonucleotide
  Sense strand starting at position 3567 of SEQ ID NO: 318421
ucucucuuugauuagaguu

SEQ ID NO: 561446 - RNA, 19 nt, Artificial Sequence
  Description of Artificial Sequence: Synthetic oligonucleotide
  Antisense strand to SEQ ID NO: 561445
aacucuaaucaaagagaga

SEQ ID NO: 561447 - RNA, 19 nt, Artificial Sequence
  Description of Artificial Sequence: Synthetic oligonucleotide
  Sense strand starting at position 66 of SEQ ID NO: 318422
aagacuuccgggcacuuau

SEQ ID NO: 561448 - RNA, 19 nt, Artificial Sequence
  Description of Artificial Sequence: Synthetic oligonucleotide
  Antisense strand to SEQ ID NO: 561447
auaagugcccggaagucuu

SEQ ID NO: 561449 - RNA, 19 nt, Artificial Sequence
  Description of Artificial Sequence: Synthetic oligonucleotide
  Sense strand starting at position 173 of SEQ ID NO: 318422
ugaaauuucccgcguggau

SEQ ID NO: 561450 - RNA, 19 nt, Artificial Sequence
  Description of Artificial Sequence: Synthetic oligonucleotide
  Antisense strand to SEQ ID NO: 561449
auccacgcgggaaauuuca

SEQ ID NO: 561451 - RNA, 19 nt, Artificial Sequence
  Description of Artificial Sequence: Synthetic oligonucleotide
  Sense strand starting at position 273 of SEQ ID NO: 318422
ugagcuuccugaguaaaug

SEQ ID NO: 561452 - RNA, 19 nt, Artificial Sequence
  Description of Artificial Sequence: Synthetic oligonucleotide
  Antisense strand to SEQ ID NO: 561451
cauuuacucaggaagcuca

SEQ ID NO: 561453 - RNA, 19 nt, Artificial Sequence
  Description of Artificial Sequence: Synthetic oligonucleotide
  Sense strand starting at position 281 of SEQ ID NO: 318422
cugaguaaaugcuaucgau

SEQ ID NO: 561454 - RNA, 19 nt, Artificial Sequence
  Description of Artificial Sequence: Synthetic oligonucleotide
  Antisense strand to SEQ ID NO: 561453
aucgauagcauuuacucag

SEQ ID NO: 561455 - RNA, 19 nt, Artificial Sequence
  Description of Artificial Sequence: Synthetic oligonucleotide
  Sense strand starting at position 542 of SEQ ID NO: 318422
gacaguuuccucgacggca

SEQ ID NO: 561456 - RNA, 19 nt, Artificial Sequence
  Description of Artificial Sequence: Synthetic oligonucleotide
  Antisense strand to SEQ ID NO: 561455
ugccgucgaggaaacuguc

SEQ ID NO: 561457 - RNA, 19 nt, Artificial Sequence
  Description of Artificial Sequence: Synthetic oligonucleotide
  Sense strand starting at position 901 of SEQ ID NO: 318422
caggcuugucgcgccgaau

SEQ ID NO: 561458 - RNA, 19 nt, Artificial Sequence
  Description of Artificial Sequence: Synthetic oligonucleotide
  Antisense strand to SEQ ID NO: 561457
auucggcgcgacaagccug

SEQ ID NO: 561459 - RNA, 19 nt, Artificial Sequence
  Description of Artificial Sequence: Synthetic oligonucleotide
  Sense strand starting at position 996 of SEQ ID NO: 318422
gacuuagccuucuccagga

SEQ ID NO: 561460 - RNA, 19 nt, Artificial Sequence
  Description of Artificial Sequence: Synthetic oligonucleotide
  Antisense strand to SEQ ID NO: 561459
uccuggagaaggcuaaguc

SEQ ID NO: 561461 - RNA, 19 nt, Artificial Sequence
  Description of Artificial Sequence: Synthetic oligonucleotide
  Sense strand starting at position 1163 of SEQ ID NO: 318422
cagcgacucguccagggaa

SEQ ID NO: 561462 - RNA, 19 nt, Artificial Sequence
  Description of Artificial Sequence: Synthetic oligonucleotide
  Antisense strand to SEQ ID NO: 561461
uucccuggacgagucgcug

SEQ ID NO: 561463 - RNA, 19 nt, Artificial Sequence
  Description of Artificial Sequence: Synthetic oligonucleotide
  Sense strand starting at position 1781 of SEQ ID NO: 318422
guaguaggagccugacgaa

SEQ ID NO: 561464 - RNA, 19 nt, Artificial Sequence
  Description of Artificial Sequence: Synthetic oligonucleotide
  Antisense strand to SEQ ID NO: 561463
uucgucaggcuccuacuac

SEQ ID NO: 561465 - RNA, 19 nt, Artificial Sequence
  Description of Artificial Sequence: Synthetic oligonucleotide
  Sense strand starting at position 2237 of SEQ ID NO: 318422
cagggauccgccugaaguc

SEQ ID NO: 561466 - RNA, 19 nt, Artificial Sequence
  Description of Artificial Sequence: Synthetic oligonucleotide
  Antisense strand to SEQ ID NO: 561465
gacuucaggcggaucccug

SEQ ID NO: 561467 - RNA, 19 nt, Artificial Sequence
  Description of Artificial Sequence: Synthetic oligonucleotide
  Sense strand starting at position 2490 of SEQ ID NO: 318422
gcuagaggcuucccugacu

SEQ ID NO: 561468 - RNA, 19 nt, Artificial Sequence
  Description of Artificial Sequence: Synthetic oligonucleotide
  Antisense strand to SEQ ID NO: 561467
agucagggaagccucuagc

SEQ ID NO: 561469 - RNA, 19 nt, Artificial Sequence
  Description of Artificial Sequence: Synthetic oligonucleotide
  Sense strand starting at position 2803 of SEQ ID NO: 318422
accaccugucauugucuua

SEQ ID NO: 561470 - RNA, 19 nt, Artificial Sequence
  Description of Artificial Sequence: Synthetic oligonucleotide
  Antisense strand to SEQ ID NO: 561469
uaagacaaugacagguggu

SEQ ID NO: 561471 - RNA, 19 nt, Artificial Sequence
  Description of Artificial Sequence: Synthetic oligonucleotide
  Sense strand starting at position 2806 of SEQ ID NO: 318422
accugucauugucuuacaa

SEQ ID NO: 561472 - RNA, 19 nt, Artificial Sequence
  Description of Artificial Sequence: Synthetic oligonucleotide
  Antisense strand to SEQ ID NO: 561471
uuguaagacaaugacaggu

SEQ ID NO: 561473 - RNA, 19 nt, Artificial Sequence
  Description of Artificial Sequence: Synthetic oligonucleotide
  Sense strand starting at position 2808 of SEQ ID NO: 318422
cugucauugucuuacaacu

SEQ ID NO: 561474 - RNA, 19 nt, Artificial Sequence
  Description of Artificial Sequence: Synthetic oligonucleotide
  Antisense strand to SEQ ID NO: 561473
aguuguaagacaaugacag

SEQ ID NO: 561475 - RNA, 19 nt, Artificial Sequence
  Description of Artificial Sequence: Synthetic oligonucleotide
  Sense strand starting at position 3076 of SEQ ID NO: 318422
ugugcaacuugugcaaauu

SEQ ID NO: 561476 - RNA, 19 nt, Artificial Sequence
  Description of Artificial Sequence: Synthetic oligonucleotide
  Antisense strand to SEQ ID NO: 561475
aauuugcacaaguugcaca

SEQ ID NO: 561477 - RNA, 19 nt, Artificial Sequence
  Description of Artificial Sequence: Synthetic oligonucleotide
  Sense strand starting at position 3094 of SEQ ID NO: 318422
ugaggucccuucccagauu

SEQ ID NO: 561478 - RNA, 19 nt, Artificial Sequence
  Description of Artificial Sequence: Synthetic oligonucleotide
  Antisense strand to SEQ ID NO: 561477
aaucugggaagggaccuca

SEQ ID NO: 561479 - RNA, 19 nt, Artificial Sequence
  Description of Artificial Sequence: Synthetic oligonucleotide
  Sense strand starting at position 3097 of SEQ ID NO: 318422
ggucccuucccagauuguu

SEQ ID NO: 561480 - RNA, 19 nt, Artificial Sequence
  Description of Artificial Sequence: Synthetic oligonucleotide
  Antisense strand to SEQ ID NO: 561479
aacaaucugggaagggacc

SEQ ID NO: 561481 - RNA, 19 nt, Artificial Sequence
  Description of Artificial Sequence: Synthetic oligonucleotide
  Sense strand starting at position 3186 of SEQ ID NO: 318422
ggugucagcaggugcaaau

SEQ ID NO: 561482 - RNA, 19 nt, Artificial Sequence
  Description of Artificial Sequence: Synthetic oligonucleotide
  Antisense strand to SEQ ID NO: 561481
auuugcaccugcugacacc

SEQ ID NO: 561483 - RNA, 19 nt, Artificial Sequence
  Description of Artificial Sequence: Synthetic oligonucleotide
  Sense strand starting at position 3215 of SEQ ID NO: 318422
gguauaacauuauugucau

SEQ ID NO: 561484 - RNA, 19 nt, Artificial Sequence
  Description of Artificial Sequence: Synthetic oligonucleotide
  Antisense strand to SEQ ID NO: 561483
augacaauaauguuauacc

SEQ ID NO: 561485 - RNA, 19 nt, Artificial Sequence
  Description of Artificial Sequence: Synthetic oligonucleotide
  Sense strand starting at position 3216 of SEQ ID NO: 318422
guauaacauuauugucaug

SEQ ID NO: 561486 - RNA, 19 nt, Artificial Sequence
  Description of Artificial Sequence: Synthetic oligonucleotide
  Antisense strand to SEQ ID NO: 561485
caugacaauaauguuauac

SEQ ID NO: 561487 - RNA, 19 nt, Artificial Sequence
  Description of Artificial Sequence: Synthetic oligonucleotide
  Sense strand starting at position 3223 of SEQ ID NO: 318422
auuauugucaugugaugga

SEQ ID NO: 561488 - RNA, 19 nt, Artificial Sequence
  Description of Artificial Sequence: Synthetic oligonucleotide
  Antisense strand to SEQ ID NO: 561487
uccaucacaugacaauaau

SEQ ID NO: 561489 - RNA, 19 nt, Artificial Sequence
  Description of Artificial Sequence: Synthetic oligonucleotide
  Sense strand starting at position 3226 of SEQ ID NO: 318422
auugucaugugauggaaac

SEQ ID NO: 561490 - RNA, 19 nt, Artificial Sequence
  Description of Artificial Sequence: Synthetic oligonucleotide
  Antisense strand to SEQ ID NO: 561489
guuuccaucacaugacaau

SEQ ID NO: 561491 - RNA, 19 nt, Artificial Sequence
  Description of Artificial Sequence: Synthetic oligonucleotide
  Sense strand starting at position 3227 of SEQ ID NO: 318422
uugucaugugauggaaacu

SEQ ID NO: 561492 - RNA, 19 nt, Artificial Sequence
  Description of Artificial Sequence: Synthetic oligonucleotide
  Antisense strand to SEQ ID NO: 561491
aguuuccaucacaugacaa

SEQ ID NO: 561493 - RNA, 19 nt, Artificial Sequence
  Description of Artificial Sequence: Synthetic oligonucleotide
  Sense strand starting at position 3250 of SEQ ID NO: 318422
ucccaaauuccuugugguu

SEQ ID NO: 561494 - RNA, 19 nt, Artificial Sequence
  Description of Artificial Sequence: Synthetic oligonucleotide
  Antisense strand to SEQ ID NO: 561493
aaccacaaggaauuuggga

SEQ ID NO: 561495 - RNA, 19 nt, Artificial Sequence
  Description of Artificial Sequence: Synthetic oligonucleotide
  Sense strand starting at position 3274 of SEQ ID NO: 318422
acccacugucuuugaaguu

SEQ ID NO: 561496 - RNA, 19 nt, Artificial Sequence
  Description of Artificial Sequence: Synthetic oligonucleotide
  Antisense strand to SEQ ID NO: 561495
aacuucaaagacagugggu

SEQ ID NO: 561497 - RNA, 19 nt, Artificial Sequence
  Description of Artificial Sequence: Synthetic oligonucleotide
  Sense strand starting at position 3316 of SEQ ID NO: 318422
uagucaaguugggaaguua

SEQ ID NO: 561498 - RNA, 19 nt, Artificial Sequence
  Description of Artificial Sequence: Synthetic oligonucleotide
  Antisense strand to SEQ ID NO: 561497
uaacuucccaacuugacua

SEQ ID NO: 561499 - RNA, 19 nt, Artificial Sequence
  Description of Artificial Sequence: Synthetic oligonucleotide
  Sense strand starting at position 3330 of SEQ ID NO: 318422
aguuaaauuuaccaggaca

SEQ ID NO: 561500 - RNA, 19 nt, Artificial Sequence
  Description of Artificial Sequence: Synthetic oligonucleotide
  Antisense strand to SEQ ID NO: 561499
uguccugguaaauuuaacu

SEQ ID NO: 561501 - RNA, 19 nt, Artificial Sequence
  Description of Artificial Sequence: Synthetic oligonucleotide
  Sense strand starting at position 3359 of SEQ ID NO: 318422
gguggaauauuacugggua

SEQ ID NO: 561502 - RNA, 19 nt, Artificial Sequence
  Description of Artificial Sequence: Synthetic oligonucleotide
  Antisense strand to SEQ ID NO: 561501
uacccaguaauauuccacc

SEQ ID NO: 561503 - RNA, 19 nt, Artificial Sequence
  Description of Artificial Sequence: Synthetic oligonucleotide
  Sense strand starting at position 3360 of SEQ ID NO: 318422
guggaauauuacuggguaa

SEQ ID NO: 561504 - RNA, 19 nt, Artificial Sequence
  Description of Artificial Sequence: Synthetic oligonucleotide
  Antisense strand to SEQ ID NO: 561503
uuacccaguaauauuccac

SEQ ID NO: 561505 - RNA, 19 nt, Artificial Sequence
  Description of Artificial Sequence: Synthetic oligonucleotide
  Sense strand starting at position 3361 of SEQ ID NO: 318422
uggaauauuacuggguaac

SEQ ID NO: 561506 - RNA, 19 nt, Artificial Sequence
  Description of Artificial Sequence: Synthetic oligonucleotide
  Antisense strand to SEQ ID NO: 561505
guuacccaguaauauucca

SEQ ID NO: 561507 - RNA, 19 nt, Artificial Sequence
  Description of Artificial Sequence: Synthetic oligonucleotide
  Sense strand starting at position 3362 of SEQ ID NO: 318422
ggaauauuacuggguaacc

SEQ ID NO: 561508 - RNA, 19 nt, Artificial Sequence
  Description of Artificial Sequence: Synthetic oligonucleotide
  Antisense strand to SEQ ID NO: 561507
gguuacccaguaauauucc

SEQ ID NO: 561509 - RNA, 19 nt, Artificial Sequence
  Description of Artificial Sequence: Synthetic oligonucleotide
  Sense strand starting at position 3363 of SEQ ID NO: 318422
gaauauuacuggguaacca

SEQ ID NO: 561510 - RNA, 19 nt, Artificial Sequence
  Description of Artificial Sequence: Synthetic oligonucleotide
  Antisense strand to SEQ ID NO: 561509
ugguuacccaguaauauuc

SEQ ID NO: 561511 - RNA, 19 nt, Artificial Sequence
  Description of Artificial Sequence: Synthetic oligonucleotide
  Sense strand starting at position 3638 of SEQ ID NO: 318422
ugacgugucccugaggcuu

SEQ ID NO: 561512 - RNA, 19 nt, Artificial Sequence
  Description of Artificial Sequence: Synthetic oligonucleotide
  Antisense strand to SEQ ID NO: 561511
aagccucagggacacguca

SEQ ID NO: 561513 - RNA, 19 nt, Artificial Sequence
  Description of Artificial Sequence: Synthetic oligonucleotide
  Sense strand starting at position 3712 of SEQ ID NO: 318422
ccggaagucagacauguga

SEQ ID NO: 561514 - RNA, 19 nt, Artificial Sequence
  Description of Artificial Sequence: Synthetic oligonucleotide
  Antisense strand to SEQ ID NO: 561513
ucacaugucugacuuccgg

SEQ ID NO: 561515 - RNA, 19 nt, Artificial Sequence
  Description of Artificial Sequence: Synthetic oligonucleotide
  Sense strand starting at position 3714 of SEQ ID NO: 318422
ggaagucagacaugugauu

SEQ ID NO: 561516 - RNA, 19 nt, Artificial Sequence
  Description of Artificial Sequence: Synthetic oligonucleotide
  Antisense strand to SEQ ID NO: 561515
aaucacaugucugacuucc

SEQ ID NO: 561517 - RNA, 19 nt, Artificial Sequence
  Description of Artificial Sequence: Synthetic oligonucleotide
  Sense strand starting at position 3725 of SEQ ID NO: 318422
augugauuccugcaacgga

SEQ ID NO: 561518 - RNA, 19 nt, Artificial Sequence
  Description of Artificial Sequence: Synthetic oligonucleotide
  Antisense strand to SEQ ID NO: 561517
uccguugcaggaaucacau

SEQ ID NO: 561519 - RNA, 19 nt, Artificial Sequence
  Description of Artificial Sequence: Synthetic oligonucleotide
  Sense strand starting at position 3854 of SEQ ID NO: 318422
uguuucugcuggcugauaa

SEQ ID NO: 561520 - RNA, 19 nt, Artificial Sequence
  Description of Artificial Sequence: Synthetic oligonucleotide
  Antisense strand to SEQ ID NO: 561519
uuaucagccagcagaaaca

SEQ ID NO: 561521 - RNA, 19 nt, Artificial Sequence
  Description of Artificial Sequence: Synthetic oligonucleotide
  Sense strand starting at position 3855 of SEQ ID NO: 318422
guuucugcuggcugauaac

SEQ ID NO: 561522 - RNA, 19 nt, Artificial Sequence
  Description of Artificial Sequence: Synthetic oligonucleotide
  Antisense strand to SEQ ID NO: 561521
guuaucagccagcagaaac

SEQ ID NO: 561523 - RNA, 19 nt, Artificial Sequence
  Description of Artificial Sequence: Synthetic oligonucleotide
  Sense strand starting at position 3924 of SEQ ID NO: 318422
gcuuuauaaugugagacuc

SEQ ID NO: 561524 - RNA, 19 nt, Artificial Sequence
  Description of Artificial Sequence: Synthetic oligonucleotide
  Antisense strand to SEQ ID NO: 561523
gagucucacauuauaaagc

SEQ ID NO: 561525 - RNA, 19 nt, Artificial Sequence
  Description of Artificial Sequence: Synthetic oligonucleotide
  Sense strand starting at position 3926 of SEQ ID NO: 318422
uuuauaaugugagacucaa

SEQ ID NO: 561526 - RNA, 19 nt, Artificial Sequence
  Description of Artificial Sequence: Synthetic oligonucleotide
  Antisense strand to SEQ ID NO: 561525
uugagucucacauuauaaa

SEQ ID NO: 561527 - RNA, 19 nt, Artificial Sequence
  Description of Artificial Sequence: Synthetic oligonucleotide
  Sense strand starting at position 681 of SEQ ID NO: 318423
uuccuauugcacugccaga

SEQ ID NO: 561528 - RNA, 19 nt, Artificial Sequence
  Description of Artificial Sequence: Synthetic oligonucleotide
  Antisense strand to SEQ ID NO: 561527
ucuggcagugcaauaggaa

SEQ ID NO: 561529 - RNA, 19 nt, Artificial Sequence
  Description of Artificial Sequence: Synthetic oligonucleotide
  Sense strand starting at position 798 of SEQ ID NO: 318423
cccagcugucuacggaaga

SEQ ID NO: 561530 - RNA, 19 nt, Artificial Sequence
  Description of Artificial Sequence: Synthetic oligonucleotide
  Antisense strand to SEQ ID NO: 561529
ucuuccguagacagcuggg

SEQ ID NO: 561531 - RNA, 19 nt, Artificial Sequence
  Description of Artificial Sequence: Synthetic oligonucleotide
  Sense strand starting at position 1057 of SEQ ID NO: 318423
cacuaauuagucugagagc

SEQ ID NO: 561532 - RNA, 19 nt, Artificial Sequence
  Description of Artificial Sequence: Synthetic oligonucleotide
  Antisense strand to SEQ ID NO: 561531
gcucucagacuaauuagug

SEQ ID NO: 561533 - RNA, 19 nt, Artificial Sequence
  Description of Artificial Sequence: Synthetic oligonucleotide
  Sense strand starting at position 1332 of SEQ ID NO: 318423
agagguaacugucucacau

SEQ ID NO: 561534 - RNA, 19 nt, Artificial Sequence
  Description of Artificial Sequence: Synthetic oligonucleotide
  Antisense strand to SEQ ID NO: 561533
augugagacaguuaccucu

SEQ ID NO: 561535 - RNA, 19 nt, Artificial Sequence
  Description of Artificial Sequence: Synthetic oligonucleotide
  Sense strand starting at position 1468 of SEQ ID NO: 318423
caugauaggauucggguuu

SEQ ID NO: 561536 - RNA, 19 nt, Artificial Sequence
  Description of Artificial Sequence: Synthetic oligonucleotide
  Antisense strand to SEQ ID NO: 561535
aaacccgaauccuaucaug

SEQ ID NO: 561537 - RNA, 19 nt, Artificial Sequence
  Description of Artificial Sequence: Synthetic oligonucleotide
  Sense strand starting at position 1705 of SEQ ID NO: 318423
gaccaagugucccugaauc

SEQ ID NO: 561538 - RNA, 19 nt, Artificial Sequence
  Description of Artificial Sequence: Synthetic oligonucleotide
  Antisense strand to SEQ ID NO: 561537
gauucagggacacuugguc

SEQ ID NO: 561539 - RNA, 19 nt, Artificial Sequence
  Description of Artificial Sequence: Synthetic oligonucleotide
  Sense strand starting at position 1715 of SEQ ID NO: 318423
cccugaaucucugacuuga

SEQ ID NO: 561540 - RNA, 19 nt, Artificial Sequence
  Description of Artificial Sequence: Synthetic oligonucleotide
  Antisense strand to SEQ ID NO: 561539
ucaagucagagauucaggg

SEQ ID NO: 561541 - RNA, 19 nt, Artificial Sequence
  Description of Artificial Sequence: Synthetic oligonucleotide
  Sense strand starting at position 1717 of SEQ ID NO: 318423
cugaaucucugacuugaga

SEQ ID NO: 561542 - RNA, 19 nt, Artificial Sequence
  Description of Artificial Sequence: Synthetic oligonucleotide
  Antisense strand to SEQ ID NO: 561541
ucucaagucagagauucag

SEQ ID NO: 561543 - RNA, 19 nt, Artificial Sequence
  Description of Artificial Sequence: Synthetic oligonucleotide
  Sense strand starting at position 1733 of SEQ ID NO: 318423
agauuucucugcuuccgca

SEQ ID NO: 561544 - RNA, 19 nt, Artificial Sequence
  Description of Artificial Sequence: Synthetic oligonucleotide
  Antisense strand to SEQ ID NO: 561543
ugcggaagcagagaaaucu

SEQ ID NO: 561545 - RNA, 19 nt, Artificial Sequence
  Description of Artificial Sequence: Synthetic oligonucleotide
  Sense strand starting at position 1803 of SEQ ID NO: 318423
cugggacucugucucugaa

SEQ ID NO: 561546 - RNA, 19 nt, Artificial Sequence
  Description of Artificial Sequence: Synthetic oligonucleotide
  Antisense strand to SEQ ID NO: 561545
uucagagacagagucccag

SEQ ID NO: 561547 - RNA, 19 nt, Artificial Sequence
  Description of Artificial Sequence: Synthetic oligonucleotide
  Sense strand starting at position 1838 of SEQ ID NO: 318423
ggcagcugucucugacuuu

SEQ ID NO: 561548 - RNA, 19 nt, Artificial Sequence
  Description of Artificial Sequence: Synthetic oligonucleotide
  Antisense strand to SEQ ID NO: 561547
aaagucagagacagcugcc

SEQ ID NO: 561549 - RNA, 19 nt, Artificial Sequence
  Description of Artificial Sequence: Synthetic oligonucleotide
  Sense strand starting at position 1907 of SEQ ID NO: 318423
gcuugagugucagcucaau

SEQ ID NO: 561550 - RNA, 19 nt, Artificial Sequence
  Description of Artificial Sequence: Synthetic oligonucleotide
  Antisense strand to SEQ ID NO: 561549
auugagcugacacucaagc

SEQ ID NO: 561551 - RNA, 19 nt, Artificial Sequence
  Description of Artificial Sequence: Synthetic oligonucleotide
  Sense strand starting at position 1946 of SEQ ID NO: 318423
guugcucuguuucugacua

SEQ ID NO: 561552 - RNA, 19 nt, Artificial Sequence
  Description of Artificial Sequence: Synthetic oligonucleotide
  Antisense strand to SEQ ID NO: 561551
uagucagaaacagagcaac

SEQ ID NO: 561553 - RNA, 19 nt, Artificial Sequence
  Description of Artificial Sequence: Synthetic oligonucleotide
  Sense strand starting at position 1950 of SEQ ID NO: 318423
cucuguuucugacuacuuu

SEQ ID NO: 561554 - RNA, 19 nt, Artificial Sequence
  Description of Artificial Sequence: Synthetic oligonucleotide
  Antisense strand to SEQ ID NO: 561553
aaaguagucagaaacagag

SEQ ID NO: 561555 - RNA, 19 nt, Artificial Sequence
  Description of Artificial Sequence: Synthetic oligonucleotide
  Sense strand starting at position 2040 of SEQ ID NO: 318423
cugagucuuggaggaguga

SEQ ID NO: 561556 - RNA, 19 nt, Artificial Sequence
  Description of Artificial Sequence: Synthetic oligonucleotide
  Antisense strand to SEQ ID NO: 561555
ucacuccuccaagacucag

SEQ ID NO: 561557 - RNA, 19 nt, Artificial Sequence
  Description of Artificial Sequence: Synthetic oligonucleotide
  Sense strand starting at position 2147 of SEQ ID NO: 318423
agguguucugucggagggu

SEQ ID NO: 561558 - RNA, 19 nt, Artificial Sequence
  Description of Artificial Sequence: Synthetic oligonucleotide
  Antisense strand to SEQ ID NO: 561557
acccuccgacagaacaccu

SEQ ID NO: 561559 - RNA, 19 nt, Artificial Sequence
  Description of Artificial Sequence: Synthetic oligonucleotide
  Sense strand starting at position 2380 of SEQ ID NO: 318423
aggaucugcuuccaggaaa

SEQ ID NO: 561560 - RNA, 19 nt, Artificial Sequence
  Description of Artificial Sequence: Synthetic oligonucleotide
  Antisense strand to SEQ ID NO: 561559
uuuccuggaagcagauccu

SEQ ID NO: 561561 - RNA, 19 nt, Artificial Sequence
  Description of Artificial Sequence: Synthetic oligonucleotide
  Sense strand starting at position 2383 of SEQ ID NO: 318423
aucugcuuccaggaaacua

SEQ ID NO: 561562 - RNA, 19 nt, Artificial Sequence
  Description of Artificial Sequence: Synthetic oligonucleotide
  Antisense strand to SEQ ID NO: 561561
uaguuuccuggaagcagau

SEQ ID NO: 561563 - RNA, 19 nt, Artificial Sequence
  Description of Artificial Sequence: Synthetic oligonucleotide
  Sense strand starting at position 2436 of SEQ ID NO: 318423
cucagauacccugauaguu

SEQ ID NO: 561564 - RNA, 19 nt, Artificial Sequence
  Description of Artificial Sequence: Synthetic oligonucleotide
  Antisense strand to SEQ ID NO: 561563
aacuaucaggguaucugag

SEQ ID NO: 561565 - RNA, 19 nt, Artificial Sequence
  Description of Artificial Sequence: Synthetic oligonucleotide
  Sense strand starting at position 2524 of SEQ ID NO: 318423
gcucucaaguacuuucuga

SEQ ID NO: 561566 - RNA, 19 nt, Artificial Sequence
  Description of Artificial Sequence: Synthetic oligonucleotide
  Antisense strand to SEQ ID NO: 561565
ucagaaaguacuugagagc

SEQ ID NO: 561567 - RNA, 19 nt, Artificial Sequence
  Description of Artificial Sequence: Synthetic oligonucleotide
  Sense strand starting at position 2704 of SEQ ID NO: 318423
cugagauucccgugacaua

SEQ ID NO: 561568 - RNA, 19 nt, Artificial Sequence
  Description of Artificial Sequence: Synthetic oligonucleotide
  Antisense strand to SEQ ID NO: 561567
uaugucacgggaaucucag

SEQ ID NO: 561569 - RNA, 19 nt, Artificial Sequence
  Description of Artificial Sequence: Synthetic oligonucleotide
  Sense strand starting at position 2705 of SEQ ID NO: 318423
ugagauucccgugacauac

SEQ ID NO: 561570 - RNA, 19 nt, Artificial Sequence
  Description of Artificial Sequence: Synthetic oligonucleotide
  Antisense strand to SEQ ID NO: 561569
guaugucacgggaaucuca

SEQ ID NO: 561571 - RNA, 19 nt, Artificial Sequence
  Description of Artificial Sequence: Synthetic oligonucleotide
  Sense strand starting at position 2757 of SEQ ID NO: 318423
gggaaucucugagcaguca

SEQ ID NO: 561572 - RNA, 19 nt, Artificial Sequence
  Description of Artificial Sequence: Synthetic oligonucleotide
  Antisense strand to SEQ ID NO: 561571
ugacugcucagagauuccc

SEQ ID NO: 561573 - RNA, 19 nt, Artificial Sequence
  Description of Artificial Sequence: Synthetic oligonucleotide
  Sense strand starting at position 2811 of SEQ ID NO: 318423
guuacuuagaccugggaag

SEQ ID NO: 561574 - RNA, 19 nt, Artificial Sequence
  Description of Artificial Sequence: Synthetic oligonucleotide
  Antisense strand to SEQ ID NO: 561573
cuucccaggucuaaguaac

SEQ ID NO: 561575 - RNA, 19 nt, Artificial Sequence
  Description of Artificial Sequence: Synthetic oligonucleotide
  Sense strand starting at position 2812 of SEQ ID NO: 318423
uuacuuagaccugggaagu

SEQ ID NO: 561576 - RNA, 19 nt, Artificial Sequence
  Description of Artificial Sequence: Synthetic oligonucleotide
  Antisense strand to SEQ ID NO: 561575
acuucccaggucuaaguaa

SEQ ID NO: 561577 - RNA, 19 nt, Artificial Sequence
  Description of Artificial Sequence: Synthetic oligonucleotide
  Sense strand starting at position 2813 of SEQ ID NO: 318423
uacuuagaccugggaagua

SEQ ID NO: 561578 - RNA, 19 nt, Artificial Sequence
  Description of Artificial Sequence: Synthetic oligonucleotide
  Antisense strand to SEQ ID NO: 561577
uacuucccaggucuaagua

SEQ ID NO: 561579 - RNA, 19 nt, Artificial Sequence
  Description of Artificial Sequence: Synthetic oligonucleotide
  Sense strand starting at position 2845 of SEQ ID NO: 318423
ccaggacacucugacaguu

SEQ ID NO: 561580 - RNA, 19 nt, Artificial Sequence
  Description of Artificial Sequence: Synthetic oligonucleotide
  Antisense strand to SEQ ID NO: 561579
aacugucagaguguccugg

SEQ ID NO: 561581 - RNA, 19 nt, Artificial Sequence
  Description of Artificial Sequence: Synthetic oligonucleotide
  Sense strand starting at position 2847 of SEQ ID NO: 318423
aggacacucugacaguuua

SEQ ID NO: 561582 - RNA, 19 nt, Artificial Sequence
  Description of Artificial Sequence: Synthetic oligonucleotide
  Antisense strand to SEQ ID NO: 561581
uaaacugucagaguguccu

SEQ ID NO: 561583 - RNA, 19 nt, Artificial Sequence
  Description of Artificial Sequence: Synthetic oligonucleotide
  Sense strand starting at position 2855 of SEQ ID NO: 318423
cugacaguuuaaggaugau

SEQ ID NO: 561584 - RNA, 19 nt, Artificial Sequence
  Description of Artificial Sequence: Synthetic oligonucleotide
  Antisense strand to SEQ ID NO: 561583
aucauccuuaaacugucag

SEQ ID NO: 561585 - RNA, 19 nt, Artificial Sequence
  Description of Artificial Sequence: Synthetic oligonucleotide
  Sense strand starting at position 2858 of SEQ ID NO: 318423
acaguuuaaggaugaugca

SEQ ID NO: 561586 - RNA, 19 nt, Artificial Sequence
  Description of Artificial Sequence: Synthetic oligonucleotide
  Antisense strand to SEQ ID NO: 561585
ugcaucauccuuaaacugu

SEQ ID NO: 561587 - RNA, 19 nt, Artificial Sequence
  Description of Artificial Sequence: Synthetic oligonucleotide
  Sense strand starting at position 3003 of SEQ ID NO: 318423
gucugauucccagggucau

SEQ ID NO: 561588 - RNA, 19 nt, Artificial Sequence
  Description of Artificial Sequence: Synthetic oligonucleotide
  Antisense strand to SEQ ID NO: 561587
augacccugggaaucagac

SEQ ID NO: 561589 - RNA, 19 nt, Artificial Sequence
  Description of Artificial Sequence: Synthetic oligonucleotide
  Sense strand starting at position 3015 of SEQ ID NO: 318423
gggucaugccgucauacag

SEQ ID NO: 561590 - RNA, 19 nt, Artificial Sequence
  Description of Artificial Sequence: Synthetic oligonucleotide
  Antisense strand to SEQ ID NO: 561589
cuguaugacggcaugaccc

SEQ ID NO: 561591 - RNA, 19 nt, Artificial Sequence
  Description of Artificial Sequence: Synthetic oligonucleotide
  Sense strand starting at position 3045 of SEQ ID NO: 318423
acacgcuggugauucaaga

SEQ ID NO: 561592 - RNA, 19 nt, Artificial Sequence
  Description of Artificial Sequence: Synthetic oligonucleotide
  Antisense strand to SEQ ID NO: 561591
ucuugaaucaccagcgugu

SEQ ID NO: 561593 - RNA, 19 nt, Artificial Sequence
  Description of Artificial Sequence: Synthetic oligonucleotide
  Sense strand starting at position 3097 of SEQ ID NO: 318423
uaccgugugguccauggau

SEQ ID NO: 561594 - RNA, 19 nt, Artificial Sequence
  Description of Artificial Sequence: Synthetic oligonucleotide
  Antisense strand to SEQ ID NO: 561593
auccauggaccacacggua

SEQ ID NO: 561595 - RNA, 19 nt, Artificial Sequence
  Description of Artificial Sequence: Synthetic oligonucleotide
  Sense strand starting at position 3099 of SEQ ID NO: 318423
ccgugugguccauggauca

SEQ ID NO: 561596 - RNA, 19 nt, Artificial Sequence
  Description of Artificial Sequence: Synthetic oligonucleotide
  Antisense strand to SEQ ID NO: 561595
ugauccauggaccacacgg

SEQ ID NO: 561597 - RNA, 19 nt, Artificial Sequence
  Description of Artificial Sequence: Synthetic oligonucleotide
  Sense strand starting at position 3145 of SEQ ID NO: 318423
gcauguuggaaaugcagau

SEQ ID NO: 561598 - RNA, 19 nt, Artificial Sequence
  Description of Artificial Sequence: Synthetic oligonucleotide
  Antisense strand to SEQ ID NO: 561597
aucugcauuuccaacaugc

SEQ ID NO: 561599 - RNA, 19 nt, Artificial Sequence
  Description of Artificial Sequence: Synthetic oligonucleotide
  Sense strand starting at position 3191 of SEQ ID NO: 318423
gucacaaucugccuuguau

SEQ ID NO: 561600 - RNA, 19 nt, Artificial Sequence
  Description of Artificial Sequence: Synthetic oligonucleotide
  Antisense strand to SEQ ID NO: 561599
auacaaggcagauugugac

SEQ ID NO: 561601 - RNA, 19 nt, Artificial Sequence
  Description of Artificial Sequence: Synthetic oligonucleotide
  Sense strand starting at position 3301 of SEQ ID NO: 318423
acuucuauugcucacaguu

SEQ ID NO: 561602 - RNA, 19 nt, Artificial Sequence
  Description of Artificial Sequence: Synthetic oligonucleotide
  Antisense strand to SEQ ID NO: 561601
aacugugagcaauagaagu

SEQ ID NO: 561603 - RNA, 19 nt, Artificial Sequence
  Description of Artificial Sequence: Synthetic oligonucleotide
  Sense strand starting at position 3601 of SEQ ID NO: 318423
acguuuaguccauagcaac

SEQ ID NO: 561604 - RNA, 19 nt, Artificial Sequence
  Description of Artificial Sequence: Synthetic oligonucleotide
  Antisense strand to SEQ ID NO: 561603
guugcuauggacuaaacgu

SEQ ID NO: 561605 - RNA, 19 nt, Artificial Sequence
  Description of Artificial Sequence: Synthetic oligonucleotide
  Sense strand starting at position 3628 of SEQ ID NO: 318423
gggaaacacugcucuaauu

SEQ ID NO: 561606 - RNA, 19 nt, Artificial Sequence
  Description of Artificial Sequence: Synthetic oligonucleotide
  Antisense strand to SEQ ID NO: 561605
aauuagagcaguguuuccc

SEQ ID NO: 561607 - RNA, 19 nt, Artificial Sequence
  Description of Artificial Sequence: Synthetic oligonucleotide
  Sense strand starting at position 91 of SEQ ID NO: 318424
cugucaaccaguugugaag

SEQ ID NO: 561608 - RNA, 19 nt, Artificial Sequence
  Description of Artificial Sequence: Synthetic oligonucleotide
  Antisense strand to SEQ ID NO: 561607
cuucacaacugguugacag

SEQ ID NO: 561609 - RNA, 19 nt, Artificial Sequence
  Description of Artificial Sequence: Synthetic oligonucleotide
  Sense strand starting at position 207 of SEQ ID NO: 318424
cugucuguggaguaaccua

SEQ ID NO: 561610 - RNA, 19 nt, Artificial Sequence
  Description of Artificial Sequence: Synthetic oligonucleotide
  Antisense strand to SEQ ID NO: 561609
uagguuacuccacagacag

SEQ ID NO: 561611 - RNA, 19 nt, Artificial Sequence
  Description of Artificial Sequence: Synthetic oligonucleotide
  Sense strand starting at position 282 of SEQ ID NO: 318424
acagacuugcauuagguaa

SEQ ID NO: 561612 - RNA, 19 nt, Artificial Sequence
  Description of Artificial Sequence: Synthetic oligonucleotide
  Antisense strand to SEQ ID NO: 561611
uuaccuaaugcaagucugu

SEQ ID NO: 561613 - RNA, 19 nt, Artificial Sequence
  Description of Artificial Sequence: Synthetic oligonucleotide
  Sense strand starting at position 391 of SEQ ID NO: 318424
gguuaaucucuagaggcca

SEQ ID NO: 561614 - RNA, 19 nt, Artificial Sequence
  Description of Artificial Sequence: Synthetic oligonucleotide
  Antisense strand to SEQ ID NO: 561613
uggccucuagagauuaacc

SEQ ID NO: 561615 - RNA, 19 nt, Artificial Sequence
  Description of Artificial Sequence: Synthetic oligonucleotide
  Sense strand starting at position 975 of SEQ ID NO: 318424
ggcccagaguuacugguaa

SEQ ID NO: 561616 - RNA, 19 nt, Artificial Sequence
  Description of Artificial Sequence: Synthetic oligonucleotide
  Antisense strand to SEQ ID NO: 561615
uuaccaguaacucugggcc

SEQ ID NO: 561617 - RNA, 19 nt, Artificial Sequence
  Description of Artificial Sequence: Synthetic oligonucleotide
  Sense strand starting at position 1525 of SEQ ID NO: 318424
guaguuucccaggaguuug

SEQ ID NO: 561618 - RNA, 19 nt, Artificial Sequence
  Description of Artificial Sequence: Synthetic oligonucleotide
  Antisense strand to SEQ ID NO: 561617
caaacuccugggaaacuac

SEQ ID NO: 561619 - RNA, 19 nt, Artificial Sequence
  Description of Artificial Sequence: Synthetic oligonucleotide
  Sense strand starting at position 1530 of SEQ ID NO: 318424
uucccaggaguuuggaaau

SEQ ID NO: 561620 - RNA, 19 nt, Artificial Sequence
  Description of Artificial Sequence: Synthetic oligonucleotide
  Antisense strand to SEQ ID NO: 561619
auuuccaaacuccugggaa

SEQ ID NO: 561621 - RNA, 19 nt, Artificial Sequence
  Description of Artificial Sequence: Synthetic oligonucleotide
  Sense strand starting at position 2138 of SEQ ID NO: 318424
cgacguugcccuucgagau

SEQ ID NO: 561622 - RNA, 19 nt, Artificial Sequence
  Description of Artificial Sequence: Synthetic oligonucleotide
  Antisense strand to SEQ ID NO: 561621
aucucgaagggcaacgucg

SEQ ID NO: 561623 - RNA, 19 nt, Artificial Sequence
  Description of Artificial Sequence: Synthetic oligonucleotide
  Sense strand starting at position 2142 of SEQ ID NO: 318424
guugcccuucgagauaucu

SEQ ID NO: 561624 - RNA, 19 nt, Artificial Sequence
  Description of Artificial Sequence: Synthetic oligonucleotide
  Antisense strand to SEQ ID NO: 561623
agauaucucgaagggcaac

SEQ ID NO: 561625 - RNA, 19 nt, Artificial Sequence
  Description of Artificial Sequence: Synthetic oligonucleotide
  Sense strand starting at position 2153 of SEQ ID NO: 318424
agauaucucccagaugcca

SEQ ID NO: 561626 - RNA, 19 nt, Artificial Sequence
  Description of Artificial Sequence: Synthetic oligonucleotide
  Antisense strand to SEQ ID NO: 561625
uggcaucugggagauaucu

SEQ ID NO: 561627 - RNA, 19 nt, Artificial Sequence
  Description of Artificial Sequence: Synthetic oligonucleotide
  Sense strand starting at position 2357 of SEQ ID NO: 318424
uggagacagucuguaaagu

SEQ ID NO: 561628 - RNA, 19 nt, Artificial Sequence
  Description of Artificial Sequence: Synthetic oligonucleotide
  Antisense strand to SEQ ID NO: 561627
acuuuacagacugucucca

SEQ ID NO: 561629 - RNA, 19 nt, Artificial Sequence
  Description of Artificial Sequence: Synthetic oligonucleotide
  Sense strand starting at position 2400 of SEQ ID NO: 318424
aaaugauguccagaggccu

SEQ ID NO: 561630 - RNA, 19 nt, Artificial Sequence
  Description of Artificial Sequence: Synthetic oligonucleotide
  Antisense strand to SEQ ID NO: 561629
aggccucuggacaucauuu

SEQ ID NO: 561631 - RNA, 19 nt, Artificial Sequence
  Description of Artificial Sequence: Synthetic oligonucleotide
  Sense strand starting at position 2408 of SEQ ID NO: 318424
uccagaggccuuuaaucaa

SEQ ID NO: 561632 - RNA, 19 nt, Artificial Sequence
  Description of Artificial Sequence: Synthetic oligonucleotide
  Antisense strand to SEQ ID NO: 561631
uugauuaaaggccucugga

SEQ ID NO: 561633 - RNA, 19 nt, Artificial Sequence
  Description of Artificial Sequence: Synthetic oligonucleotide
  Sense strand starting at position 2439 of SEQ ID NO: 318424
cugcgaguuaagcagacuu

SEQ ID NO: 561634 - RNA, 19 nt, Artificial Sequence
  Description of Artificial Sequence: Synthetic oligonucleotide
  Antisense strand to SEQ ID NO: 561633
aagucugcuuaacucgcag

SEQ ID NO: 561635 - RNA, 19 nt, Artificial Sequence
  Description of Artificial Sequence: Synthetic oligonucleotide
  Sense strand starting at position 2441 of SEQ ID NO: 318424
gcgaguuaagcagacuucu

SEQ ID NO: 561636 - RNA, 19 nt, Artificial Sequence
  Description of Artificial Sequence: Synthetic oligonucleotide
  Antisense strand to SEQ ID NO: 561635
agaagucugcuuaacucgc

SEQ ID NO: 561637 - RNA, 19 nt, Artificial Sequence
  Description of Artificial Sequence: Synthetic oligonucleotide
  Sense strand starting at position 2499 of SEQ ID NO: 318424
acagcuaauggucaucuau

SEQ ID NO: 561638 - RNA, 19 nt, Artificial Sequence
  Description of Artificial Sequence: Synthetic oligonucleotide
  Antisense strand to SEQ ID NO: 561637
auagaugaccauuagcugu

SEQ ID NO: 561639 - RNA, 19 nt, Artificial Sequence
  Description of Artificial Sequence: Synthetic oligonucleotide
  Sense strand starting at position 2501 of SEQ ID NO: 318424
agcuaauggucaucuauug

SEQ ID NO: 561640 - RNA, 19 nt, Artificial Sequence
  Description of Artificial Sequence: Synthetic oligonucleotide
  Antisense strand to SEQ ID NO: 561639
caauagaugaccauuagcu

SEQ ID NO: 561641 - RNA, 19 nt, Artificial Sequence
  Description of Artificial Sequence: Synthetic oligonucleotide
  Sense strand starting at position 2533 of SEQ ID NO: 318424
caaccaguguucuugaaag

SEQ ID NO: 561642 - RNA, 19 nt, Artificial Sequence
  Description of Artificial Sequence: Synthetic oligonucleotide
  Antisense strand to SEQ ID NO: 561641
cuuucaagaacacugguug

SEQ ID NO: 561643 - RNA, 19 nt, Artificial Sequence
  Description of Artificial Sequence: Synthetic oligonucleotide
  Sense strand starting at position 2656 of SEQ ID NO: 318424
ugucuuauuuggcccaacu

SEQ ID NO: 561644 - RNA, 19 nt, Artificial Sequence
  Description of Artificial Sequence: Synthetic oligonucleotide
  Antisense strand to SEQ ID NO: 561643
aguugggccaaauaagaca

SEQ ID NO: 561645 - RNA, 19 nt, Artificial Sequence
  Description of Artificial Sequence: Synthetic oligonucleotide
  Sense strand starting at position 2765 of SEQ ID NO: 318424
ucgugaaggagcugaguaa

SEQ ID NO: 561646 - RNA, 19 nt, Artificial Sequence
  Description of Artificial Sequence: Synthetic oligonucleotide
  Antisense strand to SEQ ID NO: 561645
uuacucagcuccuucacga

SEQ ID NO: 561647 - RNA, 19 nt, Artificial Sequence
  Description of Artificial Sequence: Synthetic oligonucleotide
  Sense strand starting at position 2780 of SEQ ID NO: 318424
guaagagauugccuccaac

SEQ ID NO: 561648 - RNA, 19 nt, Artificial Sequence
  Description of Artificial Sequence: Synthetic oligonucleotide
  Antisense strand to SEQ ID NO: 561647
guuggaggcaaucucuuac

SEQ ID NO: 561649 - RNA, 19 nt, Artificial Sequence
  Description of Artificial Sequence: Synthetic oligonucleotide
  Sense strand starting at position 2783 of SEQ ID NO: 318424
agagauugccuccaacuuc

SEQ ID NO: 561650 - RNA, 19 nt, Artificial Sequence
  Description of Artificial Sequence: Synthetic oligonucleotide
  Antisense strand to SEQ ID NO: 561649
gaaguuggaggcaaucucu

SEQ ID NO: 561651 - RNA, 19 nt, Artificial Sequence
  Description of Artificial Sequence: Synthetic oligonucleotide
  Sense strand starting at position 2905 of SEQ ID NO: 318424
auaggaagccuucgguuca

SEQ ID NO: 561652 - RNA, 19 nt, Artificial Sequence
  Description of Artificial Sequence: Synthetic oligonucleotide
  Antisense strand to SEQ ID NO: 561651
ugaaccgaaggcuuccuau

SEQ ID NO: 561653 - RNA, 19 nt, Artificial Sequence
  Description of Artificial Sequence: Synthetic oligonucleotide
  Sense strand starting at position 2926 of SEQ ID NO: 318424
cucaguaggugucuacaau

SEQ ID NO: 561654 - RNA, 19 nt, Artificial Sequence
  Description of Artificial Sequence: Synthetic oligonucleotide
  Antisense strand to SEQ ID NO: 561653
auuguagacaccuacugag

SEQ ID NO: 561655 - RNA, 19 nt, Artificial Sequence
  Description of Artificial Sequence: Synthetic oligonucleotide
  Sense strand starting at position 2927 of SEQ ID NO: 318424
ucaguaggugucuacaauu

SEQ ID NO: 561656 - RNA, 19 nt, Artificial Sequence
  Description of Artificial Sequence: Synthetic oligonucleotide
  Antisense strand to SEQ ID NO: 561655
aauuguagacaccuacuga

SEQ ID NO: 561657 - RNA, 19 nt, Artificial Sequence
  Description of Artificial Sequence: Synthetic oligonucleotide
  Sense strand starting at position 2962 of SEQ ID NO: 318424
uuaacuuccuuaguuguaa

SEQ ID NO: 561658 - RNA, 19 nt, Artificial Sequence
  Description of Artificial Sequence: Synthetic oligonucleotide
  Antisense strand to SEQ ID NO: 561657
uuacaacuaaggaaguuaa

SEQ ID NO: 561659 - RNA, 19 nt, Artificial Sequence
  Description of Artificial Sequence: Synthetic oligonucleotide
  Sense strand starting at position 3077 of SEQ ID NO: 318424
uuucgucgugccuuagcaa

SEQ ID NO: 561660 - RNA, 19 nt, Artificial Sequence
  Description of Artificial Sequence: Synthetic oligonucleotide
  Antisense strand to SEQ ID NO: 561659
uugcuaaggcacgacgaaa

SEQ ID NO: 561661 - RNA, 19 nt, Artificial Sequence
  Description of Artificial Sequence: Synthetic oligonucleotide
  Sense strand starting at position 3185 of SEQ ID NO: 318424
guaggcucuuaaucaauca

SEQ ID NO: 561662 - RNA, 19 nt, Artificial Sequence
  Description of Artificial Sequence: Synthetic oligonucleotide
  Antisense strand to SEQ ID NO: 561661
ugauugauuaagagccuac

SEQ ID NO: 561663 - RNA, 19 nt, Artificial Sequence
  Description of Artificial Sequence: Synthetic oligonucleotide
  Sense strand starting at position 3241 of SEQ ID NO: 318424
uuggaagucauauguggaa

SEQ ID NO: 561664 - RNA, 19 nt, Artificial Sequence
  Description of Artificial Sequence: Synthetic oligonucleotide
  Antisense strand to SEQ ID NO: 561663
uuccacauaugacuuccaa

SEQ ID NO: 561665 - RNA, 19 nt, Artificial Sequence
  Description of Artificial Sequence: Synthetic oligonucleotide
  Sense strand starting at position 3243 of SEQ ID NO: 318424
ggaagucauauguggaaua

SEQ ID NO: 561666 - RNA, 19 nt, Artificial Sequence
  Description of Artificial Sequence: Synthetic oligonucleotide
  Antisense strand to SEQ ID NO: 561665
uauuccacauaugacuucc

SEQ ID NO: 561667 - RNA, 19 nt, Artificial Sequence
  Description of Artificial Sequence: Synthetic oligonucleotide
  Sense strand starting at position 3373 of SEQ ID NO: 318424
gcagaugcugcuggaaaga

SEQ ID NO: 561668 - RNA, 19 nt, Artificial Sequence
  Description of Artificial Sequence: Synthetic oligonucleotide
  Antisense strand to SEQ ID NO: 561667
ucuuuccagcagcaucugc

SEQ ID NO: 561669 - RNA, 19 nt, Artificial Sequence
  Description of Artificial Sequence: Synthetic oligonucleotide
  Sense strand starting at position 3474 of SEQ ID NO: 318424
uaaguaauaugcuugaguu

SEQ ID NO: 561670 - RNA, 19 nt, Artificial Sequence
  Description of Artificial Sequence: Synthetic oligonucleotide
  Antisense strand to SEQ ID NO: 561669
aacucaagcauauuacuua

SEQ ID NO: 561671 - RNA, 19 nt, Artificial Sequence
  Description of Artificial Sequence: Synthetic oligonucleotide
  Sense strand starting at position 3475 of SEQ ID NO: 318424
aaguaauaugcuugaguuc

SEQ ID NO: 561672 - RNA, 19 nt, Artificial Sequence
  Description of Artificial Sequence: Synthetic oligonucleotide
  Antisense strand to SEQ ID NO: 561671
gaacucaagcauauuacuu

SEQ ID NO: 561673 - RNA, 19 nt, Artificial Sequence
  Description of Artificial Sequence: Synthetic oligonucleotide
  Sense strand starting at position 3476 of SEQ ID NO: 318424
aguaauaugcuugaguucu

SEQ ID NO: 561674 - RNA, 19 nt, Artificial Sequence
  Description of Artificial Sequence: Synthetic oligonucleotide
  Antisense strand to SEQ ID NO: 561673
agaacucaagcauauuacu

SEQ ID NO: 561675 - RNA, 19 nt, Artificial Sequence
  Description of Artificial Sequence: Synthetic oligonucleotide
  Sense strand starting at position 3653 of SEQ ID NO: 318424
auucuucuagauuggaauu

SEQ ID NO: 561676 - RNA, 19 nt, Artificial Sequence
  Description of Artificial Sequence: Synthetic oligonucleotide
  Antisense strand to SEQ ID NO: 561675
aauuccaaucuagaagaau

SEQ ID NO: 561677 - RNA, 19 nt, Artificial Sequence
  Description of Artificial Sequence: Synthetic oligonucleotide
  Sense strand starting at position 3690 of SEQ ID NO: 318424
uaggcaaguguguaagaaa

SEQ ID NO: 561678 - RNA, 19 nt, Artificial Sequence
  Description of Artificial Sequence: Synthetic oligonucleotide
  Antisense strand to SEQ ID NO: 561677
uuucuuacacacuugccua

SEQ ID NO: 561679 - RNA, 19 nt, Artificial Sequence
  Description of Artificial Sequence: Synthetic oligonucleotide
  Sense strand starting at position 3721 of SEQ ID NO: 318424
aaaguuaagugacuuuaga

SEQ ID NO: 561680 - RNA, 19 nt, Artificial Sequence
  Description of Artificial Sequence: Synthetic oligonucleotide
  Antisense strand to SEQ ID NO: 561679
ucuaaagucacuuaacuuu

SEQ ID NO: 561681 - RNA, 19 nt, Artificial Sequence
  Description of Artificial Sequence: Synthetic oligonucleotide
  Sense strand starting at position 3810 of SEQ ID NO: 318424
uaagaagauguccaugcua

SEQ ID NO: 561682 - RNA, 19 nt, Artificial Sequence
  Description of Artificial Sequence: Synthetic oligonucleotide
  Antisense strand to SEQ ID NO: 561681
uagcauggacaucuucuua

SEQ ID NO: 561683 - RNA, 19 nt, Artificial Sequence
  Description of Artificial Sequence: Synthetic oligonucleotide
  Sense strand starting at position 3812 of SEQ ID NO: 318424
agaagauguccaugcuacu

SEQ ID NO: 561684 - RNA, 19 nt, Artificial Sequence
  Description of Artificial Sequence: Synthetic oligonucleotide
  Antisense strand to SEQ ID NO: 561683
aguagcauggacaucuucu

SEQ ID NO: 561685 - RNA, 19 nt, Artificial Sequence
  Description of Artificial Sequence: Synthetic oligonucleotide
  Sense strand starting at position 3818 of SEQ ID NO: 318424
uguccaugcuacucugaau

SEQ ID NO: 561686 - RNA, 19 nt, Artificial Sequence
  Description of Artificial Sequence: Synthetic oligonucleotide
  Antisense strand to SEQ ID NO: 561685
auucagaguagcauggaca

SEQ ID NO: 561687 - RNA, 19 nt, Artificial Sequence
  Description of Artificial Sequence: Synthetic oligonucleotide
  Sense strand starting at position 19 of SEQ ID NO: 318425
cuuggucucaccggagaaa

SEQ ID NO: 561688 - RNA, 19 nt, Artificial Sequence
  Description of Artificial Sequence: Synthetic oligonucleotide
  Antisense strand to SEQ ID NO: 561687
uuucuccggugagaccaag

SEQ ID NO: 561689 - RNA, 19 nt, Artificial Sequence
  Description of Artificial Sequence: Synthetic oligonucleotide
  Sense strand starting at position 114 of SEQ ID NO: 318425
guggcugauuuagcuggaa

SEQ ID NO: 561690 - RNA, 19 nt, Artificial Sequence
  Description of Artificial Sequence: Synthetic oligonucleotide
  Antisense strand to SEQ ID NO: 561689
uuccagcuaaaucagccac

SEQ ID NO: 561691 - RNA, 19 nt, Artificial Sequence
  Description of Artificial Sequence: Synthetic oligonucleotide
  Sense strand starting at position 166 of SEQ ID NO: 318425
gaauguccucacuggagga

SEQ ID NO: 561692 - RNA, 19 nt, Artificial Sequence
  Description of Artificial Sequence: Synthetic oligonucleotide
  Antisense strand to SEQ ID NO: 561691
uccuccagugaggacauuc

SEQ ID NO: 561693 - RNA, 19 nt, Artificial Sequence
  Description of Artificial Sequence: Synthetic oligonucleotide
  Sense strand starting at position 208 of SEQ ID NO: 318425
guucuucuccuggguuaca

SEQ ID NO: 561694 - RNA, 19 nt, Artificial Sequence
  Description of Artificial Sequence: Synthetic oligonucleotide
  Antisense strand to SEQ ID NO: 561693
uguaacccaggagaagaac

SEQ ID NO: 561695 - RNA, 19 nt, Artificial Sequence
  Description of Artificial Sequence: Synthetic oligonucleotide
  Sense strand starting at position 209 of SEQ ID NO: 318425
uucuucuccuggguuacaa

SEQ ID NO: 561696 - RNA, 19 nt, Artificial Sequence
  Description of Artificial Sequence: Synthetic oligonucleotide
  Antisense strand to SEQ ID NO: 561695
uuguaacccaggagaagaa

SEQ ID NO: 561697 - RNA, 19 nt, Artificial Sequence
  Description of Artificial Sequence: Synthetic oligonucleotide
  Sense strand starting at position 265 of SEQ ID NO: 318425
cagagaagccugcagugua

SEQ ID NO: 561698 - RNA, 19 nt, Artificial Sequence
  Description of Artificial Sequence: Synthetic oligonucleotide
  Antisense strand to SEQ ID NO: 561697
uacacugcaggcuucucug

SEQ ID NO: 561699 - RNA, 19 nt, Artificial Sequence
  Description of Artificial Sequence: Synthetic oligonucleotide
  Sense strand starting at position 336 of SEQ ID NO: 318425
cccugagccucccuuuaga

SEQ ID NO: 561700 - RNA, 19 nt, Artificial Sequence
  Description of Artificial Sequence: Synthetic oligonucleotide
  Antisense strand to SEQ ID NO: 561699
ucuaaagggaggcucaggg

SEQ ID NO: 561701 - RNA, 19 nt, Artificial Sequence
  Description of Artificial Sequence: Synthetic oligonucleotide
  Sense strand starting at position 472 of SEQ ID NO: 318425
aaaggcacccgugaguaau

SEQ ID NO: 561702 - RNA, 19 nt, Artificial Sequence
  Description of Artificial Sequence: Synthetic oligonucleotide
  Antisense strand to SEQ ID NO: 561701
auuacucacgggugccuuu

SEQ ID NO: 561703 - RNA, 19 nt, Artificial Sequence
  Description of Artificial Sequence: Synthetic oligonucleotide
  Sense strand starting at position 779 of SEQ ID NO: 318425
gucauuuccucugagucag

SEQ ID NO: 561704 - RNA, 19 nt, Artificial Sequence
  Description of Artificial Sequence: Synthetic oligonucleotide
  Antisense strand to SEQ ID NO: 561703
cugacucagaggaaaugac

SEQ ID NO: 561705 - RNA, 19 nt, Artificial Sequence
  Description of Artificial Sequence: Synthetic oligonucleotide
  Sense strand starting at position 787 of SEQ ID NO: 318425
cucugagucagaggccauu

SEQ ID NO: 561706 - RNA, 19 nt, Artificial Sequence
  Description of Artificial Sequence: Synthetic oligonucleotide
  Antisense strand to SEQ ID NO: 561705
aauggccucugacucagag

SEQ ID NO: 561707 - RNA, 19 nt, Artificial Sequence
  Description of Artificial Sequence: Synthetic oligonucleotide
  Sense strand starting at position 798 of SEQ ID NO: 318425
aggccauucuccucccaga

SEQ ID NO: 561708 - RNA, 19 nt, Artificial Sequence
  Description of Artificial Sequence: Synthetic oligonucleotide
  Antisense strand to SEQ ID NO: 561707
ucugggaggagaauggccu

SEQ ID NO: 561709 - RNA, 19 nt, Artificial Sequence
  Description of Artificial Sequence: Synthetic oligonucleotide
  Sense strand starting at position 877 of SEQ ID NO: 318425
gcaugcuacucaguacagu

SEQ ID NO: 561710 - RNA, 19 nt, Artificial Sequence
  Description of Artificial Sequence: Synthetic oligonucleotide
  Antisense strand to SEQ ID NO: 561709
acuguacugaguagcaugc

SEQ ID NO: 561711 - RNA, 19 nt, Artificial Sequence
  Description of Artificial Sequence: Synthetic oligonucleotide
  Sense strand starting at position 898 of SEQ ID NO: 318425
gggcauugugcucagacaa

SEQ ID NO: 561712 - RNA, 19 nt, Artificial Sequence
  Description of Artificial Sequence: Synthetic oligonucleotide
  Antisense strand to SEQ ID NO: 561711
uugucugagcacaaugccc

SEQ ID NO: 561713 - RNA, 19 nt, Artificial Sequence
  Description of Artificial Sequence: Synthetic oligonucleotide
  Sense strand starting at position 979 of SEQ ID NO: 318425
uucccugggucagcaauau

SEQ ID NO: 561714 - RNA, 19 nt, Artificial Sequence
  Description of Artificial Sequence: Synthetic oligonucleotide
  Antisense strand to SEQ ID NO: 561713
auauugcugacccagggaa

SEQ ID NO: 561715 - RNA, 19 nt, Artificial Sequence
  Description of Artificial Sequence: Synthetic oligonucleotide
  Sense strand starting at position 1039 of SEQ ID NO: 318425
ggagaaugguggcuaggaa

SEQ ID NO: 561716 - RNA, 19 nt, Artificial Sequence
  Description of Artificial Sequence: Synthetic oligonucleotide
  Antisense strand to SEQ ID NO: 561715
uuccuagccaccauucucc

SEQ ID NO: 561717 - RNA, 19 nt, Artificial Sequence
  Description of Artificial Sequence: Synthetic oligonucleotide
  Sense strand starting at position 1140 of SEQ ID NO: 318425
cuccucuacccugguaaga

SEQ ID NO: 561718 - RNA, 19 nt, Artificial Sequence
  Description of Artificial Sequence: Synthetic oligonucleotide
  Antisense strand to SEQ ID NO: 561717
ucuuaccaggguagaggag

SEQ ID NO: 561719 - RNA, 19 nt, Artificial Sequence
  Description of Artificial Sequence: Synthetic oligonucleotide
  Sense strand starting at position 1142 of SEQ ID NO: 318425
ccucuacccugguaagaaa

SEQ ID NO: 561720 - RNA, 19 nt, Artificial Sequence
  Description of Artificial Sequence: Synthetic oligonucleotide
  Antisense strand to SEQ ID NO: 561719
uuucuuaccaggguagagg

SEQ ID NO: 561721 - RNA, 19 nt, Artificial Sequence
  Description of Artificial Sequence: Synthetic oligonucleotide
  Sense strand starting at position 2630 of SEQ ID NO: 318425
ucugaaguuggcuguccau

SEQ ID NO: 561722 - RNA, 19 nt, Artificial Sequence
  Description of Artificial Sequence: Synthetic oligonucleotide
  Antisense strand to SEQ ID NO: 561721
auggacagccaacuucaga

SEQ ID NO: 561723 - RNA, 19 nt, Artificial Sequence
  Description of Artificial Sequence: Synthetic oligonucleotide
  Sense strand starting at position 2724 of SEQ ID NO: 318425
accauauuagcuggaacau

SEQ ID NO: 561724 - RNA, 19 nt, Artificial Sequence
  Description of Artificial Sequence: Synthetic oligonucleotide
  Antisense strand to SEQ ID NO: 561723
auguuccagcuaauauggu

SEQ ID NO: 561725 - RNA, 19 nt, Artificial Sequence
  Description of Artificial Sequence: Synthetic oligonucleotide
  Sense strand starting at position 2725 of SEQ ID NO: 318425
ccauauuagcuggaacauu

SEQ ID NO: 561726 - RNA, 19 nt, Artificial Sequence
  Description of Artificial Sequence: Synthetic oligonucleotide
  Antisense strand to SEQ ID NO: 561725
aauguuccagcuaauaugg

SEQ ID NO: 561727 - RNA, 19 nt, Artificial Sequence
  Description of Artificial Sequence: Synthetic oligonucleotide
  Sense strand starting at position 2828 of SEQ ID NO: 318425
uguggagaaucgcuugaau

SEQ ID NO: 561728 - RNA, 19 nt, Artificial Sequence
  Description of Artificial Sequence: Synthetic oligonucleotide
  Antisense strand to SEQ ID NO: 561727
auucaagcgauucuccaca

SEQ ID NO: 561729 - RNA, 19 nt, Artificial Sequence
  Description of Artificial Sequence: Synthetic oligonucleotide
  Sense strand starting at position 3082 of SEQ ID NO: 318425
gguagauucuagcuuuggu

SEQ ID NO: 561730 - RNA, 19 nt, Artificial Sequence
  Description of Artificial Sequence: Synthetic oligonucleotide
  Antisense strand to SEQ ID NO: 561729
accaaagcuagaaucuacc

SEQ ID NO: 561731 - RNA, 19 nt, Artificial Sequence
  Description of Artificial Sequence: Synthetic oligonucleotide
  Sense strand starting at position 3126 of SEQ ID NO: 318425
aauggugucaggcacguau

SEQ ID NO: 561732 - RNA, 19 nt, Artificial Sequence
  Description of Artificial Sequence: Synthetic oligonucleotide
  Antisense strand to SEQ ID NO: 561731
auacgugccugacaccauu

SEQ ID NO: 561733 - RNA, 19 nt, Artificial Sequence
  Description of Artificial Sequence: Synthetic oligonucleotide
  Sense strand starting at position 3138 of SEQ ID NO: 318425
cacguaucugcuucuguuu

SEQ ID NO: 561734 - RNA, 19 nt, Artificial Sequence
  Description of Artificial Sequence: Synthetic oligonucleotide
  Antisense strand to SEQ ID NO: 561733
aaacagaagcagauacgug

SEQ ID NO: 561735 - RNA, 19 nt, Artificial Sequence
  Description of Artificial Sequence: Synthetic oligonucleotide
  Sense strand starting at position 3227 of SEQ ID NO: 318425
gccaucuaucccuggagga

SEQ ID NO: 561736 - RNA, 19 nt, Artificial Sequence
  Description of Artificial Sequence: Synthetic oligonucleotide
  Antisense strand to SEQ ID NO: 561735
uccuccagggauagauggc

SEQ ID NO: 561737 - RNA, 19 nt, Artificial Sequence
  Description of Artificial Sequence: Synthetic oligonucleotide
  Sense strand starting at position 3228 of SEQ ID NO: 318425
ccaucuaucccuggaggaa

SEQ ID NO: 561738 - RNA, 19 nt, Artificial Sequence
  Description of Artificial Sequence: Synthetic oligonucleotide
  Antisense strand to SEQ ID NO: 561737
uuccuccagggauagaugg

SEQ ID NO: 561739 - RNA, 19 nt, Artificial Sequence
  Description of Artificial Sequence: Synthetic oligonucleotide
  Sense strand starting at position 3334 of SEQ ID NO: 318425
agucucuaucagugaacca

SEQ ID NO: 561740 - RNA, 19 nt, Artificial Sequence
  Description of Artificial Sequence: Synthetic oligonucleotide
  Antisense strand to SEQ ID NO: 561739
ugguucacugauagagacu

SEQ ID NO: 561741 - RNA, 19 nt, Artificial Sequence
  Description of Artificial Sequence: Synthetic oligonucleotide
  Sense strand starting at position 3355 of SEQ ID NO: 318425
cuaagugccuguguguuaa

SEQ ID NO: 561742 - RNA, 19 nt, Artificial Sequence
  Description of Artificial Sequence: Synthetic oligonucleotide
  Antisense strand to SEQ ID NO: 561741
uuaacacacaggcacuuag

SEQ ID NO: 561743 - RNA, 19 nt, Artificial Sequence
  Description of Artificial Sequence: Synthetic oligonucleotide
  Sense strand starting at position 3361 of SEQ ID NO: 318425
gccuguguguuaagggaga

SEQ ID NO: 561744 - RNA, 19 nt, Artificial Sequence
  Description of Artificial Sequence: Synthetic oligonucleotide
  Antisense strand to SEQ ID NO: 561743
ucucccuuaacacacaggc

SEQ ID NO: 561745 - RNA, 19 nt, Artificial Sequence
  Description of Artificial Sequence: Synthetic oligonucleotide
  Sense strand starting at position 3378 of SEQ ID NO: 318425
gaggauaugugcuccuuau

SEQ ID NO: 561746 - RNA, 19 nt, Artificial Sequence
  Description of Artificial Sequence: Synthetic oligonucleotide
  Antisense strand to SEQ ID NO: 561745
auaaggagcacauauccuc

SEQ ID NO: 561747 - RNA, 19 nt, Artificial Sequence
  Description of Artificial Sequence: Synthetic oligonucleotide
  Sense strand starting at position 3382 of SEQ ID NO: 318425
auaugugcuccuuaugcaa

SEQ ID NO: 561748 - RNA, 19 nt, Artificial Sequence
  Description of Artificial Sequence: Synthetic oligonucleotide
  Antisense strand to SEQ ID NO: 561747
uugcauaaggagcacauau

SEQ ID NO: 561749 - RNA, 19 nt, Artificial Sequence
  Description of Artificial Sequence: Synthetic oligonucleotide
  Sense strand starting at position 3480 of SEQ ID NO: 318425
gggugccauccuggugaaa

SEQ ID NO: 561750 - RNA, 19 nt, Artificial Sequence
  Description of Artificial Sequence: Synthetic oligonucleotide
  Antisense strand to SEQ ID NO: 561749
uuucaccaggauggcaccc

SEQ ID NO: 561751 - RNA, 19 nt, Artificial Sequence
  Description of Artificial Sequence: Synthetic oligonucleotide
  Sense strand starting at position 3633 of SEQ ID NO: 318425
gugucuccugaugagaaug

SEQ ID NO: 561752 - RNA, 19 nt, Artificial Sequence
  Description of Artificial Sequence: Synthetic oligonucleotide
  Antisense strand to SEQ ID NO: 561751
cauucucaucaggagacac

SEQ ID NO: 561753 - RNA, 19 nt, Artificial Sequence
  Description of Artificial Sequence: Synthetic oligonucleotide
  Sense strand starting at position 3690 of SEQ ID NO: 318425
uggaacaccuucuaaguua

SEQ ID NO: 561754 - RNA, 19 nt, Artificial Sequence
  Description of Artificial Sequence: Synthetic oligonucleotide
  Antisense strand to SEQ ID NO: 561753
uaacuuagaagguguucca

SEQ ID NO: 561755 - RNA, 19 nt, Artificial Sequence
  Description of Artificial Sequence: Synthetic oligonucleotide
  Sense strand starting at position 3701 of SEQ ID NO: 318425
cuaaguuagcgggaggaca

SEQ ID NO: 561756 - RNA, 19 nt, Artificial Sequence
  Description of Artificial Sequence: Synthetic oligonucleotide
  Antisense strand to SEQ ID NO: 561755
uguccucccgcuaacuuag

SEQ ID NO: 561757 - RNA, 19 nt, Artificial Sequence
  Description of Artificial Sequence: Synthetic oligonucleotide
  Sense strand starting at position 3713 of SEQ ID NO: 318425
gaggacaguucugucacuu

SEQ ID NO: 561758 - RNA, 19 nt, Artificial Sequence
  Description of Artificial Sequence: Synthetic oligonucleotide
  Antisense strand to SEQ ID NO: 561757
aagugacagaacuguccuc

SEQ ID NO: 561759 - RNA, 19 nt, Artificial Sequence
  Description of Artificial Sequence: Synthetic oligonucleotide
  Sense strand starting at position 3748 of SEQ ID NO: 318425
gcucucucacucuagguau

SEQ ID NO: 561760 - RNA, 19 nt, Artificial Sequence
  Description of Artificial Sequence: Synthetic oligonucleotide
  Antisense strand to SEQ ID NO: 561759
auaccuagagugagagagc

SEQ ID NO: 561761 - RNA, 19 nt, Artificial Sequence
  Description of Artificial Sequence: Synthetic oligonucleotide
  Sense strand starting at position 3926 of SEQ ID NO: 318425
gggccuuaacccugugauc

SEQ ID NO: 561762 - RNA, 19 nt, Artificial Sequence
  Description of Artificial Sequence: Synthetic oligonucleotide
  Antisense strand to SEQ ID NO: 561761
gaucacaggguuaaggccc

SEQ ID NO: 561763 - RNA, 19 nt, Artificial Sequence
  Description of Artificial Sequence: Synthetic oligonucleotide
  Sense strand starting at position 3928 of SEQ ID NO: 318425
gccuuaacccugugauccu

SEQ ID NO: 561764 - RNA, 19 nt, Artificial Sequence
  Description of Artificial Sequence: Synthetic oligonucleotide
  Antisense strand to SEQ ID NO: 561763
aggaucacaggguuaaggc

SEQ ID NO: 561765 - RNA, 19 nt, Artificial Sequence
  Description of Artificial Sequence: Synthetic oligonucleotide
  Sense strand starting at position 3966 of SEQ ID NO: 318425
ggcugugucucacugacuu

SEQ ID NO: 561766 - RNA, 19 nt, Artificial Sequence
  Description of Artificial Sequence: Synthetic oligonucleotide
  Antisense strand to SEQ ID NO: 561765
aagucagugagacacagcc

SEQ ID NO: 561767 - RNA, 19 nt, Artificial Sequence
  Description of Artificial Sequence: Synthetic oligonucleotide
  Sense strand starting at position 174 of SEQ ID NO: 318426
gcccacuacuggucucuau

SEQ ID NO: 561768 - RNA, 19 nt, Artificial Sequence
  Description of Artificial Sequence: Synthetic oligonucleotide
  Antisense strand to SEQ ID NO: 561767
auagagaccaguagugggc

SEQ ID NO: 561769 - RNA, 19 nt, Artificial Sequence
  Description of Artificial Sequence: Synthetic oligonucleotide
  Sense strand starting at position 178 of SEQ ID NO: 318426
acuacuggucucuaugcua

SEQ ID NO: 561770 - RNA, 19 nt, Artificial Sequence
  Description of Artificial Sequence: Synthetic oligonucleotide
  Antisense strand to SEQ ID NO: 561769
uagcauagagaccaguagu

SEQ ID NO: 561771 - RNA, 19 nt, Artificial Sequence
  Description of Artificial Sequence: Synthetic oligonucleotide
  Sense strand starting at position 183 of SEQ ID NO: 318426
uggucucuaugcuaguuau

SEQ ID NO: 561772 - RNA, 19 nt, Artificial Sequence
  Description of Artificial Sequence: Synthetic oligonucleotide
  Antisense strand to SEQ ID NO: 561771
auaacuagcauagagacca

SEQ ID NO: 561773 - RNA, 19 nt, Artificial Sequence
  Description of Artificial Sequence: Synthetic oligonucleotide
  Sense strand starting at position 186 of SEQ ID NO: 318426
ucucuaugcuaguuaucua

SEQ ID NO: 561774 - RNA, 19 nt, Artificial Sequence
  Description of Artificial Sequence: Synthetic oligonucleotide
  Antisense strand to SEQ ID NO: 561773
uagauaacuagcauagaga

SEQ ID NO: 561775 - RNA, 19 nt, Artificial Sequence
  Description of Artificial Sequence: Synthetic oligonucleotide
  Sense strand starting at position 190 of SEQ ID NO: 318426
uaugcuaguuaucuaagga

SEQ ID NO: 561776 - RNA, 19 nt, Artificial Sequence
  Description of Artificial Sequence: Synthetic oligonucleotide
  Antisense strand to SEQ ID NO: 561775
uccuuagauaacuagcaua

SEQ ID NO: 561777 - RNA, 19 nt, Artificial Sequence
  Description of Artificial Sequence: Synthetic oligonucleotide
  Sense strand starting at position 685 of SEQ ID NO: 318426
ccagguuccuccucugaaa

SEQ ID NO: 561778 - RNA, 19 nt, Artificial Sequence
  Description of Artificial Sequence: Synthetic oligonucleotide
  Antisense strand to SEQ ID NO: 561777
uuucagaggaggaaccugg

SEQ ID NO: 561779 - RNA, 19 nt, Artificial Sequence
  Description of Artificial Sequence: Synthetic oligonucleotide
  Sense strand starting at position 688 of SEQ ID NO: 318426
gguuccuccucugaaaccu

SEQ ID NO: 561780 - RNA, 19 nt, Artificial Sequence
  Description of Artificial Sequence: Synthetic oligonucleotide
  Antisense strand to SEQ ID NO: 561779
agguuucagaggaggaacc

SEQ ID NO: 561781 - RNA, 19 nt, Artificial Sequence
  Description of Artificial Sequence: Synthetic oligonucleotide
  Sense strand starting at position 736 of SEQ ID NO: 318426
cgcagcuggcauggaaaua

SEQ ID NO: 561782 - RNA, 19 nt, Artificial Sequence
  Description of Artificial Sequence: Synthetic oligonucleotide
  Antisense strand to SEQ ID NO: 561781
uauuuccaugccagcugcg

SEQ ID NO: 561783 - RNA, 19 nt, Artificial Sequence
  Description of Artificial Sequence: Synthetic oligonucleotide
  Sense strand starting at position 737 of SEQ ID NO: 318426
gcagcuggcauggaaauaa

SEQ ID NO: 561784 - RNA, 19 nt, Artificial Sequence
  Description of Artificial Sequence: Synthetic oligonucleotide
  Antisense strand to SEQ ID NO: 561783
uuauuuccaugccagcugc

SEQ ID NO: 561785 - RNA, 19 nt, Artificial Sequence
  Description of Artificial Sequence: Synthetic oligonucleotide
  Sense strand starting at position 919 of SEQ ID NO: 318426
gcuggaguuucuucagcag

SEQ ID NO: 561786 - RNA, 19 nt, Artificial Sequence
  Description of Artificial Sequence: Synthetic oligonucleotide
  Antisense strand to SEQ ID NO: 561785
cugcugaagaaacuccagc

SEQ ID NO: 561787 - RNA, 19 nt, Artificial Sequence
  Description of Artificial Sequence: Synthetic oligonucleotide
  Sense strand starting at position 922 of SEQ ID NO: 318426
ggaguuucuucagcaguag

SEQ ID NO: 561788 - RNA, 19 nt, Artificial Sequence
  Description of Artificial Sequence: Synthetic oligonucleotide
  Antisense strand to SEQ ID NO: 561787
cuacugcugaagaaacucc

SEQ ID NO: 561789 - RNA, 19 nt, Artificial Sequence
  Description of Artificial Sequence: Synthetic oligonucleotide
  Sense strand starting at position 1121 of SEQ ID NO: 318426
uggacacaguucucagaca

SEQ ID NO: 561790 - RNA, 19 nt, Artificial Sequence
  Description of Artificial Sequence: Synthetic oligonucleotide
  Antisense strand to SEQ ID NO: 561789
ugucugagaacugugucca

SEQ ID NO: 561791 - RNA, 19 nt, Artificial Sequence
  Description of Artificial Sequence: Synthetic oligonucleotide
  Sense strand starting at position 1122 of SEQ ID NO: 318426
ggacacaguucucagacau

SEQ ID NO: 561792 - RNA, 19 nt, Artificial Sequence
  Description of Artificial Sequence: Synthetic oligonucleotide
  Antisense strand to SEQ ID NO: 561791
augucugagaacugugucc

SEQ ID NO: 561793 - RNA, 19 nt, Artificial Sequence
  Description of Artificial Sequence: Synthetic oligonucleotide
  Sense strand starting at position 1223 of SEQ ID NO: 318426
auauaaaggucuggauuuc

SEQ ID NO: 561794 - RNA, 19 nt, Artificial Sequence
  Description of Artificial Sequence: Synthetic oligonucleotide
  Antisense strand to SEQ ID NO: 561793
gaaauccagaccuuuauau

SEQ ID NO: 561795 - RNA, 19 nt, Artificial Sequence
  Description of Artificial Sequence: Synthetic oligonucleotide
  Sense strand starting at position 1257 of SEQ ID NO: 318426
auuggacagucaggucaua

SEQ ID NO: 561796 - RNA, 19 nt, Artificial Sequence
  Description of Artificial Sequence: Synthetic oligonucleotide
  Antisense strand to SEQ ID NO: 561795
uaugaccugacuguccaau

SEQ ID NO: 561797 - RNA, 19 nt, Artificial Sequence
  Description of Artificial Sequence: Synthetic oligonucleotide
  Sense strand starting at position 1352 of SEQ ID NO: 318426
cccugauccuuggaagcau

SEQ ID NO: 561798 - RNA, 19 nt, Artificial Sequence
  Description of Artificial Sequence: Synthetic oligonucleotide
  Antisense strand to SEQ ID NO: 561797
augcuuccaaggaucaggg

SEQ ID NO: 561799 - RNA, 19 nt, Artificial Sequence
  Description of Artificial Sequence: Synthetic oligonucleotide
  Sense strand starting at position 1376 of SEQ ID NO: 318426
uuuccaaugccuggagcua

SEQ ID NO: 561800 - RNA, 19 nt, Artificial Sequence
  Description of Artificial Sequence: Synthetic oligonucleotide
  Antisense strand to SEQ ID NO: 561799
uagcuccaggcauuggaaa

SEQ ID NO: 561801 - RNA, 19 nt, Artificial Sequence
  Description of Artificial Sequence: Synthetic oligonucleotide
  Sense strand starting at position 1425 of SEQ ID NO: 318426
uggacccaucuuugcuaaa

SEQ ID NO: 561802 - RNA, 19 nt, Artificial Sequence
  Description of Artificial Sequence: Synthetic oligonucleotide
  Antisense strand to SEQ ID NO: 561801
uuuagcaaagaugggucca

SEQ ID NO: 561803 - RNA, 19 nt, Artificial Sequence
  Description of Artificial Sequence: Synthetic oligonucleotide
  Sense strand starting at position 1426 of SEQ ID NO: 318426
ggacccaucuuugcuaaau

SEQ ID NO: 561804 - RNA, 19 nt, Artificial Sequence
  Description of Artificial Sequence: Synthetic oligonucleotide
  Antisense strand to SEQ ID NO: 561803
auuuagcaaagaugggucc

SEQ ID NO: 561805 - RNA, 19 nt, Artificial Sequence
  Description of Artificial Sequence: Synthetic oligonucleotide
  Sense strand starting at position 1549 of SEQ ID NO: 318426
cuuggucucaccggagaaa

SEQ ID NO: 561806 - RNA, 19 nt, Artificial Sequence
  Description of Artificial Sequence: Synthetic oligonucleotide
  Antisense strand to SEQ ID NO: 561805
uuucuccggugagaccaag

SEQ ID NO: 561807 - RNA, 19 nt, Artificial Sequence
  Description of Artificial Sequence: Synthetic oligonucleotide
  Sense strand starting at position 1644 of SEQ ID NO: 318426
guggcugauuuagcuggaa

SEQ ID NO: 561808 - RNA, 19 nt, Artificial Sequence
  Description of Artificial Sequence: Synthetic oligonucleotide
  Antisense strand to SEQ ID NO: 561807
uuccagcuaaaucagccac

SEQ ID NO: 561809 - RNA, 19 nt, Artificial Sequence
  Description of Artificial Sequence: Synthetic oligonucleotide
  Sense strand starting at position 1696 of SEQ ID NO: 318426
gaauguccucacuggagga

SEQ ID NO: 561810 - RNA, 19 nt, Artificial Sequence
  Description of Artificial Sequence: Synthetic oligonucleotide
  Antisense strand to SEQ ID NO: 561809
uccuccagugaggacauuc

SEQ ID NO: 561811 - RNA, 19 nt, Artificial Sequence
  Description of Artificial Sequence: Synthetic oligonucleotide
  Sense strand starting at position 1736 of SEQ ID NO: 318426
caguucuucuccuggguua

SEQ ID NO: 561812 - RNA, 19 nt, Artificial Sequence
  Description of Artificial Sequence: Synthetic oligonucleotide
  Antisense strand to SEQ ID NO: 561811
uaacccaggagaagaacug

SEQ ID NO: 561813 - RNA, 19 nt, Artificial Sequence
  Description of Artificial Sequence: Synthetic oligonucleotide
  Sense strand starting at position 1738 of SEQ ID NO: 318426
guucuucuccuggguuaca

SEQ ID NO: 561814 - RNA, 19 nt, Artificial Sequence
  Description of Artificial Sequence: Synthetic oligonucleotide
  Antisense strand to SEQ ID NO: 561813
uguaacccaggagaagaac

SEQ ID NO: 561815 - RNA, 19 nt, Artificial Sequence
  Description of Artificial Sequence: Synthetic oligonucleotide
  Sense strand starting at position 1739 of SEQ ID NO: 318426
uucuucuccuggguuacaa

SEQ ID NO: 561816 - RNA, 19 nt, Artificial Sequence
  Description of Artificial Sequence: Synthetic oligonucleotide
  Antisense strand to SEQ ID NO: 561815
uuguaacccaggagaagaa

SEQ ID NO: 561817 - RNA, 19 nt, Artificial Sequence
  Description of Artificial Sequence: Synthetic oligonucleotide
  Sense strand starting at position 1795 of SEQ ID NO: 318426
cagagaagccugcagugua

SEQ ID NO: 561818 - RNA, 19 nt, Artificial Sequence
  Description of Artificial Sequence: Synthetic oligonucleotide
  Antisense strand to SEQ ID NO: 561817
uacacugcaggcuucucug

SEQ ID NO: 561819 - RNA, 19 nt, Artificial Sequence
  Description of Artificial Sequence: Synthetic oligonucleotide
  Sense strand starting at position 1866 of SEQ ID NO: 318426
cccugagccucccuuuaga

SEQ ID NO: 561820 - RNA, 19 nt, Artificial Sequence
  Description of Artificial Sequence: Synthetic oligonucleotide
  Antisense strand to SEQ ID NO: 561819
ucuaaagggaggcucaggg

SEQ ID NO: 561821 - RNA, 19 nt, Artificial Sequence
  Description of Artificial Sequence: Synthetic oligonucleotide
  Sense strand starting at position 2002 of SEQ ID NO: 318426
aaaggcacccgugaguaau

SEQ ID NO: 561822 - RNA, 19 nt, Artificial Sequence
  Description of Artificial Sequence: Synthetic oligonucleotide
  Antisense strand to SEQ ID NO: 561821
auuacucacgggugccuuu

SEQ ID NO: 561823 - RNA, 19 nt, Artificial Sequence
  Description of Artificial Sequence: Synthetic oligonucleotide
  Sense strand starting at position 2210 of SEQ ID NO: 318426
gcuggcaucugcugaguca

SEQ ID NO: 561824 - RNA, 19 nt, Artificial Sequence
  Description of Artificial Sequence: Synthetic oligonucleotide
  Antisense strand to SEQ ID NO: 561823
ugacucagcagaugccagc

SEQ ID NO: 561825 - RNA, 19 nt, Artificial Sequence
  Description of Artificial Sequence: Synthetic oligonucleotide
  Sense strand starting at position 2309 of SEQ ID NO: 318426
gucauuuccucugagucag

SEQ ID NO: 561826 - RNA, 19 nt, Artificial Sequence
  Description of Artificial Sequence: Synthetic oligonucleotide
  Antisense strand to SEQ ID NO: 561825
cugacucagaggaaaugac

SEQ ID NO: 561827 - RNA, 19 nt, Artificial Sequence
  Description of Artificial Sequence: Synthetic oligonucleotide
  Sense strand starting at position 2317 of SEQ ID NO: 318426
cucugagucagaggccauu

SEQ ID NO: 561828 - RNA, 19 nt, Artificial Sequence
  Description of Artificial Sequence: Synthetic oligonucleotide
  Antisense strand to SEQ ID NO: 561827
aauggccucugacucagag

SEQ ID NO: 561829 - RNA, 19 nt, Artificial Sequence
  Description of Artificial Sequence: Synthetic oligonucleotide
  Sense strand starting at position 2328 of SEQ ID NO: 318426
aggccauucuccucccaga

SEQ ID NO: 561830 - RNA, 19 nt, Artificial Sequence
  Description of Artificial Sequence: Synthetic oligonucleotide
  Antisense strand to SEQ ID NO: 561829
ucugggaggagaauggccu

SEQ ID NO: 561831 - RNA, 19 nt, Artificial Sequence
  Description of Artificial Sequence: Synthetic oligonucleotide
  Sense strand starting at position 2407 of SEQ ID NO: 318426
gcaugcuacucaguacagu

SEQ ID NO: 561832 - RNA, 19 nt, Artificial Sequence
  Description of Artificial Sequence: Synthetic oligonucleotide
  Antisense strand to SEQ ID NO: 561831
acuguacugaguagcaugc

SEQ ID NO: 561833 - RNA, 19 nt, Artificial Sequence
  Description of Artificial Sequence: Synthetic oligonucleotide
  Sense strand starting at position 2428 of SEQ ID NO: 318426
gggcauugugcucagacaa

SEQ ID NO: 561834 - RNA, 19 nt, Artificial Sequence
  Description of Artificial Sequence: Synthetic oligonucleotide
  Antisense strand to SEQ ID NO: 561833
uugucugagcacaaugccc

SEQ ID NO: 561835 - RNA, 19 nt, Artificial Sequence
  Description of Artificial Sequence: Synthetic oligonucleotide
  Sense strand starting at position 2509 of SEQ ID NO: 318426
uucccugggucagcaauau

SEQ ID NO: 561836 - RNA, 19 nt, Artificial Sequence
  Description of Artificial Sequence: Synthetic oligonucleotide
  Antisense strand to SEQ ID NO: 561835
auauugcugacccagggaa

SEQ ID NO: 561837 - RNA, 19 nt, Artificial Sequence
  Description of Artificial Sequence: Synthetic oligonucleotide
  Sense strand starting at position 2569 of SEQ ID NO: 318426
ggagaaugguggcuaggaa

SEQ ID NO: 561838 - RNA, 19 nt, Artificial Sequence
  Description of Artificial Sequence: Synthetic oligonucleotide
  Antisense strand to SEQ ID NO: 561837
uuccuagccaccauucucc

SEQ ID NO: 561839 - RNA, 19 nt, Artificial Sequence
  Description of Artificial Sequence: Synthetic oligonucleotide
  Sense strand starting at position 2670 of SEQ ID NO: 318426
cuccucuacccugguaaga

SEQ ID NO: 561840 - RNA, 19 nt, Artificial Sequence
  Description of Artificial Sequence: Synthetic oligonucleotide
  Antisense strand to SEQ ID NO: 561839
ucuuaccaggguagaggag

SEQ ID NO: 561841 - RNA, 19 nt, Artificial Sequence
  Description of Artificial Sequence: Synthetic oligonucleotide
  Sense strand starting at position 2672 of SEQ ID NO: 318426
ccucuacccugguaagaaa

SEQ ID NO: 561842 - RNA, 19 nt, Artificial Sequence
  Description of Artificial Sequence: Synthetic oligonucleotide
  Antisense strand to SEQ ID NO: 561841
uuucuuaccaggguagagg

SEQ ID NO: 561843 - RNA, 19 nt, Artificial Sequence
  Description of Artificial Sequence: Synthetic oligonucleotide
  Sense strand starting at position 54 of SEQ ID NO: 318427
gcaguaugaaugggcaaca

SEQ ID NO: 561844 - RNA, 19 nt, Artificial Sequence
  Description of Artificial Sequence: Synthetic oligonucleotide
  Antisense strand to SEQ ID NO: 561843
uguugcccauucauacugc

SEQ ID NO: 561845 - RNA, 19 nt, Artificial Sequence
  Description of Artificial Sequence: Synthetic oligonucleotide
  Sense strand starting at position 73 of SEQ ID NO: 318427
guauuaaugcugcagagaa

SEQ ID NO: 561846 - RNA, 19 nt, Artificial Sequence
  Description of Artificial Sequence: Synthetic oligonucleotide
  Antisense strand to SEQ ID NO: 561845
uucucugcagcauuaauac

SEQ ID NO: 561847 - RNA, 19 nt, Artificial Sequence
  Description of Artificial Sequence: Synthetic oligonucleotide
  Sense strand starting at position 179 of SEQ ID NO: 318427
gaaagauuccaguguaaac

SEQ ID NO: 561848 - RNA, 19 nt, Artificial Sequence
  Description of Artificial Sequence: Synthetic oligonucleotide
  Antisense strand to SEQ ID NO: 561847
guuuacacuggaaucuuuc

SEQ ID NO: 561849 - RNA, 19 nt, Artificial Sequence
  Description of Artificial Sequence: Synthetic oligonucleotide
  Sense strand starting at position 263 of SEQ ID NO: 318427
aggaaagaucuauggcacu

SEQ ID NO: 561850 - RNA, 19 nt, Artificial Sequence
  Description of Artificial Sequence: Synthetic oligonucleotide
  Antisense strand to SEQ ID NO: 561849
agugccauagaucuuuccu

SEQ ID NO: 561851 - RNA, 19 nt, Artificial Sequence
  Description of Artificial Sequence: Synthetic oligonucleotide
  Sense strand starting at position 329 of SEQ ID NO: 318427
cuauacaucgaagguaaau

SEQ ID NO: 561852 - RNA, 19 nt, Artificial Sequence
  Description of Artificial Sequence: Synthetic oligonucleotide
  Antisense strand to SEQ ID NO: 561851
auuuaccuucgauguauag

SEQ ID NO: 561853 - RNA, 19 nt, Artificial Sequence
  Description of Artificial Sequence: Synthetic oligonucleotide
  Sense strand starting at position 548 of SEQ ID NO: 318427
caaagucauuaaguggaau

SEQ ID NO: 561854 - RNA, 19 nt, Artificial Sequence
  Description of Artificial Sequence: Synthetic oligonucleotide
  Antisense strand to SEQ ID NO: 561853
auuccacuuaaugacuuug

SEQ ID NO: 561855 - RNA, 19 nt, Artificial Sequence
  Description of Artificial Sequence: Synthetic oligonucleotide
  Sense strand starting at position 1003 of SEQ ID NO: 318427
gcgcuaguuagagccuaau

SEQ ID NO: 561856 - RNA, 19 nt, Artificial Sequence
  Description of Artificial Sequence: Synthetic oligonucleotide
  Antisense strand to SEQ ID NO: 561855
auuaggcucuaacuagcgc

SEQ ID NO: 561857 - RNA, 19 nt, Artificial Sequence
  Description of Artificial Sequence: Synthetic oligonucleotide
  Sense strand starting at position 1085 of SEQ ID NO: 318427
acugaaugccaagaugugu

SEQ ID NO: 561858 - RNA, 19 nt, Artificial Sequence
  Description of Artificial Sequence: Synthetic oligonucleotide
  Antisense strand to SEQ ID NO: 561857
acacaucuuggcauucagu

SEQ ID NO: 561859 - RNA, 19 nt, Artificial Sequence
  Description of Artificial Sequence: Synthetic oligonucleotide
  Sense strand starting at position 1194 of SEQ ID NO: 318427
acgugcuaucugcaaauuu

SEQ ID NO: 561860 - RNA, 19 nt, Artificial Sequence
  Description of Artificial Sequence: Synthetic oligonucleotide
  Antisense strand to SEQ ID NO: 561859
aaauuugcagauagcacgu

SEQ ID NO: 561861 - RNA, 19 nt, Artificial Sequence
  Description of Artificial Sequence: Synthetic oligonucleotide
  Sense strand starting at position 1204 of SEQ ID NO: 318427
ugcaaauuugccugaagca

SEQ ID NO: 561862 - RNA, 19 nt, Artificial Sequence
  Description of Artificial Sequence: Synthetic oligonucleotide
  Antisense strand to SEQ ID NO: 561861
ugcuucaggcaaauuugca

SEQ ID NO: 561863 - RNA, 19 nt, Artificial Sequence
  Description of Artificial Sequence: Synthetic oligonucleotide
  Sense strand starting at position 2429 of SEQ ID NO: 318427
gucaaagauuuccagauaa

SEQ ID NO: 561864 - RNA, 19 nt, Artificial Sequence
  Description of Artificial Sequence: Synthetic oligonucleotide
  Antisense strand to SEQ ID NO: 561863
uuaucuggaaaucuuugac

SEQ ID NO: 561865 - RNA, 19 nt, Artificial Sequence
  Description of Artificial Sequence: Synthetic oligonucleotide
  Sense strand starting at position 2439 of SEQ ID NO: 318427
uccagauaacagugauuau

SEQ ID NO: 561866 - RNA, 19 nt, Artificial Sequence
  Description of Artificial Sequence: Synthetic oligonucleotide
  Antisense strand to SEQ ID NO: 561865
auaaucacuguuaucugga

SEQ ID NO: 561867 - RNA, 19 nt, Artificial Sequence
  Description of Artificial Sequence: Synthetic oligonucleotide
  Sense strand starting at position 2650 of SEQ ID NO: 318427
aaauuaauggagugcgaua

SEQ ID NO: 561868 - RNA, 19 nt, Artificial Sequence
  Description of Artificial Sequence: Synthetic oligonucleotide
  Antisense strand to SEQ ID NO: 561867
uaucgcacuccauuaauuu

SEQ ID NO: 561869 - RNA, 19 nt, Artificial Sequence
  Description of Artificial Sequence: Synthetic oligonucleotide
  Sense strand starting at position 2652 of SEQ ID NO: 318427
auuaauggagugcgauaga

SEQ ID NO: 561870 - RNA, 19 nt, Artificial Sequence
  Description of Artificial Sequence: Synthetic oligonucleotide
  Antisense strand to SEQ ID NO: 561869
ucuaucgcacuccauuaau

SEQ ID NO: 561871 - RNA, 19 nt, Artificial Sequence
  Description of Artificial Sequence: Synthetic oligonucleotide
  Sense strand starting at position 2701 of SEQ ID NO: 318427
ugauuugagucugagacua

SEQ ID NO: 561872 - RNA, 19 nt, Artificial Sequence
  Description of Artificial Sequence: Synthetic oligonucleotide
  Antisense strand to SEQ ID NO: 561871
uagucucagacucaaauca

SEQ ID NO: 561873 - RNA, 19 nt, Artificial Sequence
  Description of Artificial Sequence: Synthetic oligonucleotide
  Sense strand starting at position 2703 of SEQ ID NO: 318427
auuugagucugagacuacu

SEQ ID NO: 561874 - RNA, 19 nt, Artificial Sequence
  Description of Artificial Sequence: Synthetic oligonucleotide
  Antisense strand to SEQ ID NO: 561873
aguagucucagacucaaau

SEQ ID NO: 561875 - RNA, 19 nt, Artificial Sequence
  Description of Artificial Sequence: Synthetic oligonucleotide
  Sense strand starting at position 2709 of SEQ ID NO: 318427
gucugagacuacucuaaug

SEQ ID NO: 561876 - RNA, 19 nt, Artificial Sequence
  Description of Artificial Sequence: Synthetic oligonucleotide
  Antisense strand to SEQ ID NO: 561875
cauuagaguagucucagac

SEQ ID NO: 561877 - RNA, 19 nt, Artificial Sequence
  Description of Artificial Sequence: Synthetic oligonucleotide
  Sense strand starting at position 2759 of SEQ ID NO: 318427
ucacuuagucuccauaagu

SEQ ID NO: 561878 - RNA, 19 nt, Artificial Sequence
  Description of Artificial Sequence: Synthetic oligonucleotide
  Antisense strand to SEQ ID NO: 561877
acuuauggagacuaaguga

SEQ ID NO: 561879 - RNA, 19 nt, Artificial Sequence
  Description of Artificial Sequence: Synthetic oligonucleotide
  Sense strand starting at position 3239 of SEQ ID NO: 318427
ggaacucacuuagagauuu

SEQ ID NO: 561880 - RNA, 19 nt, Artificial Sequence
  Description of Artificial Sequence: Synthetic oligonucleotide
  Antisense strand to SEQ ID NO: 561879
aaaucucuaagugaguucc

SEQ ID NO: 561881 - RNA, 19 nt, Artificial Sequence
  Description of Artificial Sequence: Synthetic oligonucleotide
  Sense strand starting at position 3317 of SEQ ID NO: 318427
aguuaauacuauguagcaa

SEQ ID NO: 561882 - RNA, 19 nt, Artificial Sequence
  Description of Artificial Sequence: Synthetic oligonucleotide
  Antisense strand to SEQ ID NO: 561881
uugcuacauaguauuaacu

SEQ ID NO: 561883 - RNA, 19 nt, Artificial Sequence
  Description of Artificial Sequence: Synthetic oligonucleotide
  Sense strand starting at position 3348 of SEQ ID NO: 318427
agaucucacugugcaacua

SEQ ID NO: 561884 - RNA, 19 nt, Artificial Sequence
  Description of Artificial Sequence: Synthetic oligonucleotide
  Antisense strand to SEQ ID NO: 561883
uaguugcacagugagaucu

SEQ ID NO: 561885 - RNA, 19 nt, Artificial Sequence
  Description of Artificial Sequence: Synthetic oligonucleotide
  Sense strand starting at position 3407 of SEQ ID NO: 318427
gaauguguguagguggaga

SEQ ID NO: 561886 - RNA, 19 nt, Artificial Sequence
  Description of Artificial Sequence: Synthetic oligonucleotide
  Antisense strand to SEQ ID NO: 561885
ucuccaccuacacacauuc

SEQ ID NO: 561887 - RNA, 19 nt, Artificial Sequence
  Description of Artificial Sequence: Synthetic oligonucleotide
  Sense strand starting at position 3418 of SEQ ID NO: 318427
gguggagauccagguuacu

SEQ ID NO: 561888 - RNA, 19 nt, Artificial Sequence
  Description of Artificial Sequence: Synthetic oligonucleotide
  Antisense strand to SEQ ID NO: 561887
aguaaccuggaucuccacc

SEQ ID NO: 561889 - RNA, 19 nt, Artificial Sequence
  Description of Artificial Sequence: Synthetic oligonucleotide
  Sense strand starting at position 3504 of SEQ ID NO: 318427
ccuuaauagcuauaaggua

SEQ ID NO: 561890 - RNA, 19 nt, Artificial Sequence
  Description of Artificial Sequence: Synthetic oligonucleotide
  Antisense strand to SEQ ID NO: 561889
uaccuuauagcuauuaagg

SEQ ID NO: 561891 - RNA, 19 nt, Artificial Sequence
  Description of Artificial Sequence: Synthetic oligonucleotide
  Sense strand starting at position 3551 of SEQ ID NO: 318427
auuuauuaguggcugcaau

SEQ ID NO: 561892 - RNA, 19 nt, Artificial Sequence
  Description of Artificial Sequence: Synthetic oligonucleotide
  Antisense strand to SEQ ID NO: 561891
auugcagccacuaauaaau

SEQ ID NO: 561893 - RNA, 19 nt, Artificial Sequence
  Description of Artificial Sequence: Synthetic oligonucleotide
  Sense strand starting at position 3576 of SEQ ID NO: 318427
agcauugguacuggaaaug

SEQ ID NO: 561894 - RNA, 19 nt, Artificial Sequence
  Description of Artificial Sequence: Synthetic oligonucleotide
  Antisense strand to SEQ ID NO: 561893
cauuuccaguaccaaugcu

SEQ ID NO: 561895 - RNA, 19 nt, Artificial Sequence
  Description of Artificial Sequence: Synthetic oligonucleotide
  Sense strand starting at position 3586 of SEQ ID NO: 318427
cuggaaaugcaguaacgaa

SEQ ID NO: 561896 - RNA, 19 nt, Artificial Sequence
  Description of Artificial Sequence: Synthetic oligonucleotide
  Antisense strand to SEQ ID NO: 561895
uucguuacugcauuuccag

SEQ ID NO: 561897 - RNA, 19 nt, Artificial Sequence
  Description of Artificial Sequence: Synthetic oligonucleotide
  Sense strand starting at position 3616 of SEQ ID NO: 318427
aggucuugauaccuaggga

SEQ ID NO: 561898 - RNA, 19 nt, Artificial Sequence
  Description of Artificial Sequence: Synthetic oligonucleotide
  Antisense strand to SEQ ID NO: 561897
ucccuagguaucaagaccu

SEQ ID NO: 561899 - RNA, 19 nt, Artificial Sequence
  Description of Artificial Sequence: Synthetic oligonucleotide
  Sense strand starting at position 3631 of SEQ ID NO: 318427
gggagcguucuuuauaaua

SEQ ID NO: 561900 - RNA, 19 nt, Artificial Sequence
  Description of Artificial Sequence: Synthetic oligonucleotide
  Antisense strand to SEQ ID NO: 561899
uauuauaaagaacgcuccc

SEQ ID NO: 561901 - RNA, 19 nt, Artificial Sequence
  Description of Artificial Sequence: Synthetic oligonucleotide
  Sense strand starting at position 3710 of SEQ ID NO: 318427
gucaacaaagagugaugua

SEQ ID NO: 561902 - RNA, 19 nt, Artificial Sequence
  Description of Artificial Sequence: Synthetic oligonucleotide
  Antisense strand to SEQ ID NO: 561901
uacaucacucuuuguugac

SEQ ID NO: 561903 - RNA, 19 nt, Artificial Sequence
  Description of Artificial Sequence: Synthetic oligonucleotide
  Sense strand starting at position 3731 of SEQ ID NO: 318427
auugacaguaauuggagua

SEQ ID NO: 561904 - RNA, 19 nt, Artificial Sequence
  Description of Artificial Sequence: Synthetic oligonucleotide
  Antisense strand to SEQ ID NO: 561903
uacuccaauuacugucaau

SEQ ID NO: 561905 - RNA, 19 nt, Artificial Sequence
  Description of Artificial Sequence: Synthetic oligonucleotide
  Sense strand starting at position 3780 of SEQ ID NO: 318427
cuucucugaauaggugaga

SEQ ID NO: 561906 - RNA, 19 nt, Artificial Sequence
  Description of Artificial Sequence: Synthetic oligonucleotide
  Antisense strand to SEQ ID NO: 561905
ucucaccuauucagagaag

SEQ ID NO: 561907 - RNA, 19 nt, Artificial Sequence
  Description of Artificial Sequence: Synthetic oligonucleotide
  Sense strand starting at position 3781 of SEQ ID NO: 318427
uucucugaauaggugagau

SEQ ID NO: 561908 - RNA, 19 nt, Artificial Sequence
  Description of Artificial Sequence: Synthetic oligonucleotide
  Antisense strand to SEQ ID NO: 561907
aucucaccuauucagagaa

SEQ ID NO: 561909 - RNA, 19 nt, Artificial Sequence
  Description of Artificial Sequence: Synthetic oligonucleotide
  Sense strand starting at position 3783 of SEQ ID NO: 318427
cucugaauaggugagaugu

SEQ ID NO: 561910 - RNA, 19 nt, Artificial Sequence
  Description of Artificial Sequence: Synthetic oligonucleotide
  Antisense strand to SEQ ID NO: 561909
acaucucaccuauucagag

SEQ ID NO: 561911 - RNA, 19 nt, Artificial Sequence
  Description of Artificial Sequence: Synthetic oligonucleotide
  Sense strand starting at position 3792 of SEQ ID NO: 318427
ggugagaugugagcagaga

SEQ ID NO: 561912 - RNA, 19 nt, Artificial Sequence
  Description of Artificial Sequence: Synthetic oligonucleotide
  Antisense strand to SEQ ID NO: 561911
ucucugcucacaucucacc

SEQ ID NO: 561913 - RNA, 19 nt, Artificial Sequence
  Description of Artificial Sequence: Synthetic oligonucleotide
  Sense strand starting at position 3829 of SEQ ID NO: 318427
ugugcuuauccggacagaa

SEQ ID NO: 561914 - RNA, 19 nt, Artificial Sequence
  Description of Artificial Sequence: Synthetic oligonucleotide
  Antisense strand to SEQ ID NO: 561913
uucuguccggauaagcaca

SEQ ID NO: 561915 - RNA, 19 nt, Artificial Sequence
  Description of Artificial Sequence: Synthetic oligonucleotide
  Sense strand starting at position 3831 of SEQ ID NO: 318427
ugcuuauccggacagaaag

SEQ ID NO: 561916 - RNA, 19 nt, Artificial Sequence
  Description of Artificial Sequence: Synthetic oligonucleotide
  Antisense strand to SEQ ID NO: 561915
cuuucuguccggauaagca

SEQ ID NO: 561917 - RNA, 19 nt, Artificial Sequence
  Description of Artificial Sequence: Synthetic oligonucleotide
  Sense strand starting at position 3906 of SEQ ID NO: 318427
gaagcaggacugugagaau

SEQ ID NO: 561918 - RNA, 19 nt, Artificial Sequence
  Description of Artificial Sequence: Synthetic oligonucleotide
  Antisense strand to SEQ ID NO: 561917
auucucacaguccugcuuc

SEQ ID NO: 561919 - RNA, 19 nt, Artificial Sequence
  Description of Artificial Sequence: Synthetic oligonucleotide
  Sense strand starting at position 3913 of SEQ ID NO: 318427
gacugugagaaugguaaag

SEQ ID NO: 561920 - RNA, 19 nt, Artificial Sequence
  Description of Artificial Sequence: Synthetic oligonucleotide
  Antisense strand to SEQ ID NO: 561919
cuuuaccauucucacaguc

SEQ ID NO: 561921 - RNA, 19 nt, Artificial Sequence
  Description of Artificial Sequence: Synthetic oligonucleotide
  Sense strand starting at position 3980 of SEQ ID NO: 318427
ugggaaagccuuugauuac

SEQ ID NO: 561922 - RNA, 19 nt, Artificial Sequence
  Description of Artificial Sequence: Synthetic oligonucleotide
  Antisense strand to SEQ ID NO: 561921
guaaucaaaggcuuuccca

SEQ ID NO: 561923 - RNA, 19 nt, Artificial Sequence
  Description of Artificial Sequence: Synthetic oligonucleotide
  Sense strand starting at position 44 of SEQ ID NO: 318428
ccaggagacuuugaacaaa

SEQ ID NO: 561924 - RNA, 19 nt, Artificial Sequence
  Description of Artificial Sequence: Synthetic oligonucleotide
  Antisense strand to SEQ ID NO: 561923
uuuguucaaagucuccugg

SEQ ID NO: 561925 - RNA, 19 nt, Artificial Sequence
  Description of Artificial Sequence: Synthetic oligonucleotide
  Sense strand starting at position 89 of SEQ ID NO: 318428
gguagugccucccucuaaa

SEQ ID NO: 561926 - RNA, 19 nt, Artificial Sequence
  Description of Artificial Sequence: Synthetic oligonucleotide
  Antisense strand to SEQ ID NO: 561925
uuuagagggaggcacuacc

SEQ ID NO: 561927 - RNA, 19 nt, Artificial Sequence
  Description of Artificial Sequence: Synthetic oligonucleotide
  Sense strand starting at position 108 of SEQ ID NO: 318428
gacuguuaugaggguacuu

SEQ ID NO: 561928 - RNA, 19 nt, Artificial Sequence
  Description of Artificial Sequence: Synthetic oligonucleotide
  Antisense strand to SEQ ID NO: 561927
aaguacccucauaacaguc

SEQ ID NO: 561929 - RNA, 19 nt, Artificial Sequence
  Description of Artificial Sequence: Synthetic oligonucleotide
  Sense strand starting at position 110 of SEQ ID NO: 318428
cuguuaugaggguacuuag

SEQ ID NO: 561930 - RNA, 19 nt, Artificial Sequence
  Description of Artificial Sequence: Synthetic oligonucleotide
  Antisense strand to SEQ ID NO: 561929
cuaaguacccucauaacag

SEQ ID NO: 561931 - RNA, 19 nt, Artificial Sequence
  Description of Artificial Sequence: Synthetic oligonucleotide
  Sense strand starting at position 117 of SEQ ID NO: 318428
gaggguacuuagcacauau

SEQ ID NO: 561932 - RNA, 19 nt, Artificial Sequence
  Description of Artificial Sequence: Synthetic oligonucleotide
  Antisense strand to SEQ ID NO: 561931
auaugugcuaaguacccuc

SEQ ID NO: 561933 - RNA, 19 nt, Artificial Sequence
  Description of Artificial Sequence: Synthetic oligonucleotide
  Sense strand starting at position 128 of SEQ ID NO: 318428
gcacauaugcuccauaugu

SEQ ID NO: 561934 - RNA, 19 nt, Artificial Sequence
  Description of Artificial Sequence: Synthetic oligonucleotide
  Antisense strand to SEQ ID NO: 561933
acauauggagcauaugugc

SEQ ID NO: 561935 - RNA, 19 nt, Artificial Sequence
  Description of Artificial Sequence: Synthetic oligonucleotide
  Sense strand starting at position 136 of SEQ ID NO: 318428
gcuccauauguggaagcua

SEQ ID NO: 561936 - RNA, 19 nt, Artificial Sequence
  Description of Artificial Sequence: Synthetic oligonucleotide
  Antisense strand to SEQ ID NO: 561935
uagcuuccacauauggagc

SEQ ID NO: 561937 - RNA, 19 nt, Artificial Sequence
  Description of Artificial Sequence: Synthetic oligonucleotide
  Sense strand starting at position 148 of SEQ ID NO: 318428
gaagcuaggugagguaaua

SEQ ID NO: 561938 - RNA, 19 nt, Artificial Sequence
  Description of Artificial Sequence: Synthetic oligonucleotide
  Antisense strand to SEQ ID NO: 561937
uauuaccucaccuagcuuc

SEQ ID NO: 561939 - RNA, 19 nt, Artificial Sequence
  Description of Artificial Sequence: Synthetic oligonucleotide
  Sense strand starting at position 188 of SEQ ID NO: 318428
cucaguccugucuagagca

SEQ ID NO: 561940 - RNA, 19 nt, Artificial Sequence
  Description of Artificial Sequence: Synthetic oligonucleotide
  Antisense strand to SEQ ID NO: 561939
ugcucuagacaggacugag

SEQ ID NO: 561941 - RNA, 19 nt, Artificial Sequence
  Description of Artificial Sequence: Synthetic oligonucleotide
  Sense strand starting at position 581 of SEQ ID NO: 318428
cccugcuucccgcauauau

SEQ ID NO: 561942 - RNA, 19 nt, Artificial Sequence
  Description of Artificial Sequence: Synthetic oligonucleotide
  Antisense strand to SEQ ID NO: 561941
auauaugcgggaagcaggg

SEQ ID NO: 561943 - RNA, 19 nt, Artificial Sequence
  Description of Artificial Sequence: Synthetic oligonucleotide
  Sense strand starting at position 670 of SEQ ID NO: 318428
guagcuucccugggagaca

SEQ ID NO: 561944 - RNA, 19 nt, Artificial Sequence
  Description of Artificial Sequence: Synthetic oligonucleotide
  Antisense strand to SEQ ID NO: 561943
ugucucccagggaagcuac

SEQ ID NO: 561945 - RNA, 19 nt, Artificial Sequence
  Description of Artificial Sequence: Synthetic oligonucleotide
  Sense strand starting at position 682 of SEQ ID NO: 318428
ggagacagguuccuaaagu

SEQ ID NO: 561946 - RNA, 19 nt, Artificial Sequence
  Description of Artificial Sequence: Synthetic oligonucleotide
  Antisense strand to SEQ ID NO: 561945
acuuuaggaaccugucucc

SEQ ID NO: 561947 - RNA, 19 nt, Artificial Sequence
  Description of Artificial Sequence: Synthetic oligonucleotide
  Sense strand starting at position 683 of SEQ ID NO: 318428
gagacagguuccuaaaguc

SEQ ID NO: 561948 - RNA, 19 nt, Artificial Sequence
  Description of Artificial Sequence: Synthetic oligonucleotide
  Antisense strand to SEQ ID NO: 561947
gacuuuaggaaccugucuc

SEQ ID NO: 561949 - RNA, 19 nt, Artificial Sequence
  Description of Artificial Sequence: Synthetic oligonucleotide
  Sense strand starting at position 812 of SEQ ID NO: 318428
gcagcucuuguuuguagga

SEQ ID NO: 561950 - RNA, 19 nt, Artificial Sequence
  Description of Artificial Sequence: Synthetic oligonucleotide
  Antisense strand to SEQ ID NO: 561949
uccuacaaacaagagcugc

SEQ ID NO: 561951 - RNA, 19 nt, Artificial Sequence
  Description of Artificial Sequence: Synthetic oligonucleotide
  Sense strand starting at position 965 of SEQ ID NO: 318428
gcccucuuccauugugacu

SEQ ID NO: 561952 - RNA, 19 nt, Artificial Sequence
  Description of Artificial Sequence: Synthetic oligonucleotide
  Antisense strand to SEQ ID NO: 561951
agucacaauggaagagggc

SEQ ID NO: 561953 - RNA, 19 nt, Artificial Sequence
  Description of Artificial Sequence: Synthetic oligonucleotide
  Sense strand starting at position 1248 of SEQ ID NO: 318428
gccauuaugugccuccuca

SEQ ID NO: 561954 - RNA, 19 nt, Artificial Sequence
  Description of Artificial Sequence: Synthetic oligonucleotide
  Antisense strand to SEQ ID NO: 561953
ugaggaggcacauaauggc

SEQ ID NO: 561955 - RNA, 19 nt, Artificial Sequence
  Description of Artificial Sequence: Synthetic oligonucleotide
  Sense strand starting at position 1339 of SEQ ID NO: 318428
ggcugucaaaguugggaaa

SEQ ID NO: 561956 - RNA, 19 nt, Artificial Sequence
  Description of Artificial Sequence: Synthetic oligonucleotide
  Antisense strand to SEQ ID NO: 561955
uuucccaacuuugacagcc

SEQ ID NO: 561957 - RNA, 19 nt, Artificial Sequence
  Description of Artificial Sequence: Synthetic oligonucleotide
  Sense strand starting at position 1648 of SEQ ID NO: 318428
ccaugacaaccguauccuu

SEQ ID NO: 561958 - RNA, 19 nt, Artificial Sequence
  Description of Artificial Sequence: Synthetic oligonucleotide
  Antisense strand to SEQ ID NO: 561957
aaggauacgguugucaugg

SEQ ID NO: 561959 - RNA, 19 nt, Artificial Sequence
  Description of Artificial Sequence: Synthetic oligonucleotide
  Sense strand starting at position 1684 of SEQ ID NO: 318428
gcggaauugaucuggaaau

SEQ ID NO: 561960 - RNA, 19 nt, Artificial Sequence
  Description of Artificial Sequence: Synthetic oligonucleotide
  Antisense strand to SEQ ID NO: 561959
auuuccagaucaauuccgc

SEQ ID NO: 561961 - RNA, 19 nt, Artificial Sequence
  Description of Artificial Sequence: Synthetic oligonucleotide
  Sense strand starting at position 1685 of SEQ ID NO: 318428
cggaauugaucuggaaaug

SEQ ID NO: 561962 - RNA, 19 nt, Artificial Sequence
  Description of Artificial Sequence: Synthetic oligonucleotide
  Antisense strand to SEQ ID NO: 561961
cauuuccagaucaauuccg

SEQ ID NO: 561963 - RNA, 19 nt, Artificial Sequence
  Description of Artificial Sequence: Synthetic oligonucleotide
  Sense strand starting at position 1695 of SEQ ID NO: 318428
cuggaaauguagcuuuguu

SEQ ID NO: 561964 - RNA, 19 nt, Artificial Sequence
  Description of Artificial Sequence: Synthetic oligonucleotide
  Antisense strand to SEQ ID NO: 561963
aacaaagcuacauuuccag

SEQ ID NO: 561965 - RNA, 19 nt, Artificial Sequence
  Description of Artificial Sequence: Synthetic oligonucleotide
  Sense strand starting at position 2435 of SEQ ID NO: 318428
cggucuguucagggaguga

SEQ ID NO: 561966 - RNA, 19 nt, Artificial Sequence
  Description of Artificial Sequence: Synthetic oligonucleotide
  Antisense strand to SEQ ID NO: 561965
ucacucccugaacagaccg

SEQ ID NO: 561967 - RNA, 19 nt, Artificial Sequence
  Description of Artificial Sequence: Synthetic oligonucleotide
  Sense strand starting at position 2535 of SEQ ID NO: 318428
ggugaagaaucucagagag

SEQ ID NO: 561968 - RNA, 19 nt, Artificial Sequence
  Description of Artificial Sequence: Synthetic oligonucleotide
  Antisense strand to SEQ ID NO: 561967
cucucugagauucuucacc

SEQ ID NO: 561969 - RNA, 19 nt, Artificial Sequence
  Description of Artificial Sequence: Synthetic oligonucleotide
  Sense strand starting at position 2758 of SEQ ID NO: 318428
ccucccugggcagauauaa

SEQ ID NO: 561970 - RNA, 19 nt, Artificial Sequence
  Description of Artificial Sequence: Synthetic oligonucleotide
  Antisense strand to SEQ ID NO: 561969
uuauaucugcccagggagg

SEQ ID NO: 561971 - RNA, 19 nt, Artificial Sequence
  Description of Artificial Sequence: Synthetic oligonucleotide
  Sense strand starting at position 2984 of SEQ ID NO: 318428
gccucucagagaggcauua

SEQ ID NO: 561972 - RNA, 19 nt, Artificial Sequence
  Description of Artificial Sequence: Synthetic oligonucleotide
  Antisense strand to SEQ ID NO: 561971
uaaugccucucugagaggc

SEQ ID NO: 561973 - RNA, 19 nt, Artificial Sequence
  Description of Artificial Sequence: Synthetic oligonucleotide
  Sense strand starting at position 3213 of SEQ ID NO: 318428
uccugcugugcucagugaa

SEQ ID NO: 561974 - RNA, 19 nt, Artificial Sequence
  Description of Artificial Sequence: Synthetic oligonucleotide
  Antisense strand to SEQ ID NO: 561973
uucacugagcacagcagga

SEQ ID NO: 561975 - RNA, 19 nt, Artificial Sequence
  Description of Artificial Sequence: Synthetic oligonucleotide
  Sense strand starting at position 3216 of SEQ ID NO: 318428
ugcugugcucagugaacuc

SEQ ID NO: 561976 - RNA, 19 nt, Artificial Sequence
  Description of Artificial Sequence: Synthetic oligonucleotide
  Antisense strand to SEQ ID NO: 561975
gaguucacugagcacagca

SEQ ID NO: 561977 - RNA, 19 nt, Artificial Sequence
  Description of Artificial Sequence: Synthetic oligonucleotide
  Sense strand starting at position 3277 of SEQ ID NO: 318428
ugaagucuucucugaccuu

SEQ ID NO: 561978 - RNA, 19 nt, Artificial Sequence
  Description of Artificial Sequence: Synthetic oligonucleotide
  Antisense strand to SEQ ID NO: 561977
aaggucagagaagacuuca

SEQ ID NO: 561979 - RNA, 19 nt, Artificial Sequence
  Description of Artificial Sequence: Synthetic oligonucleotide
  Sense strand starting at position 3319 of SEQ ID NO: 318428
cauggacucuucuuaggga

SEQ ID NO: 561980 - RNA, 19 nt, Artificial Sequence
  Description of Artificial Sequence: Synthetic oligonucleotide
  Antisense strand to SEQ ID NO: 561979
ucccuaagaagaguccaug

SEQ ID NO: 561981 - RNA, 19 nt, Artificial Sequence
  Description of Artificial Sequence: Synthetic oligonucleotide
  Sense strand starting at position 3322 of SEQ ID NO: 318428
ggacucuucuuagggagca

SEQ ID NO: 561982 - RNA, 19 nt, Artificial Sequence
  Description of Artificial Sequence: Synthetic oligonucleotide
  Antisense strand to SEQ ID NO: 561981
ugcucccuaagaagagucc

SEQ ID NO: 561983 - RNA, 19 nt, Artificial Sequence
  Description of Artificial Sequence: Synthetic oligonucleotide
  Sense strand starting at position 3372 of SEQ ID NO: 318428
aguaauuggagguguggaa

SEQ ID NO: 561984 - RNA, 19 nt, Artificial Sequence
  Description of Artificial Sequence: Synthetic oligonucleotide
  Antisense strand to SEQ ID NO: 561983
uuccacaccuccaauuacu

SEQ ID NO: 561985 - RNA, 19 nt, Artificial Sequence
  Description of Artificial Sequence: Synthetic oligonucleotide
  Sense strand starting at position 3458 of SEQ ID NO: 318428
uggugacaccucugacaac

SEQ ID NO: 561986 - RNA, 19 nt, Artificial Sequence
  Description of Artificial Sequence: Synthetic oligonucleotide
  Antisense strand to SEQ ID NO: 561985
guugucagaggugucacca

SEQ ID NO: 561987 - RNA, 19 nt, Artificial Sequence
  Description of Artificial Sequence: Synthetic oligonucleotide
  Sense strand starting at position 3572 of SEQ ID NO: 318428
auaagucacuugcucauga

SEQ ID NO: 561988 - RNA, 19 nt, Artificial Sequence
  Description of Artificial Sequence: Synthetic oligonucleotide
  Antisense strand to SEQ ID NO: 561987
ucaugagcaagugacuuau

SEQ ID NO: 561989 - RNA, 19 nt, Artificial Sequence
  Description of Artificial Sequence: Synthetic oligonucleotide
  Sense strand starting at position 3582 of SEQ ID NO: 318428
ugcucaugaucccaggaga

SEQ ID NO: 561990 - RNA, 19 nt, Artificial Sequence
  Description of Artificial Sequence: Synthetic oligonucleotide
  Antisense strand to SEQ ID NO: 561989
ucuccugggaucaugagca

SEQ ID NO: 561991 - RNA, 19 nt, Artificial Sequence
  Description of Artificial Sequence: Synthetic oligonucleotide
  Sense strand starting at position 3598 of SEQ ID NO: 318428
agaucugaaucugugagca

SEQ ID NO: 561992 - RNA, 19 nt, Artificial Sequence
  Description of Artificial Sequence: Synthetic oligonucleotide
  Antisense strand to SEQ ID NO: 561991
ugcucacagauucagaucu

SEQ ID NO: 561993 - RNA, 19 nt, Artificial Sequence
  Description of Artificial Sequence: Synthetic oligonucleotide
  Sense strand starting at position 3600 of SEQ ID NO: 318428
aucugaaucugugagcaca

SEQ ID NO: 561994 - RNA, 19 nt, Artificial Sequence
  Description of Artificial Sequence: Synthetic oligonucleotide
  Antisense strand to SEQ ID NO: 561993
ugugcucacagauucagau

SEQ ID NO: 561995 - RNA, 19 nt, Artificial Sequence
  Description of Artificial Sequence: Synthetic oligonucleotide
  Sense strand starting at position 3612 of SEQ ID NO: 318428
gagcacagcuggucaauua

SEQ ID NO: 561996 - RNA, 19 nt, Artificial Sequence
  Description of Artificial Sequence: Synthetic oligonucleotide
  Antisense strand to SEQ ID NO: 561995
uaauugaccagcugugcuc

SEQ ID NO: 561997 - RNA, 19 nt, Artificial Sequence
  Description of Artificial Sequence: Synthetic oligonucleotide
  Sense strand starting at position 3613 of SEQ ID NO: 318428
agcacagcuggucaauuaa

SEQ ID NO: 561998 - RNA, 19 nt, Artificial Sequence
  Description of Artificial Sequence: Synthetic oligonucleotide
  Antisense strand to SEQ ID NO: 561997
uuaauugaccagcugugcu

SEQ ID NO: 561999 - RNA, 19 nt, Artificial Sequence
  Description of Artificial Sequence: Synthetic oligonucleotide
  Sense strand starting at position 3717 of SEQ ID NO: 318428
gcaggugcccaggaucuua

SEQ ID NO: 562000 - RNA, 19 nt, Artificial Sequence
  Description of Artificial Sequence: Synthetic oligonucleotide
  Antisense strand to SEQ ID NO: 561999
uaagauccugggcaccugc

SEQ ID NO: 562001 - RNA, 19 nt, Artificial Sequence
  Description of Artificial Sequence: Synthetic oligonucleotide
  Sense strand starting at position 3837 of SEQ ID NO: 318428
gagggaagugcucauggca

SEQ ID NO: 562002 - RNA, 19 nt, Artificial Sequence
  Description of Artificial Sequence: Synthetic oligonucleotide
  Antisense strand to SEQ ID NO: 562001
ugccaugagcacuucccuc

SEQ ID NO: 562003 - RNA, 19 nt, Artificial Sequence
  Description of Artificial Sequence: Synthetic oligonucleotide
  Sense strand starting at position 65 of SEQ ID NO: 318429
acagauaaaugacagaauu

SEQ ID NO: 562004 - RNA, 19 nt, Artificial Sequence
  Description of Artificial Sequence: Synthetic oligonucleotide
  Antisense strand to SEQ ID NO: 562003
aauucugucauuuaucugu

SEQ ID NO: 562005 - RNA, 19 nt, Artificial Sequence
  Description of Artificial Sequence: Synthetic oligonucleotide
  Sense strand starting at position 417 of SEQ ID NO: 318429
ugugaaagaagcuagugau

SEQ ID NO: 562006 - RNA, 19 nt, Artificial Sequence
  Description of Artificial Sequence: Synthetic oligonucleotide
  Antisense strand to SEQ ID NO: 562005
aucacuagcuucuuucaca

SEQ ID NO: 562007 - RNA, 19 nt, Artificial Sequence
  Description of Artificial Sequence: Synthetic oligonucleotide
  Sense strand starting at position 430 of SEQ ID NO: 318429
agugauuaaccguagcuag

SEQ ID NO: 562008 - RNA, 19 nt, Artificial Sequence
  Description of Artificial Sequence: Synthetic oligonucleotide
  Antisense strand to SEQ ID NO: 562007
cuagcuacgguuaaucacu

SEQ ID NO: 562009 - RNA, 19 nt, Artificial Sequence
  Description of Artificial Sequence: Synthetic oligonucleotide
  Sense strand starting at position 475 of SEQ ID NO: 318429
acaggaaguugggauuuga

SEQ ID NO: 562010 - RNA, 19 nt, Artificial Sequence
  Description of Artificial Sequence: Synthetic oligonucleotide
  Antisense strand to SEQ ID NO: 562009
ucaaaucccaacuuccugu

SEQ ID NO: 562011 - RNA, 19 nt, Artificial Sequence
  Description of Artificial Sequence: Synthetic oligonucleotide
  Sense strand starting at position 504 of SEQ ID NO: 318429
ggcauuugccaucgguuaa

SEQ ID NO: 562012 - RNA, 19 nt, Artificial Sequence
  Description of Artificial Sequence: Synthetic oligonucleotide
  Antisense strand to SEQ ID NO: 562011
uuaaccgauggcaaaugcc

SEQ ID NO: 562013 - RNA, 19 nt, Artificial Sequence
  Description of Artificial Sequence: Synthetic oligonucleotide
  Sense strand starting at position 505 of SEQ ID NO: 318429
gcauuugccaucgguuaag

SEQ ID NO: 562014 - RNA, 19 nt, Artificial Sequence
  Description of Artificial Sequence: Synthetic oligonucleotide
  Antisense strand to SEQ ID NO: 562013
cuuaaccgauggcaaaugc

SEQ ID NO: 562015 - RNA, 19 nt, Artificial Sequence
  Description of Artificial Sequence: Synthetic oligonucleotide
  Sense strand starting at position 587 of SEQ ID NO: 318429
uugguuuauccagggagaa

SEQ ID NO: 562016 - RNA, 19 nt, Artificial Sequence
  Description of Artificial Sequence: Synthetic oligonucleotide
  Antisense strand to SEQ ID NO: 562015
uucucccuggauaaaccaa

SEQ ID NO: 562017 - RNA, 19 nt, Artificial Sequence
  Description of Artificial Sequence: Synthetic oligonucleotide
  Sense strand starting at position 589 of SEQ ID NO: 318429
gguuuauccagggagaagc

SEQ ID NO: 562018 - RNA, 19 nt, Artificial Sequence
  Description of Artificial Sequence: Synthetic oligonucleotide
  Antisense strand to SEQ ID NO: 562017
gcuucucccuggauaaacc

SEQ ID NO: 562019 - RNA, 19 nt, Artificial Sequence
  Description of Artificial Sequence: Synthetic oligonucleotide
  Sense strand starting at position 730 of SEQ ID NO: 318429
uugaucacagcuuaguaga

SEQ ID NO: 562020 - RNA, 19 nt, Artificial Sequence
  Description of Artificial Sequence: Synthetic oligonucleotide
  Antisense strand to SEQ ID NO: 562019
ucuacuaagcugugaucaa

SEQ ID NO: 562021 - RNA, 19 nt, Artificial Sequence
  Description of Artificial Sequence: Synthetic oligonucleotide
  Sense strand starting at position 732 of SEQ ID NO: 318429
gaucacagcuuaguagauu

SEQ ID NO: 562022 - RNA, 19 nt, Artificial Sequence
  Description of Artificial Sequence: Synthetic oligonucleotide
  Antisense strand to SEQ ID NO: 562021
aaucuacuaagcugugauc

SEQ ID NO: 562023 - RNA, 19 nt, Artificial Sequence
  Description of Artificial Sequence: Synthetic oligonucleotide
  Sense strand starting at position 741 of SEQ ID NO: 318429
uuaguagauuugggaaaca

SEQ ID NO: 562024 - RNA, 19 nt, Artificial Sequence
  Description of Artificial Sequence: Synthetic oligonucleotide
  Antisense strand to SEQ ID NO: 562023
uguuucccaaaucuacuaa

SEQ ID NO: 562025 - RNA, 19 nt, Artificial Sequence
  Description of Artificial Sequence: Synthetic oligonucleotide
  Sense strand starting at position 780 of SEQ ID NO: 318429
uuggcugugcaugagauaa

SEQ ID NO: 562026 - RNA, 19 nt, Artificial Sequence
  Description of Artificial Sequence: Synthetic oligonucleotide
  Antisense strand to SEQ ID NO: 562025
uuaucucaugcacagccaa

SEQ ID NO: 562027 - RNA, 19 nt, Artificial Sequence
  Description of Artificial Sequence: Synthetic oligonucleotide
  Sense strand starting at position 1037 of SEQ ID NO: 318429
cuggguguugucuagagaa

SEQ ID NO: 562028 - RNA, 19 nt, Artificial Sequence
  Description of Artificial Sequence: Synthetic oligonucleotide
  Antisense strand to SEQ ID NO: 562027
uucucuagacaacacccag

SEQ ID NO: 562029 - RNA, 19 nt, Artificial Sequence
  Description of Artificial Sequence: Synthetic oligonucleotide
  Sense strand starting at position 1058 of SEQ ID NO: 318429
ggaauuaauguauguaaac

SEQ ID NO: 562030 - RNA, 19 nt, Artificial Sequence
  Description of Artificial Sequence: Synthetic oligonucleotide
  Antisense strand to SEQ ID NO: 562029
guuuacauacauuaauucc

SEQ ID NO: 562031 - RNA, 19 nt, Artificial Sequence
  Description of Artificial Sequence: Synthetic oligonucleotide
  Sense strand starting at position 1148 of SEQ ID NO: 318429
agagauguuagaggauagu

SEQ ID NO: 562032 - RNA, 19 nt, Artificial Sequence
  Description of Artificial Sequence: Synthetic oligonucleotide
  Antisense strand to SEQ ID NO: 562031
acuauccucuaacaucucu

SEQ ID NO: 562033 - RNA, 19 nt, Artificial Sequence
  Description of Artificial Sequence: Synthetic oligonucleotide
  Sense strand starting at position 1199 of SEQ ID NO: 318429
uuuagauuguuagcagaac

SEQ ID NO: 562034 - RNA, 19 nt, Artificial Sequence
  Description of Artificial Sequence: Synthetic oligonucleotide
  Antisense strand to SEQ ID NO: 562033
guucugcuaacaaucuaaa

SEQ ID NO: 562035 - RNA, 19 nt, Artificial Sequence
  Description of Artificial Sequence: Synthetic oligonucleotide
  Sense strand starting at position 1651 of SEQ ID NO: 318429
ccagcaguccuucgauuug

SEQ ID NO: 562036 - RNA, 19 nt, Artificial Sequence
  Description of Artificial Sequence: Synthetic oligonucleotide
  Antisense strand to SEQ ID NO: 562035
caaaucgaaggacugcugg

SEQ ID NO: 562037 - RNA, 19 nt, Artificial Sequence
  Description of Artificial Sequence: Synthetic oligonucleotide
  Sense strand starting at position 1748 of SEQ ID NO: 318429
gccagugagugacuuagga

SEQ ID NO: 562038 - RNA, 19 nt, Artificial Sequence
  Description of Artificial Sequence: Synthetic oligonucleotide
  Antisense strand to SEQ ID NO: 562037
uccuaagucacucacuggc

SEQ ID NO: 562039 - RNA, 19 nt, Artificial Sequence
  Description of Artificial Sequence: Synthetic oligonucleotide
  Sense strand starting at position 1770 of SEQ ID NO: 318429
guggcugcuccacagagau

SEQ ID NO: 562040 - RNA, 19 nt, Artificial Sequence
  Description of Artificial Sequence: Synthetic oligonucleotide
  Antisense strand to SEQ ID NO: 562039
aucucuguggagcagccac

SEQ ID NO: 562041 - RNA, 19 nt, Artificial Sequence
  Description of Artificial Sequence: Synthetic oligonucleotide
  Sense strand starting at position 1782 of SEQ ID NO: 318429
cagagaugcuagcugggau

SEQ ID NO: 562042 - RNA, 19 nt, Artificial Sequence
  Description of Artificial Sequence: Synthetic oligonucleotide
  Antisense strand to SEQ ID NO: 562041
aucccagcuagcaucucug

SEQ ID NO: 562043 - RNA, 19 nt, Artificial Sequence
  Description of Artificial Sequence: Synthetic oligonucleotide
  Sense strand starting at position 1785 of SEQ ID NO: 318429
agaugcuagcugggaucua

SEQ ID NO: 562044 - RNA, 19 nt, Artificial Sequence
  Description of Artificial Sequence: Synthetic oligonucleotide
  Antisense strand to SEQ ID NO: 562043
uagaucccagcuagcaucu

SEQ ID NO: 562045 - RNA, 19 nt, Artificial Sequence
  Description of Artificial Sequence: Synthetic oligonucleotide
  Sense strand starting at position 2046 of SEQ ID NO: 318429
aagggauucguccaauucu

SEQ ID NO: 562046 - RNA, 19 nt, Artificial Sequence
  Description of Artificial Sequence: Synthetic oligonucleotide
  Antisense strand to SEQ ID NO: 562045
agaauuggacgaaucccuu

SEQ ID NO: 562047 - RNA, 19 nt, Artificial Sequence
  Description of Artificial Sequence: Synthetic oligonucleotide
  Sense strand starting at position 2295 of SEQ ID NO: 318429
gaggaaacguuucuggaau

SEQ ID NO: 562048 - RNA, 19 nt, Artificial Sequence
  Description of Artificial Sequence: Synthetic oligonucleotide
  Antisense strand to SEQ ID NO: 562047
auuccagaaacguuuccuc

SEQ ID NO: 562049 - RNA, 19 nt, Artificial Sequence
  Description of Artificial Sequence: Synthetic oligonucleotide
  Sense strand starting at position 2306 of SEQ ID NO: 318429
ucuggaaucugauugcuag

SEQ ID NO: 562050 - RNA, 19 nt, Artificial Sequence
  Description of Artificial Sequence: Synthetic oligonucleotide
  Antisense strand to SEQ ID NO: 562049
cuagcaaucagauuccaga

SEQ ID NO: 562051 - RNA, 19 nt, Artificial Sequence
  Description of Artificial Sequence: Synthetic oligonucleotide
  Sense strand starting at position 2309 of SEQ ID NO: 318429
ggaaucugauugcuaggga

SEQ ID NO: 562052 - RNA, 19 nt, Artificial Sequence
  Description of Artificial Sequence: Synthetic oligonucleotide
  Antisense strand to SEQ ID NO: 562051
ucccuagcaaucagauucc

SEQ ID NO: 562053 - RNA, 19 nt, Artificial Sequence
  Description of Artificial Sequence: Synthetic oligonucleotide
  Sense strand starting at position 2425 of SEQ ID NO: 318429
agagcaguggaagguuaua

SEQ ID NO: 562054 - RNA, 19 nt, Artificial Sequence
  Description of Artificial Sequence: Synthetic oligonucleotide
  Antisense strand to SEQ ID NO: 562053
uauaaccuuccacugcucu

SEQ ID NO: 562055 - RNA, 19 nt, Artificial Sequence
  Description of Artificial Sequence: Synthetic oligonucleotide
  Sense strand starting at position 2437 of SEQ ID NO: 318429
gguuauauagcaugaggga

SEQ ID NO: 562056 - RNA, 19 nt, Artificial Sequence
  Description of Artificial Sequence: Synthetic oligonucleotide
  Antisense strand to SEQ ID NO: 562055
ucccucaugcuauauaacc

SEQ ID NO: 562057 - RNA, 19 nt, Artificial Sequence
  Description of Artificial Sequence: Synthetic oligonucleotide
  Sense strand starting at position 2879 of SEQ ID NO: 318429
aucugagguuucuuuagag

SEQ ID NO: 562058 - RNA, 19 nt, Artificial Sequence
  Description of Artificial Sequence: Synthetic oligonucleotide
  Antisense strand to SEQ ID NO: 562057
cucuaaagaaaccucagau

SEQ ID NO: 562059 - RNA, 19 nt, Artificial Sequence
  Description of Artificial Sequence: Synthetic oligonucleotide
  Sense strand starting at position 2946 of SEQ ID NO: 318429
cuggucuucguggaagaau

SEQ ID NO: 562060 - RNA, 19 nt, Artificial Sequence
  Description of Artificial Sequence: Synthetic oligonucleotide
  Antisense strand to SEQ ID NO: 562059
auucuuccacgaagaccag

SEQ ID NO: 562061 - RNA, 19 nt, Artificial Sequence
  Description of Artificial Sequence: Synthetic oligonucleotide
  Sense strand starting at position 3036 of SEQ ID NO: 318429
uuuccacguguagauaaua

SEQ ID NO: 562062 - RNA, 19 nt, Artificial Sequence
  Description of Artificial Sequence: Synthetic oligonucleotide
  Antisense strand to SEQ ID NO: 562061
uauuaucuacacguggaaa

SEQ ID NO: 562063 - RNA, 19 nt, Artificial Sequence
  Description of Artificial Sequence: Synthetic oligonucleotide
  Sense strand starting at position 3334 of SEQ ID NO: 318429
auuaaacgucaaugugaaa

SEQ ID NO: 562064 - RNA, 19 nt, Artificial Sequence
  Description of Artificial Sequence: Synthetic oligonucleotide
  Antisense strand to SEQ ID NO: 562063
uuucacauugacguuuaau

SEQ ID NO: 562065 - RNA, 19 nt, Artificial Sequence
  Description of Artificial Sequence: Synthetic oligonucleotide
  Sense strand starting at position 3386 of SEQ ID NO: 318429
aguggcugaccuggugaaa

SEQ ID NO: 562066 - RNA, 19 nt, Artificial Sequence
  Description of Artificial Sequence: Synthetic oligonucleotide
  Antisense strand to SEQ ID NO: 562065
uuucaccaggucagccacu

SEQ ID NO: 562067 - RNA, 19 nt, Artificial Sequence
  Description of Artificial Sequence: Synthetic oligonucleotide
  Sense strand starting at position 3444 of SEQ ID NO: 318429
cuugacaccuuaguaagaa

SEQ ID NO: 562068 - RNA, 19 nt, Artificial Sequence
  Description of Artificial Sequence: Synthetic oligonucleotide
  Antisense strand to SEQ ID NO: 562067
uucuuacuaaggugucaag

SEQ ID NO: 562069 - RNA, 19 nt, Artificial Sequence
  Description of Artificial Sequence: Synthetic oligonucleotide
  Sense strand starting at position 3485 of SEQ ID NO: 318429
guuuaugugguuuccguga

SEQ ID NO: 562070 - RNA, 19 nt, Artificial Sequence
  Description of Artificial Sequence: Synthetic oligonucleotide
  Antisense strand to SEQ ID NO: 562069
ucacggaaaccacauaaac

SEQ ID NO: 562071 - RNA, 19 nt, Artificial Sequence
  Description of Artificial Sequence: Synthetic oligonucleotide
  Sense strand starting at position 3885 of SEQ ID NO: 318429
acucuugagcaaugaucua

SEQ ID NO: 562072 - RNA, 19 nt, Artificial Sequence
  Description of Artificial Sequence: Synthetic oligonucleotide
  Antisense strand to SEQ ID NO: 562071
uagaucauugcucaagagu

SEQ ID NO: 562073 - RNA, 19 nt, Artificial Sequence
  Description of Artificial Sequence: Synthetic oligonucleotide
  Sense strand starting at position 3900 of SEQ ID NO: 318429
ucuagauauuguccugacu

SEQ ID NO: 562074 - RNA, 19 nt, Artificial Sequence
  Description of Artificial Sequence: Synthetic oligonucleotide
  Antisense strand to SEQ ID NO: 562073
agucaggacaauaucuaga

SEQ ID NO: 562075 - RNA, 19 nt, Artificial Sequence
  Description of Artificial Sequence: Synthetic oligonucleotide
  Sense strand starting at position 3903 of SEQ ID NO: 318429
agauauuguccugacucca

SEQ ID NO: 562076 - RNA, 19 nt, Artificial Sequence
  Description of Artificial Sequence: Synthetic oligonucleotide
  Antisense strand to SEQ ID NO: 562075
uggagucaggacaauaucu

SEQ ID NO: 562077 - RNA, 19 nt, Artificial Sequence
  Description of Artificial Sequence: Synthetic oligonucleotide
  Sense strand starting at position 3913 of SEQ ID NO: 318429
cugacuccagaauguagaa

SEQ ID NO: 562078 - RNA, 19 nt, Artificial Sequence
  Description of Artificial Sequence: Synthetic oligonucleotide
  Antisense strand to SEQ ID NO: 562077
uucuacauucuggagucag

SEQ ID NO: 562079 - RNA, 19 nt, Artificial Sequence
  Description of Artificial Sequence: Synthetic oligonucleotide
  Sense strand starting at position 3926 of SEQ ID NO: 318429
guagaaaggugauuacuua

SEQ ID NO: 562080 - RNA, 19 nt, Artificial Sequence
  Description of Artificial Sequence: Synthetic oligonucleotide
  Antisense strand to SEQ ID NO: 562079
uaaguaaucaccuuucuac

SEQ ID NO: 562081 - RNA, 19 nt, Artificial Sequence
  Description of Artificial Sequence: Synthetic oligonucleotide
  Sense strand starting at position 3934 of SEQ ID NO: 318429
gugauuacuuaugcuagaa

SEQ ID NO: 562082 - RNA, 19 nt, Artificial Sequence
  Description of Artificial Sequence: Synthetic oligonucleotide
  Antisense strand to SEQ ID NO: 562081
uucuagcauaaguaaucac

SEQ ID NO: 562083 - RNA, 19 nt, Artificial Sequence
  Description of Artificial Sequence: Synthetic oligonucleotide
  Sense strand starting at position 1026 of SEQ ID NO: 318430
ccacuuguaagguguuaga

SEQ ID NO: 562084 - RNA, 19 nt, Artificial Sequence
  Description of Artificial Sequence: Synthetic oligonucleotide
  Antisense strand to SEQ ID NO: 562083
ucuaacaccuuacaagugg

SEQ ID NO: 562085 - RNA, 19 nt, Artificial Sequence
  Description of Artificial Sequence: Synthetic oligonucleotide
  Sense strand starting at position 1059 of SEQ ID NO: 318430
acgauacacugauaagaca

SEQ ID NO: 562086 - RNA, 19 nt, Artificial Sequence
  Description of Artificial Sequence: Synthetic oligonucleotide
  Antisense strand to SEQ ID NO: 562085
ugucuuaucaguguaucgu

SEQ ID NO: 562087 - RNA, 19 nt, Artificial Sequence
  Description of Artificial Sequence: Synthetic oligonucleotide
  Sense strand starting at position 1090 of SEQ ID NO: 318430
cgauccuacuuucuggauu

SEQ ID NO: 562088 - RNA, 19 nt, Artificial Sequence
  Description of Artificial Sequence: Synthetic oligonucleotide
  Antisense strand to SEQ ID NO: 562087
aauccagaaaguaggaucg

SEQ ID NO: 562089 - RNA, 19 nt, Artificial Sequence
  Description of Artificial Sequence: Synthetic oligonucleotide
  Sense strand starting at position 1093 of SEQ ID NO: 318430
uccuacuuucuggauugua

SEQ ID NO: 562090 - RNA, 19 nt, Artificial Sequence
  Description of Artificial Sequence: Synthetic oligonucleotide
  Antisense strand to SEQ ID NO: 562089
uacaauccagaaaguagga

SEQ ID NO: 562091 - RNA, 19 nt, Artificial Sequence
  Description of Artificial Sequence: Synthetic oligonucleotide
  Sense strand starting at position 1101 of SEQ ID NO: 318430
ucuggauuguagccacuua

SEQ ID NO: 562092 - RNA, 19 nt, Artificial Sequence
  Description of Artificial Sequence: Synthetic oligonucleotide
  Antisense strand to SEQ ID NO: 562091
uaaguggcuacaauccaga

SEQ ID NO: 562093 - RNA, 19 nt, Artificial Sequence
  Description of Artificial Sequence: Synthetic oligonucleotide
  Sense strand starting at position 1148 of SEQ ID NO: 318430
ucgcgauacguccugccaa

SEQ ID NO: 562094 - RNA, 19 nt, Artificial Sequence
  Description of Artificial Sequence: Synthetic oligonucleotide
  Antisense strand to SEQ ID NO: 562093
uuggcaggacguaucgcga

SEQ ID NO: 562095 - RNA, 19 nt, Artificial Sequence
  Description of Artificial Sequence: Synthetic oligonucleotide
  Sense strand starting at position 1150 of SEQ ID NO: 318430
gcgauacguccugccaaca

SEQ ID NO: 562096 - RNA, 19 nt, Artificial Sequence
  Description of Artificial Sequence: Synthetic oligonucleotide
  Antisense strand to SEQ ID NO: 562095
uguuggcaggacguaucgc

SEQ ID NO: 562097 - RNA, 19 nt, Artificial Sequence
  Description of Artificial Sequence: Synthetic oligonucleotide
  Sense strand starting at position 1168 of SEQ ID NO: 318430
agcacacucuugcugacau

SEQ ID NO: 562098 - RNA, 19 nt, Artificial Sequence
  Description of Artificial Sequence: Synthetic oligonucleotide
  Antisense strand to SEQ ID NO: 562097
augucagcaagagugugcu

SEQ ID NO: 562099 - RNA, 19 nt, Artificial Sequence
  Description of Artificial Sequence: Synthetic oligonucleotide
  Sense strand starting at position 1240 of SEQ ID NO: 318430
cuccauugccaagaugaau

SEQ ID NO: 562100 - RNA, 19 nt, Artificial Sequence
  Description of Artificial Sequence: Synthetic oligonucleotide
  Antisense strand to SEQ ID NO: 562099
auucaucuuggcaauggag

SEQ ID NO: 562101 - RNA, 19 nt, Artificial Sequence
  Description of Artificial Sequence: Synthetic oligonucleotide
  Sense strand starting at position 1290 of SEQ ID NO: 318430
agugcuauucucgauagau

SEQ ID NO: 562102 - RNA, 19 nt, Artificial Sequence
  Description of Artificial Sequence: Synthetic oligonucleotide
  Antisense strand to SEQ ID NO: 562101
aucuaucgagaauagcacu

SEQ ID NO: 562103 - RNA, 19 nt, Artificial Sequence
  Description of Artificial Sequence: Synthetic oligonucleotide
  Sense strand starting at position 1292 of SEQ ID NO: 318430
ugcuauucucgauagauuc

SEQ ID NO: 562104 - RNA, 19 nt, Artificial Sequence
  Description of Artificial Sequence: Synthetic oligonucleotide
  Antisense strand to SEQ ID NO: 562103
gaaucuaucgagaauagca

SEQ ID NO: 562105 - RNA, 19 nt, Artificial Sequence
  Description of Artificial Sequence: Synthetic oligonucleotide
  Sense strand starting at position 2398 of SEQ ID NO: 318430
caacaucuagaucguggaa

SEQ ID NO: 562106 - RNA, 19 nt, Artificial Sequence
  Description of Artificial Sequence: Synthetic oligonucleotide
  Antisense strand to SEQ ID NO: 562105
uuccacgaucuagauguug

SEQ ID NO: 562107 - RNA, 19 nt, Artificial Sequence
  Description of Artificial Sequence: Synthetic oligonucleotide
  Sense strand starting at position 2432 of SEQ ID NO: 318430
uuaggauucuaccuagggu

SEQ ID NO: 562108 - RNA, 19 nt, Artificial Sequence
  Description of Artificial Sequence: Synthetic oligonucleotide
  Antisense strand to SEQ ID NO: 562107
acccuagguagaauccuaa

SEQ ID NO: 562109 - RNA, 19 nt, Artificial Sequence
  Description of Artificial Sequence: Synthetic oligonucleotide
  Sense strand starting at position 2872 of SEQ ID NO: 318430
ggccguguuauacucguua

SEQ ID NO: 562110 - RNA, 19 nt, Artificial Sequence
  Description of Artificial Sequence: Synthetic oligonucleotide
  Antisense strand to SEQ ID NO: 562109
uaacgaguauaacacggcc

SEQ ID NO: 562111 - RNA, 19 nt, Artificial Sequence
  Description of Artificial Sequence: Synthetic oligonucleotide
  Sense strand starting at position 2876 of SEQ ID NO: 318430
guguuauacucguuagacc

SEQ ID NO: 562112 - RNA, 19 nt, Artificial Sequence
  Description of Artificial Sequence: Synthetic oligonucleotide
  Antisense strand to SEQ ID NO: 562111
ggucuaacgaguauaacac

SEQ ID NO: 562113 - RNA, 19 nt, Artificial Sequence
  Description of Artificial Sequence: Synthetic oligonucleotide
  Sense strand starting at position 3032 of SEQ ID NO: 318430
uuugacuucuugucuaaug

SEQ ID NO: 562114 - RNA, 19 nt, Artificial Sequence
  Description of Artificial Sequence: Synthetic oligonucleotide
  Antisense strand to SEQ ID NO: 562113
cauuagacaagaagucaaa

SEQ ID NO: 562115 - RNA, 19 nt, Artificial Sequence
  Description of Artificial Sequence: Synthetic oligonucleotide
  Sense strand starting at position 3034 of SEQ ID NO: 318430
ugacuucuugucuaauggu

SEQ ID NO: 562116 - RNA, 19 nt, Artificial Sequence
  Description of Artificial Sequence: Synthetic oligonucleotide
  Antisense strand to SEQ ID NO: 562115
accauuagacaagaaguca

SEQ ID NO: 562117 - RNA, 19 nt, Artificial Sequence
  Description of Artificial Sequence: Synthetic oligonucleotide
  Sense strand starting at position 3165 of SEQ ID NO: 318430
aagauuguguggccuuauu

SEQ ID NO: 562118 - RNA, 19 nt, Artificial Sequence
  Description of Artificial Sequence: Synthetic oligonucleotide
  Antisense strand to SEQ ID NO: 562117
aauaaggccacacaaucuu

SEQ ID NO: 562119 - RNA, 19 nt, Artificial Sequence
  Description of Artificial Sequence: Synthetic oligonucleotide
  Sense strand starting at position 3262 of SEQ ID NO: 318430
guaaguaaauaacuggauu

SEQ ID NO: 562120 - RNA, 19 nt, Artificial Sequence
  Description of Artificial Sequence: Synthetic oligonucleotide
  Antisense strand to SEQ ID NO: 562119
aauccaguuauuuacuuac

SEQ ID NO: 562121 - RNA, 19 nt, Artificial Sequence
  Description of Artificial Sequence: Synthetic oligonucleotide
  Sense strand starting at position 3299 of SEQ ID NO: 318430
guacccauuucuuaaaugu

SEQ ID NO: 562122 - RNA, 19 nt, Artificial Sequence
  Description of Artificial Sequence: Synthetic oligonucleotide
  Antisense strand to SEQ ID NO: 562121
acauuuaagaaauggguac

SEQ ID NO: 562123 - RNA, 19 nt, Artificial Sequence
  Description of Artificial Sequence: Synthetic oligonucleotide
  Sense strand starting at position 3309 of SEQ ID NO: 318430
cuuaaauguuauuucguga

SEQ ID NO: 562124 - RNA, 19 nt, Artificial Sequence
  Description of Artificial Sequence: Synthetic oligonucleotide
  Antisense strand to SEQ ID NO: 562123
ucacgaaauaacauuuaag

SEQ ID NO: 562125 - RNA, 19 nt, Artificial Sequence
  Description of Artificial Sequence: Synthetic oligonucleotide
  Sense strand starting at position 3312 of SEQ ID NO: 318430
aaauguuauuucgugaacg

SEQ ID NO: 562126 - RNA, 19 nt, Artificial Sequence
  Description of Artificial Sequence: Synthetic oligonucleotide
  Antisense strand to SEQ ID NO: 562125
cguucacgaaauaacauuu

SEQ ID NO: 562127 - RNA, 19 nt, Artificial Sequence
  Description of Artificial Sequence: Synthetic oligonucleotide
  Sense strand starting at position 3369 of SEQ ID NO: 318430
acacauggguaauaagaga

SEQ ID NO: 562128 - RNA, 19 nt, Artificial Sequence
  Description of Artificial Sequence: Synthetic oligonucleotide
  Antisense strand to SEQ ID NO: 562127
ucucuuauuacccaugugu

SEQ ID NO: 562129 - RNA, 19 nt, Artificial Sequence
  Description of Artificial Sequence: Synthetic oligonucleotide
  Sense strand starting at position 3537 of SEQ ID NO: 318430
uuuguuagccaauauuaag

SEQ ID NO: 562130 - RNA, 19 nt, Artificial Sequence
  Description of Artificial Sequence: Synthetic oligonucleotide
  Antisense strand to SEQ ID NO: 562129
cuuaauauuggcuaacaaa

SEQ ID NO: 562131 - RNA, 19 nt, Artificial Sequence
  Description of Artificial Sequence: Synthetic oligonucleotide
  Sense strand starting at position 3543 of SEQ ID NO: 318430
agccaauauuaagauugau

SEQ ID NO: 562132 - RNA, 19 nt, Artificial Sequence
  Description of Artificial Sequence: Synthetic oligonucleotide
  Antisense strand to SEQ ID NO: 562131
aucaaucuuaauauuggcu

SEQ ID NO: 562133 - RNA, 19 nt, Artificial Sequence
  Description of Artificial Sequence: Synthetic oligonucleotide
  Sense strand starting at position 3546 of SEQ ID NO: 318430
caauauuaagauugauggu

SEQ ID NO: 562134 - RNA, 19 nt, Artificial Sequence
  Description of Artificial Sequence: Synthetic oligonucleotide
  Antisense strand to SEQ ID NO: 562133
accaucaaucuuaauauug

SEQ ID NO: 562135 - RNA, 19 nt, Artificial Sequence
  Description of Artificial Sequence: Synthetic oligonucleotide
  Sense strand starting at position 3555 of SEQ ID NO: 318430
gauugauggugauugguca

SEQ ID NO: 562136 - RNA, 19 nt, Artificial Sequence
  Description of Artificial Sequence: Synthetic oligonucleotide
  Antisense strand to SEQ ID NO: 562135
ugaccaaucaccaucaauc

SEQ ID NO: 562137 - RNA, 19 nt, Artificial Sequence
  Description of Artificial Sequence: Synthetic oligonucleotide
  Sense strand starting at position 3619 of SEQ ID NO: 318430
ugucgaugcuuccuuugaa

SEQ ID NO: 562138 - RNA, 19 nt, Artificial Sequence
  Description of Artificial Sequence: Synthetic oligonucleotide
  Antisense strand to SEQ ID NO: 562137
uucaaaggaagcaucgaca

SEQ ID NO: 562139 - RNA, 19 nt, Artificial Sequence
  Description of Artificial Sequence: Synthetic oligonucleotide
  Sense strand starting at position 3620 of SEQ ID NO: 318430
gucgaugcuuccuuugaac

SEQ ID NO: 562140 - RNA, 19 nt, Artificial Sequence
  Description of Artificial Sequence: Synthetic oligonucleotide
  Antisense strand to SEQ ID NO: 562139
guucaaaggaagcaucgac

SEQ ID NO: 562141 - RNA, 19 nt, Artificial Sequence
  Description of Artificial Sequence: Synthetic oligonucleotide
  Sense strand starting at position 3622 of SEQ ID NO: 318430
cgaugcuuccuuugaacag

SEQ ID NO: 562142 - RNA, 19 nt, Artificial Sequence
  Description of Artificial Sequence: Synthetic oligonucleotide
  Antisense strand to SEQ ID NO: 562141
cuguucaaaggaagcaucg

SEQ ID NO: 562143 - RNA, 19 nt, Artificial Sequence
  Description of Artificial Sequence: Synthetic oligonucleotide
  Sense strand starting at position 3638 of SEQ ID NO: 318430
caguaaccucuaggauugu

SEQ ID NO: 562144 - RNA, 19 nt, Artificial Sequence
  Description of Artificial Sequence: Synthetic oligonucleotide
  Antisense strand to SEQ ID NO: 562143
acaauccuagagguuacug

SEQ ID NO: 562145 - RNA, 19 nt, Artificial Sequence
  Description of Artificial Sequence: Synthetic oligonucleotide
  Sense strand starting at position 3649 of SEQ ID NO: 318430
aggauugugucagcacaga

SEQ ID NO: 562146 - RNA, 19 nt, Artificial Sequence
  Description of Artificial Sequence: Synthetic oligonucleotide
  Antisense strand to SEQ ID NO: 562145
ucugugcugacacaauccu

SEQ ID NO: 562147 - RNA, 19 nt, Artificial Sequence
  Description of Artificial Sequence: Synthetic oligonucleotide
  Sense strand starting at position 3751 of SEQ ID NO: 318430
aguugcuugucaguaaaua

SEQ ID NO: 562148 - RNA, 19 nt, Artificial Sequence
  Description of Artificial Sequence: Synthetic oligonucleotide
  Antisense strand to SEQ ID NO: 562147
uauuuacugacaagcaacu

SEQ ID NO: 562149 - RNA, 19 nt, Artificial Sequence
  Description of Artificial Sequence: Synthetic oligonucleotide
  Sense strand starting at position 3752 of SEQ ID NO: 318430
guugcuugucaguaaauau

SEQ ID NO: 562150 - RNA, 19 nt, Artificial Sequence
  Description of Artificial Sequence: Synthetic oligonucleotide
  Antisense strand to SEQ ID NO: 562149
auauuuacugacaagcaac

SEQ ID NO: 562151 - RNA, 19 nt, Artificial Sequence
  Description of Artificial Sequence: Synthetic oligonucleotide
  Sense strand starting at position 3784 of SEQ ID NO: 318430
ugggaagucccuuauauuc

SEQ ID NO: 562152 - RNA, 19 nt, Artificial Sequence
  Description of Artificial Sequence: Synthetic oligonucleotide
  Antisense strand to SEQ ID NO: 562151
gaauauaagggacuuccca

SEQ ID NO: 562153 - RNA, 19 nt, Artificial Sequence
  Description of Artificial Sequence: Synthetic oligonucleotide
  Sense strand starting at position 3867 of SEQ ID NO: 318430
acaauugguugcuauuuau

SEQ ID NO: 562154 - RNA, 19 nt, Artificial Sequence
  Description of Artificial Sequence: Synthetic oligonucleotide
  Antisense strand to SEQ ID NO: 562153
auaaauagcaaccaauugu

SEQ ID NO: 562155 - RNA, 19 nt, Artificial Sequence
  Description of Artificial Sequence: Synthetic oligonucleotide
  Sense strand starting at position 3949 of SEQ ID NO: 318430
guaacuguuacagguauua

SEQ ID NO: 562156 - RNA, 19 nt, Artificial Sequence
  Description of Artificial Sequence: Synthetic oligonucleotide
  Antisense strand to SEQ ID NO: 562155
uaauaccuguaacaguuac

SEQ ID NO: 562157 - RNA, 19 nt, Artificial Sequence
  Description of Artificial Sequence: Synthetic oligonucleotide
  Sense strand starting at position 3959 of SEQ ID NO: 318430
cagguauuagcaugucauu

SEQ ID NO: 562158 - RNA, 19 nt, Artificial Sequence
  Description of Artificial Sequence: Synthetic oligonucleotide
  Antisense strand to SEQ ID NO: 562157
aaugacaugcuaauaccug

SEQ ID NO: 562159 - RNA, 19 nt, Artificial Sequence
  Description of Artificial Sequence: Synthetic oligonucleotide
  Sense strand starting at position 3964 of SEQ ID NO: 318430
auuagcaugucauugacaa

SEQ ID NO: 562160 - RNA, 19 nt, Artificial Sequence
  Description of Artificial Sequence: Synthetic oligonucleotide
  Antisense strand to SEQ ID NO: 562159
uugucaaugacaugcuaau

SEQ ID NO: 562161 - RNA, 19 nt, Artificial Sequence
  Description of Artificial Sequence: Synthetic oligonucleotide
  Sense strand starting at position 3965 of SEQ ID NO: 318430
uuagcaugucauugacaaa

SEQ ID NO: 562162 - RNA, 19 nt, Artificial Sequence
  Description of Artificial Sequence: Synthetic oligonucleotide
  Antisense strand to SEQ ID NO: 562161
uuugucaaugacaugcuaa

SEQ ID NO: 562163 - RNA, 19 nt, Artificial Sequence
  Description of Artificial Sequence: Synthetic oligonucleotide
  Sense strand starting at position 8 of SEQ ID NO: 318431
ggcuuauaggagugugauu

SEQ ID NO: 562164 - RNA, 19 nt, Artificial Sequence
  Description of Artificial Sequence: Synthetic oligonucleotide
  Antisense strand to SEQ ID NO: 562163
aaucacacuccuauaagcc

SEQ ID NO: 562165 - RNA, 19 nt, Artificial Sequence
  Description of Artificial Sequence: Synthetic oligonucleotide
  Sense strand starting at position 74 of SEQ ID NO: 318431
acaaguuuguguuccucaa

SEQ ID NO: 562166 - RNA, 19 nt, Artificial Sequence
  Description of Artificial Sequence: Synthetic oligonucleotide
  Antisense strand to SEQ ID NO: 562165
uugaggaacacaaacuugu

SEQ ID NO: 562167 - RNA, 19 nt, Artificial Sequence
  Description of Artificial Sequence: Synthetic oligonucleotide
  Sense strand starting at position 78 of SEQ ID NO: 318431
guuuguguuccucaaauac

SEQ ID NO: 562168 - RNA, 19 nt, Artificial Sequence
  Description of Artificial Sequence: Synthetic oligonucleotide
  Antisense strand to SEQ ID NO: 562167
guauuugaggaacacaaac

SEQ ID NO: 562169 - RNA, 19 nt, Artificial Sequence
  Description of Artificial Sequence: Synthetic oligonucleotide
  Sense strand starting at position 156 of SEQ ID NO: 318431
aaucuucuagucuggaguu

SEQ ID NO: 562170 - RNA, 19 nt, Artificial Sequence
  Description of Artificial Sequence: Synthetic oligonucleotide
  Antisense strand to SEQ ID NO: 562169
aacuccagacuagaagauu

SEQ ID NO: 562171 - RNA, 19 nt, Artificial Sequence
  Description of Artificial Sequence: Synthetic oligonucleotide
  Sense strand starting at position 158 of SEQ ID NO: 318431
ucuucuagucuggaguuga

SEQ ID NO: 562172 - RNA, 19 nt, Artificial Sequence
  Description of Artificial Sequence: Synthetic oligonucleotide
  Antisense strand to SEQ ID NO: 562171
ucaacuccagacuagaaga

SEQ ID NO: 562173 - RNA, 19 nt, Artificial Sequence
  Description of Artificial Sequence: Synthetic oligonucleotide
  Sense strand starting at position 171 of SEQ ID NO: 318431
aguugacaggucuacuaca

SEQ ID NO: 562174 - RNA, 19 nt, Artificial Sequence
  Description of Artificial Sequence: Synthetic oligonucleotide
  Antisense strand to SEQ ID NO: 562173
uguaguagaccugucaacu

SEQ ID NO: 562175 - RNA, 19 nt, Artificial Sequence
  Description of Artificial Sequence: Synthetic oligonucleotide
  Sense strand starting at position 221 of SEQ ID NO: 318431
cggcauguuccugcuuuau

SEQ ID NO: 562176 - RNA, 19 nt, Artificial Sequence
  Description of Artificial Sequence: Synthetic oligonucleotide
  Antisense strand to SEQ ID NO: 562175
auaaagcaggaacaugccg

SEQ ID NO: 562177 - RNA, 19 nt, Artificial Sequence
  Description of Artificial Sequence: Synthetic oligonucleotide
  Sense strand starting at position 248 of SEQ ID NO: 318431
acauaugcaugccuagaau

SEQ ID NO: 562178 - RNA, 19 nt, Artificial Sequence
  Description of Artificial Sequence: Synthetic oligonucleotide
  Antisense strand to SEQ ID NO: 562177
auucuaggcaugcauaugu

SEQ ID NO: 562179 - RNA, 19 nt, Artificial Sequence
  Description of Artificial Sequence: Synthetic oligonucleotide
  Sense strand starting at position 287 of SEQ ID NO: 318431
uucgguucugugucucauu

SEQ ID NO: 562180 - RNA, 19 nt, Artificial Sequence
  Description of Artificial Sequence: Synthetic oligonucleotide
  Antisense strand to SEQ ID NO: 562179
aaugagacacagaaccgaa

SEQ ID NO: 562181 - RNA, 19 nt, Artificial Sequence
  Description of Artificial Sequence: Synthetic oligonucleotide
  Sense strand starting at position 370 of SEQ ID NO: 318431
agaagacaucuuuguccua

SEQ ID NO: 562182 - RNA, 19 nt, Artificial Sequence
  Description of Artificial Sequence: Synthetic oligonucleotide
  Antisense strand to SEQ ID NO: 562181
uaggacaaagaugucuucu

SEQ ID NO: 562183 - RNA, 19 nt, Artificial Sequence
  Description of Artificial Sequence: Synthetic oligonucleotide
  Sense strand starting at position 456 of SEQ ID NO: 318431
aguguuaauccacaugcua

SEQ ID NO: 562184 - RNA, 19 nt, Artificial Sequence
  Description of Artificial Sequence: Synthetic oligonucleotide
  Antisense strand to SEQ ID NO: 562183
uagcauguggauuaacacu

SEQ ID NO: 562185 - RNA, 19 nt, Artificial Sequence
  Description of Artificial Sequence: Synthetic oligonucleotide
  Sense strand starting at position 496 of SEQ ID NO: 318431
uccucucaucugggauaca

SEQ ID NO: 562186 - RNA, 19 nt, Artificial Sequence
  Description of Artificial Sequence: Synthetic oligonucleotide
  Antisense strand to SEQ ID NO: 562185
uguaucccagaugagagga

SEQ ID NO: 562187 - RNA, 19 nt, Artificial Sequence
  Description of Artificial Sequence: Synthetic oligonucleotide
  Sense strand starting at position 671 of SEQ ID NO: 318431
auguaucuguaaguggaua

SEQ ID NO: 562188 - RNA, 19 nt, Artificial Sequence
  Description of Artificial Sequence: Synthetic oligonucleotide
  Antisense strand to SEQ ID NO: 562187
uauccacuuacagauacau

SEQ ID NO: 562189 - RNA, 19 nt, Artificial Sequence
  Description of Artificial Sequence: Synthetic oligonucleotide
  Sense strand starting at position 729 of SEQ ID NO: 318431
auguaucuguaaguagaca

SEQ ID NO: 562190 - RNA, 19 nt, Artificial Sequence
  Description of Artificial Sequence: Synthetic oligonucleotide
  Antisense strand to SEQ ID NO: 562189
ugucuacuuacagauacau

SEQ ID NO: 562191 - RNA, 19 nt, Artificial Sequence
  Description of Artificial Sequence: Synthetic oligonucleotide
  Sense strand starting at position 871 of SEQ ID NO: 318431
aucugagucuccuccacua

SEQ ID NO: 562192 - RNA, 19 nt, Artificial Sequence
  Description of Artificial Sequence: Synthetic oligonucleotide
  Antisense strand to SEQ ID NO: 562191
uaguggaggagacucagau

SEQ ID NO: 562193 - RNA, 19 nt, Artificial Sequence
  Description of Artificial Sequence: Synthetic oligonucleotide
  Sense strand starting at position 927 of SEQ ID NO: 318431
ggaagaaagcuacguagga

SEQ ID NO: 562194 - RNA, 19 nt, Artificial Sequence
  Description of Artificial Sequence: Synthetic oligonucleotide
  Antisense strand to SEQ ID NO: 562193
uccuacguagcuuucuucc

SEQ ID NO: 562195 - RNA, 19 nt, Artificial Sequence
  Description of Artificial Sequence: Synthetic oligonucleotide
  Sense strand starting at position 928 of SEQ ID NO: 318431
gaagaaagcuacguaggau

SEQ ID NO: 562196 - RNA, 19 nt, Artificial Sequence
  Description of Artificial Sequence: Synthetic oligonucleotide
  Antisense strand to SEQ ID NO: 562195
auccuacguagcuuucuuc

SEQ ID NO: 562197 - RNA, 19 nt, Artificial Sequence
  Description of Artificial Sequence: Synthetic oligonucleotide
  Sense strand starting at position 931 of SEQ ID NO: 318431
gaaagcuacguaggaugau

SEQ ID NO: 562198 - RNA, 19 nt, Artificial Sequence
  Description of Artificial Sequence: Synthetic oligonucleotide
  Antisense strand to SEQ ID NO: 562197
aucauccuacguagcuuuc

SEQ ID NO: 562199 - RNA, 19 nt, Artificial Sequence
  Description of Artificial Sequence: Synthetic oligonucleotide
  Sense strand starting at position 943 of SEQ ID NO: 318431
ggaugaugccaauagucau

SEQ ID NO: 562200 - RNA, 19 nt, Artificial Sequence
  Description of Artificial Sequence: Synthetic oligonucleotide
  Antisense strand to SEQ ID NO: 562199
augacuauuggcaucaucc

SEQ ID NO: 562201 - RNA, 19 nt, Artificial Sequence
  Description of Artificial Sequence: Synthetic oligonucleotide
  Sense strand starting at position 1189 of SEQ ID NO: 318431
uaaggcuuugauugcugaa

SEQ ID NO: 562202 - RNA, 19 nt, Artificial Sequence
  Description of Artificial Sequence: Synthetic oligonucleotide
  Antisense strand to SEQ ID NO: 562201
uucagcaaucaaagccuua

SEQ ID NO: 562203 - RNA, 19 nt, Artificial Sequence
  Description of Artificial Sequence: Synthetic oligonucleotide
  Sense strand starting at position 1191 of SEQ ID NO: 318431
aggcuuugauugcugaaga

SEQ ID NO: 562204 - RNA, 19 nt, Artificial Sequence
  Description of Artificial Sequence: Synthetic oligonucleotide
  Antisense strand to SEQ ID NO: 562203
ucuucagcaaucaaagccu

SEQ ID NO: 562205 - RNA, 19 nt, Artificial Sequence
  Description of Artificial Sequence: Synthetic oligonucleotide
  Sense strand starting at position 1323 of SEQ ID NO: 318431
uggcuaugauaggccuaau

SEQ ID NO: 562206 - RNA, 19 nt, Artificial Sequence
  Description of Artificial Sequence: Synthetic oligonucleotide
  Antisense strand to SEQ ID NO: 562205
auuaggccuaucauagcca

SEQ ID NO: 562207 - RNA, 19 nt, Artificial Sequence
  Description of Artificial Sequence: Synthetic oligonucleotide
  Sense strand starting at position 1326 of SEQ ID NO: 318431
cuaugauaggccuaauagc

SEQ ID NO: 562208 - RNA, 19 nt, Artificial Sequence
  Description of Artificial Sequence: Synthetic oligonucleotide
  Antisense strand to SEQ ID NO: 562207
gcuauuaggccuaucauag

SEQ ID NO: 562209 - RNA, 19 nt, Artificial Sequence
  Description of Artificial Sequence: Synthetic oligonucleotide
  Sense strand starting at position 1334 of SEQ ID NO: 318431
ggccuaauagcagagauuc

SEQ ID NO: 562210 - RNA, 19 nt, Artificial Sequence
  Description of Artificial Sequence: Synthetic oligonucleotide
  Antisense strand to SEQ ID NO: 562209
gaaucucugcuauuaggcc

SEQ ID NO: 562211 - RNA, 19 nt, Artificial Sequence
  Description of Artificial Sequence: Synthetic oligonucleotide
  Sense strand starting at position 2338 of SEQ ID NO: 318431
augguuuauugcuuuaaga

SEQ ID NO: 562212 - RNA, 19 nt, Artificial Sequence
  Description of Artificial Sequence: Synthetic oligonucleotide
  Antisense strand to SEQ ID NO: 562211
ucuuaaagcaauaaaccau

SEQ ID NO: 562213 - RNA, 19 nt, Artificial Sequence
  Description of Artificial Sequence: Synthetic oligonucleotide
  Sense strand starting at position 2340 of SEQ ID NO: 318431
gguuuauugcuuuaagaua

SEQ ID NO: 562214 - RNA, 19 nt, Artificial Sequence
  Description of Artificial Sequence: Synthetic oligonucleotide
  Antisense strand to SEQ ID NO: 562213
uaucuuaaagcaauaaacc

SEQ ID NO: 562215 - RNA, 19 nt, Artificial Sequence
  Description of Artificial Sequence: Synthetic oligonucleotide
  Sense strand starting at position 2426 of SEQ ID NO: 318431
aaccaauguugggucuaaa

SEQ ID NO: 562216 - RNA, 19 nt, Artificial Sequence
  Description of Artificial Sequence: Synthetic oligonucleotide
  Antisense strand to SEQ ID NO: 562215
uuuagacccaacauugguu

SEQ ID NO: 562217 - RNA, 19 nt, Artificial Sequence
  Description of Artificial Sequence: Synthetic oligonucleotide
  Sense strand starting at position 2547 of SEQ ID NO: 318431
acugaucguucccuaaucu

SEQ ID NO: 562218 - RNA, 19 nt, Artificial Sequence
  Description of Artificial Sequence: Synthetic oligonucleotide
  Antisense strand to SEQ ID NO: 562217
agauuagggaacgaucagu

SEQ ID NO: 562219 - RNA, 19 nt, Artificial Sequence
  Description of Artificial Sequence: Synthetic oligonucleotide
  Sense strand starting at position 2548 of SEQ ID NO: 318431
cugaucguucccuaaucuu

SEQ ID NO: 562220 - RNA, 19 nt, Artificial Sequence
  Description of Artificial Sequence: Synthetic oligonucleotide
  Antisense strand to SEQ ID NO: 562219
aagauuagggaacgaucag

SEQ ID NO: 562221 - RNA, 19 nt, Artificial Sequence
  Description of Artificial Sequence: Synthetic oligonucleotide
  Sense strand starting at position 2615 of SEQ ID NO: 318431
ucacgaaucugucuuagga

SEQ ID NO: 562222 - RNA, 19 nt, Artificial Sequence
  Description of Artificial Sequence: Synthetic oligonucleotide
  Antisense strand to SEQ ID NO: 562221
uccuaagacagauucguga

SEQ ID NO: 562223 - RNA, 19 nt, Artificial Sequence
  Description of Artificial Sequence: Synthetic oligonucleotide
  Sense strand starting at position 2770 of SEQ ID NO: 318431
aagagaauaucagagagau

SEQ ID NO: 562224 - RNA, 19 nt, Artificial Sequence
  Description of Artificial Sequence: Synthetic oligonucleotide
  Antisense strand to SEQ ID NO: 562223
aucucucugauauucucuu

SEQ ID NO: 562225 - RNA, 19 nt, Artificial Sequence
  Description of Artificial Sequence: Synthetic oligonucleotide
  Sense strand starting at position 3033 of SEQ ID NO: 318431
ucacgaaaggcuugacacu

SEQ ID NO: 562226 - RNA, 19 nt, Artificial Sequence
  Description of Artificial Sequence: Synthetic oligonucleotide
  Antisense strand to SEQ ID NO: 562225
agugucaagccuuucguga

SEQ ID NO: 562227 - RNA, 19 nt, Artificial Sequence
  Description of Artificial Sequence: Synthetic oligonucleotide
  Sense strand starting at position 3034 of SEQ ID NO: 318431
cacgaaaggcuugacacua

SEQ ID NO: 562228 - RNA, 19 nt, Artificial Sequence
  Description of Artificial Sequence: Synthetic oligonucleotide
  Antisense strand to SEQ ID NO: 562227
uagugucaagccuuucgug

SEQ ID NO: 562229 - RNA, 19 nt, Artificial Sequence
  Description of Artificial Sequence: Synthetic oligonucleotide
  Sense strand starting at position 3168 of SEQ ID NO: 318431
cuauuaaaugcuggacauu

SEQ ID NO: 562230 - RNA, 19 nt, Artificial Sequence
  Description of Artificial Sequence: Synthetic oligonucleotide
  Antisense strand to SEQ ID NO: 562229
aauguccagcauuuaauag

SEQ ID NO: 562231 - RNA, 19 nt, Artificial Sequence
  Description of Artificial Sequence: Synthetic oligonucleotide
  Sense strand starting at position 3632 of SEQ ID NO: 318431
gcacuuagucccuaaucag

SEQ ID NO: 562232 - RNA, 19 nt, Artificial Sequence
  Description of Artificial Sequence: Synthetic oligonucleotide
  Antisense strand to SEQ ID NO: 562231
cugauuagggacuaagugc

SEQ ID NO: 562233 - RNA, 19 nt, Artificial Sequence
  Description of Artificial Sequence: Synthetic oligonucleotide
  Sense strand starting at position 3635 of SEQ ID NO: 318431
cuuagucccuaaucaguuu

SEQ ID NO: 562234 - RNA, 19 nt, Artificial Sequence
  Description of Artificial Sequence: Synthetic oligonucleotide
  Antisense strand to SEQ ID NO: 562233
aaacugauuagggacuaag

SEQ ID NO: 562235 - RNA, 19 nt, Artificial Sequence
  Description of Artificial Sequence: Synthetic oligonucleotide
  Sense strand starting at position 3767 of SEQ ID NO: 318431
uguccugcgcuuucugauu

SEQ ID NO: 562236 - RNA, 19 nt, Artificial Sequence
  Description of Artificial Sequence: Synthetic oligonucleotide
  Antisense strand to SEQ ID NO: 562235
aaucagaaagcgcaggaca

SEQ ID NO: 562237 - RNA, 19 nt, Artificial Sequence
  Description of Artificial Sequence: Synthetic oligonucleotide
  Sense strand starting at position 3779 of SEQ ID NO: 318431
ucugauuccucuucgagau

SEQ ID NO: 562238 - RNA, 19 nt, Artificial Sequence
  Description of Artificial Sequence: Synthetic oligonucleotide
  Antisense strand to SEQ ID NO: 562237
aucucgaagaggaaucaga

SEQ ID NO: 562239 - RNA, 19 nt, Artificial Sequence
  Description of Artificial Sequence: Synthetic oligonucleotide
  Sense strand starting at position 3780 of SEQ ID NO: 318431
cugauuccucuucgagaug

SEQ ID NO: 562240 - RNA, 19 nt, Artificial Sequence
  Description of Artificial Sequence: Synthetic oligonucleotide
  Antisense strand to SEQ ID NO: 562239
caucucgaagaggaaucag

SEQ ID NO: 562241 - RNA, 19 nt, Artificial Sequence
  Description of Artificial Sequence: Synthetic oligonucleotide
  Sense strand starting at position 3974 of SEQ ID NO: 318431
guuccuaaacuccagguau

SEQ ID NO: 562242 - RNA, 19 nt, Artificial Sequence
  Description of Artificial Sequence: Synthetic oligonucleotide
  Antisense strand to SEQ ID NO: 562241
auaccuggaguuuaggaac

SEQ ID NO: 562243 - RNA, 19 nt, Artificial Sequence
  Description of Artificial Sequence: Synthetic oligonucleotide
  Sense strand starting at position 53 of SEQ ID NO: 318432
aaucuucuagucuggaguu

SEQ ID NO: 562244 - RNA, 19 nt, Artificial Sequence
  Description of Artificial Sequence: Synthetic oligonucleotide
  Antisense strand to SEQ ID NO: 562243
aacuccagacuagaagauu

SEQ ID NO: 562245 - RNA, 19 nt, Artificial Sequence
  Description of Artificial Sequence: Synthetic oligonucleotide
  Sense strand starting at position 55 of SEQ ID NO: 318432
ucuucuagucuggaguuga

SEQ ID NO: 562246 - RNA, 19 nt, Artificial Sequence
  Description of Artificial Sequence: Synthetic oligonucleotide
  Antisense strand to SEQ ID NO: 562245
ucaacuccagacuagaaga

SEQ ID NO: 562247 - RNA, 19 nt, Artificial Sequence
  Description of Artificial Sequence: Synthetic oligonucleotide
  Sense strand starting at position 68 of SEQ ID NO: 318432
aguugacaggucuacuaca

SEQ ID NO: 562248 - RNA, 19 nt, Artificial Sequence
  Description of Artificial Sequence: Synthetic oligonucleotide
  Antisense strand to SEQ ID NO: 562247
uguaguagaccugucaacu

SEQ ID NO: 562249 - RNA, 19 nt, Artificial Sequence
  Description of Artificial Sequence: Synthetic oligonucleotide
  Sense strand starting at position 118 of SEQ ID NO: 318432
cggcauguuccugcuuuau

SEQ ID NO: 562250 - RNA, 19 nt, Artificial Sequence
  Description of Artificial Sequence: Synthetic oligonucleotide
  Antisense strand to SEQ ID NO: 562249
auaaagcaggaacaugccg

SEQ ID NO: 562251 - RNA, 19 nt, Artificial Sequence
  Description of Artificial Sequence: Synthetic oligonucleotide
  Sense strand starting at position 145 of SEQ ID NO: 318432
acauaugcaugccuagaau

SEQ ID NO: 562252 - RNA, 19 nt, Artificial Sequence
  Description of Artificial Sequence: Synthetic oligonucleotide
  Antisense strand to SEQ ID NO: 562251
auucuaggcaugcauaugu

SEQ ID NO: 562253 - RNA, 19 nt, Artificial Sequence
  Description of Artificial Sequence: Synthetic oligonucleotide
  Sense strand starting at position 184 of SEQ ID NO: 318432
uucgguucugugucucauu

SEQ ID NO: 562254 - RNA, 19 nt, Artificial Sequence
  Description of Artificial Sequence: Synthetic oligonucleotide
  Antisense strand to SEQ ID NO: 562253
aaugagacacagaaccgaa

SEQ ID NO: 562255 - RNA, 19 nt, Artificial Sequence
  Description of Artificial Sequence: Synthetic oligonucleotide
  Sense strand starting at position 267 of SEQ ID NO: 318432
agaagacaucuuuguccua

SEQ ID NO: 562256 - RNA, 19 nt, Artificial Sequence
  Description of Artificial Sequence: Synthetic oligonucleotide
  Antisense strand to SEQ ID NO: 562255
uaggacaaagaugucuucu

SEQ ID NO: 562257 - RNA, 19 nt, Artificial Sequence
  Description of Artificial Sequence: Synthetic oligonucleotide
  Sense strand starting at position 353 of SEQ ID NO: 318432
aguguuaauccacaugcua

SEQ ID NO: 562258 - RNA, 19 nt, Artificial Sequence
  Description of Artificial Sequence: Synthetic oligonucleotide
  Antisense strand to SEQ ID NO: 562257
uagcauguggauuaacacu

SEQ ID NO: 562259 - RNA, 19 nt, Artificial Sequence
  Description of Artificial Sequence: Synthetic oligonucleotide
  Sense strand starting at position 393 of SEQ ID NO: 318432
uccucucaucugggauaca

SEQ ID NO: 562260 - RNA, 19 nt, Artificial Sequence
  Description of Artificial Sequence: Synthetic oligonucleotide
  Antisense strand to SEQ ID NO: 562259
uguaucccagaugagagga

SEQ ID NO: 562261 - RNA, 19 nt, Artificial Sequence
  Description of Artificial Sequence: Synthetic oligonucleotide
  Sense strand starting at position 568 of SEQ ID NO: 318432
auguaucuguaaguggaua

SEQ ID NO: 562262 - RNA, 19 nt, Artificial Sequence
  Description of Artificial Sequence: Synthetic oligonucleotide
  Antisense strand to SEQ ID NO: 562261
uauccacuuacagauacau

SEQ ID NO: 562263 - RNA, 19 nt, Artificial Sequence
  Description of Artificial Sequence: Synthetic oligonucleotide
  Sense strand starting at position 622 of SEQ ID NO: 318432
caguauguaucuguaagua

SEQ ID NO: 562264 - RNA, 19 nt, Artificial Sequence
  Description of Artificial Sequence: Synthetic oligonucleotide
  Antisense strand to SEQ ID NO: 562263
uacuuacagauacauacug

SEQ ID NO: 562265 - RNA, 19 nt, Artificial Sequence
  Description of Artificial Sequence: Synthetic oligonucleotide
  Sense strand starting at position 626 of SEQ ID NO: 318432
auguaucuguaaguagaca

SEQ ID NO: 562266 - RNA, 19 nt, Artificial Sequence
  Description of Artificial Sequence: Synthetic oligonucleotide
  Antisense strand to SEQ ID NO: 562265
ugucuacuuacagauacau

SEQ ID NO: 562267 - RNA, 19 nt, Artificial Sequence
  Description of Artificial Sequence: Synthetic oligonucleotide
  Sense strand starting at position 768 of SEQ ID NO: 318432
aucugagucuccuccacua

SEQ ID NO: 562268 - RNA, 19 nt, Artificial Sequence
  Description of Artificial Sequence: Synthetic oligonucleotide
  Antisense strand to SEQ ID NO: 562267
uaguggaggagacucagau

SEQ ID NO: 562269 - RNA, 19 nt, Artificial Sequence
  Description of Artificial Sequence: Synthetic oligonucleotide
  Sense strand starting at position 824 of SEQ ID NO: 318432
ggaagaaagcuacguagga

SEQ ID NO: 562270 - RNA, 19 nt, Artificial Sequence
  Description of Artificial Sequence: Synthetic oligonucleotide
  Antisense strand to SEQ ID NO: 562269
uccuacguagcuuucuucc

SEQ ID NO: 562271 - RNA, 19 nt, Artificial Sequence
  Description of Artificial Sequence: Synthetic oligonucleotide
  Sense strand starting at position 825 of SEQ ID NO: 318432
gaagaaagcuacguaggau

SEQ ID NO: 562272 - RNA, 19 nt, Artificial Sequence
  Description of Artificial Sequence: Synthetic oligonucleotide
  Antisense strand to SEQ ID NO: 562271
auccuacguagcuuucuuc

SEQ ID NO: 562273 - RNA, 19 nt, Artificial Sequence
  Description of Artificial Sequence: Synthetic oligonucleotide
  Sense strand starting at position 828 of SEQ ID NO: 318432
gaaagcuacguaggaugau

SEQ ID NO: 562274 - RNA, 19 nt, Artificial Sequence
  Description of Artificial Sequence: Synthetic oligonucleotide
  Antisense strand to SEQ ID NO: 562273
aucauccuacguagcuuuc

SEQ ID NO: 562275 - RNA, 19 nt, Artificial Sequence
  Description of Artificial Sequence: Synthetic oligonucleotide
  Sense strand starting at position 840 of SEQ ID NO: 318432
ggaugaugccaauagucau

SEQ ID NO: 562276 - RNA, 19 nt, Artificial Sequence
  Description of Artificial Sequence: Synthetic oligonucleotide
  Antisense strand to SEQ ID NO: 562275
augacuauuggcaucaucc

SEQ ID NO: 562277 - RNA, 19 nt, Artificial Sequence
  Description of Artificial Sequence: Synthetic oligonucleotide
  Sense strand starting at position 1086 of SEQ ID NO: 318432
uaaggcuuugauugcugaa

SEQ ID NO: 562278 - RNA, 19 nt, Artificial Sequence
  Description of Artificial Sequence: Synthetic oligonucleotide
  Antisense strand to SEQ ID NO: 562277
uucagcaaucaaagccuua

SEQ ID NO: 562279 - RNA, 19 nt, Artificial Sequence
  Description of Artificial Sequence: Synthetic oligonucleotide
  Sense strand starting at position 1088 of SEQ ID NO: 318432
aggcuuugauugcugaaga

SEQ ID NO: 562280 - RNA, 19 nt, Artificial Sequence
  Description of Artificial Sequence: Synthetic oligonucleotide
  Antisense strand to SEQ ID NO: 562279
ucuucagcaaucaaagccu

SEQ ID NO: 562281 - RNA, 19 nt, Artificial Sequence
  Description of Artificial Sequence: Synthetic oligonucleotide
  Sense strand starting at position 1220 of SEQ ID NO: 318432
uggcuaugauaggccuaau

SEQ ID NO: 562282 - RNA, 19 nt, Artificial Sequence
  Description of Artificial Sequence: Synthetic oligonucleotide
  Antisense strand to SEQ ID NO: 562281
auuaggccuaucauagcca

SEQ ID NO: 562283 - RNA, 19 nt, Artificial Sequence
  Description of Artificial Sequence: Synthetic oligonucleotide
  Sense strand starting at position 1223 of SEQ ID NO: 318432
cuaugauaggccuaauagc

SEQ ID NO: 562284 - RNA, 19 nt, Artificial Sequence
  Description of Artificial Sequence: Synthetic oligonucleotide
  Antisense strand to SEQ ID NO: 562283
gcuauuaggccuaucauag

SEQ ID NO: 562285 - RNA, 19 nt, Artificial Sequence
  Description of Artificial Sequence: Synthetic oligonucleotide
  Sense strand starting at position 1231 of SEQ ID NO: 318432
ggccuaauagcagagauuc

SEQ ID NO: 562286 - RNA, 19 nt, Artificial Sequence
  Description of Artificial Sequence: Synthetic oligonucleotide
  Antisense strand to SEQ ID NO: 562285
gaaucucugcuauuaggcc

SEQ ID NO: 562287 - RNA, 19 nt, Artificial Sequence
  Description of Artificial Sequence: Synthetic oligonucleotide
  Sense strand starting at position 2235 of SEQ ID NO: 318432
augguuuauugcuuuaaga

SEQ ID NO: 562288 - RNA, 19 nt, Artificial Sequence
  Description of Artificial Sequence: Synthetic oligonucleotide
  Antisense strand to SEQ ID NO: 562287
ucuuaaagcaauaaaccau

SEQ ID NO: 562289 - RNA, 19 nt, Artificial Sequence
  Description of Artificial Sequence: Synthetic oligonucleotide
  Sense strand starting at position 2237 of SEQ ID NO: 318432
gguuuauugcuuuaagaua

SEQ ID NO: 562290 - RNA, 19 nt, Artificial Sequence
  Description of Artificial Sequence: Synthetic oligonucleotide
  Antisense strand to SEQ ID NO: 562289
uaucuuaaagcaauaaacc

SEQ ID NO: 562291 - RNA, 19 nt, Artificial Sequence
  Description of Artificial Sequence: Synthetic oligonucleotide
  Sense strand starting at position 2323 of SEQ ID NO: 318432
aaccaauguugggucuaaa

SEQ ID NO: 562292 - RNA, 19 nt, Artificial Sequence
  Description of Artificial Sequence: Synthetic oligonucleotide
  Antisense strand to SEQ ID NO: 562291
uuuagacccaacauugguu

SEQ ID NO: 562293 - RNA, 19 nt, Artificial Sequence
  Description of Artificial Sequence: Synthetic oligonucleotide
  Sense strand starting at position 2440 of SEQ ID NO: 318432
acgaacugaucguucccua

SEQ ID NO: 562294 - RNA, 19 nt, Artificial Sequence
  Description of Artificial Sequence: Synthetic oligonucleotide
  Antisense strand to SEQ ID NO: 562293
uagggaacgaucaguucgu

SEQ ID NO: 562295 - RNA, 19 nt, Artificial Sequence
  Description of Artificial Sequence: Synthetic oligonucleotide
  Sense strand starting at position 2444 of SEQ ID NO: 318432
acugaucguucccuaaucu

SEQ ID NO: 562296 - RNA, 19 nt, Artificial Sequence
  Description of Artificial Sequence: Synthetic oligonucleotide
  Antisense strand to SEQ ID NO: 562295
agauuagggaacgaucagu

SEQ ID NO: 562297 - RNA, 19 nt, Artificial Sequence
  Description of Artificial Sequence: Synthetic oligonucleotide
  Sense strand starting at position 2445 of SEQ ID NO: 318432
cugaucguucccuaaucuu

SEQ ID NO: 562298 - RNA, 19 nt, Artificial Sequence
  Description of Artificial Sequence: Synthetic oligonucleotide
  Antisense strand to SEQ ID NO: 562297
aagauuagggaacgaucag

SEQ ID NO: 562299 - RNA, 19 nt, Artificial Sequence
  Description of Artificial Sequence: Synthetic oligonucleotide
  Sense strand starting at position 2512 of SEQ ID NO: 318432
ucacgaaucugucuuagga

SEQ ID NO: 562300 - RNA, 19 nt, Artificial Sequence
  Description of Artificial Sequence: Synthetic oligonucleotide
  Antisense strand to SEQ ID NO: 562299
uccuaagacagauucguga

SEQ ID NO: 562301 - RNA, 19 nt, Artificial Sequence
  Description of Artificial Sequence: Synthetic oligonucleotide
  Sense strand starting at position 2667 of SEQ ID NO: 318432
aagagaauaucagagagau

SEQ ID NO: 562302 - RNA, 19 nt, Artificial Sequence
  Description of Artificial Sequence: Synthetic oligonucleotide
  Antisense strand to SEQ ID NO: 562301
aucucucugauauucucuu

SEQ ID NO: 562303 - RNA, 19 nt, Artificial Sequence
  Description of Artificial Sequence: Synthetic oligonucleotide
  Sense strand starting at position 2930 of SEQ ID NO: 318432
ucacgaaaggcuugacacu

SEQ ID NO: 562304 - RNA, 19 nt, Artificial Sequence
  Description of Artificial Sequence: Synthetic oligonucleotide
  Antisense strand to SEQ ID NO: 562303
agugucaagccuuucguga

SEQ ID NO: 562305 - RNA, 19 nt, Artificial Sequence
  Description of Artificial Sequence: Synthetic oligonucleotide
  Sense strand starting at position 2931 of SEQ ID NO: 318432
cacgaaaggcuugacacua

SEQ ID NO: 562306 - RNA, 19 nt, Artificial Sequence
  Description of Artificial Sequence: Synthetic oligonucleotide
  Antisense strand to SEQ ID NO: 562305
uagugucaagccuuucgug

SEQ ID NO: 562307 - RNA, 19 nt, Artificial Sequence
  Description of Artificial Sequence: Synthetic oligonucleotide
  Sense strand starting at position 3065 of SEQ ID NO: 318432
cuauuaaaugcuggacauu

SEQ ID NO: 562308 - RNA, 19 nt, Artificial Sequence
  Description of Artificial Sequence: Synthetic oligonucleotide
  Antisense strand to SEQ ID NO: 562307
aauguccagcauuuaauag

SEQ ID NO: 562309 - RNA, 19 nt, Artificial Sequence
  Description of Artificial Sequence: Synthetic oligonucleotide
  Sense strand starting at position 3529 of SEQ ID NO: 318432
gcacuuagucccuaaucag

SEQ ID NO: 562310 - RNA, 19 nt, Artificial Sequence
  Description of Artificial Sequence: Synthetic oligonucleotide
  Antisense strand to SEQ ID NO: 562309
cugauuagggacuaagugc

SEQ ID NO: 562311 - RNA, 19 nt, Artificial Sequence
  Description of Artificial Sequence: Synthetic oligonucleotide
  Sense strand starting at position 3532 of SEQ ID NO: 318432
cuuagucccuaaucaguuu

SEQ ID NO: 562312 - RNA, 19 nt, Artificial Sequence
  Description of Artificial Sequence: Synthetic oligonucleotide
  Antisense strand to SEQ ID NO: 562311
aaacugauuagggacuaag

SEQ ID NO: 562313 - RNA, 19 nt, Artificial Sequence
  Description of Artificial Sequence: Synthetic oligonucleotide
  Sense strand starting at position 3664 of SEQ ID NO: 318432
uguccugcgcuuucugauu

SEQ ID NO: 562314 - RNA, 19 nt, Artificial Sequence
  Description of Artificial Sequence: Synthetic oligonucleotide
  Antisense strand to SEQ ID NO: 562313
aaucagaaagcgcaggaca

SEQ ID NO: 562315 - RNA, 19 nt, Artificial Sequence
  Description of Artificial Sequence: Synthetic oligonucleotide
  Sense strand starting at position 3676 of SEQ ID NO: 318432
ucugauuccucuucgagau

SEQ ID NO: 562316 - RNA, 19 nt, Artificial Sequence
  Description of Artificial Sequence: Synthetic oligonucleotide
  Antisense strand to SEQ ID NO: 562315
aucucgaagaggaaucaga

SEQ ID NO: 562317 - RNA, 19 nt, Artificial Sequence
  Description of Artificial Sequence: Synthetic oligonucleotide
  Sense strand starting at position 3677 of SEQ ID NO: 318432
cugauuccucuucgagaug

SEQ ID NO: 562318 - RNA, 19 nt, Artificial Sequence
  Description of Artificial Sequence: Synthetic oligonucleotide
  Antisense strand to SEQ ID NO: 562317
caucucgaagaggaaucag

SEQ ID NO: 562319 - RNA, 19 nt, Artificial Sequence
  Description of Artificial Sequence: Synthetic oligonucleotide
  Sense strand starting at position 3871 of SEQ ID NO: 318432
guuccuaaacuccagguau

SEQ ID NO: 562320 - RNA, 19 nt, Artificial Sequence
  Description of Artificial Sequence: Synthetic oligonucleotide
  Antisense strand to SEQ ID NO: 562319
auaccuggaguuuaggaac

SEQ ID NO: 562321 - RNA, 19 nt, Artificial Sequence
  Description of Artificial Sequence: Synthetic oligonucleotide
  Sense strand starting at position 3920 of SEQ ID NO: 318432
cuauuauguugggcuauuu

SEQ ID NO: 562322 - RNA, 19 nt, Artificial Sequence
  Description of Artificial Sequence: Synthetic oligonucleotide
  Antisense strand to SEQ ID NO: 562321
aaauagcccaacauaauag

SEQ ID NO: 562323 - RNA, 19 nt, Artificial Sequence
  Description of Artificial Sequence: Synthetic oligonucleotide
  Sense strand starting at position 2075 of SEQ ID NO: 318433
ucgcgagaucugcgggaga

SEQ ID NO: 562324 - RNA, 19 nt, Artificial Sequence
  Description of Artificial Sequence: Synthetic oligonucleotide
  Antisense strand to SEQ ID NO: 562323
ucucccgcagaucucgcga

SEQ ID NO: 562325 - RNA, 19 nt, Artificial Sequence
  Description of Artificial Sequence: Synthetic oligonucleotide
  Sense strand starting at position 2077 of SEQ ID NO: 318433
gcgagaucugcgggagaga

SEQ ID NO: 562326 - RNA, 19 nt, Artificial Sequence
  Description of Artificial Sequence: Synthetic oligonucleotide
  Antisense strand to SEQ ID NO: 562325
ucucucccgcagaucucgc

SEQ ID NO: 562327 - RNA, 19 nt, Artificial Sequence
  Description of Artificial Sequence: Synthetic oligonucleotide
  Sense strand starting at position 2434 of SEQ ID NO: 318433
ugagaaggagucugccaua

SEQ ID NO: 562328 - RNA, 19 nt, Artificial Sequence
  Description of Artificial Sequence: Synthetic oligonucleotide
  Antisense strand to SEQ ID NO: 562327
uauggcagacuccuucuca

SEQ ID NO: 562329 - RNA, 19 nt, Artificial Sequence
  Description of Artificial Sequence: Synthetic oligonucleotide
  Sense strand starting at position 2437 of SEQ ID NO: 318433
gaaggagucugccauacua

SEQ ID NO: 562330 - RNA, 19 nt, Artificial Sequence
  Description of Artificial Sequence: Synthetic oligonucleotide
  Antisense strand to SEQ ID NO: 562329
uaguauggcagacuccuuc

SEQ ID NO: 562331 - RNA, 19 nt, Artificial Sequence
  Description of Artificial Sequence: Synthetic oligonucleotide
  Sense strand starting at position 2439 of SEQ ID NO: 318433
aggagucugccauacuaag

SEQ ID NO: 562332 - RNA, 19 nt, Artificial Sequence
  Description of Artificial Sequence: Synthetic oligonucleotide
  Antisense strand to SEQ ID NO: 562331
cuuaguauggcagacuccu

SEQ ID NO: 562333 - RNA, 19 nt, Artificial Sequence
  Description of Artificial Sequence: Synthetic oligonucleotide
  Sense strand starting at position 2970 of SEQ ID NO: 318433
gugacuguucccgucgacu

SEQ ID NO: 562334 - RNA, 19 nt, Artificial Sequence
  Description of Artificial Sequence: Synthetic oligonucleotide
  Antisense strand to SEQ ID NO: 562333
agucgacgggaacagucac

SEQ ID NO: 562335 - RNA, 19 nt, Artificial Sequence
  Description of Artificial Sequence: Synthetic oligonucleotide
  Sense strand starting at position 3255 of SEQ ID NO: 318433
caagcaggcuuucggaaau

SEQ ID NO: 562336 - RNA, 19 nt, Artificial Sequence
  Description of Artificial Sequence: Synthetic oligonucleotide
  Antisense strand to SEQ ID NO: 562335
auuuccgaaagccugcuug

SEQ ID NO: 562337 - RNA, 19 nt, Artificial Sequence
  Description of Artificial Sequence: Synthetic oligonucleotide
  Sense strand starting at position 3290 of SEQ ID NO: 318433
ucaggaauuuccugggaaa

SEQ ID NO: 562338 - RNA, 19 nt, Artificial Sequence
  Description of Artificial Sequence: Synthetic oligonucleotide
  Antisense strand to SEQ ID NO: 562337
uuucccaggaaauuccuga

SEQ ID NO: 562339 - RNA, 19 nt, Artificial Sequence
  Description of Artificial Sequence: Synthetic oligonucleotide
  Sense strand starting at position 3309 of SEQ ID NO: 318433
cgcaguuccuuacgggauu

SEQ ID NO: 562340 - RNA, 19 nt, Artificial Sequence
  Description of Artificial Sequence: Synthetic oligonucleotide
  Antisense strand to SEQ ID NO: 562339
aaucccguaaggaacugcg

SEQ ID NO: 562341 - RNA, 19 nt, Artificial Sequence
  Description of Artificial Sequence: Synthetic oligonucleotide
  Sense strand starting at position 3362 of SEQ ID NO: 318433
cccagaaacuugugucaag

SEQ ID NO: 562342 - RNA, 19 nt, Artificial Sequence
  Description of Artificial Sequence: Synthetic oligonucleotide
  Antisense strand to SEQ ID NO: 562341
cuugacacaaguuucuggg

SEQ ID NO: 562343 - RNA, 19 nt, Artificial Sequence
  Description of Artificial Sequence: Synthetic oligonucleotide
  Sense strand starting at position 3436 of SEQ ID NO: 318433
cagcuaaguugcugaccau

SEQ ID NO: 562344 - RNA, 19 nt, Artificial Sequence
  Description of Artificial Sequence: Synthetic oligonucleotide
  Antisense strand to SEQ ID NO: 562343
auggucagcaacuuagcug

SEQ ID NO: 562345 - RNA, 19 nt, Artificial Sequence
  Description of Artificial Sequence: Synthetic oligonucleotide
  Sense strand starting at position 3437 of SEQ ID NO: 318433
agcuaaguugcugaccauu

SEQ ID NO: 562346 - RNA, 19 nt, Artificial Sequence
  Description of Artificial Sequence: Synthetic oligonucleotide
  Antisense strand to SEQ ID NO: 562345
aauggucagcaacuuagcu

SEQ ID NO: 562347 - RNA, 19 nt, Artificial Sequence
  Description of Artificial Sequence: Synthetic oligonucleotide
  Sense strand starting at position 3439 of SEQ ID NO: 318433
cuaaguugcugaccauuaa

SEQ ID NO: 562348 - RNA, 19 nt, Artificial Sequence
  Description of Artificial Sequence: Synthetic oligonucleotide
  Antisense strand to SEQ ID NO: 562347
uuaauggucagcaacuuag

SEQ ID NO: 562349 - RNA, 19 nt, Artificial Sequence
  Description of Artificial Sequence: Synthetic oligonucleotide
  Sense strand starting at position 3443 of SEQ ID NO: 318433
guugcugaccauuaauuaa

SEQ ID NO: 562350 - RNA, 19 nt, Artificial Sequence
  Description of Artificial Sequence: Synthetic oligonucleotide
  Antisense strand to SEQ ID NO: 562349
uuaauuaauggucagcaac

SEQ ID NO: 562351 - RNA, 19 nt, Artificial Sequence
  Description of Artificial Sequence: Synthetic oligonucleotide
  Sense strand starting at position 3454 of SEQ ID NO: 318433
uuaauuaaccagugagucu

SEQ ID NO: 562352 - RNA, 19 nt, Artificial Sequence
  Description of Artificial Sequence: Synthetic oligonucleotide
  Antisense strand to SEQ ID NO: 562351
agacucacugguuaauuaa

SEQ ID NO: 562353 - RNA, 19 nt, Artificial Sequence
  Description of Artificial Sequence: Synthetic oligonucleotide
  Sense strand starting at position 3463 of SEQ ID NO: 318433
cagugagucuuuggacggu

SEQ ID NO: 562354 - RNA, 19 nt, Artificial Sequence
  Description of Artificial Sequence: Synthetic oligonucleotide
  Antisense strand to SEQ ID NO: 562353
accguccaaagacucacug

SEQ ID NO: 562355 - RNA, 19 nt, Artificial Sequence
  Description of Artificial Sequence: Synthetic oligonucleotide
  Sense strand starting at position 3466 of SEQ ID NO: 318433
ugagucuuuggacggugau

SEQ ID NO: 562356 - RNA, 19 nt, Artificial Sequence
  Description of Artificial Sequence: Synthetic oligonucleotide
  Antisense strand to SEQ ID NO: 562355
aucaccguccaaagacuca

SEQ ID NO: 562357 - RNA, 19 nt, Artificial Sequence
  Description of Artificial Sequence: Synthetic oligonucleotide
  Sense strand starting at position 3467 of SEQ ID NO: 318433
gagucuuuggacggugaua

SEQ ID NO: 562358 - RNA, 19 nt, Artificial Sequence
  Description of Artificial Sequence: Synthetic oligonucleotide
  Antisense strand to SEQ ID NO: 562357
uaucaccguccaaagacuc

SEQ ID NO: 562359 - RNA, 19 nt, Artificial Sequence
  Description of Artificial Sequence: Synthetic oligonucleotide
  Sense strand starting at position 3491 of SEQ ID NO: 318433
aaaggaucuucucugguau

SEQ ID NO: 562360 - RNA, 19 nt, Artificial Sequence
  Description of Artificial Sequence: Synthetic oligonucleotide
  Antisense strand to SEQ ID NO: 562359
auaccagagaagauccuuu

SEQ ID NO: 562361 - RNA, 19 nt, Artificial Sequence
  Description of Artificial Sequence: Synthetic oligonucleotide
  Sense strand starting at position 3492 of SEQ ID NO: 318433
aaggaucuucucugguauu

SEQ ID NO: 562362 - RNA, 19 nt, Artificial Sequence
  Description of Artificial Sequence: Synthetic oligonucleotide
  Antisense strand to SEQ ID NO: 562361
aauaccagagaagauccuu

SEQ ID NO: 562363 - RNA, 19 nt, Artificial Sequence
  Description of Artificial Sequence: Synthetic oligonucleotide
  Sense strand starting at position 3493 of SEQ ID NO: 318433
aggaucuucucugguauua

SEQ ID NO: 562364 - RNA, 19 nt, Artificial Sequence
  Description of Artificial Sequence: Synthetic oligonucleotide
  Antisense strand to SEQ ID NO: 562363
uaauaccagagaagauccu

SEQ ID NO: 562365 - RNA, 19 nt, Artificial Sequence
  Description of Artificial Sequence: Synthetic oligonucleotide
  Sense strand starting at position 3554 of SEQ ID NO: 318433
uuuacuagaccugacguau

SEQ ID NO: 562366 - RNA, 19 nt, Artificial Sequence
  Description of Artificial Sequence: Synthetic oligonucleotide
  Antisense strand to SEQ ID NO: 562365
auacgucaggucuaguaaa

SEQ ID NO: 562367 - RNA, 19 nt, Artificial Sequence
  Description of Artificial Sequence: Synthetic oligonucleotide
  Sense strand starting at position 3560 of SEQ ID NO: 318433
agaccugacguauaaccua

SEQ ID NO: 562368 - RNA, 19 nt, Artificial Sequence
  Description of Artificial Sequence: Synthetic oligonucleotide
  Antisense strand to SEQ ID NO: 562367
uagguuauacgucaggucu

SEQ ID NO: 562369 - RNA, 19 nt, Artificial Sequence
  Description of Artificial Sequence: Synthetic oligonucleotide
  Sense strand starting at position 3568 of SEQ ID NO: 318433
cguauaaccuagggcuuau

SEQ ID NO: 562370 - RNA, 19 nt, Artificial Sequence
  Description of Artificial Sequence: Synthetic oligonucleotide
  Antisense strand to SEQ ID NO: 562369
auaagcccuagguuauacg

SEQ ID NO: 562371 - RNA, 19 nt, Artificial Sequence
  Description of Artificial Sequence: Synthetic oligonucleotide
  Sense strand starting at position 3578 of SEQ ID NO: 318433
agggcuuauuuccagauag

SEQ ID NO: 562372 - RNA, 19 nt, Artificial Sequence
  Description of Artificial Sequence: Synthetic oligonucleotide
  Antisense strand to SEQ ID NO: 562371
cuaucuggaaauaagcccu

SEQ ID NO: 562373 - RNA, 19 nt, Artificial Sequence
  Description of Artificial Sequence: Synthetic oligonucleotide
  Sense strand starting at position 3593 of SEQ ID NO: 318433
auagguauugagugcuugu

SEQ ID NO: 562374 - RNA, 19 nt, Artificial Sequence
  Description of Artificial Sequence: Synthetic oligonucleotide
  Antisense strand to SEQ ID NO: 562373
acaagcacucaauaccuau

SEQ ID NO: 562375 - RNA, 19 nt, Artificial Sequence
  Description of Artificial Sequence: Synthetic oligonucleotide
  Sense strand starting at position 3596 of SEQ ID NO: 318433
gguauugagugcuuguacu

SEQ ID NO: 562376 - RNA, 19 nt, Artificial Sequence
  Description of Artificial Sequence: Synthetic oligonucleotide
  Antisense strand to SEQ ID NO: 562375
aguacaagcacucaauacc

SEQ ID NO: 562377 - RNA, 19 nt, Artificial Sequence
  Description of Artificial Sequence: Synthetic oligonucleotide
  Sense strand starting at position 3602 of SEQ ID NO: 318433
gagugcuuguacucucuca

SEQ ID NO: 562378 - RNA, 19 nt, Artificial Sequence
  Description of Artificial Sequence: Synthetic oligonucleotide
  Antisense strand to SEQ ID NO: 562377
ugagagaguacaagcacuc

SEQ ID NO: 562379 - RNA, 19 nt, Artificial Sequence
  Description of Artificial Sequence: Synthetic oligonucleotide
  Sense strand starting at position 3770 of SEQ ID NO: 318433
cacagaucguugccucuau

SEQ ID NO: 562380 - RNA, 19 nt, Artificial Sequence
  Description of Artificial Sequence: Synthetic oligonucleotide
  Antisense strand to SEQ ID NO: 562379
auagaggcaacgaucugug

SEQ ID NO: 562381 - RNA, 19 nt, Artificial Sequence
  Description of Artificial Sequence: Synthetic oligonucleotide
  Sense strand starting at position 3779 of SEQ ID NO: 318433
uugccucuauccugagaaa

SEQ ID NO: 562382 - RNA, 19 nt, Artificial Sequence
  Description of Artificial Sequence: Synthetic oligonucleotide
  Antisense strand to SEQ ID NO: 562381
uuucucaggauagaggcaa

SEQ ID NO: 562383 - RNA, 19 nt, Artificial Sequence
  Description of Artificial Sequence: Synthetic oligonucleotide
  Sense strand starting at position 3808 of SEQ ID NO: 318433
uuccauuuguggguucuau

SEQ ID NO: 562384 - RNA, 19 nt, Artificial Sequence
  Description of Artificial Sequence: Synthetic oligonucleotide
  Antisense strand to SEQ ID NO: 562383
auagaacccacaaauggaa

SEQ ID NO: 562385 - RNA, 19 nt, Artificial Sequence
  Description of Artificial Sequence: Synthetic oligonucleotide
  Sense strand starting at position 3817 of SEQ ID NO: 318433
uggguucuauucccauuga

SEQ ID NO: 562386 - RNA, 19 nt, Artificial Sequence
  Description of Artificial Sequence: Synthetic oligonucleotide
  Antisense strand to SEQ ID NO: 562385
ucaaugggaauagaaccca

SEQ ID NO: 562387 - RNA, 19 nt, Artificial Sequence
  Description of Artificial Sequence: Synthetic oligonucleotide
  Sense strand starting at position 3902 of SEQ ID NO: 318433
ggaauaugauugcccagcu

SEQ ID NO: 562388 - RNA, 19 nt, Artificial Sequence
  Description of Artificial Sequence: Synthetic oligonucleotide
  Antisense strand to SEQ ID NO: 562387
agcugggcaaucauauucc

SEQ ID NO: 562389 - RNA, 19 nt, Artificial Sequence
  Description of Artificial Sequence: Synthetic oligonucleotide
  Sense strand starting at position 3911 of SEQ ID NO: 318433
uugcccagcuuccuagaaa

SEQ ID NO: 562390 - RNA, 19 nt, Artificial Sequence
  Description of Artificial Sequence: Synthetic oligonucleotide
  Antisense strand to SEQ ID NO: 562389
uuucuaggaagcugggcaa

SEQ ID NO: 562391 - RNA, 19 nt, Artificial Sequence
  Description of Artificial Sequence: Synthetic oligonucleotide
  Sense strand starting at position 3967 of SEQ ID NO: 318433
gggaauaagccuugcugau

SEQ ID NO: 562392 - RNA, 19 nt, Artificial Sequence
  Description of Artificial Sequence: Synthetic oligonucleotide
  Antisense strand to SEQ ID NO: 562391
aucagcaaggcuuauuccc

SEQ ID NO: 562393 - RNA, 19 nt, Artificial Sequence
  Description of Artificial Sequence: Synthetic oligonucleotide
  Sense strand starting at position 330 of SEQ ID NO: 318434
gaaggauuccugggucuug

SEQ ID NO: 562394 - RNA, 19 nt, Artificial Sequence
  Description of Artificial Sequence: Synthetic oligonucleotide
  Antisense strand to SEQ ID NO: 562393
caagacccaggaauccuuc

SEQ ID NO: 562395 - RNA, 19 nt, Artificial Sequence
  Description of Artificial Sequence: Synthetic oligonucleotide
  Sense strand starting at position 331 of SEQ ID NO: 318434
aaggauuccugggucuuga

SEQ ID NO: 562396 - RNA, 19 nt, Artificial Sequence
  Description of Artificial Sequence: Synthetic oligonucleotide
  Antisense strand to SEQ ID NO: 562395
ucaagacccaggaauccuu

SEQ ID NO: 562397 - RNA, 19 nt, Artificial Sequence
  Description of Artificial Sequence: Synthetic oligonucleotide
  Sense strand starting at position 393 of SEQ ID NO: 318434
auugcaaacaggugagaua

SEQ ID NO: 562398 - RNA, 19 nt, Artificial Sequence
  Description of Artificial Sequence: Synthetic oligonucleotide
  Antisense strand to SEQ ID NO: 562397
uaucucaccuguuugcaau

SEQ ID NO: 562399 - RNA, 19 nt, Artificial Sequence
  Description of Artificial Sequence: Synthetic oligonucleotide
  Sense strand starting at position 423 of SEQ ID NO: 318434
ugugcuguugcaggaaaca

SEQ ID NO: 562400 - RNA, 19 nt, Artificial Sequence
  Description of Artificial Sequence: Synthetic oligonucleotide
  Antisense strand to SEQ ID NO: 562399
uguuuccugcaacagcaca

SEQ ID NO: 562401 - RNA, 19 nt, Artificial Sequence
  Description of Artificial Sequence: Synthetic oligonucleotide
  Sense strand starting at position 580 of SEQ ID NO: 318434
aaaugugguuaagccaaau

SEQ ID NO: 562402 - RNA, 19 nt, Artificial Sequence
  Description of Artificial Sequence: Synthetic oligonucleotide
  Antisense strand to SEQ ID NO: 562401
auuuggcuuaaccacauuu

SEQ ID NO: 562403 - RNA, 19 nt, Artificial Sequence
  Description of Artificial Sequence: Synthetic oligonucleotide
  Sense strand starting at position 636 of SEQ ID NO: 318434
aacugaaucccagguguua

SEQ ID NO: 562404 - RNA, 19 nt, Artificial Sequence
  Description of Artificial Sequence: Synthetic oligonucleotide
  Antisense strand to SEQ ID NO: 562403
uaacaccugggauucaguu

SEQ ID NO: 562405 - RNA, 19 nt, Artificial Sequence
  Description of Artificial Sequence: Synthetic oligonucleotide
  Sense strand starting at position 638 of SEQ ID NO: 318434
cugaaucccagguguuaga

SEQ ID NO: 562406 - RNA, 19 nt, Artificial Sequence
  Description of Artificial Sequence: Synthetic oligonucleotide
  Antisense strand to SEQ ID NO: 562405
ucuaacaccugggauucag

SEQ ID NO: 562407 - RNA, 19 nt, Artificial Sequence
  Description of Artificial Sequence: Synthetic oligonucleotide
  Sense strand starting at position 648 of SEQ ID NO: 318434
gguguuagaaguuacuuga

SEQ ID NO: 562408 - RNA, 19 nt, Artificial Sequence
  Description of Artificial Sequence: Synthetic oligonucleotide
  Antisense strand to SEQ ID NO: 562407
ucaaguaacuucuaacacc

SEQ ID NO: 562409 - RNA, 19 nt, Artificial Sequence
  Description of Artificial Sequence: Synthetic oligonucleotide
  Sense strand starting at position 651 of SEQ ID NO: 318434
guuagaaguuacuugaaca

SEQ ID NO: 562410 - RNA, 19 nt, Artificial Sequence
  Description of Artificial Sequence: Synthetic oligonucleotide
  Antisense strand to SEQ ID NO: 562409
uguucaaguaacuucuaac

SEQ ID NO: 562411 - RNA, 19 nt, Artificial Sequence
  Description of Artificial Sequence: Synthetic oligonucleotide
  Sense strand starting at position 764 of SEQ ID NO: 318434
auaugcuucucuguugaau

SEQ ID NO: 562412 - RNA, 19 nt, Artificial Sequence
  Description of Artificial Sequence: Synthetic oligonucleotide
  Antisense strand to SEQ ID NO: 562411
auucaacagagaagcauau

SEQ ID NO: 562413 - RNA, 19 nt, Artificial Sequence
  Description of Artificial Sequence: Synthetic oligonucleotide
  Sense strand starting at position 770 of SEQ ID NO: 318434
uucucuguugaaugguuaa

SEQ ID NO: 562414 - RNA, 19 nt, Artificial Sequence
  Description of Artificial Sequence: Synthetic oligonucleotide
  Antisense strand to SEQ ID NO: 562413
uuaaccauucaacagagaa

SEQ ID NO: 562415 - RNA, 19 nt, Artificial Sequence
  Description of Artificial Sequence: Synthetic oligonucleotide
  Sense strand starting at position 910 of SEQ ID NO: 318434
cuccaaucccgcuaaaguu

SEQ ID NO: 562416 - RNA, 19 nt, Artificial Sequence
  Description of Artificial Sequence: Synthetic oligonucleotide
  Antisense strand to SEQ ID NO: 562415
aacuuuagcgggauuggag

SEQ ID NO: 562417 - RNA, 19 nt, Artificial Sequence
  Description of Artificial Sequence: Synthetic oligonucleotide
  Sense strand starting at position 920 of SEQ ID NO: 318434
gcuaaaguuaaacguuaga

SEQ ID NO: 562418 - RNA, 19 nt, Artificial Sequence
  Description of Artificial Sequence: Synthetic oligonucleotide
  Antisense strand to SEQ ID NO: 562417
ucuaacguuuaacuuuagc

SEQ ID NO: 562419 - RNA, 19 nt, Artificial Sequence
  Description of Artificial Sequence: Synthetic oligonucleotide
  Sense strand starting at position 1418 of SEQ ID NO: 318434
cgacaagcgcguccucaau

SEQ ID NO: 562420 - RNA, 19 nt, Artificial Sequence
  Description of Artificial Sequence: Synthetic oligonucleotide
  Antisense strand to SEQ ID NO: 562419
auugaggacgcgcuugucg

SEQ ID NO: 562421 - RNA, 19 nt, Artificial Sequence
  Description of Artificial Sequence: Synthetic oligonucleotide
  Sense strand starting at position 2139 of SEQ ID NO: 318434
ggacgucuaucaucuaguc

SEQ ID NO: 562422 - RNA, 19 nt, Artificial Sequence
  Description of Artificial Sequence: Synthetic oligonucleotide
  Antisense strand to SEQ ID NO: 562421
gacuagaugauagacgucc

SEQ ID NO: 562423 - RNA, 19 nt, Artificial Sequence
  Description of Artificial Sequence: Synthetic oligonucleotide
  Sense strand starting at position 2188 of SEQ ID NO: 318434
ucucauuggccagaugugu

SEQ ID NO: 562424 - RNA, 19 nt, Artificial Sequence
  Description of Artificial Sequence: Synthetic oligonucleotide
  Antisense strand to SEQ ID NO: 562423
acacaucuggccaaugaga

SEQ ID NO: 562425 - RNA, 19 nt, Artificial Sequence
  Description of Artificial Sequence: Synthetic oligonucleotide
  Sense strand starting at position 2197 of SEQ ID NO: 318434
ccagauguguugucaagug

SEQ ID NO: 562426 - RNA, 19 nt, Artificial Sequence
  Description of Artificial Sequence: Synthetic oligonucleotide
  Antisense strand to SEQ ID NO: 562425
cacuugacaacacaucugg

SEQ ID NO: 562427 - RNA, 19 nt, Artificial Sequence
  Description of Artificial Sequence: Synthetic oligonucleotide
  Sense strand starting at position 2215 of SEQ ID NO: 318434
guggaaucugaguggagga

SEQ ID NO: 562428 - RNA, 19 nt, Artificial Sequence
  Description of Artificial Sequence: Synthetic oligonucleotide
  Antisense strand to SEQ ID NO: 562427
uccuccacucagauuccac

SEQ ID NO: 562429 - RNA, 19 nt, Artificial Sequence
  Description of Artificial Sequence: Synthetic oligonucleotide
  Sense strand starting at position 2297 of SEQ ID NO: 318434
cuugcuauuggcuggaaga

SEQ ID NO: 562430 - RNA, 19 nt, Artificial Sequence
  Description of Artificial Sequence: Synthetic oligonucleotide
  Antisense strand to SEQ ID NO: 562429
ucuuccagccaauagcaag

SEQ ID NO: 562431 - RNA, 19 nt, Artificial Sequence
  Description of Artificial Sequence: Synthetic oligonucleotide
  Sense strand starting at position 2298 of SEQ ID NO: 318434
uugcuauuggcuggaagag

SEQ ID NO: 562432 - RNA, 19 nt, Artificial Sequence
  Description of Artificial Sequence: Synthetic oligonucleotide
  Antisense strand to SEQ ID NO: 562431
cucuuccagccaauagcaa

SEQ ID NO: 562433 - RNA, 19 nt, Artificial Sequence
  Description of Artificial Sequence: Synthetic oligonucleotide
  Sense strand starting at position 2364 of SEQ ID NO: 318434
ggucuuuggaggugggaga

SEQ ID NO: 562434 - RNA, 19 nt, Artificial Sequence
  Description of Artificial Sequence: Synthetic oligonucleotide
  Antisense strand to SEQ ID NO: 562433
ucucccaccuccaaagacc

SEQ ID NO: 562435 - RNA, 19 nt, Artificial Sequence
  Description of Artificial Sequence: Synthetic oligonucleotide
  Sense strand starting at position 2468 of SEQ ID NO: 318434
ccaagaaucucugcgcaga

SEQ ID NO: 562436 - RNA, 19 nt, Artificial Sequence
  Description of Artificial Sequence: Synthetic oligonucleotide
  Antisense strand to SEQ ID NO: 562435
ucugcgcagagauucuugg

SEQ ID NO: 562437 - RNA, 19 nt, Artificial Sequence
  Description of Artificial Sequence: Synthetic oligonucleotide
  Sense strand starting at position 2470 of SEQ ID NO: 318434
aagaaucucugcgcagaga

SEQ ID NO: 562438 - RNA, 19 nt, Artificial Sequence
  Description of Artificial Sequence: Synthetic oligonucleotide
  Antisense strand to SEQ ID NO: 562437
ucucugcgcagagauucuu

SEQ ID NO: 562439 - RNA, 19 nt, Artificial Sequence
  Description of Artificial Sequence: Synthetic oligonucleotide
  Sense strand starting at position 2471 of SEQ ID NO: 318434
agaaucucugcgcagagau

SEQ ID NO: 562440 - RNA, 19 nt, Artificial Sequence
  Description of Artificial Sequence: Synthetic oligonucleotide
  Antisense strand to SEQ ID NO: 562439
aucucugcgcagagauucu

SEQ ID NO: 562441 - RNA, 19 nt, Artificial Sequence
  Description of Artificial Sequence: Synthetic oligonucleotide
  Sense strand starting at position 2481 of SEQ ID NO: 318434
cgcagagauccuuagaaua

SEQ ID NO: 562442 - RNA, 19 nt, Artificial Sequence
  Description of Artificial Sequence: Synthetic oligonucleotide
  Antisense strand to SEQ ID NO: 562441
uauucuaaggaucucugcg

SEQ ID NO: 562443 - RNA, 19 nt, Artificial Sequence
  Description of Artificial Sequence: Synthetic oligonucleotide
  Sense strand starting at position 2502 of SEQ ID NO: 318434
uguuauuucuaggcgcgga

SEQ ID NO: 562444 - RNA, 19 nt, Artificial Sequence
  Description of Artificial Sequence: Synthetic oligonucleotide
  Antisense strand to SEQ ID NO: 562443
uccgcgccuagaaauaaca

SEQ ID NO: 562445 - RNA, 19 nt, Artificial Sequence
  Description of Artificial Sequence: Synthetic oligonucleotide
  Sense strand starting at position 2653 of SEQ ID NO: 318434
ucaagacguucuccauaac

SEQ ID NO: 562446 - RNA, 19 nt, Artificial Sequence
  Description of Artificial Sequence: Synthetic oligonucleotide
  Antisense strand to SEQ ID NO: 562445
guuauggagaacgucuuga

SEQ ID NO: 562447 - RNA, 19 nt, Artificial Sequence
  Description of Artificial Sequence: Synthetic oligonucleotide
  Sense strand starting at position 2720 of SEQ ID NO: 318434
ccuugacuucuaggaguau

SEQ ID NO: 562448 - RNA, 19 nt, Artificial Sequence
  Description of Artificial Sequence: Synthetic oligonucleotide
  Antisense strand to SEQ ID NO: 562447
auacuccuagaagucaagg

SEQ ID NO: 562449 - RNA, 19 nt, Artificial Sequence
  Description of Artificial Sequence: Synthetic oligonucleotide
  Sense strand starting at position 2856 of SEQ ID NO: 318434
acugaugacuguuccagga

SEQ ID NO: 562450 - RNA, 19 nt, Artificial Sequence
  Description of Artificial Sequence: Synthetic oligonucleotide
  Antisense strand to SEQ ID NO: 562449
uccuggaacagucaucagu

SEQ ID NO: 562451 - RNA, 19 nt, Artificial Sequence
  Description of Artificial Sequence: Synthetic oligonucleotide
  Sense strand starting at position 2876 of SEQ ID NO: 318434
ggagucuugagacauugcu

SEQ ID NO: 562452 - RNA, 19 nt, Artificial Sequence
  Description of Artificial Sequence: Synthetic oligonucleotide
  Antisense strand to SEQ ID NO: 562451
agcaaugucucaagacucc

SEQ ID NO: 562453 - RNA, 19 nt, Artificial Sequence
  Description of Artificial Sequence: Synthetic oligonucleotide
  Sense strand starting at position 2883 of SEQ ID NO: 318434
ugagacauugcuggacuga

SEQ ID NO: 562454 - RNA, 19 nt, Artificial Sequence
  Description of Artificial Sequence: Synthetic oligonucleotide
  Antisense strand to SEQ ID NO: 562453
ucaguccagcaaugucuca

SEQ ID NO: 562455 - RNA, 19 nt, Artificial Sequence
  Description of Artificial Sequence: Synthetic oligonucleotide
  Sense strand starting at position 2892 of SEQ ID NO: 318434
gcuggacugauaugugaac

SEQ ID NO: 562456 - RNA, 19 nt, Artificial Sequence
  Description of Artificial Sequence: Synthetic oligonucleotide
  Antisense strand to SEQ ID NO: 562455
guucacauaucaguccagc

SEQ ID NO: 562457 - RNA, 19 nt, Artificial Sequence
  Description of Artificial Sequence: Synthetic oligonucleotide
  Sense strand starting at position 2948 of SEQ ID NO: 318434
gcaccuggucccugcuaaa

SEQ ID NO: 562458 - RNA, 19 nt, Artificial Sequence
  Description of Artificial Sequence: Synthetic oligonucleotide
  Antisense strand to SEQ ID NO: 562457
uuuagcagggaccaggugc

SEQ ID NO: 562459 - RNA, 19 nt, Artificial Sequence
  Description of Artificial Sequence: Synthetic oligonucleotide
  Sense strand starting at position 3069 of SEQ ID NO: 318434
guuugucaucucuggaaga

SEQ ID NO: 562460 - RNA, 19 nt, Artificial Sequence
  Description of Artificial Sequence: Synthetic oligonucleotide
  Antisense strand to SEQ ID NO: 562459
ucuuccagagaugacaaac

SEQ ID NO: 562461 - RNA, 19 nt, Artificial Sequence
  Description of Artificial Sequence: Synthetic oligonucleotide
  Sense strand starting at position 3316 of SEQ ID NO: 318434
caagguuacucggcuggua

SEQ ID NO: 562462 - RNA, 19 nt, Artificial Sequence
  Description of Artificial Sequence: Synthetic oligonucleotide
  Antisense strand to SEQ ID NO: 562461
uaccagccgaguaaccuug

SEQ ID NO: 562463 - RNA, 19 nt, Artificial Sequence
  Description of Artificial Sequence: Synthetic oligonucleotide
  Sense strand starting at position 3318 of SEQ ID NO: 318434
agguuacucggcugguaaa

SEQ ID NO: 562464 - RNA, 19 nt, Artificial Sequence
  Description of Artificial Sequence: Synthetic oligonucleotide
  Antisense strand to SEQ ID NO: 562463
uuuaccagccgaguaaccu

SEQ ID NO: 562465 - RNA, 19 nt, Artificial Sequence
  Description of Artificial Sequence: Synthetic oligonucleotide
  Sense strand starting at position 3319 of SEQ ID NO: 318434
gguuacucggcugguaaau

SEQ ID NO: 562466 - RNA, 19 nt, Artificial Sequence
  Description of Artificial Sequence: Synthetic oligonucleotide
  Antisense strand to SEQ ID NO: 562465
auuuaccagccgaguaacc

SEQ ID NO: 562467 - RNA, 19 nt, Artificial Sequence
  Description of Artificial Sequence: Synthetic oligonucleotide
  Sense strand starting at position 3336 of SEQ ID NO: 318434
auugcauagucagaauuuc

SEQ ID NO: 562468 - RNA, 19 nt, Artificial Sequence
  Description of Artificial Sequence: Synthetic oligonucleotide
  Antisense strand to SEQ ID NO: 562467
gaaauucugacuaugcaau

SEQ ID NO: 562469 - RNA, 19 nt, Artificial Sequence
  Description of Artificial Sequence: Synthetic oligonucleotide
  Sense strand starting at position 3453 of SEQ ID NO: 318434
gaucccaaucagggaaguu

SEQ ID NO: 562470 - RNA, 19 nt, Artificial Sequence
  Description of Artificial Sequence: Synthetic oligonucleotide
  Antisense strand to SEQ ID NO: 562469
aacuucccugauugggauc

SEQ ID NO: 562471 - RNA, 19 nt, Artificial Sequence
  Description of Artificial Sequence: Synthetic oligonucleotide
  Sense strand starting at position 3936 of SEQ ID NO: 318434
auaauaagaucuuaagggu

SEQ ID NO: 562472 - RNA, 19 nt, Artificial Sequence
  Description of Artificial Sequence: Synthetic oligonucleotide
  Antisense strand to SEQ ID NO: 562471
acccuuaagaucuuauuau

SEQ ID NO: 562473 - RNA, 19 nt, Artificial Sequence
  Description of Artificial Sequence: Synthetic oligonucleotide
  Sense strand starting at position 52 of SEQ ID NO: 318435
cgcccuuguccucugucaa

SEQ ID NO: 562474 - RNA, 19 nt, Artificial Sequence
  Description of Artificial Sequence: Synthetic oligonucleotide
  Antisense strand to SEQ ID NO: 562473
uugacagaggacaagggcg

SEQ ID NO: 562475 - RNA, 19 nt, Artificial Sequence
  Description of Artificial Sequence: Synthetic oligonucleotide
  Sense strand starting at position 91 of SEQ ID NO: 318435
caccauucuguugggauca

SEQ ID NO: 562476 - RNA, 19 nt, Artificial Sequence
  Description of Artificial Sequence: Synthetic oligonucleotide
  Antisense strand to SEQ ID NO: 562475
ugaucccaacagaauggug

SEQ ID NO: 562477 - RNA, 19 nt, Artificial Sequence
  Description of Artificial Sequence: Synthetic oligonucleotide
  Sense strand starting at position 96 of SEQ ID NO: 318435
uucuguugggaucagguaa

SEQ ID NO: 562478 - RNA, 19 nt, Artificial Sequence
  Description of Artificial Sequence: Synthetic oligonucleotide
  Antisense strand to SEQ ID NO: 562477
uuaccugaucccaacagaa

SEQ ID NO: 562479 - RNA, 19 nt, Artificial Sequence
  Description of Artificial Sequence: Synthetic oligonucleotide
  Sense strand starting at position 345 of SEQ ID NO: 318435
cugcauguuccugcuguga

SEQ ID NO: 562480 - RNA, 19 nt, Artificial Sequence
  Description of Artificial Sequence: Synthetic oligonucleotide
  Antisense strand to SEQ ID NO: 562479
ucacagcaggaacaugcag

SEQ ID NO: 562481 - RNA, 19 nt, Artificial Sequence
  Description of Artificial Sequence: Synthetic oligonucleotide
  Sense strand starting at position 417 of SEQ ID NO: 318435
agagcugagcuuugauauc

SEQ ID NO: 562482 - RNA, 19 nt, Artificial Sequence
  Description of Artificial Sequence: Synthetic oligonucleotide
  Antisense strand to SEQ ID NO: 562481
gauaucaaagcucagcucu

SEQ ID NO: 562483 - RNA, 19 nt, Artificial Sequence
  Description of Artificial Sequence: Synthetic oligonucleotide
  Sense strand starting at position 423 of SEQ ID NO: 318435
gagcuuugauaucuguaaa

SEQ ID NO: 562484 - RNA, 19 nt, Artificial Sequence
  Description of Artificial Sequence: Synthetic oligonucleotide
  Antisense strand to SEQ ID NO: 562483
uuuacagauaucaaagcuc

SEQ ID NO: 562485 - RNA, 19 nt, Artificial Sequence
  Description of Artificial Sequence: Synthetic oligonucleotide
  Sense strand starting at position 455 of SEQ ID NO: 318435
agccucauaccugagaauu

SEQ ID NO: 562486 - RNA, 19 nt, Artificial Sequence
  Description of Artificial Sequence: Synthetic oligonucleotide
  Antisense strand to SEQ ID NO: 562485
aauucucagguaugaggcu

SEQ ID NO: 562487 - RNA, 19 nt, Artificial Sequence
  Description of Artificial Sequence: Synthetic oligonucleotide
  Sense strand starting at position 463 of SEQ ID NO: 318435
accugagaauuagauaaac

SEQ ID NO: 562488 - RNA, 19 nt, Artificial Sequence
  Description of Artificial Sequence: Synthetic oligonucleotide
  Antisense strand to SEQ ID NO: 562487
guuuaucuaauucucaggu

SEQ ID NO: 562489 - RNA, 19 nt, Artificial Sequence
  Description of Artificial Sequence: Synthetic oligonucleotide
  Sense strand starting at position 804 of SEQ ID NO: 318435
uaguguucuagugaggucu

SEQ ID NO: 562490 - RNA, 19 nt, Artificial Sequence
  Description of Artificial Sequence: Synthetic oligonucleotide
  Antisense strand to SEQ ID NO: 562489
agaccucacuagaacacua

SEQ ID NO: 562491 - RNA, 19 nt, Artificial Sequence
  Description of Artificial Sequence: Synthetic oligonucleotide
  Sense strand starting at position 1090 of SEQ ID NO: 318435
aagaguaaggccugaguca

SEQ ID NO: 562492 - RNA, 19 nt, Artificial Sequence
  Description of Artificial Sequence: Synthetic oligonucleotide
  Antisense strand to SEQ ID NO: 562491
ugacucaggccuuacucuu

SEQ ID NO: 562493 - RNA, 19 nt, Artificial Sequence
  Description of Artificial Sequence: Synthetic oligonucleotide
  Sense strand starting at position 1091 of SEQ ID NO: 318435
agaguaaggccugagucaa

SEQ ID NO: 562494 - RNA, 19 nt, Artificial Sequence
  Description of Artificial Sequence: Synthetic oligonucleotide
  Antisense strand to SEQ ID NO: 562493
uugacucaggccuuacucu

SEQ ID NO: 562495 - RNA, 19 nt, Artificial Sequence
  Description of Artificial Sequence: Synthetic oligonucleotide
  Sense strand starting at position 1160 of SEQ ID NO: 318435
gucuaugagaaaugggucu

SEQ ID NO: 562496 - RNA, 19 nt, Artificial Sequence
  Description of Artificial Sequence: Synthetic oligonucleotide
  Antisense strand to SEQ ID NO: 562495
agacccauuucucauagac

SEQ ID NO: 562497 - RNA, 19 nt, Artificial Sequence
  Description of Artificial Sequence: Synthetic oligonucleotide
  Sense strand starting at position 1162 of SEQ ID NO: 318435
cuaugagaaaugggucugu

SEQ ID NO: 562498 - RNA, 19 nt, Artificial Sequence
  Description of Artificial Sequence: Synthetic oligonucleotide
  Antisense strand to SEQ ID NO: 562497
acagacccauuucucauag

SEQ ID NO: 562499 - RNA, 19 nt, Artificial Sequence
  Description of Artificial Sequence: Synthetic oligonucleotide
  Sense strand starting at position 1166 of SEQ ID NO: 318435
gagaaaugggucugugagg

SEQ ID NO: 562500 - RNA, 19 nt, Artificial Sequence
  Description of Artificial Sequence: Synthetic oligonucleotide
  Antisense strand to SEQ ID NO: 562499
ccucacagacccauuucuc

SEQ ID NO: 562501 - RNA, 19 nt, Artificial Sequence
  Description of Artificial Sequence: Synthetic oligonucleotide
  Sense strand starting at position 1197 of SEQ ID NO: 318435
caguaauaggcaggaccua

SEQ ID NO: 562502 - RNA, 19 nt, Artificial Sequence
  Description of Artificial Sequence: Synthetic oligonucleotide
  Antisense strand to SEQ ID NO: 562501
uagguccugccuauuacug

SEQ ID NO: 562503 - RNA, 19 nt, Artificial Sequence
  Description of Artificial Sequence: Synthetic oligonucleotide
  Sense strand starting at position 1357 of SEQ ID NO: 318435
gggccauaggugcagauua

SEQ ID NO: 562504 - RNA, 19 nt, Artificial Sequence
  Description of Artificial Sequence: Synthetic oligonucleotide
  Antisense strand to SEQ ID NO: 562503
uaaucugcaccuauggccc

SEQ ID NO: 562505 - RNA, 19 nt, Artificial Sequence
  Description of Artificial Sequence: Synthetic oligonucleotide
  Sense strand starting at position 1756 of SEQ ID NO: 318435
ccgauuauccuucgaagac

SEQ ID NO: 562506 - RNA, 19 nt, Artificial Sequence
  Description of Artificial Sequence: Synthetic oligonucleotide
  Antisense strand to SEQ ID NO: 562505
gucuucgaaggauaaucgg

SEQ ID NO: 562507 - RNA, 19 nt, Artificial Sequence
  Description of Artificial Sequence: Synthetic oligonucleotide
  Sense strand starting at position 2337 of SEQ ID NO: 318435
cgugguauuuggaagagca

SEQ ID NO: 562508 - RNA, 19 nt, Artificial Sequence
  Description of Artificial Sequence: Synthetic oligonucleotide
  Antisense strand to SEQ ID NO: 562507
ugcucuuccaaauaccacg

SEQ ID NO: 562509 - RNA, 19 nt, Artificial Sequence
  Description of Artificial Sequence: Synthetic oligonucleotide
  Sense strand starting at position 2369 of SEQ ID NO: 318435
ucgcuaucuggagaucgaa

SEQ ID NO: 562510 - RNA, 19 nt, Artificial Sequence
  Description of Artificial Sequence: Synthetic oligonucleotide
  Antisense strand to SEQ ID NO: 562509
uucgaucuccagauagcga

SEQ ID NO: 562511 - RNA, 19 nt, Artificial Sequence
  Description of Artificial Sequence: Synthetic oligonucleotide
  Sense strand starting at position 2372 of SEQ ID NO: 318435
cuaucuggagaucgaauua

SEQ ID NO: 562512 - RNA, 19 nt, Artificial Sequence
  Description of Artificial Sequence: Synthetic oligonucleotide
  Antisense strand to SEQ ID NO: 562511
uaauucgaucuccagauag

SEQ ID NO: 562513 - RNA, 19 nt, Artificial Sequence
  Description of Artificial Sequence: Synthetic oligonucleotide
  Sense strand starting at position 2414 of SEQ ID NO: 318435
ccaggaaggacucgauauc

SEQ ID NO: 562514 - RNA, 19 nt, Artificial Sequence
  Description of Artificial Sequence: Synthetic oligonucleotide
  Antisense strand to SEQ ID NO: 562513
gauaucgaguccuuccugg

SEQ ID NO: 562515 - RNA, 19 nt, Artificial Sequence
  Description of Artificial Sequence: Synthetic oligonucleotide
  Sense strand starting at position 2429 of SEQ ID NO: 318435
uaucgaauccuagguagac

SEQ ID NO: 562516 - RNA, 19 nt, Artificial Sequence
  Description of Artificial Sequence: Synthetic oligonucleotide
  Antisense strand to SEQ ID NO: 562515
gucuaccuaggauucgaua

SEQ ID NO: 562517 - RNA, 19 nt, Artificial Sequence
  Description of Artificial Sequence: Synthetic oligonucleotide
  Sense strand starting at position 2505 of SEQ ID NO: 318435
gguggugguuuacuugaga

SEQ ID NO: 562518 - RNA, 19 nt, Artificial Sequence
  Description of Artificial Sequence: Synthetic oligonucleotide
  Antisense strand to SEQ ID NO: 562517
ucucaaguaaaccaccacc

SEQ ID NO: 562519 - RNA, 19 nt, Artificial Sequence
  Description of Artificial Sequence: Synthetic oligonucleotide
  Sense strand starting at position 2508 of SEQ ID NO: 318435
ggugguuuacuugagaccu

SEQ ID NO: 562520 - RNA, 19 nt, Artificial Sequence
  Description of Artificial Sequence: Synthetic oligonucleotide
  Antisense strand to SEQ ID NO: 562519
aggucucaaguaaaccacc

SEQ ID NO: 562521 - RNA, 19 nt, Artificial Sequence
  Description of Artificial Sequence: Synthetic oligonucleotide
  Sense strand starting at position 2578 of SEQ ID NO: 318435
gggaguugggagggaucuu

SEQ ID NO: 562522 - RNA, 19 nt, Artificial Sequence
  Description of Artificial Sequence: Synthetic oligonucleotide
  Antisense strand to SEQ ID NO: 562521
aagaucccucccaacuccc

SEQ ID NO: 562523 - RNA, 19 nt, Artificial Sequence
  Description of Artificial Sequence: Synthetic oligonucleotide
  Sense strand starting at position 2590 of SEQ ID NO: 318435
ggaucuuggaguuggaaau

SEQ ID NO: 562524 - RNA, 19 nt, Artificial Sequence
  Description of Artificial Sequence: Synthetic oligonucleotide
  Antisense strand to SEQ ID NO: 562523
auuuccaacuccaagaucc

SEQ ID NO: 562525 - RNA, 19 nt, Artificial Sequence
  Description of Artificial Sequence: Synthetic oligonucleotide
  Sense strand starting at position 2679 of SEQ ID NO: 318435
gaauccaggucagucagau

SEQ ID NO: 562526 - RNA, 19 nt, Artificial Sequence
  Description of Artificial Sequence: Synthetic oligonucleotide
  Antisense strand to SEQ ID NO: 562525
aucugacugaccuggauuc

SEQ ID NO: 562527 - RNA, 19 nt, Artificial Sequence
  Description of Artificial Sequence: Synthetic oligonucleotide
  Sense strand starting at position 2729 of SEQ ID NO: 318435
ccuuaacucugguuugaac

SEQ ID NO: 562528 - RNA, 19 nt, Artificial Sequence
  Description of Artificial Sequence: Synthetic oligonucleotide
  Antisense strand to SEQ ID NO: 562527
guucaaaccagaguuaagg

SEQ ID NO: 562529 - RNA, 19 nt, Artificial Sequence
  Description of Artificial Sequence: Synthetic oligonucleotide
  Sense strand starting at position 2738 of SEQ ID NO: 318435
ugguuugaaccauagcaca

SEQ ID NO: 562530 - RNA, 19 nt, Artificial Sequence
  Description of Artificial Sequence: Synthetic oligonucleotide
  Antisense strand to SEQ ID NO: 562529
ugugcuaugguucaaacca

SEQ ID NO: 562531 - RNA, 19 nt, Artificial Sequence
  Description of Artificial Sequence: Synthetic oligonucleotide
  Sense strand starting at position 3174 of SEQ ID NO: 318435
agauacauguggcuagaga

SEQ ID NO: 562532 - RNA, 19 nt, Artificial Sequence
  Description of Artificial Sequence: Synthetic oligonucleotide
  Antisense strand to SEQ ID NO: 562531
ucucuagccacauguaucu

SEQ ID NO: 562533 - RNA, 19 nt, Artificial Sequence
  Description of Artificial Sequence: Synthetic oligonucleotide
  Sense strand starting at position 3239 of SEQ ID NO: 318435
gguugacagcuguagagua

SEQ ID NO: 562534 - RNA, 19 nt, Artificial Sequence
  Description of Artificial Sequence: Synthetic oligonucleotide
  Antisense strand to SEQ ID NO: 562533
uacucuacagcugucaacc

SEQ ID NO: 562535 - RNA, 19 nt, Artificial Sequence
  Description of Artificial Sequence: Synthetic oligonucleotide
  Sense strand starting at position 3252 of SEQ ID NO: 318435
agaguaugaccucagguuu

SEQ ID NO: 562536 - RNA, 19 nt, Artificial Sequence
  Description of Artificial Sequence: Synthetic oligonucleotide
  Antisense strand to SEQ ID NO: 562535
aaaccugaggucauacucu

SEQ ID NO: 562537 - RNA, 19 nt, Artificial Sequence
  Description of Artificial Sequence: Synthetic oligonucleotide
  Sense strand starting at position 3298 of SEQ ID NO: 318435
ggaccuguccuuugacuca

SEQ ID NO: 562538 - RNA, 19 nt, Artificial Sequence
  Description of Artificial Sequence: Synthetic oligonucleotide
  Antisense strand to SEQ ID NO: 562537
ugagucaaaggacaggucc

SEQ ID NO: 562539 - RNA, 19 nt, Artificial Sequence
  Description of Artificial Sequence: Synthetic oligonucleotide
  Sense strand starting at position 3342 of SEQ ID NO: 318435
aucuuacggaguuguccua

SEQ ID NO: 562540 - RNA, 19 nt, Artificial Sequence
  Description of Artificial Sequence: Synthetic oligonucleotide
  Antisense strand to SEQ ID NO: 562539
uaggacaacuccguaagau

SEQ ID NO: 562541 - RNA, 19 nt, Artificial Sequence
  Description of Artificial Sequence: Synthetic oligonucleotide
  Sense strand starting at position 3389 of SEQ ID NO: 318435
gcaucuauggcacagauau

SEQ ID NO: 562542 - RNA, 19 nt, Artificial Sequence
  Description of Artificial Sequence: Synthetic oligonucleotide
  Antisense strand to SEQ ID NO: 562541
auaucugugccauagaugc

SEQ ID NO: 562543 - RNA, 19 nt, Artificial Sequence
  Description of Artificial Sequence: Synthetic oligonucleotide
  Sense strand starting at position 3397 of SEQ ID NO: 318435
ggcacagauauauguugga

SEQ ID NO: 562544 - RNA, 19 nt, Artificial Sequence
  Description of Artificial Sequence: Synthetic oligonucleotide
  Antisense strand to SEQ ID NO: 562543
uccaacauauaucugugcc

SEQ ID NO: 562545 - RNA, 19 nt, Artificial Sequence
  Description of Artificial Sequence: Synthetic oligonucleotide
  Sense strand starting at position 3401 of SEQ ID NO: 318435
cagauauauguuggacuca

SEQ ID NO: 562546 - RNA, 19 nt, Artificial Sequence
  Description of Artificial Sequence: Synthetic oligonucleotide
  Antisense strand to SEQ ID NO: 562545
ugaguccaacauauaucug

SEQ ID NO: 562547 - RNA, 19 nt, Artificial Sequence
  Description of Artificial Sequence: Synthetic oligonucleotide
  Sense strand starting at position 3879 of SEQ ID NO: 318435
gcccuuuguugaucucaag

SEQ ID NO: 562548 - RNA, 19 nt, Artificial Sequence
  Description of Artificial Sequence: Synthetic oligonucleotide
  Antisense strand to SEQ ID NO: 562547
cuugagaucaacaaagggc

SEQ ID NO: 562549 - RNA, 19 nt, Artificial Sequence
  Description of Artificial Sequence: Synthetic oligonucleotide
  Sense strand starting at position 3908 of SEQ ID NO: 318435
uuugccuucuaguuuaaga

SEQ ID NO: 562550 - RNA, 19 nt, Artificial Sequence
  Description of Artificial Sequence: Synthetic oligonucleotide
  Antisense strand to SEQ ID NO: 562549
ucuuaaacuagaaggcaaa

SEQ ID NO: 562551 - RNA, 19 nt, Artificial Sequence
  Description of Artificial Sequence: Synthetic oligonucleotide
  Sense strand starting at position 3910 of SEQ ID NO: 318435
ugccuucuaguuuaagagu

SEQ ID NO: 562552 - RNA, 19 nt, Artificial Sequence
  Description of Artificial Sequence: Synthetic oligonucleotide
  Antisense strand to SEQ ID NO: 562551
acucuuaaacuagaaggca

SEQ ID NO: 562553 - RNA, 19 nt, Artificial Sequence
  Description of Artificial Sequence: Synthetic oligonucleotide
  Sense strand starting at position 161 of SEQ ID NO: 318436
acuacauaguuggugaaca

SEQ ID NO: 562554 - RNA, 19 nt, Artificial Sequence
  Description of Artificial Sequence: Synthetic oligonucleotide
  Antisense strand to SEQ ID NO: 562553
uguucaccaacuauguagu

SEQ ID NO: 562555 - RNA, 19 nt, Artificial Sequence
  Description of Artificial Sequence: Synthetic oligonucleotide
  Sense strand starting at position 253 of SEQ ID NO: 318436
cuaagcaacucuguaagaa

SEQ ID NO: 562556 - RNA, 19 nt, Artificial Sequence
  Description of Artificial Sequence: Synthetic oligonucleotide
  Antisense strand to SEQ ID NO: 562555
uucuuacagaguugcuuag

SEQ ID NO: 562557 - RNA, 19 nt, Artificial Sequence
  Description of Artificial Sequence: Synthetic oligonucleotide
  Sense strand starting at position 280 of SEQ ID NO: 318436
ugauauacagugugguuaa

SEQ ID NO: 562558 - RNA, 19 nt, Artificial Sequence
  Description of Artificial Sequence: Synthetic oligonucleotide
  Antisense strand to SEQ ID NO: 562557
uuaaccacacuguauauca

SEQ ID NO: 562559 - RNA, 19 nt, Artificial Sequence
  Description of Artificial Sequence: Synthetic oligonucleotide
  Sense strand starting at position 283 of SEQ ID NO: 318436
uauacagugugguuaaauu

SEQ ID NO: 562560 - RNA, 19 nt, Artificial Sequence
  Description of Artificial Sequence: Synthetic oligonucleotide
  Antisense strand to SEQ ID NO: 562559
aauuuaaccacacuguaua

SEQ ID NO: 562561 - RNA, 19 nt, Artificial Sequence
  Description of Artificial Sequence: Synthetic oligonucleotide
  Sense strand starting at position 336 of SEQ ID NO: 318436
gcauacauaguuuacuuua

SEQ ID NO: 562562 - RNA, 19 nt, Artificial Sequence
  Description of Artificial Sequence: Synthetic oligonucleotide
  Antisense strand to SEQ ID NO: 562561
uaaaguaaacuauguaugc

SEQ ID NO: 562563 - RNA, 19 nt, Artificial Sequence
  Description of Artificial Sequence: Synthetic oligonucleotide
  Sense strand starting at position 1040 of SEQ ID NO: 318436
uaggaucacugcuugauua

SEQ ID NO: 562564 - RNA, 19 nt, Artificial Sequence
  Description of Artificial Sequence: Synthetic oligonucleotide
  Antisense strand to SEQ ID NO: 562563
uaaucaagcagugauccua

SEQ ID NO: 562565 - RNA, 19 nt, Artificial Sequence
  Description of Artificial Sequence: Synthetic oligonucleotide
  Sense strand starting at position 1041 of SEQ ID NO: 318436
aggaucacugcuugauuaa

SEQ ID NO: 562566 - RNA, 19 nt, Artificial Sequence
  Description of Artificial Sequence: Synthetic oligonucleotide
  Antisense strand to SEQ ID NO: 562565
uuaaucaagcagugauccu

SEQ ID NO: 562567 - RNA, 19 nt, Artificial Sequence
  Description of Artificial Sequence: Synthetic oligonucleotide
  Sense strand starting at position 1042 of SEQ ID NO: 318436
ggaucacugcuugauuaau

SEQ ID NO: 562568 - RNA, 19 nt, Artificial Sequence
  Description of Artificial Sequence: Synthetic oligonucleotide
  Antisense strand to SEQ ID NO: 562567
auuaaucaagcagugaucc

SEQ ID NO: 562569 - RNA, 19 nt, Artificial Sequence
  Description of Artificial Sequence: Synthetic oligonucleotide
  Sense strand starting at position 1104 of SEQ ID NO: 318436
cgagaauuaucacucaucu

SEQ ID NO: 562570 - RNA, 19 nt, Artificial Sequence
  Description of Artificial Sequence: Synthetic oligonucleotide
  Antisense strand to SEQ ID NO: 562569
agaugagugauaauucucg

SEQ ID NO: 562571 - RNA, 19 nt, Artificial Sequence
  Description of Artificial Sequence: Synthetic oligonucleotide
  Sense strand starting at position 1160 of SEQ ID NO: 318436
gugguacuucugcaccaga

SEQ ID NO: 562572 - RNA, 19 nt, Artificial Sequence
  Description of Artificial Sequence: Synthetic oligonucleotide
  Antisense strand to SEQ ID NO: 562571
ucuggugcagaaguaccac

SEQ ID NO: 562573 - RNA, 19 nt, Artificial Sequence
  Description of Artificial Sequence: Synthetic oligonucleotide
  Sense strand starting at position 1321 of SEQ ID NO: 318436
ggcauagcucagggauaug

SEQ ID NO: 562574 - RNA, 19 nt, Artificial Sequence
  Description of Artificial Sequence: Synthetic oligonucleotide
  Antisense strand to SEQ ID NO: 562573
cauaucccugagcuaugcc

SEQ ID NO: 562575 - RNA, 19 nt, Artificial Sequence
  Description of Artificial Sequence: Synthetic oligonucleotide
  Sense strand starting at position 1401 of SEQ ID NO: 318436
cuuugaggagccuaacauu

SEQ ID NO: 562576 - RNA, 19 nt, Artificial Sequence
  Description of Artificial Sequence: Synthetic oligonucleotide
  Antisense strand to SEQ ID NO: 562575
aauguuaggcuccucaaag

SEQ ID NO: 562577 - RNA, 19 nt, Artificial Sequence
  Description of Artificial Sequence: Synthetic oligonucleotide
  Sense strand starting at position 2308 of SEQ ID NO: 318436
cuuaucucagcuggagauu

SEQ ID NO: 562578 - RNA, 19 nt, Artificial Sequence
  Description of Artificial Sequence: Synthetic oligonucleotide
  Antisense strand to SEQ ID NO: 562577
aaucuccagcugagauaag

SEQ ID NO: 562579 - RNA, 19 nt, Artificial Sequence
  Description of Artificial Sequence: Synthetic oligonucleotide
  Sense strand starting at position 2348 of SEQ ID NO: 318436
ucggaaguagauggugauu

SEQ ID NO: 562580 - RNA, 19 nt, Artificial Sequence
  Description of Artificial Sequence: Synthetic oligonucleotide
  Antisense strand to SEQ ID NO: 562579
aaucaccaucuacuuccga

SEQ ID NO: 562581 - RNA, 19 nt, Artificial Sequence
  Description of Artificial Sequence: Synthetic oligonucleotide
  Sense strand starting at position 2542 of SEQ ID NO: 318436
cgauuaacgguacacacau

SEQ ID NO: 562582 - RNA, 19 nt, Artificial Sequence
  Description of Artificial Sequence: Synthetic oligonucleotide
  Antisense strand to SEQ ID NO: 562581
auguguguaccguuaaucg

SEQ ID NO: 562583 - RNA, 19 nt, Artificial Sequence
  Description of Artificial Sequence: Synthetic oligonucleotide
  Sense strand starting at position 2557 of SEQ ID NO: 318436
acauaaggaaagugguuua

SEQ ID NO: 562584 - RNA, 19 nt, Artificial Sequence
  Description of Artificial Sequence: Synthetic oligonucleotide
  Antisense strand to SEQ ID NO: 562583
uaaaccacuuuccuuaugu

SEQ ID NO: 562585 - RNA, 19 nt, Artificial Sequence
  Description of Artificial Sequence: Synthetic oligonucleotide
  Sense strand starting at position 2579 of SEQ ID NO: 318436
gcauaauugcacugagaag

SEQ ID NO: 562586 - RNA, 19 nt, Artificial Sequence
  Description of Artificial Sequence: Synthetic oligonucleotide
  Antisense strand to SEQ ID NO: 562585
cuucucagugcaauuaugc

SEQ ID NO: 562587 - RNA, 19 nt, Artificial Sequence
  Description of Artificial Sequence: Synthetic oligonucleotide
  Sense strand starting at position 2641 of SEQ ID NO: 318436
gugcgugaaagcgagauuu

SEQ ID NO: 562588 - RNA, 19 nt, Artificial Sequence
  Description of Artificial Sequence: Synthetic oligonucleotide
  Antisense strand to SEQ ID NO: 562587
aaaucucgcuuucacgcac

SEQ ID NO: 562589 - RNA, 19 nt, Artificial Sequence
  Description of Artificial Sequence: Synthetic oligonucleotide
  Sense strand starting at position 2643 of SEQ ID NO: 318436
gcgugaaagcgagauuucu

SEQ ID NO: 562590 - RNA, 19 nt, Artificial Sequence
  Description of Artificial Sequence: Synthetic oligonucleotide
  Antisense strand to SEQ ID NO: 562589
agaaaucucgcuuucacgc

SEQ ID NO: 562591 - RNA, 19 nt, Artificial Sequence
  Description of Artificial Sequence: Synthetic oligonucleotide
  Sense strand starting at position 2652 of SEQ ID NO: 318436
cgagauuucuggcuaagca

SEQ ID NO: 562592 - RNA, 19 nt, Artificial Sequence
  Description of Artificial Sequence: Synthetic oligonucleotide
  Antisense strand to SEQ ID NO: 562591
ugcuuagccagaaaucucg

SEQ ID NO: 562593 - RNA, 19 nt, Artificial Sequence
  Description of Artificial Sequence: Synthetic oligonucleotide
  Sense strand starting at position 2830 of SEQ ID NO: 318436
ggcgucuggcggagagaaa

SEQ ID NO: 562594 - RNA, 19 nt, Artificial Sequence
  Description of Artificial Sequence: Synthetic oligonucleotide
  Antisense strand to SEQ ID NO: 562593
uuucucuccgccagacgcc

SEQ ID NO: 562595 - RNA, 19 nt, Artificial Sequence
  Description of Artificial Sequence: Synthetic oligonucleotide
  Sense strand starting at position 3011 of SEQ ID NO: 318436
gcaccuuccgccgucauua

SEQ ID NO: 562596 - RNA, 19 nt, Artificial Sequence
  Description of Artificial Sequence: Synthetic oligonucleotide
  Antisense strand to SEQ ID NO: 562595
uaaugacggcggaaggugc

SEQ ID NO: 562597 - RNA, 19 nt, Artificial Sequence
  Description of Artificial Sequence: Synthetic oligonucleotide
  Sense strand starting at position 3222 of SEQ ID NO: 318436
auacuccucccagauuagu

SEQ ID NO: 562598 - RNA, 19 nt, Artificial Sequence
  Description of Artificial Sequence: Synthetic oligonucleotide
  Antisense strand to SEQ ID NO: 562597
acuaaucugggaggaguau

SEQ ID NO: 562599 - RNA, 19 nt, Artificial Sequence
  Description of Artificial Sequence: Synthetic oligonucleotide
  Sense strand starting at position 3302 of SEQ ID NO: 318436
aguugacugauagguauga

SEQ ID NO: 562600 - RNA, 19 nt, Artificial Sequence
  Description of Artificial Sequence: Synthetic oligonucleotide
  Antisense strand to SEQ ID NO: 562599
ucauaccuaucagucaacu

SEQ ID NO: 562601 - RNA, 19 nt, Artificial Sequence
  Description of Artificial Sequence: Synthetic oligonucleotide
  Sense strand starting at position 3306 of SEQ ID NO: 318436
gacugauagguaugacuau

SEQ ID NO: 562602 - RNA, 19 nt, Artificial Sequence
  Description of Artificial Sequence: Synthetic oligonucleotide
  Antisense strand to SEQ ID NO: 562601
auagucauaccuaucaguc

SEQ ID NO: 562603 - RNA, 19 nt, Artificial Sequence
  Description of Artificial Sequence: Synthetic oligonucleotide
  Sense strand starting at position 3325 of SEQ ID NO: 318436
ccauguccucuguaacuau

SEQ ID NO: 562604 - RNA, 19 nt, Artificial Sequence
  Description of Artificial Sequence: Synthetic oligonucleotide
  Antisense strand to SEQ ID NO: 562603
auaguuacagaggacaugg

SEQ ID NO: 562605 - RNA, 19 nt, Artificial Sequence
  Description of Artificial Sequence: Synthetic oligonucleotide
  Sense strand starting at position 3332 of SEQ ID NO: 318436
cucuguaacuaucuagaga

SEQ ID NO: 562606 - RNA, 19 nt, Artificial Sequence
  Description of Artificial Sequence: Synthetic oligonucleotide
  Antisense strand to SEQ ID NO: 562605
ucucuagauaguuacagag

SEQ ID NO: 562607 - RNA, 19 nt, Artificial Sequence
  Description of Artificial Sequence: Synthetic oligonucleotide
  Sense strand starting at position 3367 of SEQ ID NO: 318436
aaaguaaacguugaucauc

SEQ ID NO: 562608 - RNA, 19 nt, Artificial Sequence
  Description of Artificial Sequence: Synthetic oligonucleotide
  Antisense strand to SEQ ID NO: 562607
gaugaucaacguuuacuuu

SEQ ID NO: 562609 - RNA, 19 nt, Artificial Sequence
  Description of Artificial Sequence: Synthetic oligonucleotide
  Sense strand starting at position 3455 of SEQ ID NO: 318436
ugauauuggcauggaggua

SEQ ID NO: 562610 - RNA, 19 nt, Artificial Sequence
  Description of Artificial Sequence: Synthetic oligonucleotide
  Antisense strand to SEQ ID NO: 562609
uaccuccaugccaauauca

SEQ ID NO: 562611 - RNA, 19 nt, Artificial Sequence
  Description of Artificial Sequence: Synthetic oligonucleotide
  Sense strand starting at position 3456 of SEQ ID NO: 318436
gauauuggcauggagguau

SEQ ID NO: 562612 - RNA, 19 nt, Artificial Sequence
  Description of Artificial Sequence: Synthetic oligonucleotide
  Antisense strand to SEQ ID NO: 562611
auaccuccaugccaauauc

SEQ ID NO: 562613 - RNA, 19 nt, Artificial Sequence
  Description of Artificial Sequence: Synthetic oligonucleotide
  Sense strand starting at position 3526 of SEQ ID NO: 318436
gguucugaaacuuaaacgu

SEQ ID NO: 562614 - RNA, 19 nt, Artificial Sequence
  Description of Artificial Sequence: Synthetic oligonucleotide
  Antisense strand to SEQ ID NO: 562613
acguuuaaguuucagaacc

SEQ ID NO: 562615 - RNA, 19 nt, Artificial Sequence
  Description of Artificial Sequence: Synthetic oligonucleotide
  Sense strand starting at position 3554 of SEQ ID NO: 318436
ucuguugagacggagguua

SEQ ID NO: 562616 - RNA, 19 nt, Artificial Sequence
  Description of Artificial Sequence: Synthetic oligonucleotide
  Antisense strand to SEQ ID NO: 562615
uaaccuccgucucaacaga

SEQ ID NO: 562617 - RNA, 19 nt, Artificial Sequence
  Description of Artificial Sequence: Synthetic oligonucleotide
  Sense strand starting at position 3556 of SEQ ID NO: 318436
uguugagacggagguuaaa

SEQ ID NO: 562618 - RNA, 19 nt, Artificial Sequence
  Description of Artificial Sequence: Synthetic oligonucleotide
  Antisense strand to SEQ ID NO: 562617
uuuaaccuccgucucaaca

SEQ ID NO: 562619 - RNA, 19 nt, Artificial Sequence
  Description of Artificial Sequence: Synthetic oligonucleotide
  Sense strand starting at position 3684 of SEQ ID NO: 318436
uugccauaauuugagaaac

SEQ ID NO: 562620 - RNA, 19 nt, Artificial Sequence
  Description of Artificial Sequence: Synthetic oligonucleotide
  Antisense strand to SEQ ID NO: 562619
guuucucaaauuauggcaa

SEQ ID NO: 562621 - RNA, 19 nt, Artificial Sequence
  Description of Artificial Sequence: Synthetic oligonucleotide
  Sense strand starting at position 3686 of SEQ ID NO: 318436
gccauaauuugagaaacau

SEQ ID NO: 562622 - RNA, 19 nt, Artificial Sequence
  Description of Artificial Sequence: Synthetic oligonucleotide
  Antisense strand to SEQ ID NO: 562621
auguuucucaaauuauggc

SEQ ID NO: 562623 - RNA, 19 nt, Artificial Sequence
  Description of Artificial Sequence: Synthetic oligonucleotide
  Sense strand starting at position 3714 of SEQ ID NO: 318436
agaaucuauguguaacacu

SEQ ID NO: 562624 - RNA, 19 nt, Artificial Sequence
  Description of Artificial Sequence: Synthetic oligonucleotide
  Antisense strand to SEQ ID NO: 562623
aguguuacacauagauucu

SEQ ID NO: 562625 - RNA, 19 nt, Artificial Sequence
  Description of Artificial Sequence: Synthetic oligonucleotide
  Sense strand starting at position 3875 of SEQ ID NO: 318436
cuugcaauuagugagaaug

SEQ ID NO: 562626 - RNA, 19 nt, Artificial Sequence
  Description of Artificial Sequence: Synthetic oligonucleotide
  Antisense strand to SEQ ID NO: 562625
cauucucacuaauugcaag

SEQ ID NO: 562627 - RNA, 19 nt, Artificial Sequence
  Description of Artificial Sequence: Synthetic oligonucleotide
  Sense strand starting at position 3897 of SEQ ID NO: 318436
ugcgauaucaccuagguaa

SEQ ID NO: 562628 - RNA, 19 nt, Artificial Sequence
  Description of Artificial Sequence: Synthetic oligonucleotide
  Antisense strand to SEQ ID NO: 562627
uuaccuaggugauaucgca

SEQ ID NO: 562629 - RNA, 19 nt, Artificial Sequence
  Description of Artificial Sequence: Synthetic oligonucleotide
  Sense strand starting at position 3900 of SEQ ID NO: 318436
gauaucaccuagguaagua

SEQ ID NO: 562630 - RNA, 19 nt, Artificial Sequence
  Description of Artificial Sequence: Synthetic oligonucleotide
  Antisense strand to SEQ ID NO: 562629
uacuuaccuaggugauauc

SEQ ID NO: 562631 - RNA, 19 nt, Artificial Sequence
  Description of Artificial Sequence: Synthetic oligonucleotide
  Sense strand starting at position 3975 of SEQ ID NO: 318436
aguuauaguuacccuaaag

SEQ ID NO: 562632 - RNA, 19 nt, Artificial Sequence
  Description of Artificial Sequence: Synthetic oligonucleotide
  Antisense strand to SEQ ID NO: 562631
cuuuaggguaacuauaacu

SEQ ID NO: 562633 - RNA, 19 nt, Artificial Sequence
  Description of Artificial Sequence: Synthetic oligonucleotide
  Sense strand starting at position 3 of SEQ ID NO: 318437
gugcuaaucccaugagaau

SEQ ID NO: 562634 - RNA, 19 nt, Artificial Sequence
  Description of Artificial Sequence: Synthetic oligonucleotide
  Antisense strand to SEQ ID NO: 562633
auucucaugggauuagcac

SEQ ID NO: 562635 - RNA, 19 nt, Artificial Sequence
  Description of Artificial Sequence: Synthetic oligonucleotide
  Sense strand starting at position 17 of SEQ ID NO: 318437
agaauaauuucugauuagc

SEQ ID NO: 562636 - RNA, 19 nt, Artificial Sequence
  Description of Artificial Sequence: Synthetic oligonucleotide
  Antisense strand to SEQ ID NO: 562635
gcuaaucagaaauuauucu

SEQ ID NO: 562637 - RNA, 19 nt, Artificial Sequence
  Description of Artificial Sequence: Synthetic oligonucleotide
  Sense strand starting at position 50 of SEQ ID NO: 318437
agagacauccuuugaagca

SEQ ID NO: 562638 - RNA, 19 nt, Artificial Sequence
  Description of Artificial Sequence: Synthetic oligonucleotide
  Antisense strand to SEQ ID NO: 562637
ugcuucaaaggaugucucu

SEQ ID NO: 562639 - RNA, 19 nt, Artificial Sequence
  Description of Artificial Sequence: Synthetic oligonucleotide
  Sense strand starting at position 143 of SEQ ID NO: 318437
cugcuaaggucacuuggaa

SEQ ID NO: 562640 - RNA, 19 nt, Artificial Sequence
  Description of Artificial Sequence: Synthetic oligonucleotide
  Antisense strand to SEQ ID NO: 562639
uuccaagugaccuuagcag

SEQ ID NO: 562641 - RNA, 19 nt, Artificial Sequence
  Description of Artificial Sequence: Synthetic oligonucleotide
  Sense strand starting at position 175 of SEQ ID NO: 318437
cuugauaaugcaugagcaa

SEQ ID NO: 562642 - RNA, 19 nt, Artificial Sequence
  Description of Artificial Sequence: Synthetic oligonucleotide
  Antisense strand to SEQ ID NO: 562641
uugcucaugcauuaucaag

SEQ ID NO: 562643 - RNA, 19 nt, Artificial Sequence
  Description of Artificial Sequence: Synthetic oligonucleotide
  Sense strand starting at position 182 of SEQ ID NO: 318437
augcaugagcaacauuagu

SEQ ID NO: 562644 - RNA, 19 nt, Artificial Sequence
  Description of Artificial Sequence: Synthetic oligonucleotide
  Antisense strand to SEQ ID NO: 562643
acuaauguugcucaugcau

SEQ ID NO: 562645 - RNA, 19 nt, Artificial Sequence
  Description of Artificial Sequence: Synthetic oligonucleotide
  Sense strand starting at position 360 of SEQ ID NO: 318437
ggacaagaaccgugucuua

SEQ ID NO: 562646 - RNA, 19 nt, Artificial Sequence
  Description of Artificial Sequence: Synthetic oligonucleotide
  Antisense strand to SEQ ID NO: 562645
uaagacacgguucuugucc

SEQ ID NO: 562647 - RNA, 19 nt, Artificial Sequence
  Description of Artificial Sequence: Synthetic oligonucleotide
  Sense strand starting at position 363 of SEQ ID NO: 318437
caagaaccgugucuuauuu

SEQ ID NO: 562648 - RNA, 19 nt, Artificial Sequence
  Description of Artificial Sequence: Synthetic oligonucleotide
  Antisense strand to SEQ ID NO: 562647
aaauaagacacgguucuug

SEQ ID NO: 562649 - RNA, 19 nt, Artificial Sequence
  Description of Artificial Sequence: Synthetic oligonucleotide
  Sense strand starting at position 692 of SEQ ID NO: 318437
acaggacuauuguuaagau

SEQ ID NO: 562650 - RNA, 19 nt, Artificial Sequence
  Description of Artificial Sequence: Synthetic oligonucleotide
  Antisense strand to SEQ ID NO: 562649
aucuuaacaauaguccugu

SEQ ID NO: 562651 - RNA, 19 nt, Artificial Sequence
  Description of Artificial Sequence: Synthetic oligonucleotide
  Sense strand starting at position 1102 of SEQ ID NO: 318437
uguucucggaaaugaauag

SEQ ID NO: 562652 - RNA, 19 nt, Artificial Sequence
  Description of Artificial Sequence: Synthetic oligonucleotide
  Antisense strand to SEQ ID NO: 562651
cuauucauuuccgagaaca

SEQ ID NO: 562653 - RNA, 19 nt, Artificial Sequence
  Description of Artificial Sequence: Synthetic oligonucleotide
  Sense strand starting at position 1106 of SEQ ID NO: 318437
cucggaaaugaauagcuuu

SEQ ID NO: 562654 - RNA, 19 nt, Artificial Sequence
  Description of Artificial Sequence: Synthetic oligonucleotide
  Antisense strand to SEQ ID NO: 562653
aaagcuauucauuuccgag

SEQ ID NO: 562655 - RNA, 19 nt, Artificial Sequence
  Description of Artificial Sequence: Synthetic oligonucleotide
  Sense strand starting at position 1192 of SEQ ID NO: 318437
uggaucuguugggucagaa

SEQ ID NO: 562656 - RNA, 19 nt, Artificial Sequence
  Description of Artificial Sequence: Synthetic oligonucleotide
  Antisense strand to SEQ ID NO: 562655
uucugacccaacagaucca

SEQ ID NO: 562657 - RNA, 19 nt, Artificial Sequence
  Description of Artificial Sequence: Synthetic oligonucleotide
  Sense strand starting at position 1419 of SEQ ID NO: 318437
cuaucuuuguaauucugga

SEQ ID NO: 562658 - RNA, 19 nt, Artificial Sequence
  Description of Artificial Sequence: Synthetic oligonucleotide
  Antisense strand to SEQ ID NO: 562657
uccagaauuacaaagauag

SEQ ID NO: 562659 - RNA, 19 nt, Artificial Sequence
  Description of Artificial Sequence: Synthetic oligonucleotide
  Sense strand starting at position 1457 of SEQ ID NO: 318437
gguuuccucgucuccguaa

SEQ ID NO: 562660 - RNA, 19 nt, Artificial Sequence
  Description of Artificial Sequence: Synthetic oligonucleotide
  Antisense strand to SEQ ID NO: 562659
uuacggagacgaggaaacc

SEQ ID NO: 562661 - RNA, 19 nt, Artificial Sequence
  Description of Artificial Sequence: Synthetic oligonucleotide
  Sense strand starting at position 1776 of SEQ ID NO: 318437
ucagcaaagucccugaaga

SEQ ID NO: 562662 - RNA, 19 nt, Artificial Sequence
  Description of Artificial Sequence: Synthetic oligonucleotide
  Antisense strand to SEQ ID NO: 562661
ucuucagggacuuugcuga

SEQ ID NO: 562663 - RNA, 19 nt, Artificial Sequence
  Description of Artificial Sequence: Synthetic oligonucleotide
  Sense strand starting at position 2279 of SEQ ID NO: 318437
uggguuacuuacuugacua

SEQ ID NO: 562664 - RNA, 19 nt, Artificial Sequence
  Description of Artificial Sequence: Synthetic oligonucleotide
  Antisense strand to SEQ ID NO: 562663
uagucaaguaaguaaccca

SEQ ID NO: 562665 - RNA, 19 nt, Artificial Sequence
  Description of Artificial Sequence: Synthetic oligonucleotide
  Sense strand starting at position 2281 of SEQ ID NO: 318437
gguuacuuacuugacuaca

SEQ ID NO: 562666 - RNA, 19 nt, Artificial Sequence
  Description of Artificial Sequence: Synthetic oligonucleotide
  Antisense strand to SEQ ID NO: 562665
uguagucaaguaaguaacc

SEQ ID NO: 562667 - RNA, 19 nt, Artificial Sequence
  Description of Artificial Sequence: Synthetic oligonucleotide
  Sense strand starting at position 2549 of SEQ ID NO: 318437
cuugguuauuucucgcuau

SEQ ID NO: 562668 - RNA, 19 nt, Artificial Sequence
  Description of Artificial Sequence: Synthetic oligonucleotide
  Antisense strand to SEQ ID NO: 562667
auagcgagaaauaaccaag

SEQ ID NO: 562669 - RNA, 19 nt, Artificial Sequence
  Description of Artificial Sequence: Synthetic oligonucleotide
  Sense strand starting at position 2552 of SEQ ID NO: 318437
gguuauuucucgcuauuau

SEQ ID NO: 562670 - RNA, 19 nt, Artificial Sequence
  Description of Artificial Sequence: Synthetic oligonucleotide
  Antisense strand to SEQ ID NO: 562669
auaauagcgagaaauaacc

SEQ ID NO: 562671 - RNA, 19 nt, Artificial Sequence
  Description of Artificial Sequence: Synthetic oligonucleotide
  Sense strand starting at position 2553 of SEQ ID NO: 318437
guuauuucucgcuauuauu

SEQ ID NO: 562672 - RNA, 19 nt, Artificial Sequence
  Description of Artificial Sequence: Synthetic oligonucleotide
  Antisense strand to SEQ ID NO: 562671
aauaauagcgagaaauaac

SEQ ID NO: 562673 - RNA, 19 nt, Artificial Sequence
  Description of Artificial Sequence: Synthetic oligonucleotide
  Sense strand starting at position 2561 of SEQ ID NO: 318437
ucgcuauuauuucuccagu

SEQ ID NO: 562674 - RNA, 19 nt, Artificial Sequence
  Description of Artificial Sequence: Synthetic oligonucleotide
  Antisense strand to SEQ ID NO: 562673
acuggagaaauaauagcga

SEQ ID NO: 562675 - RNA, 19 nt, Artificial Sequence
  Description of Artificial Sequence: Synthetic oligonucleotide
  Sense strand starting at position 2563 of SEQ ID NO: 318437
gcuauuauuucuccaguga

SEQ ID NO: 562676 - RNA, 19 nt, Artificial Sequence
  Description of Artificial Sequence: Synthetic oligonucleotide
  Antisense strand to SEQ ID NO: 562675
ucacuggagaaauaauagc

SEQ ID NO: 562677 - RNA, 19 nt, Artificial Sequence
  Description of Artificial Sequence: Synthetic oligonucleotide
  Sense strand starting at position 2579 of SEQ ID NO: 318437
ugauuaguaugcccauaua

SEQ ID NO: 562678 - RNA, 19 nt, Artificial Sequence
  Description of Artificial Sequence: Synthetic oligonucleotide
  Antisense strand to SEQ ID NO: 562677
uauaugggcauacuaauca

SEQ ID NO: 562679 - RNA, 19 nt, Artificial Sequence
  Description of Artificial Sequence: Synthetic oligonucleotide
  Sense strand starting at position 2582 of SEQ ID NO: 318437
uuaguaugcccauauacug

SEQ ID NO: 562680 - RNA, 19 nt, Artificial Sequence
  Description of Artificial Sequence: Synthetic oligonucleotide
  Antisense strand to SEQ ID NO: 562679
caguauaugggcauacuaa

SEQ ID NO: 562681 - RNA, 19 nt, Artificial Sequence
  Description of Artificial Sequence: Synthetic oligonucleotide
  Sense strand starting at position 2624 of SEQ ID NO: 318437
gggauccugaaguacguua

SEQ ID NO: 562682 - RNA, 19 nt, Artificial Sequence
  Description of Artificial Sequence: Synthetic oligonucleotide
  Antisense strand to SEQ ID NO: 562681
uaacguacuucaggauccc

SEQ ID NO: 562683 - RNA, 19 nt, Artificial Sequence
  Description of Artificial Sequence: Synthetic oligonucleotide
  Sense strand starting at position 2695 of SEQ ID NO: 318437
ccaggucauuaacucaaga

SEQ ID NO: 562684 - RNA, 19 nt, Artificial Sequence
  Description of Artificial Sequence: Synthetic oligonucleotide
  Antisense strand to SEQ ID NO: 562683
ucuugaguuaaugaccugg

SEQ ID NO: 562685 - RNA, 19 nt, Artificial Sequence
  Description of Artificial Sequence: Synthetic oligonucleotide
  Sense strand starting at position 2804 of SEQ ID NO: 318437
uggguuugagauugcaaag

SEQ ID NO: 562686 - RNA, 19 nt, Artificial Sequence
  Description of Artificial Sequence: Synthetic oligonucleotide
  Antisense strand to SEQ ID NO: 562685
cuuugcaaucucaaaccca

SEQ ID NO: 562687 - RNA, 19 nt, Artificial Sequence
  Description of Artificial Sequence: Synthetic oligonucleotide
  Sense strand starting at position 2978 of SEQ ID NO: 318437
uacugugaacaaggauuau

SEQ ID NO: 562688 - RNA, 19 nt, Artificial Sequence
  Description of Artificial Sequence: Synthetic oligonucleotide
  Antisense strand to SEQ ID NO: 562687
auaauccuuguucacagua

SEQ ID NO: 562689 - RNA, 19 nt, Artificial Sequence
  Description of Artificial Sequence: Synthetic oligonucleotide
  Sense strand starting at position 3100 of SEQ ID NO: 318437
agaagugagcucuguggaa

SEQ ID NO: 562690 - RNA, 19 nt, Artificial Sequence
  Description of Artificial Sequence: Synthetic oligonucleotide
  Antisense strand to SEQ ID NO: 562689
uuccacagagcucacuucu

SEQ ID NO: 562691 - RNA, 19 nt, Artificial Sequence
  Description of Artificial Sequence: Synthetic oligonucleotide
  Sense strand starting at position 3104 of SEQ ID NO: 318437
gugagcucuguggaaugaa

SEQ ID NO: 562692 - RNA, 19 nt, Artificial Sequence
  Description of Artificial Sequence: Synthetic oligonucleotide
  Antisense strand to SEQ ID NO: 562691
uucauuccacagagcucac

SEQ ID NO: 562693 - RNA, 19 nt, Artificial Sequence
  Description of Artificial Sequence: Synthetic oligonucleotide
  Sense strand starting at position 3107 of SEQ ID NO: 318437
agcucuguggaaugaaaga

SEQ ID NO: 562694 - RNA, 19 nt, Artificial Sequence
  Description of Artificial Sequence: Synthetic oligonucleotide
  Antisense strand to SEQ ID NO: 562693
ucuuucauuccacagagcu

SEQ ID NO: 562695 - RNA, 19 nt, Artificial Sequence
  Description of Artificial Sequence: Synthetic oligonucleotide
  Sense strand starting at position 3145 of SEQ ID NO: 318437
cguuauuaacagcaacauu

SEQ ID NO: 562696 - RNA, 19 nt, Artificial Sequence
  Description of Artificial Sequence: Synthetic oligonucleotide
  Antisense strand to SEQ ID NO: 562695
aauguugcuguuaauaacg

SEQ ID NO: 562697 - RNA, 19 nt, Artificial Sequence
  Description of Artificial Sequence: Synthetic oligonucleotide
  Sense strand starting at position 3241 of SEQ ID NO: 318437
guacacuuccaguaaaugu

SEQ ID NO: 562698 - RNA, 19 nt, Artificial Sequence
  Description of Artificial Sequence: Synthetic oligonucleotide
  Antisense strand to SEQ ID NO: 562697
acauuuacuggaaguguac

SEQ ID NO: 562699 - RNA, 19 nt, Artificial Sequence
  Description of Artificial Sequence: Synthetic oligonucleotide
  Sense strand starting at position 3306 of SEQ ID NO: 318437
gccauacuucgauacauuc

SEQ ID NO: 562700 - RNA, 19 nt, Artificial Sequence
  Description of Artificial Sequence: Synthetic oligonucleotide
  Antisense strand to SEQ ID NO: 562699
gaauguaucgaaguauggc

SEQ ID NO: 562701 - RNA, 19 nt, Artificial Sequence
  Description of Artificial Sequence: Synthetic oligonucleotide
  Sense strand starting at position 3315 of SEQ ID NO: 318437
cgauacauucuauggaagu

SEQ ID NO: 562702 - RNA, 19 nt, Artificial Sequence
  Description of Artificial Sequence: Synthetic oligonucleotide
  Antisense strand to SEQ ID NO: 562701
acuuccauagaauguaucg

SEQ ID NO: 562703 - RNA, 19 nt, Artificial Sequence
  Description of Artificial Sequence: Synthetic oligonucleotide
  Sense strand starting at position 3387 of SEQ ID NO: 318437
ggauuuagcccguaagcug

SEQ ID NO: 562704 - RNA, 19 nt, Artificial Sequence
  Description of Artificial Sequence: Synthetic oligonucleotide
  Antisense strand to SEQ ID NO: 562703
cagcuuacgggcuaaaucc

SEQ ID NO: 562705 - RNA, 19 nt, Artificial Sequence
  Description of Artificial Sequence: Synthetic oligonucleotide
  Sense strand starting at position 3404 of SEQ ID NO: 318437
ugcauaucagaggaagugu

SEQ ID NO: 562706 - RNA, 19 nt, Artificial Sequence
  Description of Artificial Sequence: Synthetic oligonucleotide
  Antisense strand to SEQ ID NO: 562705
acacuuccucugauaugca

SEQ ID NO: 562707 - RNA, 19 nt, Artificial Sequence
  Description of Artificial Sequence: Synthetic oligonucleotide
  Sense strand starting at position 3558 of SEQ ID NO: 318437
gcaauaaugauguagacgu

SEQ ID NO: 562708 - RNA, 19 nt, Artificial Sequence
  Description of Artificial Sequence: Synthetic oligonucleotide
  Antisense strand to SEQ ID NO: 562707
acgucuacaucauuauugc

SEQ ID NO: 562709 - RNA, 19 nt, Artificial Sequence
  Description of Artificial Sequence: Synthetic oligonucleotide
  Sense strand starting at position 3599 of SEQ ID NO: 318437
ugucaaagcuaugucauuu

SEQ ID NO: 562710 - RNA, 19 nt, Artificial Sequence
  Description of Artificial Sequence: Synthetic oligonucleotide
  Antisense strand to SEQ ID NO: 562709
aaaugacauagcuuugaca

SEQ ID NO: 562711 - RNA, 19 nt, Artificial Sequence
  Description of Artificial Sequence: Synthetic oligonucleotide
  Sense strand starting at position 3645 of SEQ ID NO: 318437
uaaggaugugauggaagua

SEQ ID NO: 562712 - RNA, 19 nt, Artificial Sequence
  Description of Artificial Sequence: Synthetic oligonucleotide
  Antisense strand to SEQ ID NO: 562711
uacuuccaucacauccuua

SEQ ID NO: 562713 - RNA, 19 nt, Artificial Sequence
  Description of Artificial Sequence: Synthetic oligonucleotide
  Sense strand starting at position 105 of SEQ ID NO: 318438
ggaaauagcuacccugcau

SEQ ID NO: 562714 - RNA, 19 nt, Artificial Sequence
  Description of Artificial Sequence: Synthetic oligonucleotide
  Antisense strand to SEQ ID NO: 562713
augcaggguagcuauuucc

SEQ ID NO: 562715 - RNA, 19 nt, Artificial Sequence
  Description of Artificial Sequence: Synthetic oligonucleotide
  Sense strand starting at position 158 of SEQ ID NO: 318438
cccuaucuugcugagaacu

SEQ ID NO: 562716 - RNA, 19 nt, Artificial Sequence
  Description of Artificial Sequence: Synthetic oligonucleotide
  Antisense strand to SEQ ID NO: 562715
aguucucagcaagauaggg

SEQ ID NO: 562717 - RNA, 19 nt, Artificial Sequence
  Description of Artificial Sequence: Synthetic oligonucleotide
  Sense strand starting at position 395 of SEQ ID NO: 318438
gauacucggcucuauuacu

SEQ ID NO: 562718 - RNA, 19 nt, Artificial Sequence
  Description of Artificial Sequence: Synthetic oligonucleotide
  Antisense strand to SEQ ID NO: 562717
aguaauagagccgaguauc

SEQ ID NO: 562719 - RNA, 19 nt, Artificial Sequence
  Description of Artificial Sequence: Synthetic oligonucleotide
  Sense strand starting at position 412 of SEQ ID NO: 318438
cuuugauagcaguaauaag

SEQ ID NO: 562720 - RNA, 19 nt, Artificial Sequence
  Description of Artificial Sequence: Synthetic oligonucleotide
  Antisense strand to SEQ ID NO: 562719
cuuauuacugcuaucaaag

SEQ ID NO: 562721 - RNA, 19 nt, Artificial Sequence
  Description of Artificial Sequence: Synthetic oligonucleotide
  Sense strand starting at position 484 of SEQ ID NO: 318438
gccauuccaguguaucaua
